United States Patent Application Publication US 2025/0333448 A1 - sequence listing, part 9

SEQ ID NO: 182694 - protein, 17 aa, Artificial Sequence
  Description of Artificial Sequence: Synthetic peptide
  Seed: GMMMGMFNMLSTVLGVS
GMMMGMFNMMSVVLNVS

SEQ ID NO: 182695 - protein, 17 aa, Artificial Sequence
  Description of Artificial Sequence: Synthetic peptide
  Seed: GMMMGMFNMLSTVLGVS
GMMMGMFNMMSVVLSVS

SEQ ID NO: 182696 - protein, 17 aa, Artificial Sequence
  Description of Artificial Sequence: Synthetic peptide
  Seed: GMMMGMFNMLSTVLGVS
GMMMGMFNMNSAVLAVS

SEQ ID NO: 182697 - protein, 17 aa, Artificial Sequence
  Description of Artificial Sequence: Synthetic peptide
  Seed: GMMMGMFNMLSTVLGVS
GMMMGMFNMNSAVLFVS

SEQ ID NO: 182698 - protein, 17 aa, Artificial Sequence
  Description of Artificial Sequence: Synthetic peptide
  Seed: GMMMGMFNMLSTVLGVS
GMMMGMFNMNSAVLGVS

SEQ ID NO: 182699 - protein, 17 aa, Artificial Sequence
  Description of Artificial Sequence: Synthetic peptide
  Seed: GMMMGMFNMLSTVLGVS
GMMMGMFNMNSAVLHVS

SEQ ID NO: 182700 - protein, 17 aa, Artificial Sequence
  Description of Artificial Sequence: Synthetic peptide
  Seed: GMMMGMFNMLSTVLGVS
GMMMGMFNMNSAVLLVS

SEQ ID NO: 182701 - protein, 17 aa, Artificial Sequence
  Description of Artificial Sequence: Synthetic peptide
  Seed: GMMMGMFNMLSTVLGVS
GMMMGMFNMNSAVLMVS

SEQ ID NO: 182702 - protein, 17 aa, Artificial Sequence
  Description of Artificial Sequence: Synthetic peptide
  Seed: GMMMGMFNMLSTVLGVS
GMMMGMFNMNSAVLNVS

SEQ ID NO: 182703 - protein, 17 aa, Artificial Sequence
  Description of Artificial Sequence: Synthetic peptide
  Seed: GMMMGMFNMLSTVLGVS
GMMMGMFNMNSAVLRVS

SEQ ID NO: 182704 - protein, 17 aa, Artificial Sequence
  Description of Artificial Sequence: Synthetic peptide
  Seed: GMMMGMFNMLSTVLGVS
GMMMGMFNMNSAVLSVS

SEQ ID NO: 182705 - protein, 17 aa, Artificial Sequence
  Description of Artificial Sequence: Synthetic peptide
  Seed: GMMMGMFNMLSTVLGVS
GMMMGMFNMNSAVLTVS

SEQ ID NO: 182706 - protein, 17 aa, Artificial Sequence
  Description of Artificial Sequence: Synthetic peptide
  Seed: GMMMGMFNMLSTVLGVS
GMMMGMFNMNSAVLVVS

SEQ ID NO: 182707 - protein, 17 aa, Artificial Sequence
  Description of Artificial Sequence: Synthetic peptide
  Seed: GMMMGMFNMLSTVLGVS
GMMMGMFNMNSAVLYVS

SEQ ID NO: 182708 - protein, 17 aa, Artificial Sequence
  Description of Artificial Sequence: Synthetic peptide
  Seed: GMMMGMFNMLSTVLGVS
GMMMGMFNMNSGVLAVS

SEQ ID NO: 182709 - protein, 17 aa, Artificial Sequence
  Description of Artificial Sequence: Synthetic peptide
  Seed: GMMMGMFNMLSTVLGVS
GMMMGMFNMNSGVLFVS

SEQ ID NO: 182710 - protein, 17 aa, Artificial Sequence
  Description of Artificial Sequence: Synthetic peptide
  Seed: GMMMGMFNMLSTVLGVS
GMMMGMFNMNSGVLIVS

SEQ ID NO: 182711 - protein, 17 aa, Artificial Sequence
  Description of Artificial Sequence: Synthetic peptide
  Seed: GMMMGMFNMLSTVLGVS
GMMMGMFNMNSGVLLVS

SEQ ID NO: 182712 - protein, 17 aa, Artificial Sequence
  Description of Artificial Sequence: Synthetic peptide
  Seed: GMMMGMFNMLSTVLGVS
GMMMGMFNMNSGVLMVS

SEQ ID NO: 182713 - protein, 17 aa, Artificial Sequence
  Description of Artificial Sequence: Synthetic peptide
  Seed: GMMMGMFNMLSTVLGVS
GMMMGMFNMNSGVLSVS

SEQ ID NO: 182714 - protein, 17 aa, Artificial Sequence
  Description of Artificial Sequence: Synthetic peptide
  Seed: GMMMGMFNMLSTVLGVS
GMMMGMFNMNSGVLTVS

SEQ ID NO: 182715 - protein, 17 aa, Artificial Sequence
  Description of Artificial Sequence: Synthetic peptide
  Seed: GMMMGMFNMLSTVLGVS
GMMMGMFNMNSGVLVVS

SEQ ID NO: 182716 - protein, 17 aa, Artificial Sequence
  Description of Artificial Sequence: Synthetic peptide
  Seed: GMMMGMFNMLSTVLGVS
GMMMGMFNMNSGVLYVS

SEQ ID NO: 182717 - protein, 17 aa, Artificial Sequence
  Description of Artificial Sequence: Synthetic peptide
  Seed: GMMMGMFNMLSTVLGVS
GMMMGMFNMNSHVLIVS

SEQ ID NO: 182718 - protein, 17 aa, Artificial Sequence
  Description of Artificial Sequence: Synthetic peptide
  Seed: GMMMGMFNMLSTVLGVS
GMMMGMFNMNSHVLVVS

SEQ ID NO: 182719 - protein, 17 aa, Artificial Sequence
  Description of Artificial Sequence: Synthetic peptide
  Seed: GMMMGMFNMLSTVLGVS
GMMMGMFNMNSHVLYVS

SEQ ID NO: 182720 - protein, 17 aa, Artificial Sequence
  Description of Artificial Sequence: Synthetic peptide
  Seed: GMMMGMFNMLSTVLGVS
GMMMGMFNMNSIVLIVS

SEQ ID NO: 182721 - protein, 17 aa, Artificial Sequence
  Description of Artificial Sequence: Synthetic peptide
  Seed: GMMMGMFNMLSTVLGVS
GMMMGMFNMNSIVLVVS

SEQ ID NO: 182722 - protein, 17 aa, Artificial Sequence
  Description of Artificial Sequence: Synthetic peptide
  Seed: GMMMGMFNMLSTVLGVS
GMMMGMFNMNSIVLYVS

SEQ ID NO: 182723 - protein, 17 aa, Artificial Sequence
  Description of Artificial Sequence: Synthetic peptide
  Seed: GMMMGMFNMLSTVLGVS
GMMMGMFNMNSKVLIVS

SEQ ID NO: 182724 - protein, 17 aa, Artificial Sequence
  Description of Artificial Sequence: Synthetic peptide
  Seed: GMMMGMFNMLSTVLGVS
GMMMGMFNMNSKVLVVS

SEQ ID NO: 182725 - protein, 17 aa, Artificial Sequence
  Description of Artificial Sequence: Synthetic peptide
  Seed: GMMMGMFNMLSTVLGVS
GMMMGMFNMNSNVLAVS

SEQ ID NO: 182726 - protein, 17 aa, Artificial Sequence
  Description of Artificial Sequence: Synthetic peptide
  Seed: GMMMGMFNMLSTVLGVS
GMMMGMFNMNSNVLFVS

SEQ ID NO: 182727 - protein, 17 aa, Artificial Sequence
  Description of Artificial Sequence: Synthetic peptide
  Seed: GMMMGMFNMLSTVLGVS
GMMMGMFNMNSNVLLVS

SEQ ID NO: 182728 - protein, 17 aa, Artificial Sequence
  Description of Artificial Sequence: Synthetic peptide
  Seed: GMMMGMFNMLSTVLGVS
GMMMGMFNMNSNVLMVS

SEQ ID NO: 182729 - protein, 17 aa, Artificial Sequence
  Description of Artificial Sequence: Synthetic peptide
  Seed: GMMMGMFNMLSTVLGVS
GMMMGMFNMNSNVLSVS

SEQ ID NO: 182730 - protein, 17 aa, Artificial Sequence
  Description of Artificial Sequence: Synthetic peptide
  Seed: GMMMGMFNMLSTVLGVS
GMMMGMFNMNSNVLYVS

SEQ ID NO: 182731 - protein, 17 aa, Artificial Sequence
  Description of Artificial Sequence: Synthetic peptide
  Seed: GMMMGMFNMLSTVLGVS
GMMMGMFNMNSPVLAVS

SEQ ID NO: 182732 - protein, 17 aa, Artificial Sequence
  Description of Artificial Sequence: Synthetic peptide
  Seed: GMMMGMFNMLSTVLGVS
GMMMGMFNMNSPVLFVS

SEQ ID NO: 182733 - protein, 17 aa, Artificial Sequence
  Description of Artificial Sequence: Synthetic peptide
  Seed: GMMMGMFNMLSTVLGVS
GMMMGMFNMNSPVLIVS

SEQ ID NO: 182734 - protein, 17 aa, Artificial Sequence
  Description of Artificial Sequence: Synthetic peptide
  Seed: GMMMGMFNMLSTVLGVS
GMMMGMFNMNSPVLLVS

SEQ ID NO: 182735 - protein, 17 aa, Artificial Sequence
  Description of Artificial Sequence: Synthetic peptide
  Seed: GMMMGMFNMLSTVLGVS
GMMMGMFNMNSPVLMVS

SEQ ID NO: 182736 - protein, 17 aa, Artificial Sequence
  Description of Artificial Sequence: Synthetic peptide
  Seed: GMMMGMFNMLSTVLGVS
GMMMGMFNMNSPVLNVS

SEQ ID NO: 182737 - protein, 17 aa, Artificial Sequence
  Description of Artificial Sequence: Synthetic peptide
  Seed: GMMMGMFNMLSTVLGVS
GMMMGMFNMNSPVLSVS

SEQ ID NO: 182738 - protein, 17 aa, Artificial Sequence
  Description of Artificial Sequence: Synthetic peptide
  Seed: GMMMGMFNMLSTVLGVS
GMMMGMFNMNSPVLTVS

SEQ ID NO: 182739 - protein, 17 aa, Artificial Sequence
  Description of Artificial Sequence: Synthetic peptide
  Seed: GMMMGMFNMLSTVLGVS
GMMMGMFNMNSPVLVVS

SEQ ID NO: 182740 - protein, 17 aa, Artificial Sequence
  Description of Artificial Sequence: Synthetic peptide
  Seed: GMMMGMFNMLSTVLGVS
GMMMGMFNMNSPVLYVS

SEQ ID NO: 182741 - protein, 17 aa, Artificial Sequence
  Description of Artificial Sequence: Synthetic peptide
  Seed: GMMMGMFNMLSTVLGVS
GMMMGMFNMNSSVLAVS

SEQ ID NO: 182742 - protein, 17 aa, Artificial Sequence
  Description of Artificial Sequence: Synthetic peptide
  Seed: GMMMGMFNMLSTVLGVS
GMMMGMFNMNSSVLFVS

SEQ ID NO: 182743 - protein, 17 aa, Artificial Sequence
  Description of Artificial Sequence: Synthetic peptide
  Seed: GMMMGMFNMLSTVLGVS
GMMMGMFNMNSSVLLVS

SEQ ID NO: 182744 - protein, 17 aa, Artificial Sequence
  Description of Artificial Sequence: Synthetic peptide
  Seed: GMMMGMFNMLSTVLGVS
GMMMGMFNMNSSVLMVS

SEQ ID NO: 182745 - protein, 17 aa, Artificial Sequence
  Description of Artificial Sequence: Synthetic peptide
  Seed: GMMMGMFNMLSTVLGVS
GMMMGMFNMNSSVLSVS

SEQ ID NO: 182746 - protein, 17 aa, Artificial Sequence
  Description of Artificial Sequence: Synthetic peptide
  Seed: GMMMGMFNMLSTVLGVS
GMMMGMFNMNSSVLTVS

SEQ ID NO: 182747 - protein, 17 aa, Artificial Sequence
  Description of Artificial Sequence: Synthetic peptide
  Seed: GMMMGMFNMLSTVLGVS
GMMMGMFNMNSSVLVVS

SEQ ID NO: 182748 - protein, 17 aa, Artificial Sequence
  Description of Artificial Sequence: Synthetic peptide
  Seed: GMMMGMFNMLSTVLGVS
GMMMGMFNMNSSVLYVS

SEQ ID NO: 182749 - protein, 17 aa, Artificial Sequence
  Description of Artificial Sequence: Synthetic peptide
  Seed: GMMMGMFNMLSTVLGVS
GMMMGMFNMNSTVLFVS

SEQ ID NO: 182750 - protein, 17 aa, Artificial Sequence
  Description of Artificial Sequence: Synthetic peptide
  Seed: GMMMGMFNMLSTVLGVS
GMMMGMFNMNSTVLIVS

SEQ ID NO: 182751 - protein, 17 aa, Artificial Sequence
  Description of Artificial Sequence: Synthetic peptide
  Seed: GMMMGMFNMLSTVLGVS
GMMMGMFNMNSTVLLVS

SEQ ID NO: 182752 - protein, 17 aa, Artificial Sequence
  Description of Artificial Sequence: Synthetic peptide
  Seed: GMMMGMFNMLSTVLGVS
GMMMGMFNMNSTVLMVS

SEQ ID NO: 182753 - protein, 17 aa, Artificial Sequence
  Description of Artificial Sequence: Synthetic peptide
  Seed: GMMMGMFNMLSTVLGVS
GMMMGMFNMNSTVLVVS

SEQ ID NO: 182754 - protein, 17 aa, Artificial Sequence
  Description of Artificial Sequence: Synthetic peptide
  Seed: GMMMGMFNMLSTVLGVS
GMMMGMFNMNSTVLYVS

SEQ ID NO: 182755 - protein, 17 aa, Artificial Sequence
  Description of Artificial Sequence: Synthetic peptide
  Seed: GMMMGMFNMLSTVLGVS
GMMMGMFNMNSVVLIVS

SEQ ID NO: 182756 - protein, 17 aa, Artificial Sequence
  Description of Artificial Sequence: Synthetic peptide
  Seed: GMMMGMFNMLSTVLGVS
GMMMGMFNMNSVVLVVS

SEQ ID NO: 182757 - protein, 17 aa, Artificial Sequence
  Description of Artificial Sequence: Synthetic peptide
  Seed: GMMMGMFNMLSTVLGVS
GMMMGMFNMNSVVLYVS

SEQ ID NO: 182758 - protein, 17 aa, Artificial Sequence
  Description of Artificial Sequence: Synthetic peptide
  Seed: GMMMGMFNMLSTVLGVS
GMMMGMFNMPSAVLLVS

SEQ ID NO: 182759 - protein, 17 aa, Artificial Sequence
  Description of Artificial Sequence: Synthetic peptide
  Seed: GMMMGMFNMLSTVLGVS
GMMMGMFNMPSAVLVVS

SEQ ID NO: 182760 - protein, 17 aa, Artificial Sequence
  Description of Artificial Sequence: Synthetic peptide
  Seed: GMMMGMFNMLSTVLGVS
GMMMGMFNMPSGVLVVS

SEQ ID NO: 182761 - protein, 17 aa, Artificial Sequence
  Description of Artificial Sequence: Synthetic peptide
  Seed: GMMMGMFNMLSTVLGVS
GMMMGMFNMPSPVLLVS

SEQ ID NO: 182762 - protein, 17 aa, Artificial Sequence
  Description of Artificial Sequence: Synthetic peptide
  Seed: GMMMGMFNMLSTVLGVS
GMMMGMFNMPSSVLIVS

SEQ ID NO: 182763 - protein, 17 aa, Artificial Sequence
  Description of Artificial Sequence: Synthetic peptide
  Seed: GMMMGMFNMLSTVLGVS
GMMMGMFNMPSSVLLVS

SEQ ID NO: 182764 - protein, 17 aa, Artificial Sequence
  Description of Artificial Sequence: Synthetic peptide
  Seed: GMMMGMFNMLSTVLGVS
GMMMGMFNMPSSVLMVS

SEQ ID NO: 182765 - protein, 17 aa, Artificial Sequence
  Description of Artificial Sequence: Synthetic peptide
  Seed: GMMMGMFNMLSTVLGVS
GMMMGMFNMPSSVLVVS

SEQ ID NO: 182766 - protein, 17 aa, Artificial Sequence
  Description of Artificial Sequence: Synthetic peptide
  Seed: GMMMGMFNMLSTVLGVS
GMMMGMFNMQSAVLAVS

SEQ ID NO: 182767 - protein, 17 aa, Artificial Sequence
  Description of Artificial Sequence: Synthetic peptide
  Seed: GMMMGMFNMLSTVLGVS
GMMMGMFNMQSAVLCVS

SEQ ID NO: 182768 - protein, 17 aa, Artificial Sequence
  Description of Artificial Sequence: Synthetic peptide
  Seed: GMMMGMFNMLSTVLGVS
GMMMGMFNMQSAVLDVS

SEQ ID NO: 182769 - protein, 17 aa, Artificial Sequence
  Description of Artificial Sequence: Synthetic peptide
  Seed: GMMMGMFNMLSTVLGVS
GMMMGMFNMQSAVLEVS

SEQ ID NO: 182770 - protein, 17 aa, Artificial Sequence
  Description of Artificial Sequence: Synthetic peptide
  Seed: GMMMGMFNMLSTVLGVS
GMMMGMFNMQSAVLFVS

SEQ ID NO: 182771 - protein, 17 aa, Artificial Sequence
  Description of Artificial Sequence: Synthetic peptide
  Seed: GMMMGMFNMLSTVLGVS
GMMMGMFNMQSAVLGVS

SEQ ID NO: 182772 - protein, 17 aa, Artificial Sequence
  Description of Artificial Sequence: Synthetic peptide
  Seed: GMMMGMFNMLSTVLGVS
GMMMGMFNMQSAVLHVS

SEQ ID NO: 182773 - protein, 17 aa, Artificial Sequence
  Description of Artificial Sequence: Synthetic peptide
  Seed: GMMMGMFNMLSTVLGVS
GMMMGMFNMQSAVLIVS

SEQ ID NO: 182774 - protein, 17 aa, Artificial Sequence
  Description of Artificial Sequence: Synthetic peptide
  Seed: GMMMGMFNMLSTVLGVS
GMMMGMFNMQSAVLKVS

SEQ ID NO: 182775 - protein, 17 aa, Artificial Sequence
  Description of Artificial Sequence: Synthetic peptide
  Seed: GMMMGMFNMLSTVLGVS
GMMMGMFNMQSAVLLVS

SEQ ID NO: 182776 - protein, 17 aa, Artificial Sequence
  Description of Artificial Sequence: Synthetic peptide
  Seed: GMMMGMFNMLSTVLGVS
GMMMGMFNMQSAVLMVS

SEQ ID NO: 182777 - protein, 17 aa, Artificial Sequence
  Description of Artificial Sequence: Synthetic peptide
  Seed: GMMMGMFNMLSTVLGVS
GMMMGMFNMQSAVLNVS

SEQ ID NO: 182778 - protein, 17 aa, Artificial Sequence
  Description of Artificial Sequence: Synthetic peptide
  Seed: GMMMGMFNMLSTVLGVS
GMMMGMFNMQSAVLPVS

SEQ ID NO: 182779 - protein, 17 aa, Artificial Sequence
  Description of Artificial Sequence: Synthetic peptide
  Seed: GMMMGMFNMLSTVLGVS
GMMMGMFNMQSAVLQVS

SEQ ID NO: 182780 - protein, 17 aa, Artificial Sequence
  Description of Artificial Sequence: Synthetic peptide
  Seed: GMMMGMFNMLSTVLGVS
GMMMGMFNMQSAVLRVS

SEQ ID NO: 182781 - protein, 17 aa, Artificial Sequence
  Description of Artificial Sequence: Synthetic peptide
  Seed: GMMMGMFNMLSTVLGVS
GMMMGMFNMQSAVLSVS

SEQ ID NO: 182782 - protein, 17 aa, Artificial Sequence
  Description of Artificial Sequence: Synthetic peptide
  Seed: GMMMGMFNMLSTVLGVS
GMMMGMFNMQSAVLTVS

SEQ ID NO: 182783 - protein, 17 aa, Artificial Sequence
  Description of Artificial Sequence: Synthetic peptide
  Seed: GMMMGMFNMLSTVLGVS
GMMMGMFNMQSAVLVVS

SEQ ID NO: 182784 - protein, 17 aa, Artificial Sequence
  Description of Artificial Sequence: Synthetic peptide
  Seed: GMMMGMFNMLSTVLGVS
GMMMGMFNMQSAVLYVS

SEQ ID NO: 182785 - protein, 17 aa, Artificial Sequence
  Description of Artificial Sequence: Synthetic peptide
  Seed: GMMMGMFNMLSTVLGVS
GMMMGMFNMQSGVLAVS

SEQ ID NO: 182786 - protein, 17 aa, Artificial Sequence
  Description of Artificial Sequence: Synthetic peptide
  Seed: GMMMGMFNMLSTVLGVS
GMMMGMFNMQSGVLFVS

SEQ ID NO: 182787 - protein, 17 aa, Artificial Sequence
  Description of Artificial Sequence: Synthetic peptide
  Seed: GMMMGMFNMLSTVLGVS
GMMMGMFNMQSGVLGVS

SEQ ID NO: 182788 - protein, 17 aa, Artificial Sequence
  Description of Artificial Sequence: Synthetic peptide
  Seed: GMMMGMFNMLSTVLGVS
GMMMGMFNMQSGVLHVS

SEQ ID NO: 182789 - protein, 17 aa, Artificial Sequence
  Description of Artificial Sequence: Synthetic peptide
  Seed: GMMMGMFNMLSTVLGVS
GMMMGMFNMQSGVLIVS

SEQ ID NO: 182790 - protein, 17 aa, Artificial Sequence
  Description of Artificial Sequence: Synthetic peptide
  Seed: GMMMGMFNMLSTVLGVS
GMMMGMFNMQSGVLKVS

SEQ ID NO: 182791 - protein, 17 aa, Artificial Sequence
  Description of Artificial Sequence: Synthetic peptide
  Seed: GMMMGMFNMLSTVLGVS
GMMMGMFNMQSGVLLVS

SEQ ID NO: 182792 - protein, 17 aa, Artificial Sequence
  Description of Artificial Sequence: Synthetic peptide
  Seed: GMMMGMFNMLSTVLGVS
GMMMGMFNMQSGVLMVS

SEQ ID NO: 182793 - protein, 17 aa, Artificial Sequence
  Description of Artificial Sequence: Synthetic peptide
  Seed: GMMMGMFNMLSTVLGVS
GMMMGMFNMQSGVLNVS

SEQ ID NO: 182794 - protein, 17 aa, Artificial Sequence
  Description of Artificial Sequence: Synthetic peptide
  Seed: GMMMGMFNMLSTVLGVS
GMMMGMFNMQSGVLPVS

SEQ ID NO: 182795 - protein, 17 aa, Artificial Sequence
  Description of Artificial Sequence: Synthetic peptide
  Seed: GMMMGMFNMLSTVLGVS
GMMMGMFNMQSGVLQVS

SEQ ID NO: 182796 - protein, 17 aa, Artificial Sequence
  Description of Artificial Sequence: Synthetic peptide
  Seed: GMMMGMFNMLSTVLGVS
GMMMGMFNMQSGVLRVS

SEQ ID NO: 182797 - protein, 17 aa, Artificial Sequence
  Description of Artificial Sequence: Synthetic peptide
  Seed: GMMMGMFNMLSTVLGVS
GMMMGMFNMQSGVLSVS

SEQ ID NO: 182798 - protein, 17 aa, Artificial Sequence
  Description of Artificial Sequence: Synthetic peptide
  Seed: GMMMGMFNMLSTVLGVS
GMMMGMFNMQSGVLTVS

SEQ ID NO: 182799 - protein, 17 aa, Artificial Sequence
  Description of Artificial Sequence: Synthetic peptide
  Seed: GMMMGMFNMLSTVLGVS
GMMMGMFNMQSGVLVVS

SEQ ID NO: 182800 - protein, 17 aa, Artificial Sequence
  Description of Artificial Sequence: Synthetic peptide
  Seed: GMMMGMFNMLSTVLGVS
GMMMGMFNMQSGVLYVS

SEQ ID NO: 182801 - protein, 17 aa, Artificial Sequence
  Description of Artificial Sequence: Synthetic peptide
  Seed: GMMMGMFNMLSTVLGVS
GMMMGMFNMQSHVLLVS

SEQ ID NO: 182802 - protein, 17 aa, Artificial Sequence
  Description of Artificial Sequence: Synthetic peptide
  Seed: GMMMGMFNMLSTVLGVS
GMMMGMFNMQSIVLHVS

SEQ ID NO: 182803 - protein, 17 aa, Artificial Sequence
  Description of Artificial Sequence: Synthetic peptide
  Seed: GMMMGMFNMLSTVLGVS
GMMMGMFNMQSIVLNVS

SEQ ID NO: 182804 - protein, 17 aa, Artificial Sequence
  Description of Artificial Sequence: Synthetic peptide
  Seed: GMMMGMFNMLSTVLGVS
GMMMGMFNMQSIVLSVS

SEQ ID NO: 182805 - protein, 17 aa, Artificial Sequence
  Description of Artificial Sequence: Synthetic peptide
  Seed: GMMMGMFNMLSTVLGVS
GMMMGMFNMQSKVLSVS

SEQ ID NO: 182806 - protein, 17 aa, Artificial Sequence
  Description of Artificial Sequence: Synthetic peptide
  Seed: GMMMGMFNMLSTVLGVS
GMMMGMFNMQSNVLAVS

SEQ ID NO: 182807 - protein, 17 aa, Artificial Sequence
  Description of Artificial Sequence: Synthetic peptide
  Seed: GMMMGMFNMLSTVLGVS
GMMMGMFNMQSNVLDVS

SEQ ID NO: 182808 - protein, 17 aa, Artificial Sequence
  Description of Artificial Sequence: Synthetic peptide
  Seed: GMMMGMFNMLSTVLGVS
GMMMGMFNMQSNVLGVS

SEQ ID NO: 182809 - protein, 17 aa, Artificial Sequence
  Description of Artificial Sequence: Synthetic peptide
  Seed: GMMMGMFNMLSTVLGVS
GMMMGMFNMQSNVLHVS

SEQ ID NO: 182810 - protein, 17 aa, Artificial Sequence
  Description of Artificial Sequence: Synthetic peptide
  Seed: GMMMGMFNMLSTVLGVS
GMMMGMFNMQSNVLIVS

SEQ ID NO: 182811 - protein, 17 aa, Artificial Sequence
  Description of Artificial Sequence: Synthetic peptide
  Seed: GMMMGMFNMLSTVLGVS
GMMMGMFNMQSNVLLVS

SEQ ID NO: 182812 - protein, 17 aa, Artificial Sequence
  Description of Artificial Sequence: Synthetic peptide
  Seed: GMMMGMFNMLSTVLGVS
GMMMGMFNMQSNVLMVS

SEQ ID NO: 182813 - protein, 17 aa, Artificial Sequence
  Description of Artificial Sequence: Synthetic peptide
  Seed: GMMMGMFNMLSTVLGVS
GMMMGMFNMQSNVLNVS

SEQ ID NO: 182814 - protein, 17 aa, Artificial Sequence
  Description of Artificial Sequence: Synthetic peptide
  Seed: GMMMGMFNMLSTVLGVS
GMMMGMFNMQSNVLSVS

SEQ ID NO: 182815 - protein, 17 aa, Artificial Sequence
  Description of Artificial Sequence: Synthetic peptide
  Seed: GMMMGMFNMLSTVLGVS
GMMMGMFNMQSNVLTVS

SEQ ID NO: 182816 - protein, 17 aa, Artificial Sequence
  Description of Artificial Sequence: Synthetic peptide
  Seed: GMMMGMFNMLSTVLGVS
GMMMGMFNMQSNVLVVS

SEQ ID NO: 182817 - protein, 17 aa, Artificial Sequence
  Description of Artificial Sequence: Synthetic peptide
  Seed: GMMMGMFNMLSTVLGVS
GMMMGMFNMQSPVLAVS

SEQ ID NO: 182818 - protein, 17 aa, Artificial Sequence
  Description of Artificial Sequence: Synthetic peptide
  Seed: GMMMGMFNMLSTVLGVS
GMMMGMFNMQSPVLCVS

SEQ ID NO: 182819 - protein, 17 aa, Artificial Sequence
  Description of Artificial Sequence: Synthetic peptide
  Seed: GMMMGMFNMLSTVLGVS
GMMMGMFNMQSPVLDVS

SEQ ID NO: 182820 - protein, 17 aa, Artificial Sequence
  Description of Artificial Sequence: Synthetic peptide
  Seed: GMMMGMFNMLSTVLGVS
GMMMGMFNMQSPVLEVS

SEQ ID NO: 182821 - protein, 17 aa, Artificial Sequence
  Description of Artificial Sequence: Synthetic peptide
  Seed: GMMMGMFNMLSTVLGVS
GMMMGMFNMQSPVLFVS

SEQ ID NO: 182822 - protein, 17 aa, Artificial Sequence
  Description of Artificial Sequence: Synthetic peptide
  Seed: GMMMGMFNMLSTVLGVS
GMMMGMFNMQSPVLGVS

SEQ ID NO: 182823 - protein, 17 aa, Artificial Sequence
  Description of Artificial Sequence: Synthetic peptide
  Seed: GMMMGMFNMLSTVLGVS
GMMMGMFNMQSPVLHVS

SEQ ID NO: 182824 - protein, 17 aa, Artificial Sequence
  Description of Artificial Sequence: Synthetic peptide
  Seed: GMMMGMFNMLSTVLGVS
GMMMGMFNMQSPVLIVS

SEQ ID NO: 182825 - protein, 17 aa, Artificial Sequence
  Description of Artificial Sequence: Synthetic peptide
  Seed: GMMMGMFNMLSTVLGVS
GMMMGMFNMQSPVLKVS

SEQ ID NO: 182826 - protein, 17 aa, Artificial Sequence
  Description of Artificial Sequence: Synthetic peptide
  Seed: GMMMGMFNMLSTVLGVS
GMMMGMFNMQSPVLLVS

SEQ ID NO: 182827 - protein, 17 aa, Artificial Sequence
  Description of Artificial Sequence: Synthetic peptide
  Seed: GMMMGMFNMLSTVLGVS
GMMMGMFNMQSPVLMVS

SEQ ID NO: 182828 - protein, 17 aa, Artificial Sequence
  Description of Artificial Sequence: Synthetic peptide
  Seed: GMMMGMFNMLSTVLGVS
GMMMGMFNMQSPVLNVS

SEQ ID NO: 182829 - protein, 17 aa, Artificial Sequence
  Description of Artificial Sequence: Synthetic peptide
  Seed: GMMMGMFNMLSTVLGVS
GMMMGMFNMQSPVLPVS

SEQ ID NO: 182830 - protein, 17 aa, Artificial Sequence
  Description of Artificial Sequence: Synthetic peptide
  Seed: GMMMGMFNMLSTVLGVS
GMMMGMFNMQSPVLQVS

SEQ ID NO: 182831 - protein, 17 aa, Artificial Sequence
  Description of Artificial Sequence: Synthetic peptide
  Seed: GMMMGMFNMLSTVLGVS
GMMMGMFNMQSPVLRVS

SEQ ID NO: 182832 - protein, 17 aa, Artificial Sequence
  Description of Artificial Sequence: Synthetic peptide
  Seed: GMMMGMFNMLSTVLGVS
GMMMGMFNMQSPVLSVS

SEQ ID NO: 182833 - protein, 17 aa, Artificial Sequence
  Description of Artificial Sequence: Synthetic peptide
  Seed: GMMMGMFNMLSTVLGVS
GMMMGMFNMQSPVLTVS

SEQ ID NO: 182834 - protein, 17 aa, Artificial Sequence
  Description of Artificial Sequence: Synthetic peptide
  Seed: GMMMGMFNMLSTVLGVS
GMMMGMFNMQSPVLVVS

SEQ ID NO: 182835 - protein, 17 aa, Artificial Sequence
  Description of Artificial Sequence: Synthetic peptide
  Seed: GMMMGMFNMLSTVLGVS
GMMMGMFNMQSPVLYVS

SEQ ID NO: 182836 - protein, 17 aa, Artificial Sequence
  Description of Artificial Sequence: Synthetic peptide
  Seed: GMMMGMFNMLSTVLGVS
GMMMGMFNMQSRVLHVS

SEQ ID NO: 182837 - protein, 17 aa, Artificial Sequence
  Description of Artificial Sequence: Synthetic peptide
  Seed: GMMMGMFNMLSTVLGVS
GMMMGMFNMQSRVLSVS

SEQ ID NO: 182838 - protein, 17 aa, Artificial Sequence
  Description of Artificial Sequence: Synthetic peptide
  Seed: GMMMGMFNMLSTVLGVS
GMMMGMFNMQSSVLAVS

SEQ ID NO: 182839 - protein, 17 aa, Artificial Sequence
  Description of Artificial Sequence: Synthetic peptide
  Seed: GMMMGMFNMLSTVLGVS
GMMMGMFNMQSSVLDVS

SEQ ID NO: 182840 - protein, 17 aa, Artificial Sequence
  Description of Artificial Sequence: Synthetic peptide
  Seed: GMMMGMFNMLSTVLGVS
GMMMGMFNMQSSVLGVS

SEQ ID NO: 182841 - protein, 17 aa, Artificial Sequence
  Description of Artificial Sequence: Synthetic peptide
  Seed: GMMMGMFNMLSTVLGVS
GMMMGMFNMQSSVLHVS

SEQ ID NO: 182842 - protein, 17 aa, Artificial Sequence
  Description of Artificial Sequence: Synthetic peptide
  Seed: GMMMGMFNMLSTVLGVS
GMMMGMFNMQSSVLIVS

SEQ ID NO: 182843 - protein, 17 aa, Artificial Sequence
  Description of Artificial Sequence: Synthetic peptide
  Seed: GMMMGMFNMLSTVLGVS
GMMMGMFNMQSSVLKVS

SEQ ID NO: 182844 - protein, 17 aa, Artificial Sequence
  Description of Artificial Sequence: Synthetic peptide
  Seed: GMMMGMFNMLSTVLGVS
GMMMGMFNMQSSVLLVS

SEQ ID NO: 182845 - protein, 17 aa, Artificial Sequence
  Description of Artificial Sequence: Synthetic peptide
  Seed: GMMMGMFNMLSTVLGVS
GMMMGMFNMQSSVLMVS

SEQ ID NO: 182846 - protein, 17 aa, Artificial Sequence
  Description of Artificial Sequence: Synthetic peptide
  Seed: GMMMGMFNMLSTVLGVS
GMMMGMFNMQSSVLNVS

SEQ ID NO: 182847 - protein, 17 aa, Artificial Sequence
  Description of Artificial Sequence: Synthetic peptide
  Seed: GMMMGMFNMLSTVLGVS
GMMMGMFNMQSSVLQVS

SEQ ID NO: 182848 - protein, 17 aa, Artificial Sequence
  Description of Artificial Sequence: Synthetic peptide
  Seed: GMMMGMFNMLSTVLGVS
GMMMGMFNMQSSVLRVS

SEQ ID NO: 182849 - protein, 17 aa, Artificial Sequence
  Description of Artificial Sequence: Synthetic peptide
  Seed: GMMMGMFNMLSTVLGVS
GMMMGMFNMQSSVLSVS

SEQ ID NO: 182850 - protein, 17 aa, Artificial Sequence
  Description of Artificial Sequence: Synthetic peptide
  Seed: GMMMGMFNMLSTVLGVS
GMMMGMFNMQSSVLTVS

SEQ ID NO: 182851 - protein, 17 aa, Artificial Sequence
  Description of Artificial Sequence: Synthetic peptide
  Seed: GMMMGMFNMLSTVLGVS
GMMMGMFNMQSSVLVVS

SEQ ID NO: 182852 - protein, 17 aa, Artificial Sequence
  Description of Artificial Sequence: Synthetic peptide
  Seed: GMMMGMFNMLSTVLGVS
GMMMGMFNMQSSVLYVS

SEQ ID NO: 182853 - protein, 17 aa, Artificial Sequence
  Description of Artificial Sequence: Synthetic peptide
  Seed: GMMMGMFNMLSTVLGVS
GMMMGMFNMQSTVLAVS

SEQ ID NO: 182854 - protein, 17 aa, Artificial Sequence
  Description of Artificial Sequence: Synthetic peptide
  Seed: GMMMGMFNMLSTVLGVS
GMMMGMFNMQSTVLDVS

SEQ ID NO: 182855 - protein, 17 aa, Artificial Sequence
  Description of Artificial Sequence: Synthetic peptide
  Seed: GMMMGMFNMLSTVLGVS
GMMMGMFNMQSTVLGVS

SEQ ID NO: 182856 - protein, 17 aa, Artificial Sequence
  Description of Artificial Sequence: Synthetic peptide
  Seed: GMMMGMFNMLSTVLGVS
GMMMGMFNMQSTVLHVS

SEQ ID NO: 182857 - protein, 17 aa, Artificial Sequence
  Description of Artificial Sequence: Synthetic peptide
  Seed: GMMMGMFNMLSTVLGVS
GMMMGMFNMQSTVLIVS

SEQ ID NO: 182858 - protein, 17 aa, Artificial Sequence
  Description of Artificial Sequence: Synthetic peptide
  Seed: GMMMGMFNMLSTVLGVS
GMMMGMFNMQSTVLLVS

SEQ ID NO: 182859 - protein, 17 aa, Artificial Sequence
  Description of Artificial Sequence: Synthetic peptide
  Seed: GMMMGMFNMLSTVLGVS
GMMMGMFNMQSTVLMVS

SEQ ID NO: 182860 - protein, 17 aa, Artificial Sequence
  Description of Artificial Sequence: Synthetic peptide
  Seed: GMMMGMFNMLSTVLGVS
GMMMGMFNMQSTVLNVS

SEQ ID NO: 182861 - protein, 17 aa, Artificial Sequence
  Description of Artificial Sequence: Synthetic peptide
  Seed: GMMMGMFNMLSTVLGVS
GMMMGMFNMQSTVLQVS

SEQ ID NO: 182862 - protein, 17 aa, Artificial Sequence
  Description of Artificial Sequence: Synthetic peptide
  Seed: GMMMGMFNMLSTVLGVS
GMMMGMFNMQSTVLSVS

SEQ ID NO: 182863 - protein, 17 aa, Artificial Sequence
  Description of Artificial Sequence: Synthetic peptide
  Seed: GMMMGMFNMLSTVLGVS
GMMMGMFNMQSTVLTVS

SEQ ID NO: 182864 - protein, 17 aa, Artificial Sequence
  Description of Artificial Sequence: Synthetic peptide
  Seed: GMMMGMFNMLSTVLGVS
GMMMGMFNMQSTVLVVS

SEQ ID NO: 182865 - protein, 17 aa, Artificial Sequence
  Description of Artificial Sequence: Synthetic peptide
  Seed: GMMMGMFNMLSTVLGVS
GMMMGMFNMQSVVLAVS

SEQ ID NO: 182866 - protein, 17 aa, Artificial Sequence
  Description of Artificial Sequence: Synthetic peptide
  Seed: GMMMGMFNMLSTVLGVS
GMMMGMFNMQSVVLHVS

SEQ ID NO: 182867 - protein, 17 aa, Artificial Sequence
  Description of Artificial Sequence: Synthetic peptide
  Seed: GMMMGMFNMLSTVLGVS
GMMMGMFNMQSVVLNVS

SEQ ID NO: 182868 - protein, 17 aa, Artificial Sequence
  Description of Artificial Sequence: Synthetic peptide
  Seed: GMMMGMFNMLSTVLGVS
GMMMGMFNMQSVVLSVS

SEQ ID NO: 182869 - protein, 17 aa, Artificial Sequence
  Description of Artificial Sequence: Synthetic peptide
  Seed: GMMMGMFNMLSTVLGVS
GMMMGMFNMRSAVLAVS

SEQ ID NO: 182870 - protein, 17 aa, Artificial Sequence
  Description of Artificial Sequence: Synthetic peptide
  Seed: GMMMGMFNMLSTVLGVS
GMMMGMFNMRSAVLIVS

SEQ ID NO: 182871 - protein, 17 aa, Artificial Sequence
  Description of Artificial Sequence: Synthetic peptide
  Seed: GMMMGMFNMLSTVLGVS
GMMMGMFNMRSAVLLVS

SEQ ID NO: 182872 - protein, 17 aa, Artificial Sequence
  Description of Artificial Sequence: Synthetic peptide
  Seed: GMMMGMFNMLSTVLGVS
GMMMGMFNMRSAVLNVS

SEQ ID NO: 182873 - protein, 17 aa, Artificial Sequence
  Description of Artificial Sequence: Synthetic peptide
  Seed: GMMMGMFNMLSTVLGVS
GMMMGMFNMRSAVLSVS

SEQ ID NO: 182874 - protein, 17 aa, Artificial Sequence
  Description of Artificial Sequence: Synthetic peptide
  Seed: GMMMGMFNMLSTVLGVS
GMMMGMFNMRSAVLVVS

SEQ ID NO: 182875 - protein, 17 aa, Artificial Sequence
  Description of Artificial Sequence: Synthetic peptide
  Seed: GMMMGMFNMLSTVLGVS
GMMMGMFNMRSGVLAVS

SEQ ID NO: 182876 - protein, 17 aa, Artificial Sequence
  Description of Artificial Sequence: Synthetic peptide
  Seed: GMMMGMFNMLSTVLGVS
GMMMGMFNMRSGVLIVS

SEQ ID NO: 182877 - protein, 17 aa, Artificial Sequence
  Description of Artificial Sequence: Synthetic peptide
  Seed: GMMMGMFNMLSTVLGVS
GMMMGMFNMRSGVLLVS

SEQ ID NO: 182878 - protein, 17 aa, Artificial Sequence
  Description of Artificial Sequence: Synthetic peptide
  Seed: GMMMGMFNMLSTVLGVS
GMMMGMFNMRSGVLMVS

SEQ ID NO: 182879 - protein, 17 aa, Artificial Sequence
  Description of Artificial Sequence: Synthetic peptide
  Seed: GMMMGMFNMLSTVLGVS
GMMMGMFNMRSGVLVVS

SEQ ID NO: 182880 - protein, 17 aa, Artificial Sequence
  Description of Artificial Sequence: Synthetic peptide
  Seed: GMMMGMFNMLSTVLGVS
GMMMGMFNMRSSVLVVS

SEQ ID NO: 182881 - protein, 17 aa, Artificial Sequence
  Description of Artificial Sequence: Synthetic peptide
  Seed: GMMMGMFNMLSTVLGVS
GMMMGMFNMSSAVLAVS

SEQ ID NO: 182882 - protein, 17 aa, Artificial Sequence
  Description of Artificial Sequence: Synthetic peptide
  Seed: GMMMGMFNMLSTVLGVS
GMMMGMFNMSSAVLFVS

SEQ ID NO: 182883 - protein, 17 aa, Artificial Sequence
  Description of Artificial Sequence: Synthetic peptide
  Seed: GMMMGMFNMLSTVLGVS
GMMMGMFNMSSAVLGVS

SEQ ID NO: 182884 - protein, 17 aa, Artificial Sequence
  Description of Artificial Sequence: Synthetic peptide
  Seed: GMMMGMFNMLSTVLGVS
GMMMGMFNMSSAVLHVS

SEQ ID NO: 182885 - protein, 17 aa, Artificial Sequence
  Description of Artificial Sequence: Synthetic peptide
  Seed: GMMMGMFNMLSTVLGVS
GMMMGMFNMSSAVLIVS

SEQ ID NO: 182886 - protein, 17 aa, Artificial Sequence
  Description of Artificial Sequence: Synthetic peptide
  Seed: GMMMGMFNMLSTVLGVS
GMMMGMFNMSSAVLKVS

SEQ ID NO: 182887 - protein, 17 aa, Artificial Sequence
  Description of Artificial Sequence: Synthetic peptide
  Seed: GMMMGMFNMLSTVLGVS
GMMMGMFNMSSAVLLVS

SEQ ID NO: 182888 - protein, 17 aa, Artificial Sequence
  Description of Artificial Sequence: Synthetic peptide
  Seed: GMMMGMFNMLSTVLGVS
GMMMGMFNMSSAVLMVS

SEQ ID NO: 182889 - protein, 17 aa, Artificial Sequence
  Description of Artificial Sequence: Synthetic peptide
  Seed: GMMMGMFNMLSTVLGVS
GMMMGMFNMSSAVLNVS

SEQ ID NO: 182890 - protein, 17 aa, Artificial Sequence
  Description of Artificial Sequence: Synthetic peptide
  Seed: GMMMGMFNMLSTVLGVS
GMMMGMFNMSSAVLQVS

SEQ ID NO: 182891 - protein, 17 aa, Artificial Sequence
  Description of Artificial Sequence: Synthetic peptide
  Seed: GMMMGMFNMLSTVLGVS
GMMMGMFNMSSAVLRVS

SEQ ID NO: 182892 - protein, 17 aa, Artificial Sequence
  Description of Artificial Sequence: Synthetic peptide
  Seed: GMMMGMFNMLSTVLGVS
GMMMGMFNMSSAVLSVS

SEQ ID NO: 182893 - protein, 17 aa, Artificial Sequence
  Description of Artificial Sequence: Synthetic peptide
  Seed: GMMMGMFNMLSTVLGVS
GMMMGMFNMSSAVLTVS

SEQ ID NO: 182894 - protein, 17 aa, Artificial Sequence
  Description of Artificial Sequence: Synthetic peptide
  Seed: GMMMGMFNMLSTVLGVS
GMMMGMFNMSSAVLVVS

SEQ ID NO: 182895 - protein, 17 aa, Artificial Sequence
  Description of Artificial Sequence: Synthetic peptide
  Seed: GMMMGMFNMLSTVLGVS
GMMMGMFNMSSAVLYVS

SEQ ID NO: 182896 - protein, 17 aa, Artificial Sequence
  Description of Artificial Sequence: Synthetic peptide
  Seed: GMMMGMFNMLSTVLGVS
GMMMGMFNMSSFVLEVS

SEQ ID NO: 182897 - protein, 17 aa, Artificial Sequence
  Description of Artificial Sequence: Synthetic peptide
  Seed: GMMMGMFNMLSTVLGVS
GMMMGMFNMSSGVLAVS

SEQ ID NO: 182898 - protein, 17 aa, Artificial Sequence
  Description of Artificial Sequence: Synthetic peptide
  Seed: GMMMGMFNMLSTVLGVS
GMMMGMFNMSSGVLFVS

SEQ ID NO: 182899 - protein, 17 aa, Artificial Sequence
  Description of Artificial Sequence: Synthetic peptide
  Seed: GMMMGMFNMLSTVLGVS
GMMMGMFNMSSGVLGVS

SEQ ID NO: 182900 - protein, 17 aa, Artificial Sequence
  Description of Artificial Sequence: Synthetic peptide
  Seed: GMMMGMFNMLSTVLGVS
GMMMGMFNMSSGVLHVS

SEQ ID NO: 182901 - protein, 17 aa, Artificial Sequence
  Description of Artificial Sequence: Synthetic peptide
  Seed: GMMMGMFNMLSTVLGVS
GMMMGMFNMSSGVLIVS

SEQ ID NO: 182902 - protein, 17 aa, Artificial Sequence
  Description of Artificial Sequence: Synthetic peptide
  Seed: GMMMGMFNMLSTVLGVS
GMMMGMFNMSSGVLKVS

SEQ ID NO: 182903 - protein, 17 aa, Artificial Sequence
  Description of Artificial Sequence: Synthetic peptide
  Seed: GMMMGMFNMLSTVLGVS
GMMMGMFNMSSGVLLVS

SEQ ID NO: 182904 - protein, 17 aa, Artificial Sequence
  Description of Artificial Sequence: Synthetic peptide
  Seed: GMMMGMFNMLSTVLGVS
GMMMGMFNMSSGVLMVS

SEQ ID NO: 182905 - protein, 17 aa, Artificial Sequence
  Description of Artificial Sequence: Synthetic peptide
  Seed: GMMMGMFNMLSTVLGVS
GMMMGMFNMSSGVLNVS

SEQ ID NO: 182906 - protein, 17 aa, Artificial Sequence
  Description of Artificial Sequence: Synthetic peptide
  Seed: GMMMGMFNMLSTVLGVS
GMMMGMFNMSSGVLRVS

SEQ ID NO: 182907 - protein, 17 aa, Artificial Sequence
  Description of Artificial Sequence: Synthetic peptide
  Seed: GMMMGMFNMLSTVLGVS
GMMMGMFNMSSGVLSVS

SEQ ID NO: 182908 - protein, 17 aa, Artificial Sequence
  Description of Artificial Sequence: Synthetic peptide
  Seed: GMMMGMFNMLSTVLGVS
GMMMGMFNMSSGVLTVS

SEQ ID NO: 182909 - protein, 17 aa, Artificial Sequence
  Description of Artificial Sequence: Synthetic peptide
  Seed: GMMMGMFNMLSTVLGVS
GMMMGMFNMSSGVLVVS

SEQ ID NO: 182910 - protein, 17 aa, Artificial Sequence
  Description of Artificial Sequence: Synthetic peptide
  Seed: GMMMGMFNMLSTVLGVS
GMMMGMFNMSSGVLYVS

SEQ ID NO: 182911 - protein, 17 aa, Artificial Sequence
  Description of Artificial Sequence: Synthetic peptide
  Seed: GMMMGMFNMLSTVLGVS
GMMMGMFNMSSIVLNVS

SEQ ID NO: 182912 - protein, 17 aa, Artificial Sequence
  Description of Artificial Sequence: Synthetic peptide
  Seed: GMMMGMFNMLSTVLGVS
GMMMGMFNMSSKVLSVS

SEQ ID NO: 182913 - protein, 17 aa, Artificial Sequence
  Description of Artificial Sequence: Synthetic peptide
  Seed: GMMMGMFNMLSTVLGVS
GMMMGMFNMSSNVLAVS

SEQ ID NO: 182914 - protein, 17 aa, Artificial Sequence
  Description of Artificial Sequence: Synthetic peptide
  Seed: GMMMGMFNMLSTVLGVS
GMMMGMFNMSSNVLDVS

SEQ ID NO: 182915 - protein, 17 aa, Artificial Sequence
  Description of Artificial Sequence: Synthetic peptide
  Seed: GMMMGMFNMLSTVLGVS
GMMMGMFNMSSNVLIVS

SEQ ID NO: 182916 - protein, 17 aa, Artificial Sequence
  Description of Artificial Sequence: Synthetic peptide
  Seed: GMMMGMFNMLSTVLGVS
GMMMGMFNMSSNVLLVS

SEQ ID NO: 182917 - protein, 17 aa, Artificial Sequence
  Description of Artificial Sequence: Synthetic peptide
  Seed: GMMMGMFNMLSTVLGVS
GMMMGMFNMSSNVLNVS

SEQ ID NO: 182918 - protein, 17 aa, Artificial Sequence
  Description of Artificial Sequence: Synthetic peptide
  Seed: GMMMGMFNMLSTVLGVS
GMMMGMFNMSSNVLSVS

SEQ ID NO: 182919 - protein, 17 aa, Artificial Sequence
  Description of Artificial Sequence: Synthetic peptide
  Seed: GMMMGMFNMLSTVLGVS
GMMMGMFNMSSNVLVVS

SEQ ID NO: 182920 - protein, 17 aa, Artificial Sequence
  Description of Artificial Sequence: Synthetic peptide
  Seed: GMMMGMFNMLSTVLGVS
GMMMGMFNMSSPVLAVS

SEQ ID NO: 182921 - protein, 17 aa, Artificial Sequence
  Description of Artificial Sequence: Synthetic peptide
  Seed: GMMMGMFNMLSTVLGVS
GMMMGMFNMSSPVLFVS

SEQ ID NO: 182922 - protein, 17 aa, Artificial Sequence
  Description of Artificial Sequence: Synthetic peptide
  Seed: GMMMGMFNMLSTVLGVS
GMMMGMFNMSSPVLGVS

SEQ ID NO: 182923 - protein, 17 aa, Artificial Sequence
  Description of Artificial Sequence: Synthetic peptide
  Seed: GMMMGMFNMLSTVLGVS
GMMMGMFNMSSPVLHVS

SEQ ID NO: 182924 - protein, 17 aa, Artificial Sequence
  Description of Artificial Sequence: Synthetic peptide
  Seed: GMMMGMFNMLSTVLGVS
GMMMGMFNMSSPVLIVS

SEQ ID NO: 182925 - protein, 17 aa, Artificial Sequence
  Description of Artificial Sequence: Synthetic peptide
  Seed: GMMMGMFNMLSTVLGVS
GMMMGMFNMSSPVLLVS

SEQ ID NO: 182926 - protein, 17 aa, Artificial Sequence
  Description of Artificial Sequence: Synthetic peptide
  Seed: GMMMGMFNMLSTVLGVS
GMMMGMFNMSSPVLMVS

SEQ ID NO: 182927 - protein, 17 aa, Artificial Sequence
  Description of Artificial Sequence: Synthetic peptide
  Seed: GMMMGMFNMLSTVLGVS
GMMMGMFNMSSPVLNVS

SEQ ID NO: 182928 - protein, 17 aa, Artificial Sequence
  Description of Artificial Sequence: Synthetic peptide
  Seed: GMMMGMFNMLSTVLGVS
GMMMGMFNMSSPVLQVS

SEQ ID NO: 182929 - protein, 17 aa, Artificial Sequence
  Description of Artificial Sequence: Synthetic peptide
  Seed: GMMMGMFNMLSTVLGVS
GMMMGMFNMSSPVLSVS

SEQ ID NO: 182930 - protein, 17 aa, Artificial Sequence
  Description of Artificial Sequence: Synthetic peptide
  Seed: GMMMGMFNMLSTVLGVS
GMMMGMFNMSSPVLTVS

SEQ ID NO: 182931 - protein, 17 aa, Artificial Sequence
  Description of Artificial Sequence: Synthetic peptide
  Seed: GMMMGMFNMLSTVLGVS
GMMMGMFNMSSPVLVVS

SEQ ID NO: 182932 - protein, 17 aa, Artificial Sequence
  Description of Artificial Sequence: Synthetic peptide
  Seed: GMMMGMFNMLSTVLGVS
GMMMGMFNMSSPVLYVS

SEQ ID NO: 182933 - protein, 17 aa, Artificial Sequence
  Description of Artificial Sequence: Synthetic peptide
  Seed: GMMMGMFNMLSTVLGVS
GMMMGMFNMSSRVLSVS

SEQ ID NO: 182934 - protein, 17 aa, Artificial Sequence
  Description of Artificial Sequence: Synthetic peptide
  Seed: GMMMGMFNMLSTVLGVS
GMMMGMFNMSSSVLAVS

SEQ ID NO: 182935 - protein, 17 aa, Artificial Sequence
  Description of Artificial Sequence: Synthetic peptide
  Seed: GMMMGMFNMLSTVLGVS
GMMMGMFNMSSSVLFVS

SEQ ID NO: 182936 - protein, 17 aa, Artificial Sequence
  Description of Artificial Sequence: Synthetic peptide
  Seed: GMMMGMFNMLSTVLGVS
GMMMGMFNMSSSVLGVS

SEQ ID NO: 182937 - protein, 17 aa, Artificial Sequence
  Description of Artificial Sequence: Synthetic peptide
  Seed: GMMMGMFNMLSTVLGVS
GMMMGMFNMSSSVLHVS

SEQ ID NO: 182938 - protein, 17 aa, Artificial Sequence
  Description of Artificial Sequence: Synthetic peptide
  Seed: GMMMGMFNMLSTVLGVS
GMMMGMFNMSSSVLIVS

SEQ ID NO: 182939 - protein, 17 aa, Artificial Sequence
  Description of Artificial Sequence: Synthetic peptide
  Seed: GMMMGMFNMLSTVLGVS
GMMMGMFNMSSSVLLVS

SEQ ID NO: 182940 - protein, 17 aa, Artificial Sequence
  Description of Artificial Sequence: Synthetic peptide
  Seed: GMMMGMFNMLSTVLGVS
GMMMGMFNMSSSVLMVS

SEQ ID NO: 182941 - protein, 17 aa, Artificial Sequence
  Description of Artificial Sequence: Synthetic peptide
  Seed: GMMMGMFNMLSTVLGVS
GMMMGMFNMSSSVLNVS

SEQ ID NO: 182942 - protein, 17 aa, Artificial Sequence
  Description of Artificial Sequence: Synthetic peptide
  Seed: GMMMGMFNMLSTVLGVS
GMMMGMFNMSSSVLSVS

SEQ ID NO: 182943 - protein, 17 aa, Artificial Sequence
  Description of Artificial Sequence: Synthetic peptide
  Seed: GMMMGMFNMLSTVLGVS
GMMMGMFNMSSSVLTVS

SEQ ID NO: 182944 - protein, 17 aa, Artificial Sequence
  Description of Artificial Sequence: Synthetic peptide
  Seed: GMMMGMFNMLSTVLGVS
GMMMGMFNMSSSVLVVS

SEQ ID NO: 182945 - protein, 17 aa, Artificial Sequence
  Description of Artificial Sequence: Synthetic peptide
  Seed: GMMMGMFNMLSTVLGVS
GMMMGMFNMSSSVLYVS

SEQ ID NO: 182946 - protein, 17 aa, Artificial Sequence
  Description of Artificial Sequence: Synthetic peptide
  Seed: GMMMGMFNMLSTVLGVS
GMMMGMFNMSSTVLAVS

SEQ ID NO: 182947 - protein, 17 aa, Artificial Sequence
  Description of Artificial Sequence: Synthetic peptide
  Seed: GMMMGMFNMLSTVLGVS
GMMMGMFNMSSTVLHVS

SEQ ID NO: 182948 - protein, 17 aa, Artificial Sequence
  Description of Artificial Sequence: Synthetic peptide
  Seed: GMMMGMFNMLSTVLGVS
GMMMGMFNMSSTVLIVS

SEQ ID NO: 182949 - protein, 17 aa, Artificial Sequence
  Description of Artificial Sequence: Synthetic peptide
  Seed: GMMMGMFNMLSTVLGVS
GMMMGMFNMSSTVLLVS

SEQ ID NO: 182950 - protein, 17 aa, Artificial Sequence
  Description of Artificial Sequence: Synthetic peptide
  Seed: GMMMGMFNMLSTVLGVS
GMMMGMFNMSSTVLNVS

SEQ ID NO: 182951 - protein, 17 aa, Artificial Sequence
  Description of Artificial Sequence: Synthetic peptide
  Seed: GMMMGMFNMLSTVLGVS
GMMMGMFNMSSTVLSVS

SEQ ID NO: 182952 - protein, 17 aa, Artificial Sequence
  Description of Artificial Sequence: Synthetic peptide
  Seed: GMMMGMFNMLSTVLGVS
GMMMGMFNMSSTVLTVS

SEQ ID NO: 182953 - protein, 17 aa, Artificial Sequence
  Description of Artificial Sequence: Synthetic peptide
  Seed: GMMMGMFNMLSTVLGVS
GMMMGMFNMSSTVLVVS

SEQ ID NO: 182954 - protein, 17 aa, Artificial Sequence
  Description of Artificial Sequence: Synthetic peptide
  Seed: GMMMGMFNMLSTVLGVS
GMMMGMFNMSSVVLNVS

SEQ ID NO: 182955 - protein, 17 aa, Artificial Sequence
  Description of Artificial Sequence: Synthetic peptide
  Seed: GMMMGMFNMLSTVLGVS
GMMMGMFNMTSAVLAVS

SEQ ID NO: 182956 - protein, 17 aa, Artificial Sequence
  Description of Artificial Sequence: Synthetic peptide
  Seed: GMMMGMFNMLSTVLGVS
GMMMGMFNMTSAVLGVS

SEQ ID NO: 182957 - protein, 17 aa, Artificial Sequence
  Description of Artificial Sequence: Synthetic peptide
  Seed: GMMMGMFNMLSTVLGVS
GMMMGMFNMTSAVLHVS

SEQ ID NO: 182958 - protein, 17 aa, Artificial Sequence
  Description of Artificial Sequence: Synthetic peptide
  Seed: GMMMGMFNMLSTVLGVS
GMMMGMFNMTSAVLIVS

SEQ ID NO: 182959 - protein, 17 aa, Artificial Sequence
  Description of Artificial Sequence: Synthetic peptide
  Seed: GMMMGMFNMLSTVLGVS
GMMMGMFNMTSAVLLVS

SEQ ID NO: 182960 - protein, 17 aa, Artificial Sequence
  Description of Artificial Sequence: Synthetic peptide
  Seed: GMMMGMFNMLSTVLGVS
GMMMGMFNMTSAVLMVS

SEQ ID NO: 182961 - protein, 17 aa, Artificial Sequence
  Description of Artificial Sequence: Synthetic peptide
  Seed: GMMMGMFNMLSTVLGVS
GMMMGMFNMTSAVLNVS

SEQ ID NO: 182962 - protein, 17 aa, Artificial Sequence
  Description of Artificial Sequence: Synthetic peptide
  Seed: GMMMGMFNMLSTVLGVS
GMMMGMFNMTSAVLQVS

SEQ ID NO: 182963 - protein, 17 aa, Artificial Sequence
  Description of Artificial Sequence: Synthetic peptide
  Seed: GMMMGMFNMLSTVLGVS
GMMMGMFNMTSAVLRVS

SEQ ID NO: 182964 - protein, 17 aa, Artificial Sequence
  Description of Artificial Sequence: Synthetic peptide
  Seed: GMMMGMFNMLSTVLGVS
GMMMGMFNMTSAVLSVS

SEQ ID NO: 182965 - protein, 17 aa, Artificial Sequence
  Description of Artificial Sequence: Synthetic peptide
  Seed: GMMMGMFNMLSTVLGVS
GMMMGMFNMTSAVLTVS

SEQ ID NO: 182966 - protein, 17 aa, Artificial Sequence
  Description of Artificial Sequence: Synthetic peptide
  Seed: GMMMGMFNMLSTVLGVS
GMMMGMFNMTSAVLVVS

SEQ ID NO: 182967 - protein, 17 aa, Artificial Sequence
  Description of Artificial Sequence: Synthetic peptide
  Seed: GMMMGMFNMLSTVLGVS
GMMMGMFNMTSAVLYVS

SEQ ID NO: 182968 - protein, 17 aa, Artificial Sequence
  Description of Artificial Sequence: Synthetic peptide
  Seed: GMMMGMFNMLSTVLGVS
GMMMGMFNMTSFVLDVS

SEQ ID NO: 182969 - protein, 17 aa, Artificial Sequence
  Description of Artificial Sequence: Synthetic peptide
  Seed: GMMMGMFNMLSTVLGVS
GMMMGMFNMTSFVLEVS

SEQ ID NO: 182970 - protein, 17 aa, Artificial Sequence
  Description of Artificial Sequence: Synthetic peptide
  Seed: GMMMGMFNMLSTVLGVS
GMMMGMFNMTSGVLAVS

SEQ ID NO: 182971 - protein, 17 aa, Artificial Sequence
  Description of Artificial Sequence: Synthetic peptide
  Seed: GMMMGMFNMLSTVLGVS
GMMMGMFNMTSGVLGVS

SEQ ID NO: 182972 - protein, 17 aa, Artificial Sequence
  Description of Artificial Sequence: Synthetic peptide
  Seed: GMMMGMFNMLSTVLGVS
GMMMGMFNMTSGVLIVS

SEQ ID NO: 182973 - protein, 17 aa, Artificial Sequence
  Description of Artificial Sequence: Synthetic peptide
  Seed: GMMMGMFNMLSTVLGVS
GMMMGMFNMTSGVLKVS

SEQ ID NO: 182974 - protein, 17 aa, Artificial Sequence
  Description of Artificial Sequence: Synthetic peptide
  Seed: GMMMGMFNMLSTVLGVS
GMMMGMFNMTSGVLLVS

SEQ ID NO: 182975 - protein, 17 aa, Artificial Sequence
  Description of Artificial Sequence: Synthetic peptide
  Seed: GMMMGMFNMLSTVLGVS
GMMMGMFNMTSGVLMVS

SEQ ID NO: 182976 - protein, 17 aa, Artificial Sequence
  Description of Artificial Sequence: Synthetic peptide
  Seed: GMMMGMFNMLSTVLGVS
GMMMGMFNMTSGVLNVS

SEQ ID NO: 182977 - protein, 17 aa, Artificial Sequence
  Description of Artificial Sequence: Synthetic peptide
  Seed: GMMMGMFNMLSTVLGVS
GMMMGMFNMTSGVLRVS

SEQ ID NO: 182978 - protein, 17 aa, Artificial Sequence
  Description of Artificial Sequence: Synthetic peptide
  Seed: GMMMGMFNMLSTVLGVS
GMMMGMFNMTSGVLSVS

SEQ ID NO: 182979 - protein, 17 aa, Artificial Sequence
  Description of Artificial Sequence: Synthetic peptide
  Seed: GMMMGMFNMLSTVLGVS
GMMMGMFNMTSGVLTVS

SEQ ID NO: 182980 - protein, 17 aa, Artificial Sequence
  Description of Artificial Sequence: Synthetic peptide
  Seed: GMMMGMFNMLSTVLGVS
GMMMGMFNMTSGVLVVS

SEQ ID NO: 182981 - protein, 17 aa, Artificial Sequence
  Description of Artificial Sequence: Synthetic peptide
  Seed: GMMMGMFNMLSTVLGVS
GMMMGMFNMTSKVLSVS

SEQ ID NO: 182982 - protein, 17 aa, Artificial Sequence
  Description of Artificial Sequence: Synthetic peptide
  Seed: GMMMGMFNMLSTVLGVS
GMMMGMFNMTSNVLAVS

SEQ ID NO: 182983 - protein, 17 aa, Artificial Sequence
  Description of Artificial Sequence: Synthetic peptide
  Seed: GMMMGMFNMLSTVLGVS
GMMMGMFNMTSNVLIVS

SEQ ID NO: 182984 - protein, 17 aa, Artificial Sequence
  Description of Artificial Sequence: Synthetic peptide
  Seed: GMMMGMFNMLSTVLGVS
GMMMGMFNMTSNVLLVS

SEQ ID NO: 182985 - protein, 17 aa, Artificial Sequence
  Description of Artificial Sequence: Synthetic peptide
  Seed: GMMMGMFNMLSTVLGVS
GMMMGMFNMTSNVLNVS

SEQ ID NO: 182986 - protein, 17 aa, Artificial Sequence
  Description of Artificial Sequence: Synthetic peptide
  Seed: GMMMGMFNMLSTVLGVS
GMMMGMFNMTSNVLVVS

SEQ ID NO: 182987 - protein, 17 aa, Artificial Sequence
  Description of Artificial Sequence: Synthetic peptide
  Seed: GMMMGMFNMLSTVLGVS
GMMMGMFNMTSPVLAVS

SEQ ID NO: 182988 - protein, 17 aa, Artificial Sequence
  Description of Artificial Sequence: Synthetic peptide
  Seed: GMMMGMFNMLSTVLGVS
GMMMGMFNMTSPVLFVS

SEQ ID NO: 182989 - protein, 17 aa, Artificial Sequence
  Description of Artificial Sequence: Synthetic peptide
  Seed: GMMMGMFNMLSTVLGVS
GMMMGMFNMTSPVLGVS

SEQ ID NO: 182990 - protein, 17 aa, Artificial Sequence
  Description of Artificial Sequence: Synthetic peptide
  Seed: GMMMGMFNMLSTVLGVS
GMMMGMFNMTSPVLHVS

SEQ ID NO: 182991 - protein, 17 aa, Artificial Sequence
  Description of Artificial Sequence: Synthetic peptide
  Seed: GMMMGMFNMLSTVLGVS
GMMMGMFNMTSPVLIVS

SEQ ID NO: 182992 - protein, 17 aa, Artificial Sequence
  Description of Artificial Sequence: Synthetic peptide
  Seed: GMMMGMFNMLSTVLGVS
GMMMGMFNMTSPVLLVS

SEQ ID NO: 182993 - protein, 17 aa, Artificial Sequence
  Description of Artificial Sequence: Synthetic peptide
  Seed: GMMMGMFNMLSTVLGVS
GMMMGMFNMTSPVLMVS

SEQ ID NO: 182994 - protein, 17 aa, Artificial Sequence
  Description of Artificial Sequence: Synthetic peptide
  Seed: GMMMGMFNMLSTVLGVS
GMMMGMFNMTSPVLNVS

SEQ ID NO: 182995 - protein, 17 aa, Artificial Sequence
  Description of Artificial Sequence: Synthetic peptide
  Seed: GMMMGMFNMLSTVLGVS
GMMMGMFNMTSPVLQVS

SEQ ID NO: 182996 - protein, 17 aa, Artificial Sequence
  Description of Artificial Sequence: Synthetic peptide
  Seed: GMMMGMFNMLSTVLGVS
GMMMGMFNMTSPVLSVS

SEQ ID NO: 182997 - protein, 17 aa, Artificial Sequence
  Description of Artificial Sequence: Synthetic peptide
  Seed: GMMMGMFNMLSTVLGVS
GMMMGMFNMTSPVLTVS

SEQ ID NO: 182998 - protein, 17 aa, Artificial Sequence
  Description of Artificial Sequence: Synthetic peptide
  Seed: GMMMGMFNMLSTVLGVS
GMMMGMFNMTSPVLVVS

SEQ ID NO: 182999 - protein, 17 aa, Artificial Sequence
  Description of Artificial Sequence: Synthetic peptide
  Seed: GMMMGMFNMLSTVLGVS
GMMMGMFNMTSPVLYVS

SEQ ID NO: 183000 - protein, 17 aa, Artificial Sequence
  Description of Artificial Sequence: Synthetic peptide
  Seed: GMMMGMFNMLSTVLGVS
GMMMGMFNMTSSVLAVS

SEQ ID NO: 183001 - protein, 17 aa, Artificial Sequence
  Description of Artificial Sequence: Synthetic peptide
  Seed: GMMMGMFNMLSTVLGVS
GMMMGMFNMTSSVLFVS

SEQ ID NO: 183002 - protein, 17 aa, Artificial Sequence
  Description of Artificial Sequence: Synthetic peptide
  Seed: GMMMGMFNMLSTVLGVS
GMMMGMFNMTSSVLHVS

SEQ ID NO: 183003 - protein, 17 aa, Artificial Sequence
  Description of Artificial Sequence: Synthetic peptide
  Seed: GMMMGMFNMLSTVLGVS
GMMMGMFNMTSSVLIVS

SEQ ID NO: 183004 - protein, 17 aa, Artificial Sequence
  Description of Artificial Sequence: Synthetic peptide
  Seed: GMMMGMFNMLSTVLGVS
GMMMGMFNMTSSVLLVS

SEQ ID NO: 183005 - protein, 17 aa, Artificial Sequence
  Description of Artificial Sequence: Synthetic peptide
  Seed: GMMMGMFNMLSTVLGVS
GMMMGMFNMTSSVLMVS

SEQ ID NO: 183006 - protein, 17 aa, Artificial Sequence
  Description of Artificial Sequence: Synthetic peptide
  Seed: GMMMGMFNMLSTVLGVS
GMMMGMFNMTSSVLNVS

SEQ ID NO: 183007 - protein, 17 aa, Artificial Sequence
  Description of Artificial Sequence: Synthetic peptide
  Seed: GMMMGMFNMLSTVLGVS
GMMMGMFNMTSSVLSVS

SEQ ID NO: 183008 - protein, 17 aa, Artificial Sequence
  Description of Artificial Sequence: Synthetic peptide
  Seed: GMMMGMFNMLSTVLGVS
GMMMGMFNMTSSVLTVS

SEQ ID NO: 183009 - protein, 17 aa, Artificial Sequence
  Description of Artificial Sequence: Synthetic peptide
  Seed: GMMMGMFNMLSTVLGVS
GMMMGMFNMTSSVLVVS

SEQ ID NO: 183010 - protein, 17 aa, Artificial Sequence
  Description of Artificial Sequence: Synthetic peptide
  Seed: GMMMGMFNMLSTVLGVS
GMMMGMFNMTSSVLYVS

SEQ ID NO: 183011 - protein, 17 aa, Artificial Sequence
  Description of Artificial Sequence: Synthetic peptide
  Seed: GMMMGMFNMLSTVLGVS
GMMMGMFNMTSTVLIVS

SEQ ID NO: 183012 - protein, 17 aa, Artificial Sequence
  Description of Artificial Sequence: Synthetic peptide
  Seed: GMMMGMFNMLSTVLGVS
GMMMGMFNMTSTVLNVS

SEQ ID NO: 183013 - protein, 17 aa, Artificial Sequence
  Description of Artificial Sequence: Synthetic peptide
  Seed: GMMMGMFNMLSTVLGVS
GMMMGMFNMTSTVLSVS

SEQ ID NO: 183014 - protein, 17 aa, Artificial Sequence
  Description of Artificial Sequence: Synthetic peptide
  Seed: GMMMGMFNMLSTVLGVS
GMMMGMFNMTSTVLVVS

SEQ ID NO: 183015 - protein, 17 aa, Artificial Sequence
  Description of Artificial Sequence: Synthetic peptide
  Seed: GMMMGMFNMLSTVLGVS
GMMMGMFNMVSAVLAVS

SEQ ID NO: 183016 - protein, 17 aa, Artificial Sequence
  Description of Artificial Sequence: Synthetic peptide
  Seed: GMMMGMFNMLSTVLGVS
GMMMGMFNMVSAVLGVS

SEQ ID NO: 183017 - protein, 17 aa, Artificial Sequence
  Description of Artificial Sequence: Synthetic peptide
  Seed: GMMMGMFNMLSTVLGVS
GMMMGMFNMVSAVLHVS

SEQ ID NO: 183018 - protein, 17 aa, Artificial Sequence
  Description of Artificial Sequence: Synthetic peptide
  Seed: GMMMGMFNMLSTVLGVS
GMMMGMFNMVSAVLKVS

SEQ ID NO: 183019 - protein, 17 aa, Artificial Sequence
  Description of Artificial Sequence: Synthetic peptide
  Seed: GMMMGMFNMLSTVLGVS
GMMMGMFNMVSAVLNVS

SEQ ID NO: 183020 - protein, 17 aa, Artificial Sequence
  Description of Artificial Sequence: Synthetic peptide
  Seed: GMMMGMFNMLSTVLGVS
GMMMGMFNMVSAVLRVS

SEQ ID NO: 183021 - protein, 17 aa, Artificial Sequence
  Description of Artificial Sequence: Synthetic peptide
  Seed: GMMMGMFNMLSTVLGVS
GMMMGMFNMVSAVLSVS

SEQ ID NO: 183022 - protein, 17 aa, Artificial Sequence
  Description of Artificial Sequence: Synthetic peptide
  Seed: GMMMGMFNMLSTVLGVS
GMMMGMFNMVSAVLTVS

SEQ ID NO: 183023 - protein, 17 aa, Artificial Sequence
  Description of Artificial Sequence: Synthetic peptide
  Seed: GMMMGMFNMLSTVLGVS
GMMMGMFNMVSAVLVVS

SEQ ID NO: 183024 - protein, 17 aa, Artificial Sequence
  Description of Artificial Sequence: Synthetic peptide
  Seed: GMMMGMFNMLSTVLGVS
GMMMGMFNMVSGVLAVS

SEQ ID NO: 183025 - protein, 17 aa, Artificial Sequence
  Description of Artificial Sequence: Synthetic peptide
  Seed: GMMMGMFNMLSTVLGVS
GMMMGMFNMVSGVLGVS

SEQ ID NO: 183026 - protein, 17 aa, Artificial Sequence
  Description of Artificial Sequence: Synthetic peptide
  Seed: GMMMGMFNMLSTVLGVS
GMMMGMFNMVSGVLHVS

SEQ ID NO: 183027 - protein, 17 aa, Artificial Sequence
  Description of Artificial Sequence: Synthetic peptide
  Seed: GMMMGMFNMLSTVLGVS
GMMMGMFNMVSGVLKVS

SEQ ID NO: 183028 - protein, 17 aa, Artificial Sequence
  Description of Artificial Sequence: Synthetic peptide
  Seed: GMMMGMFNMLSTVLGVS
GMMMGMFNMVSGVLNVS

SEQ ID NO: 183029 - protein, 17 aa, Artificial Sequence
  Description of Artificial Sequence: Synthetic peptide
  Seed: GMMMGMFNMLSTVLGVS
GMMMGMFNMVSGVLRVS

SEQ ID NO: 183030 - protein, 17 aa, Artificial Sequence
  Description of Artificial Sequence: Synthetic peptide
  Seed: GMMMGMFNMLSTVLGVS
GMMMGMFNMVSGVLSVS

SEQ ID NO: 183031 - protein, 17 aa, Artificial Sequence
  Description of Artificial Sequence: Synthetic peptide
  Seed: GMMMGMFNMLSTVLGVS
GMMMGMFNMVSGVLTVS

SEQ ID NO: 183032 - protein, 17 aa, Artificial Sequence
  Description of Artificial Sequence: Synthetic peptide
  Seed: GMMMGMFNMLSTVLGVS
GMMMGMFNMVSGVLVVS

SEQ ID NO: 183033 - protein, 17 aa, Artificial Sequence
  Description of Artificial Sequence: Synthetic peptide
  Seed: GMMMGMFNMLSTVLGVS
GMMMGMFNMVSKVLHVS

SEQ ID NO: 183034 - protein, 17 aa, Artificial Sequence
  Description of Artificial Sequence: Synthetic peptide
  Seed: GMMMGMFNMLSTVLGVS
GMMMGMFNMVSKVLKVS

SEQ ID NO: 183035 - protein, 17 aa, Artificial Sequence
  Description of Artificial Sequence: Synthetic peptide
  Seed: GMMMGMFNMLSTVLGVS
GMMMGMFNMVSKVLSVS

SEQ ID NO: 183036 - protein, 17 aa, Artificial Sequence
  Description of Artificial Sequence: Synthetic peptide
  Seed: GMMMGMFNMLSTVLGVS
GMMMGMFNMVSNVLAVS

SEQ ID NO: 183037 - protein, 17 aa, Artificial Sequence
  Description of Artificial Sequence: Synthetic peptide
  Seed: GMMMGMFNMLSTVLGVS
GMMMGMFNMVSNVLDVS

SEQ ID NO: 183038 - protein, 17 aa, Artificial Sequence
  Description of Artificial Sequence: Synthetic peptide
  Seed: GMMMGMFNMLSTVLGVS
GMMMGMFNMVSNVLHVS

SEQ ID NO: 183039 - protein, 17 aa, Artificial Sequence
  Description of Artificial Sequence: Synthetic peptide
  Seed: GMMMGMFNMLSTVLGVS
GMMMGMFNMVSNVLNVS

SEQ ID NO: 183040 - protein, 17 aa, Artificial Sequence
  Description of Artificial Sequence: Synthetic peptide
  Seed: GMMMGMFNMLSTVLGVS
GMMMGMFNMVSNVLSVS

SEQ ID NO: 183041 - protein, 17 aa, Artificial Sequence
  Description of Artificial Sequence: Synthetic peptide
  Seed: GMMMGMFNMLSTVLGVS
GMMMGMFNMVSPVLAVS

SEQ ID NO: 183042 - protein, 17 aa, Artificial Sequence
  Description of Artificial Sequence: Synthetic peptide
  Seed: GMMMGMFNMLSTVLGVS
GMMMGMFNMVSPVLDVS

SEQ ID NO: 183043 - protein, 17 aa, Artificial Sequence
  Description of Artificial Sequence: Synthetic peptide
  Seed: GMMMGMFNMLSTVLGVS
GMMMGMFNMVSPVLEVS

SEQ ID NO: 183044 - protein, 17 aa, Artificial Sequence
  Description of Artificial Sequence: Synthetic peptide
  Seed: GMMMGMFNMLSTVLGVS
GMMMGMFNMVSPVLGVS

SEQ ID NO: 183045 - protein, 17 aa, Artificial Sequence
  Description of Artificial Sequence: Synthetic peptide
  Seed: GMMMGMFNMLSTVLGVS
GMMMGMFNMVSPVLHVS

SEQ ID NO: 183046 - protein, 17 aa, Artificial Sequence
  Description of Artificial Sequence: Synthetic peptide
  Seed: GMMMGMFNMLSTVLGVS
GMMMGMFNMVSPVLIVS

SEQ ID NO: 183047 - protein, 17 aa, Artificial Sequence
  Description of Artificial Sequence: Synthetic peptide
  Seed: GMMMGMFNMLSTVLGVS
GMMMGMFNMVSPVLKVS

SEQ ID NO: 183048 - protein, 17 aa, Artificial Sequence
  Description of Artificial Sequence: Synthetic peptide
  Seed: GMMMGMFNMLSTVLGVS
GMMMGMFNMVSPVLLVS

SEQ ID NO: 183049 - protein, 17 aa, Artificial Sequence
  Description of Artificial Sequence: Synthetic peptide
  Seed: GMMMGMFNMLSTVLGVS
GMMMGMFNMVSPVLMVS

SEQ ID NO: 183050 - protein, 17 aa, Artificial Sequence
  Description of Artificial Sequence: Synthetic peptide
  Seed: GMMMGMFNMLSTVLGVS
GMMMGMFNMVSPVLNVS

SEQ ID NO: 183051 - protein, 17 aa, Artificial Sequence
  Description of Artificial Sequence: Synthetic peptide
  Seed: GMMMGMFNMLSTVLGVS
GMMMGMFNMVSPVLPVS

SEQ ID NO: 183052 - protein, 17 aa, Artificial Sequence
  Description of Artificial Sequence: Synthetic peptide
  Seed: GMMMGMFNMLSTVLGVS
GMMMGMFNMVSPVLQVS

SEQ ID NO: 183053 - protein, 17 aa, Artificial Sequence
  Description of Artificial Sequence: Synthetic peptide
  Seed: GMMMGMFNMLSTVLGVS
GMMMGMFNMVSPVLRVS

SEQ ID NO: 183054 - protein, 17 aa, Artificial Sequence
  Description of Artificial Sequence: Synthetic peptide
  Seed: GMMMGMFNMLSTVLGVS
GMMMGMFNMVSPVLSVS

SEQ ID NO: 183055 - protein, 17 aa, Artificial Sequence
  Description of Artificial Sequence: Synthetic peptide
  Seed: GMMMGMFNMLSTVLGVS
GMMMGMFNMVSPVLTVS

SEQ ID NO: 183056 - protein, 17 aa, Artificial Sequence
  Description of Artificial Sequence: Synthetic peptide
  Seed: GMMMGMFNMLSTVLGVS
GMMMGMFNMVSPVLVVS

SEQ ID NO: 183057 - protein, 17 aa, Artificial Sequence
  Description of Artificial Sequence: Synthetic peptide
  Seed: GMMMGMFNMLSTVLGVS
GMMMGMFNMVSRVLHVS

SEQ ID NO: 183058 - protein, 17 aa, Artificial Sequence
  Description of Artificial Sequence: Synthetic peptide
  Seed: GMMMGMFNMLSTVLGVS
GMMMGMFNMVSRVLKVS

SEQ ID NO: 183059 - protein, 17 aa, Artificial Sequence
  Description of Artificial Sequence: Synthetic peptide
  Seed: GMMMGMFNMLSTVLGVS
GMMMGMFNMVSSVLAVS

SEQ ID NO: 183060 - protein, 17 aa, Artificial Sequence
  Description of Artificial Sequence: Synthetic peptide
  Seed: GMMMGMFNMLSTVLGVS
GMMMGMFNMVSSVLHVS

SEQ ID NO: 183061 - protein, 17 aa, Artificial Sequence
  Description of Artificial Sequence: Synthetic peptide
  Seed: GMMMGMFNMLSTVLGVS
GMMMGMFNMVSSVLKVS

SEQ ID NO: 183062 - protein, 17 aa, Artificial Sequence
  Description of Artificial Sequence: Synthetic peptide
  Seed: GMMMGMFNMLSTVLGVS
GMMMGMFNMVSSVLNVS

SEQ ID NO: 183063 - protein, 17 aa, Artificial Sequence
  Description of Artificial Sequence: Synthetic peptide
  Seed: GMMMGMFNMLSTVLGVS
GMMMGMFNMVSSVLSVS

SEQ ID NO: 183064 - protein, 17 aa, Artificial Sequence
  Description of Artificial Sequence: Synthetic peptide
  Seed: GMMMGMFNMLSTVLGVS
GMMMGMFNMVSSVLTVS

SEQ ID NO: 183065 - protein, 17 aa, Artificial Sequence
  Description of Artificial Sequence: Synthetic peptide
  Seed: GMMMGMFNMLSTVLGVS
GMMMGMFNMVSTVLDVS

SEQ ID NO: 183066 - protein, 17 aa, Artificial Sequence
  Description of Artificial Sequence: Synthetic peptide
  Seed: GMMMGMFNMLSTVLGVS
GMMMGMFNMVSTVLHVS

SEQ ID NO: 183067 - protein, 17 aa, Artificial Sequence
  Description of Artificial Sequence: Synthetic peptide
  Seed: GMMMGMFNMLSTVLGVS
GMMMGMFNMVSTVLNVS

SEQ ID NO: 183068 - protein, 17 aa, Artificial Sequence
  Description of Artificial Sequence: Synthetic peptide
  Seed: GMMMGMFNMLSTVLGVS
GMMMGMFNMVSTVLSVS

SEQ ID NO: 183069 - protein, 17 aa, Artificial Sequence
  Description of Artificial Sequence: Synthetic peptide
  Seed: GMMMGMFNMLSTVLGVS
GMMMGMGNMLSAVLAVS

SEQ ID NO: 183070 - protein, 17 aa, Artificial Sequence
  Description of Artificial Sequence: Synthetic peptide
  Seed: GMMMGMFNMLSTVLGVS
GMMMGMHNMLSAVLAVS

SEQ ID NO: 183071 - protein, 17 aa, Artificial Sequence
  Description of Artificial Sequence: Synthetic peptide
  Seed: GMMMGMFNMLSTVLGVS
GMMMGMHNMLSAVLIVS

SEQ ID NO: 183072 - protein, 17 aa, Artificial Sequence
  Description of Artificial Sequence: Synthetic peptide
  Seed: GMMMGMFNMLSTVLGVS
GMMMGMHNMLSAVLLVS

SEQ ID NO: 183073 - protein, 17 aa, Artificial Sequence
  Description of Artificial Sequence: Synthetic peptide
  Seed: GMMMGMFNMLSTVLGVS
GMMMGMHNMLSAVLVVS

SEQ ID NO: 183074 - protein, 17 aa, Artificial Sequence
  Description of Artificial Sequence: Synthetic peptide
  Seed: GMMMGMFNMLSTVLGVS
GMMMGMHNMLSGVLAVS

SEQ ID NO: 183075 - protein, 17 aa, Artificial Sequence
  Description of Artificial Sequence: Synthetic peptide
  Seed: GMMMGMFNMLSTVLGVS
GMMMGMHNMLSGVLIVS

SEQ ID NO: 183076 - protein, 17 aa, Artificial Sequence
  Description of Artificial Sequence: Synthetic peptide
  Seed: GMMMGMFNMLSTVLGVS
GMMMGMHNMLSGVLLVS

SEQ ID NO: 183077 - protein, 17 aa, Artificial Sequence
  Description of Artificial Sequence: Synthetic peptide
  Seed: GMMMGMFNMLSTVLGVS
GMMMGMHNMLSGVLVVS

SEQ ID NO: 183078 - protein, 17 aa, Artificial Sequence
  Description of Artificial Sequence: Synthetic peptide
  Seed: GMMMGMFNMLSTVLGVS
GMMMGMHNMLSPVLVVS

SEQ ID NO: 183079 - protein, 17 aa, Artificial Sequence
  Description of Artificial Sequence: Synthetic peptide
  Seed: GMMMGMFNMLSTVLGVS
GMMMGMHNMLSSVLIVS

SEQ ID NO: 183080 - protein, 17 aa, Artificial Sequence
  Description of Artificial Sequence: Synthetic peptide
  Seed: GMMMGMFNMLSTVLGVS
GMMMGMHNMLSSVLVVS

SEQ ID NO: 183081 - protein, 17 aa, Artificial Sequence
  Description of Artificial Sequence: Synthetic peptide
  Seed: GMMMGMFNMLSTVLGVS
GMMMGMHNMMSAVLAVS

SEQ ID NO: 183082 - protein, 17 aa, Artificial Sequence
  Description of Artificial Sequence: Synthetic peptide
  Seed: GMMMGMFNMLSTVLGVS
GMMMGMHNMMSAVLIVS

SEQ ID NO: 183083 - protein, 17 aa, Artificial Sequence
  Description of Artificial Sequence: Synthetic peptide
  Seed: GMMMGMFNMLSTVLGVS
GMMMGMHNMMSAVLLVS

SEQ ID NO: 183084 - protein, 17 aa, Artificial Sequence
  Description of Artificial Sequence: Synthetic peptide
  Seed: GMMMGMFNMLSTVLGVS
GMMMGMHNMMSAVLMVS

SEQ ID NO: 183085 - protein, 17 aa, Artificial Sequence
  Description of Artificial Sequence: Synthetic peptide
  Seed: GMMMGMFNMLSTVLGVS
GMMMGMHNMMSAVLNVS

SEQ ID NO: 183086 - protein, 17 aa, Artificial Sequence
  Description of Artificial Sequence: Synthetic peptide
  Seed: GMMMGMFNMLSTVLGVS
GMMMGMHNMMSAVLSVS

SEQ ID NO: 183087 - protein, 17 aa, Artificial Sequence
  Description of Artificial Sequence: Synthetic peptide
  Seed: GMMMGMFNMLSTVLGVS
GMMMGMHNMMSAVLVVS

SEQ ID NO: 183088 - protein, 17 aa, Artificial Sequence
  Description of Artificial Sequence: Synthetic peptide
  Seed: GMMMGMFNMLSTVLGVS
GMMMGMHNMMSGVLAVS

SEQ ID NO: 183089 - protein, 17 aa, Artificial Sequence
  Description of Artificial Sequence: Synthetic peptide
  Seed: GMMMGMFNMLSTVLGVS
GMMMGMHNMMSGVLIVS

SEQ ID NO: 183090 - protein, 17 aa, Artificial Sequence
  Description of Artificial Sequence: Synthetic peptide
  Seed: GMMMGMFNMLSTVLGVS
GMMMGMHNMMSGVLLVS

SEQ ID NO: 183091 - protein, 17 aa, Artificial Sequence
  Description of Artificial Sequence: Synthetic peptide
  Seed: GMMMGMFNMLSTVLGVS
GMMMGMHNMMSGVLVVS

SEQ ID NO: 183092 - protein, 17 aa, Artificial Sequence
  Description of Artificial Sequence: Synthetic peptide
  Seed: GMMMGMFNMLSTVLGVS
GMMMGMHNMMSPVLAVS

SEQ ID NO: 183093 - protein, 17 aa, Artificial Sequence
  Description of Artificial Sequence: Synthetic peptide
  Seed: GMMMGMFNMLSTVLGVS
GMMMGMHNMMSPVLVVS

SEQ ID NO: 183094 - protein, 17 aa, Artificial Sequence
  Description of Artificial Sequence: Synthetic peptide
  Seed: GMMMGMFNMLSTVLGVS
GMMMGMHNMMSSVLIVS

SEQ ID NO: 183095 - protein, 17 aa, Artificial Sequence
  Description of Artificial Sequence: Synthetic peptide
  Seed: GMMMGMFNMLSTVLGVS
GMMMGMHNMMSSVLLVS

SEQ ID NO: 183096 - protein, 17 aa, Artificial Sequence
  Description of Artificial Sequence: Synthetic peptide
  Seed: GMMMGMFNMLSTVLGVS
GMMMGMHNMMSSVLVVS

SEQ ID NO: 183097 - protein, 17 aa, Artificial Sequence
  Description of Artificial Sequence: Synthetic peptide
  Seed: GMMMGMFNMLSTVLGVS
GMMMGMINMASAVLAVS

SEQ ID NO: 183098 - protein, 17 aa, Artificial Sequence
  Description of Artificial Sequence: Synthetic peptide
  Seed: GMMMGMFNMLSTVLGVS
GMMMGMINMASAVLGVS

SEQ ID NO: 183099 - protein, 17 aa, Artificial Sequence
  Description of Artificial Sequence: Synthetic peptide
  Seed: GMMMGMFNMLSTVLGVS
GMMMGMINMASAVLHVS

SEQ ID NO: 183100 - protein, 17 aa, Artificial Sequence
  Description of Artificial Sequence: Synthetic peptide
  Seed: GMMMGMFNMLSTVLGVS
GMMMGMINMASAVLIVS

SEQ ID NO: 183101 - protein, 17 aa, Artificial Sequence
  Description of Artificial Sequence: Synthetic peptide
  Seed: GMMMGMFNMLSTVLGVS
GMMMGMINMASAVLLVS

SEQ ID NO: 183102 - protein, 17 aa, Artificial Sequence
  Description of Artificial Sequence: Synthetic peptide
  Seed: GMMMGMFNMLSTVLGVS
GMMMGMINMASAVLMVS

SEQ ID NO: 183103 - protein, 17 aa, Artificial Sequence
  Description of Artificial Sequence: Synthetic peptide
  Seed: GMMMGMFNMLSTVLGVS
GMMMGMINMASAVLNVS

SEQ ID NO: 183104 - protein, 17 aa, Artificial Sequence
  Description of Artificial Sequence: Synthetic peptide
  Seed: GMMMGMFNMLSTVLGVS
GMMMGMINMASAVLQVS

SEQ ID NO: 183105 - protein, 17 aa, Artificial Sequence
  Description of Artificial Sequence: Synthetic peptide
  Seed: GMMMGMFNMLSTVLGVS
GMMMGMINMASAVLSVS

SEQ ID NO: 183106 - protein, 17 aa, Artificial Sequence
  Description of Artificial Sequence: Synthetic peptide
  Seed: GMMMGMFNMLSTVLGVS
GMMMGMINMASAVLTVS

SEQ ID NO: 183107 - protein, 17 aa, Artificial Sequence
  Description of Artificial Sequence: Synthetic peptide
  Seed: GMMMGMFNMLSTVLGVS
GMMMGMINMASAVLVVS

SEQ ID NO: 183108 - protein, 17 aa, Artificial Sequence
  Description of Artificial Sequence: Synthetic peptide
  Seed: GMMMGMFNMLSTVLGVS
GMMMGMINMASGVLAVS

SEQ ID NO: 183109 - protein, 17 aa, Artificial Sequence
  Description of Artificial Sequence: Synthetic peptide
  Seed: GMMMGMFNMLSTVLGVS
GMMMGMINMASGVLGVS

SEQ ID NO: 183110 - protein, 17 aa, Artificial Sequence
  Description of Artificial Sequence: Synthetic peptide
  Seed: GMMMGMFNMLSTVLGVS
GMMMGMINMASGVLIVS

SEQ ID NO: 183111 - protein, 17 aa, Artificial Sequence
  Description of Artificial Sequence: Synthetic peptide
  Seed: GMMMGMFNMLSTVLGVS
GMMMGMINMASGVLLVS

SEQ ID NO: 183112 - protein, 17 aa, Artificial Sequence
  Description of Artificial Sequence: Synthetic peptide
  Seed: GMMMGMFNMLSTVLGVS
GMMMGMINMASGVLMVS

SEQ ID NO: 183113 - protein, 17 aa, Artificial Sequence
  Description of Artificial Sequence: Synthetic peptide
  Seed: GMMMGMFNMLSTVLGVS
GMMMGMINMASGVLNVS

SEQ ID NO: 183114 - protein, 17 aa, Artificial Sequence
  Description of Artificial Sequence: Synthetic peptide
  Seed: GMMMGMFNMLSTVLGVS
GMMMGMINMASGVLSVS

SEQ ID NO: 183115 - protein, 17 aa, Artificial Sequence
  Description of Artificial Sequence: Synthetic peptide
  Seed: GMMMGMFNMLSTVLGVS
GMMMGMINMASGVLTVS

SEQ ID NO: 183116 - protein, 17 aa, Artificial Sequence
  Description of Artificial Sequence: Synthetic peptide
  Seed: GMMMGMFNMLSTVLGVS
GMMMGMINMASGVLVVS

SEQ ID NO: 183117 - protein, 17 aa, Artificial Sequence
  Description of Artificial Sequence: Synthetic peptide
  Seed: GMMMGMFNMLSTVLGVS
GMMMGMINMASKVLHVS

SEQ ID NO: 183118 - protein, 17 aa, Artificial Sequence
  Description of Artificial Sequence: Synthetic peptide
  Seed: GMMMGMFNMLSTVLGVS
GMMMGMINMASKVLKVS

SEQ ID NO: 183119 - protein, 17 aa, Artificial Sequence
  Description of Artificial Sequence: Synthetic peptide
  Seed: GMMMGMFNMLSTVLGVS
GMMMGMINMASKVLRVS

SEQ ID NO: 183120 - protein, 17 aa, Artificial Sequence
  Description of Artificial Sequence: Synthetic peptide
  Seed: GMMMGMFNMLSTVLGVS
GMMMGMINMASNVLAVS

SEQ ID NO: 183121 - protein, 17 aa, Artificial Sequence
  Description of Artificial Sequence: Synthetic peptide
  Seed: GMMMGMFNMLSTVLGVS
GMMMGMINMASNVLGVS

SEQ ID NO: 183122 - protein, 17 aa, Artificial Sequence
  Description of Artificial Sequence: Synthetic peptide
  Seed: GMMMGMFNMLSTVLGVS
GMMMGMINMASNVLHVS

SEQ ID NO: 183123 - protein, 17 aa, Artificial Sequence
  Description of Artificial Sequence: Synthetic peptide
  Seed: GMMMGMFNMLSTVLGVS
GMMMGMINMASNVLLVS

SEQ ID NO: 183124 - protein, 17 aa, Artificial Sequence
  Description of Artificial Sequence: Synthetic peptide
  Seed: GMMMGMFNMLSTVLGVS
GMMMGMINMASNVLNVS

SEQ ID NO: 183125 - protein, 17 aa, Artificial Sequence
  Description of Artificial Sequence: Synthetic peptide
  Seed: GMMMGMFNMLSTVLGVS
GMMMGMINMASNVLQVS

SEQ ID NO: 183126 - protein, 17 aa, Artificial Sequence
  Description of Artificial Sequence: Synthetic peptide
  Seed: GMMMGMFNMLSTVLGVS
GMMMGMINMASNVLSVS

SEQ ID NO: 183127 - protein, 17 aa, Artificial Sequence
  Description of Artificial Sequence: Synthetic peptide
  Seed: GMMMGMFNMLSTVLGVS
GMMMGMINMASNVLVVS

SEQ ID NO: 183128 - protein, 17 aa, Artificial Sequence
  Description of Artificial Sequence: Synthetic peptide
  Seed: GMMMGMFNMLSTVLGVS
GMMMGMINMASPVLAVS

SEQ ID NO: 183129 - protein, 17 aa, Artificial Sequence
  Description of Artificial Sequence: Synthetic peptide
  Seed: GMMMGMFNMLSTVLGVS
GMMMGMINMASPVLGVS

SEQ ID NO: 183130 - protein, 17 aa, Artificial Sequence
  Description of Artificial Sequence: Synthetic peptide
  Seed: GMMMGMFNMLSTVLGVS
GMMMGMINMASPVLHVS

SEQ ID NO: 183131 - protein, 17 aa, Artificial Sequence
  Description of Artificial Sequence: Synthetic peptide
  Seed: GMMMGMFNMLSTVLGVS
GMMMGMINMASPVLIVS

SEQ ID NO: 183132 - protein, 17 aa, Artificial Sequence
  Description of Artificial Sequence: Synthetic peptide
  Seed: GMMMGMFNMLSTVLGVS
GMMMGMINMASPVLLVS

SEQ ID NO: 183133 - protein, 17 aa, Artificial Sequence
  Description of Artificial Sequence: Synthetic peptide
  Seed: GMMMGMFNMLSTVLGVS
GMMMGMINMASPVLMVS

SEQ ID NO: 183134 - protein, 17 aa, Artificial Sequence
  Description of Artificial Sequence: Synthetic peptide
  Seed: GMMMGMFNMLSTVLGVS
GMMMGMINMASPVLNVS

SEQ ID NO: 183135 - protein, 17 aa, Artificial Sequence
  Description of Artificial Sequence: Synthetic peptide
  Seed: GMMMGMFNMLSTVLGVS
GMMMGMINMASPVLQVS

SEQ ID NO: 183136 - protein, 17 aa, Artificial Sequence
  Description of Artificial Sequence: Synthetic peptide
  Seed: GMMMGMFNMLSTVLGVS
GMMMGMINMASPVLSVS

SEQ ID NO: 183137 - protein, 17 aa, Artificial Sequence
  Description of Artificial Sequence: Synthetic peptide
  Seed: GMMMGMFNMLSTVLGVS
GMMMGMINMASPVLTVS

SEQ ID NO: 183138 - protein, 17 aa, Artificial Sequence
  Description of Artificial Sequence: Synthetic peptide
  Seed: GMMMGMFNMLSTVLGVS
GMMMGMINMASPVLVVS

SEQ ID NO: 183139 - protein, 17 aa, Artificial Sequence
  Description of Artificial Sequence: Synthetic peptide
  Seed: GMMMGMFNMLSTVLGVS
GMMMGMINMASRVLHVS

SEQ ID NO: 183140 - protein, 17 aa, Artificial Sequence
  Description of Artificial Sequence: Synthetic peptide
  Seed: GMMMGMFNMLSTVLGVS
GMMMGMINMASRVLKVS

SEQ ID NO: 183141 - protein, 17 aa, Artificial Sequence
  Description of Artificial Sequence: Synthetic peptide
  Seed: GMMMGMFNMLSTVLGVS
GMMMGMINMASRVLRVS

SEQ ID NO: 183142 - protein, 17 aa, Artificial Sequence
  Description of Artificial Sequence: Synthetic peptide
  Seed: GMMMGMFNMLSTVLGVS
GMMMGMINMASSVLAVS

SEQ ID NO: 183143 - protein, 17 aa, Artificial Sequence
  Description of Artificial Sequence: Synthetic peptide
  Seed: GMMMGMFNMLSTVLGVS
GMMMGMINMASSVLGVS

SEQ ID NO: 183144 - protein, 17 aa, Artificial Sequence
  Description of Artificial Sequence: Synthetic peptide
  Seed: GMMMGMFNMLSTVLGVS
GMMMGMINMASSVLHVS

SEQ ID NO: 183145 - protein, 17 aa, Artificial Sequence
  Description of Artificial Sequence: Synthetic peptide
  Seed: GMMMGMFNMLSTVLGVS
GMMMGMINMASSVLIVS

SEQ ID NO: 183146 - protein, 17 aa, Artificial Sequence
  Description of Artificial Sequence: Synthetic peptide
  Seed: GMMMGMFNMLSTVLGVS
GMMMGMINMASSVLLVS

SEQ ID NO: 183147 - protein, 17 aa, Artificial Sequence
  Description of Artificial Sequence: Synthetic peptide
  Seed: GMMMGMFNMLSTVLGVS
GMMMGMINMASSVLMVS

SEQ ID NO: 183148 - protein, 17 aa, Artificial Sequence
  Description of Artificial Sequence: Synthetic peptide
  Seed: GMMMGMFNMLSTVLGVS
GMMMGMINMASSVLNVS

SEQ ID NO: 183149 - protein, 17 aa, Artificial Sequence
  Description of Artificial Sequence: Synthetic peptide
  Seed: GMMMGMFNMLSTVLGVS
GMMMGMINMASSVLSVS

SEQ ID NO: 183150 - protein, 17 aa, Artificial Sequence
  Description of Artificial Sequence: Synthetic peptide
  Seed: GMMMGMFNMLSTVLGVS
GMMMGMINMASSVLTVS

SEQ ID NO: 183151 - protein, 17 aa, Artificial Sequence
  Description of Artificial Sequence: Synthetic peptide
  Seed: GMMMGMFNMLSTVLGVS
GMMMGMINMASSVLVVS

SEQ ID NO: 183152 - protein, 17 aa, Artificial Sequence
  Description of Artificial Sequence: Synthetic peptide
  Seed: GMMMGMFNMLSTVLGVS
GMMMGMINMASTVLAVS

SEQ ID NO: 183153 - protein, 17 aa, Artificial Sequence
  Description of Artificial Sequence: Synthetic peptide
  Seed: GMMMGMFNMLSTVLGVS
GMMMGMINMASTVLHVS

SEQ ID NO: 183154 - protein, 17 aa, Artificial Sequence
  Description of Artificial Sequence: Synthetic peptide
  Seed: GMMMGMFNMLSTVLGVS
GMMMGMINMASTVLNVS

SEQ ID NO: 183155 - protein, 17 aa, Artificial Sequence
  Description of Artificial Sequence: Synthetic peptide
  Seed: GMMMGMFNMLSTVLGVS
GMMMGMINMASTVLSVS

SEQ ID NO: 183156 - protein, 17 aa, Artificial Sequence
  Description of Artificial Sequence: Synthetic peptide
  Seed: GMMMGMFNMLSTVLGVS
GMMMGMINMESAVLAVS

SEQ ID NO: 183157 - protein, 17 aa, Artificial Sequence
  Description of Artificial Sequence: Synthetic peptide
  Seed: GMMMGMFNMLSTVLGVS
GMMMGMINMESAVLSVS

SEQ ID NO: 183158 - protein, 17 aa, Artificial Sequence
  Description of Artificial Sequence: Synthetic peptide
  Seed: GMMMGMFNMLSTVLGVS
GMMMGMINMESAVLTVS

SEQ ID NO: 183159 - protein, 17 aa, Artificial Sequence
  Description of Artificial Sequence: Synthetic peptide
  Seed: GMMMGMFNMLSTVLGVS
GMMMGMINMESAVLVVS

SEQ ID NO: 183160 - protein, 17 aa, Artificial Sequence
  Description of Artificial Sequence: Synthetic peptide
  Seed: GMMMGMFNMLSTVLGVS
GMMMGMINMESGVLAVS

SEQ ID NO: 183161 - protein, 17 aa, Artificial Sequence
  Description of Artificial Sequence: Synthetic peptide
  Seed: GMMMGMFNMLSTVLGVS
GMMMGMINMESNVLAVS

SEQ ID NO: 183162 - protein, 17 aa, Artificial Sequence
  Description of Artificial Sequence: Synthetic peptide
  Seed: GMMMGMFNMLSTVLGVS
GMMMGMINMESPVLAVS

SEQ ID NO: 183163 - protein, 17 aa, Artificial Sequence
  Description of Artificial Sequence: Synthetic peptide
  Seed: GMMMGMFNMLSTVLGVS
GMMMGMINMESPVLVVS

SEQ ID NO: 183164 - protein, 17 aa, Artificial Sequence
  Description of Artificial Sequence: Synthetic peptide
  Seed: GMMMGMFNMLSTVLGVS
GMMMGMINMGSAVLAVS

SEQ ID NO: 183165 - protein, 17 aa, Artificial Sequence
  Description of Artificial Sequence: Synthetic peptide
  Seed: GMMMGMFNMLSTVLGVS
GMMMGMINMGSAVLGVS

SEQ ID NO: 183166 - protein, 17 aa, Artificial Sequence
  Description of Artificial Sequence: Synthetic peptide
  Seed: GMMMGMFNMLSTVLGVS
GMMMGMINMGSAVLIVS

SEQ ID NO: 183167 - protein, 17 aa, Artificial Sequence
  Description of Artificial Sequence: Synthetic peptide
  Seed: GMMMGMFNMLSTVLGVS
GMMMGMINMGSAVLLVS

SEQ ID NO: 183168 - protein, 17 aa, Artificial Sequence
  Description of Artificial Sequence: Synthetic peptide
  Seed: GMMMGMFNMLSTVLGVS
GMMMGMINMGSAVLMVS

SEQ ID NO: 183169 - protein, 17 aa, Artificial Sequence
  Description of Artificial Sequence: Synthetic peptide
  Seed: GMMMGMFNMLSTVLGVS
GMMMGMINMGSAVLSVS

SEQ ID NO: 183170 - protein, 17 aa, Artificial Sequence
  Description of Artificial Sequence: Synthetic peptide
  Seed: GMMMGMFNMLSTVLGVS
GMMMGMINMGSAVLTVS

SEQ ID NO: 183171 - protein, 17 aa, Artificial Sequence
  Description of Artificial Sequence: Synthetic peptide
  Seed: GMMMGMFNMLSTVLGVS
GMMMGMINMGSAVLVVS

SEQ ID NO: 183172 - protein, 17 aa, Artificial Sequence
  Description of Artificial Sequence: Synthetic peptide
  Seed: GMMMGMFNMLSTVLGVS
GMMMGMINMGSGVLAVS

SEQ ID NO: 183173 - protein, 17 aa, Artificial Sequence
  Description of Artificial Sequence: Synthetic peptide
  Seed: GMMMGMFNMLSTVLGVS
GMMMGMINMGSGVLVVS

SEQ ID NO: 183174 - protein, 17 aa, Artificial Sequence
  Description of Artificial Sequence: Synthetic peptide
  Seed: GMMMGMFNMLSTVLGVS
GMMMGMINMGSPVLIVS

SEQ ID NO: 183175 - protein, 17 aa, Artificial Sequence
  Description of Artificial Sequence: Synthetic peptide
  Seed: GMMMGMFNMLSTVLGVS
GMMMGMINMGSPVLLVS

SEQ ID NO: 183176 - protein, 17 aa, Artificial Sequence
  Description of Artificial Sequence: Synthetic peptide
  Seed: GMMMGMFNMLSTVLGVS
GMMMGMINMGSPVLMVS

SEQ ID NO: 183177 - protein, 17 aa, Artificial Sequence
  Description of Artificial Sequence: Synthetic peptide
  Seed: GMMMGMFNMLSTVLGVS
GMMMGMINMGSPVLVVS

SEQ ID NO: 183178 - protein, 17 aa, Artificial Sequence
  Description of Artificial Sequence: Synthetic peptide
  Seed: GMMMGMFNMLSTVLGVS
GMMMGMINMGSSVLAVS

SEQ ID NO: 183179 - protein, 17 aa, Artificial Sequence
  Description of Artificial Sequence: Synthetic peptide
  Seed: GMMMGMFNMLSTVLGVS
GMMMGMINMGSSVLVVS

SEQ ID NO: 183180 - protein, 17 aa, Artificial Sequence
  Description of Artificial Sequence: Synthetic peptide
  Seed: GMMMGMFNMLSTVLGVS
GMMMGMINMHSAVLIVS

SEQ ID NO: 183181 - protein, 17 aa, Artificial Sequence
  Description of Artificial Sequence: Synthetic peptide
  Seed: GMMMGMFNMLSTVLGVS
GMMMGMINMHSAVLLVS

SEQ ID NO: 183182 - protein, 17 aa, Artificial Sequence
  Description of Artificial Sequence: Synthetic peptide
  Seed: GMMMGMFNMLSTVLGVS
GMMMGMINMHSAVLVVS

SEQ ID NO: 183183 - protein, 17 aa, Artificial Sequence
  Description of Artificial Sequence: Synthetic peptide
  Seed: GMMMGMFNMLSTVLGVS
GMMMGMINMHSGVLAVS

SEQ ID NO: 183184 - protein, 17 aa, Artificial Sequence
  Description of Artificial Sequence: Synthetic peptide
  Seed: GMMMGMFNMLSTVLGVS
GMMMGMINMHSGVLVVS

SEQ ID NO: 183185 - protein, 17 aa, Artificial Sequence
  Description of Artificial Sequence: Synthetic peptide
  Seed: GMMMGMFNMLSTVLGVS
GMMMGMINMHSSVLLVS

SEQ ID NO: 183186 - protein, 17 aa, Artificial Sequence
  Description of Artificial Sequence: Synthetic peptide
  Seed: GMMMGMFNMLSTVLGVS
GMMMGMINMHSSVLVVS

SEQ ID NO: 183187 - protein, 17 aa, Artificial Sequence
  Description of Artificial Sequence: Synthetic peptide
  Seed: GMMMGMFNMLSTVLGVS
GMMMGMINMISAVLHVS

SEQ ID NO: 183188 - protein, 17 aa, Artificial Sequence
  Description of Artificial Sequence: Synthetic peptide
  Seed: GMMMGMFNMLSTVLGVS
GMMMGMINMISAVLNVS

SEQ ID NO: 183189 - protein, 17 aa, Artificial Sequence
  Description of Artificial Sequence: Synthetic peptide
  Seed: GMMMGMFNMLSTVLGVS
GMMMGMINMISGVLAVS

SEQ ID NO: 183190 - protein, 17 aa, Artificial Sequence
  Description of Artificial Sequence: Synthetic peptide
  Seed: GMMMGMFNMLSTVLGVS
GMMMGMINMISKVLHVS

SEQ ID NO: 183191 - protein, 17 aa, Artificial Sequence
  Description of Artificial Sequence: Synthetic peptide
  Seed: GMMMGMFNMLSTVLGVS
GMMMGMINMISKVLKVS

SEQ ID NO: 183192 - protein, 17 aa, Artificial Sequence
  Description of Artificial Sequence: Synthetic peptide
  Seed: GMMMGMFNMLSTVLGVS
GMMMGMINMISKVLRVS

SEQ ID NO: 183193 - protein, 17 aa, Artificial Sequence
  Description of Artificial Sequence: Synthetic peptide
  Seed: GMMMGMFNMLSTVLGVS
GMMMGMINMISNVLAVS

SEQ ID NO: 183194 - protein, 17 aa, Artificial Sequence
  Description of Artificial Sequence: Synthetic peptide
  Seed: GMMMGMFNMLSTVLGVS
GMMMGMINMISNVLHVS

SEQ ID NO: 183195 - protein, 17 aa, Artificial Sequence
  Description of Artificial Sequence: Synthetic peptide
  Seed: GMMMGMFNMLSTVLGVS
GMMMGMINMISNVLSVS

SEQ ID NO: 183196 - protein, 17 aa, Artificial Sequence
  Description of Artificial Sequence: Synthetic peptide
  Seed: GMMMGMFNMLSTVLGVS
GMMMGMINMISPVLAVS

SEQ ID NO: 183197 - protein, 17 aa, Artificial Sequence
  Description of Artificial Sequence: Synthetic peptide
  Seed: GMMMGMFNMLSTVLGVS
GMMMGMINMISPVLGVS

SEQ ID NO: 183198 - protein, 17 aa, Artificial Sequence
  Description of Artificial Sequence: Synthetic peptide
  Seed: GMMMGMFNMLSTVLGVS
GMMMGMINMISPVLHVS

SEQ ID NO: 183199 - protein, 17 aa, Artificial Sequence
  Description of Artificial Sequence: Synthetic peptide
  Seed: GMMMGMFNMLSTVLGVS
GMMMGMINMISPVLIVS

SEQ ID NO: 183200 - protein, 17 aa, Artificial Sequence
  Description of Artificial Sequence: Synthetic peptide
  Seed: GMMMGMFNMLSTVLGVS
GMMMGMINMISPVLLVS

SEQ ID NO: 183201 - protein, 17 aa, Artificial Sequence
  Description of Artificial Sequence: Synthetic peptide
  Seed: GMMMGMFNMLSTVLGVS
GMMMGMINMISPVLMVS

SEQ ID NO: 183202 - protein, 17 aa, Artificial Sequence
  Description of Artificial Sequence: Synthetic peptide
  Seed: GMMMGMFNMLSTVLGVS
GMMMGMINMISPVLNVS

SEQ ID NO: 183203 - protein, 17 aa, Artificial Sequence
  Description of Artificial Sequence: Synthetic peptide
  Seed: GMMMGMFNMLSTVLGVS
GMMMGMINMISPVLSVS

SEQ ID NO: 183204 - protein, 17 aa, Artificial Sequence
  Description of Artificial Sequence: Synthetic peptide
  Seed: GMMMGMFNMLSTVLGVS
GMMMGMINMISPVLTVS

SEQ ID NO: 183205 - protein, 17 aa, Artificial Sequence
  Description of Artificial Sequence: Synthetic peptide
  Seed: GMMMGMFNMLSTVLGVS
GMMMGMINMISPVLVVS

SEQ ID NO: 183206 - protein, 17 aa, Artificial Sequence
  Description of Artificial Sequence: Synthetic peptide
  Seed: GMMMGMFNMLSTVLGVS
GMMMGMINMISRVLHVS

SEQ ID NO: 183207 - protein, 17 aa, Artificial Sequence
  Description of Artificial Sequence: Synthetic peptide
  Seed: GMMMGMFNMLSTVLGVS
GMMMGMINMISRVLKVS

SEQ ID NO: 183208 - protein, 17 aa, Artificial Sequence
  Description of Artificial Sequence: Synthetic peptide
  Seed: GMMMGMFNMLSTVLGVS
GMMMGMINMISRVLRVS

SEQ ID NO: 183209 - protein, 17 aa, Artificial Sequence
  Description of Artificial Sequence: Synthetic peptide
  Seed: GMMMGMFNMLSTVLGVS
GMMMGMINMISTVLHVS

SEQ ID NO: 183210 - protein, 17 aa, Artificial Sequence
  Description of Artificial Sequence: Synthetic peptide
  Seed: GMMMGMFNMLSTVLGVS
GMMMGMINMKSGVLLVS

SEQ ID NO: 183211 - protein, 17 aa, Artificial Sequence
  Description of Artificial Sequence: Synthetic peptide
  Seed: GMMMGMFNMLSTVLGVS
GMMMGMINMKSRVLAVS

SEQ ID NO: 183212 - protein, 17 aa, Artificial Sequence
  Description of Artificial Sequence: Synthetic peptide
  Seed: GMMMGMFNMLSTVLGVS
GMMMGMINMKSRVLGVS

SEQ ID NO: 183213 - protein, 17 aa, Artificial Sequence
  Description of Artificial Sequence: Synthetic peptide
  Seed: GMMMGMFNMLSTVLGVS
GMMMGMINMKSRVLHVS

SEQ ID NO: 183214 - protein, 17 aa, Artificial Sequence
  Description of Artificial Sequence: Synthetic peptide
  Seed: GMMMGMFNMLSTVLGVS
GMMMGMINMKSRVLKVS

SEQ ID NO: 183215 - protein, 17 aa, Artificial Sequence
  Description of Artificial Sequence: Synthetic peptide
  Seed: GMMMGMFNMLSTVLGVS
GMMMGMINMKSRVLQVS

SEQ ID NO: 183216 - protein, 17 aa, Artificial Sequence
  Description of Artificial Sequence: Synthetic peptide
  Seed: GMMMGMFNMLSTVLGVS
GMMMGMINMKSRVLRVS

SEQ ID NO: 183217 - protein, 17 aa, Artificial Sequence
  Description of Artificial Sequence: Synthetic peptide
  Seed: GMMMGMFNMLSTVLGVS
GMMMGMINMKSRVLSVS

SEQ ID NO: 183218 - protein, 17 aa, Artificial Sequence
  Description of Artificial Sequence: Synthetic peptide
  Seed: GMMMGMFNMLSTVLGVS
GMMMGMINMLSAVLAVS

SEQ ID NO: 183219 - protein, 17 aa, Artificial Sequence
  Description of Artificial Sequence: Synthetic peptide
  Seed: GMMMGMFNMLSTVLGVS
GMMMGMINMLSAVLHVS

SEQ ID NO: 183220 - protein, 17 aa, Artificial Sequence
  Description of Artificial Sequence: Synthetic peptide
  Seed: GMMMGMFNMLSTVLGVS
GMMMGMINMLSAVLKVS

SEQ ID NO: 183221 - protein, 17 aa, Artificial Sequence
  Description of Artificial Sequence: Synthetic peptide
  Seed: GMMMGMFNMLSTVLGVS
GMMMGMINMLSAVLNVS

SEQ ID NO: 183222 - protein, 17 aa, Artificial Sequence
  Description of Artificial Sequence: Synthetic peptide
  Seed: GMMMGMFNMLSTVLGVS
GMMMGMINMLSAVLRVS

SEQ ID NO: 183223 - protein, 17 aa, Artificial Sequence
  Description of Artificial Sequence: Synthetic peptide
  Seed: GMMMGMFNMLSTVLGVS
GMMMGMINMLSAVLSVS

SEQ ID NO: 183224 - protein, 17 aa, Artificial Sequence
  Description of Artificial Sequence: Synthetic peptide
  Seed: GMMMGMFNMLSTVLGVS
GMMMGMINMLSAVLTVS

SEQ ID NO: 183225 - protein, 17 aa, Artificial Sequence
  Description of Artificial Sequence: Synthetic peptide
  Seed: GMMMGMFNMLSTVLGVS
GMMMGMINMLSGVLAVS

SEQ ID NO: 183226 - protein, 17 aa, Artificial Sequence
  Description of Artificial Sequence: Synthetic peptide
  Seed: GMMMGMFNMLSTVLGVS
GMMMGMINMLSGVLGVS

SEQ ID NO: 183227 - protein, 17 aa, Artificial Sequence
  Description of Artificial Sequence: Synthetic peptide
  Seed: GMMMGMFNMLSTVLGVS
GMMMGMINMLSGVLHVS

SEQ ID NO: 183228 - protein, 17 aa, Artificial Sequence
  Description of Artificial Sequence: Synthetic peptide
  Seed: GMMMGMFNMLSTVLGVS
GMMMGMINMLSGVLKVS

SEQ ID NO: 183229 - protein, 17 aa, Artificial Sequence
  Description of Artificial Sequence: Synthetic peptide
  Seed: GMMMGMFNMLSTVLGVS
GMMMGMINMLSGVLNVS

SEQ ID NO: 183230 - protein, 17 aa, Artificial Sequence
  Description of Artificial Sequence: Synthetic peptide
  Seed: GMMMGMFNMLSTVLGVS
GMMMGMINMLSGVLRVS

SEQ ID NO: 183231 - protein, 17 aa, Artificial Sequence
  Description of Artificial Sequence: Synthetic peptide
  Seed: GMMMGMFNMLSTVLGVS
GMMMGMINMLSGVLSVS

SEQ ID NO: 183232 - protein, 17 aa, Artificial Sequence
  Description of Artificial Sequence: Synthetic peptide
  Seed: GMMMGMFNMLSTVLGVS
GMMMGMINMLSGVLTVS

SEQ ID NO: 183233 - protein, 17 aa, Artificial Sequence
  Description of Artificial Sequence: Synthetic peptide
  Seed: GMMMGMFNMLSTVLGVS
GMMMGMINMLSGVLVVS

SEQ ID NO: 183234 - protein, 17 aa, Artificial Sequence
  Description of Artificial Sequence: Synthetic peptide
  Seed: GMMMGMFNMLSTVLGVS
GMMMGMINMLSKVLHVS

SEQ ID NO: 183235 - protein, 17 aa, Artificial Sequence
  Description of Artificial Sequence: Synthetic peptide
  Seed: GMMMGMFNMLSTVLGVS
GMMMGMINMLSKVLKVS

SEQ ID NO: 183236 - protein, 17 aa, Artificial Sequence
  Description of Artificial Sequence: Synthetic peptide
  Seed: GMMMGMFNMLSTVLGVS
GMMMGMINMLSKVLRVS

SEQ ID NO: 183237 - protein, 17 aa, Artificial Sequence
  Description of Artificial Sequence: Synthetic peptide
  Seed: GMMMGMFNMLSTVLGVS
GMMMGMINMLSNVLAVS

SEQ ID NO: 183238 - protein, 17 aa, Artificial Sequence
  Description of Artificial Sequence: Synthetic peptide
  Seed: GMMMGMFNMLSTVLGVS
GMMMGMINMLSNVLHVS

SEQ ID NO: 183239 - protein, 17 aa, Artificial Sequence
  Description of Artificial Sequence: Synthetic peptide
  Seed: GMMMGMFNMLSTVLGVS
GMMMGMINMLSNVLNVS

SEQ ID NO: 183240 - protein, 17 aa, Artificial Sequence
  Description of Artificial Sequence: Synthetic peptide
  Seed: GMMMGMFNMLSTVLGVS
GMMMGMINMLSNVLSVS

SEQ ID NO: 183241 - protein, 17 aa, Artificial Sequence
  Description of Artificial Sequence: Synthetic peptide
  Seed: GMMMGMFNMLSTVLGVS
GMMMGMINMLSNVLTVS

SEQ ID NO: 183242 - protein, 17 aa, Artificial Sequence
  Description of Artificial Sequence: Synthetic peptide
  Seed: GMMMGMFNMLSTVLGVS
GMMMGMINMLSPVLAVS

SEQ ID NO: 183243 - protein, 17 aa, Artificial Sequence
  Description of Artificial Sequence: Synthetic peptide
  Seed: GMMMGMFNMLSTVLGVS
GMMMGMINMLSPVLFVS

SEQ ID NO: 183244 - protein, 17 aa, Artificial Sequence
  Description of Artificial Sequence: Synthetic peptide
  Seed: GMMMGMFNMLSTVLGVS
GMMMGMINMLSPVLGVS

SEQ ID NO: 183245 - protein, 17 aa, Artificial Sequence
  Description of Artificial Sequence: Synthetic peptide
  Seed: GMMMGMFNMLSTVLGVS
GMMMGMINMLSPVLHVS

SEQ ID NO: 183246 - protein, 17 aa, Artificial Sequence
  Description of Artificial Sequence: Synthetic peptide
  Seed: GMMMGMFNMLSTVLGVS
GMMMGMINMLSPVLIVS

SEQ ID NO: 183247 - protein, 17 aa, Artificial Sequence
  Description of Artificial Sequence: Synthetic peptide
  Seed: GMMMGMFNMLSTVLGVS
GMMMGMINMLSPVLKVS

SEQ ID NO: 183248 - protein, 17 aa, Artificial Sequence
  Description of Artificial Sequence: Synthetic peptide
  Seed: GMMMGMFNMLSTVLGVS
GMMMGMINMLSPVLLVS

SEQ ID NO: 183249 - protein, 17 aa, Artificial Sequence
  Description of Artificial Sequence: Synthetic peptide
  Seed: GMMMGMFNMLSTVLGVS
GMMMGMINMLSPVLMVS

SEQ ID NO: 183250 - protein, 17 aa, Artificial Sequence
  Description of Artificial Sequence: Synthetic peptide
  Seed: GMMMGMFNMLSTVLGVS
GMMMGMINMLSPVLNVS

SEQ ID NO: 183251 - protein, 17 aa, Artificial Sequence
  Description of Artificial Sequence: Synthetic peptide
  Seed: GMMMGMFNMLSTVLGVS
GMMMGMINMLSPVLPVS

SEQ ID NO: 183252 - protein, 17 aa, Artificial Sequence
  Description of Artificial Sequence: Synthetic peptide
  Seed: GMMMGMFNMLSTVLGVS
GMMMGMINMLSPVLQVS

SEQ ID NO: 183253 - protein, 17 aa, Artificial Sequence
  Description of Artificial Sequence: Synthetic peptide
  Seed: GMMMGMFNMLSTVLGVS
GMMMGMINMLSPVLRVS

SEQ ID NO: 183254 - protein, 17 aa, Artificial Sequence
  Description of Artificial Sequence: Synthetic peptide
  Seed: GMMMGMFNMLSTVLGVS
GMMMGMINMLSPVLSVS

SEQ ID NO: 183255 - protein, 17 aa, Artificial Sequence
  Description of Artificial Sequence: Synthetic peptide
  Seed: GMMMGMFNMLSTVLGVS
GMMMGMINMLSPVLTVS

SEQ ID NO: 183256 - protein, 17 aa, Artificial Sequence
  Description of Artificial Sequence: Synthetic peptide
  Seed: GMMMGMFNMLSTVLGVS
GMMMGMINMLSPVLVVS

SEQ ID NO: 183257 - protein, 17 aa, Artificial Sequence
  Description of Artificial Sequence: Synthetic peptide
  Seed: GMMMGMFNMLSTVLGVS
GMMMGMINMLSPVLYVS

SEQ ID NO: 183258 - protein, 17 aa, Artificial Sequence
  Description of Artificial Sequence: Synthetic peptide
  Seed: GMMMGMFNMLSTVLGVS
GMMMGMINMLSRVLHVS

SEQ ID NO: 183259 - protein, 17 aa, Artificial Sequence
  Description of Artificial Sequence: Synthetic peptide
  Seed: GMMMGMFNMLSTVLGVS
GMMMGMINMLSRVLKVS

SEQ ID NO: 183260 - protein, 17 aa, Artificial Sequence
  Description of Artificial Sequence: Synthetic peptide
  Seed: GMMMGMFNMLSTVLGVS
GMMMGMINMLSRVLRVS

SEQ ID NO: 183261 - protein, 17 aa, Artificial Sequence
  Description of Artificial Sequence: Synthetic peptide
  Seed: GMMMGMFNMLSTVLGVS
GMMMGMINMLSSVLAVS

SEQ ID NO: 183262 - protein, 17 aa, Artificial Sequence
  Description of Artificial Sequence: Synthetic peptide
  Seed: GMMMGMFNMLSTVLGVS
GMMMGMINMLSSVLHVS

SEQ ID NO: 183263 - protein, 17 aa, Artificial Sequence
  Description of Artificial Sequence: Synthetic peptide
  Seed: GMMMGMFNMLSTVLGVS
GMMMGMINMLSSVLKVS

SEQ ID NO: 183264 - protein, 17 aa, Artificial Sequence
  Description of Artificial Sequence: Synthetic peptide
  Seed: GMMMGMFNMLSTVLGVS
GMMMGMINMLSSVLNVS

SEQ ID NO: 183265 - protein, 17 aa, Artificial Sequence
  Description of Artificial Sequence: Synthetic peptide
  Seed: GMMMGMFNMLSTVLGVS
GMMMGMINMLSSVLRVS

SEQ ID NO: 183266 - protein, 17 aa, Artificial Sequence
  Description of Artificial Sequence: Synthetic peptide
  Seed: GMMMGMFNMLSTVLGVS
GMMMGMINMLSSVLSVS

SEQ ID NO: 183267 - protein, 17 aa, Artificial Sequence
  Description of Artificial Sequence: Synthetic peptide
  Seed: GMMMGMFNMLSTVLGVS
GMMMGMINMLSSVLTVS

SEQ ID NO: 183268 - protein, 17 aa, Artificial Sequence
  Description of Artificial Sequence: Synthetic peptide
  Seed: GMMMGMFNMLSTVLGVS
GMMMGMINMLSSVLVVS

SEQ ID NO: 183269 - protein, 17 aa, Artificial Sequence
  Description of Artificial Sequence: Synthetic peptide
  Seed: GMMMGMFNMLSTVLGVS
GMMMGMINMLSTVLHVS

SEQ ID NO: 183270 - protein, 17 aa, Artificial Sequence
  Description of Artificial Sequence: Synthetic peptide
  Seed: GMMMGMFNMLSTVLGVS
GMMMGMINMLSTVLNVS

SEQ ID NO: 183271 - protein, 17 aa, Artificial Sequence
  Description of Artificial Sequence: Synthetic peptide
  Seed: GMMMGMFNMLSTVLGVS
GMMMGMINMMSAVLAVS

SEQ ID NO: 183272 - protein, 17 aa, Artificial Sequence
  Description of Artificial Sequence: Synthetic peptide
  Seed: GMMMGMFNMLSTVLGVS
GMMMGMINMMSAVLDVS

SEQ ID NO: 183273 - protein, 17 aa, Artificial Sequence
  Description of Artificial Sequence: Synthetic peptide
  Seed: GMMMGMFNMLSTVLGVS
GMMMGMINMMSAVLGVS

SEQ ID NO: 183274 - protein, 17 aa, Artificial Sequence
  Description of Artificial Sequence: Synthetic peptide
  Seed: GMMMGMFNMLSTVLGVS
GMMMGMINMMSAVLHVS

SEQ ID NO: 183275 - protein, 17 aa, Artificial Sequence
  Description of Artificial Sequence: Synthetic peptide
  Seed: GMMMGMFNMLSTVLGVS
GMMMGMINMMSAVLIVS

SEQ ID NO: 183276 - protein, 17 aa, Artificial Sequence
  Description of Artificial Sequence: Synthetic peptide
  Seed: GMMMGMFNMLSTVLGVS
GMMMGMINMMSAVLKVS

SEQ ID NO: 183277 - protein, 17 aa, Artificial Sequence
  Description of Artificial Sequence: Synthetic peptide
  Seed: GMMMGMFNMLSTVLGVS
GMMMGMINMMSAVLLVS

SEQ ID NO: 183278 - protein, 17 aa, Artificial Sequence
  Description of Artificial Sequence: Synthetic peptide
  Seed: GMMMGMFNMLSTVLGVS
GMMMGMINMMSAVLNVS

SEQ ID NO: 183279 - protein, 17 aa, Artificial Sequence
  Description of Artificial Sequence: Synthetic peptide
  Seed: GMMMGMFNMLSTVLGVS
GMMMGMINMMSAVLPVS

SEQ ID NO: 183280 - protein, 17 aa, Artificial Sequence
  Description of Artificial Sequence: Synthetic peptide
  Seed: GMMMGMFNMLSTVLGVS
GMMMGMINMMSAVLSVS

SEQ ID NO: 183281 - protein, 17 aa, Artificial Sequence
  Description of Artificial Sequence: Synthetic peptide
  Seed: GMMMGMFNMLSTVLGVS
GMMMGMINMMSAVLTVS

SEQ ID NO: 183282 - protein, 17 aa, Artificial Sequence
  Description of Artificial Sequence: Synthetic peptide
  Seed: GMMMGMFNMLSTVLGVS
GMMMGMINMMSAVLVVS

SEQ ID NO: 183283 - protein, 17 aa, Artificial Sequence
  Description of Artificial Sequence: Synthetic peptide
  Seed: GMMMGMFNMLSTVLGVS
GMMMGMINMMSDVLAVS

SEQ ID NO: 183284 - protein, 17 aa, Artificial Sequence
  Description of Artificial Sequence: Synthetic peptide
  Seed: GMMMGMFNMLSTVLGVS
GMMMGMINMMSDVLSVS

SEQ ID NO: 183285 - protein, 17 aa, Artificial Sequence
  Description of Artificial Sequence: Synthetic peptide
  Seed: GMMMGMFNMLSTVLGVS
GMMMGMINMMSGVLAVS

SEQ ID NO: 183286 - protein, 17 aa, Artificial Sequence
  Description of Artificial Sequence: Synthetic peptide
  Seed: GMMMGMFNMLSTVLGVS
GMMMGMINMMSGVLGVS

SEQ ID NO: 183287 - protein, 17 aa, Artificial Sequence
  Description of Artificial Sequence: Synthetic peptide
  Seed: GMMMGMFNMLSTVLGVS
GMMMGMINMMSGVLHVS

SEQ ID NO: 183288 - protein, 17 aa, Artificial Sequence
  Description of Artificial Sequence: Synthetic peptide
  Seed: GMMMGMFNMLSTVLGVS
GMMMGMINMMSGVLIVS

SEQ ID NO: 183289 - protein, 17 aa, Artificial Sequence
  Description of Artificial Sequence: Synthetic peptide
  Seed: GMMMGMFNMLSTVLGVS
GMMMGMINMMSGVLKVS

SEQ ID NO: 183290 - protein, 17 aa, Artificial Sequence
  Description of Artificial Sequence: Synthetic peptide
  Seed: GMMMGMFNMLSTVLGVS
GMMMGMINMMSGVLLVS

SEQ ID NO: 183291 - protein, 17 aa, Artificial Sequence
  Description of Artificial Sequence: Synthetic peptide
  Seed: GMMMGMFNMLSTVLGVS
GMMMGMINMMSGVLMVS

SEQ ID NO: 183292 - protein, 17 aa, Artificial Sequence
  Description of Artificial Sequence: Synthetic peptide
  Seed: GMMMGMFNMLSTVLGVS
GMMMGMINMMSGVLNVS

SEQ ID NO: 183293 - protein, 17 aa, Artificial Sequence
  Description of Artificial Sequence: Synthetic peptide
  Seed: GMMMGMFNMLSTVLGVS
GMMMGMINMMSGVLPVS

SEQ ID NO: 183294 - protein, 17 aa, Artificial Sequence
  Description of Artificial Sequence: Synthetic peptide
  Seed: GMMMGMFNMLSTVLGVS
GMMMGMINMMSGVLRVS

SEQ ID NO: 183295 - protein, 17 aa, Artificial Sequence
  Description of Artificial Sequence: Synthetic peptide
  Seed: GMMMGMFNMLSTVLGVS
GMMMGMINMMSGVLSVS

SEQ ID NO: 183296 - protein, 17 aa, Artificial Sequence
  Description of Artificial Sequence: Synthetic peptide
  Seed: GMMMGMFNMLSTVLGVS
GMMMGMINMMSGVLTVS

SEQ ID NO: 183297 - protein, 17 aa, Artificial Sequence
  Description of Artificial Sequence: Synthetic peptide
  Seed: GMMMGMFNMLSTVLGVS
GMMMGMINMMSGVLVVS

SEQ ID NO: 183298 - protein, 17 aa, Artificial Sequence
  Description of Artificial Sequence: Synthetic peptide
  Seed: GMMMGMFNMLSTVLGVS
GMMMGMINMMSHVLNVS

SEQ ID NO: 183299 - protein, 17 aa, Artificial Sequence
  Description of Artificial Sequence: Synthetic peptide
  Seed: GMMMGMFNMLSTVLGVS
GMMMGMINMMSKVLHVS

SEQ ID NO: 183300 - protein, 17 aa, Artificial Sequence
  Description of Artificial Sequence: Synthetic peptide
  Seed: GMMMGMFNMLSTVLGVS
GMMMGMINMMSKVLKVS

SEQ ID NO: 183301 - protein, 17 aa, Artificial Sequence
  Description of Artificial Sequence: Synthetic peptide
  Seed: GMMMGMFNMLSTVLGVS
GMMMGMINMMSKVLNVS

SEQ ID NO: 183302 - protein, 17 aa, Artificial Sequence
  Description of Artificial Sequence: Synthetic peptide
  Seed: GMMMGMFNMLSTVLGVS
GMMMGMINMMSKVLRVS

SEQ ID NO: 183303 - protein, 17 aa, Artificial Sequence
  Description of Artificial Sequence: Synthetic peptide
  Seed: GMMMGMFNMLSTVLGVS
GMMMGMINMMSKVLSVS

SEQ ID NO: 183304 - protein, 17 aa, Artificial Sequence
  Description of Artificial Sequence: Synthetic peptide
  Seed: GMMMGMFNMLSTVLGVS
GMMMGMINMMSNVLAVS

SEQ ID NO: 183305 - protein, 17 aa, Artificial Sequence
  Description of Artificial Sequence: Synthetic peptide
  Seed: GMMMGMFNMLSTVLGVS
GMMMGMINMMSNVLDVS

SEQ ID NO: 183306 - protein, 17 aa, Artificial Sequence
  Description of Artificial Sequence: Synthetic peptide
  Seed: GMMMGMFNMLSTVLGVS
GMMMGMINMMSNVLEVS

SEQ ID NO: 183307 - protein, 17 aa, Artificial Sequence
  Description of Artificial Sequence: Synthetic peptide
  Seed: GMMMGMFNMLSTVLGVS
GMMMGMINMMSNVLGVS

SEQ ID NO: 183308 - protein, 17 aa, Artificial Sequence
  Description of Artificial Sequence: Synthetic peptide
  Seed: GMMMGMFNMLSTVLGVS
GMMMGMINMMSNVLHVS

SEQ ID NO: 183309 - protein, 17 aa, Artificial Sequence
  Description of Artificial Sequence: Synthetic peptide
  Seed: GMMMGMFNMLSTVLGVS
GMMMGMINMMSNVLIVS

SEQ ID NO: 183310 - protein, 17 aa, Artificial Sequence
  Description of Artificial Sequence: Synthetic peptide
  Seed: GMMMGMFNMLSTVLGVS
GMMMGMINMMSNVLKVS

SEQ ID NO: 183311 - protein, 17 aa, Artificial Sequence
  Description of Artificial Sequence: Synthetic peptide
  Seed: GMMMGMFNMLSTVLGVS
GMMMGMINMMSNVLLVS

SEQ ID NO: 183312 - protein, 17 aa, Artificial Sequence
  Description of Artificial Sequence: Synthetic peptide
  Seed: GMMMGMFNMLSTVLGVS
GMMMGMINMMSNVLNVS

SEQ ID NO: 183313 - protein, 17 aa, Artificial Sequence
  Description of Artificial Sequence: Synthetic peptide
  Seed: GMMMGMFNMLSTVLGVS
GMMMGMINMMSNVLPVS

SEQ ID NO: 183314 - protein, 17 aa, Artificial Sequence
  Description of Artificial Sequence: Synthetic peptide
  Seed: GMMMGMFNMLSTVLGVS
GMMMGMINMMSNVLQVS

SEQ ID NO: 183315 - protein, 17 aa, Artificial Sequence
  Description of Artificial Sequence: Synthetic peptide
  Seed: GMMMGMFNMLSTVLGVS
GMMMGMINMMSNVLRVS

SEQ ID NO: 183316 - protein, 17 aa, Artificial Sequence
  Description of Artificial Sequence: Synthetic peptide
  Seed: GMMMGMFNMLSTVLGVS
GMMMGMINMMSNVLSVS

SEQ ID NO: 183317 - protein, 17 aa, Artificial Sequence
  Description of Artificial Sequence: Synthetic peptide
  Seed: GMMMGMFNMLSTVLGVS
GMMMGMINMMSNVLTVS

SEQ ID NO: 183318 - protein, 17 aa, Artificial Sequence
  Description of Artificial Sequence: Synthetic peptide
  Seed: GMMMGMFNMLSTVLGVS
GMMMGMINMMSNVLVVS

SEQ ID NO: 183319 - protein, 17 aa, Artificial Sequence
  Description of Artificial Sequence: Synthetic peptide
  Seed: GMMMGMFNMLSTVLGVS
GMMMGMINMMSPVLAVS

SEQ ID NO: 183320 - protein, 17 aa, Artificial Sequence
  Description of Artificial Sequence: Synthetic peptide
  Seed: GMMMGMFNMLSTVLGVS
GMMMGMINMMSPVLCVS

SEQ ID NO: 183321 - protein, 17 aa, Artificial Sequence
  Description of Artificial Sequence: Synthetic peptide
  Seed: GMMMGMFNMLSTVLGVS
GMMMGMINMMSPVLDVS

SEQ ID NO: 183322 - protein, 17 aa, Artificial Sequence
  Description of Artificial Sequence: Synthetic peptide
  Seed: GMMMGMFNMLSTVLGVS
GMMMGMINMMSPVLEVS

SEQ ID NO: 183323 - protein, 17 aa, Artificial Sequence
  Description of Artificial Sequence: Synthetic peptide
  Seed: GMMMGMFNMLSTVLGVS
GMMMGMINMMSPVLFVS

SEQ ID NO: 183324 - protein, 17 aa, Artificial Sequence
  Description of Artificial Sequence: Synthetic peptide
  Seed: GMMMGMFNMLSTVLGVS
GMMMGMINMMSPVLGVS

SEQ ID NO: 183325 - protein, 17 aa, Artificial Sequence
  Description of Artificial Sequence: Synthetic peptide
  Seed: GMMMGMFNMLSTVLGVS
GMMMGMINMMSPVLHVS

SEQ ID NO: 183326 - protein, 17 aa, Artificial Sequence
  Description of Artificial Sequence: Synthetic peptide
  Seed: GMMMGMFNMLSTVLGVS
GMMMGMINMMSPVLIVS

SEQ ID NO: 183327 - protein, 17 aa, Artificial Sequence
  Description of Artificial Sequence: Synthetic peptide
  Seed: GMMMGMFNMLSTVLGVS
GMMMGMINMMSPVLKVS

SEQ ID NO: 183328 - protein, 17 aa, Artificial Sequence
  Description of Artificial Sequence: Synthetic peptide
  Seed: GMMMGMFNMLSTVLGVS
GMMMGMINMMSPVLLVS

SEQ ID NO: 183329 - protein, 17 aa, Artificial Sequence
  Description of Artificial Sequence: Synthetic peptide
  Seed: GMMMGMFNMLSTVLGVS
GMMMGMINMMSPVLMVS

SEQ ID NO: 183330 - protein, 17 aa, Artificial Sequence
  Description of Artificial Sequence: Synthetic peptide
  Seed: GMMMGMFNMLSTVLGVS
GMMMGMINMMSPVLNVS

SEQ ID NO: 183331 - protein, 17 aa, Artificial Sequence
  Description of Artificial Sequence: Synthetic peptide
  Seed: GMMMGMFNMLSTVLGVS
GMMMGMINMMSPVLPVS

SEQ ID NO: 183332 - protein, 17 aa, Artificial Sequence
  Description of Artificial Sequence: Synthetic peptide
  Seed: GMMMGMFNMLSTVLGVS
GMMMGMINMMSPVLQVS

SEQ ID NO: 183333 - protein, 17 aa, Artificial Sequence
  Description of Artificial Sequence: Synthetic peptide
  Seed: GMMMGMFNMLSTVLGVS
GMMMGMINMMSPVLRVS

SEQ ID NO: 183334 - protein, 17 aa, Artificial Sequence
  Description of Artificial Sequence: Synthetic peptide
  Seed: GMMMGMFNMLSTVLGVS
GMMMGMINMMSPVLSVS

SEQ ID NO: 183335 - protein, 17 aa, Artificial Sequence
  Description of Artificial Sequence: Synthetic peptide
  Seed: GMMMGMFNMLSTVLGVS
GMMMGMINMMSPVLTVS

SEQ ID NO: 183336 - protein, 17 aa, Artificial Sequence
  Description of Artificial Sequence: Synthetic peptide
  Seed: GMMMGMFNMLSTVLGVS
GMMMGMINMMSPVLVVS

SEQ ID NO: 183337 - protein, 17 aa, Artificial Sequence
  Description of Artificial Sequence: Synthetic peptide
  Seed: GMMMGMFNMLSTVLGVS
GMMMGMINMMSPVLYVS

SEQ ID NO: 183338 - protein, 17 aa, Artificial Sequence
  Description of Artificial Sequence: Synthetic peptide
  Seed: GMMMGMFNMLSTVLGVS
GMMMGMINMMSRVLAVS

SEQ ID NO: 183339 - protein, 17 aa, Artificial Sequence
  Description of Artificial Sequence: Synthetic peptide
  Seed: GMMMGMFNMLSTVLGVS
GMMMGMINMMSRVLDVS

SEQ ID NO: 183340 - protein, 17 aa, Artificial Sequence
  Description of Artificial Sequence: Synthetic peptide
  Seed: GMMMGMFNMLSTVLGVS
GMMMGMINMMSRVLHVS

SEQ ID NO: 183341 - protein, 17 aa, Artificial Sequence
  Description of Artificial Sequence: Synthetic peptide
  Seed: GMMMGMFNMLSTVLGVS
GMMMGMINMMSRVLKVS

SEQ ID NO: 183342 - protein, 17 aa, Artificial Sequence
  Description of Artificial Sequence: Synthetic peptide
  Seed: GMMMGMFNMLSTVLGVS
GMMMGMINMMSRVLNVS

SEQ ID NO: 183343 - protein, 17 aa, Artificial Sequence
  Description of Artificial Sequence: Synthetic peptide
  Seed: GMMMGMFNMLSTVLGVS
GMMMGMINMMSRVLRVS

SEQ ID NO: 183344 - protein, 17 aa, Artificial Sequence
  Description of Artificial Sequence: Synthetic peptide
  Seed: GMMMGMFNMLSTVLGVS
GMMMGMINMMSRVLSVS

SEQ ID NO: 183345 - protein, 17 aa, Artificial Sequence
  Description of Artificial Sequence: Synthetic peptide
  Seed: GMMMGMFNMLSTVLGVS
GMMMGMINMMSSVLAVS

SEQ ID NO: 183346 - protein, 17 aa, Artificial Sequence
  Description of Artificial Sequence: Synthetic peptide
  Seed: GMMMGMFNMLSTVLGVS
GMMMGMINMMSSVLGVS

SEQ ID NO: 183347 - protein, 17 aa, Artificial Sequence
  Description of Artificial Sequence: Synthetic peptide
  Seed: GMMMGMFNMLSTVLGVS
GMMMGMINMMSSVLHVS

SEQ ID NO: 183348 - protein, 17 aa, Artificial Sequence
  Description of Artificial Sequence: Synthetic peptide
  Seed: GMMMGMFNMLSTVLGVS
GMMMGMINMMSSVLKVS

SEQ ID NO: 183349 - protein, 17 aa, Artificial Sequence
  Description of Artificial Sequence: Synthetic peptide
  Seed: GMMMGMFNMLSTVLGVS
GMMMGMINMMSSVLLVS

SEQ ID NO: 183350 - protein, 17 aa, Artificial Sequence
  Description of Artificial Sequence: Synthetic peptide
  Seed: GMMMGMFNMLSTVLGVS
GMMMGMINMMSSVLNVS

SEQ ID NO: 183351 - protein, 17 aa, Artificial Sequence
  Description of Artificial Sequence: Synthetic peptide
  Seed: GMMMGMFNMLSTVLGVS
GMMMGMINMMSSVLSVS

SEQ ID NO: 183352 - protein, 17 aa, Artificial Sequence
  Description of Artificial Sequence: Synthetic peptide
  Seed: GMMMGMFNMLSTVLGVS
GMMMGMINMMSSVLTVS

SEQ ID NO: 183353 - protein, 17 aa, Artificial Sequence
  Description of Artificial Sequence: Synthetic peptide
  Seed: GMMMGMFNMLSTVLGVS
GMMMGMINMMSSVLVVS

SEQ ID NO: 183354 - protein, 17 aa, Artificial Sequence
  Description of Artificial Sequence: Synthetic peptide
  Seed: GMMMGMFNMLSTVLGVS
GMMMGMINMMSTVLAVS

SEQ ID NO: 183355 - protein, 17 aa, Artificial Sequence
  Description of Artificial Sequence: Synthetic peptide
  Seed: GMMMGMFNMLSTVLGVS
GMMMGMINMMSTVLHVS

SEQ ID NO: 183356 - protein, 17 aa, Artificial Sequence
  Description of Artificial Sequence: Synthetic peptide
  Seed: GMMMGMFNMLSTVLGVS
GMMMGMINMMSTVLNVS

SEQ ID NO: 183357 - protein, 17 aa, Artificial Sequence
  Description of Artificial Sequence: Synthetic peptide
  Seed: GMMMGMFNMLSTVLGVS
GMMMGMINMMSTVLSVS

SEQ ID NO: 183358 - protein, 17 aa, Artificial Sequence
  Description of Artificial Sequence: Synthetic peptide
  Seed: GMMMGMFNMLSTVLGVS
GMMMGMINMMSVVLHVS

SEQ ID NO: 183359 - protein, 17 aa, Artificial Sequence
  Description of Artificial Sequence: Synthetic peptide
  Seed: GMMMGMFNMLSTVLGVS
GMMMGMINMNSAVLAVS

SEQ ID NO: 183360 - protein, 17 aa, Artificial Sequence
  Description of Artificial Sequence: Synthetic peptide
  Seed: GMMMGMFNMLSTVLGVS
GMMMGMINMNSAVLFVS

SEQ ID NO: 183361 - protein, 17 aa, Artificial Sequence
  Description of Artificial Sequence: Synthetic peptide
  Seed: GMMMGMFNMLSTVLGVS
GMMMGMINMNSAVLGVS

SEQ ID NO: 183362 - protein, 17 aa, Artificial Sequence
  Description of Artificial Sequence: Synthetic peptide
  Seed: GMMMGMFNMLSTVLGVS
GMMMGMINMNSAVLHVS

SEQ ID NO: 183363 - protein, 17 aa, Artificial Sequence
  Description of Artificial Sequence: Synthetic peptide
  Seed: GMMMGMFNMLSTVLGVS
GMMMGMINMNSAVLIVS

SEQ ID NO: 183364 - protein, 17 aa, Artificial Sequence
  Description of Artificial Sequence: Synthetic peptide
  Seed: GMMMGMFNMLSTVLGVS
GMMMGMINMNSAVLKVS

SEQ ID NO: 183365 - protein, 17 aa, Artificial Sequence
  Description of Artificial Sequence: Synthetic peptide
  Seed: GMMMGMFNMLSTVLGVS
GMMMGMINMNSAVLLVS

SEQ ID NO: 183366 - protein, 17 aa, Artificial Sequence
  Description of Artificial Sequence: Synthetic peptide
  Seed: GMMMGMFNMLSTVLGVS
GMMMGMINMNSAVLMVS

SEQ ID NO: 183367 - protein, 17 aa, Artificial Sequence
  Description of Artificial Sequence: Synthetic peptide
  Seed: GMMMGMFNMLSTVLGVS
GMMMGMINMNSAVLNVS

SEQ ID NO: 183368 - protein, 17 aa, Artificial Sequence
  Description of Artificial Sequence: Synthetic peptide
  Seed: GMMMGMFNMLSTVLGVS
GMMMGMINMNSAVLQVS

SEQ ID NO: 183369 - protein, 17 aa, Artificial Sequence
  Description of Artificial Sequence: Synthetic peptide
  Seed: GMMMGMFNMLSTVLGVS
GMMMGMINMNSAVLRVS

SEQ ID NO: 183370 - protein, 17 aa, Artificial Sequence
  Description of Artificial Sequence: Synthetic peptide
  Seed: GMMMGMFNMLSTVLGVS
GMMMGMINMNSAVLSVS

SEQ ID NO: 183371 - protein, 17 aa, Artificial Sequence
  Description of Artificial Sequence: Synthetic peptide
  Seed: GMMMGMFNMLSTVLGVS
GMMMGMINMNSAVLTVS

SEQ ID NO: 183372 - protein, 17 aa, Artificial Sequence
  Description of Artificial Sequence: Synthetic peptide
  Seed: GMMMGMFNMLSTVLGVS
GMMMGMINMNSAVLVVS

SEQ ID NO: 183373 - protein, 17 aa, Artificial Sequence
  Description of Artificial Sequence: Synthetic peptide
  Seed: GMMMGMFNMLSTVLGVS
GMMMGMINMNSAVLYVS

SEQ ID NO: 183374 - protein, 17 aa, Artificial Sequence
  Description of Artificial Sequence: Synthetic peptide
  Seed: GMMMGMFNMLSTVLGVS
GMMMGMINMNSGVLAVS

SEQ ID NO: 183375 - protein, 17 aa, Artificial Sequence
  Description of Artificial Sequence: Synthetic peptide
  Seed: GMMMGMFNMLSTVLGVS
GMMMGMINMNSGVLFVS

SEQ ID NO: 183376 - protein, 17 aa, Artificial Sequence
  Description of Artificial Sequence: Synthetic peptide
  Seed: GMMMGMFNMLSTVLGVS
GMMMGMINMNSGVLHVS

SEQ ID NO: 183377 - protein, 17 aa, Artificial Sequence
  Description of Artificial Sequence: Synthetic peptide
  Seed: GMMMGMFNMLSTVLGVS
GMMMGMINMNSGVLIVS

SEQ ID NO: 183378 - protein, 17 aa, Artificial Sequence
  Description of Artificial Sequence: Synthetic peptide
  Seed: GMMMGMFNMLSTVLGVS
GMMMGMINMNSGVLLVS

SEQ ID NO: 183379 - protein, 17 aa, Artificial Sequence
  Description of Artificial Sequence: Synthetic peptide
  Seed: GMMMGMFNMLSTVLGVS
GMMMGMINMNSGVLMVS

SEQ ID NO: 183380 - protein, 17 aa, Artificial Sequence
  Description of Artificial Sequence: Synthetic peptide
  Seed: GMMMGMFNMLSTVLGVS
GMMMGMINMNSGVLSVS

SEQ ID NO: 183381 - protein, 17 aa, Artificial Sequence
  Description of Artificial Sequence: Synthetic peptide
  Seed: GMMMGMFNMLSTVLGVS
GMMMGMINMNSGVLTVS

SEQ ID NO: 183382 - protein, 17 aa, Artificial Sequence
  Description of Artificial Sequence: Synthetic peptide
  Seed: GMMMGMFNMLSTVLGVS
GMMMGMINMNSGVLVVS

SEQ ID NO: 183383 - protein, 17 aa, Artificial Sequence
  Description of Artificial Sequence: Synthetic peptide
  Seed: GMMMGMFNMLSTVLGVS
GMMMGMINMNSGVLYVS

SEQ ID NO: 183384 - protein, 17 aa, Artificial Sequence
  Description of Artificial Sequence: Synthetic peptide
  Seed: GMMMGMFNMLSTVLGVS
GMMMGMINMNSHVLAVS

SEQ ID NO: 183385 - protein, 17 aa, Artificial Sequence
  Description of Artificial Sequence: Synthetic peptide
  Seed: GMMMGMFNMLSTVLGVS
GMMMGMINMNSHVLFVS

SEQ ID NO: 183386 - protein, 17 aa, Artificial Sequence
  Description of Artificial Sequence: Synthetic peptide
  Seed: GMMMGMFNMLSTVLGVS
GMMMGMINMNSHVLIVS

SEQ ID NO: 183387 - protein, 17 aa, Artificial Sequence
  Description of Artificial Sequence: Synthetic peptide
  Seed: GMMMGMFNMLSTVLGVS
GMMMGMINMNSHVLLVS

SEQ ID NO: 183388 - protein, 17 aa, Artificial Sequence
  Description of Artificial Sequence: Synthetic peptide
  Seed: GMMMGMFNMLSTVLGVS
GMMMGMINMNSHVLMVS

SEQ ID NO: 183389 - protein, 17 aa, Artificial Sequence
  Description of Artificial Sequence: Synthetic peptide
  Seed: GMMMGMFNMLSTVLGVS
GMMMGMINMNSHVLSVS

SEQ ID NO: 183390 - protein, 17 aa, Artificial Sequence
  Description of Artificial Sequence: Synthetic peptide
  Seed: GMMMGMFNMLSTVLGVS
GMMMGMINMNSHVLVVS

SEQ ID NO: 183391 - protein, 17 aa, Artificial Sequence
  Description of Artificial Sequence: Synthetic peptide
  Seed: GMMMGMFNMLSTVLGVS
GMMMGMINMNSHVLYVS

SEQ ID NO: 183392 - protein, 17 aa, Artificial Sequence
  Description of Artificial Sequence: Synthetic peptide
  Seed: GMMMGMFNMLSTVLGVS
GMMMGMINMNSIVLHVS

SEQ ID NO: 183393 - protein, 17 aa, Artificial Sequence
  Description of Artificial Sequence: Synthetic peptide
  Seed: GMMMGMFNMLSTVLGVS
GMMMGMINMNSIVLIVS

SEQ ID NO: 183394 - protein, 17 aa, Artificial Sequence
  Description of Artificial Sequence: Synthetic peptide
  Seed: GMMMGMFNMLSTVLGVS
GMMMGMINMNSIVLKVS

SEQ ID NO: 183395 - protein, 17 aa, Artificial Sequence
  Description of Artificial Sequence: Synthetic peptide
  Seed: GMMMGMFNMLSTVLGVS
GMMMGMINMNSIVLRVS

SEQ ID NO: 183396 - protein, 17 aa, Artificial Sequence
  Description of Artificial Sequence: Synthetic peptide
  Seed: GMMMGMFNMLSTVLGVS
GMMMGMINMNSIVLVVS

SEQ ID NO: 183397 - protein, 17 aa, Artificial Sequence
  Description of Artificial Sequence: Synthetic peptide
  Seed: GMMMGMFNMLSTVLGVS
GMMMGMINMNSIVLYVS

SEQ ID NO: 183398 - protein, 17 aa, Artificial Sequence
  Description of Artificial Sequence: Synthetic peptide
  Seed: GMMMGMFNMLSTVLGVS
GMMMGMINMNSKVLFVS

SEQ ID NO: 183399 - protein, 17 aa, Artificial Sequence
  Description of Artificial Sequence: Synthetic peptide
  Seed: GMMMGMFNMLSTVLGVS
GMMMGMINMNSKVLIVS

SEQ ID NO: 183400 - protein, 17 aa, Artificial Sequence
  Description of Artificial Sequence: Synthetic peptide
  Seed: GMMMGMFNMLSTVLGVS
GMMMGMINMNSKVLLVS

SEQ ID NO: 183401 - protein, 17 aa, Artificial Sequence
  Description of Artificial Sequence: Synthetic peptide
  Seed: GMMMGMFNMLSTVLGVS
GMMMGMINMNSKVLVVS

SEQ ID NO: 183402 - protein, 17 aa, Artificial Sequence
  Description of Artificial Sequence: Synthetic peptide
  Seed: GMMMGMFNMLSTVLGVS
GMMMGMINMNSKVLYVS

SEQ ID NO: 183403 - protein, 17 aa, Artificial Sequence
  Description of Artificial Sequence: Synthetic peptide
  Seed: GMMMGMFNMLSTVLGVS
GMMMGMINMNSLVLYVS

SEQ ID NO: 183404 - protein, 17 aa, Artificial Sequence
  Description of Artificial Sequence: Synthetic peptide
  Seed: GMMMGMFNMLSTVLGVS
GMMMGMINMNSMVLVVS

SEQ ID NO: 183405 - protein, 17 aa, Artificial Sequence
  Description of Artificial Sequence: Synthetic peptide
  Seed: GMMMGMFNMLSTVLGVS
GMMMGMINMNSMVLYVS

SEQ ID NO: 183406 - protein, 17 aa, Artificial Sequence
  Description of Artificial Sequence: Synthetic peptide
  Seed: GMMMGMFNMLSTVLGVS
GMMMGMINMNSNVLAVS

SEQ ID NO: 183407 - protein, 17 aa, Artificial Sequence
  Description of Artificial Sequence: Synthetic peptide
  Seed: GMMMGMFNMLSTVLGVS
GMMMGMINMNSNVLFVS

SEQ ID NO: 183408 - protein, 17 aa, Artificial Sequence
  Description of Artificial Sequence: Synthetic peptide
  Seed: GMMMGMFNMLSTVLGVS
GMMMGMINMNSNVLHVS

SEQ ID NO: 183409 - protein, 17 aa, Artificial Sequence
  Description of Artificial Sequence: Synthetic peptide
  Seed: GMMMGMFNMLSTVLGVS
GMMMGMINMNSNVLIVS

SEQ ID NO: 183410 - protein, 17 aa, Artificial Sequence
  Description of Artificial Sequence: Synthetic peptide
  Seed: GMMMGMFNMLSTVLGVS
GMMMGMINMNSNVLKVS

SEQ ID NO: 183411 - protein, 17 aa, Artificial Sequence
  Description of Artificial Sequence: Synthetic peptide
  Seed: GMMMGMFNMLSTVLGVS
GMMMGMINMNSNVLLVS

SEQ ID NO: 183412 - protein, 17 aa, Artificial Sequence
  Description of Artificial Sequence: Synthetic peptide
  Seed: GMMMGMFNMLSTVLGVS
GMMMGMINMNSNVLMVS

SEQ ID NO: 183413 - protein, 17 aa, Artificial Sequence
  Description of Artificial Sequence: Synthetic peptide
  Seed: GMMMGMFNMLSTVLGVS
GMMMGMINMNSNVLNVS

SEQ ID NO: 183414 - protein, 17 aa, Artificial Sequence
  Description of Artificial Sequence: Synthetic peptide
  Seed: GMMMGMFNMLSTVLGVS
GMMMGMINMNSNVLQVS

SEQ ID NO: 183415 - protein, 17 aa, Artificial Sequence
  Description of Artificial Sequence: Synthetic peptide
  Seed: GMMMGMFNMLSTVLGVS
GMMMGMINMNSNVLRVS

SEQ ID NO: 183416 - protein, 17 aa, Artificial Sequence
  Description of Artificial Sequence: Synthetic peptide
  Seed: GMMMGMFNMLSTVLGVS
GMMMGMINMNSNVLSVS

SEQ ID NO: 183417 - protein, 17 aa, Artificial Sequence
  Description of Artificial Sequence: Synthetic peptide
  Seed: GMMMGMFNMLSTVLGVS
GMMMGMINMNSNVLTVS

SEQ ID NO: 183418 - protein, 17 aa, Artificial Sequence
  Description of Artificial Sequence: Synthetic peptide
  Seed: GMMMGMFNMLSTVLGVS
GMMMGMINMNSNVLVVS

SEQ ID NO: 183419 - protein, 17 aa, Artificial Sequence
  Description of Artificial Sequence: Synthetic peptide
  Seed: GMMMGMFNMLSTVLGVS
GMMMGMINMNSNVLYVS

SEQ ID NO: 183420 - protein, 17 aa, Artificial Sequence
  Description of Artificial Sequence: Synthetic peptide
  Seed: GMMMGMFNMLSTVLGVS
GMMMGMINMNSPVLAVS

SEQ ID NO: 183421 - protein, 17 aa, Artificial Sequence
  Description of Artificial Sequence: Synthetic peptide
  Seed: GMMMGMFNMLSTVLGVS
GMMMGMINMNSPVLFVS

SEQ ID NO: 183422 - protein, 17 aa, Artificial Sequence
  Description of Artificial Sequence: Synthetic peptide
  Seed: GMMMGMFNMLSTVLGVS
GMMMGMINMNSPVLHVS

SEQ ID NO: 183423 - protein, 17 aa, Artificial Sequence
  Description of Artificial Sequence: Synthetic peptide
  Seed: GMMMGMFNMLSTVLGVS
GMMMGMINMNSPVLIVS

SEQ ID NO: 183424 - protein, 17 aa, Artificial Sequence
  Description of Artificial Sequence: Synthetic peptide
  Seed: GMMMGMFNMLSTVLGVS
GMMMGMINMNSPVLKVS

SEQ ID NO: 183425 - protein, 17 aa, Artificial Sequence
  Description of Artificial Sequence: Synthetic peptide
  Seed: GMMMGMFNMLSTVLGVS
GMMMGMINMNSPVLLVS

SEQ ID NO: 183426 - protein, 17 aa, Artificial Sequence
  Description of Artificial Sequence: Synthetic peptide
  Seed: GMMMGMFNMLSTVLGVS
GMMMGMINMNSPVLMVS

SEQ ID NO: 183427 - protein, 17 aa, Artificial Sequence
  Description of Artificial Sequence: Synthetic peptide
  Seed: GMMMGMFNMLSTVLGVS
GMMMGMINMNSPVLNVS

SEQ ID NO: 183428 - protein, 17 aa, Artificial Sequence
  Description of Artificial Sequence: Synthetic peptide
  Seed: GMMMGMFNMLSTVLGVS
GMMMGMINMNSPVLQVS

SEQ ID NO: 183429 - protein, 17 aa, Artificial Sequence
  Description of Artificial Sequence: Synthetic peptide
  Seed: GMMMGMFNMLSTVLGVS
GMMMGMINMNSPVLRVS

SEQ ID NO: 183430 - protein, 17 aa, Artificial Sequence
  Description of Artificial Sequence: Synthetic peptide
  Seed: GMMMGMFNMLSTVLGVS
GMMMGMINMNSPVLSVS

SEQ ID NO: 183431 - protein, 17 aa, Artificial Sequence
  Description of Artificial Sequence: Synthetic peptide
  Seed: GMMMGMFNMLSTVLGVS
GMMMGMINMNSPVLTVS

SEQ ID NO: 183432 - protein, 17 aa, Artificial Sequence
  Description of Artificial Sequence: Synthetic peptide
  Seed: GMMMGMFNMLSTVLGVS
GMMMGMINMNSPVLVVS

SEQ ID NO: 183433 - protein, 17 aa, Artificial Sequence
  Description of Artificial Sequence: Synthetic peptide
  Seed: GMMMGMFNMLSTVLGVS
GMMMGMINMNSPVLWVS

SEQ ID NO: 183434 - protein, 17 aa, Artificial Sequence
  Description of Artificial Sequence: Synthetic peptide
  Seed: GMMMGMFNMLSTVLGVS
GMMMGMINMNSPVLYVS

SEQ ID NO: 183435 - protein, 17 aa, Artificial Sequence
  Description of Artificial Sequence: Synthetic peptide
  Seed: GMMMGMFNMLSTVLGVS
GMMMGMINMNSQVLIVS

SEQ ID NO: 183436 - protein, 17 aa, Artificial Sequence
  Description of Artificial Sequence: Synthetic peptide
  Seed: GMMMGMFNMLSTVLGVS
GMMMGMINMNSQVLVVS

SEQ ID NO: 183437 - protein, 17 aa, Artificial Sequence
  Description of Artificial Sequence: Synthetic peptide
  Seed: GMMMGMFNMLSTVLGVS
GMMMGMINMNSRVLAVS

SEQ ID NO: 183438 - protein, 17 aa, Artificial Sequence
  Description of Artificial Sequence: Synthetic peptide
  Seed: GMMMGMFNMLSTVLGVS
GMMMGMINMNSRVLFVS

SEQ ID NO: 183439 - protein, 17 aa, Artificial Sequence
  Description of Artificial Sequence: Synthetic peptide
  Seed: GMMMGMFNMLSTVLGVS
GMMMGMINMNSRVLIVS

SEQ ID NO: 183440 - protein, 17 aa, Artificial Sequence
  Description of Artificial Sequence: Synthetic peptide
  Seed: GMMMGMFNMLSTVLGVS
GMMMGMINMNSRVLLVS

SEQ ID NO: 183441 - protein, 17 aa, Artificial Sequence
  Description of Artificial Sequence: Synthetic peptide
  Seed: GMMMGMFNMLSTVLGVS
GMMMGMINMNSRVLMVS

SEQ ID NO: 183442 - protein, 17 aa, Artificial Sequence
  Description of Artificial Sequence: Synthetic peptide
  Seed: GMMMGMFNMLSTVLGVS
GMMMGMINMNSRVLVVS

SEQ ID NO: 183443 - protein, 17 aa, Artificial Sequence
  Description of Artificial Sequence: Synthetic peptide
  Seed: GMMMGMFNMLSTVLGVS
GMMMGMINMNSRVLYVS

SEQ ID NO: 183444 - protein, 17 aa, Artificial Sequence
  Description of Artificial Sequence: Synthetic peptide
  Seed: GMMMGMFNMLSTVLGVS
GMMMGMINMNSSVLAVS

SEQ ID NO: 183445 - protein, 17 aa, Artificial Sequence
  Description of Artificial Sequence: Synthetic peptide
  Seed: GMMMGMFNMLSTVLGVS
GMMMGMINMNSSVLFVS

SEQ ID NO: 183446 - protein, 17 aa, Artificial Sequence
  Description of Artificial Sequence: Synthetic peptide
  Seed: GMMMGMFNMLSTVLGVS
GMMMGMINMNSSVLHVS

SEQ ID NO: 183447 - protein, 17 aa, Artificial Sequence
  Description of Artificial Sequence: Synthetic peptide
  Seed: GMMMGMFNMLSTVLGVS
GMMMGMINMNSSVLIVS

SEQ ID NO: 183448 - protein, 17 aa, Artificial Sequence
  Description of Artificial Sequence: Synthetic peptide
  Seed: GMMMGMFNMLSTVLGVS
GMMMGMINMNSSVLKVS

SEQ ID NO: 183449 - protein, 17 aa, Artificial Sequence
  Description of Artificial Sequence: Synthetic peptide
  Seed: GMMMGMFNMLSTVLGVS
GMMMGMINMNSSVLLVS

SEQ ID NO: 183450 - protein, 17 aa, Artificial Sequence
  Description of Artificial Sequence: Synthetic peptide
  Seed: GMMMGMFNMLSTVLGVS
GMMMGMINMNSSVLMVS

SEQ ID NO: 183451 - protein, 17 aa, Artificial Sequence
  Description of Artificial Sequence: Synthetic peptide
  Seed: GMMMGMFNMLSTVLGVS
GMMMGMINMNSSVLNVS

SEQ ID NO: 183452 - protein, 17 aa, Artificial Sequence
  Description of Artificial Sequence: Synthetic peptide
  Seed: GMMMGMFNMLSTVLGVS
GMMMGMINMNSSVLQVS

SEQ ID NO: 183453 - protein, 17 aa, Artificial Sequence
  Description of Artificial Sequence: Synthetic peptide
  Seed: GMMMGMFNMLSTVLGVS
GMMMGMINMNSSVLRVS

SEQ ID NO: 183454 - protein, 17 aa, Artificial Sequence
  Description of Artificial Sequence: Synthetic peptide
  Seed: GMMMGMFNMLSTVLGVS
GMMMGMINMNSSVLSVS

SEQ ID NO: 183455 - protein, 17 aa, Artificial Sequence
  Description of Artificial Sequence: Synthetic peptide
  Seed: GMMMGMFNMLSTVLGVS
GMMMGMINMNSSVLTVS

SEQ ID NO: 183456 - protein, 17 aa, Artificial Sequence
  Description of Artificial Sequence: Synthetic peptide
  Seed: GMMMGMFNMLSTVLGVS
GMMMGMINMNSSVLVVS

SEQ ID NO: 183457 - protein, 17 aa, Artificial Sequence
  Description of Artificial Sequence: Synthetic peptide
  Seed: GMMMGMFNMLSTVLGVS
GMMMGMINMNSSVLYVS

SEQ ID NO: 183458 - protein, 17 aa, Artificial Sequence
  Description of Artificial Sequence: Synthetic peptide
  Seed: GMMMGMFNMLSTVLGVS
GMMMGMINMNSTVLAVS

SEQ ID NO: 183459 - protein, 17 aa, Artificial Sequence
  Description of Artificial Sequence: Synthetic peptide
  Seed: GMMMGMFNMLSTVLGVS
GMMMGMINMNSTVLFVS

SEQ ID NO: 183460 - protein, 17 aa, Artificial Sequence
  Description of Artificial Sequence: Synthetic peptide
  Seed: GMMMGMFNMLSTVLGVS
GMMMGMINMNSTVLIVS

SEQ ID NO: 183461 - protein, 17 aa, Artificial Sequence
  Description of Artificial Sequence: Synthetic peptide
  Seed: GMMMGMFNMLSTVLGVS
GMMMGMINMNSTVLLVS

SEQ ID NO: 183462 - protein, 17 aa, Artificial Sequence
  Description of Artificial Sequence: Synthetic peptide
  Seed: GMMMGMFNMLSTVLGVS
GMMMGMINMNSTVLMVS

SEQ ID NO: 183463 - protein, 17 aa, Artificial Sequence
  Description of Artificial Sequence: Synthetic peptide
  Seed: GMMMGMFNMLSTVLGVS
GMMMGMINMNSTVLSVS

SEQ ID NO: 183464 - protein, 17 aa, Artificial Sequence
  Description of Artificial Sequence: Synthetic peptide
  Seed: GMMMGMFNMLSTVLGVS
GMMMGMINMNSTVLTVS

SEQ ID NO: 183465 - protein, 17 aa, Artificial Sequence
  Description of Artificial Sequence: Synthetic peptide
  Seed: GMMMGMFNMLSTVLGVS
GMMMGMINMNSTVLVVS

SEQ ID NO: 183466 - protein, 17 aa, Artificial Sequence
  Description of Artificial Sequence: Synthetic peptide
  Seed: GMMMGMFNMLSTVLGVS
GMMMGMINMNSTVLYVS

SEQ ID NO: 183467 - protein, 17 aa, Artificial Sequence
  Description of Artificial Sequence: Synthetic peptide
  Seed: GMMMGMFNMLSTVLGVS
GMMMGMINMNSVVLHVS

SEQ ID NO: 183468 - protein, 17 aa, Artificial Sequence
  Description of Artificial Sequence: Synthetic peptide
  Seed: GMMMGMFNMLSTVLGVS
GMMMGMINMNSVVLIVS

SEQ ID NO: 183469 - protein, 17 aa, Artificial Sequence
  Description of Artificial Sequence: Synthetic peptide
  Seed: GMMMGMFNMLSTVLGVS
GMMMGMINMNSVVLKVS

SEQ ID NO: 183470 - protein, 17 aa, Artificial Sequence
  Description of Artificial Sequence: Synthetic peptide
  Seed: GMMMGMFNMLSTVLGVS
GMMMGMINMNSVVLLVS

SEQ ID NO: 183471 - protein, 17 aa, Artificial Sequence
  Description of Artificial Sequence: Synthetic peptide
  Seed: GMMMGMFNMLSTVLGVS
GMMMGMINMNSVVLRVS

SEQ ID NO: 183472 - protein, 17 aa, Artificial Sequence
  Description of Artificial Sequence: Synthetic peptide
  Seed: GMMMGMFNMLSTVLGVS
GMMMGMINMNSVVLVVS

SEQ ID NO: 183473 - protein, 17 aa, Artificial Sequence
  Description of Artificial Sequence: Synthetic peptide
  Seed: GMMMGMFNMLSTVLGVS
GMMMGMINMNSVVLYVS

SEQ ID NO: 183474 - protein, 17 aa, Artificial Sequence
  Description of Artificial Sequence: Synthetic peptide
  Seed: GMMMGMFNMLSTVLGVS
GMMMGMINMQSAVLAVS

SEQ ID NO: 183475 - protein, 17 aa, Artificial Sequence
  Description of Artificial Sequence: Synthetic peptide
  Seed: GMMMGMFNMLSTVLGVS
GMMMGMINMQSAVLGVS

SEQ ID NO: 183476 - protein, 17 aa, Artificial Sequence
  Description of Artificial Sequence: Synthetic peptide
  Seed: GMMMGMFNMLSTVLGVS
GMMMGMINMQSAVLHVS

SEQ ID NO: 183477 - protein, 17 aa, Artificial Sequence
  Description of Artificial Sequence: Synthetic peptide
  Seed: GMMMGMFNMLSTVLGVS
GMMMGMINMQSAVLIVS

SEQ ID NO: 183478 - protein, 17 aa, Artificial Sequence
  Description of Artificial Sequence: Synthetic peptide
  Seed: GMMMGMFNMLSTVLGVS
GMMMGMINMQSAVLLVS

SEQ ID NO: 183479 - protein, 17 aa, Artificial Sequence
  Description of Artificial Sequence: Synthetic peptide
  Seed: GMMMGMFNMLSTVLGVS
GMMMGMINMQSAVLMVS

SEQ ID NO: 183480 - protein, 17 aa, Artificial Sequence
  Description of Artificial Sequence: Synthetic peptide
  Seed: GMMMGMFNMLSTVLGVS
GMMMGMINMQSAVLNVS

SEQ ID NO: 183481 - protein, 17 aa, Artificial Sequence
  Description of Artificial Sequence: Synthetic peptide
  Seed: GMMMGMFNMLSTVLGVS
GMMMGMINMQSAVLQVS

SEQ ID NO: 183482 - protein, 17 aa, Artificial Sequence
  Description of Artificial Sequence: Synthetic peptide
  Seed: GMMMGMFNMLSTVLGVS
GMMMGMINMQSAVLSVS

SEQ ID NO: 183483 - protein, 17 aa, Artificial Sequence
  Description of Artificial Sequence: Synthetic peptide
  Seed: GMMMGMFNMLSTVLGVS
GMMMGMINMQSAVLTVS

SEQ ID NO: 183484 - protein, 17 aa, Artificial Sequence
  Description of Artificial Sequence: Synthetic peptide
  Seed: GMMMGMFNMLSTVLGVS
GMMMGMINMQSAVLVVS

SEQ ID NO: 183485 - protein, 17 aa, Artificial Sequence
  Description of Artificial Sequence: Synthetic peptide
  Seed: GMMMGMFNMLSTVLGVS
GMMMGMINMQSGVLAVS

SEQ ID NO: 183486 - protein, 17 aa, Artificial Sequence
  Description of Artificial Sequence: Synthetic peptide
  Seed: GMMMGMFNMLSTVLGVS
GMMMGMINMQSGVLGVS

SEQ ID NO: 183487 - protein, 17 aa, Artificial Sequence
  Description of Artificial Sequence: Synthetic peptide
  Seed: GMMMGMFNMLSTVLGVS
GMMMGMINMQSGVLIVS

SEQ ID NO: 183488 - protein, 17 aa, Artificial Sequence
  Description of Artificial Sequence: Synthetic peptide
  Seed: GMMMGMFNMLSTVLGVS
GMMMGMINMQSGVLLVS

SEQ ID NO: 183489 - protein, 17 aa, Artificial Sequence
  Description of Artificial Sequence: Synthetic peptide
  Seed: GMMMGMFNMLSTVLGVS
GMMMGMINMQSGVLMVS

SEQ ID NO: 183490 - protein, 17 aa, Artificial Sequence
  Description of Artificial Sequence: Synthetic peptide
  Seed: GMMMGMFNMLSTVLGVS
GMMMGMINMQSGVLNVS

SEQ ID NO: 183491 - protein, 17 aa, Artificial Sequence
  Description of Artificial Sequence: Synthetic peptide
  Seed: GMMMGMFNMLSTVLGVS
GMMMGMINMQSGVLSVS

SEQ ID NO: 183492 - protein, 17 aa, Artificial Sequence
  Description of Artificial Sequence: Synthetic peptide
  Seed: GMMMGMFNMLSTVLGVS
GMMMGMINMQSGVLTVS

SEQ ID NO: 183493 - protein, 17 aa, Artificial Sequence
  Description of Artificial Sequence: Synthetic peptide
  Seed: GMMMGMFNMLSTVLGVS
GMMMGMINMQSGVLVVS

SEQ ID NO: 183494 - protein, 17 aa, Artificial Sequence
  Description of Artificial Sequence: Synthetic peptide
  Seed: GMMMGMFNMLSTVLGVS
GMMMGMINMQSNVLGVS

SEQ ID NO: 183495 - protein, 17 aa, Artificial Sequence
  Description of Artificial Sequence: Synthetic peptide
  Seed: GMMMGMFNMLSTVLGVS
GMMMGMINMQSNVLHVS

SEQ ID NO: 183496 - protein, 17 aa, Artificial Sequence
  Description of Artificial Sequence: Synthetic peptide
  Seed: GMMMGMFNMLSTVLGVS
GMMMGMINMQSNVLLVS

SEQ ID NO: 183497 - protein, 17 aa, Artificial Sequence
  Description of Artificial Sequence: Synthetic peptide
  Seed: GMMMGMFNMLSTVLGVS
GMMMGMINMQSNVLNVS

SEQ ID NO: 183498 - protein, 17 aa, Artificial Sequence
  Description of Artificial Sequence: Synthetic peptide
  Seed: GMMMGMFNMLSTVLGVS
GMMMGMINMQSNVLQVS

SEQ ID NO: 183499 - protein, 17 aa, Artificial Sequence
  Description of Artificial Sequence: Synthetic peptide
  Seed: GMMMGMFNMLSTVLGVS
GMMMGMINMQSNVLSVS

SEQ ID NO: 183500 - protein, 17 aa, Artificial Sequence
  Description of Artificial Sequence: Synthetic peptide
  Seed: GMMMGMFNMLSTVLGVS
GMMMGMINMQSNVLVVS

SEQ ID NO: 183501 - protein, 17 aa, Artificial Sequence
  Description of Artificial Sequence: Synthetic peptide
  Seed: GMMMGMFNMLSTVLGVS
GMMMGMINMQSPVLAVS

SEQ ID NO: 183502 - protein, 17 aa, Artificial Sequence
  Description of Artificial Sequence: Synthetic peptide
  Seed: GMMMGMFNMLSTVLGVS
GMMMGMINMQSPVLHVS

SEQ ID NO: 183503 - protein, 17 aa, Artificial Sequence
  Description of Artificial Sequence: Synthetic peptide
  Seed: GMMMGMFNMLSTVLGVS
GMMMGMINMQSPVLIVS

SEQ ID NO: 183504 - protein, 17 aa, Artificial Sequence
  Description of Artificial Sequence: Synthetic peptide
  Seed: GMMMGMFNMLSTVLGVS
GMMMGMINMQSPVLLVS

SEQ ID NO: 183505 - protein, 17 aa, Artificial Sequence
  Description of Artificial Sequence: Synthetic peptide
  Seed: GMMMGMFNMLSTVLGVS
GMMMGMINMQSPVLMVS

SEQ ID NO: 183506 - protein, 17 aa, Artificial Sequence
  Description of Artificial Sequence: Synthetic peptide
  Seed: GMMMGMFNMLSTVLGVS
GMMMGMINMQSPVLNVS

SEQ ID NO: 183507 - protein, 17 aa, Artificial Sequence
  Description of Artificial Sequence: Synthetic peptide
  Seed: GMMMGMFNMLSTVLGVS
GMMMGMINMQSPVLQVS

SEQ ID NO: 183508 - protein, 17 aa, Artificial Sequence
  Description of Artificial Sequence: Synthetic peptide
  Seed: GMMMGMFNMLSTVLGVS
GMMMGMINMQSPVLSVS

SEQ ID NO: 183509 - protein, 17 aa, Artificial Sequence
  Description of Artificial Sequence: Synthetic peptide
  Seed: GMMMGMFNMLSTVLGVS
GMMMGMINMQSPVLTVS

SEQ ID NO: 183510 - protein, 17 aa, Artificial Sequence
  Description of Artificial Sequence: Synthetic peptide
  Seed: GMMMGMFNMLSTVLGVS
GMMMGMINMQSPVLVVS

SEQ ID NO: 183511 - protein, 17 aa, Artificial Sequence
  Description of Artificial Sequence: Synthetic peptide
  Seed: GMMMGMFNMLSTVLGVS
GMMMGMINMQSRVLHVS

SEQ ID NO: 183512 - protein, 17 aa, Artificial Sequence
  Description of Artificial Sequence: Synthetic peptide
  Seed: GMMMGMFNMLSTVLGVS
GMMMGMINMQSRVLKVS

SEQ ID NO: 183513 - protein, 17 aa, Artificial Sequence
  Description of Artificial Sequence: Synthetic peptide
  Seed: GMMMGMFNMLSTVLGVS
GMMMGMINMQSRVLRVS

SEQ ID NO: 183514 - protein, 17 aa, Artificial Sequence
  Description of Artificial Sequence: Synthetic peptide
  Seed: GMMMGMFNMLSTVLGVS
GMMMGMINMQSSVLAVS

SEQ ID NO: 183515 - protein, 17 aa, Artificial Sequence
  Description of Artificial Sequence: Synthetic peptide
  Seed: GMMMGMFNMLSTVLGVS
GMMMGMINMQSSVLGVS

SEQ ID NO: 183516 - protein, 17 aa, Artificial Sequence
  Description of Artificial Sequence: Synthetic peptide
  Seed: GMMMGMFNMLSTVLGVS
GMMMGMINMQSSVLHVS

SEQ ID NO: 183517 - protein, 17 aa, Artificial Sequence
  Description of Artificial Sequence: Synthetic peptide
  Seed: GMMMGMFNMLSTVLGVS
GMMMGMINMQSSVLIVS

SEQ ID NO: 183518 - protein, 17 aa, Artificial Sequence
  Description of Artificial Sequence: Synthetic peptide
  Seed: GMMMGMFNMLSTVLGVS
GMMMGMINMQSSVLLVS

SEQ ID NO: 183519 - protein, 17 aa, Artificial Sequence
  Description of Artificial Sequence: Synthetic peptide
  Seed: GMMMGMFNMLSTVLGVS
GMMMGMINMQSSVLMVS

SEQ ID NO: 183520 - protein, 17 aa, Artificial Sequence
  Description of Artificial Sequence: Synthetic peptide
  Seed: GMMMGMFNMLSTVLGVS
GMMMGMINMQSSVLNVS

SEQ ID NO: 183521 - protein, 17 aa, Artificial Sequence
  Description of Artificial Sequence: Synthetic peptide
  Seed: GMMMGMFNMLSTVLGVS
GMMMGMINMQSSVLSVS

SEQ ID NO: 183522 - protein, 17 aa, Artificial Sequence
  Description of Artificial Sequence: Synthetic peptide
  Seed: GMMMGMFNMLSTVLGVS
GMMMGMINMQSSVLTVS

SEQ ID NO: 183523 - protein, 17 aa, Artificial Sequence
  Description of Artificial Sequence: Synthetic peptide
  Seed: GMMMGMFNMLSTVLGVS
GMMMGMINMQSSVLVVS

SEQ ID NO: 183524 - protein, 17 aa, Artificial Sequence
  Description of Artificial Sequence: Synthetic peptide
  Seed: GMMMGMFNMLSTVLGVS
GMMMGMINMQSTVLAVS

SEQ ID NO: 183525 - protein, 17 aa, Artificial Sequence
  Description of Artificial Sequence: Synthetic peptide
  Seed: GMMMGMFNMLSTVLGVS
GMMMGMINMQSTVLHVS

SEQ ID NO: 183526 - protein, 17 aa, Artificial Sequence
  Description of Artificial Sequence: Synthetic peptide
  Seed: GMMMGMFNMLSTVLGVS
GMMMGMINMQSTVLNVS

SEQ ID NO: 183527 - protein, 17 aa, Artificial Sequence
  Description of Artificial Sequence: Synthetic peptide
  Seed: GMMMGMFNMLSTVLGVS
GMMMGMINMQSTVLSVS

SEQ ID NO: 183528 - protein, 17 aa, Artificial Sequence
  Description of Artificial Sequence: Synthetic peptide
  Seed: GMMMGMFNMLSTVLGVS
GMMMGMINMQSTVLVVS

SEQ ID NO: 183529 - protein, 17 aa, Artificial Sequence
  Description of Artificial Sequence: Synthetic peptide
  Seed: GMMMGMFNMLSTVLGVS
GMMMGMINMRSRVLAVS

SEQ ID NO: 183530 - protein, 17 aa, Artificial Sequence
  Description of Artificial Sequence: Synthetic peptide
  Seed: GMMMGMFNMLSTVLGVS
GMMMGMINMRSRVLHVS

SEQ ID NO: 183531 - protein, 17 aa, Artificial Sequence
  Description of Artificial Sequence: Synthetic peptide
  Seed: GMMMGMFNMLSTVLGVS
GMMMGMINMRSRVLKVS

SEQ ID NO: 183532 - protein, 17 aa, Artificial Sequence
  Description of Artificial Sequence: Synthetic peptide
  Seed: GMMMGMFNMLSTVLGVS
GMMMGMINMRSRVLQVS

SEQ ID NO: 183533 - protein, 17 aa, Artificial Sequence
  Description of Artificial Sequence: Synthetic peptide
  Seed: GMMMGMFNMLSTVLGVS
GMMMGMINMRSRVLRVS

SEQ ID NO: 183534 - protein, 17 aa, Artificial Sequence
  Description of Artificial Sequence: Synthetic peptide
  Seed: GMMMGMFNMLSTVLGVS
GMMMGMINMRSRVLSVS

SEQ ID NO: 183535 - protein, 17 aa, Artificial Sequence
  Description of Artificial Sequence: Synthetic peptide
  Seed: GMMMGMFNMLSTVLGVS
GMMMGMINMSSAVLAVS

SEQ ID NO: 183536 - protein, 17 aa, Artificial Sequence
  Description of Artificial Sequence: Synthetic peptide
  Seed: GMMMGMFNMLSTVLGVS
GMMMGMINMSSAVLHVS

SEQ ID NO: 183537 - protein, 17 aa, Artificial Sequence
  Description of Artificial Sequence: Synthetic peptide
  Seed: GMMMGMFNMLSTVLGVS
GMMMGMINMSSAVLIVS

SEQ ID NO: 183538 - protein, 17 aa, Artificial Sequence
  Description of Artificial Sequence: Synthetic peptide
  Seed: GMMMGMFNMLSTVLGVS
GMMMGMINMSSAVLLVS

SEQ ID NO: 183539 - protein, 17 aa, Artificial Sequence
  Description of Artificial Sequence: Synthetic peptide
  Seed: GMMMGMFNMLSTVLGVS
GMMMGMINMSSAVLMVS

SEQ ID NO: 183540 - protein, 17 aa, Artificial Sequence
  Description of Artificial Sequence: Synthetic peptide
  Seed: GMMMGMFNMLSTVLGVS
GMMMGMINMSSAVLNVS

SEQ ID NO: 183541 - protein, 17 aa, Artificial Sequence
  Description of Artificial Sequence: Synthetic peptide
  Seed: GMMMGMFNMLSTVLGVS
GMMMGMINMSSAVLSVS

SEQ ID NO: 183542 - protein, 17 aa, Artificial Sequence
  Description of Artificial Sequence: Synthetic peptide
  Seed: GMMMGMFNMLSTVLGVS
GMMMGMINMSSAVLTVS

SEQ ID NO: 183543 - protein, 17 aa, Artificial Sequence
  Description of Artificial Sequence: Synthetic peptide
  Seed: GMMMGMFNMLSTVLGVS
GMMMGMINMSSAVLVVS

SEQ ID NO: 183544 - protein, 17 aa, Artificial Sequence
  Description of Artificial Sequence: Synthetic peptide
  Seed: GMMMGMFNMLSTVLGVS
GMMMGMINMSSAVLYVS

SEQ ID NO: 183545 - protein, 17 aa, Artificial Sequence
  Description of Artificial Sequence: Synthetic peptide
  Seed: GMMMGMFNMLSTVLGVS
GMMMGMINMSSGVLAVS

SEQ ID NO: 183546 - protein, 17 aa, Artificial Sequence
  Description of Artificial Sequence: Synthetic peptide
  Seed: GMMMGMFNMLSTVLGVS
GMMMGMINMSSGVLIVS

SEQ ID NO: 183547 - protein, 17 aa, Artificial Sequence
  Description of Artificial Sequence: Synthetic peptide
  Seed: GMMMGMFNMLSTVLGVS
GMMMGMINMSSGVLLVS

SEQ ID NO: 183548 - protein, 17 aa, Artificial Sequence
  Description of Artificial Sequence: Synthetic peptide
  Seed: GMMMGMFNMLSTVLGVS
GMMMGMINMSSGVLMVS

SEQ ID NO: 183549 - protein, 17 aa, Artificial Sequence
  Description of Artificial Sequence: Synthetic peptide
  Seed: GMMMGMFNMLSTVLGVS
GMMMGMINMSSGVLTVS

SEQ ID NO: 183550 - protein, 17 aa, Artificial Sequence
  Description of Artificial Sequence: Synthetic peptide
  Seed: GMMMGMFNMLSTVLGVS
GMMMGMINMSSGVLVVS

SEQ ID NO: 183551 - protein, 17 aa, Artificial Sequence
  Description of Artificial Sequence: Synthetic peptide
  Seed: GMMMGMFNMLSTVLGVS
GMMMGMINMSSNVLAVS

SEQ ID NO: 183552 - protein, 17 aa, Artificial Sequence
  Description of Artificial Sequence: Synthetic peptide
  Seed: GMMMGMFNMLSTVLGVS
GMMMGMINMSSNVLIVS

SEQ ID NO: 183553 - protein, 17 aa, Artificial Sequence
  Description of Artificial Sequence: Synthetic peptide
  Seed: GMMMGMFNMLSTVLGVS
GMMMGMINMSSNVLSVS

SEQ ID NO: 183554 - protein, 17 aa, Artificial Sequence
  Description of Artificial Sequence: Synthetic peptide
  Seed: GMMMGMFNMLSTVLGVS
GMMMGMINMSSNVLVVS

SEQ ID NO: 183555 - protein, 17 aa, Artificial Sequence
  Description of Artificial Sequence: Synthetic peptide
  Seed: GMMMGMFNMLSTVLGVS
GMMMGMINMSSNVLYVS

SEQ ID NO: 183556 - protein, 17 aa, Artificial Sequence
  Description of Artificial Sequence: Synthetic peptide
  Seed: GMMMGMFNMLSTVLGVS
GMMMGMINMSSPVLAVS

SEQ ID NO: 183557 - protein, 17 aa, Artificial Sequence
  Description of Artificial Sequence: Synthetic peptide
  Seed: GMMMGMFNMLSTVLGVS
GMMMGMINMSSPVLIVS

SEQ ID NO: 183558 - protein, 17 aa, Artificial Sequence
  Description of Artificial Sequence: Synthetic peptide
  Seed: GMMMGMFNMLSTVLGVS
GMMMGMINMSSPVLLVS

SEQ ID NO: 183559 - protein, 17 aa, Artificial Sequence
  Description of Artificial Sequence: Synthetic peptide
  Seed: GMMMGMFNMLSTVLGVS
GMMMGMINMSSPVLNVS

SEQ ID NO: 183560 - protein, 17 aa, Artificial Sequence
  Description of Artificial Sequence: Synthetic peptide
  Seed: GMMMGMFNMLSTVLGVS
GMMMGMINMSSPVLSVS

SEQ ID NO: 183561 - protein, 17 aa, Artificial Sequence
  Description of Artificial Sequence: Synthetic peptide
  Seed: GMMMGMFNMLSTVLGVS
GMMMGMINMSSPVLVVS

SEQ ID NO: 183562 - protein, 17 aa, Artificial Sequence
  Description of Artificial Sequence: Synthetic peptide
  Seed: GMMMGMFNMLSTVLGVS
GMMMGMINMSSPVLYVS

SEQ ID NO: 183563 - protein, 17 aa, Artificial Sequence
  Description of Artificial Sequence: Synthetic peptide
  Seed: GMMMGMFNMLSTVLGVS
GMMMGMINMSSRVLRVS

SEQ ID NO: 183564 - protein, 17 aa, Artificial Sequence
  Description of Artificial Sequence: Synthetic peptide
  Seed: GMMMGMFNMLSTVLGVS
GMMMGMINMSSSVLIVS

SEQ ID NO: 183565 - protein, 17 aa, Artificial Sequence
  Description of Artificial Sequence: Synthetic peptide
  Seed: GMMMGMFNMLSTVLGVS
GMMMGMINMSSSVLVVS

SEQ ID NO: 183566 - protein, 17 aa, Artificial Sequence
  Description of Artificial Sequence: Synthetic peptide
  Seed: GMMMGMFNMLSTVLGVS
GMMMGMINMTSAVLAVS

SEQ ID NO: 183567 - protein, 17 aa, Artificial Sequence
  Description of Artificial Sequence: Synthetic peptide
  Seed: GMMMGMFNMLSTVLGVS
GMMMGMINMTSAVLNVS

SEQ ID NO: 183568 - protein, 17 aa, Artificial Sequence
  Description of Artificial Sequence: Synthetic peptide
  Seed: GMMMGMFNMLSTVLGVS
GMMMGMINMTSAVLTVS

SEQ ID NO: 183569 - protein, 17 aa, Artificial Sequence
  Description of Artificial Sequence: Synthetic peptide
  Seed: GMMMGMFNMLSTVLGVS
GMMMGMINMTSAVLVVS

SEQ ID NO: 183570 - protein, 17 aa, Artificial Sequence
  Description of Artificial Sequence: Synthetic peptide
  Seed: GMMMGMFNMLSTVLGVS
GMMMGMINMTSGVLAVS

SEQ ID NO: 183571 - protein, 17 aa, Artificial Sequence
  Description of Artificial Sequence: Synthetic peptide
  Seed: GMMMGMFNMLSTVLGVS
GMMMGMINMTSPVLIVS

SEQ ID NO: 183572 - protein, 17 aa, Artificial Sequence
  Description of Artificial Sequence: Synthetic peptide
  Seed: GMMMGMFNMLSTVLGVS
GMMMGMINMTSPVLLVS

SEQ ID NO: 183573 - protein, 17 aa, Artificial Sequence
  Description of Artificial Sequence: Synthetic peptide
  Seed: GMMMGMFNMLSTVLGVS
GMMMGMINMTSPVLMVS

SEQ ID NO: 183574 - protein, 17 aa, Artificial Sequence
  Description of Artificial Sequence: Synthetic peptide
  Seed: GMMMGMFNMLSTVLGVS
GMMMGMINMTSPVLNVS

SEQ ID NO: 183575 - protein, 17 aa, Artificial Sequence
  Description of Artificial Sequence: Synthetic peptide
  Seed: GMMMGMFNMLSTVLGVS
GMMMGMINMTSPVLVVS

SEQ ID NO: 183576 - protein, 17 aa, Artificial Sequence
  Description of Artificial Sequence: Synthetic peptide
  Seed: GMMMGMFNMLSTVLGVS
GMMMGMINMVSKVLHVS

SEQ ID NO: 183577 - protein, 17 aa, Artificial Sequence
  Description of Artificial Sequence: Synthetic peptide
  Seed: GMMMGMFNMLSTVLGVS
GMMMGMINMVSKVLKVS

SEQ ID NO: 183578 - protein, 17 aa, Artificial Sequence
  Description of Artificial Sequence: Synthetic peptide
  Seed: GMMMGMFNMLSTVLGVS
GMMMGMINMVSKVLRVS

SEQ ID NO: 183579 - protein, 17 aa, Artificial Sequence
  Description of Artificial Sequence: Synthetic peptide
  Seed: GMMMGMFNMLSTVLGVS
GMMMGMINMVSPVLAVS

SEQ ID NO: 183580 - protein, 17 aa, Artificial Sequence
  Description of Artificial Sequence: Synthetic peptide
  Seed: GMMMGMFNMLSTVLGVS
GMMMGMINMVSPVLGVS

SEQ ID NO: 183581 - protein, 17 aa, Artificial Sequence
  Description of Artificial Sequence: Synthetic peptide
  Seed: GMMMGMFNMLSTVLGVS
GMMMGMINMVSPVLIVS

SEQ ID NO: 183582 - protein, 17 aa, Artificial Sequence
  Description of Artificial Sequence: Synthetic peptide
  Seed: GMMMGMFNMLSTVLGVS
GMMMGMINMVSPVLLVS

SEQ ID NO: 183583 - protein, 17 aa, Artificial Sequence
  Description of Artificial Sequence: Synthetic peptide
  Seed: GMMMGMFNMLSTVLGVS
GMMMGMINMVSPVLMVS

SEQ ID NO: 183584 - protein, 17 aa, Artificial Sequence
  Description of Artificial Sequence: Synthetic peptide
  Seed: GMMMGMFNMLSTVLGVS
GMMMGMINMVSPVLNVS

SEQ ID NO: 183585 - protein, 17 aa, Artificial Sequence
  Description of Artificial Sequence: Synthetic peptide
  Seed: GMMMGMFNMLSTVLGVS
GMMMGMINMVSPVLSVS

SEQ ID NO: 183586 - protein, 17 aa, Artificial Sequence
  Description of Artificial Sequence: Synthetic peptide
  Seed: GMMMGMFNMLSTVLGVS
GMMMGMINMVSPVLTVS

SEQ ID NO: 183587 - protein, 17 aa, Artificial Sequence
  Description of Artificial Sequence: Synthetic peptide
  Seed: GMMMGMFNMLSTVLGVS
GMMMGMINMVSPVLVVS

SEQ ID NO: 183588 - protein, 17 aa, Artificial Sequence
  Description of Artificial Sequence: Synthetic peptide
  Seed: GMMMGMFNMLSTVLGVS
GMMMGMINMVSRVLHVS

SEQ ID NO: 183589 - protein, 17 aa, Artificial Sequence
  Description of Artificial Sequence: Synthetic peptide
  Seed: GMMMGMFNMLSTVLGVS
GMMMGMINMVSRVLKVS

SEQ ID NO: 183590 - protein, 17 aa, Artificial Sequence
  Description of Artificial Sequence: Synthetic peptide
  Seed: GMMMGMFNMLSTVLGVS
GMMMGMINMVSRVLRVS

SEQ ID NO: 183591 - protein, 17 aa, Artificial Sequence
  Description of Artificial Sequence: Synthetic peptide
  Seed: GMMMGMFNMLSTVLGVS
GMMMGMINMWSNVLAVS

SEQ ID NO: 183592 - protein, 17 aa, Artificial Sequence
  Description of Artificial Sequence: Synthetic peptide
  Seed: GMMMGMFNMLSTVLGVS
GMMMGMINMWSNVLIVS

SEQ ID NO: 183593 - protein, 17 aa, Artificial Sequence
  Description of Artificial Sequence: Synthetic peptide
  Seed: GMMMGMFNMLSTVLGVS
GMMMGMINMWSNVLLVS

SEQ ID NO: 183594 - protein, 17 aa, Artificial Sequence
  Description of Artificial Sequence: Synthetic peptide
  Seed: GMMMGMFNMLSTVLGVS
GMMMGMINMWSNVLVVS

SEQ ID NO: 183595 - protein, 17 aa, Artificial Sequence
  Description of Artificial Sequence: Synthetic peptide
  Seed: GMMMGMFNMLSTVLGVS
GMMMGMINMWSSVLAVS

SEQ ID NO: 183596 - protein, 17 aa, Artificial Sequence
  Description of Artificial Sequence: Synthetic peptide
  Seed: GMMMGMFNMLSTVLGVS
GMMMGMINMYSNVLHVS

SEQ ID NO: 183597 - protein, 17 aa, Artificial Sequence
  Description of Artificial Sequence: Synthetic peptide
  Seed: GMMMGMFNMLSTVLGVS
GMMMGMINMYSNVLKVS

SEQ ID NO: 183598 - protein, 17 aa, Artificial Sequence
  Description of Artificial Sequence: Synthetic peptide
  Seed: GMMMGMFNMLSTVLGVS
GMMMGMINMYSNVLRVS

SEQ ID NO: 183599 - protein, 17 aa, Artificial Sequence
  Description of Artificial Sequence: Synthetic peptide
  Seed: GMMMGMFNMLSTVLGVS
GMMMGMINMYSNVLSVS

SEQ ID NO: 183600 - protein, 17 aa, Artificial Sequence
  Description of Artificial Sequence: Synthetic peptide
  Seed: GMMMGMFNMLSTVLGVS
GMMMGMINMYSNVLTVS

SEQ ID NO: 183601 - protein, 17 aa, Artificial Sequence
  Description of Artificial Sequence: Synthetic peptide
  Seed: GMMMGMFNMLSTVLGVS
GMMMGMINMYSNVLVVS

SEQ ID NO: 183602 - protein, 17 aa, Artificial Sequence
  Description of Artificial Sequence: Synthetic peptide
  Seed: GMMMGMFNMLSTVLGVS
GMMMGMINMYSSVLHVS

SEQ ID NO: 183603 - protein, 17 aa, Artificial Sequence
  Description of Artificial Sequence: Synthetic peptide
  Seed: GMMMGMFNMLSTVLGVS
GMMMGMINMYSSVLKVS

SEQ ID NO: 183604 - protein, 17 aa, Artificial Sequence
  Description of Artificial Sequence: Synthetic peptide
  Seed: GMMMGMFNMLSTVLGVS
GMMMGMINMYSSVLRVS

SEQ ID NO: 183605 - protein, 17 aa, Artificial Sequence
  Description of Artificial Sequence: Synthetic peptide
  Seed: GMMMGMFNMLSTVLGVS
GMMMGMKNMLSGVLVVS

SEQ ID NO: 183606 - protein, 17 aa, Artificial Sequence
  Description of Artificial Sequence: Synthetic peptide
  Seed: GMMMGMFNMLSTVLGVS
GMMMGMKNMMSGVLIVS

SEQ ID NO: 183607 - protein, 17 aa, Artificial Sequence
  Description of Artificial Sequence: Synthetic peptide
  Seed: GMMMGMFNMLSTVLGVS
GMMMGMKNMMSGVLLVS

SEQ ID NO: 183608 - protein, 17 aa, Artificial Sequence
  Description of Artificial Sequence: Synthetic peptide
  Seed: GMMMGMFNMLSTVLGVS
GMMMGMKNMMSGVLVVS

SEQ ID NO: 183609 - protein, 17 aa, Artificial Sequence
  Description of Artificial Sequence: Synthetic peptide
  Seed: GMMMGMFNMLSTVLGVS
GMMMGMKNMMSTVLNVS

SEQ ID NO: 183610 - protein, 17 aa, Artificial Sequence
  Description of Artificial Sequence: Synthetic peptide
  Seed: GMMMGMFNMLSTVLGVS
GMMMGMLNMASAVLAVS

SEQ ID NO: 183611 - protein, 17 aa, Artificial Sequence
  Description of Artificial Sequence: Synthetic peptide
  Seed: GMMMGMFNMLSTVLGVS
GMMMGMLNMASAVLGVS

SEQ ID NO: 183612 - protein, 17 aa, Artificial Sequence
  Description of Artificial Sequence: Synthetic peptide
  Seed: GMMMGMFNMLSTVLGVS
GMMMGMLNMASAVLHVS

SEQ ID NO: 183613 - protein, 17 aa, Artificial Sequence
  Description of Artificial Sequence: Synthetic peptide
  Seed: GMMMGMFNMLSTVLGVS
GMMMGMLNMASAVLIVS

SEQ ID NO: 183614 - protein, 17 aa, Artificial Sequence
  Description of Artificial Sequence: Synthetic peptide
  Seed: GMMMGMFNMLSTVLGVS
GMMMGMLNMASAVLLVS

SEQ ID NO: 183615 - protein, 17 aa, Artificial Sequence
  Description of Artificial Sequence: Synthetic peptide
  Seed: GMMMGMFNMLSTVLGVS
GMMMGMLNMASAVLMVS

SEQ ID NO: 183616 - protein, 17 aa, Artificial Sequence
  Description of Artificial Sequence: Synthetic peptide
  Seed: GMMMGMFNMLSTVLGVS
GMMMGMLNMASAVLNVS

SEQ ID NO: 183617 - protein, 17 aa, Artificial Sequence
  Description of Artificial Sequence: Synthetic peptide
  Seed: GMMMGMFNMLSTVLGVS
GMMMGMLNMASAVLQVS

SEQ ID NO: 183618 - protein, 17 aa, Artificial Sequence
  Description of Artificial Sequence: Synthetic peptide
  Seed: GMMMGMFNMLSTVLGVS
GMMMGMLNMASAVLSVS

SEQ ID NO: 183619 - protein, 17 aa, Artificial Sequence
  Description of Artificial Sequence: Synthetic peptide
  Seed: GMMMGMFNMLSTVLGVS
GMMMGMLNMASAVLTVS

SEQ ID NO: 183620 - protein, 17 aa, Artificial Sequence
  Description of Artificial Sequence: Synthetic peptide
  Seed: GMMMGMFNMLSTVLGVS
GMMMGMLNMASAVLVVS

SEQ ID NO: 183621 - protein, 17 aa, Artificial Sequence
  Description of Artificial Sequence: Synthetic peptide
  Seed: GMMMGMFNMLSTVLGVS
GMMMGMLNMASAVLYVS

SEQ ID NO: 183622 - protein, 17 aa, Artificial Sequence
  Description of Artificial Sequence: Synthetic peptide
  Seed: GMMMGMFNMLSTVLGVS
GMMMGMLNMASGVLAVS

SEQ ID NO: 183623 - protein, 17 aa, Artificial Sequence
  Description of Artificial Sequence: Synthetic peptide
  Seed: GMMMGMFNMLSTVLGVS
GMMMGMLNMASGVLGVS

SEQ ID NO: 183624 - protein, 17 aa, Artificial Sequence
  Description of Artificial Sequence: Synthetic peptide
  Seed: GMMMGMFNMLSTVLGVS
GMMMGMLNMASGVLIVS

SEQ ID NO: 183625 - protein, 17 aa, Artificial Sequence
  Description of Artificial Sequence: Synthetic peptide
  Seed: GMMMGMFNMLSTVLGVS
GMMMGMLNMASGVLLVS

SEQ ID NO: 183626 - protein, 17 aa, Artificial Sequence
  Description of Artificial Sequence: Synthetic peptide
  Seed: GMMMGMFNMLSTVLGVS
GMMMGMLNMASGVLMVS

SEQ ID NO: 183627 - protein, 17 aa, Artificial Sequence
  Description of Artificial Sequence: Synthetic peptide
  Seed: GMMMGMFNMLSTVLGVS
GMMMGMLNMASGVLNVS

SEQ ID NO: 183628 - protein, 17 aa, Artificial Sequence
  Description of Artificial Sequence: Synthetic peptide
  Seed: GMMMGMFNMLSTVLGVS
GMMMGMLNMASGVLSVS

SEQ ID NO: 183629 - protein, 17 aa, Artificial Sequence
  Description of Artificial Sequence: Synthetic peptide
  Seed: GMMMGMFNMLSTVLGVS
GMMMGMLNMASGVLTVS

SEQ ID NO: 183630 - protein, 17 aa, Artificial Sequence
  Description of Artificial Sequence: Synthetic peptide
  Seed: GMMMGMFNMLSTVLGVS
GMMMGMLNMASGVLVVS

SEQ ID NO: 183631 - protein, 17 aa, Artificial Sequence
  Description of Artificial Sequence: Synthetic peptide
  Seed: GMMMGMFNMLSTVLGVS
GMMMGMLNMASNVLAVS

SEQ ID NO: 183632 - protein, 17 aa, Artificial Sequence
  Description of Artificial Sequence: Synthetic peptide
  Seed: GMMMGMFNMLSTVLGVS
GMMMGMLNMASNVLGVS

SEQ ID NO: 183633 - protein, 17 aa, Artificial Sequence
  Description of Artificial Sequence: Synthetic peptide
  Seed: GMMMGMFNMLSTVLGVS
GMMMGMLNMASNVLLVS

SEQ ID NO: 183634 - protein, 17 aa, Artificial Sequence
  Description of Artificial Sequence: Synthetic peptide
  Seed: GMMMGMFNMLSTVLGVS
GMMMGMLNMASNVLNVS

SEQ ID NO: 183635 - protein, 17 aa, Artificial Sequence
  Description of Artificial Sequence: Synthetic peptide
  Seed: GMMMGMFNMLSTVLGVS
GMMMGMLNMASNVLSVS

SEQ ID NO: 183636 - protein, 17 aa, Artificial Sequence
  Description of Artificial Sequence: Synthetic peptide
  Seed: GMMMGMFNMLSTVLGVS
GMMMGMLNMASNVLVVS

SEQ ID NO: 183637 - protein, 17 aa, Artificial Sequence
  Description of Artificial Sequence: Synthetic peptide
  Seed: GMMMGMFNMLSTVLGVS
GMMMGMLNMASPVLAVS

SEQ ID NO: 183638 - protein, 17 aa, Artificial Sequence
  Description of Artificial Sequence: Synthetic peptide
  Seed: GMMMGMFNMLSTVLGVS
GMMMGMLNMASPVLGVS

SEQ ID NO: 183639 - protein, 17 aa, Artificial Sequence
  Description of Artificial Sequence: Synthetic peptide
  Seed: GMMMGMFNMLSTVLGVS
GMMMGMLNMASPVLHVS

SEQ ID NO: 183640 - protein, 17 aa, Artificial Sequence
  Description of Artificial Sequence: Synthetic peptide
  Seed: GMMMGMFNMLSTVLGVS
GMMMGMLNMASPVLIVS

SEQ ID NO: 183641 - protein, 17 aa, Artificial Sequence
  Description of Artificial Sequence: Synthetic peptide
  Seed: GMMMGMFNMLSTVLGVS
GMMMGMLNMASPVLLVS

SEQ ID NO: 183642 - protein, 17 aa, Artificial Sequence
  Description of Artificial Sequence: Synthetic peptide
  Seed: GMMMGMFNMLSTVLGVS
GMMMGMLNMASPVLMVS

SEQ ID NO: 183643 - protein, 17 aa, Artificial Sequence
  Description of Artificial Sequence: Synthetic peptide
  Seed: GMMMGMFNMLSTVLGVS
GMMMGMLNMASPVLNVS

SEQ ID NO: 183644 - protein, 17 aa, Artificial Sequence
  Description of Artificial Sequence: Synthetic peptide
  Seed: GMMMGMFNMLSTVLGVS
GMMMGMLNMASPVLQVS

SEQ ID NO: 183645 - protein, 17 aa, Artificial Sequence
  Description of Artificial Sequence: Synthetic peptide
  Seed: GMMMGMFNMLSTVLGVS
GMMMGMLNMASPVLSVS

SEQ ID NO: 183646 - protein, 17 aa, Artificial Sequence
  Description of Artificial Sequence: Synthetic peptide
  Seed: GMMMGMFNMLSTVLGVS
GMMMGMLNMASPVLTVS

SEQ ID NO: 183647 - protein, 17 aa, Artificial Sequence
  Description of Artificial Sequence: Synthetic peptide
  Seed: GMMMGMFNMLSTVLGVS
GMMMGMLNMASPVLVVS

SEQ ID NO: 183648 - protein, 17 aa, Artificial Sequence
  Description of Artificial Sequence: Synthetic peptide
  Seed: GMMMGMFNMLSTVLGVS
GMMMGMLNMASRVLHVS

SEQ ID NO: 183649 - protein, 17 aa, Artificial Sequence
  Description of Artificial Sequence: Synthetic peptide
  Seed: GMMMGMFNMLSTVLGVS
GMMMGMLNMASRVLKVS

SEQ ID NO: 183650 - protein, 17 aa, Artificial Sequence
  Description of Artificial Sequence: Synthetic peptide
  Seed: GMMMGMFNMLSTVLGVS
GMMMGMLNMASRVLRVS

SEQ ID NO: 183651 - protein, 17 aa, Artificial Sequence
  Description of Artificial Sequence: Synthetic peptide
  Seed: GMMMGMFNMLSTVLGVS
GMMMGMLNMASSVLAVS

SEQ ID NO: 183652 - protein, 17 aa, Artificial Sequence
  Description of Artificial Sequence: Synthetic peptide
  Seed: GMMMGMFNMLSTVLGVS
GMMMGMLNMASSVLGVS

SEQ ID NO: 183653 - protein, 17 aa, Artificial Sequence
  Description of Artificial Sequence: Synthetic peptide
  Seed: GMMMGMFNMLSTVLGVS
GMMMGMLNMASSVLHVS

SEQ ID NO: 183654 - protein, 17 aa, Artificial Sequence
  Description of Artificial Sequence: Synthetic peptide
  Seed: GMMMGMFNMLSTVLGVS
GMMMGMLNMASSVLIVS

SEQ ID NO: 183655 - protein, 17 aa, Artificial Sequence
  Description of Artificial Sequence: Synthetic peptide
  Seed: GMMMGMFNMLSTVLGVS
GMMMGMLNMASSVLLVS

SEQ ID NO: 183656 - protein, 17 aa, Artificial Sequence
  Description of Artificial Sequence: Synthetic peptide
  Seed: GMMMGMFNMLSTVLGVS
GMMMGMLNMASSVLMVS

SEQ ID NO: 183657 - protein, 17 aa, Artificial Sequence
  Description of Artificial Sequence: Synthetic peptide
  Seed: GMMMGMFNMLSTVLGVS
GMMMGMLNMASSVLNVS

SEQ ID NO: 183658 - protein, 17 aa, Artificial Sequence
  Description of Artificial Sequence: Synthetic peptide
  Seed: GMMMGMFNMLSTVLGVS
GMMMGMLNMASSVLSVS

SEQ ID NO: 183659 - protein, 17 aa, Artificial Sequence
  Description of Artificial Sequence: Synthetic peptide
  Seed: GMMMGMFNMLSTVLGVS
GMMMGMLNMASSVLTVS

SEQ ID NO: 183660 - protein, 17 aa, Artificial Sequence
  Description of Artificial Sequence: Synthetic peptide
  Seed: GMMMGMFNMLSTVLGVS
GMMMGMLNMASSVLVVS

SEQ ID NO: 183661 - protein, 17 aa, Artificial Sequence
  Description of Artificial Sequence: Synthetic peptide
  Seed: GMMMGMFNMLSTVLGVS
GMMMGMLNMASTVLAVS

SEQ ID NO: 183662 - protein, 17 aa, Artificial Sequence
  Description of Artificial Sequence: Synthetic peptide
  Seed: GMMMGMFNMLSTVLGVS
GMMMGMLNMASTVLNVS

SEQ ID NO: 183663 - protein, 17 aa, Artificial Sequence
  Description of Artificial Sequence: Synthetic peptide
  Seed: GMMMGMFNMLSTVLGVS
GMMMGMLNMASTVLSVS

SEQ ID NO: 183664 - protein, 17 aa, Artificial Sequence
  Description of Artificial Sequence: Synthetic peptide
  Seed: GMMMGMFNMLSTVLGVS
GMMMGMLNMESAVLAVS

SEQ ID NO: 183665 - protein, 17 aa, Artificial Sequence
  Description of Artificial Sequence: Synthetic peptide
  Seed: GMMMGMFNMLSTVLGVS
GMMMGMLNMESAVLSVS

SEQ ID NO: 183666 - protein, 17 aa, Artificial Sequence
  Description of Artificial Sequence: Synthetic peptide
  Seed: GMMMGMFNMLSTVLGVS
GMMMGMLNMESAVLVVS

SEQ ID NO: 183667 - protein, 17 aa, Artificial Sequence
  Description of Artificial Sequence: Synthetic peptide
  Seed: GMMMGMFNMLSTVLGVS
GMMMGMLNMESGVLAVS

SEQ ID NO: 183668 - protein, 17 aa, Artificial Sequence
  Description of Artificial Sequence: Synthetic peptide
  Seed: GMMMGMFNMLSTVLGVS
GMMMGMLNMGSAVLAVS

SEQ ID NO: 183669 - protein, 17 aa, Artificial Sequence
  Description of Artificial Sequence: Synthetic peptide
  Seed: GMMMGMFNMLSTVLGVS
GMMMGMLNMGSAVLIVS

SEQ ID NO: 183670 - protein, 17 aa, Artificial Sequence
  Description of Artificial Sequence: Synthetic peptide
  Seed: GMMMGMFNMLSTVLGVS
GMMMGMLNMGSAVLLVS

SEQ ID NO: 183671 - protein, 17 aa, Artificial Sequence
  Description of Artificial Sequence: Synthetic peptide
  Seed: GMMMGMFNMLSTVLGVS
GMMMGMLNMGSAVLMVS

SEQ ID NO: 183672 - protein, 17 aa, Artificial Sequence
  Description of Artificial Sequence: Synthetic peptide
  Seed: GMMMGMFNMLSTVLGVS
GMMMGMLNMGSAVLSVS

SEQ ID NO: 183673 - protein, 17 aa, Artificial Sequence
  Description of Artificial Sequence: Synthetic peptide
  Seed: GMMMGMFNMLSTVLGVS
GMMMGMLNMGSAVLTVS

SEQ ID NO: 183674 - protein, 17 aa, Artificial Sequence
  Description of Artificial Sequence: Synthetic peptide
  Seed: GMMMGMFNMLSTVLGVS
GMMMGMLNMGSAVLVVS

SEQ ID NO: 183675 - protein, 17 aa, Artificial Sequence
  Description of Artificial Sequence: Synthetic peptide
  Seed: GMMMGMFNMLSTVLGVS
GMMMGMLNMGSPVLIVS

SEQ ID NO: 183676 - protein, 17 aa, Artificial Sequence
  Description of Artificial Sequence: Synthetic peptide
  Seed: GMMMGMFNMLSTVLGVS
GMMMGMLNMGSPVLLVS

SEQ ID NO: 183677 - protein, 17 aa, Artificial Sequence
  Description of Artificial Sequence: Synthetic peptide
  Seed: GMMMGMFNMLSTVLGVS
GMMMGMLNMGSPVLVVS

SEQ ID NO: 183678 - protein, 17 aa, Artificial Sequence
  Description of Artificial Sequence: Synthetic peptide
  Seed: GMMMGMFNMLSTVLGVS
GMMMGMLNMGSSVLAVS

SEQ ID NO: 183679 - protein, 17 aa, Artificial Sequence
  Description of Artificial Sequence: Synthetic peptide
  Seed: GMMMGMFNMLSTVLGVS
GMMMGMLNMHSAVLIVS

SEQ ID NO: 183680 - protein, 17 aa, Artificial Sequence
  Description of Artificial Sequence: Synthetic peptide
  Seed: GMMMGMFNMLSTVLGVS
GMMMGMLNMHSAVLLVS

SEQ ID NO: 183681 - protein, 17 aa, Artificial Sequence
  Description of Artificial Sequence: Synthetic peptide
  Seed: GMMMGMFNMLSTVLGVS
GMMMGMLNMHSAVLVVS

SEQ ID NO: 183682 - protein, 17 aa, Artificial Sequence
  Description of Artificial Sequence: Synthetic peptide
  Seed: GMMMGMFNMLSTVLGVS
GMMMGMLNMHSSVLLVS

SEQ ID NO: 183683 - protein, 17 aa, Artificial Sequence
  Description of Artificial Sequence: Synthetic peptide
  Seed: GMMMGMFNMLSTVLGVS
GMMMGMLNMHSSVLVVS

SEQ ID NO: 183684 - protein, 17 aa, Artificial Sequence
  Description of Artificial Sequence: Synthetic peptide
  Seed: GMMMGMFNMLSTVLGVS
GMMMGMLNMISAVLNVS

SEQ ID NO: 183685 - protein, 17 aa, Artificial Sequence
  Description of Artificial Sequence: Synthetic peptide
  Seed: GMMMGMFNMLSTVLGVS
GMMMGMLNMISGVLAVS

SEQ ID NO: 183686 - protein, 17 aa, Artificial Sequence
  Description of Artificial Sequence: Synthetic peptide
  Seed: GMMMGMFNMLSTVLGVS
GMMMGMLNMISKVLHVS

SEQ ID NO: 183687 - protein, 17 aa, Artificial Sequence
  Description of Artificial Sequence: Synthetic peptide
  Seed: GMMMGMFNMLSTVLGVS
GMMMGMLNMISKVLKVS

SEQ ID NO: 183688 - protein, 17 aa, Artificial Sequence
  Description of Artificial Sequence: Synthetic peptide
  Seed: GMMMGMFNMLSTVLGVS
GMMMGMLNMISPVLAVS

SEQ ID NO: 183689 - protein, 17 aa, Artificial Sequence
  Description of Artificial Sequence: Synthetic peptide
  Seed: GMMMGMFNMLSTVLGVS
GMMMGMLNMISPVLGVS

SEQ ID NO: 183690 - protein, 17 aa, Artificial Sequence
  Description of Artificial Sequence: Synthetic peptide
  Seed: GMMMGMFNMLSTVLGVS
GMMMGMLNMISPVLHVS

SEQ ID NO: 183691 - protein, 17 aa, Artificial Sequence
  Description of Artificial Sequence: Synthetic peptide
  Seed: GMMMGMFNMLSTVLGVS
GMMMGMLNMISPVLIVS

SEQ ID NO: 183692 - protein, 17 aa, Artificial Sequence
  Description of Artificial Sequence: Synthetic peptide
  Seed: GMMMGMFNMLSTVLGVS
GMMMGMLNMISPVLLVS

SEQ ID NO: 183693 - protein, 17 aa, Artificial Sequence
  Description of Artificial Sequence: Synthetic peptide
  Seed: GMMMGMFNMLSTVLGVS
GMMMGMLNMISPVLMVS

SEQ ID NO: 183694 - protein, 17 aa, Artificial Sequence
  Description of Artificial Sequence: Synthetic peptide
  Seed: GMMMGMFNMLSTVLGVS
GMMMGMLNMISPVLNVS

SEQ ID NO: 183695 - protein, 17 aa, Artificial Sequence
  Description of Artificial Sequence: Synthetic peptide
  Seed: GMMMGMFNMLSTVLGVS
GMMMGMLNMISPVLSVS

SEQ ID NO: 183696 - protein, 17 aa, Artificial Sequence
  Description of Artificial Sequence: Synthetic peptide
  Seed: GMMMGMFNMLSTVLGVS
GMMMGMLNMISPVLTVS

SEQ ID NO: 183697 - protein, 17 aa, Artificial Sequence
  Description of Artificial Sequence: Synthetic peptide
  Seed: GMMMGMFNMLSTVLGVS
GMMMGMLNMISPVLVVS

SEQ ID NO: 183698 - protein, 17 aa, Artificial Sequence
  Description of Artificial Sequence: Synthetic peptide
  Seed: GMMMGMFNMLSTVLGVS
GMMMGMLNMISRVLHVS

SEQ ID NO: 183699 - protein, 17 aa, Artificial Sequence
  Description of Artificial Sequence: Synthetic peptide
  Seed: GMMMGMFNMLSTVLGVS
GMMMGMLNMISRVLKVS

SEQ ID NO: 183700 - protein, 17 aa, Artificial Sequence
  Description of Artificial Sequence: Synthetic peptide
  Seed: GMMMGMFNMLSTVLGVS
GMMMGMLNMISRVLRVS

SEQ ID NO: 183701 - protein, 17 aa, Artificial Sequence
  Description of Artificial Sequence: Synthetic peptide
  Seed: GMMMGMFNMLSTVLGVS
GMMMGMLNMKSGVLLVS

SEQ ID NO: 183702 - protein, 17 aa, Artificial Sequence
  Description of Artificial Sequence: Synthetic peptide
  Seed: GMMMGMFNMLSTVLGVS
GMMMGMLNMKSGVLVVS

SEQ ID NO: 183703 - protein, 17 aa, Artificial Sequence
  Description of Artificial Sequence: Synthetic peptide
  Seed: GMMMGMFNMLSTVLGVS
GMMMGMLNMKSRVLAVS

SEQ ID NO: 183704 - protein, 17 aa, Artificial Sequence
  Description of Artificial Sequence: Synthetic peptide
  Seed: GMMMGMFNMLSTVLGVS
GMMMGMLNMKSRVLHVS

SEQ ID NO: 183705 - protein, 17 aa, Artificial Sequence
  Description of Artificial Sequence: Synthetic peptide
  Seed: GMMMGMFNMLSTVLGVS
GMMMGMLNMKSRVLKVS

SEQ ID NO: 183706 - protein, 17 aa, Artificial Sequence
  Description of Artificial Sequence: Synthetic peptide
  Seed: GMMMGMFNMLSTVLGVS
GMMMGMLNMKSRVLRVS

SEQ ID NO: 183707 - protein, 17 aa, Artificial Sequence
  Description of Artificial Sequence: Synthetic peptide
  Seed: GMMMGMFNMLSTVLGVS
GMMMGMLNMKSRVLSVS

SEQ ID NO: 183708 - protein, 17 aa, Artificial Sequence
  Description of Artificial Sequence: Synthetic peptide
  Seed: GMMMGMFNMLSTVLGVS
GMMMGMLNMLSAVLAVS

SEQ ID NO: 183709 - protein, 17 aa, Artificial Sequence
  Description of Artificial Sequence: Synthetic peptide
  Seed: GMMMGMFNMLSTVLGVS
GMMMGMLNMLSAVLHVS

SEQ ID NO: 183710 - protein, 17 aa, Artificial Sequence
  Description of Artificial Sequence: Synthetic peptide
  Seed: GMMMGMFNMLSTVLGVS
GMMMGMLNMLSAVLKVS

SEQ ID NO: 183711 - protein, 17 aa, Artificial Sequence
  Description of Artificial Sequence: Synthetic peptide
  Seed: GMMMGMFNMLSTVLGVS
GMMMGMLNMLSAVLNVS

SEQ ID NO: 183712 - protein, 17 aa, Artificial Sequence
  Description of Artificial Sequence: Synthetic peptide
  Seed: GMMMGMFNMLSTVLGVS
GMMMGMLNMLSAVLRVS

SEQ ID NO: 183713 - protein, 17 aa, Artificial Sequence
  Description of Artificial Sequence: Synthetic peptide
  Seed: GMMMGMFNMLSTVLGVS
GMMMGMLNMLSAVLSVS

SEQ ID NO: 183714 - protein, 17 aa, Artificial Sequence
  Description of Artificial Sequence: Synthetic peptide
  Seed: GMMMGMFNMLSTVLGVS
GMMMGMLNMLSAVLTVS

SEQ ID NO: 183715 - protein, 17 aa, Artificial Sequence
  Description of Artificial Sequence: Synthetic peptide
  Seed: GMMMGMFNMLSTVLGVS
GMMMGMLNMLSGVLAVS

SEQ ID NO: 183716 - protein, 17 aa, Artificial Sequence
  Description of Artificial Sequence: Synthetic peptide
  Seed: GMMMGMFNMLSTVLGVS
GMMMGMLNMLSGVLGVS

SEQ ID NO: 183717 - protein, 17 aa, Artificial Sequence
  Description of Artificial Sequence: Synthetic peptide
  Seed: GMMMGMFNMLSTVLGVS
GMMMGMLNMLSGVLHVS

SEQ ID NO: 183718 - protein, 17 aa, Artificial Sequence
  Description of Artificial Sequence: Synthetic peptide
  Seed: GMMMGMFNMLSTVLGVS
GMMMGMLNMLSGVLKVS

SEQ ID NO: 183719 - protein, 17 aa, Artificial Sequence
  Description of Artificial Sequence: Synthetic peptide
  Seed: GMMMGMFNMLSTVLGVS
GMMMGMLNMLSGVLLVS

SEQ ID NO: 183720 - protein, 17 aa, Artificial Sequence
  Description of Artificial Sequence: Synthetic peptide
  Seed: GMMMGMFNMLSTVLGVS
GMMMGMLNMLSGVLNVS

SEQ ID NO: 183721 - protein, 17 aa, Artificial Sequence
  Description of Artificial Sequence: Synthetic peptide
  Seed: GMMMGMFNMLSTVLGVS
GMMMGMLNMLSGVLRVS

SEQ ID NO: 183722 - protein, 17 aa, Artificial Sequence
  Description of Artificial Sequence: Synthetic peptide
  Seed: GMMMGMFNMLSTVLGVS
GMMMGMLNMLSGVLSVS

SEQ ID NO: 183723 - protein, 17 aa, Artificial Sequence
  Description of Artificial Sequence: Synthetic peptide
  Seed: GMMMGMFNMLSTVLGVS
GMMMGMLNMLSGVLTVS

SEQ ID NO: 183724 - protein, 17 aa, Artificial Sequence
  Description of Artificial Sequence: Synthetic peptide
  Seed: GMMMGMFNMLSTVLGVS
GMMMGMLNMLSGVLVVS

SEQ ID NO: 183725 - protein, 17 aa, Artificial Sequence
  Description of Artificial Sequence: Synthetic peptide
  Seed: GMMMGMFNMLSTVLGVS
GMMMGMLNMLSKVLHVS

SEQ ID NO: 183726 - protein, 17 aa, Artificial Sequence
  Description of Artificial Sequence: Synthetic peptide
  Seed: GMMMGMFNMLSTVLGVS
GMMMGMLNMLSKVLKVS

SEQ ID NO: 183727 - protein, 17 aa, Artificial Sequence
  Description of Artificial Sequence: Synthetic peptide
  Seed: GMMMGMFNMLSTVLGVS
GMMMGMLNMLSKVLRVS

SEQ ID NO: 183728 - protein, 17 aa, Artificial Sequence
  Description of Artificial Sequence: Synthetic peptide
  Seed: GMMMGMFNMLSTVLGVS
GMMMGMLNMLSNVLAVS

SEQ ID NO: 183729 - protein, 17 aa, Artificial Sequence
  Description of Artificial Sequence: Synthetic peptide
  Seed: GMMMGMFNMLSTVLGVS
GMMMGMLNMLSNVLNVS

SEQ ID NO: 183730 - protein, 17 aa, Artificial Sequence
  Description of Artificial Sequence: Synthetic peptide
  Seed: GMMMGMFNMLSTVLGVS
GMMMGMLNMLSNVLSVS

SEQ ID NO: 183731 - protein, 17 aa, Artificial Sequence
  Description of Artificial Sequence: Synthetic peptide
  Seed: GMMMGMFNMLSTVLGVS
GMMMGMLNMLSNVLTVS

SEQ ID NO: 183732 - protein, 17 aa, Artificial Sequence
  Description of Artificial Sequence: Synthetic peptide
  Seed: GMMMGMFNMLSTVLGVS
GMMMGMLNMLSPVLAVS

SEQ ID NO: 183733 - protein, 17 aa, Artificial Sequence
  Description of Artificial Sequence: Synthetic peptide
  Seed: GMMMGMFNMLSTVLGVS
GMMMGMLNMLSPVLGVS

SEQ ID NO: 183734 - protein, 17 aa, Artificial Sequence
  Description of Artificial Sequence: Synthetic peptide
  Seed: GMMMGMFNMLSTVLGVS
GMMMGMLNMLSPVLHVS

SEQ ID NO: 183735 - protein, 17 aa, Artificial Sequence
  Description of Artificial Sequence: Synthetic peptide
  Seed: GMMMGMFNMLSTVLGVS
GMMMGMLNMLSPVLIVS

SEQ ID NO: 183736 - protein, 17 aa, Artificial Sequence
  Description of Artificial Sequence: Synthetic peptide
  Seed: GMMMGMFNMLSTVLGVS
GMMMGMLNMLSPVLLVS

SEQ ID NO: 183737 - protein, 17 aa, Artificial Sequence
  Description of Artificial Sequence: Synthetic peptide
  Seed: GMMMGMFNMLSTVLGVS
GMMMGMLNMLSPVLMVS

SEQ ID NO: 183738 - protein, 17 aa, Artificial Sequence
  Description of Artificial Sequence: Synthetic peptide
  Seed: GMMMGMFNMLSTVLGVS
GMMMGMLNMLSPVLNVS

SEQ ID NO: 183739 - protein, 17 aa, Artificial Sequence
  Description of Artificial Sequence: Synthetic peptide
  Seed: GMMMGMFNMLSTVLGVS
GMMMGMLNMLSPVLQVS

SEQ ID NO: 183740 - protein, 17 aa, Artificial Sequence
  Description of Artificial Sequence: Synthetic peptide
  Seed: GMMMGMFNMLSTVLGVS
GMMMGMLNMLSPVLRVS

SEQ ID NO: 183741 - protein, 17 aa, Artificial Sequence
  Description of Artificial Sequence: Synthetic peptide
  Seed: GMMMGMFNMLSTVLGVS
GMMMGMLNMLSPVLSVS

SEQ ID NO: 183742 - protein, 17 aa, Artificial Sequence
  Description of Artificial Sequence: Synthetic peptide
  Seed: GMMMGMFNMLSTVLGVS
GMMMGMLNMLSPVLTVS

SEQ ID NO: 183743 - protein, 17 aa, Artificial Sequence
  Description of Artificial Sequence: Synthetic peptide
  Seed: GMMMGMFNMLSTVLGVS
GMMMGMLNMLSPVLVVS

SEQ ID NO: 183744 - protein, 17 aa, Artificial Sequence
  Description of Artificial Sequence: Synthetic peptide
  Seed: GMMMGMFNMLSTVLGVS
GMMMGMLNMLSRVLHVS

SEQ ID NO: 183745 - protein, 17 aa, Artificial Sequence
  Description of Artificial Sequence: Synthetic peptide
  Seed: GMMMGMFNMLSTVLGVS
GMMMGMLNMLSRVLKVS

SEQ ID NO: 183746 - protein, 17 aa, Artificial Sequence
  Description of Artificial Sequence: Synthetic peptide
  Seed: GMMMGMFNMLSTVLGVS
GMMMGMLNMLSRVLRVS

SEQ ID NO: 183747 - protein, 17 aa, Artificial Sequence
  Description of Artificial Sequence: Synthetic peptide
  Seed: GMMMGMFNMLSTVLGVS
GMMMGMLNMLSSVLAVS

SEQ ID NO: 183748 - protein, 17 aa, Artificial Sequence
  Description of Artificial Sequence: Synthetic peptide
  Seed: GMMMGMFNMLSTVLGVS
GMMMGMLNMLSSVLHVS

SEQ ID NO: 183749 - protein, 17 aa, Artificial Sequence
  Description of Artificial Sequence: Synthetic peptide
  Seed: GMMMGMFNMLSTVLGVS
GMMMGMLNMLSSVLKVS

SEQ ID NO: 183750 - protein, 17 aa, Artificial Sequence
  Description of Artificial Sequence: Synthetic peptide
  Seed: GMMMGMFNMLSTVLGVS
GMMMGMLNMLSSVLNVS

SEQ ID NO: 183751 - protein, 17 aa, Artificial Sequence
  Description of Artificial Sequence: Synthetic peptide
  Seed: GMMMGMFNMLSTVLGVS
GMMMGMLNMLSSVLRVS

SEQ ID NO: 183752 - protein, 17 aa, Artificial Sequence
  Description of Artificial Sequence: Synthetic peptide
  Seed: GMMMGMFNMLSTVLGVS
GMMMGMLNMLSSVLSVS

SEQ ID NO: 183753 - protein, 17 aa, Artificial Sequence
  Description of Artificial Sequence: Synthetic peptide
  Seed: GMMMGMFNMLSTVLGVS
GMMMGMLNMLSSVLTVS

SEQ ID NO: 183754 - protein, 17 aa, Artificial Sequence
  Description of Artificial Sequence: Synthetic peptide
  Seed: GMMMGMFNMLSTVLGVS
GMMMGMLNMLSSVLVVS

SEQ ID NO: 183755 - protein, 17 aa, Artificial Sequence
  Description of Artificial Sequence: Synthetic peptide
  Seed: GMMMGMFNMLSTVLGVS
GMMMGMLNMLSTVLHVS

SEQ ID NO: 183756 - protein, 17 aa, Artificial Sequence
  Description of Artificial Sequence: Synthetic peptide
  Seed: GMMMGMFNMLSTVLGVS
GMMMGMLNMLSTVLNVS

SEQ ID NO: 183757 - protein, 17 aa, Artificial Sequence
  Description of Artificial Sequence: Synthetic peptide
  Seed: GMMMGMFNMLSTVLGVS
GMMMGMLNMMSAVLAVS

SEQ ID NO: 183758 - protein, 17 aa, Artificial Sequence
  Description of Artificial Sequence: Synthetic peptide
  Seed: GMMMGMFNMLSTVLGVS
GMMMGMLNMMSAVLDVS

SEQ ID NO: 183759 - protein, 17 aa, Artificial Sequence
  Description of Artificial Sequence: Synthetic peptide
  Seed: GMMMGMFNMLSTVLGVS
GMMMGMLNMMSAVLGVS

SEQ ID NO: 183760 - protein, 17 aa, Artificial Sequence
  Description of Artificial Sequence: Synthetic peptide
  Seed: GMMMGMFNMLSTVLGVS
GMMMGMLNMMSAVLHVS

SEQ ID NO: 183761 - protein, 17 aa, Artificial Sequence
  Description of Artificial Sequence: Synthetic peptide
  Seed: GMMMGMFNMLSTVLGVS
GMMMGMLNMMSAVLIVS

SEQ ID NO: 183762 - protein, 17 aa, Artificial Sequence
  Description of Artificial Sequence: Synthetic peptide
  Seed: GMMMGMFNMLSTVLGVS
GMMMGMLNMMSAVLKVS

SEQ ID NO: 183763 - protein, 17 aa, Artificial Sequence
  Description of Artificial Sequence: Synthetic peptide
  Seed: GMMMGMFNMLSTVLGVS
GMMMGMLNMMSAVLLVS

SEQ ID NO: 183764 - protein, 17 aa, Artificial Sequence
  Description of Artificial Sequence: Synthetic peptide
  Seed: GMMMGMFNMLSTVLGVS
GMMMGMLNMMSAVLMVS

SEQ ID NO: 183765 - protein, 17 aa, Artificial Sequence
  Description of Artificial Sequence: Synthetic peptide
  Seed: GMMMGMFNMLSTVLGVS
GMMMGMLNMMSAVLNVS

SEQ ID NO: 183766 - protein, 17 aa, Artificial Sequence
  Description of Artificial Sequence: Synthetic peptide
  Seed: GMMMGMFNMLSTVLGVS
GMMMGMLNMMSAVLQVS

SEQ ID NO: 183767 - protein, 17 aa, Artificial Sequence
  Description of Artificial Sequence: Synthetic peptide
  Seed: GMMMGMFNMLSTVLGVS
GMMMGMLNMMSAVLRVS

SEQ ID NO: 183768 - protein, 17 aa, Artificial Sequence
  Description of Artificial Sequence: Synthetic peptide
  Seed: GMMMGMFNMLSTVLGVS
GMMMGMLNMMSAVLSVS

SEQ ID NO: 183769 - protein, 17 aa, Artificial Sequence
  Description of Artificial Sequence: Synthetic peptide
  Seed: GMMMGMFNMLSTVLGVS
GMMMGMLNMMSAVLTVS

SEQ ID NO: 183770 - protein, 17 aa, Artificial Sequence
  Description of Artificial Sequence: Synthetic peptide
  Seed: GMMMGMFNMLSTVLGVS
GMMMGMLNMMSAVLVVS

SEQ ID NO: 183771 - protein, 17 aa, Artificial Sequence
  Description of Artificial Sequence: Synthetic peptide
  Seed: GMMMGMFNMLSTVLGVS
GMMMGMLNMMSGVLAVS

SEQ ID NO: 183772 - protein, 17 aa, Artificial Sequence
  Description of Artificial Sequence: Synthetic peptide
  Seed: GMMMGMFNMLSTVLGVS
GMMMGMLNMMSGVLGVS

SEQ ID NO: 183773 - protein, 17 aa, Artificial Sequence
  Description of Artificial Sequence: Synthetic peptide
  Seed: GMMMGMFNMLSTVLGVS
GMMMGMLNMMSGVLHVS

SEQ ID NO: 183774 - protein, 17 aa, Artificial Sequence
  Description of Artificial Sequence: Synthetic peptide
  Seed: GMMMGMFNMLSTVLGVS
GMMMGMLNMMSGVLIVS

SEQ ID NO: 183775 - protein, 17 aa, Artificial Sequence
  Description of Artificial Sequence: Synthetic peptide
  Seed: GMMMGMFNMLSTVLGVS
GMMMGMLNMMSGVLKVS

SEQ ID NO: 183776 - protein, 17 aa, Artificial Sequence
  Description of Artificial Sequence: Synthetic peptide
  Seed: GMMMGMFNMLSTVLGVS
GMMMGMLNMMSGVLLVS

SEQ ID NO: 183777 - protein, 17 aa, Artificial Sequence
  Description of Artificial Sequence: Synthetic peptide
  Seed: GMMMGMFNMLSTVLGVS
GMMMGMLNMMSGVLMVS

SEQ ID NO: 183778 - protein, 17 aa, Artificial Sequence
  Description of Artificial Sequence: Synthetic peptide
  Seed: GMMMGMFNMLSTVLGVS
GMMMGMLNMMSGVLNVS

SEQ ID NO: 183779 - protein, 17 aa, Artificial Sequence
  Description of Artificial Sequence: Synthetic peptide
  Seed: GMMMGMFNMLSTVLGVS
GMMMGMLNMMSGVLRVS

SEQ ID NO: 183780 - protein, 17 aa, Artificial Sequence
  Description of Artificial Sequence: Synthetic peptide
  Seed: GMMMGMFNMLSTVLGVS
GMMMGMLNMMSGVLSVS

SEQ ID NO: 183781 - protein, 17 aa, Artificial Sequence
  Description of Artificial Sequence: Synthetic peptide
  Seed: GMMMGMFNMLSTVLGVS
GMMMGMLNMMSGVLTVS

SEQ ID NO: 183782 - protein, 17 aa, Artificial Sequence
  Description of Artificial Sequence: Synthetic peptide
  Seed: GMMMGMFNMLSTVLGVS
GMMMGMLNMMSGVLVVS

SEQ ID NO: 183783 - protein, 17 aa, Artificial Sequence
  Description of Artificial Sequence: Synthetic peptide
  Seed: GMMMGMFNMLSTVLGVS
GMMMGMLNMMSKVLHVS

SEQ ID NO: 183784 - protein, 17 aa, Artificial Sequence
  Description of Artificial Sequence: Synthetic peptide
  Seed: GMMMGMFNMLSTVLGVS
GMMMGMLNMMSKVLKVS

SEQ ID NO: 183785 - protein, 17 aa, Artificial Sequence
  Description of Artificial Sequence: Synthetic peptide
  Seed: GMMMGMFNMLSTVLGVS
GMMMGMLNMMSKVLRVS

SEQ ID NO: 183786 - protein, 17 aa, Artificial Sequence
  Description of Artificial Sequence: Synthetic peptide
  Seed: GMMMGMFNMLSTVLGVS
GMMMGMLNMMSKVLSVS

SEQ ID NO: 183787 - protein, 17 aa, Artificial Sequence
  Description of Artificial Sequence: Synthetic peptide
  Seed: GMMMGMFNMLSTVLGVS
GMMMGMLNMMSNVLAVS

SEQ ID NO: 183788 - protein, 17 aa, Artificial Sequence
  Description of Artificial Sequence: Synthetic peptide
  Seed: GMMMGMFNMLSTVLGVS
GMMMGMLNMMSNVLGVS

SEQ ID NO: 183789 - protein, 17 aa, Artificial Sequence
  Description of Artificial Sequence: Synthetic peptide
  Seed: GMMMGMFNMLSTVLGVS
GMMMGMLNMMSNVLHVS

SEQ ID NO: 183790 - protein, 17 aa, Artificial Sequence
  Description of Artificial Sequence: Synthetic peptide
  Seed: GMMMGMFNMLSTVLGVS
GMMMGMLNMMSNVLNVS

SEQ ID NO: 183791 - protein, 17 aa, Artificial Sequence
  Description of Artificial Sequence: Synthetic peptide
  Seed: GMMMGMFNMLSTVLGVS
GMMMGMLNMMSNVLQVS

SEQ ID NO: 183792 - protein, 17 aa, Artificial Sequence
  Description of Artificial Sequence: Synthetic peptide
  Seed: GMMMGMFNMLSTVLGVS
GMMMGMLNMMSNVLSVS

SEQ ID NO: 183793 - protein, 17 aa, Artificial Sequence
  Description of Artificial Sequence: Synthetic peptide
  Seed: GMMMGMFNMLSTVLGVS
GMMMGMLNMMSNVLTVS

SEQ ID NO: 183794 - protein, 17 aa, Artificial Sequence
  Description of Artificial Sequence: Synthetic peptide
  Seed: GMMMGMFNMLSTVLGVS
GMMMGMLNMMSNVLVVS

SEQ ID NO: 183795 - protein, 17 aa, Artificial Sequence
  Description of Artificial Sequence: Synthetic peptide
  Seed: GMMMGMFNMLSTVLGVS
GMMMGMLNMMSPVLAVS

SEQ ID NO: 183796 - protein, 17 aa, Artificial Sequence
  Description of Artificial Sequence: Synthetic peptide
  Seed: GMMMGMFNMLSTVLGVS
GMMMGMLNMMSPVLDVS

SEQ ID NO: 183797 - protein, 17 aa, Artificial Sequence
  Description of Artificial Sequence: Synthetic peptide
  Seed: GMMMGMFNMLSTVLGVS
GMMMGMLNMMSPVLEVS

SEQ ID NO: 183798 - protein, 17 aa, Artificial Sequence
  Description of Artificial Sequence: Synthetic peptide
  Seed: GMMMGMFNMLSTVLGVS
GMMMGMLNMMSPVLFVS

SEQ ID NO: 183799 - protein, 17 aa, Artificial Sequence
  Description of Artificial Sequence: Synthetic peptide
  Seed: GMMMGMFNMLSTVLGVS
GMMMGMLNMMSPVLGVS

SEQ ID NO: 183800 - protein, 17 aa, Artificial Sequence
  Description of Artificial Sequence: Synthetic peptide
  Seed: GMMMGMFNMLSTVLGVS
GMMMGMLNMMSPVLHVS

SEQ ID NO: 183801 - protein, 17 aa, Artificial Sequence
  Description of Artificial Sequence: Synthetic peptide
  Seed: GMMMGMFNMLSTVLGVS
GMMMGMLNMMSPVLIVS

SEQ ID NO: 183802 - protein, 17 aa, Artificial Sequence
  Description of Artificial Sequence: Synthetic peptide
  Seed: GMMMGMFNMLSTVLGVS
GMMMGMLNMMSPVLKVS

SEQ ID NO: 183803 - protein, 17 aa, Artificial Sequence
  Description of Artificial Sequence: Synthetic peptide
  Seed: GMMMGMFNMLSTVLGVS
GMMMGMLNMMSPVLLVS

SEQ ID NO: 183804 - protein, 17 aa, Artificial Sequence
  Description of Artificial Sequence: Synthetic peptide
  Seed: GMMMGMFNMLSTVLGVS
GMMMGMLNMMSPVLMVS

SEQ ID NO: 183805 - protein, 17 aa, Artificial Sequence
  Description of Artificial Sequence: Synthetic peptide
  Seed: GMMMGMFNMLSTVLGVS
GMMMGMLNMMSPVLNVS

SEQ ID NO: 183806 - protein, 17 aa, Artificial Sequence
  Description of Artificial Sequence: Synthetic peptide
  Seed: GMMMGMFNMLSTVLGVS
GMMMGMLNMMSPVLPVS

SEQ ID NO: 183807 - protein, 17 aa, Artificial Sequence
  Description of Artificial Sequence: Synthetic peptide
  Seed: GMMMGMFNMLSTVLGVS
GMMMGMLNMMSPVLQVS

SEQ ID NO: 183808 - protein, 17 aa, Artificial Sequence
  Description of Artificial Sequence: Synthetic peptide
  Seed: GMMMGMFNMLSTVLGVS
GMMMGMLNMMSPVLRVS

SEQ ID NO: 183809 - protein, 17 aa, Artificial Sequence
  Description of Artificial Sequence: Synthetic peptide
  Seed: GMMMGMFNMLSTVLGVS
GMMMGMLNMMSPVLSVS

SEQ ID NO: 183810 - protein, 17 aa, Artificial Sequence
  Description of Artificial Sequence: Synthetic peptide
  Seed: GMMMGMFNMLSTVLGVS
GMMMGMLNMMSPVLTVS

SEQ ID NO: 183811 - protein, 17 aa, Artificial Sequence
  Description of Artificial Sequence: Synthetic peptide
  Seed: GMMMGMFNMLSTVLGVS
GMMMGMLNMMSPVLVVS

SEQ ID NO: 183812 - protein, 17 aa, Artificial Sequence
  Description of Artificial Sequence: Synthetic peptide
  Seed: GMMMGMFNMLSTVLGVS
GMMMGMLNMMSPVLYVS

SEQ ID NO: 183813 - protein, 17 aa, Artificial Sequence
  Description of Artificial Sequence: Synthetic peptide
  Seed: GMMMGMFNMLSTVLGVS
GMMMGMLNMMSRVLAVS

SEQ ID NO: 183814 - protein, 17 aa, Artificial Sequence
  Description of Artificial Sequence: Synthetic peptide
  Seed: GMMMGMFNMLSTVLGVS
GMMMGMLNMMSRVLHVS

SEQ ID NO: 183815 - protein, 17 aa, Artificial Sequence
  Description of Artificial Sequence: Synthetic peptide
  Seed: GMMMGMFNMLSTVLGVS
GMMMGMLNMMSRVLKVS

SEQ ID NO: 183816 - protein, 17 aa, Artificial Sequence
  Description of Artificial Sequence: Synthetic peptide
  Seed: GMMMGMFNMLSTVLGVS
GMMMGMLNMMSRVLNVS

SEQ ID NO: 183817 - protein, 17 aa, Artificial Sequence
  Description of Artificial Sequence: Synthetic peptide
  Seed: GMMMGMFNMLSTVLGVS
GMMMGMLNMMSRVLRVS

SEQ ID NO: 183818 - protein, 17 aa, Artificial Sequence
  Description of Artificial Sequence: Synthetic peptide
  Seed: GMMMGMFNMLSTVLGVS
GMMMGMLNMMSSVLAVS

SEQ ID NO: 183819 - protein, 17 aa, Artificial Sequence
  Description of Artificial Sequence: Synthetic peptide
  Seed: GMMMGMFNMLSTVLGVS
GMMMGMLNMMSSVLGVS

SEQ ID NO: 183820 - protein, 17 aa, Artificial Sequence
  Description of Artificial Sequence: Synthetic peptide
  Seed: GMMMGMFNMLSTVLGVS
GMMMGMLNMMSSVLHVS

SEQ ID NO: 183821 - protein, 17 aa, Artificial Sequence
  Description of Artificial Sequence: Synthetic peptide
  Seed: GMMMGMFNMLSTVLGVS
GMMMGMLNMMSSVLKVS

SEQ ID NO: 183822 - protein, 17 aa, Artificial Sequence
  Description of Artificial Sequence: Synthetic peptide
  Seed: GMMMGMFNMLSTVLGVS
GMMMGMLNMMSSVLLVS

SEQ ID NO: 183823 - protein, 17 aa, Artificial Sequence
  Description of Artificial Sequence: Synthetic peptide
  Seed: GMMMGMFNMLSTVLGVS
GMMMGMLNMMSSVLNVS

SEQ ID NO: 183824 - protein, 17 aa, Artificial Sequence
  Description of Artificial Sequence: Synthetic peptide
  Seed: GMMMGMFNMLSTVLGVS
GMMMGMLNMMSSVLRVS

SEQ ID NO: 183825 - protein, 17 aa, Artificial Sequence
  Description of Artificial Sequence: Synthetic peptide
  Seed: GMMMGMFNMLSTVLGVS
GMMMGMLNMMSSVLSVS

SEQ ID NO: 183826 - protein, 17 aa, Artificial Sequence
  Description of Artificial Sequence: Synthetic peptide
  Seed: GMMMGMFNMLSTVLGVS
GMMMGMLNMMSSVLTVS

SEQ ID NO: 183827 - protein, 17 aa, Artificial Sequence
  Description of Artificial Sequence: Synthetic peptide
  Seed: GMMMGMFNMLSTVLGVS
GMMMGMLNMMSSVLVVS

SEQ ID NO: 183828 - protein, 17 aa, Artificial Sequence
  Description of Artificial Sequence: Synthetic peptide
  Seed: GMMMGMFNMLSTVLGVS
GMMMGMLNMMSTVLAVS

SEQ ID NO: 183829 - protein, 17 aa, Artificial Sequence
  Description of Artificial Sequence: Synthetic peptide
  Seed: GMMMGMFNMLSTVLGVS
GMMMGMLNMMSTVLHVS

SEQ ID NO: 183830 - protein, 17 aa, Artificial Sequence
  Description of Artificial Sequence: Synthetic peptide
  Seed: GMMMGMFNMLSTVLGVS
GMMMGMLNMMSTVLNVS

SEQ ID NO: 183831 - protein, 17 aa, Artificial Sequence
  Description of Artificial Sequence: Synthetic peptide
  Seed: GMMMGMFNMLSTVLGVS
GMMMGMLNMMSTVLSVS

SEQ ID NO: 183832 - protein, 17 aa, Artificial Sequence
  Description of Artificial Sequence: Synthetic peptide
  Seed: GMMMGMFNMLSTVLGVS
GMMMGMLNMMSVVLHVS

SEQ ID NO: 183833 - protein, 17 aa, Artificial Sequence
  Description of Artificial Sequence: Synthetic peptide
  Seed: GMMMGMFNMLSTVLGVS
GMMMGMLNMNSAVLAVS

SEQ ID NO: 183834 - protein, 17 aa, Artificial Sequence
  Description of Artificial Sequence: Synthetic peptide
  Seed: GMMMGMFNMLSTVLGVS
GMMMGMLNMNSAVLFVS

SEQ ID NO: 183835 - protein, 17 aa, Artificial Sequence
  Description of Artificial Sequence: Synthetic peptide
  Seed: GMMMGMFNMLSTVLGVS
GMMMGMLNMNSAVLHVS

SEQ ID NO: 183836 - protein, 17 aa, Artificial Sequence
  Description of Artificial Sequence: Synthetic peptide
  Seed: GMMMGMFNMLSTVLGVS
GMMMGMLNMNSAVLIVS

SEQ ID NO: 183837 - protein, 17 aa, Artificial Sequence
  Description of Artificial Sequence: Synthetic peptide
  Seed: GMMMGMFNMLSTVLGVS
GMMMGMLNMNSAVLKVS

SEQ ID NO: 183838 - protein, 17 aa, Artificial Sequence
  Description of Artificial Sequence: Synthetic peptide
  Seed: GMMMGMFNMLSTVLGVS
GMMMGMLNMNSAVLLVS

SEQ ID NO: 183839 - protein, 17 aa, Artificial Sequence
  Description of Artificial Sequence: Synthetic peptide
  Seed: GMMMGMFNMLSTVLGVS
GMMMGMLNMNSAVLMVS

SEQ ID NO: 183840 - protein, 17 aa, Artificial Sequence
  Description of Artificial Sequence: Synthetic peptide
  Seed: GMMMGMFNMLSTVLGVS
GMMMGMLNMNSAVLNVS

SEQ ID NO: 183841 - protein, 17 aa, Artificial Sequence
  Description of Artificial Sequence: Synthetic peptide
  Seed: GMMMGMFNMLSTVLGVS
GMMMGMLNMNSAVLQVS

SEQ ID NO: 183842 - protein, 17 aa, Artificial Sequence
  Description of Artificial Sequence: Synthetic peptide
  Seed: GMMMGMFNMLSTVLGVS
GMMMGMLNMNSAVLRVS

SEQ ID NO: 183843 - protein, 17 aa, Artificial Sequence
  Description of Artificial Sequence: Synthetic peptide
  Seed: GMMMGMFNMLSTVLGVS
GMMMGMLNMNSAVLSVS

SEQ ID NO: 183844 - protein, 17 aa, Artificial Sequence
  Description of Artificial Sequence: Synthetic peptide
  Seed: GMMMGMFNMLSTVLGVS
GMMMGMLNMNSAVLTVS

SEQ ID NO: 183845 - protein, 17 aa, Artificial Sequence
  Description of Artificial Sequence: Synthetic peptide
  Seed: GMMMGMFNMLSTVLGVS
GMMMGMLNMNSAVLVVS

SEQ ID NO: 183846 - protein, 17 aa, Artificial Sequence
  Description of Artificial Sequence: Synthetic peptide
  Seed: GMMMGMFNMLSTVLGVS
GMMMGMLNMNSAVLYVS

SEQ ID NO: 183847 - protein, 17 aa, Artificial Sequence
  Description of Artificial Sequence: Synthetic peptide
  Seed: GMMMGMFNMLSTVLGVS
GMMMGMLNMNSGVLAVS

SEQ ID NO: 183848 - protein, 17 aa, Artificial Sequence
  Description of Artificial Sequence: Synthetic peptide
  Seed: GMMMGMFNMLSTVLGVS
GMMMGMLNMNSGVLFVS

SEQ ID NO: 183849 - protein, 17 aa, Artificial Sequence
  Description of Artificial Sequence: Synthetic peptide
  Seed: GMMMGMFNMLSTVLGVS
GMMMGMLNMNSGVLIVS

SEQ ID NO: 183850 - protein, 17 aa, Artificial Sequence
  Description of Artificial Sequence: Synthetic peptide
  Seed: GMMMGMFNMLSTVLGVS
GMMMGMLNMNSGVLLVS

SEQ ID NO: 183851 - protein, 17 aa, Artificial Sequence
  Description of Artificial Sequence: Synthetic peptide
  Seed: GMMMGMFNMLSTVLGVS
GMMMGMLNMNSGVLMVS

SEQ ID NO: 183852 - protein, 17 aa, Artificial Sequence
  Description of Artificial Sequence: Synthetic peptide
  Seed: GMMMGMFNMLSTVLGVS
GMMMGMLNMNSGVLVVS

SEQ ID NO: 183853 - protein, 17 aa, Artificial Sequence
  Description of Artificial Sequence: Synthetic peptide
  Seed: GMMMGMFNMLSTVLGVS
GMMMGMLNMNSGVLYVS

SEQ ID NO: 183854 - protein, 17 aa, Artificial Sequence
  Description of Artificial Sequence: Synthetic peptide
  Seed: GMMMGMFNMLSTVLGVS
GMMMGMLNMNSHVLIVS

SEQ ID NO: 183855 - protein, 17 aa, Artificial Sequence
  Description of Artificial Sequence: Synthetic peptide
  Seed: GMMMGMFNMLSTVLGVS
GMMMGMLNMNSHVLVVS

SEQ ID NO: 183856 - protein, 17 aa, Artificial Sequence
  Description of Artificial Sequence: Synthetic peptide
  Seed: GMMMGMFNMLSTVLGVS
GMMMGMLNMNSHVLYVS

SEQ ID NO: 183857 - protein, 17 aa, Artificial Sequence
  Description of Artificial Sequence: Synthetic peptide
  Seed: GMMMGMFNMLSTVLGVS
GMMMGMLNMNSIVLIVS

SEQ ID NO: 183858 - protein, 17 aa, Artificial Sequence
  Description of Artificial Sequence: Synthetic peptide
  Seed: GMMMGMFNMLSTVLGVS
GMMMGMLNMNSIVLVVS

SEQ ID NO: 183859 - protein, 17 aa, Artificial Sequence
  Description of Artificial Sequence: Synthetic peptide
  Seed: GMMMGMFNMLSTVLGVS
GMMMGMLNMNSIVLYVS

SEQ ID NO: 183860 - protein, 17 aa, Artificial Sequence
  Description of Artificial Sequence: Synthetic peptide
  Seed: GMMMGMFNMLSTVLGVS
GMMMGMLNMNSKVLIVS

SEQ ID NO: 183861 - protein, 17 aa, Artificial Sequence
  Description of Artificial Sequence: Synthetic peptide
  Seed: GMMMGMFNMLSTVLGVS
GMMMGMLNMNSKVLVVS

SEQ ID NO: 183862 - protein, 17 aa, Artificial Sequence
  Description of Artificial Sequence: Synthetic peptide
  Seed: GMMMGMFNMLSTVLGVS
GMMMGMLNMNSNVLAVS

SEQ ID NO: 183863 - protein, 17 aa, Artificial Sequence
  Description of Artificial Sequence: Synthetic peptide
  Seed: GMMMGMFNMLSTVLGVS
GMMMGMLNMNSNVLFVS

SEQ ID NO: 183864 - protein, 17 aa, Artificial Sequence
  Description of Artificial Sequence: Synthetic peptide
  Seed: GMMMGMFNMLSTVLGVS
GMMMGMLNMNSNVLHVS

SEQ ID NO: 183865 - protein, 17 aa, Artificial Sequence
  Description of Artificial Sequence: Synthetic peptide
  Seed: GMMMGMFNMLSTVLGVS
GMMMGMLNMNSNVLIVS

SEQ ID NO: 183866 - protein, 17 aa, Artificial Sequence
  Description of Artificial Sequence: Synthetic peptide
  Seed: GMMMGMFNMLSTVLGVS
GMMMGMLNMNSNVLKVS

SEQ ID NO: 183867 - protein, 17 aa, Artificial Sequence
  Description of Artificial Sequence: Synthetic peptide
  Seed: GMMMGMFNMLSTVLGVS
GMMMGMLNMNSNVLLVS

SEQ ID NO: 183868 - protein, 17 aa, Artificial Sequence
  Description of Artificial Sequence: Synthetic peptide
  Seed: GMMMGMFNMLSTVLGVS
GMMMGMLNMNSNVLMVS

SEQ ID NO: 183869 - protein, 17 aa, Artificial Sequence
  Description of Artificial Sequence: Synthetic peptide
  Seed: GMMMGMFNMLSTVLGVS
GMMMGMLNMNSNVLRVS

SEQ ID NO: 183870 - protein, 17 aa, Artificial Sequence
  Description of Artificial Sequence: Synthetic peptide
  Seed: GMMMGMFNMLSTVLGVS
GMMMGMLNMNSNVLSVS

SEQ ID NO: 183871 - protein, 17 aa, Artificial Sequence
  Description of Artificial Sequence: Synthetic peptide
  Seed: GMMMGMFNMLSTVLGVS
GMMMGMLNMNSNVLTVS

SEQ ID NO: 183872 - protein, 17 aa, Artificial Sequence
  Description of Artificial Sequence: Synthetic peptide
  Seed: GMMMGMFNMLSTVLGVS
GMMMGMLNMNSNVLVVS

SEQ ID NO: 183873 - protein, 17 aa, Artificial Sequence
  Description of Artificial Sequence: Synthetic peptide
  Seed: GMMMGMFNMLSTVLGVS
GMMMGMLNMNSNVLYVS

SEQ ID NO: 183874 - protein, 17 aa, Artificial Sequence
  Description of Artificial Sequence: Synthetic peptide
  Seed: GMMMGMFNMLSTVLGVS
GMMMGMLNMNSPVLAVS

SEQ ID NO: 183875 - protein, 17 aa, Artificial Sequence
  Description of Artificial Sequence: Synthetic peptide
  Seed: GMMMGMFNMLSTVLGVS
GMMMGMLNMNSPVLFVS

SEQ ID NO: 183876 - protein, 17 aa, Artificial Sequence
  Description of Artificial Sequence: Synthetic peptide
  Seed: GMMMGMFNMLSTVLGVS
GMMMGMLNMNSPVLIVS

SEQ ID NO: 183877 - protein, 17 aa, Artificial Sequence
  Description of Artificial Sequence: Synthetic peptide
  Seed: GMMMGMFNMLSTVLGVS
GMMMGMLNMNSPVLLVS

SEQ ID NO: 183878 - protein, 17 aa, Artificial Sequence
  Description of Artificial Sequence: Synthetic peptide
  Seed: GMMMGMFNMLSTVLGVS
GMMMGMLNMNSPVLMVS

SEQ ID NO: 183879 - protein, 17 aa, Artificial Sequence
  Description of Artificial Sequence: Synthetic peptide
  Seed: GMMMGMFNMLSTVLGVS
GMMMGMLNMNSPVLSVS

SEQ ID NO: 183880 - protein, 17 aa, Artificial Sequence
  Description of Artificial Sequence: Synthetic peptide
  Seed: GMMMGMFNMLSTVLGVS
GMMMGMLNMNSPVLTVS

SEQ ID NO: 183881 - protein, 17 aa, Artificial Sequence
  Description of Artificial Sequence: Synthetic peptide
  Seed: GMMMGMFNMLSTVLGVS
GMMMGMLNMNSPVLVVS

SEQ ID NO: 183882 - protein, 17 aa, Artificial Sequence
  Description of Artificial Sequence: Synthetic peptide
  Seed: GMMMGMFNMLSTVLGVS
GMMMGMLNMNSPVLYVS

SEQ ID NO: 183883 - protein, 17 aa, Artificial Sequence
  Description of Artificial Sequence: Synthetic peptide
  Seed: GMMMGMFNMLSTVLGVS
GMMMGMLNMNSRVLIVS

SEQ ID NO: 183884 - protein, 17 aa, Artificial Sequence
  Description of Artificial Sequence: Synthetic peptide
  Seed: GMMMGMFNMLSTVLGVS
GMMMGMLNMNSRVLVVS

SEQ ID NO: 183885 - protein, 17 aa, Artificial Sequence
  Description of Artificial Sequence: Synthetic peptide
  Seed: GMMMGMFNMLSTVLGVS
GMMMGMLNMNSSVLAVS

SEQ ID NO: 183886 - protein, 17 aa, Artificial Sequence
  Description of Artificial Sequence: Synthetic peptide
  Seed: GMMMGMFNMLSTVLGVS
GMMMGMLNMNSSVLFVS

SEQ ID NO: 183887 - protein, 17 aa, Artificial Sequence
  Description of Artificial Sequence: Synthetic peptide
  Seed: GMMMGMFNMLSTVLGVS
GMMMGMLNMNSSVLHVS

SEQ ID NO: 183888 - protein, 17 aa, Artificial Sequence
  Description of Artificial Sequence: Synthetic peptide
  Seed: GMMMGMFNMLSTVLGVS
GMMMGMLNMNSSVLIVS

SEQ ID NO: 183889 - protein, 17 aa, Artificial Sequence
  Description of Artificial Sequence: Synthetic peptide
  Seed: GMMMGMFNMLSTVLGVS
GMMMGMLNMNSSVLLVS

SEQ ID NO: 183890 - protein, 17 aa, Artificial Sequence
  Description of Artificial Sequence: Synthetic peptide
  Seed: GMMMGMFNMLSTVLGVS
GMMMGMLNMNSSVLMVS

SEQ ID NO: 183891 - protein, 17 aa, Artificial Sequence
  Description of Artificial Sequence: Synthetic peptide
  Seed: GMMMGMFNMLSTVLGVS
GMMMGMLNMNSSVLNVS

SEQ ID NO: 183892 - protein, 17 aa, Artificial Sequence
  Description of Artificial Sequence: Synthetic peptide
  Seed: GMMMGMFNMLSTVLGVS
GMMMGMLNMNSSVLSVS

SEQ ID NO: 183893 - protein, 17 aa, Artificial Sequence
  Description of Artificial Sequence: Synthetic peptide
  Seed: GMMMGMFNMLSTVLGVS
GMMMGMLNMNSSVLTVS

SEQ ID NO: 183894 - protein, 17 aa, Artificial Sequence
  Description of Artificial Sequence: Synthetic peptide
  Seed: GMMMGMFNMLSTVLGVS
GMMMGMLNMNSSVLVVS

SEQ ID NO: 183895 - protein, 17 aa, Artificial Sequence
  Description of Artificial Sequence: Synthetic peptide
  Seed: GMMMGMFNMLSTVLGVS
GMMMGMLNMNSSVLYVS

SEQ ID NO: 183896 - protein, 17 aa, Artificial Sequence
  Description of Artificial Sequence: Synthetic peptide
  Seed: GMMMGMFNMLSTVLGVS
GMMMGMLNMNSTVLFVS

SEQ ID NO: 183897 - protein, 17 aa, Artificial Sequence
  Description of Artificial Sequence: Synthetic peptide
  Seed: GMMMGMFNMLSTVLGVS
GMMMGMLNMNSTVLIVS

SEQ ID NO: 183898 - protein, 17 aa, Artificial Sequence
  Description of Artificial Sequence: Synthetic peptide
  Seed: GMMMGMFNMLSTVLGVS
GMMMGMLNMNSTVLLVS

SEQ ID NO: 183899 - protein, 17 aa, Artificial Sequence
  Description of Artificial Sequence: Synthetic peptide
  Seed: GMMMGMFNMLSTVLGVS
GMMMGMLNMNSTVLMVS

SEQ ID NO: 183900 - protein, 17 aa, Artificial Sequence
  Description of Artificial Sequence: Synthetic peptide
  Seed: GMMMGMFNMLSTVLGVS
GMMMGMLNMNSTVLVVS

SEQ ID NO: 183901 - protein, 17 aa, Artificial Sequence
  Description of Artificial Sequence: Synthetic peptide
  Seed: GMMMGMFNMLSTVLGVS
GMMMGMLNMNSTVLYVS

SEQ ID NO: 183902 - protein, 17 aa, Artificial Sequence
  Description of Artificial Sequence: Synthetic peptide
  Seed: GMMMGMFNMLSTVLGVS
GMMMGMLNMNSVVLIVS

SEQ ID NO: 183903 - protein, 17 aa, Artificial Sequence
  Description of Artificial Sequence: Synthetic peptide
  Seed: GMMMGMFNMLSTVLGVS
GMMMGMLNMNSVVLVVS

SEQ ID NO: 183904 - protein, 17 aa, Artificial Sequence
  Description of Artificial Sequence: Synthetic peptide
  Seed: GMMMGMFNMLSTVLGVS
GMMMGMLNMNSVVLYVS

SEQ ID NO: 183905 - protein, 17 aa, Artificial Sequence
  Description of Artificial Sequence: Synthetic peptide
  Seed: GMMMGMFNMLSTVLGVS
GMMMGMLNMQSAVLAVS

SEQ ID NO: 183906 - protein, 17 aa, Artificial Sequence
  Description of Artificial Sequence: Synthetic peptide
  Seed: GMMMGMFNMLSTVLGVS
GMMMGMLNMQSAVLGVS

SEQ ID NO: 183907 - protein, 17 aa, Artificial Sequence
  Description of Artificial Sequence: Synthetic peptide
  Seed: GMMMGMFNMLSTVLGVS
GMMMGMLNMQSAVLHVS

SEQ ID NO: 183908 - protein, 17 aa, Artificial Sequence
  Description of Artificial Sequence: Synthetic peptide
  Seed: GMMMGMFNMLSTVLGVS
GMMMGMLNMQSAVLIVS

SEQ ID NO: 183909 - protein, 17 aa, Artificial Sequence
  Description of Artificial Sequence: Synthetic peptide
  Seed: GMMMGMFNMLSTVLGVS
GMMMGMLNMQSAVLLVS

SEQ ID NO: 183910 - protein, 17 aa, Artificial Sequence
  Description of Artificial Sequence: Synthetic peptide
  Seed: GMMMGMFNMLSTVLGVS
GMMMGMLNMQSAVLMVS

SEQ ID NO: 183911 - protein, 17 aa, Artificial Sequence
  Description of Artificial Sequence: Synthetic peptide
  Seed: GMMMGMFNMLSTVLGVS
GMMMGMLNMQSAVLNVS

SEQ ID NO: 183912 - protein, 17 aa, Artificial Sequence
  Description of Artificial Sequence: Synthetic peptide
  Seed: GMMMGMFNMLSTVLGVS
GMMMGMLNMQSAVLQVS

SEQ ID NO: 183913 - protein, 17 aa, Artificial Sequence
  Description of Artificial Sequence: Synthetic peptide
  Seed: GMMMGMFNMLSTVLGVS
GMMMGMLNMQSAVLSVS

SEQ ID NO: 183914 - protein, 17 aa, Artificial Sequence
  Description of Artificial Sequence: Synthetic peptide
  Seed: GMMMGMFNMLSTVLGVS
GMMMGMLNMQSAVLTVS

SEQ ID NO: 183915 - protein, 17 aa, Artificial Sequence
  Description of Artificial Sequence: Synthetic peptide
  Seed: GMMMGMFNMLSTVLGVS
GMMMGMLNMQSAVLVVS

SEQ ID NO: 183916 - protein, 17 aa, Artificial Sequence
  Description of Artificial Sequence: Synthetic peptide
  Seed: GMMMGMFNMLSTVLGVS
GMMMGMLNMQSGVLAVS

SEQ ID NO: 183917 - protein, 17 aa, Artificial Sequence
  Description of Artificial Sequence: Synthetic peptide
  Seed: GMMMGMFNMLSTVLGVS
GMMMGMLNMQSGVLGVS

SEQ ID NO: 183918 - protein, 17 aa, Artificial Sequence
  Description of Artificial Sequence: Synthetic peptide
  Seed: GMMMGMFNMLSTVLGVS
GMMMGMLNMQSGVLIVS

SEQ ID NO: 183919 - protein, 17 aa, Artificial Sequence
  Description of Artificial Sequence: Synthetic peptide
  Seed: GMMMGMFNMLSTVLGVS
GMMMGMLNMQSGVLLVS

SEQ ID NO: 183920 - protein, 17 aa, Artificial Sequence
  Description of Artificial Sequence: Synthetic peptide
  Seed: GMMMGMFNMLSTVLGVS
GMMMGMLNMQSGVLMVS

SEQ ID NO: 183921 - protein, 17 aa, Artificial Sequence
  Description of Artificial Sequence: Synthetic peptide
  Seed: GMMMGMFNMLSTVLGVS
GMMMGMLNMQSGVLSVS

SEQ ID NO: 183922 - protein, 17 aa, Artificial Sequence
  Description of Artificial Sequence: Synthetic peptide
  Seed: GMMMGMFNMLSTVLGVS
GMMMGMLNMQSGVLTVS

SEQ ID NO: 183923 - protein, 17 aa, Artificial Sequence
  Description of Artificial Sequence: Synthetic peptide
  Seed: GMMMGMFNMLSTVLGVS
GMMMGMLNMQSGVLVVS

SEQ ID NO: 183924 - protein, 17 aa, Artificial Sequence
  Description of Artificial Sequence: Synthetic peptide
  Seed: GMMMGMFNMLSTVLGVS
GMMMGMLNMQSNVLAVS

SEQ ID NO: 183925 - protein, 17 aa, Artificial Sequence
  Description of Artificial Sequence: Synthetic peptide
  Seed: GMMMGMFNMLSTVLGVS
GMMMGMLNMQSNVLGVS

SEQ ID NO: 183926 - protein, 17 aa, Artificial Sequence
  Description of Artificial Sequence: Synthetic peptide
  Seed: GMMMGMFNMLSTVLGVS
GMMMGMLNMQSNVLLVS

SEQ ID NO: 183927 - protein, 17 aa, Artificial Sequence
  Description of Artificial Sequence: Synthetic peptide
  Seed: GMMMGMFNMLSTVLGVS
GMMMGMLNMQSNVLSVS

SEQ ID NO: 183928 - protein, 17 aa, Artificial Sequence
  Description of Artificial Sequence: Synthetic peptide
  Seed: GMMMGMFNMLSTVLGVS
GMMMGMLNMQSNVLVVS

SEQ ID NO: 183929 - protein, 17 aa, Artificial Sequence
  Description of Artificial Sequence: Synthetic peptide
  Seed: GMMMGMFNMLSTVLGVS
GMMMGMLNMQSPVLAVS

SEQ ID NO: 183930 - protein, 17 aa, Artificial Sequence
  Description of Artificial Sequence: Synthetic peptide
  Seed: GMMMGMFNMLSTVLGVS
GMMMGMLNMQSPVLIVS

SEQ ID NO: 183931 - protein, 17 aa, Artificial Sequence
  Description of Artificial Sequence: Synthetic peptide
  Seed: GMMMGMFNMLSTVLGVS
GMMMGMLNMQSPVLLVS

SEQ ID NO: 183932 - protein, 17 aa, Artificial Sequence
  Description of Artificial Sequence: Synthetic peptide
  Seed: GMMMGMFNMLSTVLGVS
GMMMGMLNMQSPVLMVS

SEQ ID NO: 183933 - protein, 17 aa, Artificial Sequence
  Description of Artificial Sequence: Synthetic peptide
  Seed: GMMMGMFNMLSTVLGVS
GMMMGMLNMQSPVLNVS

SEQ ID NO: 183934 - protein, 17 aa, Artificial Sequence
  Description of Artificial Sequence: Synthetic peptide
  Seed: GMMMGMFNMLSTVLGVS
GMMMGMLNMQSPVLSVS

SEQ ID NO: 183935 - protein, 17 aa, Artificial Sequence
  Description of Artificial Sequence: Synthetic peptide
  Seed: GMMMGMFNMLSTVLGVS
GMMMGMLNMQSPVLTVS

SEQ ID NO: 183936 - protein, 17 aa, Artificial Sequence
  Description of Artificial Sequence: Synthetic peptide
  Seed: GMMMGMFNMLSTVLGVS
GMMMGMLNMQSPVLVVS

SEQ ID NO: 183937 - protein, 17 aa, Artificial Sequence
  Description of Artificial Sequence: Synthetic peptide
  Seed: GMMMGMFNMLSTVLGVS
GMMMGMLNMQSSVLAVS

SEQ ID NO: 183938 - protein, 17 aa, Artificial Sequence
  Description of Artificial Sequence: Synthetic peptide
  Seed: GMMMGMFNMLSTVLGVS
GMMMGMLNMQSSVLGVS

SEQ ID NO: 183939 - protein, 17 aa, Artificial Sequence
  Description of Artificial Sequence: Synthetic peptide
  Seed: GMMMGMFNMLSTVLGVS
GMMMGMLNMQSSVLIVS

SEQ ID NO: 183940 - protein, 17 aa, Artificial Sequence
  Description of Artificial Sequence: Synthetic peptide
  Seed: GMMMGMFNMLSTVLGVS
GMMMGMLNMQSSVLLVS

SEQ ID NO: 183941 - protein, 17 aa, Artificial Sequence
  Description of Artificial Sequence: Synthetic peptide
  Seed: GMMMGMFNMLSTVLGVS
GMMMGMLNMQSSVLMVS

SEQ ID NO: 183942 - protein, 17 aa, Artificial Sequence
  Description of Artificial Sequence: Synthetic peptide
  Seed: GMMMGMFNMLSTVLGVS
GMMMGMLNMQSSVLNVS

SEQ ID NO: 183943 - protein, 17 aa, Artificial Sequence
  Description of Artificial Sequence: Synthetic peptide
  Seed: GMMMGMFNMLSTVLGVS
GMMMGMLNMQSSVLSVS

SEQ ID NO: 183944 - protein, 17 aa, Artificial Sequence
  Description of Artificial Sequence: Synthetic peptide
  Seed: GMMMGMFNMLSTVLGVS
GMMMGMLNMQSSVLTVS

SEQ ID NO: 183945 - protein, 17 aa, Artificial Sequence
  Description of Artificial Sequence: Synthetic peptide
  Seed: GMMMGMFNMLSTVLGVS
GMMMGMLNMQSSVLVVS

SEQ ID NO: 183946 - protein, 17 aa, Artificial Sequence
  Description of Artificial Sequence: Synthetic peptide
  Seed: GMMMGMFNMLSTVLGVS
GMMMGMLNMQSTVLNVS

SEQ ID NO: 183947 - protein, 17 aa, Artificial Sequence
  Description of Artificial Sequence: Synthetic peptide
  Seed: GMMMGMFNMLSTVLGVS
GMMMGMLNMRSRVLRVS

SEQ ID NO: 183948 - protein, 17 aa, Artificial Sequence
  Description of Artificial Sequence: Synthetic peptide
  Seed: GMMMGMFNMLSTVLGVS
GMMMGMLNMSSAVLAVS

SEQ ID NO: 183949 - protein, 17 aa, Artificial Sequence
  Description of Artificial Sequence: Synthetic peptide
  Seed: GMMMGMFNMLSTVLGVS
GMMMGMLNMSSAVLGVS

SEQ ID NO: 183950 - protein, 17 aa, Artificial Sequence
  Description of Artificial Sequence: Synthetic peptide
  Seed: GMMMGMFNMLSTVLGVS
GMMMGMLNMSSAVLIVS

SEQ ID NO: 183951 - protein, 17 aa, Artificial Sequence
  Description of Artificial Sequence: Synthetic peptide
  Seed: GMMMGMFNMLSTVLGVS
GMMMGMLNMSSAVLLVS

SEQ ID NO: 183952 - protein, 17 aa, Artificial Sequence
  Description of Artificial Sequence: Synthetic peptide
  Seed: GMMMGMFNMLSTVLGVS
GMMMGMLNMSSAVLMVS

SEQ ID NO: 183953 - protein, 17 aa, Artificial Sequence
  Description of Artificial Sequence: Synthetic peptide
  Seed: GMMMGMFNMLSTVLGVS
GMMMGMLNMSSAVLNVS

SEQ ID NO: 183954 - protein, 17 aa, Artificial Sequence
  Description of Artificial Sequence: Synthetic peptide
  Seed: GMMMGMFNMLSTVLGVS
GMMMGMLNMSSAVLSVS

SEQ ID NO: 183955 - protein, 17 aa, Artificial Sequence
  Description of Artificial Sequence: Synthetic peptide
  Seed: GMMMGMFNMLSTVLGVS
GMMMGMLNMSSAVLTVS

SEQ ID NO: 183956 - protein, 17 aa, Artificial Sequence
  Description of Artificial Sequence: Synthetic peptide
  Seed: GMMMGMFNMLSTVLGVS
GMMMGMLNMSSAVLVVS

SEQ ID NO: 183957 - protein, 17 aa, Artificial Sequence
  Description of Artificial Sequence: Synthetic peptide
  Seed: GMMMGMFNMLSTVLGVS
GMMMGMLNMSSAVLYVS

SEQ ID NO: 183958 - protein, 17 aa, Artificial Sequence
  Description of Artificial Sequence: Synthetic peptide
  Seed: GMMMGMFNMLSTVLGVS
GMMMGMLNMSSGVLAVS

SEQ ID NO: 183959 - protein, 17 aa, Artificial Sequence
  Description of Artificial Sequence: Synthetic peptide
  Seed: GMMMGMFNMLSTVLGVS
GMMMGMLNMSSGVLLVS

SEQ ID NO: 183960 - protein, 17 aa, Artificial Sequence
  Description of Artificial Sequence: Synthetic peptide
  Seed: GMMMGMFNMLSTVLGVS
GMMMGMLNMSSGVLSVS

SEQ ID NO: 183961 - protein, 17 aa, Artificial Sequence
  Description of Artificial Sequence: Synthetic peptide
  Seed: GMMMGMFNMLSTVLGVS
GMMMGMLNMSSGVLVVS

SEQ ID NO: 183962 - protein, 17 aa, Artificial Sequence
  Description of Artificial Sequence: Synthetic peptide
  Seed: GMMMGMFNMLSTVLGVS
GMMMGMLNMSSNVLYVS

SEQ ID NO: 183963 - protein, 17 aa, Artificial Sequence
  Description of Artificial Sequence: Synthetic peptide
  Seed: GMMMGMFNMLSTVLGVS
GMMMGMLNMSSPVLIVS

SEQ ID NO: 183964 - protein, 17 aa, Artificial Sequence
  Description of Artificial Sequence: Synthetic peptide
  Seed: GMMMGMFNMLSTVLGVS
GMMMGMLNMSSPVLLVS

SEQ ID NO: 183965 - protein, 17 aa, Artificial Sequence
  Description of Artificial Sequence: Synthetic peptide
  Seed: GMMMGMFNMLSTVLGVS
GMMMGMLNMSSPVLMVS

SEQ ID NO: 183966 - protein, 17 aa, Artificial Sequence
  Description of Artificial Sequence: Synthetic peptide
  Seed: GMMMGMFNMLSTVLGVS
GMMMGMLNMSSPVLVVS

SEQ ID NO: 183967 - protein, 17 aa, Artificial Sequence
  Description of Artificial Sequence: Synthetic peptide
  Seed: GMMMGMFNMLSTVLGVS
GMMMGMLNMSSSVLIVS

SEQ ID NO: 183968 - protein, 17 aa, Artificial Sequence
  Description of Artificial Sequence: Synthetic peptide
  Seed: GMMMGMFNMLSTVLGVS
GMMMGMLNMSSSVLVVS

SEQ ID NO: 183969 - protein, 17 aa, Artificial Sequence
  Description of Artificial Sequence: Synthetic peptide
  Seed: GMMMGMFNMLSTVLGVS
GMMMGMLNMTSAVLAVS

SEQ ID NO: 183970 - protein, 17 aa, Artificial Sequence
  Description of Artificial Sequence: Synthetic peptide
  Seed: GMMMGMFNMLSTVLGVS
GMMMGMLNMTSAVLTVS

SEQ ID NO: 183971 - protein, 17 aa, Artificial Sequence
  Description of Artificial Sequence: Synthetic peptide
  Seed: GMMMGMFNMLSTVLGVS
GMMMGMLNMTSPVLIVS

SEQ ID NO: 183972 - protein, 17 aa, Artificial Sequence
  Description of Artificial Sequence: Synthetic peptide
  Seed: GMMMGMFNMLSTVLGVS
GMMMGMLNMTSPVLLVS

SEQ ID NO: 183973 - protein, 17 aa, Artificial Sequence
  Description of Artificial Sequence: Synthetic peptide
  Seed: GMMMGMFNMLSTVLGVS
GMMMGMLNMTSPVLVVS

SEQ ID NO: 183974 - protein, 17 aa, Artificial Sequence
  Description of Artificial Sequence: Synthetic peptide
  Seed: GMMMGMFNMLSTVLGVS
GMMMGMLNMTSSVLIVS

SEQ ID NO: 183975 - protein, 17 aa, Artificial Sequence
  Description of Artificial Sequence: Synthetic peptide
  Seed: GMMMGMFNMLSTVLGVS
GMMMGMLNMVSPVLAVS

SEQ ID NO: 183976 - protein, 17 aa, Artificial Sequence
  Description of Artificial Sequence: Synthetic peptide
  Seed: GMMMGMFNMLSTVLGVS
GMMMGMLNMVSPVLIVS

SEQ ID NO: 183977 - protein, 17 aa, Artificial Sequence
  Description of Artificial Sequence: Synthetic peptide
  Seed: GMMMGMFNMLSTVLGVS
GMMMGMLNMVSPVLNVS

SEQ ID NO: 183978 - protein, 17 aa, Artificial Sequence
  Description of Artificial Sequence: Synthetic peptide
  Seed: GMMMGMFNMLSTVLGVS
GMMMGMLNMVSPVLSVS

SEQ ID NO: 183979 - protein, 17 aa, Artificial Sequence
  Description of Artificial Sequence: Synthetic peptide
  Seed: GMMMGMFNMLSTVLGVS
GMMMGMLNMVSPVLTVS

SEQ ID NO: 183980 - protein, 17 aa, Artificial Sequence
  Description of Artificial Sequence: Synthetic peptide
  Seed: GMMMGMFNMLSTVLGVS
GMMMGMLNMVSPVLVVS

SEQ ID NO: 183981 - protein, 17 aa, Artificial Sequence
  Description of Artificial Sequence: Synthetic peptide
  Seed: GMMMGMFNMLSTVLGVS
GMMMGMLNMVSRVLHVS

SEQ ID NO: 183982 - protein, 17 aa, Artificial Sequence
  Description of Artificial Sequence: Synthetic peptide
  Seed: GMMMGMFNMLSTVLGVS
GMMMGMLNMVSRVLKVS

SEQ ID NO: 183983 - protein, 17 aa, Artificial Sequence
  Description of Artificial Sequence: Synthetic peptide
  Seed: GMMMGMFNMLSTVLGVS
GMMMGMLNMVSRVLRVS

SEQ ID NO: 183984 - protein, 17 aa, Artificial Sequence
  Description of Artificial Sequence: Synthetic peptide
  Seed: GMMMGMFNMLSTVLGVS
GMMMGMLNMYSNVLAVS

SEQ ID NO: 183985 - protein, 17 aa, Artificial Sequence
  Description of Artificial Sequence: Synthetic peptide
  Seed: GMMMGMFNMLSTVLGVS
GMMMGMLNMYSNVLVVS

SEQ ID NO: 183986 - protein, 17 aa, Artificial Sequence
  Description of Artificial Sequence: Synthetic peptide
  Seed: GMMMGMFNMLSTVLGVS
GMMMGMMNMASAVLAVS

SEQ ID NO: 183987 - protein, 17 aa, Artificial Sequence
  Description of Artificial Sequence: Synthetic peptide
  Seed: GMMMGMFNMLSTVLGVS
GMMMGMMNMASAVLGVS

SEQ ID NO: 183988 - protein, 17 aa, Artificial Sequence
  Description of Artificial Sequence: Synthetic peptide
  Seed: GMMMGMFNMLSTVLGVS
GMMMGMMNMASAVLHVS

SEQ ID NO: 183989 - protein, 17 aa, Artificial Sequence
  Description of Artificial Sequence: Synthetic peptide
  Seed: GMMMGMFNMLSTVLGVS
GMMMGMMNMASAVLIVS

SEQ ID NO: 183990 - protein, 17 aa, Artificial Sequence
  Description of Artificial Sequence: Synthetic peptide
  Seed: GMMMGMFNMLSTVLGVS
GMMMGMMNMASAVLLVS

SEQ ID NO: 183991 - protein, 17 aa, Artificial Sequence
  Description of Artificial Sequence: Synthetic peptide
  Seed: GMMMGMFNMLSTVLGVS
GMMMGMMNMASAVLMVS

SEQ ID NO: 183992 - protein, 17 aa, Artificial Sequence
  Description of Artificial Sequence: Synthetic peptide
  Seed: GMMMGMFNMLSTVLGVS
GMMMGMMNMASAVLNVS

SEQ ID NO: 183993 - protein, 17 aa, Artificial Sequence
  Description of Artificial Sequence: Synthetic peptide
  Seed: GMMMGMFNMLSTVLGVS
GMMMGMMNMASAVLQVS

SEQ ID NO: 183994 - protein, 17 aa, Artificial Sequence
  Description of Artificial Sequence: Synthetic peptide
  Seed: GMMMGMFNMLSTVLGVS
GMMMGMMNMASAVLSVS

SEQ ID NO: 183995 - protein, 17 aa, Artificial Sequence
  Description of Artificial Sequence: Synthetic peptide
  Seed: GMMMGMFNMLSTVLGVS
GMMMGMMNMASAVLTVS

SEQ ID NO: 183996 - protein, 17 aa, Artificial Sequence
  Description of Artificial Sequence: Synthetic peptide
  Seed: GMMMGMFNMLSTVLGVS
GMMMGMMNMASAVLVVS

SEQ ID NO: 183997 - protein, 17 aa, Artificial Sequence
  Description of Artificial Sequence: Synthetic peptide
  Seed: GMMMGMFNMLSTVLGVS
GMMMGMMNMASGVLAVS

SEQ ID NO: 183998 - protein, 17 aa, Artificial Sequence
  Description of Artificial Sequence: Synthetic peptide
  Seed: GMMMGMFNMLSTVLGVS
GMMMGMMNMASGVLIVS

SEQ ID NO: 183999 - protein, 17 aa, Artificial Sequence
  Description of Artificial Sequence: Synthetic peptide
  Seed: GMMMGMFNMLSTVLGVS
GMMMGMMNMASGVLLVS

SEQ ID NO: 184000 - protein, 17 aa, Artificial Sequence
  Description of Artificial Sequence: Synthetic peptide
  Seed: GMMMGMFNMLSTVLGVS
GMMMGMMNMASGVLMVS

SEQ ID NO: 184001 - protein, 17 aa, Artificial Sequence
  Description of Artificial Sequence: Synthetic peptide
  Seed: GMMMGMFNMLSTVLGVS
GMMMGMMNMASGVLSVS

SEQ ID NO: 184002 - protein, 17 aa, Artificial Sequence
  Description of Artificial Sequence: Synthetic peptide
  Seed: GMMMGMFNMLSTVLGVS
GMMMGMMNMASGVLTVS

SEQ ID NO: 184003 - protein, 17 aa, Artificial Sequence
  Description of Artificial Sequence: Synthetic peptide
  Seed: GMMMGMFNMLSTVLGVS
GMMMGMMNMASGVLVVS

SEQ ID NO: 184004 - protein, 17 aa, Artificial Sequence
  Description of Artificial Sequence: Synthetic peptide
  Seed: GMMMGMFNMLSTVLGVS
GMMMGMMNMASNVLAVS

SEQ ID NO: 184005 - protein, 17 aa, Artificial Sequence
  Description of Artificial Sequence: Synthetic peptide
  Seed: GMMMGMFNMLSTVLGVS
GMMMGMMNMASNVLNVS

SEQ ID NO: 184006 - protein, 17 aa, Artificial Sequence
  Description of Artificial Sequence: Synthetic peptide
  Seed: GMMMGMFNMLSTVLGVS
GMMMGMMNMASNVLSVS

SEQ ID NO: 184007 - protein, 17 aa, Artificial Sequence
  Description of Artificial Sequence: Synthetic peptide
  Seed: GMMMGMFNMLSTVLGVS
GMMMGMMNMASNVLVVS

SEQ ID NO: 184008 - protein, 17 aa, Artificial Sequence
  Description of Artificial Sequence: Synthetic peptide
  Seed: GMMMGMFNMLSTVLGVS
GMMMGMMNMASPVLAVS

SEQ ID NO: 184009 - protein, 17 aa, Artificial Sequence
  Description of Artificial Sequence: Synthetic peptide
  Seed: GMMMGMFNMLSTVLGVS
GMMMGMMNMASPVLIVS

SEQ ID NO: 184010 - protein, 17 aa, Artificial Sequence
  Description of Artificial Sequence: Synthetic peptide
  Seed: GMMMGMFNMLSTVLGVS
GMMMGMMNMASPVLLVS

SEQ ID NO: 184011 - protein, 17 aa, Artificial Sequence
  Description of Artificial Sequence: Synthetic peptide
  Seed: GMMMGMFNMLSTVLGVS
GMMMGMMNMASPVLMVS

SEQ ID NO: 184012 - protein, 17 aa, Artificial Sequence
  Description of Artificial Sequence: Synthetic peptide
  Seed: GMMMGMFNMLSTVLGVS
GMMMGMMNMASPVLNVS

SEQ ID NO: 184013 - protein, 17 aa, Artificial Sequence
  Description of Artificial Sequence: Synthetic peptide
  Seed: GMMMGMFNMLSTVLGVS
GMMMGMMNMASPVLSVS

SEQ ID NO: 184014 - protein, 17 aa, Artificial Sequence
  Description of Artificial Sequence: Synthetic peptide
  Seed: GMMMGMFNMLSTVLGVS
GMMMGMMNMASPVLTVS

SEQ ID NO: 184015 - protein, 17 aa, Artificial Sequence
  Description of Artificial Sequence: Synthetic peptide
  Seed: GMMMGMFNMLSTVLGVS
GMMMGMMNMASPVLVVS

SEQ ID NO: 184016 - protein, 17 aa, Artificial Sequence
  Description of Artificial Sequence: Synthetic peptide
  Seed: GMMMGMFNMLSTVLGVS
GMMMGMMNMASSVLAVS

SEQ ID NO: 184017 - protein, 17 aa, Artificial Sequence
  Description of Artificial Sequence: Synthetic peptide
  Seed: GMMMGMFNMLSTVLGVS
GMMMGMMNMASSVLIVS

SEQ ID NO: 184018 - protein, 17 aa, Artificial Sequence
  Description of Artificial Sequence: Synthetic peptide
  Seed: GMMMGMFNMLSTVLGVS
GMMMGMMNMASSVLLVS

SEQ ID NO: 184019 - protein, 17 aa, Artificial Sequence
  Description of Artificial Sequence: Synthetic peptide
  Seed: GMMMGMFNMLSTVLGVS
GMMMGMMNMASSVLNVS

SEQ ID NO: 184020 - protein, 17 aa, Artificial Sequence
  Description of Artificial Sequence: Synthetic peptide
  Seed: GMMMGMFNMLSTVLGVS
GMMMGMMNMASSVLSVS

SEQ ID NO: 184021 - protein, 17 aa, Artificial Sequence
  Description of Artificial Sequence: Synthetic peptide
  Seed: GMMMGMFNMLSTVLGVS
GMMMGMMNMASSVLTVS

SEQ ID NO: 184022 - protein, 17 aa, Artificial Sequence
  Description of Artificial Sequence: Synthetic peptide
  Seed: GMMMGMFNMLSTVLGVS
GMMMGMMNMASSVLVVS

SEQ ID NO: 184023 - protein, 17 aa, Artificial Sequence
  Description of Artificial Sequence: Synthetic peptide
  Seed: GMMMGMFNMLSTVLGVS
GMMMGMMNMASTVLAVS

SEQ ID NO: 184024 - protein, 17 aa, Artificial Sequence
  Description of Artificial Sequence: Synthetic peptide
  Seed: GMMMGMFNMLSTVLGVS
GMMMGMMNMASTVLNVS

SEQ ID NO: 184025 - protein, 17 aa, Artificial Sequence
  Description of Artificial Sequence: Synthetic peptide
  Seed: GMMMGMFNMLSTVLGVS
GMMMGMMNMASTVLSVS

SEQ ID NO: 184026 - protein, 17 aa, Artificial Sequence
  Description of Artificial Sequence: Synthetic peptide
  Seed: GMMMGMFNMLSTVLGVS
GMMMGMMNMESAVLAVS

SEQ ID NO: 184027 - protein, 17 aa, Artificial Sequence
  Description of Artificial Sequence: Synthetic peptide
  Seed: GMMMGMFNMLSTVLGVS
GMMMGMMNMGSAVLAVS

SEQ ID NO: 184028 - protein, 17 aa, Artificial Sequence
  Description of Artificial Sequence: Synthetic peptide
  Seed: GMMMGMFNMLSTVLGVS
GMMMGMMNMGSAVLIVS

SEQ ID NO: 184029 - protein, 17 aa, Artificial Sequence
  Description of Artificial Sequence: Synthetic peptide
  Seed: GMMMGMFNMLSTVLGVS
GMMMGMMNMGSAVLLVS

SEQ ID NO: 184030 - protein, 17 aa, Artificial Sequence
  Description of Artificial Sequence: Synthetic peptide
  Seed: GMMMGMFNMLSTVLGVS
GMMMGMMNMGSAVLVVS

SEQ ID NO: 184031 - protein, 17 aa, Artificial Sequence
  Description of Artificial Sequence: Synthetic peptide
  Seed: GMMMGMFNMLSTVLGVS
GMMMGMMNMHSAVLIVS

SEQ ID NO: 184032 - protein, 17 aa, Artificial Sequence
  Description of Artificial Sequence: Synthetic peptide
  Seed: GMMMGMFNMLSTVLGVS
GMMMGMMNMHSAVLLVS

SEQ ID NO: 184033 - protein, 17 aa, Artificial Sequence
  Description of Artificial Sequence: Synthetic peptide
  Seed: GMMMGMFNMLSTVLGVS
GMMMGMMNMHSAVLVVS

SEQ ID NO: 184034 - protein, 17 aa, Artificial Sequence
  Description of Artificial Sequence: Synthetic peptide
  Seed: GMMMGMFNMLSTVLGVS
GMMMGMMNMISAVLHVS

SEQ ID NO: 184035 - protein, 17 aa, Artificial Sequence
  Description of Artificial Sequence: Synthetic peptide
  Seed: GMMMGMFNMLSTVLGVS
GMMMGMMNMISAVLNVS

SEQ ID NO: 184036 - protein, 17 aa, Artificial Sequence
  Description of Artificial Sequence: Synthetic peptide
  Seed: GMMMGMFNMLSTVLGVS
GMMMGMMNMISGVLAVS

SEQ ID NO: 184037 - protein, 17 aa, Artificial Sequence
  Description of Artificial Sequence: Synthetic peptide
  Seed: GMMMGMFNMLSTVLGVS
GMMMGMMNMISKVLKVS

SEQ ID NO: 184038 - protein, 17 aa, Artificial Sequence
  Description of Artificial Sequence: Synthetic peptide
  Seed: GMMMGMFNMLSTVLGVS
GMMMGMMNMISPVLAVS

SEQ ID NO: 184039 - protein, 17 aa, Artificial Sequence
  Description of Artificial Sequence: Synthetic peptide
  Seed: GMMMGMFNMLSTVLGVS
GMMMGMMNMISPVLIVS

SEQ ID NO: 184040 - protein, 17 aa, Artificial Sequence
  Description of Artificial Sequence: Synthetic peptide
  Seed: GMMMGMFNMLSTVLGVS
GMMMGMMNMISPVLLVS

SEQ ID NO: 184041 - protein, 17 aa, Artificial Sequence
  Description of Artificial Sequence: Synthetic peptide
  Seed: GMMMGMFNMLSTVLGVS
GMMMGMMNMISPVLNVS

SEQ ID NO: 184042 - protein, 17 aa, Artificial Sequence
  Description of Artificial Sequence: Synthetic peptide
  Seed: GMMMGMFNMLSTVLGVS
GMMMGMMNMISPVLSVS

SEQ ID NO: 184043 - protein, 17 aa, Artificial Sequence
  Description of Artificial Sequence: Synthetic peptide
  Seed: GMMMGMFNMLSTVLGVS
GMMMGMMNMISPVLTVS

SEQ ID NO: 184044 - protein, 17 aa, Artificial Sequence
  Description of Artificial Sequence: Synthetic peptide
  Seed: GMMMGMFNMLSTVLGVS
GMMMGMMNMISPVLVVS

SEQ ID NO: 184045 - protein, 17 aa, Artificial Sequence
  Description of Artificial Sequence: Synthetic peptide
  Seed: GMMMGMFNMLSTVLGVS
GMMMGMMNMISRVLHVS

SEQ ID NO: 184046 - protein, 17 aa, Artificial Sequence
  Description of Artificial Sequence: Synthetic peptide
  Seed: GMMMGMFNMLSTVLGVS
GMMMGMMNMISRVLKVS

SEQ ID NO: 184047 - protein, 17 aa, Artificial Sequence
  Description of Artificial Sequence: Synthetic peptide
  Seed: GMMMGMFNMLSTVLGVS
GMMMGMMNMISRVLRVS

SEQ ID NO: 184048 - protein, 17 aa, Artificial Sequence
  Description of Artificial Sequence: Synthetic peptide
  Seed: GMMMGMFNMLSTVLGVS
GMMMGMMNMISSVLNVS

SEQ ID NO: 184049 - protein, 17 aa, Artificial Sequence
  Description of Artificial Sequence: Synthetic peptide
  Seed: GMMMGMFNMLSTVLGVS
GMMMGMMNMLSAVLAVS

SEQ ID NO: 184050 - protein, 17 aa, Artificial Sequence
  Description of Artificial Sequence: Synthetic peptide
  Seed: GMMMGMFNMLSTVLGVS
GMMMGMMNMLSAVLGVS

SEQ ID NO: 184051 - protein, 17 aa, Artificial Sequence
  Description of Artificial Sequence: Synthetic peptide
  Seed: GMMMGMFNMLSTVLGVS
GMMMGMMNMLSAVLHVS

SEQ ID NO: 184052 - protein, 17 aa, Artificial Sequence
  Description of Artificial Sequence: Synthetic peptide
  Seed: GMMMGMFNMLSTVLGVS
GMMMGMMNMLSAVLKVS

SEQ ID NO: 184053 - protein, 17 aa, Artificial Sequence
  Description of Artificial Sequence: Synthetic peptide
  Seed: GMMMGMFNMLSTVLGVS
GMMMGMMNMLSAVLNVS

SEQ ID NO: 184054 - protein, 17 aa, Artificial Sequence
  Description of Artificial Sequence: Synthetic peptide
  Seed: GMMMGMFNMLSTVLGVS
GMMMGMMNMLSAVLRVS

SEQ ID NO: 184055 - protein, 17 aa, Artificial Sequence
  Description of Artificial Sequence: Synthetic peptide
  Seed: GMMMGMFNMLSTVLGVS
GMMMGMMNMLSAVLSVS

SEQ ID NO: 184056 - protein, 17 aa, Artificial Sequence
  Description of Artificial Sequence: Synthetic peptide
  Seed: GMMMGMFNMLSTVLGVS
GMMMGMMNMLSAVLTVS

SEQ ID NO: 184057 - protein, 17 aa, Artificial Sequence
  Description of Artificial Sequence: Synthetic peptide
  Seed: GMMMGMFNMLSTVLGVS
GMMMGMMNMLSAVLVVS

SEQ ID NO: 184058 - protein, 17 aa, Artificial Sequence
  Description of Artificial Sequence: Synthetic peptide
  Seed: GMMMGMFNMLSTVLGVS
GMMMGMMNMLSGVLAVS

SEQ ID NO: 184059 - protein, 17 aa, Artificial Sequence
  Description of Artificial Sequence: Synthetic peptide
  Seed: GMMMGMFNMLSTVLGVS
GMMMGMMNMLSGVLIVS

SEQ ID NO: 184060 - protein, 17 aa, Artificial Sequence
  Description of Artificial Sequence: Synthetic peptide
  Seed: GMMMGMFNMLSTVLGVS
GMMMGMMNMLSGVLKVS

SEQ ID NO: 184061 - protein, 17 aa, Artificial Sequence
  Description of Artificial Sequence: Synthetic peptide
  Seed: GMMMGMFNMLSTVLGVS
GMMMGMMNMLSGVLLVS

SEQ ID NO: 184062 - protein, 17 aa, Artificial Sequence
  Description of Artificial Sequence: Synthetic peptide
  Seed: GMMMGMFNMLSTVLGVS
GMMMGMMNMLSGVLNVS

SEQ ID NO: 184063 - protein, 17 aa, Artificial Sequence
  Description of Artificial Sequence: Synthetic peptide
  Seed: GMMMGMFNMLSTVLGVS
GMMMGMMNMLSGVLSVS

SEQ ID NO: 184064 - protein, 17 aa, Artificial Sequence
  Description of Artificial Sequence: Synthetic peptide
  Seed: GMMMGMFNMLSTVLGVS
GMMMGMMNMLSGVLTVS

SEQ ID NO: 184065 - protein, 17 aa, Artificial Sequence
  Description of Artificial Sequence: Synthetic peptide
  Seed: GMMMGMFNMLSTVLGVS
GMMMGMMNMLSGVLVVS

SEQ ID NO: 184066 - protein, 17 aa, Artificial Sequence
  Description of Artificial Sequence: Synthetic peptide
  Seed: GMMMGMFNMLSTVLGVS
GMMMGMMNMLSKVLKVS

SEQ ID NO: 184067 - protein, 17 aa, Artificial Sequence
  Description of Artificial Sequence: Synthetic peptide
  Seed: GMMMGMFNMLSTVLGVS
GMMMGMMNMLSKVLRVS

SEQ ID NO: 184068 - protein, 17 aa, Artificial Sequence
  Description of Artificial Sequence: Synthetic peptide
  Seed: GMMMGMFNMLSTVLGVS
GMMMGMMNMLSNVLAVS

SEQ ID NO: 184069 - protein, 17 aa, Artificial Sequence
  Description of Artificial Sequence: Synthetic peptide
  Seed: GMMMGMFNMLSTVLGVS
GMMMGMMNMLSNVLNVS

SEQ ID NO: 184070 - protein, 17 aa, Artificial Sequence
  Description of Artificial Sequence: Synthetic peptide
  Seed: GMMMGMFNMLSTVLGVS
GMMMGMMNMLSPVLAVS

SEQ ID NO: 184071 - protein, 17 aa, Artificial Sequence
  Description of Artificial Sequence: Synthetic peptide
  Seed: GMMMGMFNMLSTVLGVS
GMMMGMMNMLSPVLGVS

SEQ ID NO: 184072 - protein, 17 aa, Artificial Sequence
  Description of Artificial Sequence: Synthetic peptide
  Seed: GMMMGMFNMLSTVLGVS
GMMMGMMNMLSPVLHVS

SEQ ID NO: 184073 - protein, 17 aa, Artificial Sequence
  Description of Artificial Sequence: Synthetic peptide
  Seed: GMMMGMFNMLSTVLGVS
GMMMGMMNMLSPVLIVS

SEQ ID NO: 184074 - protein, 17 aa, Artificial Sequence
  Description of Artificial Sequence: Synthetic peptide
  Seed: GMMMGMFNMLSTVLGVS
GMMMGMMNMLSPVLLVS

SEQ ID NO: 184075 - protein, 17 aa, Artificial Sequence
  Description of Artificial Sequence: Synthetic peptide
  Seed: GMMMGMFNMLSTVLGVS
GMMMGMMNMLSPVLMVS

SEQ ID NO: 184076 - protein, 17 aa, Artificial Sequence
  Description of Artificial Sequence: Synthetic peptide
  Seed: GMMMGMFNMLSTVLGVS
GMMMGMMNMLSPVLNVS

SEQ ID NO: 184077 - protein, 17 aa, Artificial Sequence
  Description of Artificial Sequence: Synthetic peptide
  Seed: GMMMGMFNMLSTVLGVS
GMMMGMMNMLSPVLQVS

SEQ ID NO: 184078 - protein, 17 aa, Artificial Sequence
  Description of Artificial Sequence: Synthetic peptide
  Seed: GMMMGMFNMLSTVLGVS
GMMMGMMNMLSPVLRVS

SEQ ID NO: 184079 - protein, 17 aa, Artificial Sequence
  Description of Artificial Sequence: Synthetic peptide
  Seed: GMMMGMFNMLSTVLGVS
GMMMGMMNMLSPVLSVS

SEQ ID NO: 184080 - protein, 17 aa, Artificial Sequence
  Description of Artificial Sequence: Synthetic peptide
  Seed: GMMMGMFNMLSTVLGVS
GMMMGMMNMLSPVLTVS

SEQ ID NO: 184081 - protein, 17 aa, Artificial Sequence
  Description of Artificial Sequence: Synthetic peptide
  Seed: GMMMGMFNMLSTVLGVS
GMMMGMMNMLSPVLVVS

SEQ ID NO: 184082 - protein, 17 aa, Artificial Sequence
  Description of Artificial Sequence: Synthetic peptide
  Seed: GMMMGMFNMLSTVLGVS
GMMMGMMNMLSRVLHVS

SEQ ID NO: 184083 - protein, 17 aa, Artificial Sequence
  Description of Artificial Sequence: Synthetic peptide
  Seed: GMMMGMFNMLSTVLGVS
GMMMGMMNMLSRVLKVS

SEQ ID NO: 184084 - protein, 17 aa, Artificial Sequence
  Description of Artificial Sequence: Synthetic peptide
  Seed: GMMMGMFNMLSTVLGVS
GMMMGMMNMLSRVLRVS

SEQ ID NO: 184085 - protein, 17 aa, Artificial Sequence
  Description of Artificial Sequence: Synthetic peptide
  Seed: GMMMGMFNMLSTVLGVS
GMMMGMMNMLSSVLAVS

SEQ ID NO: 184086 - protein, 17 aa, Artificial Sequence
  Description of Artificial Sequence: Synthetic peptide
  Seed: GMMMGMFNMLSTVLGVS
GMMMGMMNMLSSVLHVS

SEQ ID NO: 184087 - protein, 17 aa, Artificial Sequence
  Description of Artificial Sequence: Synthetic peptide
  Seed: GMMMGMFNMLSTVLGVS
GMMMGMMNMLSSVLNVS

SEQ ID NO: 184088 - protein, 17 aa, Artificial Sequence
  Description of Artificial Sequence: Synthetic peptide
  Seed: GMMMGMFNMLSTVLGVS
GMMMGMMNMLSSVLRVS

SEQ ID NO: 184089 - protein, 17 aa, Artificial Sequence
  Description of Artificial Sequence: Synthetic peptide
  Seed: GMMMGMFNMLSTVLGVS
GMMMGMMNMLSSVLSVS

SEQ ID NO: 184090 - protein, 17 aa, Artificial Sequence
  Description of Artificial Sequence: Synthetic peptide
  Seed: GMMMGMFNMLSTVLGVS
GMMMGMMNMLSSVLTVS

SEQ ID NO: 184091 - protein, 17 aa, Artificial Sequence
  Description of Artificial Sequence: Synthetic peptide
  Seed: GMMMGMFNMLSTVLGVS
GMMMGMMNMLSSVLVVS

SEQ ID NO: 184092 - protein, 17 aa, Artificial Sequence
  Description of Artificial Sequence: Synthetic peptide
  Seed: GMMMGMFNMLSTVLGVS
GMMMGMMNMLSTVLNVS

SEQ ID NO: 184093 - protein, 17 aa, Artificial Sequence
  Description of Artificial Sequence: Synthetic peptide
  Seed: GMMMGMFNMLSTVLGVS
GMMMGMMNMMSAVLAVS

SEQ ID NO: 184094 - protein, 17 aa, Artificial Sequence
  Description of Artificial Sequence: Synthetic peptide
  Seed: GMMMGMFNMLSTVLGVS
GMMMGMMNMMSAVLDVS

SEQ ID NO: 184095 - protein, 17 aa, Artificial Sequence
  Description of Artificial Sequence: Synthetic peptide
  Seed: GMMMGMFNMLSTVLGVS
GMMMGMMNMMSAVLEVS

SEQ ID NO: 184096 - protein, 17 aa, Artificial Sequence
  Description of Artificial Sequence: Synthetic peptide
  Seed: GMMMGMFNMLSTVLGVS
GMMMGMMNMMSAVLGVS

SEQ ID NO: 184097 - protein, 17 aa, Artificial Sequence
  Description of Artificial Sequence: Synthetic peptide
  Seed: GMMMGMFNMLSTVLGVS
GMMMGMMNMMSAVLHVS

SEQ ID NO: 184098 - protein, 17 aa, Artificial Sequence
  Description of Artificial Sequence: Synthetic peptide
  Seed: GMMMGMFNMLSTVLGVS
GMMMGMMNMMSAVLIVS

SEQ ID NO: 184099 - protein, 17 aa, Artificial Sequence
  Description of Artificial Sequence: Synthetic peptide
  Seed: GMMMGMFNMLSTVLGVS
GMMMGMMNMMSAVLKVS

SEQ ID NO: 184100 - protein, 17 aa, Artificial Sequence
  Description of Artificial Sequence: Synthetic peptide
  Seed: GMMMGMFNMLSTVLGVS
GMMMGMMNMMSAVLLVS

SEQ ID NO: 184101 - protein, 17 aa, Artificial Sequence
  Description of Artificial Sequence: Synthetic peptide
  Seed: GMMMGMFNMLSTVLGVS
GMMMGMMNMMSAVLMVS

SEQ ID NO: 184102 - protein, 17 aa, Artificial Sequence
  Description of Artificial Sequence: Synthetic peptide
  Seed: GMMMGMFNMLSTVLGVS
GMMMGMMNMMSAVLNVS

SEQ ID NO: 184103 - protein, 17 aa, Artificial Sequence
  Description of Artificial Sequence: Synthetic peptide
  Seed: GMMMGMFNMLSTVLGVS
GMMMGMMNMMSAVLPVS

SEQ ID NO: 184104 - protein, 17 aa, Artificial Sequence
  Description of Artificial Sequence: Synthetic peptide
  Seed: GMMMGMFNMLSTVLGVS
GMMMGMMNMMSAVLQVS

SEQ ID NO: 184105 - protein, 17 aa, Artificial Sequence
  Description of Artificial Sequence: Synthetic peptide
  Seed: GMMMGMFNMLSTVLGVS
GMMMGMMNMMSAVLRVS

SEQ ID NO: 184106 - protein, 17 aa, Artificial Sequence
  Description of Artificial Sequence: Synthetic peptide
  Seed: GMMMGMFNMLSTVLGVS
GMMMGMMNMMSAVLSVS

SEQ ID NO: 184107 - protein, 17 aa, Artificial Sequence
  Description of Artificial Sequence: Synthetic peptide
  Seed: GMMMGMFNMLSTVLGVS
GMMMGMMNMMSAVLTVS

SEQ ID NO: 184108 - protein, 17 aa, Artificial Sequence
  Description of Artificial Sequence: Synthetic peptide
  Seed: GMMMGMFNMLSTVLGVS
GMMMGMMNMMSAVLVVS

SEQ ID NO: 184109 - protein, 17 aa, Artificial Sequence
  Description of Artificial Sequence: Synthetic peptide
  Seed: GMMMGMFNMLSTVLGVS
GMMMGMMNMMSGVLAVS

SEQ ID NO: 184110 - protein, 17 aa, Artificial Sequence
  Description of Artificial Sequence: Synthetic peptide
  Seed: GMMMGMFNMLSTVLGVS
GMMMGMMNMMSGVLGVS

SEQ ID NO: 184111 - protein, 17 aa, Artificial Sequence
  Description of Artificial Sequence: Synthetic peptide
  Seed: GMMMGMFNMLSTVLGVS
GMMMGMMNMMSGVLHVS

SEQ ID NO: 184112 - protein, 17 aa, Artificial Sequence
  Description of Artificial Sequence: Synthetic peptide
  Seed: GMMMGMFNMLSTVLGVS
GMMMGMMNMMSGVLIVS

SEQ ID NO: 184113 - protein, 17 aa, Artificial Sequence
  Description of Artificial Sequence: Synthetic peptide
  Seed: GMMMGMFNMLSTVLGVS
GMMMGMMNMMSGVLKVS

SEQ ID NO: 184114 - protein, 17 aa, Artificial Sequence
  Description of Artificial Sequence: Synthetic peptide
  Seed: GMMMGMFNMLSTVLGVS
GMMMGMMNMMSGVLLVS

SEQ ID NO: 184115 - protein, 17 aa, Artificial Sequence
  Description of Artificial Sequence: Synthetic peptide
  Seed: GMMMGMFNMLSTVLGVS
GMMMGMMNMMSGVLMVS

SEQ ID NO: 184116 - protein, 17 aa, Artificial Sequence
  Description of Artificial Sequence: Synthetic peptide
  Seed: GMMMGMFNMLSTVLGVS
GMMMGMMNMMSGVLNVS

SEQ ID NO: 184117 - protein, 17 aa, Artificial Sequence
  Description of Artificial Sequence: Synthetic peptide
  Seed: GMMMGMFNMLSTVLGVS
GMMMGMMNMMSGVLRVS

SEQ ID NO: 184118 - protein, 17 aa, Artificial Sequence
  Description of Artificial Sequence: Synthetic peptide
  Seed: GMMMGMFNMLSTVLGVS
GMMMGMMNMMSGVLSVS

SEQ ID NO: 184119 - protein, 17 aa, Artificial Sequence
  Description of Artificial Sequence: Synthetic peptide
  Seed: GMMMGMFNMLSTVLGVS
GMMMGMMNMMSGVLTVS

SEQ ID NO: 184120 - protein, 17 aa, Artificial Sequence
  Description of Artificial Sequence: Synthetic peptide
  Seed: GMMMGMFNMLSTVLGVS
GMMMGMMNMMSGVLVVS

SEQ ID NO: 184121 - protein, 17 aa, Artificial Sequence
  Description of Artificial Sequence: Synthetic peptide
  Seed: GMMMGMFNMLSTVLGVS
GMMMGMMNMMSHVLAVS

SEQ ID NO: 184122 - protein, 17 aa, Artificial Sequence
  Description of Artificial Sequence: Synthetic peptide
  Seed: GMMMGMFNMLSTVLGVS
GMMMGMMNMMSHVLNVS

SEQ ID NO: 184123 - protein, 17 aa, Artificial Sequence
  Description of Artificial Sequence: Synthetic peptide
  Seed: GMMMGMFNMLSTVLGVS
GMMMGMMNMMSKVLAVS

SEQ ID NO: 184124 - protein, 17 aa, Artificial Sequence
  Description of Artificial Sequence: Synthetic peptide
  Seed: GMMMGMFNMLSTVLGVS
GMMMGMMNMMSKVLHVS

SEQ ID NO: 184125 - protein, 17 aa, Artificial Sequence
  Description of Artificial Sequence: Synthetic peptide
  Seed: GMMMGMFNMLSTVLGVS
GMMMGMMNMMSKVLKVS

SEQ ID NO: 184126 - protein, 17 aa, Artificial Sequence
  Description of Artificial Sequence: Synthetic peptide
  Seed: GMMMGMFNMLSTVLGVS
GMMMGMMNMMSKVLNVS

SEQ ID NO: 184127 - protein, 17 aa, Artificial Sequence
  Description of Artificial Sequence: Synthetic peptide
  Seed: GMMMGMFNMLSTVLGVS
GMMMGMMNMMSKVLRVS

SEQ ID NO: 184128 - protein, 17 aa, Artificial Sequence
  Description of Artificial Sequence: Synthetic peptide
  Seed: GMMMGMFNMLSTVLGVS
GMMMGMMNMMSKVLSVS

SEQ ID NO: 184129 - protein, 17 aa, Artificial Sequence
  Description of Artificial Sequence: Synthetic peptide
  Seed: GMMMGMFNMLSTVLGVS
GMMMGMMNMMSNVLAVS

SEQ ID NO: 184130 - protein, 17 aa, Artificial Sequence
  Description of Artificial Sequence: Synthetic peptide
  Seed: GMMMGMFNMLSTVLGVS
GMMMGMMNMMSNVLGVS

SEQ ID NO: 184131 - protein, 17 aa, Artificial Sequence
  Description of Artificial Sequence: Synthetic peptide
  Seed: GMMMGMFNMLSTVLGVS
GMMMGMMNMMSNVLHVS

SEQ ID NO: 184132 - protein, 17 aa, Artificial Sequence
  Description of Artificial Sequence: Synthetic peptide
  Seed: GMMMGMFNMLSTVLGVS
GMMMGMMNMMSNVLNVS

SEQ ID NO: 184133 - protein, 17 aa, Artificial Sequence
  Description of Artificial Sequence: Synthetic peptide
  Seed: GMMMGMFNMLSTVLGVS
GMMMGMMNMMSNVLQVS

SEQ ID NO: 184134 - protein, 17 aa, Artificial Sequence
  Description of Artificial Sequence: Synthetic peptide
  Seed: GMMMGMFNMLSTVLGVS
GMMMGMMNMMSNVLRVS

SEQ ID NO: 184135 - protein, 17 aa, Artificial Sequence
  Description of Artificial Sequence: Synthetic peptide
  Seed: GMMMGMFNMLSTVLGVS
GMMMGMMNMMSNVLSVS

SEQ ID NO: 184136 - protein, 17 aa, Artificial Sequence
  Description of Artificial Sequence: Synthetic peptide
  Seed: GMMMGMFNMLSTVLGVS
GMMMGMMNMMSNVLTVS

SEQ ID NO: 184137 - protein, 17 aa, Artificial Sequence
  Description of Artificial Sequence: Synthetic peptide
  Seed: GMMMGMFNMLSTVLGVS
GMMMGMMNMMSNVLVVS

SEQ ID NO: 184138 - protein, 17 aa, Artificial Sequence
  Description of Artificial Sequence: Synthetic peptide
  Seed: GMMMGMFNMLSTVLGVS
GMMMGMMNMMSPVLAVS

SEQ ID NO: 184139 - protein, 17 aa, Artificial Sequence
  Description of Artificial Sequence: Synthetic peptide
  Seed: GMMMGMFNMLSTVLGVS
GMMMGMMNMMSPVLDVS

SEQ ID NO: 184140 - protein, 17 aa, Artificial Sequence
  Description of Artificial Sequence: Synthetic peptide
  Seed: GMMMGMFNMLSTVLGVS
GMMMGMMNMMSPVLEVS

SEQ ID NO: 184141 - protein, 17 aa, Artificial Sequence
  Description of Artificial Sequence: Synthetic peptide
  Seed: GMMMGMFNMLSTVLGVS
GMMMGMMNMMSPVLGVS

SEQ ID NO: 184142 - protein, 17 aa, Artificial Sequence
  Description of Artificial Sequence: Synthetic peptide
  Seed: GMMMGMFNMLSTVLGVS
GMMMGMMNMMSPVLHVS

SEQ ID NO: 184143 - protein, 17 aa, Artificial Sequence
  Description of Artificial Sequence: Synthetic peptide
  Seed: GMMMGMFNMLSTVLGVS
GMMMGMMNMMSPVLIVS

SEQ ID NO: 184144 - protein, 17 aa, Artificial Sequence
  Description of Artificial Sequence: Synthetic peptide
  Seed: GMMMGMFNMLSTVLGVS
GMMMGMMNMMSPVLKVS

SEQ ID NO: 184145 - protein, 17 aa, Artificial Sequence
  Description of Artificial Sequence: Synthetic peptide
  Seed: GMMMGMFNMLSTVLGVS
GMMMGMMNMMSPVLLVS

SEQ ID NO: 184146 - protein, 17 aa, Artificial Sequence
  Description of Artificial Sequence: Synthetic peptide
  Seed: GMMMGMFNMLSTVLGVS
GMMMGMMNMMSPVLMVS

SEQ ID NO: 184147 - protein, 17 aa, Artificial Sequence
  Description of Artificial Sequence: Synthetic peptide
  Seed: GMMMGMFNMLSTVLGVS
GMMMGMMNMMSPVLNVS

SEQ ID NO: 184148 - protein, 17 aa, Artificial Sequence
  Description of Artificial Sequence: Synthetic peptide
  Seed: GMMMGMFNMLSTVLGVS
GMMMGMMNMMSPVLPVS

SEQ ID NO: 184149 - protein, 17 aa, Artificial Sequence
  Description of Artificial Sequence: Synthetic peptide
  Seed: GMMMGMFNMLSTVLGVS
GMMMGMMNMMSPVLQVS

SEQ ID NO: 184150 - protein, 17 aa, Artificial Sequence
  Description of Artificial Sequence: Synthetic peptide
  Seed: GMMMGMFNMLSTVLGVS
GMMMGMMNMMSPVLRVS

SEQ ID NO: 184151 - protein, 17 aa, Artificial Sequence
  Description of Artificial Sequence: Synthetic peptide
  Seed: GMMMGMFNMLSTVLGVS
GMMMGMMNMMSPVLSVS

SEQ ID NO: 184152 - protein, 17 aa, Artificial Sequence
  Description of Artificial Sequence: Synthetic peptide
  Seed: GMMMGMFNMLSTVLGVS
GMMMGMMNMMSPVLTVS

SEQ ID NO: 184153 - protein, 17 aa, Artificial Sequence
  Description of Artificial Sequence: Synthetic peptide
  Seed: GMMMGMFNMLSTVLGVS
GMMMGMMNMMSPVLVVS

SEQ ID NO: 184154 - protein, 17 aa, Artificial Sequence
  Description of Artificial Sequence: Synthetic peptide
  Seed: GMMMGMFNMLSTVLGVS
GMMMGMMNMMSPVLYVS

SEQ ID NO: 184155 - protein, 17 aa, Artificial Sequence
  Description of Artificial Sequence: Synthetic peptide
  Seed: GMMMGMFNMLSTVLGVS
GMMMGMMNMMSRVLAVS

SEQ ID NO: 184156 - protein, 17 aa, Artificial Sequence
  Description of Artificial Sequence: Synthetic peptide
  Seed: GMMMGMFNMLSTVLGVS
GMMMGMMNMMSRVLDVS

SEQ ID NO: 184157 - protein, 17 aa, Artificial Sequence
  Description of Artificial Sequence: Synthetic peptide
  Seed: GMMMGMFNMLSTVLGVS
GMMMGMMNMMSRVLGVS

SEQ ID NO: 184158 - protein, 17 aa, Artificial Sequence
  Description of Artificial Sequence: Synthetic peptide
  Seed: GMMMGMFNMLSTVLGVS
GMMMGMMNMMSRVLHVS

SEQ ID NO: 184159 - protein, 17 aa, Artificial Sequence
  Description of Artificial Sequence: Synthetic peptide
  Seed: GMMMGMFNMLSTVLGVS
GMMMGMMNMMSRVLKVS

SEQ ID NO: 184160 - protein, 17 aa, Artificial Sequence
  Description of Artificial Sequence: Synthetic peptide
  Seed: GMMMGMFNMLSTVLGVS
GMMMGMMNMMSRVLNVS

SEQ ID NO: 184161 - protein, 17 aa, Artificial Sequence
  Description of Artificial Sequence: Synthetic peptide
  Seed: GMMMGMFNMLSTVLGVS
GMMMGMMNMMSRVLRVS

SEQ ID NO: 184162 - protein, 17 aa, Artificial Sequence
  Description of Artificial Sequence: Synthetic peptide
  Seed: GMMMGMFNMLSTVLGVS
GMMMGMMNMMSRVLSVS

SEQ ID NO: 184163 - protein, 17 aa, Artificial Sequence
  Description of Artificial Sequence: Synthetic peptide
  Seed: GMMMGMFNMLSTVLGVS
GMMMGMMNMMSSVLAVS

SEQ ID NO: 184164 - protein, 17 aa, Artificial Sequence
  Description of Artificial Sequence: Synthetic peptide
  Seed: GMMMGMFNMLSTVLGVS
GMMMGMMNMMSSVLGVS

SEQ ID NO: 184165 - protein, 17 aa, Artificial Sequence
  Description of Artificial Sequence: Synthetic peptide
  Seed: GMMMGMFNMLSTVLGVS
GMMMGMMNMMSSVLHVS

SEQ ID NO: 184166 - protein, 17 aa, Artificial Sequence
  Description of Artificial Sequence: Synthetic peptide
  Seed: GMMMGMFNMLSTVLGVS
GMMMGMMNMMSSVLIVS

SEQ ID NO: 184167 - protein, 17 aa, Artificial Sequence
  Description of Artificial Sequence: Synthetic peptide
  Seed: GMMMGMFNMLSTVLGVS
GMMMGMMNMMSSVLKVS

SEQ ID NO: 184168 - protein, 17 aa, Artificial Sequence
  Description of Artificial Sequence: Synthetic peptide
  Seed: GMMMGMFNMLSTVLGVS
GMMMGMMNMMSSVLLVS

SEQ ID NO: 184169 - protein, 17 aa, Artificial Sequence
  Description of Artificial Sequence: Synthetic peptide
  Seed: GMMMGMFNMLSTVLGVS
GMMMGMMNMMSSVLNVS

SEQ ID NO: 184170 - protein, 17 aa, Artificial Sequence
  Description of Artificial Sequence: Synthetic peptide
  Seed: GMMMGMFNMLSTVLGVS
GMMMGMMNMMSSVLQVS

SEQ ID NO: 184171 - protein, 17 aa, Artificial Sequence
  Description of Artificial Sequence: Synthetic peptide
  Seed: GMMMGMFNMLSTVLGVS
GMMMGMMNMMSSVLRVS

SEQ ID NO: 184172 - protein, 17 aa, Artificial Sequence
  Description of Artificial Sequence: Synthetic peptide
  Seed: GMMMGMFNMLSTVLGVS
GMMMGMMNMMSSVLSVS

SEQ ID NO: 184173 - protein, 17 aa, Artificial Sequence
  Description of Artificial Sequence: Synthetic peptide
  Seed: GMMMGMFNMLSTVLGVS
GMMMGMMNMMSSVLTVS

SEQ ID NO: 184174 - protein, 17 aa, Artificial Sequence
  Description of Artificial Sequence: Synthetic peptide
  Seed: GMMMGMFNMLSTVLGVS
GMMMGMMNMMSSVLVVS

SEQ ID NO: 184175 - protein, 17 aa, Artificial Sequence
  Description of Artificial Sequence: Synthetic peptide
  Seed: GMMMGMFNMLSTVLGVS
GMMMGMMNMMSTVLAVS

SEQ ID NO: 184176 - protein, 17 aa, Artificial Sequence
  Description of Artificial Sequence: Synthetic peptide
  Seed: GMMMGMFNMLSTVLGVS
GMMMGMMNMMSTVLHVS

SEQ ID NO: 184177 - protein, 17 aa, Artificial Sequence
  Description of Artificial Sequence: Synthetic peptide
  Seed: GMMMGMFNMLSTVLGVS
GMMMGMMNMMSTVLKVS

SEQ ID NO: 184178 - protein, 17 aa, Artificial Sequence
  Description of Artificial Sequence: Synthetic peptide
  Seed: GMMMGMFNMLSTVLGVS
GMMMGMMNMMSTVLNVS

SEQ ID NO: 184179 - protein, 17 aa, Artificial Sequence
  Description of Artificial Sequence: Synthetic peptide
  Seed: GMMMGMFNMLSTVLGVS
GMMMGMMNMMSTVLSVS

SEQ ID NO: 184180 - protein, 17 aa, Artificial Sequence
  Description of Artificial Sequence: Synthetic peptide
  Seed: GMMMGMFNMLSTVLGVS
GMMMGMMNMMSTVLTVS

SEQ ID NO: 184181 - protein, 17 aa, Artificial Sequence
  Description of Artificial Sequence: Synthetic peptide
  Seed: GMMMGMFNMLSTVLGVS
GMMMGMMNMMSVVLHVS

SEQ ID NO: 184182 - protein, 17 aa, Artificial Sequence
  Description of Artificial Sequence: Synthetic peptide
  Seed: GMMMGMFNMLSTVLGVS
GMMMGMMNMMSVVLNVS

SEQ ID NO: 184183 - protein, 17 aa, Artificial Sequence
  Description of Artificial Sequence: Synthetic peptide
  Seed: GMMMGMFNMLSTVLGVS
GMMMGMMNMNSAVLAVS

SEQ ID NO: 184184 - protein, 17 aa, Artificial Sequence
  Description of Artificial Sequence: Synthetic peptide
  Seed: GMMMGMFNMLSTVLGVS
GMMMGMMNMNSAVLFVS

SEQ ID NO: 184185 - protein, 17 aa, Artificial Sequence
  Description of Artificial Sequence: Synthetic peptide
  Seed: GMMMGMFNMLSTVLGVS
GMMMGMMNMNSAVLIVS

SEQ ID NO: 184186 - protein, 17 aa, Artificial Sequence
  Description of Artificial Sequence: Synthetic peptide
  Seed: GMMMGMFNMLSTVLGVS
GMMMGMMNMNSAVLLVS

SEQ ID NO: 184187 - protein, 17 aa, Artificial Sequence
  Description of Artificial Sequence: Synthetic peptide
  Seed: GMMMGMFNMLSTVLGVS
GMMMGMMNMNSAVLMVS

SEQ ID NO: 184188 - protein, 17 aa, Artificial Sequence
  Description of Artificial Sequence: Synthetic peptide
  Seed: GMMMGMFNMLSTVLGVS
GMMMGMMNMNSAVLTVS

SEQ ID NO: 184189 - protein, 17 aa, Artificial Sequence
  Description of Artificial Sequence: Synthetic peptide
  Seed: GMMMGMFNMLSTVLGVS
GMMMGMMNMNSAVLVVS

SEQ ID NO: 184190 - protein, 17 aa, Artificial Sequence
  Description of Artificial Sequence: Synthetic peptide
  Seed: GMMMGMFNMLSTVLGVS
GMMMGMMNMNSAVLYVS

SEQ ID NO: 184191 - protein, 17 aa, Artificial Sequence
  Description of Artificial Sequence: Synthetic peptide
  Seed: GMMMGMFNMLSTVLGVS
GMMMGMMNMNSGVLIVS

SEQ ID NO: 184192 - protein, 17 aa, Artificial Sequence
  Description of Artificial Sequence: Synthetic peptide
  Seed: GMMMGMFNMLSTVLGVS
GMMMGMMNMNSGVLVVS

SEQ ID NO: 184193 - protein, 17 aa, Artificial Sequence
  Description of Artificial Sequence: Synthetic peptide
  Seed: GMMMGMFNMLSTVLGVS
GMMMGMMNMNSIVLIVS

SEQ ID NO: 184194 - protein, 17 aa, Artificial Sequence
  Description of Artificial Sequence: Synthetic peptide
  Seed: GMMMGMFNMLSTVLGVS
GMMMGMMNMNSIVLVVS

SEQ ID NO: 184195 - protein, 17 aa, Artificial Sequence
  Description of Artificial Sequence: Synthetic peptide
  Seed: GMMMGMFNMLSTVLGVS
GMMMGMMNMNSIVLYVS

SEQ ID NO: 184196 - protein, 17 aa, Artificial Sequence
  Description of Artificial Sequence: Synthetic peptide
  Seed: GMMMGMFNMLSTVLGVS
GMMMGMMNMNSNVLFVS

SEQ ID NO: 184197 - protein, 17 aa, Artificial Sequence
  Description of Artificial Sequence: Synthetic peptide
  Seed: GMMMGMFNMLSTVLGVS
GMMMGMMNMNSNVLIVS

SEQ ID NO: 184198 - protein, 17 aa, Artificial Sequence
  Description of Artificial Sequence: Synthetic peptide
  Seed: GMMMGMFNMLSTVLGVS
GMMMGMMNMNSNVLLVS

SEQ ID NO: 184199 - protein, 17 aa, Artificial Sequence
  Description of Artificial Sequence: Synthetic peptide
  Seed: GMMMGMFNMLSTVLGVS
GMMMGMMNMNSNVLVVS

SEQ ID NO: 184200 - protein, 17 aa, Artificial Sequence
  Description of Artificial Sequence: Synthetic peptide
  Seed: GMMMGMFNMLSTVLGVS
GMMMGMMNMNSNVLYVS

SEQ ID NO: 184201 - protein, 17 aa, Artificial Sequence
  Description of Artificial Sequence: Synthetic peptide
  Seed: GMMMGMFNMLSTVLGVS
GMMMGMMNMNSPVLFVS

SEQ ID NO: 184202 - protein, 17 aa, Artificial Sequence
  Description of Artificial Sequence: Synthetic peptide
  Seed: GMMMGMFNMLSTVLGVS
GMMMGMMNMNSPVLIVS

SEQ ID NO: 184203 - protein, 17 aa, Artificial Sequence
  Description of Artificial Sequence: Synthetic peptide
  Seed: GMMMGMFNMLSTVLGVS
GMMMGMMNMNSPVLLVS

SEQ ID NO: 184204 - protein, 17 aa, Artificial Sequence
  Description of Artificial Sequence: Synthetic peptide
  Seed: GMMMGMFNMLSTVLGVS
GMMMGMMNMNSPVLVVS

SEQ ID NO: 184205 - protein, 17 aa, Artificial Sequence
  Description of Artificial Sequence: Synthetic peptide
  Seed: GMMMGMFNMLSTVLGVS
GMMMGMMNMNSPVLYVS

SEQ ID NO: 184206 - protein, 17 aa, Artificial Sequence
  Description of Artificial Sequence: Synthetic peptide
  Seed: GMMMGMFNMLSTVLGVS
GMMMGMMNMNSSVLFVS

SEQ ID NO: 184207 - protein, 17 aa, Artificial Sequence
  Description of Artificial Sequence: Synthetic peptide
  Seed: GMMMGMFNMLSTVLGVS
GMMMGMMNMNSSVLIVS

SEQ ID NO: 184208 - protein, 17 aa, Artificial Sequence
  Description of Artificial Sequence: Synthetic peptide
  Seed: GMMMGMFNMLSTVLGVS
GMMMGMMNMNSSVLLVS

SEQ ID NO: 184209 - protein, 17 aa, Artificial Sequence
  Description of Artificial Sequence: Synthetic peptide
  Seed: GMMMGMFNMLSTVLGVS
GMMMGMMNMNSSVLVVS

SEQ ID NO: 184210 - protein, 17 aa, Artificial Sequence
  Description of Artificial Sequence: Synthetic peptide
  Seed: GMMMGMFNMLSTVLGVS
GMMMGMMNMNSSVLYVS

SEQ ID NO: 184211 - protein, 17 aa, Artificial Sequence
  Description of Artificial Sequence: Synthetic peptide
  Seed: GMMMGMFNMLSTVLGVS
GMMMGMMNMNSTVLIVS

SEQ ID NO: 184212 - protein, 17 aa, Artificial Sequence
  Description of Artificial Sequence: Synthetic peptide
  Seed: GMMMGMFNMLSTVLGVS
GMMMGMMNMNSTVLVVS

SEQ ID NO: 184213 - protein, 17 aa, Artificial Sequence
  Description of Artificial Sequence: Synthetic peptide
  Seed: GMMMGMFNMLSTVLGVS
GMMMGMMNMNSTVLYVS

SEQ ID NO: 184214 - protein, 17 aa, Artificial Sequence
  Description of Artificial Sequence: Synthetic peptide
  Seed: GMMMGMFNMLSTVLGVS
GMMMGMMNMNSVVLVVS

SEQ ID NO: 184215 - protein, 17 aa, Artificial Sequence
  Description of Artificial Sequence: Synthetic peptide
  Seed: GMMMGMFNMLSTVLGVS
GMMMGMMNMNSVVLYVS

SEQ ID NO: 184216 - protein, 17 aa, Artificial Sequence
  Description of Artificial Sequence: Synthetic peptide
  Seed: GMMMGMFNMLSTVLGVS
GMMMGMMNMQSAVLAVS

SEQ ID NO: 184217 - protein, 17 aa, Artificial Sequence
  Description of Artificial Sequence: Synthetic peptide
  Seed: GMMMGMFNMLSTVLGVS
GMMMGMMNMQSAVLGVS

SEQ ID NO: 184218 - protein, 17 aa, Artificial Sequence
  Description of Artificial Sequence: Synthetic peptide
  Seed: GMMMGMFNMLSTVLGVS
GMMMGMMNMQSAVLHVS

SEQ ID NO: 184219 - protein, 17 aa, Artificial Sequence
  Description of Artificial Sequence: Synthetic peptide
  Seed: GMMMGMFNMLSTVLGVS
GMMMGMMNMQSAVLIVS

SEQ ID NO: 184220 - protein, 17 aa, Artificial Sequence
  Description of Artificial Sequence: Synthetic peptide
  Seed: GMMMGMFNMLSTVLGVS
GMMMGMMNMQSAVLLVS

SEQ ID NO: 184221 - protein, 17 aa, Artificial Sequence
  Description of Artificial Sequence: Synthetic peptide
  Seed: GMMMGMFNMLSTVLGVS
GMMMGMMNMQSAVLMVS

SEQ ID NO: 184222 - protein, 17 aa, Artificial Sequence
  Description of Artificial Sequence: Synthetic peptide
  Seed: GMMMGMFNMLSTVLGVS
GMMMGMMNMQSAVLNVS

SEQ ID NO: 184223 - protein, 17 aa, Artificial Sequence
  Description of Artificial Sequence: Synthetic peptide
  Seed: GMMMGMFNMLSTVLGVS
GMMMGMMNMQSAVLQVS

SEQ ID NO: 184224 - protein, 17 aa, Artificial Sequence
  Description of Artificial Sequence: Synthetic peptide
  Seed: GMMMGMFNMLSTVLGVS
GMMMGMMNMQSAVLSVS

SEQ ID NO: 184225 - protein, 17 aa, Artificial Sequence
  Description of Artificial Sequence: Synthetic peptide
  Seed: GMMMGMFNMLSTVLGVS
GMMMGMMNMQSAVLTVS

SEQ ID NO: 184226 - protein, 17 aa, Artificial Sequence
  Description of Artificial Sequence: Synthetic peptide
  Seed: GMMMGMFNMLSTVLGVS
GMMMGMMNMQSAVLVVS

SEQ ID NO: 184227 - protein, 17 aa, Artificial Sequence
  Description of Artificial Sequence: Synthetic peptide
  Seed: GMMMGMFNMLSTVLGVS
GMMMGMMNMQSGVLAVS

SEQ ID NO: 184228 - protein, 17 aa, Artificial Sequence
  Description of Artificial Sequence: Synthetic peptide
  Seed: GMMMGMFNMLSTVLGVS
GMMMGMMNMQSGVLIVS

SEQ ID NO: 184229 - protein, 17 aa, Artificial Sequence
  Description of Artificial Sequence: Synthetic peptide
  Seed: GMMMGMFNMLSTVLGVS
GMMMGMMNMQSGVLLVS

SEQ ID NO: 184230 - protein, 17 aa, Artificial Sequence
  Description of Artificial Sequence: Synthetic peptide
  Seed: GMMMGMFNMLSTVLGVS
GMMMGMMNMQSGVLSVS

SEQ ID NO: 184231 - protein, 17 aa, Artificial Sequence
  Description of Artificial Sequence: Synthetic peptide
  Seed: GMMMGMFNMLSTVLGVS
GMMMGMMNMQSGVLTVS

SEQ ID NO: 184232 - protein, 17 aa, Artificial Sequence
  Description of Artificial Sequence: Synthetic peptide
  Seed: GMMMGMFNMLSTVLGVS
GMMMGMMNMQSGVLVVS

SEQ ID NO: 184233 - protein, 17 aa, Artificial Sequence
  Description of Artificial Sequence: Synthetic peptide
  Seed: GMMMGMFNMLSTVLGVS
GMMMGMMNMQSNVLAVS

SEQ ID NO: 184234 - protein, 17 aa, Artificial Sequence
  Description of Artificial Sequence: Synthetic peptide
  Seed: GMMMGMFNMLSTVLGVS
GMMMGMMNMQSNVLSVS

SEQ ID NO: 184235 - protein, 17 aa, Artificial Sequence
  Description of Artificial Sequence: Synthetic peptide
  Seed: GMMMGMFNMLSTVLGVS
GMMMGMMNMQSPVLAVS

SEQ ID NO: 184236 - protein, 17 aa, Artificial Sequence
  Description of Artificial Sequence: Synthetic peptide
  Seed: GMMMGMFNMLSTVLGVS
GMMMGMMNMQSPVLIVS

SEQ ID NO: 184237 - protein, 17 aa, Artificial Sequence
  Description of Artificial Sequence: Synthetic peptide
  Seed: GMMMGMFNMLSTVLGVS
GMMMGMMNMQSPVLLVS

SEQ ID NO: 184238 - protein, 17 aa, Artificial Sequence
  Description of Artificial Sequence: Synthetic peptide
  Seed: GMMMGMFNMLSTVLGVS
GMMMGMMNMQSPVLNVS

SEQ ID NO: 184239 - protein, 17 aa, Artificial Sequence
  Description of Artificial Sequence: Synthetic peptide
  Seed: GMMMGMFNMLSTVLGVS
GMMMGMMNMQSPVLSVS

SEQ ID NO: 184240 - protein, 17 aa, Artificial Sequence
  Description of Artificial Sequence: Synthetic peptide
  Seed: GMMMGMFNMLSTVLGVS
GMMMGMMNMQSPVLTVS

SEQ ID NO: 184241 - protein, 17 aa, Artificial Sequence
  Description of Artificial Sequence: Synthetic peptide
  Seed: GMMMGMFNMLSTVLGVS
GMMMGMMNMQSPVLVVS

SEQ ID NO: 184242 - protein, 17 aa, Artificial Sequence
  Description of Artificial Sequence: Synthetic peptide
  Seed: GMMMGMFNMLSTVLGVS
GMMMGMMNMQSSVLAVS

SEQ ID NO: 184243 - protein, 17 aa, Artificial Sequence
  Description of Artificial Sequence: Synthetic peptide
  Seed: GMMMGMFNMLSTVLGVS
GMMMGMMNMQSSVLIVS

SEQ ID NO: 184244 - protein, 17 aa, Artificial Sequence
  Description of Artificial Sequence: Synthetic peptide
  Seed: GMMMGMFNMLSTVLGVS
GMMMGMMNMQSSVLLVS

SEQ ID NO: 184245 - protein, 17 aa, Artificial Sequence
  Description of Artificial Sequence: Synthetic peptide
  Seed: GMMMGMFNMLSTVLGVS
GMMMGMMNMQSSVLNVS

SEQ ID NO: 184246 - protein, 17 aa, Artificial Sequence
  Description of Artificial Sequence: Synthetic peptide
  Seed: GMMMGMFNMLSTVLGVS
GMMMGMMNMQSSVLTVS

SEQ ID NO: 184247 - protein, 17 aa, Artificial Sequence
  Description of Artificial Sequence: Synthetic peptide
  Seed: GMMMGMFNMLSTVLGVS
GMMMGMMNMQSSVLVVS

SEQ ID NO: 184248 - protein, 17 aa, Artificial Sequence
  Description of Artificial Sequence: Synthetic peptide
  Seed: GMMMGMFNMLSTVLGVS
GMMMGMMNMSSAVLAVS

SEQ ID NO: 184249 - protein, 17 aa, Artificial Sequence
  Description of Artificial Sequence: Synthetic peptide
  Seed: GMMMGMFNMLSTVLGVS
GMMMGMMNMSSAVLIVS

SEQ ID NO: 184250 - protein, 17 aa, Artificial Sequence
  Description of Artificial Sequence: Synthetic peptide
  Seed: GMMMGMFNMLSTVLGVS
GMMMGMMNMSSAVLLVS

SEQ ID NO: 184251 - protein, 17 aa, Artificial Sequence
  Description of Artificial Sequence: Synthetic peptide
  Seed: GMMMGMFNMLSTVLGVS
GMMMGMMNMSSAVLMVS

SEQ ID NO: 184252 - protein, 17 aa, Artificial Sequence
  Description of Artificial Sequence: Synthetic peptide
  Seed: GMMMGMFNMLSTVLGVS
GMMMGMMNMSSAVLNVS

SEQ ID NO: 184253 - protein, 17 aa, Artificial Sequence
  Description of Artificial Sequence: Synthetic peptide
  Seed: GMMMGMFNMLSTVLGVS
GMMMGMMNMSSAVLVVS

SEQ ID NO: 184254 - protein, 17 aa, Artificial Sequence
  Description of Artificial Sequence: Synthetic peptide
  Seed: GMMMGMFNMLSTVLGVS
GMMMGMMNMSSGVLAVS

SEQ ID NO: 184255 - protein, 17 aa, Artificial Sequence
  Description of Artificial Sequence: Synthetic peptide
  Seed: GMMMGMFNMLSTVLGVS
GMMMGMMNMSSPVLIVS

SEQ ID NO: 184256 - protein, 17 aa, Artificial Sequence
  Description of Artificial Sequence: Synthetic peptide
  Seed: GMMMGMFNMLSTVLGVS
GMMMGMMNMSSPVLLVS

SEQ ID NO: 184257 - protein, 17 aa, Artificial Sequence
  Description of Artificial Sequence: Synthetic peptide
  Seed: GMMMGMFNMLSTVLGVS
GMMMGMMNMSSPVLVVS

SEQ ID NO: 184258 - protein, 17 aa, Artificial Sequence
  Description of Artificial Sequence: Synthetic peptide
  Seed: GMMMGMFNMLSTVLGVS
GMMMGMMNMSSSVLIVS

SEQ ID NO: 184259 - protein, 17 aa, Artificial Sequence
  Description of Artificial Sequence: Synthetic peptide
  Seed: GMMMGMFNMLSTVLGVS
GMMMGMMNMTSAVLAVS

SEQ ID NO: 184260 - protein, 17 aa, Artificial Sequence
  Description of Artificial Sequence: Synthetic peptide
  Seed: GMMMGMFNMLSTVLGVS
GMMMGMMNMTSPVLAVS

SEQ ID NO: 184261 - protein, 17 aa, Artificial Sequence
  Description of Artificial Sequence: Synthetic peptide
  Seed: GMMMGMFNMLSTVLGVS
GMMMGMMNMTSPVLIVS

SEQ ID NO: 184262 - protein, 17 aa, Artificial Sequence
  Description of Artificial Sequence: Synthetic peptide
  Seed: GMMMGMFNMLSTVLGVS
GMMMGMMNMTSSVLIVS

SEQ ID NO: 184263 - protein, 17 aa, Artificial Sequence
  Description of Artificial Sequence: Synthetic peptide
  Seed: GMMMGMFNMLSTVLGVS
GMMMGMMNMVSAVLNVS

SEQ ID NO: 184264 - protein, 17 aa, Artificial Sequence
  Description of Artificial Sequence: Synthetic peptide
  Seed: GMMMGMFNMLSTVLGVS
GMMMGMMNMVSPVLAVS

SEQ ID NO: 184265 - protein, 17 aa, Artificial Sequence
  Description of Artificial Sequence: Synthetic peptide
  Seed: GMMMGMFNMLSTVLGVS
GMMMGMMNMVSPVLNVS

SEQ ID NO: 184266 - protein, 17 aa, Artificial Sequence
  Description of Artificial Sequence: Synthetic peptide
  Seed: GMMMGMFNMLSTVLGVS
GMMMGMMNMVSPVLSVS

SEQ ID NO: 184267 - protein, 17 aa, Artificial Sequence
  Description of Artificial Sequence: Synthetic peptide
  Seed: GMMMGMFNMLSTVLGVS
GMMMGMMNMVSPVLVVS

SEQ ID NO: 184268 - protein, 17 aa, Artificial Sequence
  Description of Artificial Sequence: Synthetic peptide
  Seed: GMMMGMFNMLSTVLGVS
GMMMGMQNMMSAVLAVS

SEQ ID NO: 184269 - protein, 17 aa, Artificial Sequence
  Description of Artificial Sequence: Synthetic peptide
  Seed: GMMMGMFNMLSTVLGVS
GMMMGMQNMMSAVLIVS

SEQ ID NO: 184270 - protein, 17 aa, Artificial Sequence
  Description of Artificial Sequence: Synthetic peptide
  Seed: GMMMGMFNMLSTVLGVS
GMMMGMQNMMSAVLNVS

SEQ ID NO: 184271 - protein, 17 aa, Artificial Sequence
  Description of Artificial Sequence: Synthetic peptide
  Seed: GMMMGMFNMLSTVLGVS
GMMMGMQNMMSAVLSVS

SEQ ID NO: 184272 - protein, 17 aa, Artificial Sequence
  Description of Artificial Sequence: Synthetic peptide
  Seed: GMMMGMFNMLSTVLGVS
GMMMGMQNMMSAVLVVS

SEQ ID NO: 184273 - protein, 17 aa, Artificial Sequence
  Description of Artificial Sequence: Synthetic peptide
  Seed: GMMMGMFNMLSTVLGVS
GMMMGMRNMLSGVLIVS

SEQ ID NO: 184274 - protein, 17 aa, Artificial Sequence
  Description of Artificial Sequence: Synthetic peptide
  Seed: GMMMGMFNMLSTVLGVS
GMMMGMRNMLSGVLLVS

SEQ ID NO: 184275 - protein, 17 aa, Artificial Sequence
  Description of Artificial Sequence: Synthetic peptide
  Seed: GMMMGMFNMLSTVLGVS
GMMMGMRNMLSGVLVVS

SEQ ID NO: 184276 - protein, 17 aa, Artificial Sequence
  Description of Artificial Sequence: Synthetic peptide
  Seed: GMMMGMFNMLSTVLGVS
GMMMGMRNMMSGVLIVS

SEQ ID NO: 184277 - protein, 17 aa, Artificial Sequence
  Description of Artificial Sequence: Synthetic peptide
  Seed: GMMMGMFNMLSTVLGVS
GMMMGMRNMMSGVLLVS

SEQ ID NO: 184278 - protein, 17 aa, Artificial Sequence
  Description of Artificial Sequence: Synthetic peptide
  Seed: GMMMGMFNMLSTVLGVS
GMMMGMRNMMSGVLVVS

SEQ ID NO: 184279 - protein, 17 aa, Artificial Sequence
  Description of Artificial Sequence: Synthetic peptide
  Seed: GMMMGMFNMLSTVLGVS
GMMMGMVNMASAVLAVS

SEQ ID NO: 184280 - protein, 17 aa, Artificial Sequence
  Description of Artificial Sequence: Synthetic peptide
  Seed: GMMMGMFNMLSTVLGVS
GMMMGMVNMASAVLHVS

SEQ ID NO: 184281 - protein, 17 aa, Artificial Sequence
  Description of Artificial Sequence: Synthetic peptide
  Seed: GMMMGMFNMLSTVLGVS
GMMMGMVNMASAVLIVS

SEQ ID NO: 184282 - protein, 17 aa, Artificial Sequence
  Description of Artificial Sequence: Synthetic peptide
  Seed: GMMMGMFNMLSTVLGVS
GMMMGMVNMASAVLLVS

SEQ ID NO: 184283 - protein, 17 aa, Artificial Sequence
  Description of Artificial Sequence: Synthetic peptide
  Seed: GMMMGMFNMLSTVLGVS
GMMMGMVNMASAVLMVS

SEQ ID NO: 184284 - protein, 17 aa, Artificial Sequence
  Description of Artificial Sequence: Synthetic peptide
  Seed: GMMMGMFNMLSTVLGVS
GMMMGMVNMASAVLNVS

SEQ ID NO: 184285 - protein, 17 aa, Artificial Sequence
  Description of Artificial Sequence: Synthetic peptide
  Seed: GMMMGMFNMLSTVLGVS
GMMMGMVNMASAVLSVS

SEQ ID NO: 184286 - protein, 17 aa, Artificial Sequence
  Description of Artificial Sequence: Synthetic peptide
  Seed: GMMMGMFNMLSTVLGVS
GMMMGMVNMASAVLTVS

SEQ ID NO: 184287 - protein, 17 aa, Artificial Sequence
  Description of Artificial Sequence: Synthetic peptide
  Seed: GMMMGMFNMLSTVLGVS
GMMMGMVNMASAVLVVS

SEQ ID NO: 184288 - protein, 17 aa, Artificial Sequence
  Description of Artificial Sequence: Synthetic peptide
  Seed: GMMMGMFNMLSTVLGVS
GMMMGMVNMASGVLAVS

SEQ ID NO: 184289 - protein, 17 aa, Artificial Sequence
  Description of Artificial Sequence: Synthetic peptide
  Seed: GMMMGMFNMLSTVLGVS
GMMMGMVNMASGVLIVS

SEQ ID NO: 184290 - protein, 17 aa, Artificial Sequence
  Description of Artificial Sequence: Synthetic peptide
  Seed: GMMMGMFNMLSTVLGVS
GMMMGMVNMASGVLLVS

SEQ ID NO: 184291 - protein, 17 aa, Artificial Sequence
  Description of Artificial Sequence: Synthetic peptide
  Seed: GMMMGMFNMLSTVLGVS
GMMMGMVNMASGVLMVS

SEQ ID NO: 184292 - protein, 17 aa, Artificial Sequence
  Description of Artificial Sequence: Synthetic peptide
  Seed: GMMMGMFNMLSTVLGVS
GMMMGMVNMASGVLTVS

SEQ ID NO: 184293 - protein, 17 aa, Artificial Sequence
  Description of Artificial Sequence: Synthetic peptide
  Seed: GMMMGMFNMLSTVLGVS
GMMMGMVNMASGVLVVS

SEQ ID NO: 184294 - protein, 17 aa, Artificial Sequence
  Description of Artificial Sequence: Synthetic peptide
  Seed: GMMMGMFNMLSTVLGVS
GMMMGMVNMASPVLAVS

SEQ ID NO: 184295 - protein, 17 aa, Artificial Sequence
  Description of Artificial Sequence: Synthetic peptide
  Seed: GMMMGMFNMLSTVLGVS
GMMMGMVNMASPVLIVS

SEQ ID NO: 184296 - protein, 17 aa, Artificial Sequence
  Description of Artificial Sequence: Synthetic peptide
  Seed: GMMMGMFNMLSTVLGVS
GMMMGMVNMASPVLLVS

SEQ ID NO: 184297 - protein, 17 aa, Artificial Sequence
  Description of Artificial Sequence: Synthetic peptide
  Seed: GMMMGMFNMLSTVLGVS
GMMMGMVNMASPVLMVS

SEQ ID NO: 184298 - protein, 17 aa, Artificial Sequence
  Description of Artificial Sequence: Synthetic peptide
  Seed: GMMMGMFNMLSTVLGVS
GMMMGMVNMASPVLNVS

SEQ ID NO: 184299 - protein, 17 aa, Artificial Sequence
  Description of Artificial Sequence: Synthetic peptide
  Seed: GMMMGMFNMLSTVLGVS
GMMMGMVNMASPVLSVS

SEQ ID NO: 184300 - protein, 17 aa, Artificial Sequence
  Description of Artificial Sequence: Synthetic peptide
  Seed: GMMMGMFNMLSTVLGVS
GMMMGMVNMASPVLVVS

SEQ ID NO: 184301 - protein, 17 aa, Artificial Sequence
  Description of Artificial Sequence: Synthetic peptide
  Seed: GMMMGMFNMLSTVLGVS
GMMMGMVNMASSVLVVS

SEQ ID NO: 184302 - protein, 17 aa, Artificial Sequence
  Description of Artificial Sequence: Synthetic peptide
  Seed: GMMMGMFNMLSTVLGVS
GMMMGMVNMGSAVLIVS

SEQ ID NO: 184303 - protein, 17 aa, Artificial Sequence
  Description of Artificial Sequence: Synthetic peptide
  Seed: GMMMGMFNMLSTVLGVS
GMMMGMVNMGSAVLLVS

SEQ ID NO: 184304 - protein, 17 aa, Artificial Sequence
  Description of Artificial Sequence: Synthetic peptide
  Seed: GMMMGMFNMLSTVLGVS
GMMMGMVNMGSAVLVVS

SEQ ID NO: 184305 - protein, 17 aa, Artificial Sequence
  Description of Artificial Sequence: Synthetic peptide
  Seed: GMMMGMFNMLSTVLGVS
GMMMGMVNMISPVLAVS

SEQ ID NO: 184306 - protein, 17 aa, Artificial Sequence
  Description of Artificial Sequence: Synthetic peptide
  Seed: GMMMGMFNMLSTVLGVS
GMMMGMVNMISPVLIVS

SEQ ID NO: 184307 - protein, 17 aa, Artificial Sequence
  Description of Artificial Sequence: Synthetic peptide
  Seed: GMMMGMFNMLSTVLGVS
GMMMGMVNMISPVLLVS

SEQ ID NO: 184308 - protein, 17 aa, Artificial Sequence
  Description of Artificial Sequence: Synthetic peptide
  Seed: GMMMGMFNMLSTVLGVS
GMMMGMVNMISPVLNVS

SEQ ID NO: 184309 - protein, 17 aa, Artificial Sequence
  Description of Artificial Sequence: Synthetic peptide
  Seed: GMMMGMFNMLSTVLGVS
GMMMGMVNMISPVLSVS

SEQ ID NO: 184310 - protein, 17 aa, Artificial Sequence
  Description of Artificial Sequence: Synthetic peptide
  Seed: GMMMGMFNMLSTVLGVS
GMMMGMVNMISPVLVVS

SEQ ID NO: 184311 - protein, 17 aa, Artificial Sequence
  Description of Artificial Sequence: Synthetic peptide
  Seed: GMMMGMFNMLSTVLGVS
GMMMGMVNMISRVLRVS

SEQ ID NO: 184312 - protein, 17 aa, Artificial Sequence
  Description of Artificial Sequence: Synthetic peptide
  Seed: GMMMGMFNMLSTVLGVS
GMMMGMVNMKSRVLRVS

SEQ ID NO: 184313 - protein, 17 aa, Artificial Sequence
  Description of Artificial Sequence: Synthetic peptide
  Seed: GMMMGMFNMLSTVLGVS
GMMMGMVNMLSAVLAVS

SEQ ID NO: 184314 - protein, 17 aa, Artificial Sequence
  Description of Artificial Sequence: Synthetic peptide
  Seed: GMMMGMFNMLSTVLGVS
GMMMGMVNMLSAVLHVS

SEQ ID NO: 184315 - protein, 17 aa, Artificial Sequence
  Description of Artificial Sequence: Synthetic peptide
  Seed: GMMMGMFNMLSTVLGVS
GMMMGMVNMLSAVLRVS

SEQ ID NO: 184316 - protein, 17 aa, Artificial Sequence
  Description of Artificial Sequence: Synthetic peptide
  Seed: GMMMGMFNMLSTVLGVS
GMMMGMVNMLSGVLAVS

SEQ ID NO: 184317 - protein, 17 aa, Artificial Sequence
  Description of Artificial Sequence: Synthetic peptide
  Seed: GMMMGMFNMLSTVLGVS
GMMMGMVNMLSGVLSVS

SEQ ID NO: 184318 - protein, 17 aa, Artificial Sequence
  Description of Artificial Sequence: Synthetic peptide
  Seed: GMMMGMFNMLSTVLGVS
GMMMGMVNMLSGVLTVS

SEQ ID NO: 184319 - protein, 17 aa, Artificial Sequence
  Description of Artificial Sequence: Synthetic peptide
  Seed: GMMMGMFNMLSTVLGVS
GMMMGMVNMLSGVLVVS

SEQ ID NO: 184320 - protein, 17 aa, Artificial Sequence
  Description of Artificial Sequence: Synthetic peptide
  Seed: GMMMGMFNMLSTVLGVS
GMMMGMVNMLSKVLKVS

SEQ ID NO: 184321 - protein, 17 aa, Artificial Sequence
  Description of Artificial Sequence: Synthetic peptide
  Seed: GMMMGMFNMLSTVLGVS
GMMMGMVNMLSNVLAVS

SEQ ID NO: 184322 - protein, 17 aa, Artificial Sequence
  Description of Artificial Sequence: Synthetic peptide
  Seed: GMMMGMFNMLSTVLGVS
GMMMGMVNMLSPVLAVS

SEQ ID NO: 184323 - protein, 17 aa, Artificial Sequence
  Description of Artificial Sequence: Synthetic peptide
  Seed: GMMMGMFNMLSTVLGVS
GMMMGMVNMLSPVLGVS

SEQ ID NO: 184324 - protein, 17 aa, Artificial Sequence
  Description of Artificial Sequence: Synthetic peptide
  Seed: GMMMGMFNMLSTVLGVS
GMMMGMVNMLSPVLHVS

SEQ ID NO: 184325 - protein, 17 aa, Artificial Sequence
  Description of Artificial Sequence: Synthetic peptide
  Seed: GMMMGMFNMLSTVLGVS
GMMMGMVNMLSPVLIVS

SEQ ID NO: 184326 - protein, 17 aa, Artificial Sequence
  Description of Artificial Sequence: Synthetic peptide
  Seed: GMMMGMFNMLSTVLGVS
GMMMGMVNMLSPVLLVS

SEQ ID NO: 184327 - protein, 17 aa, Artificial Sequence
  Description of Artificial Sequence: Synthetic peptide
  Seed: GMMMGMFNMLSTVLGVS
GMMMGMVNMLSPVLMVS

SEQ ID NO: 184328 - protein, 17 aa, Artificial Sequence
  Description of Artificial Sequence: Synthetic peptide
  Seed: GMMMGMFNMLSTVLGVS
GMMMGMVNMLSPVLNVS

SEQ ID NO: 184329 - protein, 17 aa, Artificial Sequence
  Description of Artificial Sequence: Synthetic peptide
  Seed: GMMMGMFNMLSTVLGVS
GMMMGMVNMLSPVLSVS

SEQ ID NO: 184330 - protein, 17 aa, Artificial Sequence
  Description of Artificial Sequence: Synthetic peptide
  Seed: GMMMGMFNMLSTVLGVS
GMMMGMVNMLSPVLTVS

SEQ ID NO: 184331 - protein, 17 aa, Artificial Sequence
  Description of Artificial Sequence: Synthetic peptide
  Seed: GMMMGMFNMLSTVLGVS
GMMMGMVNMLSPVLVVS

SEQ ID NO: 184332 - protein, 17 aa, Artificial Sequence
  Description of Artificial Sequence: Synthetic peptide
  Seed: GMMMGMFNMLSTVLGVS
GMMMGMVNMLSRVLHVS

SEQ ID NO: 184333 - protein, 17 aa, Artificial Sequence
  Description of Artificial Sequence: Synthetic peptide
  Seed: GMMMGMFNMLSTVLGVS
GMMMGMVNMLSRVLKVS

SEQ ID NO: 184334 - protein, 17 aa, Artificial Sequence
  Description of Artificial Sequence: Synthetic peptide
  Seed: GMMMGMFNMLSTVLGVS
GMMMGMVNMLSSVLAVS

SEQ ID NO: 184335 - protein, 17 aa, Artificial Sequence
  Description of Artificial Sequence: Synthetic peptide
  Seed: GMMMGMFNMLSTVLGVS
GMMMGMVNMMSAVLAVS

SEQ ID NO: 184336 - protein, 17 aa, Artificial Sequence
  Description of Artificial Sequence: Synthetic peptide
  Seed: GMMMGMFNMLSTVLGVS
GMMMGMVNMMSAVLHVS

SEQ ID NO: 184337 - protein, 17 aa, Artificial Sequence
  Description of Artificial Sequence: Synthetic peptide
  Seed: GMMMGMFNMLSTVLGVS
GMMMGMVNMMSAVLNVS

SEQ ID NO: 184338 - protein, 17 aa, Artificial Sequence
  Description of Artificial Sequence: Synthetic peptide
  Seed: GMMMGMFNMLSTVLGVS
GMMMGMVNMMSAVLRVS

SEQ ID NO: 184339 - protein, 17 aa, Artificial Sequence
  Description of Artificial Sequence: Synthetic peptide
  Seed: GMMMGMFNMLSTVLGVS
GMMMGMVNMMSAVLSVS

SEQ ID NO: 184340 - protein, 17 aa, Artificial Sequence
  Description of Artificial Sequence: Synthetic peptide
  Seed: GMMMGMFNMLSTVLGVS
GMMMGMVNMMSAVLTVS

SEQ ID NO: 184341 - protein, 17 aa, Artificial Sequence
  Description of Artificial Sequence: Synthetic peptide
  Seed: GMMMGMFNMLSTVLGVS
GMMMGMVNMMSAVLVVS

SEQ ID NO: 184342 - protein, 17 aa, Artificial Sequence
  Description of Artificial Sequence: Synthetic peptide
  Seed: GMMMGMFNMLSTVLGVS
GMMMGMVNMMSGVLAVS

SEQ ID NO: 184343 - protein, 17 aa, Artificial Sequence
  Description of Artificial Sequence: Synthetic peptide
  Seed: GMMMGMFNMLSTVLGVS
GMMMGMVNMMSGVLHVS

SEQ ID NO: 184344 - protein, 17 aa, Artificial Sequence
  Description of Artificial Sequence: Synthetic peptide
  Seed: GMMMGMFNMLSTVLGVS
GMMMGMVNMMSGVLIVS

SEQ ID NO: 184345 - protein, 17 aa, Artificial Sequence
  Description of Artificial Sequence: Synthetic peptide
  Seed: GMMMGMFNMLSTVLGVS
GMMMGMVNMMSGVLLVS

SEQ ID NO: 184346 - protein, 17 aa, Artificial Sequence
  Description of Artificial Sequence: Synthetic peptide
  Seed: GMMMGMFNMLSTVLGVS
GMMMGMVNMMSGVLNVS

SEQ ID NO: 184347 - protein, 17 aa, Artificial Sequence
  Description of Artificial Sequence: Synthetic peptide
  Seed: GMMMGMFNMLSTVLGVS
GMMMGMVNMMSGVLRVS

SEQ ID NO: 184348 - protein, 17 aa, Artificial Sequence
  Description of Artificial Sequence: Synthetic peptide
  Seed: GMMMGMFNMLSTVLGVS
GMMMGMVNMMSGVLSVS

SEQ ID NO: 184349 - protein, 17 aa, Artificial Sequence
  Description of Artificial Sequence: Synthetic peptide
  Seed: GMMMGMFNMLSTVLGVS
GMMMGMVNMMSGVLTVS

SEQ ID NO: 184350 - protein, 17 aa, Artificial Sequence
  Description of Artificial Sequence: Synthetic peptide
  Seed: GMMMGMFNMLSTVLGVS
GMMMGMVNMMSGVLVVS

SEQ ID NO: 184351 - protein, 17 aa, Artificial Sequence
  Description of Artificial Sequence: Synthetic peptide
  Seed: GMMMGMFNMLSTVLGVS
GMMMGMVNMMSKVLHVS

SEQ ID NO: 184352 - protein, 17 aa, Artificial Sequence
  Description of Artificial Sequence: Synthetic peptide
  Seed: GMMMGMFNMLSTVLGVS
GMMMGMVNMMSKVLKVS

SEQ ID NO: 184353 - protein, 17 aa, Artificial Sequence
  Description of Artificial Sequence: Synthetic peptide
  Seed: GMMMGMFNMLSTVLGVS
GMMMGMVNMMSKVLRVS

SEQ ID NO: 184354 - protein, 17 aa, Artificial Sequence
  Description of Artificial Sequence: Synthetic peptide
  Seed: GMMMGMFNMLSTVLGVS
GMMMGMVNMMSNVLAVS

SEQ ID NO: 184355 - protein, 17 aa, Artificial Sequence
  Description of Artificial Sequence: Synthetic peptide
  Seed: GMMMGMFNMLSTVLGVS
GMMMGMVNMMSNVLGVS

SEQ ID NO: 184356 - protein, 17 aa, Artificial Sequence
  Description of Artificial Sequence: Synthetic peptide
  Seed: GMMMGMFNMLSTVLGVS
GMMMGMVNMMSNVLHVS

SEQ ID NO: 184357 - protein, 17 aa, Artificial Sequence
  Description of Artificial Sequence: Synthetic peptide
  Seed: GMMMGMFNMLSTVLGVS
GMMMGMVNMMSNVLNVS

SEQ ID NO: 184358 - protein, 17 aa, Artificial Sequence
  Description of Artificial Sequence: Synthetic peptide
  Seed: GMMMGMFNMLSTVLGVS
GMMMGMVNMMSNVLQVS

SEQ ID NO: 184359 - protein, 17 aa, Artificial Sequence
  Description of Artificial Sequence: Synthetic peptide
  Seed: GMMMGMFNMLSTVLGVS
GMMMGMVNMMSNVLSVS

SEQ ID NO: 184360 - protein, 17 aa, Artificial Sequence
  Description of Artificial Sequence: Synthetic peptide
  Seed: GMMMGMFNMLSTVLGVS
GMMMGMVNMMSNVLVVS

SEQ ID NO: 184361 - protein, 17 aa, Artificial Sequence
  Description of Artificial Sequence: Synthetic peptide
  Seed: GMMMGMFNMLSTVLGVS
GMMMGMVNMMSPVLAVS

SEQ ID NO: 184362 - protein, 17 aa, Artificial Sequence
  Description of Artificial Sequence: Synthetic peptide
  Seed: GMMMGMFNMLSTVLGVS
GMMMGMVNMMSPVLGVS

SEQ ID NO: 184363 - protein, 17 aa, Artificial Sequence
  Description of Artificial Sequence: Synthetic peptide
  Seed: GMMMGMFNMLSTVLGVS
GMMMGMVNMMSPVLHVS

SEQ ID NO: 184364 - protein, 17 aa, Artificial Sequence
  Description of Artificial Sequence: Synthetic peptide
  Seed: GMMMGMFNMLSTVLGVS
GMMMGMVNMMSPVLIVS

SEQ ID NO: 184365 - protein, 17 aa, Artificial Sequence
  Description of Artificial Sequence: Synthetic peptide
  Seed: GMMMGMFNMLSTVLGVS
GMMMGMVNMMSPVLLVS

SEQ ID NO: 184366 - protein, 17 aa, Artificial Sequence
  Description of Artificial Sequence: Synthetic peptide
  Seed: GMMMGMFNMLSTVLGVS
GMMMGMVNMMSPVLMVS

SEQ ID NO: 184367 - protein, 17 aa, Artificial Sequence
  Description of Artificial Sequence: Synthetic peptide
  Seed: GMMMGMFNMLSTVLGVS
GMMMGMVNMMSPVLNVS

SEQ ID NO: 184368 - protein, 17 aa, Artificial Sequence
  Description of Artificial Sequence: Synthetic peptide
  Seed: GMMMGMFNMLSTVLGVS
GMMMGMVNMMSPVLQVS

SEQ ID NO: 184369 - protein, 17 aa, Artificial Sequence
  Description of Artificial Sequence: Synthetic peptide
  Seed: GMMMGMFNMLSTVLGVS
GMMMGMVNMMSPVLSVS

SEQ ID NO: 184370 - protein, 17 aa, Artificial Sequence
  Description of Artificial Sequence: Synthetic peptide
  Seed: GMMMGMFNMLSTVLGVS
GMMMGMVNMMSPVLTVS

SEQ ID NO: 184371 - protein, 17 aa, Artificial Sequence
  Description of Artificial Sequence: Synthetic peptide
  Seed: GMMMGMFNMLSTVLGVS
GMMMGMVNMMSPVLVVS

SEQ ID NO: 184372 - protein, 17 aa, Artificial Sequence
  Description of Artificial Sequence: Synthetic peptide
  Seed: GMMMGMFNMLSTVLGVS
GMMMGMVNMMSRVLHVS

SEQ ID NO: 184373 - protein, 17 aa, Artificial Sequence
  Description of Artificial Sequence: Synthetic peptide
  Seed: GMMMGMFNMLSTVLGVS
GMMMGMVNMMSRVLKVS

SEQ ID NO: 184374 - protein, 17 aa, Artificial Sequence
  Description of Artificial Sequence: Synthetic peptide
  Seed: GMMMGMFNMLSTVLGVS
GMMMGMVNMMSRVLRVS

SEQ ID NO: 184375 - protein, 17 aa, Artificial Sequence
  Description of Artificial Sequence: Synthetic peptide
  Seed: GMMMGMFNMLSTVLGVS
GMMMGMVNMMSSVLAVS

SEQ ID NO: 184376 - protein, 17 aa, Artificial Sequence
  Description of Artificial Sequence: Synthetic peptide
  Seed: GMMMGMFNMLSTVLGVS
GMMMGMVNMMSSVLHVS

SEQ ID NO: 184377 - protein, 17 aa, Artificial Sequence
  Description of Artificial Sequence: Synthetic peptide
  Seed: GMMMGMFNMLSTVLGVS
GMMMGMVNMMSSVLNVS

SEQ ID NO: 184378 - protein, 17 aa, Artificial Sequence
  Description of Artificial Sequence: Synthetic peptide
  Seed: GMMMGMFNMLSTVLGVS
GMMMGMVNMMSSVLSVS

SEQ ID NO: 184379 - protein, 17 aa, Artificial Sequence
  Description of Artificial Sequence: Synthetic peptide
  Seed: GMMMGMFNMLSTVLGVS
GMMMGMVNMMSSVLTVS

SEQ ID NO: 184380 - protein, 17 aa, Artificial Sequence
  Description of Artificial Sequence: Synthetic peptide
  Seed: GMMMGMFNMLSTVLGVS
GMMMGMVNMMSSVLVVS

SEQ ID NO: 184381 - protein, 17 aa, Artificial Sequence
  Description of Artificial Sequence: Synthetic peptide
  Seed: GMMMGMFNMLSTVLGVS
GMMMGMVNMMSTVLHVS

SEQ ID NO: 184382 - protein, 17 aa, Artificial Sequence
  Description of Artificial Sequence: Synthetic peptide
  Seed: GMMMGMFNMLSTVLGVS
GMMMGMVNMMSTVLNVS

SEQ ID NO: 184383 - protein, 17 aa, Artificial Sequence
  Description of Artificial Sequence: Synthetic peptide
  Seed: GMMMGMFNMLSTVLGVS
GMMMGMVNMNSAVLAVS

SEQ ID NO: 184384 - protein, 17 aa, Artificial Sequence
  Description of Artificial Sequence: Synthetic peptide
  Seed: GMMMGMFNMLSTVLGVS
GMMMGMVNMNSAVLFVS

SEQ ID NO: 184385 - protein, 17 aa, Artificial Sequence
  Description of Artificial Sequence: Synthetic peptide
  Seed: GMMMGMFNMLSTVLGVS
GMMMGMVNMNSAVLIVS

SEQ ID NO: 184386 - protein, 17 aa, Artificial Sequence
  Description of Artificial Sequence: Synthetic peptide
  Seed: GMMMGMFNMLSTVLGVS
GMMMGMVNMNSAVLLVS

SEQ ID NO: 184387 - protein, 17 aa, Artificial Sequence
  Description of Artificial Sequence: Synthetic peptide
  Seed: GMMMGMFNMLSTVLGVS
GMMMGMVNMNSAVLMVS

SEQ ID NO: 184388 - protein, 17 aa, Artificial Sequence
  Description of Artificial Sequence: Synthetic peptide
  Seed: GMMMGMFNMLSTVLGVS
GMMMGMVNMNSAVLSVS

SEQ ID NO: 184389 - protein, 17 aa, Artificial Sequence
  Description of Artificial Sequence: Synthetic peptide
  Seed: GMMMGMFNMLSTVLGVS
GMMMGMVNMNSAVLTVS

SEQ ID NO: 184390 - protein, 17 aa, Artificial Sequence
  Description of Artificial Sequence: Synthetic peptide
  Seed: GMMMGMFNMLSTVLGVS
GMMMGMVNMNSAVLVVS

SEQ ID NO: 184391 - protein, 17 aa, Artificial Sequence
  Description of Artificial Sequence: Synthetic peptide
  Seed: GMMMGMFNMLSTVLGVS
GMMMGMVNMNSAVLYVS

SEQ ID NO: 184392 - protein, 17 aa, Artificial Sequence
  Description of Artificial Sequence: Synthetic peptide
  Seed: GMMMGMFNMLSTVLGVS
GMMMGMVNMNSGVLIVS

SEQ ID NO: 184393 - protein, 17 aa, Artificial Sequence
  Description of Artificial Sequence: Synthetic peptide
  Seed: GMMMGMFNMLSTVLGVS
GMMMGMVNMNSGVLVVS

SEQ ID NO: 184394 - protein, 17 aa, Artificial Sequence
  Description of Artificial Sequence: Synthetic peptide
  Seed: GMMMGMFNMLSTVLGVS
GMMMGMVNMNSGVLYVS

SEQ ID NO: 184395 - protein, 17 aa, Artificial Sequence
  Description of Artificial Sequence: Synthetic peptide
  Seed: GMMMGMFNMLSTVLGVS
GMMMGMVNMNSHVLIVS

SEQ ID NO: 184396 - protein, 17 aa, Artificial Sequence
  Description of Artificial Sequence: Synthetic peptide
  Seed: GMMMGMFNMLSTVLGVS
GMMMGMVNMNSHVLVVS

SEQ ID NO: 184397 - protein, 17 aa, Artificial Sequence
  Description of Artificial Sequence: Synthetic peptide
  Seed: GMMMGMFNMLSTVLGVS
GMMMGMVNMNSNVLAVS

SEQ ID NO: 184398 - protein, 17 aa, Artificial Sequence
  Description of Artificial Sequence: Synthetic peptide
  Seed: GMMMGMFNMLSTVLGVS
GMMMGMVNMNSNVLFVS

SEQ ID NO: 184399 - protein, 17 aa, Artificial Sequence
  Description of Artificial Sequence: Synthetic peptide
  Seed: GMMMGMFNMLSTVLGVS
GMMMGMVNMNSNVLIVS

SEQ ID NO: 184400 - protein, 17 aa, Artificial Sequence
  Description of Artificial Sequence: Synthetic peptide
  Seed: GMMMGMFNMLSTVLGVS
GMMMGMVNMNSNVLLVS

SEQ ID NO: 184401 - protein, 17 aa, Artificial Sequence
  Description of Artificial Sequence: Synthetic peptide
  Seed: GMMMGMFNMLSTVLGVS
GMMMGMVNMNSNVLMVS

SEQ ID NO: 184402 - protein, 17 aa, Artificial Sequence
  Description of Artificial Sequence: Synthetic peptide
  Seed: GMMMGMFNMLSTVLGVS
GMMMGMVNMNSNVLVVS

SEQ ID NO: 184403 - protein, 17 aa, Artificial Sequence
  Description of Artificial Sequence: Synthetic peptide
  Seed: GMMMGMFNMLSTVLGVS
GMMMGMVNMNSNVLYVS

SEQ ID NO: 184404 - protein, 17 aa, Artificial Sequence
  Description of Artificial Sequence: Synthetic peptide
  Seed: GMMMGMFNMLSTVLGVS
GMMMGMVNMNSPVLFVS

SEQ ID NO: 184405 - protein, 17 aa, Artificial Sequence
  Description of Artificial Sequence: Synthetic peptide
  Seed: GMMMGMFNMLSTVLGVS
GMMMGMVNMNSPVLIVS

SEQ ID NO: 184406 - protein, 17 aa, Artificial Sequence
  Description of Artificial Sequence: Synthetic peptide
  Seed: GMMMGMFNMLSTVLGVS
GMMMGMVNMNSPVLLVS

SEQ ID NO: 184407 - protein, 17 aa, Artificial Sequence
  Description of Artificial Sequence: Synthetic peptide
  Seed: GMMMGMFNMLSTVLGVS
GMMMGMVNMNSPVLMVS

SEQ ID NO: 184408 - protein, 17 aa, Artificial Sequence
  Description of Artificial Sequence: Synthetic peptide
  Seed: GMMMGMFNMLSTVLGVS
GMMMGMVNMNSPVLVVS

SEQ ID NO: 184409 - protein, 17 aa, Artificial Sequence
  Description of Artificial Sequence: Synthetic peptide
  Seed: GMMMGMFNMLSTVLGVS
GMMMGMVNMNSPVLYVS

SEQ ID NO: 184410 - protein, 17 aa, Artificial Sequence
  Description of Artificial Sequence: Synthetic peptide
  Seed: GMMMGMFNMLSTVLGVS
GMMMGMVNMNSSVLAVS

SEQ ID NO: 184411 - protein, 17 aa, Artificial Sequence
  Description of Artificial Sequence: Synthetic peptide
  Seed: GMMMGMFNMLSTVLGVS
GMMMGMVNMNSSVLFVS

SEQ ID NO: 184412 - protein, 17 aa, Artificial Sequence
  Description of Artificial Sequence: Synthetic peptide
  Seed: GMMMGMFNMLSTVLGVS
GMMMGMVNMNSSVLIVS

SEQ ID NO: 184413 - protein, 17 aa, Artificial Sequence
  Description of Artificial Sequence: Synthetic peptide
  Seed: GMMMGMFNMLSTVLGVS
GMMMGMVNMNSSVLLVS

SEQ ID NO: 184414 - protein, 17 aa, Artificial Sequence
  Description of Artificial Sequence: Synthetic peptide
  Seed: GMMMGMFNMLSTVLGVS
GMMMGMVNMNSSVLMVS

SEQ ID NO: 184415 - protein, 17 aa, Artificial Sequence
  Description of Artificial Sequence: Synthetic peptide
  Seed: GMMMGMFNMLSTVLGVS
GMMMGMVNMNSSVLVVS

SEQ ID NO: 184416 - protein, 17 aa, Artificial Sequence
  Description of Artificial Sequence: Synthetic peptide
  Seed: GMMMGMFNMLSTVLGVS
GMMMGMVNMNSSVLYVS

SEQ ID NO: 184417 - protein, 17 aa, Artificial Sequence
  Description of Artificial Sequence: Synthetic peptide
  Seed: GMMMGMFNMLSTVLGVS
GMMMGMVNMNSTVLIVS

SEQ ID NO: 184418 - protein, 17 aa, Artificial Sequence
  Description of Artificial Sequence: Synthetic peptide
  Seed: GMMMGMFNMLSTVLGVS
GMMMGMVNMNSTVLVVS

SEQ ID NO: 184419 - protein, 17 aa, Artificial Sequence
  Description of Artificial Sequence: Synthetic peptide
  Seed: GMMMGMFNMLSTVLGVS
GMMMGMVNMNSTVLYVS

SEQ ID NO: 184420 - protein, 17 aa, Artificial Sequence
  Description of Artificial Sequence: Synthetic peptide
  Seed: GMMMGMFNMLSTVLGVS
GMMMGMVNMNSVVLYVS

SEQ ID NO: 184421 - protein, 17 aa, Artificial Sequence
  Description of Artificial Sequence: Synthetic peptide
  Seed: GMMMGMFNMLSTVLGVS
GMMMGMVNMQSAVLAVS

SEQ ID NO: 184422 - protein, 17 aa, Artificial Sequence
  Description of Artificial Sequence: Synthetic peptide
  Seed: GMMMGMFNMLSTVLGVS
GMMMGMVNMQSAVLHVS

SEQ ID NO: 184423 - protein, 17 aa, Artificial Sequence
  Description of Artificial Sequence: Synthetic peptide
  Seed: GMMMGMFNMLSTVLGVS
GMMMGMVNMQSAVLIVS

SEQ ID NO: 184424 - protein, 17 aa, Artificial Sequence
  Description of Artificial Sequence: Synthetic peptide
  Seed: GMMMGMFNMLSTVLGVS
GMMMGMVNMQSAVLLVS

SEQ ID NO: 184425 - protein, 17 aa, Artificial Sequence
  Description of Artificial Sequence: Synthetic peptide
  Seed: GMMMGMFNMLSTVLGVS
GMMMGMVNMQSAVLMVS

SEQ ID NO: 184426 - protein, 17 aa, Artificial Sequence
  Description of Artificial Sequence: Synthetic peptide
  Seed: GMMMGMFNMLSTVLGVS
GMMMGMVNMQSAVLNVS

SEQ ID NO: 184427 - protein, 17 aa, Artificial Sequence
  Description of Artificial Sequence: Synthetic peptide
  Seed: GMMMGMFNMLSTVLGVS
GMMMGMVNMQSAVLSVS

SEQ ID NO: 184428 - protein, 17 aa, Artificial Sequence
  Description of Artificial Sequence: Synthetic peptide
  Seed: GMMMGMFNMLSTVLGVS
GMMMGMVNMQSAVLTVS

SEQ ID NO: 184429 - protein, 17 aa, Artificial Sequence
  Description of Artificial Sequence: Synthetic peptide
  Seed: GMMMGMFNMLSTVLGVS
GMMMGMVNMQSAVLVVS

SEQ ID NO: 184430 - protein, 17 aa, Artificial Sequence
  Description of Artificial Sequence: Synthetic peptide
  Seed: GMMMGMFNMLSTVLGVS
GMMMGMVNMQSGVLAVS

SEQ ID NO: 184431 - protein, 17 aa, Artificial Sequence
  Description of Artificial Sequence: Synthetic peptide
  Seed: GMMMGMFNMLSTVLGVS
GMMMGMVNMQSGVLIVS

SEQ ID NO: 184432 - protein, 17 aa, Artificial Sequence
  Description of Artificial Sequence: Synthetic peptide
  Seed: GMMMGMFNMLSTVLGVS
GMMMGMVNMQSGVLLVS

SEQ ID NO: 184433 - protein, 17 aa, Artificial Sequence
  Description of Artificial Sequence: Synthetic peptide
  Seed: GMMMGMFNMLSTVLGVS
GMMMGMVNMQSGVLSVS

SEQ ID NO: 184434 - protein, 17 aa, Artificial Sequence
  Description of Artificial Sequence: Synthetic peptide
  Seed: GMMMGMFNMLSTVLGVS
GMMMGMVNMQSGVLTVS

SEQ ID NO: 184435 - protein, 17 aa, Artificial Sequence
  Description of Artificial Sequence: Synthetic peptide
  Seed: GMMMGMFNMLSTVLGVS
GMMMGMVNMQSGVLVVS

SEQ ID NO: 184436 - protein, 17 aa, Artificial Sequence
  Description of Artificial Sequence: Synthetic peptide
  Seed: GMMMGMFNMLSTVLGVS
GMMMGMVNMQSNVLAVS

SEQ ID NO: 184437 - protein, 17 aa, Artificial Sequence
  Description of Artificial Sequence: Synthetic peptide
  Seed: GMMMGMFNMLSTVLGVS
GMMMGMVNMQSNVLSVS

SEQ ID NO: 184438 - protein, 17 aa, Artificial Sequence
  Description of Artificial Sequence: Synthetic peptide
  Seed: GMMMGMFNMLSTVLGVS
GMMMGMVNMQSPVLAVS

SEQ ID NO: 184439 - protein, 17 aa, Artificial Sequence
  Description of Artificial Sequence: Synthetic peptide
  Seed: GMMMGMFNMLSTVLGVS
GMMMGMVNMQSPVLIVS

SEQ ID NO: 184440 - protein, 17 aa, Artificial Sequence
  Description of Artificial Sequence: Synthetic peptide
  Seed: GMMMGMFNMLSTVLGVS
GMMMGMVNMQSPVLLVS

SEQ ID NO: 184441 - protein, 17 aa, Artificial Sequence
  Description of Artificial Sequence: Synthetic peptide
  Seed: GMMMGMFNMLSTVLGVS
GMMMGMVNMQSPVLNVS

SEQ ID NO: 184442 - protein, 17 aa, Artificial Sequence
  Description of Artificial Sequence: Synthetic peptide
  Seed: GMMMGMFNMLSTVLGVS
GMMMGMVNMQSPVLSVS

SEQ ID NO: 184443 - protein, 17 aa, Artificial Sequence
  Description of Artificial Sequence: Synthetic peptide
  Seed: GMMMGMFNMLSTVLGVS
GMMMGMVNMQSPVLVVS

SEQ ID NO: 184444 - protein, 17 aa, Artificial Sequence
  Description of Artificial Sequence: Synthetic peptide
  Seed: GMMMGMFNMLSTVLGVS
GMMMGMVNMQSSVLVVS

SEQ ID NO: 184445 - protein, 17 aa, Artificial Sequence
  Description of Artificial Sequence: Synthetic peptide
  Seed: GMMMGMFNMLSTVLGVS
GMMMGMVNMSSAVLNVS

SEQ ID NO: 184446 - protein, 17 aa, Artificial Sequence
  Description of Artificial Sequence: Synthetic peptide
  Seed: GMMMGMFNMLSTVLGVS
GMMMGMVNMVSPVLVVS

SEQ ID NO: 184447 - protein, 17 aa, Artificial Sequence
  Description of Artificial Sequence: Synthetic peptide
  Seed: GMMMGMFNMLSTVLGVS
GMMMGMVNMYSNVLAVS

SEQ ID NO: 184448 - protein, 17 aa, Artificial Sequence
  Description of Artificial Sequence: Synthetic peptide
  Seed: GMMMGMFNMLSTVLGVS
GMMMGMWNMASAVLAVS

SEQ ID NO: 184449 - protein, 17 aa, Artificial Sequence
  Description of Artificial Sequence: Synthetic peptide
  Seed: GMMMGMFNMLSTVLGVS
GMMMGMWNMASAVLGVS

SEQ ID NO: 184450 - protein, 17 aa, Artificial Sequence
  Description of Artificial Sequence: Synthetic peptide
  Seed: GMMMGMFNMLSTVLGVS
GMMMGMWNMASAVLHVS

SEQ ID NO: 184451 - protein, 17 aa, Artificial Sequence
  Description of Artificial Sequence: Synthetic peptide
  Seed: GMMMGMFNMLSTVLGVS
GMMMGMWNMASAVLIVS

SEQ ID NO: 184452 - protein, 17 aa, Artificial Sequence
  Description of Artificial Sequence: Synthetic peptide
  Seed: GMMMGMFNMLSTVLGVS
GMMMGMWNMASAVLKVS

SEQ ID NO: 184453 - protein, 17 aa, Artificial Sequence
  Description of Artificial Sequence: Synthetic peptide
  Seed: GMMMGMFNMLSTVLGVS
GMMMGMWNMASAVLLVS

SEQ ID NO: 184454 - protein, 17 aa, Artificial Sequence
  Description of Artificial Sequence: Synthetic peptide
  Seed: GMMMGMFNMLSTVLGVS
GMMMGMWNMASAVLMVS

SEQ ID NO: 184455 - protein, 17 aa, Artificial Sequence
  Description of Artificial Sequence: Synthetic peptide
  Seed: GMMMGMFNMLSTVLGVS
GMMMGMWNMASAVLNVS

SEQ ID NO: 184456 - protein, 17 aa, Artificial Sequence
  Description of Artificial Sequence: Synthetic peptide
  Seed: GMMMGMFNMLSTVLGVS
GMMMGMWNMASAVLRVS

SEQ ID NO: 184457 - protein, 17 aa, Artificial Sequence
  Description of Artificial Sequence: Synthetic peptide
  Seed: GMMMGMFNMLSTVLGVS
GMMMGMWNMASAVLSVS

SEQ ID NO: 184458 - protein, 17 aa, Artificial Sequence
  Description of Artificial Sequence: Synthetic peptide
  Seed: GMMMGMFNMLSTVLGVS
GMMMGMWNMASAVLTVS

SEQ ID NO: 184459 - protein, 17 aa, Artificial Sequence
  Description of Artificial Sequence: Synthetic peptide
  Seed: GMMMGMFNMLSTVLGVS
GMMMGMWNMASAVLVVS

SEQ ID NO: 184460 - protein, 17 aa, Artificial Sequence
  Description of Artificial Sequence: Synthetic peptide
  Seed: GMMMGMFNMLSTVLGVS
GMMMGMWNMASGVLAVS

SEQ ID NO: 184461 - protein, 17 aa, Artificial Sequence
  Description of Artificial Sequence: Synthetic peptide
  Seed: GMMMGMFNMLSTVLGVS
GMMMGMWNMASGVLIVS

SEQ ID NO: 184462 - protein, 17 aa, Artificial Sequence
  Description of Artificial Sequence: Synthetic peptide
  Seed: GMMMGMFNMLSTVLGVS
GMMMGMWNMASGVLLVS

SEQ ID NO: 184463 - protein, 17 aa, Artificial Sequence
  Description of Artificial Sequence: Synthetic peptide
  Seed: GMMMGMFNMLSTVLGVS
GMMMGMWNMASGVLSVS

SEQ ID NO: 184464 - protein, 17 aa, Artificial Sequence
  Description of Artificial Sequence: Synthetic peptide
  Seed: GMMMGMFNMLSTVLGVS
GMMMGMWNMASGVLTVS

SEQ ID NO: 184465 - protein, 17 aa, Artificial Sequence
  Description of Artificial Sequence: Synthetic peptide
  Seed: GMMMGMFNMLSTVLGVS
GMMMGMWNMASGVLVVS

SEQ ID NO: 184466 - protein, 17 aa, Artificial Sequence
  Description of Artificial Sequence: Synthetic peptide
  Seed: GMMMGMFNMLSTVLGVS
GMMMGMWNMASNVLAVS

SEQ ID NO: 184467 - protein, 17 aa, Artificial Sequence
  Description of Artificial Sequence: Synthetic peptide
  Seed: GMMMGMFNMLSTVLGVS
GMMMGMWNMASNVLNVS

SEQ ID NO: 184468 - protein, 17 aa, Artificial Sequence
  Description of Artificial Sequence: Synthetic peptide
  Seed: GMMMGMFNMLSTVLGVS
GMMMGMWNMASPVLAVS

SEQ ID NO: 184469 - protein, 17 aa, Artificial Sequence
  Description of Artificial Sequence: Synthetic peptide
  Seed: GMMMGMFNMLSTVLGVS
GMMMGMWNMASPVLGVS

SEQ ID NO: 184470 - protein, 17 aa, Artificial Sequence
  Description of Artificial Sequence: Synthetic peptide
  Seed: GMMMGMFNMLSTVLGVS
GMMMGMWNMASPVLHVS

SEQ ID NO: 184471 - protein, 17 aa, Artificial Sequence
  Description of Artificial Sequence: Synthetic peptide
  Seed: GMMMGMFNMLSTVLGVS
GMMMGMWNMASPVLIVS

SEQ ID NO: 184472 - protein, 17 aa, Artificial Sequence
  Description of Artificial Sequence: Synthetic peptide
  Seed: GMMMGMFNMLSTVLGVS
GMMMGMWNMASPVLLVS

SEQ ID NO: 184473 - protein, 17 aa, Artificial Sequence
  Description of Artificial Sequence: Synthetic peptide
  Seed: GMMMGMFNMLSTVLGVS
GMMMGMWNMASPVLMVS

SEQ ID NO: 184474 - protein, 17 aa, Artificial Sequence
  Description of Artificial Sequence: Synthetic peptide
  Seed: GMMMGMFNMLSTVLGVS
GMMMGMWNMASPVLNVS

SEQ ID NO: 184475 - protein, 17 aa, Artificial Sequence
  Description of Artificial Sequence: Synthetic peptide
  Seed: GMMMGMFNMLSTVLGVS
GMMMGMWNMASPVLQVS

SEQ ID NO: 184476 - protein, 17 aa, Artificial Sequence
  Description of Artificial Sequence: Synthetic peptide
  Seed: GMMMGMFNMLSTVLGVS
GMMMGMWNMASPVLSVS

SEQ ID NO: 184477 - protein, 17 aa, Artificial Sequence
  Description of Artificial Sequence: Synthetic peptide
  Seed: GMMMGMFNMLSTVLGVS
GMMMGMWNMASPVLTVS

SEQ ID NO: 184478 - protein, 17 aa, Artificial Sequence
  Description of Artificial Sequence: Synthetic peptide
  Seed: GMMMGMFNMLSTVLGVS
GMMMGMWNMASPVLVVS

SEQ ID NO: 184479 - protein, 17 aa, Artificial Sequence
  Description of Artificial Sequence: Synthetic peptide
  Seed: GMMMGMFNMLSTVLGVS
GMMMGMWNMASSVLAVS

SEQ ID NO: 184480 - protein, 17 aa, Artificial Sequence
  Description of Artificial Sequence: Synthetic peptide
  Seed: GMMMGMFNMLSTVLGVS
GMMMGMWNMASSVLHVS

SEQ ID NO: 184481 - protein, 17 aa, Artificial Sequence
  Description of Artificial Sequence: Synthetic peptide
  Seed: GMMMGMFNMLSTVLGVS
GMMMGMWNMASSVLNVS

SEQ ID NO: 184482 - protein, 17 aa, Artificial Sequence
  Description of Artificial Sequence: Synthetic peptide
  Seed: GMMMGMFNMLSTVLGVS
GMMMGMWNMASSVLSVS

SEQ ID NO: 184483 - protein, 17 aa, Artificial Sequence
  Description of Artificial Sequence: Synthetic peptide
  Seed: GMMMGMFNMLSTVLGVS
GMMMGMWNMASSVLTVS

SEQ ID NO: 184484 - protein, 17 aa, Artificial Sequence
  Description of Artificial Sequence: Synthetic peptide
  Seed: GMMMGMFNMLSTVLGVS
GMMMGMWNMASSVLVVS

SEQ ID NO: 184485 - protein, 17 aa, Artificial Sequence
  Description of Artificial Sequence: Synthetic peptide
  Seed: GMMMGMFNMLSTVLGVS
GMMMGMWNMASTVLHVS

SEQ ID NO: 184486 - protein, 17 aa, Artificial Sequence
  Description of Artificial Sequence: Synthetic peptide
  Seed: GMMMGMFNMLSTVLGVS
GMMMGMWNMASTVLNVS

SEQ ID NO: 184487 - protein, 17 aa, Artificial Sequence
  Description of Artificial Sequence: Synthetic peptide
  Seed: GMMMGMFNMLSTVLGVS
GMMMGMWNMASTVLSVS

SEQ ID NO: 184488 - protein, 17 aa, Artificial Sequence
  Description of Artificial Sequence: Synthetic peptide
  Seed: GMMMGMFNMLSTVLGVS
GMMMGMWNMGSAVLAVS

SEQ ID NO: 184489 - protein, 17 aa, Artificial Sequence
  Description of Artificial Sequence: Synthetic peptide
  Seed: GMMMGMFNMLSTVLGVS
GMMMGMWNMGSAVLLVS

SEQ ID NO: 184490 - protein, 17 aa, Artificial Sequence
  Description of Artificial Sequence: Synthetic peptide
  Seed: GMMMGMFNMLSTVLGVS
GMMMGMWNMGSAVLVVS

SEQ ID NO: 184491 - protein, 17 aa, Artificial Sequence
  Description of Artificial Sequence: Synthetic peptide
  Seed: GMMMGMFNMLSTVLGVS
GMMMGMWNMHSAVLAVS

SEQ ID NO: 184492 - protein, 17 aa, Artificial Sequence
  Description of Artificial Sequence: Synthetic peptide
  Seed: GMMMGMFNMLSTVLGVS
GMMMGMWNMHSAVLIVS

SEQ ID NO: 184493 - protein, 17 aa, Artificial Sequence
  Description of Artificial Sequence: Synthetic peptide
  Seed: GMMMGMFNMLSTVLGVS
GMMMGMWNMHSAVLLVS

SEQ ID NO: 184494 - protein, 17 aa, Artificial Sequence
  Description of Artificial Sequence: Synthetic peptide
  Seed: GMMMGMFNMLSTVLGVS
GMMMGMWNMHSAVLVVS

SEQ ID NO: 184495 - protein, 17 aa, Artificial Sequence
  Description of Artificial Sequence: Synthetic peptide
  Seed: GMMMGMFNMLSTVLGVS
GMMMGMWNMISAVLHVS

SEQ ID NO: 184496 - protein, 17 aa, Artificial Sequence
  Description of Artificial Sequence: Synthetic peptide
  Seed: GMMMGMFNMLSTVLGVS
GMMMGMWNMISAVLNVS

SEQ ID NO: 184497 - protein, 17 aa, Artificial Sequence
  Description of Artificial Sequence: Synthetic peptide
  Seed: GMMMGMFNMLSTVLGVS
GMMMGMWNMISGVLAVS

SEQ ID NO: 184498 - protein, 17 aa, Artificial Sequence
  Description of Artificial Sequence: Synthetic peptide
  Seed: GMMMGMFNMLSTVLGVS
GMMMGMWNMISPVLAVS

SEQ ID NO: 184499 - protein, 17 aa, Artificial Sequence
  Description of Artificial Sequence: Synthetic peptide
  Seed: GMMMGMFNMLSTVLGVS
GMMMGMWNMISPVLGVS

SEQ ID NO: 184500 - protein, 17 aa, Artificial Sequence
  Description of Artificial Sequence: Synthetic peptide
  Seed: GMMMGMFNMLSTVLGVS
GMMMGMWNMISPVLHVS

SEQ ID NO: 184501 - protein, 17 aa, Artificial Sequence
  Description of Artificial Sequence: Synthetic peptide
  Seed: GMMMGMFNMLSTVLGVS
GMMMGMWNMISPVLIVS

SEQ ID NO: 184502 - protein, 17 aa, Artificial Sequence
  Description of Artificial Sequence: Synthetic peptide
  Seed: GMMMGMFNMLSTVLGVS
GMMMGMWNMISPVLLVS

SEQ ID NO: 184503 - protein, 17 aa, Artificial Sequence
  Description of Artificial Sequence: Synthetic peptide
  Seed: GMMMGMFNMLSTVLGVS
GMMMGMWNMISPVLNVS

SEQ ID NO: 184504 - protein, 17 aa, Artificial Sequence
  Description of Artificial Sequence: Synthetic peptide
  Seed: GMMMGMFNMLSTVLGVS
GMMMGMWNMISPVLSVS

SEQ ID NO: 184505 - protein, 17 aa, Artificial Sequence
  Description of Artificial Sequence: Synthetic peptide
  Seed: GMMMGMFNMLSTVLGVS
GMMMGMWNMISPVLTVS

SEQ ID NO: 184506 - protein, 17 aa, Artificial Sequence
  Description of Artificial Sequence: Synthetic peptide
  Seed: GMMMGMFNMLSTVLGVS
GMMMGMWNMISPVLVVS

SEQ ID NO: 184507 - protein, 17 aa, Artificial Sequence
  Description of Artificial Sequence: Synthetic peptide
  Seed: GMMMGMFNMLSTVLGVS
GMMMGMWNMISSVLNVS

SEQ ID NO: 184508 - protein, 17 aa, Artificial Sequence
  Description of Artificial Sequence: Synthetic peptide
  Seed: GMMMGMFNMLSTVLGVS
GMMMGMWNMISTVLNVS

SEQ ID NO: 184509 - protein, 17 aa, Artificial Sequence
  Description of Artificial Sequence: Synthetic peptide
  Seed: GMMMGMFNMLSTVLGVS
GMMMGMWNMKSAVLAVS

SEQ ID NO: 184510 - protein, 17 aa, Artificial Sequence
  Description of Artificial Sequence: Synthetic peptide
  Seed: GMMMGMFNMLSTVLGVS
GMMMGMWNMLSAVLAVS

SEQ ID NO: 184511 - protein, 17 aa, Artificial Sequence
  Description of Artificial Sequence: Synthetic peptide
  Seed: GMMMGMFNMLSTVLGVS
GMMMGMWNMLSAVLHVS

SEQ ID NO: 184512 - protein, 17 aa, Artificial Sequence
  Description of Artificial Sequence: Synthetic peptide
  Seed: GMMMGMFNMLSTVLGVS
GMMMGMWNMLSAVLKVS

SEQ ID NO: 184513 - protein, 17 aa, Artificial Sequence
  Description of Artificial Sequence: Synthetic peptide
  Seed: GMMMGMFNMLSTVLGVS
GMMMGMWNMLSAVLNVS

SEQ ID NO: 184514 - protein, 17 aa, Artificial Sequence
  Description of Artificial Sequence: Synthetic peptide
  Seed: GMMMGMFNMLSTVLGVS
GMMMGMWNMLSAVLRVS

SEQ ID NO: 184515 - protein, 17 aa, Artificial Sequence
  Description of Artificial Sequence: Synthetic peptide
  Seed: GMMMGMFNMLSTVLGVS
GMMMGMWNMLSAVLSVS

SEQ ID NO: 184516 - protein, 17 aa, Artificial Sequence
  Description of Artificial Sequence: Synthetic peptide
  Seed: GMMMGMFNMLSTVLGVS
GMMMGMWNMLSAVLTVS

SEQ ID NO: 184517 - protein, 17 aa, Artificial Sequence
  Description of Artificial Sequence: Synthetic peptide
  Seed: GMMMGMFNMLSTVLGVS
GMMMGMWNMLSGVLAVS

SEQ ID NO: 184518 - protein, 17 aa, Artificial Sequence
  Description of Artificial Sequence: Synthetic peptide
  Seed: GMMMGMFNMLSTVLGVS
GMMMGMWNMLSGVLHVS

SEQ ID NO: 184519 - protein, 17 aa, Artificial Sequence
  Description of Artificial Sequence: Synthetic peptide
  Seed: GMMMGMFNMLSTVLGVS
GMMMGMWNMLSGVLNVS

SEQ ID NO: 184520 - protein, 17 aa, Artificial Sequence
  Description of Artificial Sequence: Synthetic peptide
  Seed: GMMMGMFNMLSTVLGVS
GMMMGMWNMLSGVLSVS

SEQ ID NO: 184521 - protein, 17 aa, Artificial Sequence
  Description of Artificial Sequence: Synthetic peptide
  Seed: GMMMGMFNMLSTVLGVS
GMMMGMWNMLSGVLTVS

SEQ ID NO: 184522 - protein, 17 aa, Artificial Sequence
  Description of Artificial Sequence: Synthetic peptide
  Seed: GMMMGMFNMLSTVLGVS
GMMMGMWNMLSGVLVVS

SEQ ID NO: 184523 - protein, 17 aa, Artificial Sequence
  Description of Artificial Sequence: Synthetic peptide
  Seed: GMMMGMFNMLSTVLGVS
GMMMGMWNMLSNVLAVS

SEQ ID NO: 184524 - protein, 17 aa, Artificial Sequence
  Description of Artificial Sequence: Synthetic peptide
  Seed: GMMMGMFNMLSTVLGVS
GMMMGMWNMLSNVLNVS

SEQ ID NO: 184525 - protein, 17 aa, Artificial Sequence
  Description of Artificial Sequence: Synthetic peptide
  Seed: GMMMGMFNMLSTVLGVS
GMMMGMWNMLSPVLAVS

SEQ ID NO: 184526 - protein, 17 aa, Artificial Sequence
  Description of Artificial Sequence: Synthetic peptide
  Seed: GMMMGMFNMLSTVLGVS
GMMMGMWNMLSPVLGVS

SEQ ID NO: 184527 - protein, 17 aa, Artificial Sequence
  Description of Artificial Sequence: Synthetic peptide
  Seed: GMMMGMFNMLSTVLGVS
GMMMGMWNMLSPVLHVS

SEQ ID NO: 184528 - protein, 17 aa, Artificial Sequence
  Description of Artificial Sequence: Synthetic peptide
  Seed: GMMMGMFNMLSTVLGVS
GMMMGMWNMLSPVLIVS

SEQ ID NO: 184529 - protein, 17 aa, Artificial Sequence
  Description of Artificial Sequence: Synthetic peptide
  Seed: GMMMGMFNMLSTVLGVS
GMMMGMWNMLSPVLKVS

SEQ ID NO: 184530 - protein, 17 aa, Artificial Sequence
  Description of Artificial Sequence: Synthetic peptide
  Seed: GMMMGMFNMLSTVLGVS
GMMMGMWNMLSPVLLVS

SEQ ID NO: 184531 - protein, 17 aa, Artificial Sequence
  Description of Artificial Sequence: Synthetic peptide
  Seed: GMMMGMFNMLSTVLGVS
GMMMGMWNMLSPVLMVS

SEQ ID NO: 184532 - protein, 17 aa, Artificial Sequence
  Description of Artificial Sequence: Synthetic peptide
  Seed: GMMMGMFNMLSTVLGVS
GMMMGMWNMLSPVLNVS

SEQ ID NO: 184533 - protein, 17 aa, Artificial Sequence
  Description of Artificial Sequence: Synthetic peptide
  Seed: GMMMGMFNMLSTVLGVS
GMMMGMWNMLSPVLQVS

SEQ ID NO: 184534 - protein, 17 aa, Artificial Sequence
  Description of Artificial Sequence: Synthetic peptide
  Seed: GMMMGMFNMLSTVLGVS
GMMMGMWNMLSPVLRVS

SEQ ID NO: 184535 - protein, 17 aa, Artificial Sequence
  Description of Artificial Sequence: Synthetic peptide
  Seed: GMMMGMFNMLSTVLGVS
GMMMGMWNMLSPVLSVS

SEQ ID NO: 184536 - protein, 17 aa, Artificial Sequence
  Description of Artificial Sequence: Synthetic peptide
  Seed: GMMMGMFNMLSTVLGVS
GMMMGMWNMLSPVLTVS

SEQ ID NO: 184537 - protein, 17 aa, Artificial Sequence
  Description of Artificial Sequence: Synthetic peptide
  Seed: GMMMGMFNMLSTVLGVS
GMMMGMWNMLSPVLVVS

SEQ ID NO: 184538 - protein, 17 aa, Artificial Sequence
  Description of Artificial Sequence: Synthetic peptide
  Seed: GMMMGMFNMLSTVLGVS
GMMMGMWNMLSSVLAVS

SEQ ID NO: 184539 - protein, 17 aa, Artificial Sequence
  Description of Artificial Sequence: Synthetic peptide
  Seed: GMMMGMFNMLSTVLGVS
GMMMGMWNMLSSVLHVS

SEQ ID NO: 184540 - protein, 17 aa, Artificial Sequence
  Description of Artificial Sequence: Synthetic peptide
  Seed: GMMMGMFNMLSTVLGVS
GMMMGMWNMLSSVLNVS

SEQ ID NO: 184541 - protein, 17 aa, Artificial Sequence
  Description of Artificial Sequence: Synthetic peptide
  Seed: GMMMGMFNMLSTVLGVS
GMMMGMWNMLSSVLSVS

SEQ ID NO: 184542 - protein, 17 aa, Artificial Sequence
  Description of Artificial Sequence: Synthetic peptide
  Seed: GMMMGMFNMLSTVLGVS
GMMMGMWNMLSSVLTVS

SEQ ID NO: 184543 - protein, 17 aa, Artificial Sequence
  Description of Artificial Sequence: Synthetic peptide
  Seed: GMMMGMFNMLSTVLGVS
GMMMGMWNMLSTVLHVS

SEQ ID NO: 184544 - protein, 17 aa, Artificial Sequence
  Description of Artificial Sequence: Synthetic peptide
  Seed: GMMMGMFNMLSTVLGVS
GMMMGMWNMLSTVLNVS

SEQ ID NO: 184545 - protein, 17 aa, Artificial Sequence
  Description of Artificial Sequence: Synthetic peptide
  Seed: GMMMGMFNMLSTVLGVS
GMMMGMWNMMSAVLAVS

SEQ ID NO: 184546 - protein, 17 aa, Artificial Sequence
  Description of Artificial Sequence: Synthetic peptide
  Seed: GMMMGMFNMLSTVLGVS
GMMMGMWNMMSAVLGVS

SEQ ID NO: 184547 - protein, 17 aa, Artificial Sequence
  Description of Artificial Sequence: Synthetic peptide
  Seed: GMMMGMFNMLSTVLGVS
GMMMGMWNMMSAVLHVS

SEQ ID NO: 184548 - protein, 17 aa, Artificial Sequence
  Description of Artificial Sequence: Synthetic peptide
  Seed: GMMMGMFNMLSTVLGVS
GMMMGMWNMMSAVLKVS

SEQ ID NO: 184549 - protein, 17 aa, Artificial Sequence
  Description of Artificial Sequence: Synthetic peptide
  Seed: GMMMGMFNMLSTVLGVS
GMMMGMWNMMSAVLNVS

SEQ ID NO: 184550 - protein, 17 aa, Artificial Sequence
  Description of Artificial Sequence: Synthetic peptide
  Seed: GMMMGMFNMLSTVLGVS
GMMMGMWNMMSAVLRVS

SEQ ID NO: 184551 - protein, 17 aa, Artificial Sequence
  Description of Artificial Sequence: Synthetic peptide
  Seed: GMMMGMFNMLSTVLGVS
GMMMGMWNMMSAVLSVS

SEQ ID NO: 184552 - protein, 17 aa, Artificial Sequence
  Description of Artificial Sequence: Synthetic peptide
  Seed: GMMMGMFNMLSTVLGVS
GMMMGMWNMMSAVLTVS

SEQ ID NO: 184553 - protein, 17 aa, Artificial Sequence
  Description of Artificial Sequence: Synthetic peptide
  Seed: GMMMGMFNMLSTVLGVS
GMMMGMWNMMSAVLVVS

SEQ ID NO: 184554 - protein, 17 aa, Artificial Sequence
  Description of Artificial Sequence: Synthetic peptide
  Seed: GMMMGMFNMLSTVLGVS
GMMMGMWNMMSGVLAVS

SEQ ID NO: 184555 - protein, 17 aa, Artificial Sequence
  Description of Artificial Sequence: Synthetic peptide
  Seed: GMMMGMFNMLSTVLGVS
GMMMGMWNMMSGVLGVS

SEQ ID NO: 184556 - protein, 17 aa, Artificial Sequence
  Description of Artificial Sequence: Synthetic peptide
  Seed: GMMMGMFNMLSTVLGVS
GMMMGMWNMMSGVLHVS

SEQ ID NO: 184557 - protein, 17 aa, Artificial Sequence
  Description of Artificial Sequence: Synthetic peptide
  Seed: GMMMGMFNMLSTVLGVS
GMMMGMWNMMSGVLIVS

SEQ ID NO: 184558 - protein, 17 aa, Artificial Sequence
  Description of Artificial Sequence: Synthetic peptide
  Seed: GMMMGMFNMLSTVLGVS
GMMMGMWNMMSGVLKVS

SEQ ID NO: 184559 - protein, 17 aa, Artificial Sequence
  Description of Artificial Sequence: Synthetic peptide
  Seed: GMMMGMFNMLSTVLGVS
GMMMGMWNMMSGVLLVS

SEQ ID NO: 184560 - protein, 17 aa, Artificial Sequence
  Description of Artificial Sequence: Synthetic peptide
  Seed: GMMMGMFNMLSTVLGVS
GMMMGMWNMMSGVLNVS

SEQ ID NO: 184561 - protein, 17 aa, Artificial Sequence
  Description of Artificial Sequence: Synthetic peptide
  Seed: GMMMGMFNMLSTVLGVS
GMMMGMWNMMSGVLRVS

SEQ ID NO: 184562 - protein, 17 aa, Artificial Sequence
  Description of Artificial Sequence: Synthetic peptide
  Seed: GMMMGMFNMLSTVLGVS
GMMMGMWNMMSGVLSVS

SEQ ID NO: 184563 - protein, 17 aa, Artificial Sequence
  Description of Artificial Sequence: Synthetic peptide
  Seed: GMMMGMFNMLSTVLGVS
GMMMGMWNMMSGVLTVS

SEQ ID NO: 184564 - protein, 17 aa, Artificial Sequence
  Description of Artificial Sequence: Synthetic peptide
  Seed: GMMMGMFNMLSTVLGVS
GMMMGMWNMMSGVLVVS

SEQ ID NO: 184565 - protein, 17 aa, Artificial Sequence
  Description of Artificial Sequence: Synthetic peptide
  Seed: GMMMGMFNMLSTVLGVS
GMMMGMWNMMSNVLAVS

SEQ ID NO: 184566 - protein, 17 aa, Artificial Sequence
  Description of Artificial Sequence: Synthetic peptide
  Seed: GMMMGMFNMLSTVLGVS
GMMMGMWNMMSNVLHVS

SEQ ID NO: 184567 - protein, 17 aa, Artificial Sequence
  Description of Artificial Sequence: Synthetic peptide
  Seed: GMMMGMFNMLSTVLGVS
GMMMGMWNMMSNVLNVS

SEQ ID NO: 184568 - protein, 17 aa, Artificial Sequence
  Description of Artificial Sequence: Synthetic peptide
  Seed: GMMMGMFNMLSTVLGVS
GMMMGMWNMMSNVLSVS

SEQ ID NO: 184569 - protein, 17 aa, Artificial Sequence
  Description of Artificial Sequence: Synthetic peptide
  Seed: GMMMGMFNMLSTVLGVS
GMMMGMWNMMSNVLVVS

SEQ ID NO: 184570 - protein, 17 aa, Artificial Sequence
  Description of Artificial Sequence: Synthetic peptide
  Seed: GMMMGMFNMLSTVLGVS
GMMMGMWNMMSPVLAVS

SEQ ID NO: 184571 - protein, 17 aa, Artificial Sequence
  Description of Artificial Sequence: Synthetic peptide
  Seed: GMMMGMFNMLSTVLGVS
GMMMGMWNMMSPVLGVS

SEQ ID NO: 184572 - protein, 17 aa, Artificial Sequence
  Description of Artificial Sequence: Synthetic peptide
  Seed: GMMMGMFNMLSTVLGVS
GMMMGMWNMMSPVLHVS

SEQ ID NO: 184573 - protein, 17 aa, Artificial Sequence
  Description of Artificial Sequence: Synthetic peptide
  Seed: GMMMGMFNMLSTVLGVS
GMMMGMWNMMSPVLIVS

SEQ ID NO: 184574 - protein, 17 aa, Artificial Sequence
  Description of Artificial Sequence: Synthetic peptide
  Seed: GMMMGMFNMLSTVLGVS
GMMMGMWNMMSPVLKVS

SEQ ID NO: 184575 - protein, 17 aa, Artificial Sequence
  Description of Artificial Sequence: Synthetic peptide
  Seed: GMMMGMFNMLSTVLGVS
GMMMGMWNMMSPVLLVS

SEQ ID NO: 184576 - protein, 17 aa, Artificial Sequence
  Description of Artificial Sequence: Synthetic peptide
  Seed: GMMMGMFNMLSTVLGVS
GMMMGMWNMMSPVLMVS

SEQ ID NO: 184577 - protein, 17 aa, Artificial Sequence
  Description of Artificial Sequence: Synthetic peptide
  Seed: GMMMGMFNMLSTVLGVS
GMMMGMWNMMSPVLNVS

SEQ ID NO: 184578 - protein, 17 aa, Artificial Sequence
  Description of Artificial Sequence: Synthetic peptide
  Seed: GMMMGMFNMLSTVLGVS
GMMMGMWNMMSPVLQVS

SEQ ID NO: 184579 - protein, 17 aa, Artificial Sequence
  Description of Artificial Sequence: Synthetic peptide
  Seed: GMMMGMFNMLSTVLGVS
GMMMGMWNMMSPVLRVS

SEQ ID NO: 184580 - protein, 17 aa, Artificial Sequence
  Description of Artificial Sequence: Synthetic peptide
  Seed: GMMMGMFNMLSTVLGVS
GMMMGMWNMMSPVLSVS

SEQ ID NO: 184581 - protein, 17 aa, Artificial Sequence
  Description of Artificial Sequence: Synthetic peptide
  Seed: GMMMGMFNMLSTVLGVS
GMMMGMWNMMSPVLTVS

SEQ ID NO: 184582 - protein, 17 aa, Artificial Sequence
  Description of Artificial Sequence: Synthetic peptide
  Seed: GMMMGMFNMLSTVLGVS
GMMMGMWNMMSPVLVVS

SEQ ID NO: 184583 - protein, 17 aa, Artificial Sequence
  Description of Artificial Sequence: Synthetic peptide
  Seed: GMMMGMFNMLSTVLGVS
GMMMGMWNMMSRVLHVS

SEQ ID NO: 184584 - protein, 17 aa, Artificial Sequence
  Description of Artificial Sequence: Synthetic peptide
  Seed: GMMMGMFNMLSTVLGVS
GMMMGMWNMMSSVLAVS

SEQ ID NO: 184585 - protein, 17 aa, Artificial Sequence
  Description of Artificial Sequence: Synthetic peptide
  Seed: GMMMGMFNMLSTVLGVS
GMMMGMWNMMSSVLHVS

SEQ ID NO: 184586 - protein, 17 aa, Artificial Sequence
  Description of Artificial Sequence: Synthetic peptide
  Seed: GMMMGMFNMLSTVLGVS
GMMMGMWNMMSSVLKVS

SEQ ID NO: 184587 - protein, 17 aa, Artificial Sequence
  Description of Artificial Sequence: Synthetic peptide
  Seed: GMMMGMFNMLSTVLGVS
GMMMGMWNMMSSVLNVS

SEQ ID NO: 184588 - protein, 17 aa, Artificial Sequence
  Description of Artificial Sequence: Synthetic peptide
  Seed: GMMMGMFNMLSTVLGVS
GMMMGMWNMMSSVLRVS

SEQ ID NO: 184589 - protein, 17 aa, Artificial Sequence
  Description of Artificial Sequence: Synthetic peptide
  Seed: GMMMGMFNMLSTVLGVS
GMMMGMWNMMSSVLSVS

SEQ ID NO: 184590 - protein, 17 aa, Artificial Sequence
  Description of Artificial Sequence: Synthetic peptide
  Seed: GMMMGMFNMLSTVLGVS
GMMMGMWNMMSSVLTVS

SEQ ID NO: 184591 - protein, 17 aa, Artificial Sequence
  Description of Artificial Sequence: Synthetic peptide
  Seed: GMMMGMFNMLSTVLGVS
GMMMGMWNMMSSVLVVS

SEQ ID NO: 184592 - protein, 17 aa, Artificial Sequence
  Description of Artificial Sequence: Synthetic peptide
  Seed: GMMMGMFNMLSTVLGVS
GMMMGMWNMMSTVLAVS

SEQ ID NO: 184593 - protein, 17 aa, Artificial Sequence
  Description of Artificial Sequence: Synthetic peptide
  Seed: GMMMGMFNMLSTVLGVS
GMMMGMWNMMSTVLHVS

SEQ ID NO: 184594 - protein, 17 aa, Artificial Sequence
  Description of Artificial Sequence: Synthetic peptide
  Seed: GMMMGMFNMLSTVLGVS
GMMMGMWNMMSTVLNVS

SEQ ID NO: 184595 - protein, 17 aa, Artificial Sequence
  Description of Artificial Sequence: Synthetic peptide
  Seed: GMMMGMFNMLSTVLGVS
GMMMGMWNMMSTVLSVS

SEQ ID NO: 184596 - protein, 17 aa, Artificial Sequence
  Description of Artificial Sequence: Synthetic peptide
  Seed: GMMMGMFNMLSTVLGVS
GMMMGMWNMNSAVLAVS

SEQ ID NO: 184597 - protein, 17 aa, Artificial Sequence
  Description of Artificial Sequence: Synthetic peptide
  Seed: GMMMGMFNMLSTVLGVS
GMMMGMWNMNSAVLIVS

SEQ ID NO: 184598 - protein, 17 aa, Artificial Sequence
  Description of Artificial Sequence: Synthetic peptide
  Seed: GMMMGMFNMLSTVLGVS
GMMMGMWNMNSAVLLVS

SEQ ID NO: 184599 - protein, 17 aa, Artificial Sequence
  Description of Artificial Sequence: Synthetic peptide
  Seed: GMMMGMFNMLSTVLGVS
GMMMGMWNMNSAVLVVS

SEQ ID NO: 184600 - protein, 17 aa, Artificial Sequence
  Description of Artificial Sequence: Synthetic peptide
  Seed: GMMMGMFNMLSTVLGVS
GMMMGMWNMNSAVLYVS

SEQ ID NO: 184601 - protein, 17 aa, Artificial Sequence
  Description of Artificial Sequence: Synthetic peptide
  Seed: GMMMGMFNMLSTVLGVS
GMMMGMWNMQSAVLAVS

SEQ ID NO: 184602 - protein, 17 aa, Artificial Sequence
  Description of Artificial Sequence: Synthetic peptide
  Seed: GMMMGMFNMLSTVLGVS
GMMMGMWNMQSAVLIVS

SEQ ID NO: 184603 - protein, 17 aa, Artificial Sequence
  Description of Artificial Sequence: Synthetic peptide
  Seed: GMMMGMFNMLSTVLGVS
GMMMGMWNMQSAVLKVS

SEQ ID NO: 184604 - protein, 17 aa, Artificial Sequence
  Description of Artificial Sequence: Synthetic peptide
  Seed: GMMMGMFNMLSTVLGVS
GMMMGMWNMQSAVLLVS

SEQ ID NO: 184605 - protein, 17 aa, Artificial Sequence
  Description of Artificial Sequence: Synthetic peptide
  Seed: GMMMGMFNMLSTVLGVS
GMMMGMWNMQSAVLMVS

SEQ ID NO: 184606 - protein, 17 aa, Artificial Sequence
  Description of Artificial Sequence: Synthetic peptide
  Seed: GMMMGMFNMLSTVLGVS
GMMMGMWNMQSAVLNVS

SEQ ID NO: 184607 - protein, 17 aa, Artificial Sequence
  Description of Artificial Sequence: Synthetic peptide
  Seed: GMMMGMFNMLSTVLGVS
GMMMGMWNMQSAVLSVS

SEQ ID NO: 184608 - protein, 17 aa, Artificial Sequence
  Description of Artificial Sequence: Synthetic peptide
  Seed: GMMMGMFNMLSTVLGVS
GMMMGMWNMQSAVLTVS

SEQ ID NO: 184609 - protein, 17 aa, Artificial Sequence
  Description of Artificial Sequence: Synthetic peptide
  Seed: GMMMGMFNMLSTVLGVS
GMMMGMWNMQSAVLVVS

SEQ ID NO: 184610 - protein, 17 aa, Artificial Sequence
  Description of Artificial Sequence: Synthetic peptide
  Seed: GMMMGMFNMLSTVLGVS
GMMMGMWNMQSGVLAVS

SEQ ID NO: 184611 - protein, 17 aa, Artificial Sequence
  Description of Artificial Sequence: Synthetic peptide
  Seed: GMMMGMFNMLSTVLGVS
GMMMGMWNMQSGVLIVS

SEQ ID NO: 184612 - protein, 17 aa, Artificial Sequence
  Description of Artificial Sequence: Synthetic peptide
  Seed: GMMMGMFNMLSTVLGVS
GMMMGMWNMQSGVLLVS

SEQ ID NO: 184613 - protein, 17 aa, Artificial Sequence
  Description of Artificial Sequence: Synthetic peptide
  Seed: GMMMGMFNMLSTVLGVS
GMMMGMWNMQSGVLSVS

SEQ ID NO: 184614 - protein, 17 aa, Artificial Sequence
  Description of Artificial Sequence: Synthetic peptide
  Seed: GMMMGMFNMLSTVLGVS
GMMMGMWNMQSGVLTVS

SEQ ID NO: 184615 - protein, 17 aa, Artificial Sequence
  Description of Artificial Sequence: Synthetic peptide
  Seed: GMMMGMFNMLSTVLGVS
GMMMGMWNMQSGVLVVS

SEQ ID NO: 184616 - protein, 17 aa, Artificial Sequence
  Description of Artificial Sequence: Synthetic peptide
  Seed: GMMMGMFNMLSTVLGVS
GMMMGMWNMQSNVLAVS

SEQ ID NO: 184617 - protein, 17 aa, Artificial Sequence
  Description of Artificial Sequence: Synthetic peptide
  Seed: GMMMGMFNMLSTVLGVS
GMMMGMWNMQSNVLVVS

SEQ ID NO: 184618 - protein, 17 aa, Artificial Sequence
  Description of Artificial Sequence: Synthetic peptide
  Seed: GMMMGMFNMLSTVLGVS
GMMMGMWNMQSPVLAVS

SEQ ID NO: 184619 - protein, 17 aa, Artificial Sequence
  Description of Artificial Sequence: Synthetic peptide
  Seed: GMMMGMFNMLSTVLGVS
GMMMGMWNMQSPVLIVS

SEQ ID NO: 184620 - protein, 17 aa, Artificial Sequence
  Description of Artificial Sequence: Synthetic peptide
  Seed: GMMMGMFNMLSTVLGVS
GMMMGMWNMQSPVLLVS

SEQ ID NO: 184621 - protein, 17 aa, Artificial Sequence
  Description of Artificial Sequence: Synthetic peptide
  Seed: GMMMGMFNMLSTVLGVS
GMMMGMWNMQSPVLNVS

SEQ ID NO: 184622 - protein, 17 aa, Artificial Sequence
  Description of Artificial Sequence: Synthetic peptide
  Seed: GMMMGMFNMLSTVLGVS
GMMMGMWNMQSPVLSVS

SEQ ID NO: 184623 - protein, 17 aa, Artificial Sequence
  Description of Artificial Sequence: Synthetic peptide
  Seed: GMMMGMFNMLSTVLGVS
GMMMGMWNMQSPVLTVS

SEQ ID NO: 184624 - protein, 17 aa, Artificial Sequence
  Description of Artificial Sequence: Synthetic peptide
  Seed: GMMMGMFNMLSTVLGVS
GMMMGMWNMQSPVLVVS

SEQ ID NO: 184625 - protein, 17 aa, Artificial Sequence
  Description of Artificial Sequence: Synthetic peptide
  Seed: GMMMGMFNMLSTVLGVS
GMMMGMWNMQSSVLAVS

SEQ ID NO: 184626 - protein, 17 aa, Artificial Sequence
  Description of Artificial Sequence: Synthetic peptide
  Seed: GMMMGMFNMLSTVLGVS
GMMMGMWNMQSSVLLVS

SEQ ID NO: 184627 - protein, 17 aa, Artificial Sequence
  Description of Artificial Sequence: Synthetic peptide
  Seed: GMMMGMFNMLSTVLGVS
GMMMGMWNMQSSVLNVS

SEQ ID NO: 184628 - protein, 17 aa, Artificial Sequence
  Description of Artificial Sequence: Synthetic peptide
  Seed: GMMMGMFNMLSTVLGVS
GMMMGMWNMQSSVLSVS

SEQ ID NO: 184629 - protein, 17 aa, Artificial Sequence
  Description of Artificial Sequence: Synthetic peptide
  Seed: GMMMGMFNMLSTVLGVS
GMMMGMWNMQSSVLTVS

SEQ ID NO: 184630 - protein, 17 aa, Artificial Sequence
  Description of Artificial Sequence: Synthetic peptide
  Seed: GMMMGMFNMLSTVLGVS
GMMMGMWNMQSSVLVVS

SEQ ID NO: 184631 - protein, 17 aa, Artificial Sequence
  Description of Artificial Sequence: Synthetic peptide
  Seed: GMMMGMFNMLSTVLGVS
GMMMGMWNMQSTVLNVS

SEQ ID NO: 184632 - protein, 17 aa, Artificial Sequence
  Description of Artificial Sequence: Synthetic peptide
  Seed: GMMMGMFNMLSTVLGVS
GMMMGMWNMSSAVLAVS

SEQ ID NO: 184633 - protein, 17 aa, Artificial Sequence
  Description of Artificial Sequence: Synthetic peptide
  Seed: GMMMGMFNMLSTVLGVS
GMMMGMWNMSSAVLIVS

SEQ ID NO: 184634 - protein, 17 aa, Artificial Sequence
  Description of Artificial Sequence: Synthetic peptide
  Seed: GMMMGMFNMLSTVLGVS
GMMMGMWNMSSAVLLVS

SEQ ID NO: 184635 - protein, 17 aa, Artificial Sequence
  Description of Artificial Sequence: Synthetic peptide
  Seed: GMMMGMFNMLSTVLGVS
GMMMGMWNMSSAVLNVS

SEQ ID NO: 184636 - protein, 17 aa, Artificial Sequence
  Description of Artificial Sequence: Synthetic peptide
  Seed: GMMMGMFNMLSTVLGVS
GMMMGMWNMSSAVLSVS

SEQ ID NO: 184637 - protein, 17 aa, Artificial Sequence
  Description of Artificial Sequence: Synthetic peptide
  Seed: GMMMGMFNMLSTVLGVS
GMMMGMWNMSSAVLTVS

SEQ ID NO: 184638 - protein, 17 aa, Artificial Sequence
  Description of Artificial Sequence: Synthetic peptide
  Seed: GMMMGMFNMLSTVLGVS
GMMMGMWNMSSAVLVVS

SEQ ID NO: 184639 - protein, 17 aa, Artificial Sequence
  Description of Artificial Sequence: Synthetic peptide
  Seed: GMMMGMFNMLSTVLGVS
GMMMGMWNMSSGVLAVS

SEQ ID NO: 184640 - protein, 17 aa, Artificial Sequence
  Description of Artificial Sequence: Synthetic peptide
  Seed: GMMMGMFNMLSTVLGVS
GMMMGMWNMSSPVLAVS

SEQ ID NO: 184641 - protein, 17 aa, Artificial Sequence
  Description of Artificial Sequence: Synthetic peptide
  Seed: GMMMGMFNMLSTVLGVS
GMMMGMWNMSSPVLIVS

SEQ ID NO: 184642 - protein, 17 aa, Artificial Sequence
  Description of Artificial Sequence: Synthetic peptide
  Seed: GMMMGMFNMLSTVLGVS
GMMMGMWNMSSPVLNVS

SEQ ID NO: 184643 - protein, 17 aa, Artificial Sequence
  Description of Artificial Sequence: Synthetic peptide
  Seed: GMMMGMFNMLSTVLGVS
GMMMGMWNMSSPVLVVS

SEQ ID NO: 184644 - protein, 17 aa, Artificial Sequence
  Description of Artificial Sequence: Synthetic peptide
  Seed: GMMMGMFNMLSTVLGVS
GMMMGMWNMSSSVLIVS

SEQ ID NO: 184645 - protein, 17 aa, Artificial Sequence
  Description of Artificial Sequence: Synthetic peptide
  Seed: GMMMGMFNMLSTVLGVS
GMMMGMWNMVSPVLAVS

SEQ ID NO: 184646 - protein, 17 aa, Artificial Sequence
  Description of Artificial Sequence: Synthetic peptide
  Seed: GMMMGMFNMLSTVLGVS
GMMMGMWNMVSPVLNVS

SEQ ID NO: 184647 - protein, 17 aa, Artificial Sequence
  Description of Artificial Sequence: Synthetic peptide
  Seed: GMMMGMFNMLSTVLGVS
GMMMGMWNMVSPVLSVS

SEQ ID NO: 184648 - protein, 17 aa, Artificial Sequence
  Description of Artificial Sequence: Synthetic peptide
  Seed: GMMMGMFNMLSTVLGVS
GMMMGMYNMASAVLAVS

SEQ ID NO: 184649 - protein, 17 aa, Artificial Sequence
  Description of Artificial Sequence: Synthetic peptide
  Seed: GMMMGMFNMLSTVLGVS
GMMMGMYNMASAVLCVS

SEQ ID NO: 184650 - protein, 17 aa, Artificial Sequence
  Description of Artificial Sequence: Synthetic peptide
  Seed: GMMMGMFNMLSTVLGVS
GMMMGMYNMASAVLDVS

SEQ ID NO: 184651 - protein, 17 aa, Artificial Sequence
  Description of Artificial Sequence: Synthetic peptide
  Seed: GMMMGMFNMLSTVLGVS
GMMMGMYNMASAVLEVS

SEQ ID NO: 184652 - protein, 17 aa, Artificial Sequence
  Description of Artificial Sequence: Synthetic peptide
  Seed: GMMMGMFNMLSTVLGVS
GMMMGMYNMASAVLFVS

SEQ ID NO: 184653 - protein, 17 aa, Artificial Sequence
  Description of Artificial Sequence: Synthetic peptide
  Seed: GMMMGMFNMLSTVLGVS
GMMMGMYNMASAVLGVS

SEQ ID NO: 184654 - protein, 17 aa, Artificial Sequence
  Description of Artificial Sequence: Synthetic peptide
  Seed: GMMMGMFNMLSTVLGVS
GMMMGMYNMASAVLHVS

SEQ ID NO: 184655 - protein, 17 aa, Artificial Sequence
  Description of Artificial Sequence: Synthetic peptide
  Seed: GMMMGMFNMLSTVLGVS
GMMMGMYNMASAVLIVS

SEQ ID NO: 184656 - protein, 17 aa, Artificial Sequence
  Description of Artificial Sequence: Synthetic peptide
  Seed: GMMMGMFNMLSTVLGVS
GMMMGMYNMASAVLKVS

SEQ ID NO: 184657 - protein, 17 aa, Artificial Sequence
  Description of Artificial Sequence: Synthetic peptide
  Seed: GMMMGMFNMLSTVLGVS
GMMMGMYNMASAVLLVS

SEQ ID NO: 184658 - protein, 17 aa, Artificial Sequence
  Description of Artificial Sequence: Synthetic peptide
  Seed: GMMMGMFNMLSTVLGVS
GMMMGMYNMASAVLMVS

SEQ ID NO: 184659 - protein, 17 aa, Artificial Sequence
  Description of Artificial Sequence: Synthetic peptide
  Seed: GMMMGMFNMLSTVLGVS
GMMMGMYNMASAVLNVS

SEQ ID NO: 184660 - protein, 17 aa, Artificial Sequence
  Description of Artificial Sequence: Synthetic peptide
  Seed: GMMMGMFNMLSTVLGVS
GMMMGMYNMASAVLPVS

SEQ ID NO: 184661 - protein, 17 aa, Artificial Sequence
  Description of Artificial Sequence: Synthetic peptide
  Seed: GMMMGMFNMLSTVLGVS
GMMMGMYNMASAVLQVS

SEQ ID NO: 184662 - protein, 17 aa, Artificial Sequence
  Description of Artificial Sequence: Synthetic peptide
  Seed: GMMMGMFNMLSTVLGVS
GMMMGMYNMASAVLRVS

SEQ ID NO: 184663 - protein, 17 aa, Artificial Sequence
  Description of Artificial Sequence: Synthetic peptide
  Seed: GMMMGMFNMLSTVLGVS
GMMMGMYNMASAVLSVS

SEQ ID NO: 184664 - protein, 17 aa, Artificial Sequence
  Description of Artificial Sequence: Synthetic peptide
  Seed: GMMMGMFNMLSTVLGVS
GMMMGMYNMASAVLTVS

SEQ ID NO: 184665 - protein, 17 aa, Artificial Sequence
  Description of Artificial Sequence: Synthetic peptide
  Seed: GMMMGMFNMLSTVLGVS
GMMMGMYNMASAVLVVS

SEQ ID NO: 184666 - protein, 17 aa, Artificial Sequence
  Description of Artificial Sequence: Synthetic peptide
  Seed: GMMMGMFNMLSTVLGVS
GMMMGMYNMASAVLYVS

SEQ ID NO: 184667 - protein, 17 aa, Artificial Sequence
  Description of Artificial Sequence: Synthetic peptide
  Seed: GMMMGMFNMLSTVLGVS
GMMMGMYNMASGVLAVS

SEQ ID NO: 184668 - protein, 17 aa, Artificial Sequence
  Description of Artificial Sequence: Synthetic peptide
  Seed: GMMMGMFNMLSTVLGVS
GMMMGMYNMASGVLFVS

SEQ ID NO: 184669 - protein, 17 aa, Artificial Sequence
  Description of Artificial Sequence: Synthetic peptide
  Seed: GMMMGMFNMLSTVLGVS
GMMMGMYNMASGVLGVS

SEQ ID NO: 184670 - protein, 17 aa, Artificial Sequence
  Description of Artificial Sequence: Synthetic peptide
  Seed: GMMMGMFNMLSTVLGVS
GMMMGMYNMASGVLHVS

SEQ ID NO: 184671 - protein, 17 aa, Artificial Sequence
  Description of Artificial Sequence: Synthetic peptide
  Seed: GMMMGMFNMLSTVLGVS
GMMMGMYNMASGVLIVS

SEQ ID NO: 184672 - protein, 17 aa, Artificial Sequence
  Description of Artificial Sequence: Synthetic peptide
  Seed: GMMMGMFNMLSTVLGVS
GMMMGMYNMASGVLKVS

SEQ ID NO: 184673 - protein, 17 aa, Artificial Sequence
  Description of Artificial Sequence: Synthetic peptide
  Seed: GMMMGMFNMLSTVLGVS
GMMMGMYNMASGVLLVS

SEQ ID NO: 184674 - protein, 17 aa, Artificial Sequence
  Description of Artificial Sequence: Synthetic peptide
  Seed: GMMMGMFNMLSTVLGVS
GMMMGMYNMASGVLMVS

SEQ ID NO: 184675 - protein, 17 aa, Artificial Sequence
  Description of Artificial Sequence: Synthetic peptide
  Seed: GMMMGMFNMLSTVLGVS
GMMMGMYNMASGVLNVS

SEQ ID NO: 184676 - protein, 17 aa, Artificial Sequence
  Description of Artificial Sequence: Synthetic peptide
  Seed: GMMMGMFNMLSTVLGVS
GMMMGMYNMASGVLPVS

SEQ ID NO: 184677 - protein, 17 aa, Artificial Sequence
  Description of Artificial Sequence: Synthetic peptide
  Seed: GMMMGMFNMLSTVLGVS
GMMMGMYNMASGVLQVS

SEQ ID NO: 184678 - protein, 17 aa, Artificial Sequence
  Description of Artificial Sequence: Synthetic peptide
  Seed: GMMMGMFNMLSTVLGVS
GMMMGMYNMASGVLRVS

SEQ ID NO: 184679 - protein, 17 aa, Artificial Sequence
  Description of Artificial Sequence: Synthetic peptide
  Seed: GMMMGMFNMLSTVLGVS
GMMMGMYNMASGVLSVS

SEQ ID NO: 184680 - protein, 17 aa, Artificial Sequence
  Description of Artificial Sequence: Synthetic peptide
  Seed: GMMMGMFNMLSTVLGVS
GMMMGMYNMASGVLTVS

SEQ ID NO: 184681 - protein, 17 aa, Artificial Sequence
  Description of Artificial Sequence: Synthetic peptide
  Seed: GMMMGMFNMLSTVLGVS
GMMMGMYNMASGVLVVS

SEQ ID NO: 184682 - protein, 17 aa, Artificial Sequence
  Description of Artificial Sequence: Synthetic peptide
  Seed: GMMMGMFNMLSTVLGVS
GMMMGMYNMASGVLYVS

SEQ ID NO: 184683 - protein, 17 aa, Artificial Sequence
  Description of Artificial Sequence: Synthetic peptide
  Seed: GMMMGMFNMLSTVLGVS
GMMMGMYNMASHVLLVS

SEQ ID NO: 184684 - protein, 17 aa, Artificial Sequence
  Description of Artificial Sequence: Synthetic peptide
  Seed: GMMMGMFNMLSTVLGVS
GMMMGMYNMASHVLNVS

SEQ ID NO: 184685 - protein, 17 aa, Artificial Sequence
  Description of Artificial Sequence: Synthetic peptide
  Seed: GMMMGMFNMLSTVLGVS
GMMMGMYNMASHVLVVS

SEQ ID NO: 184686 - protein, 17 aa, Artificial Sequence
  Description of Artificial Sequence: Synthetic peptide
  Seed: GMMMGMFNMLSTVLGVS
GMMMGMYNMASIVLAVS

SEQ ID NO: 184687 - protein, 17 aa, Artificial Sequence
  Description of Artificial Sequence: Synthetic peptide
  Seed: GMMMGMFNMLSTVLGVS
GMMMGMYNMASIVLHVS

SEQ ID NO: 184688 - protein, 17 aa, Artificial Sequence
  Description of Artificial Sequence: Synthetic peptide
  Seed: GMMMGMFNMLSTVLGVS
GMMMGMYNMASIVLNVS

SEQ ID NO: 184689 - protein, 17 aa, Artificial Sequence
  Description of Artificial Sequence: Synthetic peptide
  Seed: GMMMGMFNMLSTVLGVS
GMMMGMYNMASIVLSVS

SEQ ID NO: 184690 - protein, 17 aa, Artificial Sequence
  Description of Artificial Sequence: Synthetic peptide
  Seed: GMMMGMFNMLSTVLGVS
GMMMGMYNMASKVLAVS

SEQ ID NO: 184691 - protein, 17 aa, Artificial Sequence
  Description of Artificial Sequence: Synthetic peptide
  Seed: GMMMGMFNMLSTVLGVS
GMMMGMYNMASKVLHVS

SEQ ID NO: 184692 - protein, 17 aa, Artificial Sequence
  Description of Artificial Sequence: Synthetic peptide
  Seed: GMMMGMFNMLSTVLGVS
GMMMGMYNMASKVLIVS

SEQ ID NO: 184693 - protein, 17 aa, Artificial Sequence
  Description of Artificial Sequence: Synthetic peptide
  Seed: GMMMGMFNMLSTVLGVS
GMMMGMYNMASKVLLVS

SEQ ID NO: 184694 - protein, 17 aa, Artificial Sequence
  Description of Artificial Sequence: Synthetic peptide
  Seed: GMMMGMFNMLSTVLGVS
GMMMGMYNMASKVLNVS

SEQ ID NO: 184695 - protein, 17 aa, Artificial Sequence
  Description of Artificial Sequence: Synthetic peptide
  Seed: GMMMGMFNMLSTVLGVS
GMMMGMYNMASKVLSVS

SEQ ID NO: 184696 - protein, 17 aa, Artificial Sequence
  Description of Artificial Sequence: Synthetic peptide
  Seed: GMMMGMFNMLSTVLGVS
GMMMGMYNMASKVLVVS

SEQ ID NO: 184697 - protein, 17 aa, Artificial Sequence
  Description of Artificial Sequence: Synthetic peptide
  Seed: GMMMGMFNMLSTVLGVS
GMMMGMYNMASLVLHVS

SEQ ID NO: 184698 - protein, 17 aa, Artificial Sequence
  Description of Artificial Sequence: Synthetic peptide
  Seed: GMMMGMFNMLSTVLGVS
GMMMGMYNMASLVLNVS

SEQ ID NO: 184699 - protein, 17 aa, Artificial Sequence
  Description of Artificial Sequence: Synthetic peptide
  Seed: GMMMGMFNMLSTVLGVS
GMMMGMYNMASMVLHVS

SEQ ID NO: 184700 - protein, 17 aa, Artificial Sequence
  Description of Artificial Sequence: Synthetic peptide
  Seed: GMMMGMFNMLSTVLGVS
GMMMGMYNMASMVLNVS

SEQ ID NO: 184701 - protein, 17 aa, Artificial Sequence
  Description of Artificial Sequence: Synthetic peptide
  Seed: GMMMGMFNMLSTVLGVS
GMMMGMYNMASNVLAVS

SEQ ID NO: 184702 - protein, 17 aa, Artificial Sequence
  Description of Artificial Sequence: Synthetic peptide
  Seed: GMMMGMFNMLSTVLGVS
GMMMGMYNMASNVLDVS

SEQ ID NO: 184703 - protein, 17 aa, Artificial Sequence
  Description of Artificial Sequence: Synthetic peptide
  Seed: GMMMGMFNMLSTVLGVS
GMMMGMYNMASNVLGVS

SEQ ID NO: 184704 - protein, 17 aa, Artificial Sequence
  Description of Artificial Sequence: Synthetic peptide
  Seed: GMMMGMFNMLSTVLGVS
GMMMGMYNMASNVLHVS

SEQ ID NO: 184705 - protein, 17 aa, Artificial Sequence
  Description of Artificial Sequence: Synthetic peptide
  Seed: GMMMGMFNMLSTVLGVS
GMMMGMYNMASNVLIVS

SEQ ID NO: 184706 - protein, 17 aa, Artificial Sequence
  Description of Artificial Sequence: Synthetic peptide
  Seed: GMMMGMFNMLSTVLGVS
GMMMGMYNMASNVLLVS

SEQ ID NO: 184707 - protein, 17 aa, Artificial Sequence
  Description of Artificial Sequence: Synthetic peptide
  Seed: GMMMGMFNMLSTVLGVS
GMMMGMYNMASNVLMVS

SEQ ID NO: 184708 - protein, 17 aa, Artificial Sequence
  Description of Artificial Sequence: Synthetic peptide
  Seed: GMMMGMFNMLSTVLGVS
GMMMGMYNMASNVLNVS

SEQ ID NO: 184709 - protein, 17 aa, Artificial Sequence
  Description of Artificial Sequence: Synthetic peptide
  Seed: GMMMGMFNMLSTVLGVS
GMMMGMYNMASNVLQVS

SEQ ID NO: 184710 - protein, 17 aa, Artificial Sequence
  Description of Artificial Sequence: Synthetic peptide
  Seed: GMMMGMFNMLSTVLGVS
GMMMGMYNMASNVLSVS

SEQ ID NO: 184711 - protein, 17 aa, Artificial Sequence
  Description of Artificial Sequence: Synthetic peptide
  Seed: GMMMGMFNMLSTVLGVS
GMMMGMYNMASNVLTVS

SEQ ID NO: 184712 - protein, 17 aa, Artificial Sequence
  Description of Artificial Sequence: Synthetic peptide
  Seed: GMMMGMFNMLSTVLGVS
GMMMGMYNMASNVLVVS

SEQ ID NO: 184713 - protein, 17 aa, Artificial Sequence
  Description of Artificial Sequence: Synthetic peptide
  Seed: GMMMGMFNMLSTVLGVS
GMMMGMYNMASPVLAVS

SEQ ID NO: 184714 - protein, 17 aa, Artificial Sequence
  Description of Artificial Sequence: Synthetic peptide
  Seed: GMMMGMFNMLSTVLGVS
GMMMGMYNMASPVLCVS

SEQ ID NO: 184715 - protein, 17 aa, Artificial Sequence
  Description of Artificial Sequence: Synthetic peptide
  Seed: GMMMGMFNMLSTVLGVS
GMMMGMYNMASPVLDVS

SEQ ID NO: 184716 - protein, 17 aa, Artificial Sequence
  Description of Artificial Sequence: Synthetic peptide
  Seed: GMMMGMFNMLSTVLGVS
GMMMGMYNMASPVLEVS

SEQ ID NO: 184717 - protein, 17 aa, Artificial Sequence
  Description of Artificial Sequence: Synthetic peptide
  Seed: GMMMGMFNMLSTVLGVS
GMMMGMYNMASPVLFVS

SEQ ID NO: 184718 - protein, 17 aa, Artificial Sequence
  Description of Artificial Sequence: Synthetic peptide
  Seed: GMMMGMFNMLSTVLGVS
GMMMGMYNMASPVLGVS

SEQ ID NO: 184719 - protein, 17 aa, Artificial Sequence
  Description of Artificial Sequence: Synthetic peptide
  Seed: GMMMGMFNMLSTVLGVS
GMMMGMYNMASPVLHVS

SEQ ID NO: 184720 - protein, 17 aa, Artificial Sequence
  Description of Artificial Sequence: Synthetic peptide
  Seed: GMMMGMFNMLSTVLGVS
GMMMGMYNMASPVLIVS

SEQ ID NO: 184721 - protein, 17 aa, Artificial Sequence
  Description of Artificial Sequence: Synthetic peptide
  Seed: GMMMGMFNMLSTVLGVS
GMMMGMYNMASPVLKVS

SEQ ID NO: 184722 - protein, 17 aa, Artificial Sequence
  Description of Artificial Sequence: Synthetic peptide
  Seed: GMMMGMFNMLSTVLGVS
GMMMGMYNMASPVLLVS

SEQ ID NO: 184723 - protein, 17 aa, Artificial Sequence
  Description of Artificial Sequence: Synthetic peptide
  Seed: GMMMGMFNMLSTVLGVS
GMMMGMYNMASPVLMVS

SEQ ID NO: 184724 - protein, 17 aa, Artificial Sequence
  Description of Artificial Sequence: Synthetic peptide
  Seed: GMMMGMFNMLSTVLGVS
GMMMGMYNMASPVLNVS

SEQ ID NO: 184725 - protein, 17 aa, Artificial Sequence
  Description of Artificial Sequence: Synthetic peptide
  Seed: GMMMGMFNMLSTVLGVS
GMMMGMYNMASPVLPVS

SEQ ID NO: 184726 - protein, 17 aa, Artificial Sequence
  Description of Artificial Sequence: Synthetic peptide
  Seed: GMMMGMFNMLSTVLGVS
GMMMGMYNMASPVLQVS

SEQ ID NO: 184727 - protein, 17 aa, Artificial Sequence
  Description of Artificial Sequence: Synthetic peptide
  Seed: GMMMGMFNMLSTVLGVS
GMMMGMYNMASPVLRVS

SEQ ID NO: 184728 - protein, 17 aa, Artificial Sequence
  Description of Artificial Sequence: Synthetic peptide
  Seed: GMMMGMFNMLSTVLGVS
GMMMGMYNMASPVLSVS

SEQ ID NO: 184729 - protein, 17 aa, Artificial Sequence
  Description of Artificial Sequence: Synthetic peptide
  Seed: GMMMGMFNMLSTVLGVS
GMMMGMYNMASPVLTVS

SEQ ID NO: 184730 - protein, 17 aa, Artificial Sequence
  Description of Artificial Sequence: Synthetic peptide
  Seed: GMMMGMFNMLSTVLGVS
GMMMGMYNMASPVLVVS

SEQ ID NO: 184731 - protein, 17 aa, Artificial Sequence
  Description of Artificial Sequence: Synthetic peptide
  Seed: GMMMGMFNMLSTVLGVS
GMMMGMYNMASPVLYVS

SEQ ID NO: 184732 - protein, 17 aa, Artificial Sequence
  Description of Artificial Sequence: Synthetic peptide
  Seed: GMMMGMFNMLSTVLGVS
GMMMGMYNMASQVLAVS

SEQ ID NO: 184733 - protein, 17 aa, Artificial Sequence
  Description of Artificial Sequence: Synthetic peptide
  Seed: GMMMGMFNMLSTVLGVS
GMMMGMYNMASQVLNVS

SEQ ID NO: 184734 - protein, 17 aa, Artificial Sequence
  Description of Artificial Sequence: Synthetic peptide
  Seed: GMMMGMFNMLSTVLGVS
GMMMGMYNMASQVLSVS

SEQ ID NO: 184735 - protein, 17 aa, Artificial Sequence
  Description of Artificial Sequence: Synthetic peptide
  Seed: GMMMGMFNMLSTVLGVS
GMMMGMYNMASQVLVVS

SEQ ID NO: 184736 - protein, 17 aa, Artificial Sequence
  Description of Artificial Sequence: Synthetic peptide
  Seed: GMMMGMFNMLSTVLGVS
GMMMGMYNMASRVLHVS

SEQ ID NO: 184737 - protein, 17 aa, Artificial Sequence
  Description of Artificial Sequence: Synthetic peptide
  Seed: GMMMGMFNMLSTVLGVS
GMMMGMYNMASRVLNVS

SEQ ID NO: 184738 - protein, 17 aa, Artificial Sequence
  Description of Artificial Sequence: Synthetic peptide
  Seed: GMMMGMFNMLSTVLGVS
GMMMGMYNMASRVLSVS

SEQ ID NO: 184739 - protein, 17 aa, Artificial Sequence
  Description of Artificial Sequence: Synthetic peptide
  Seed: GMMMGMFNMLSTVLGVS
GMMMGMYNMASSVLAVS

SEQ ID NO: 184740 - protein, 17 aa, Artificial Sequence
  Description of Artificial Sequence: Synthetic peptide
  Seed: GMMMGMFNMLSTVLGVS
GMMMGMYNMASSVLGVS

SEQ ID NO: 184741 - protein, 17 aa, Artificial Sequence
  Description of Artificial Sequence: Synthetic peptide
  Seed: GMMMGMFNMLSTVLGVS
GMMMGMYNMASSVLHVS

SEQ ID NO: 184742 - protein, 17 aa, Artificial Sequence
  Description of Artificial Sequence: Synthetic peptide
  Seed: GMMMGMFNMLSTVLGVS
GMMMGMYNMASSVLIVS

SEQ ID NO: 184743 - protein, 17 aa, Artificial Sequence
  Description of Artificial Sequence: Synthetic peptide
  Seed: GMMMGMFNMLSTVLGVS
GMMMGMYNMASSVLKVS

SEQ ID NO: 184744 - protein, 17 aa, Artificial Sequence
  Description of Artificial Sequence: Synthetic peptide
  Seed: GMMMGMFNMLSTVLGVS
GMMMGMYNMASSVLLVS

SEQ ID NO: 184745 - protein, 17 aa, Artificial Sequence
  Description of Artificial Sequence: Synthetic peptide
  Seed: GMMMGMFNMLSTVLGVS
GMMMGMYNMASSVLMVS

SEQ ID NO: 184746 - protein, 17 aa, Artificial Sequence
  Description of Artificial Sequence: Synthetic peptide
  Seed: GMMMGMFNMLSTVLGVS
GMMMGMYNMASSVLNVS

SEQ ID NO: 184747 - protein, 17 aa, Artificial Sequence
  Description of Artificial Sequence: Synthetic peptide
  Seed: GMMMGMFNMLSTVLGVS
GMMMGMYNMASSVLPVS

SEQ ID NO: 184748 - protein, 17 aa, Artificial Sequence
  Description of Artificial Sequence: Synthetic peptide
  Seed: GMMMGMFNMLSTVLGVS
GMMMGMYNMASSVLQVS

SEQ ID NO: 184749 - protein, 17 aa, Artificial Sequence
  Description of Artificial Sequence: Synthetic peptide
  Seed: GMMMGMFNMLSTVLGVS
GMMMGMYNMASSVLRVS

SEQ ID NO: 184750 - protein, 17 aa, Artificial Sequence
  Description of Artificial Sequence: Synthetic peptide
  Seed: GMMMGMFNMLSTVLGVS
GMMMGMYNMASSVLSVS

SEQ ID NO: 184751 - protein, 17 aa, Artificial Sequence
  Description of Artificial Sequence: Synthetic peptide
  Seed: GMMMGMFNMLSTVLGVS
GMMMGMYNMASSVLTVS

SEQ ID NO: 184752 - protein, 17 aa, Artificial Sequence
  Description of Artificial Sequence: Synthetic peptide
  Seed: GMMMGMFNMLSTVLGVS
GMMMGMYNMASSVLVVS

SEQ ID NO: 184753 - protein, 17 aa, Artificial Sequence
  Description of Artificial Sequence: Synthetic peptide
  Seed: GMMMGMFNMLSTVLGVS
GMMMGMYNMASSVLYVS

SEQ ID NO: 184754 - protein, 17 aa, Artificial Sequence
  Description of Artificial Sequence: Synthetic peptide
  Seed: GMMMGMFNMLSTVLGVS
GMMMGMYNMASTVLAVS

SEQ ID NO: 184755 - protein, 17 aa, Artificial Sequence
  Description of Artificial Sequence: Synthetic peptide
  Seed: GMMMGMFNMLSTVLGVS
GMMMGMYNMASTVLGVS

SEQ ID NO: 184756 - protein, 17 aa, Artificial Sequence
  Description of Artificial Sequence: Synthetic peptide
  Seed: GMMMGMFNMLSTVLGVS
GMMMGMYNMASTVLHVS

SEQ ID NO: 184757 - protein, 17 aa, Artificial Sequence
  Description of Artificial Sequence: Synthetic peptide
  Seed: GMMMGMFNMLSTVLGVS
GMMMGMYNMASTVLIVS

SEQ ID NO: 184758 - protein, 17 aa, Artificial Sequence
  Description of Artificial Sequence: Synthetic peptide
  Seed: GMMMGMFNMLSTVLGVS
GMMMGMYNMASTVLKVS

SEQ ID NO: 184759 - protein, 17 aa, Artificial Sequence
  Description of Artificial Sequence: Synthetic peptide
  Seed: GMMMGMFNMLSTVLGVS
GMMMGMYNMASTVLLVS

SEQ ID NO: 184760 - protein, 17 aa, Artificial Sequence
  Description of Artificial Sequence: Synthetic peptide
  Seed: GMMMGMFNMLSTVLGVS
GMMMGMYNMASTVLMVS

SEQ ID NO: 184761 - protein, 17 aa, Artificial Sequence
  Description of Artificial Sequence: Synthetic peptide
  Seed: GMMMGMFNMLSTVLGVS
GMMMGMYNMASTVLNVS

SEQ ID NO: 184762 - protein, 17 aa, Artificial Sequence
  Description of Artificial Sequence: Synthetic peptide
  Seed: GMMMGMFNMLSTVLGVS
GMMMGMYNMASTVLPVS

SEQ ID NO: 184763 - protein, 17 aa, Artificial Sequence
  Description of Artificial Sequence: Synthetic peptide
  Seed: GMMMGMFNMLSTVLGVS
GMMMGMYNMASTVLQVS

SEQ ID NO: 184764 - protein, 17 aa, Artificial Sequence
  Description of Artificial Sequence: Synthetic peptide
  Seed: GMMMGMFNMLSTVLGVS
GMMMGMYNMASTVLRVS

SEQ ID NO: 184765 - protein, 17 aa, Artificial Sequence
  Description of Artificial Sequence: Synthetic peptide
  Seed: GMMMGMFNMLSTVLGVS
GMMMGMYNMASTVLSVS

SEQ ID NO: 184766 - protein, 17 aa, Artificial Sequence
  Description of Artificial Sequence: Synthetic peptide
  Seed: GMMMGMFNMLSTVLGVS
GMMMGMYNMASTVLTVS

SEQ ID NO: 184767 - protein, 17 aa, Artificial Sequence
  Description of Artificial Sequence: Synthetic peptide
  Seed: GMMMGMFNMLSTVLGVS
GMMMGMYNMASTVLVVS

SEQ ID NO: 184768 - protein, 17 aa, Artificial Sequence
  Description of Artificial Sequence: Synthetic peptide
  Seed: GMMMGMFNMLSTVLGVS
GMMMGMYNMASVVLAVS

SEQ ID NO: 184769 - protein, 17 aa, Artificial Sequence
  Description of Artificial Sequence: Synthetic peptide
  Seed: GMMMGMFNMLSTVLGVS
GMMMGMYNMASVVLGVS

SEQ ID NO: 184770 - protein, 17 aa, Artificial Sequence
  Description of Artificial Sequence: Synthetic peptide
  Seed: GMMMGMFNMLSTVLGVS
GMMMGMYNMASVVLHVS

SEQ ID NO: 184771 - protein, 17 aa, Artificial Sequence
  Description of Artificial Sequence: Synthetic peptide
  Seed: GMMMGMFNMLSTVLGVS
GMMMGMYNMASVVLKVS

SEQ ID NO: 184772 - protein, 17 aa, Artificial Sequence
  Description of Artificial Sequence: Synthetic peptide
  Seed: GMMMGMFNMLSTVLGVS
GMMMGMYNMASVVLNVS

SEQ ID NO: 184773 - protein, 17 aa, Artificial Sequence
  Description of Artificial Sequence: Synthetic peptide
  Seed: GMMMGMFNMLSTVLGVS
GMMMGMYNMASVVLSVS

SEQ ID NO: 184774 - protein, 17 aa, Artificial Sequence
  Description of Artificial Sequence: Synthetic peptide
  Seed: GMMMGMFNMLSTVLGVS
GMMMGMYNMASVVLTVS

SEQ ID NO: 184775 - protein, 17 aa, Artificial Sequence
  Description of Artificial Sequence: Synthetic peptide
  Seed: GMMMGMFNMLSTVLGVS
GMMMGMYNMCSAVLAVS

SEQ ID NO: 184776 - protein, 17 aa, Artificial Sequence
  Description of Artificial Sequence: Synthetic peptide
  Seed: GMMMGMFNMLSTVLGVS
GMMMGMYNMCSAVLNVS

SEQ ID NO: 184777 - protein, 17 aa, Artificial Sequence
  Description of Artificial Sequence: Synthetic peptide
  Seed: GMMMGMFNMLSTVLGVS
GMMMGMYNMCSAVLSVS

SEQ ID NO: 184778 - protein, 17 aa, Artificial Sequence
  Description of Artificial Sequence: Synthetic peptide
  Seed: GMMMGMFNMLSTVLGVS
GMMMGMYNMCSAVLTVS

SEQ ID NO: 184779 - protein, 17 aa, Artificial Sequence
  Description of Artificial Sequence: Synthetic peptide
  Seed: GMMMGMFNMLSTVLGVS
GMMMGMYNMCSAVLVVS

SEQ ID NO: 184780 - protein, 17 aa, Artificial Sequence
  Description of Artificial Sequence: Synthetic peptide
  Seed: GMMMGMFNMLSTVLGVS
GMMMGMYNMCSGVLAVS

SEQ ID NO: 184781 - protein, 17 aa, Artificial Sequence
  Description of Artificial Sequence: Synthetic peptide
  Seed: GMMMGMFNMLSTVLGVS
GMMMGMYNMCSGVLVVS

SEQ ID NO: 184782 - protein, 17 aa, Artificial Sequence
  Description of Artificial Sequence: Synthetic peptide
  Seed: GMMMGMFNMLSTVLGVS
GMMMGMYNMCSPVLAVS

SEQ ID NO: 184783 - protein, 17 aa, Artificial Sequence
  Description of Artificial Sequence: Synthetic peptide
  Seed: GMMMGMFNMLSTVLGVS
GMMMGMYNMCSPVLIVS

SEQ ID NO: 184784 - protein, 17 aa, Artificial Sequence
  Description of Artificial Sequence: Synthetic peptide
  Seed: GMMMGMFNMLSTVLGVS
GMMMGMYNMCSPVLLVS

SEQ ID NO: 184785 - protein, 17 aa, Artificial Sequence
  Description of Artificial Sequence: Synthetic peptide
  Seed: GMMMGMFNMLSTVLGVS
GMMMGMYNMCSPVLNVS

SEQ ID NO: 184786 - protein, 17 aa, Artificial Sequence
  Description of Artificial Sequence: Synthetic peptide
  Seed: GMMMGMFNMLSTVLGVS
GMMMGMYNMCSPVLVVS

SEQ ID NO: 184787 - protein, 17 aa, Artificial Sequence
  Description of Artificial Sequence: Synthetic peptide
  Seed: GMMMGMFNMLSTVLGVS
GMMMGMYNMDSNVLAVS

SEQ ID NO: 184788 - protein, 17 aa, Artificial Sequence
  Description of Artificial Sequence: Synthetic peptide
  Seed: GMMMGMFNMLSTVLGVS
GMMMGMYNMDSNVLGVS

SEQ ID NO: 184789 - protein, 17 aa, Artificial Sequence
  Description of Artificial Sequence: Synthetic peptide
  Seed: GMMMGMFNMLSTVLGVS
GMMMGMYNMDSNVLSVS

SEQ ID NO: 184790 - protein, 17 aa, Artificial Sequence
  Description of Artificial Sequence: Synthetic peptide
  Seed: GMMMGMFNMLSTVLGVS
GMMMGMYNMDSSVLSVS

SEQ ID NO: 184791 - protein, 17 aa, Artificial Sequence
  Description of Artificial Sequence: Synthetic peptide
  Seed: GMMMGMFNMLSTVLGVS
GMMMGMYNMDSTVLAVS

SEQ ID NO: 184792 - protein, 17 aa, Artificial Sequence
  Description of Artificial Sequence: Synthetic peptide
  Seed: GMMMGMFNMLSTVLGVS
GMMMGMYNMDSTVLSVS

SEQ ID NO: 184793 - protein, 17 aa, Artificial Sequence
  Description of Artificial Sequence: Synthetic peptide
  Seed: GMMMGMFNMLSTVLGVS
GMMMGMYNMESAVLAVS

SEQ ID NO: 184794 - protein, 17 aa, Artificial Sequence
  Description of Artificial Sequence: Synthetic peptide
  Seed: GMMMGMFNMLSTVLGVS
GMMMGMYNMESAVLGVS

SEQ ID NO: 184795 - protein, 17 aa, Artificial Sequence
  Description of Artificial Sequence: Synthetic peptide
  Seed: GMMMGMFNMLSTVLGVS
GMMMGMYNMESAVLHVS

SEQ ID NO: 184796 - protein, 17 aa, Artificial Sequence
  Description of Artificial Sequence: Synthetic peptide
  Seed: GMMMGMFNMLSTVLGVS
GMMMGMYNMESAVLIVS

SEQ ID NO: 184797 - protein, 17 aa, Artificial Sequence
  Description of Artificial Sequence: Synthetic peptide
  Seed: GMMMGMFNMLSTVLGVS
GMMMGMYNMESAVLKVS

SEQ ID NO: 184798 - protein, 17 aa, Artificial Sequence
  Description of Artificial Sequence: Synthetic peptide
  Seed: GMMMGMFNMLSTVLGVS
GMMMGMYNMESAVLLVS

SEQ ID NO: 184799 - protein, 17 aa, Artificial Sequence
  Description of Artificial Sequence: Synthetic peptide
  Seed: GMMMGMFNMLSTVLGVS
GMMMGMYNMESAVLMVS

SEQ ID NO: 184800 - protein, 17 aa, Artificial Sequence
  Description of Artificial Sequence: Synthetic peptide
  Seed: GMMMGMFNMLSTVLGVS
GMMMGMYNMESAVLNVS

SEQ ID NO: 184801 - protein, 17 aa, Artificial Sequence
  Description of Artificial Sequence: Synthetic peptide
  Seed: GMMMGMFNMLSTVLGVS
GMMMGMYNMESAVLRVS

SEQ ID NO: 184802 - protein, 17 aa, Artificial Sequence
  Description of Artificial Sequence: Synthetic peptide
  Seed: GMMMGMFNMLSTVLGVS
GMMMGMYNMESAVLSVS

SEQ ID NO: 184803 - protein, 17 aa, Artificial Sequence
  Description of Artificial Sequence: Synthetic peptide
  Seed: GMMMGMFNMLSTVLGVS
GMMMGMYNMESAVLTVS

SEQ ID NO: 184804 - protein, 17 aa, Artificial Sequence
  Description of Artificial Sequence: Synthetic peptide
  Seed: GMMMGMFNMLSTVLGVS
GMMMGMYNMESAVLVVS

SEQ ID NO: 184805 - protein, 17 aa, Artificial Sequence
  Description of Artificial Sequence: Synthetic peptide
  Seed: GMMMGMFNMLSTVLGVS
GMMMGMYNMESGVLAVS

SEQ ID NO: 184806 - protein, 17 aa, Artificial Sequence
  Description of Artificial Sequence: Synthetic peptide
  Seed: GMMMGMFNMLSTVLGVS
GMMMGMYNMESGVLGVS

SEQ ID NO: 184807 - protein, 17 aa, Artificial Sequence
  Description of Artificial Sequence: Synthetic peptide
  Seed: GMMMGMFNMLSTVLGVS
GMMMGMYNMESGVLIVS

SEQ ID NO: 184808 - protein, 17 aa, Artificial Sequence
  Description of Artificial Sequence: Synthetic peptide
  Seed: GMMMGMFNMLSTVLGVS
GMMMGMYNMESGVLLVS

SEQ ID NO: 184809 - protein, 17 aa, Artificial Sequence
  Description of Artificial Sequence: Synthetic peptide
  Seed: GMMMGMFNMLSTVLGVS
GMMMGMYNMESGVLMVS

SEQ ID NO: 184810 - protein, 17 aa, Artificial Sequence
  Description of Artificial Sequence: Synthetic peptide
  Seed: GMMMGMFNMLSTVLGVS
GMMMGMYNMESGVLSVS

SEQ ID NO: 184811 - protein, 17 aa, Artificial Sequence
  Description of Artificial Sequence: Synthetic peptide
  Seed: GMMMGMFNMLSTVLGVS
GMMMGMYNMESGVLTVS

SEQ ID NO: 184812 - protein, 17 aa, Artificial Sequence
  Description of Artificial Sequence: Synthetic peptide
  Seed: GMMMGMFNMLSTVLGVS
GMMMGMYNMESGVLVVS

SEQ ID NO: 184813 - protein, 17 aa, Artificial Sequence
  Description of Artificial Sequence: Synthetic peptide
  Seed: GMMMGMFNMLSTVLGVS
GMMMGMYNMESNVLAVS

SEQ ID NO: 184814 - protein, 17 aa, Artificial Sequence
  Description of Artificial Sequence: Synthetic peptide
  Seed: GMMMGMFNMLSTVLGVS
GMMMGMYNMESNVLLVS

SEQ ID NO: 184815 - protein, 17 aa, Artificial Sequence
  Description of Artificial Sequence: Synthetic peptide
  Seed: GMMMGMFNMLSTVLGVS
GMMMGMYNMESNVLSVS

SEQ ID NO: 184816 - protein, 17 aa, Artificial Sequence
  Description of Artificial Sequence: Synthetic peptide
  Seed: GMMMGMFNMLSTVLGVS
GMMMGMYNMESNVLVVS

SEQ ID NO: 184817 - protein, 17 aa, Artificial Sequence
  Description of Artificial Sequence: Synthetic peptide
  Seed: GMMMGMFNMLSTVLGVS
GMMMGMYNMESPVLAVS

SEQ ID NO: 184818 - protein, 17 aa, Artificial Sequence
  Description of Artificial Sequence: Synthetic peptide
  Seed: GMMMGMFNMLSTVLGVS
GMMMGMYNMESPVLIVS

SEQ ID NO: 184819 - protein, 17 aa, Artificial Sequence
  Description of Artificial Sequence: Synthetic peptide
  Seed: GMMMGMFNMLSTVLGVS
GMMMGMYNMESPVLLVS

SEQ ID NO: 184820 - protein, 17 aa, Artificial Sequence
  Description of Artificial Sequence: Synthetic peptide
  Seed: GMMMGMFNMLSTVLGVS
GMMMGMYNMESPVLMVS

SEQ ID NO: 184821 - protein, 17 aa, Artificial Sequence
  Description of Artificial Sequence: Synthetic peptide
  Seed: GMMMGMFNMLSTVLGVS
GMMMGMYNMESPVLNVS

SEQ ID NO: 184822 - protein, 17 aa, Artificial Sequence
  Description of Artificial Sequence: Synthetic peptide
  Seed: GMMMGMFNMLSTVLGVS
GMMMGMYNMESPVLSVS

SEQ ID NO: 184823 - protein, 17 aa, Artificial Sequence
  Description of Artificial Sequence: Synthetic peptide
  Seed: GMMMGMFNMLSTVLGVS
GMMMGMYNMESPVLTVS

SEQ ID NO: 184824 - protein, 17 aa, Artificial Sequence
  Description of Artificial Sequence: Synthetic peptide
  Seed: GMMMGMFNMLSTVLGVS
GMMMGMYNMESPVLVVS

SEQ ID NO: 184825 - protein, 17 aa, Artificial Sequence
  Description of Artificial Sequence: Synthetic peptide
  Seed: GMMMGMFNMLSTVLGVS
GMMMGMYNMESSVLAVS

SEQ ID NO: 184826 - protein, 17 aa, Artificial Sequence
  Description of Artificial Sequence: Synthetic peptide
  Seed: GMMMGMFNMLSTVLGVS
GMMMGMYNMESSVLIVS

SEQ ID NO: 184827 - protein, 17 aa, Artificial Sequence
  Description of Artificial Sequence: Synthetic peptide
  Seed: GMMMGMFNMLSTVLGVS
GMMMGMYNMESSVLLVS

SEQ ID NO: 184828 - protein, 17 aa, Artificial Sequence
  Description of Artificial Sequence: Synthetic peptide
  Seed: GMMMGMFNMLSTVLGVS
GMMMGMYNMESSVLNVS

SEQ ID NO: 184829 - protein, 17 aa, Artificial Sequence
  Description of Artificial Sequence: Synthetic peptide
  Seed: GMMMGMFNMLSTVLGVS
GMMMGMYNMESSVLSVS

SEQ ID NO: 184830 - protein, 17 aa, Artificial Sequence
  Description of Artificial Sequence: Synthetic peptide
  Seed: GMMMGMFNMLSTVLGVS
GMMMGMYNMESSVLTVS

SEQ ID NO: 184831 - protein, 17 aa, Artificial Sequence
  Description of Artificial Sequence: Synthetic peptide
  Seed: GMMMGMFNMLSTVLGVS
GMMMGMYNMESSVLVVS

SEQ ID NO: 184832 - protein, 17 aa, Artificial Sequence
  Description of Artificial Sequence: Synthetic peptide
  Seed: GMMMGMFNMLSTVLGVS
GMMMGMYNMESTVLAVS

SEQ ID NO: 184833 - protein, 17 aa, Artificial Sequence
  Description of Artificial Sequence: Synthetic peptide
  Seed: GMMMGMFNMLSTVLGVS
GMMMGMYNMESTVLNVS

SEQ ID NO: 184834 - protein, 17 aa, Artificial Sequence
  Description of Artificial Sequence: Synthetic peptide
  Seed: GMMMGMFNMLSTVLGVS
GMMMGMYNMESTVLSVS

SEQ ID NO: 184835 - protein, 17 aa, Artificial Sequence
  Description of Artificial Sequence: Synthetic peptide
  Seed: GMMMGMFNMLSTVLGVS
GMMMGMYNMESVVLNVS

SEQ ID NO: 184836 - protein, 17 aa, Artificial Sequence
  Description of Artificial Sequence: Synthetic peptide
  Seed: GMMMGMFNMLSTVLGVS
GMMMGMYNMFSAVLHVS

SEQ ID NO: 184837 - protein, 17 aa, Artificial Sequence
  Description of Artificial Sequence: Synthetic peptide
  Seed: GMMMGMFNMLSTVLGVS
GMMMGMYNMFSAVLNVS

SEQ ID NO: 184838 - protein, 17 aa, Artificial Sequence
  Description of Artificial Sequence: Synthetic peptide
  Seed: GMMMGMFNMLSTVLGVS
GMMMGMYNMFSPVLAVS

SEQ ID NO: 184839 - protein, 17 aa, Artificial Sequence
  Description of Artificial Sequence: Synthetic peptide
  Seed: GMMMGMFNMLSTVLGVS
GMMMGMYNMFSPVLHVS

SEQ ID NO: 184840 - protein, 17 aa, Artificial Sequence
  Description of Artificial Sequence: Synthetic peptide
  Seed: GMMMGMFNMLSTVLGVS
GMMMGMYNMFSPVLIVS

SEQ ID NO: 184841 - protein, 17 aa, Artificial Sequence
  Description of Artificial Sequence: Synthetic peptide
  Seed: GMMMGMFNMLSTVLGVS
GMMMGMYNMFSPVLLVS

SEQ ID NO: 184842 - protein, 17 aa, Artificial Sequence
  Description of Artificial Sequence: Synthetic peptide
  Seed: GMMMGMFNMLSTVLGVS
GMMMGMYNMFSPVLMVS

SEQ ID NO: 184843 - protein, 17 aa, Artificial Sequence
  Description of Artificial Sequence: Synthetic peptide
  Seed: GMMMGMFNMLSTVLGVS
GMMMGMYNMFSPVLNVS

SEQ ID NO: 184844 - protein, 17 aa, Artificial Sequence
  Description of Artificial Sequence: Synthetic peptide
  Seed: GMMMGMFNMLSTVLGVS
GMMMGMYNMFSPVLSVS

SEQ ID NO: 184845 - protein, 17 aa, Artificial Sequence
  Description of Artificial Sequence: Synthetic peptide
  Seed: GMMMGMFNMLSTVLGVS
GMMMGMYNMFSPVLTVS

SEQ ID NO: 184846 - protein, 17 aa, Artificial Sequence
  Description of Artificial Sequence: Synthetic peptide
  Seed: GMMMGMFNMLSTVLGVS
GMMMGMYNMFSPVLVVS

SEQ ID NO: 184847 - protein, 17 aa, Artificial Sequence
  Description of Artificial Sequence: Synthetic peptide
  Seed: GMMMGMFNMLSTVLGVS
GMMMGMYNMGSAVLAVS

SEQ ID NO: 184848 - protein, 17 aa, Artificial Sequence
  Description of Artificial Sequence: Synthetic peptide
  Seed: GMMMGMFNMLSTVLGVS
GMMMGMYNMGSAVLFVS

SEQ ID NO: 184849 - protein, 17 aa, Artificial Sequence
  Description of Artificial Sequence: Synthetic peptide
  Seed: GMMMGMFNMLSTVLGVS
GMMMGMYNMGSAVLGVS

SEQ ID NO: 184850 - protein, 17 aa, Artificial Sequence
  Description of Artificial Sequence: Synthetic peptide
  Seed: GMMMGMFNMLSTVLGVS
GMMMGMYNMGSAVLHVS

SEQ ID NO: 184851 - protein, 17 aa, Artificial Sequence
  Description of Artificial Sequence: Synthetic peptide
  Seed: GMMMGMFNMLSTVLGVS
GMMMGMYNMGSAVLIVS

SEQ ID NO: 184852 - protein, 17 aa, Artificial Sequence
  Description of Artificial Sequence: Synthetic peptide
  Seed: GMMMGMFNMLSTVLGVS
GMMMGMYNMGSAVLKVS

SEQ ID NO: 184853 - protein, 17 aa, Artificial Sequence
  Description of Artificial Sequence: Synthetic peptide
  Seed: GMMMGMFNMLSTVLGVS
GMMMGMYNMGSAVLLVS

SEQ ID NO: 184854 - protein, 17 aa, Artificial Sequence
  Description of Artificial Sequence: Synthetic peptide
  Seed: GMMMGMFNMLSTVLGVS
GMMMGMYNMGSAVLMVS

SEQ ID NO: 184855 - protein, 17 aa, Artificial Sequence
  Description of Artificial Sequence: Synthetic peptide
  Seed: GMMMGMFNMLSTVLGVS
GMMMGMYNMGSAVLNVS

SEQ ID NO: 184856 - protein, 17 aa, Artificial Sequence
  Description of Artificial Sequence: Synthetic peptide
  Seed: GMMMGMFNMLSTVLGVS
GMMMGMYNMGSAVLQVS

SEQ ID NO: 184857 - protein, 17 aa, Artificial Sequence
  Description of Artificial Sequence: Synthetic peptide
  Seed: GMMMGMFNMLSTVLGVS
GMMMGMYNMGSAVLRVS

SEQ ID NO: 184858 - protein, 17 aa, Artificial Sequence
  Description of Artificial Sequence: Synthetic peptide
  Seed: GMMMGMFNMLSTVLGVS
GMMMGMYNMGSAVLSVS

SEQ ID NO: 184859 - protein, 17 aa, Artificial Sequence
  Description of Artificial Sequence: Synthetic peptide
  Seed: GMMMGMFNMLSTVLGVS
GMMMGMYNMGSAVLTVS

SEQ ID NO: 184860 - protein, 17 aa, Artificial Sequence
  Description of Artificial Sequence: Synthetic peptide
  Seed: GMMMGMFNMLSTVLGVS
GMMMGMYNMGSAVLVVS

SEQ ID NO: 184861 - protein, 17 aa, Artificial Sequence
  Description of Artificial Sequence: Synthetic peptide
  Seed: GMMMGMFNMLSTVLGVS
GMMMGMYNMGSAVLYVS

SEQ ID NO: 184862 - protein, 17 aa, Artificial Sequence
  Description of Artificial Sequence: Synthetic peptide
  Seed: GMMMGMFNMLSTVLGVS
GMMMGMYNMGSGVLAVS

SEQ ID NO: 184863 - protein, 17 aa, Artificial Sequence
  Description of Artificial Sequence: Synthetic peptide
  Seed: GMMMGMFNMLSTVLGVS
GMMMGMYNMGSGVLIVS

SEQ ID NO: 184864 - protein, 17 aa, Artificial Sequence
  Description of Artificial Sequence: Synthetic peptide
  Seed: GMMMGMFNMLSTVLGVS
GMMMGMYNMGSGVLLVS

SEQ ID NO: 184865 - protein, 17 aa, Artificial Sequence
  Description of Artificial Sequence: Synthetic peptide
  Seed: GMMMGMFNMLSTVLGVS
GMMMGMYNMGSGVLMVS

SEQ ID NO: 184866 - protein, 17 aa, Artificial Sequence
  Description of Artificial Sequence: Synthetic peptide
  Seed: GMMMGMFNMLSTVLGVS
GMMMGMYNMGSGVLSVS

SEQ ID NO: 184867 - protein, 17 aa, Artificial Sequence
  Description of Artificial Sequence: Synthetic peptide
  Seed: GMMMGMFNMLSTVLGVS
GMMMGMYNMGSGVLTVS

SEQ ID NO: 184868 - protein, 17 aa, Artificial Sequence
  Description of Artificial Sequence: Synthetic peptide
  Seed: GMMMGMFNMLSTVLGVS
GMMMGMYNMGSGVLVVS

SEQ ID NO: 184869 - protein, 17 aa, Artificial Sequence
  Description of Artificial Sequence: Synthetic peptide
  Seed: GMMMGMFNMLSTVLGVS
GMMMGMYNMGSNVLAVS

SEQ ID NO: 184870 - protein, 17 aa, Artificial Sequence
  Description of Artificial Sequence: Synthetic peptide
  Seed: GMMMGMFNMLSTVLGVS
GMMMGMYNMGSNVLIVS

SEQ ID NO: 184871 - protein, 17 aa, Artificial Sequence
  Description of Artificial Sequence: Synthetic peptide
  Seed: GMMMGMFNMLSTVLGVS
GMMMGMYNMGSNVLLVS

SEQ ID NO: 184872 - protein, 17 aa, Artificial Sequence
  Description of Artificial Sequence: Synthetic peptide
  Seed: GMMMGMFNMLSTVLGVS
GMMMGMYNMGSNVLMVS

SEQ ID NO: 184873 - protein, 17 aa, Artificial Sequence
  Description of Artificial Sequence: Synthetic peptide
  Seed: GMMMGMFNMLSTVLGVS
GMMMGMYNMGSNVLTVS

SEQ ID NO: 184874 - protein, 17 aa, Artificial Sequence
  Description of Artificial Sequence: Synthetic peptide
  Seed: GMMMGMFNMLSTVLGVS
GMMMGMYNMGSNVLVVS

SEQ ID NO: 184875 - protein, 17 aa, Artificial Sequence
  Description of Artificial Sequence: Synthetic peptide
  Seed: GMMMGMFNMLSTVLGVS
GMMMGMYNMGSPVLAVS

SEQ ID NO: 184876 - protein, 17 aa, Artificial Sequence
  Description of Artificial Sequence: Synthetic peptide
  Seed: GMMMGMFNMLSTVLGVS
GMMMGMYNMGSPVLIVS

SEQ ID NO: 184877 - protein, 17 aa, Artificial Sequence
  Description of Artificial Sequence: Synthetic peptide
  Seed: GMMMGMFNMLSTVLGVS
GMMMGMYNMGSPVLLVS

SEQ ID NO: 184878 - protein, 17 aa, Artificial Sequence
  Description of Artificial Sequence: Synthetic peptide
  Seed: GMMMGMFNMLSTVLGVS
GMMMGMYNMGSPVLMVS

SEQ ID NO: 184879 - protein, 17 aa, Artificial Sequence
  Description of Artificial Sequence: Synthetic peptide
  Seed: GMMMGMFNMLSTVLGVS
GMMMGMYNMGSPVLSVS

SEQ ID NO: 184880 - protein, 17 aa, Artificial Sequence
  Description of Artificial Sequence: Synthetic peptide
  Seed: GMMMGMFNMLSTVLGVS
GMMMGMYNMGSPVLTVS

SEQ ID NO: 184881 - protein, 17 aa, Artificial Sequence
  Description of Artificial Sequence: Synthetic peptide
  Seed: GMMMGMFNMLSTVLGVS
GMMMGMYNMGSPVLVVS

SEQ ID NO: 184882 - protein, 17 aa, Artificial Sequence
  Description of Artificial Sequence: Synthetic peptide
  Seed: GMMMGMFNMLSTVLGVS
GMMMGMYNMGSSVLAVS

SEQ ID NO: 184883 - protein, 17 aa, Artificial Sequence
  Description of Artificial Sequence: Synthetic peptide
  Seed: GMMMGMFNMLSTVLGVS
GMMMGMYNMGSSVLIVS

SEQ ID NO: 184884 - protein, 17 aa, Artificial Sequence
  Description of Artificial Sequence: Synthetic peptide
  Seed: GMMMGMFNMLSTVLGVS
GMMMGMYNMGSSVLLVS

SEQ ID NO: 184885 - protein, 17 aa, Artificial Sequence
  Description of Artificial Sequence: Synthetic peptide
  Seed: GMMMGMFNMLSTVLGVS
GMMMGMYNMGSSVLMVS

SEQ ID NO: 184886 - protein, 17 aa, Artificial Sequence
  Description of Artificial Sequence: Synthetic peptide
  Seed: GMMMGMFNMLSTVLGVS
GMMMGMYNMGSSVLSVS

SEQ ID NO: 184887 - protein, 17 aa, Artificial Sequence
  Description of Artificial Sequence: Synthetic peptide
  Seed: GMMMGMFNMLSTVLGVS
GMMMGMYNMGSSVLTVS

SEQ ID NO: 184888 - protein, 17 aa, Artificial Sequence
  Description of Artificial Sequence: Synthetic peptide
  Seed: GMMMGMFNMLSTVLGVS
GMMMGMYNMGSSVLVVS

SEQ ID NO: 184889 - protein, 17 aa, Artificial Sequence
  Description of Artificial Sequence: Synthetic peptide
  Seed: GMMMGMFNMLSTVLGVS
GMMMGMYNMGSTVLAVS

SEQ ID NO: 184890 - protein, 17 aa, Artificial Sequence
  Description of Artificial Sequence: Synthetic peptide
  Seed: GMMMGMFNMLSTVLGVS
GMMMGMYNMGSTVLIVS

SEQ ID NO: 184891 - protein, 17 aa, Artificial Sequence
  Description of Artificial Sequence: Synthetic peptide
  Seed: GMMMGMFNMLSTVLGVS
GMMMGMYNMGSTVLLVS

SEQ ID NO: 184892 - protein, 17 aa, Artificial Sequence
  Description of Artificial Sequence: Synthetic peptide
  Seed: GMMMGMFNMLSTVLGVS
GMMMGMYNMGSTVLVVS

SEQ ID NO: 184893 - protein, 17 aa, Artificial Sequence
  Description of Artificial Sequence: Synthetic peptide
  Seed: GMMMGMFNMLSTVLGVS
GMMMGMYNMGSVVLNVS

SEQ ID NO: 184894 - protein, 17 aa, Artificial Sequence
  Description of Artificial Sequence: Synthetic peptide
  Seed: GMMMGMFNMLSTVLGVS
GMMMGMYNMHSAVLAVS

SEQ ID NO: 184895 - protein, 17 aa, Artificial Sequence
  Description of Artificial Sequence: Synthetic peptide
  Seed: GMMMGMFNMLSTVLGVS
GMMMGMYNMHSAVLGVS

SEQ ID NO: 184896 - protein, 17 aa, Artificial Sequence
  Description of Artificial Sequence: Synthetic peptide
  Seed: GMMMGMFNMLSTVLGVS
GMMMGMYNMHSAVLHVS

SEQ ID NO: 184897 - protein, 17 aa, Artificial Sequence
  Description of Artificial Sequence: Synthetic peptide
  Seed: GMMMGMFNMLSTVLGVS
GMMMGMYNMHSAVLIVS

SEQ ID NO: 184898 - protein, 17 aa, Artificial Sequence
  Description of Artificial Sequence: Synthetic peptide
  Seed: GMMMGMFNMLSTVLGVS
GMMMGMYNMHSAVLLVS

SEQ ID NO: 184899 - protein, 17 aa, Artificial Sequence
  Description of Artificial Sequence: Synthetic peptide
  Seed: GMMMGMFNMLSTVLGVS
GMMMGMYNMHSAVLMVS

SEQ ID NO: 184900 - protein, 17 aa, Artificial Sequence
  Description of Artificial Sequence: Synthetic peptide
  Seed: GMMMGMFNMLSTVLGVS
GMMMGMYNMHSAVLNVS

SEQ ID NO: 184901 - protein, 17 aa, Artificial Sequence
  Description of Artificial Sequence: Synthetic peptide
  Seed: GMMMGMFNMLSTVLGVS
GMMMGMYNMHSAVLSVS

SEQ ID NO: 184902 - protein, 17 aa, Artificial Sequence
  Description of Artificial Sequence: Synthetic peptide
  Seed: GMMMGMFNMLSTVLGVS
GMMMGMYNMHSAVLTVS

SEQ ID NO: 184903 - protein, 17 aa, Artificial Sequence
  Description of Artificial Sequence: Synthetic peptide
  Seed: GMMMGMFNMLSTVLGVS
GMMMGMYNMHSAVLVVS

SEQ ID NO: 184904 - protein, 17 aa, Artificial Sequence
  Description of Artificial Sequence: Synthetic peptide
  Seed: GMMMGMFNMLSTVLGVS
GMMMGMYNMHSGVLAVS

SEQ ID NO: 184905 - protein, 17 aa, Artificial Sequence
  Description of Artificial Sequence: Synthetic peptide
  Seed: GMMMGMFNMLSTVLGVS
GMMMGMYNMHSGVLIVS

SEQ ID NO: 184906 - protein, 17 aa, Artificial Sequence
  Description of Artificial Sequence: Synthetic peptide
  Seed: GMMMGMFNMLSTVLGVS
GMMMGMYNMHSGVLLVS

SEQ ID NO: 184907 - protein, 17 aa, Artificial Sequence
  Description of Artificial Sequence: Synthetic peptide
  Seed: GMMMGMFNMLSTVLGVS
GMMMGMYNMHSGVLMVS

SEQ ID NO: 184908 - protein, 17 aa, Artificial Sequence
  Description of Artificial Sequence: Synthetic peptide
  Seed: GMMMGMFNMLSTVLGVS
GMMMGMYNMHSGVLSVS

SEQ ID NO: 184909 - protein, 17 aa, Artificial Sequence
  Description of Artificial Sequence: Synthetic peptide
  Seed: GMMMGMFNMLSTVLGVS
GMMMGMYNMHSGVLTVS

SEQ ID NO: 184910 - protein, 17 aa, Artificial Sequence
  Description of Artificial Sequence: Synthetic peptide
  Seed: GMMMGMFNMLSTVLGVS
GMMMGMYNMHSGVLVVS

SEQ ID NO: 184911 - protein, 17 aa, Artificial Sequence
  Description of Artificial Sequence: Synthetic peptide
  Seed: GMMMGMFNMLSTVLGVS
GMMMGMYNMHSNVLLVS

SEQ ID NO: 184912 - protein, 17 aa, Artificial Sequence
  Description of Artificial Sequence: Synthetic peptide
  Seed: GMMMGMFNMLSTVLGVS
GMMMGMYNMHSPVLAVS

SEQ ID NO: 184913 - protein, 17 aa, Artificial Sequence
  Description of Artificial Sequence: Synthetic peptide
  Seed: GMMMGMFNMLSTVLGVS
GMMMGMYNMHSPVLIVS

SEQ ID NO: 184914 - protein, 17 aa, Artificial Sequence
  Description of Artificial Sequence: Synthetic peptide
  Seed: GMMMGMFNMLSTVLGVS
GMMMGMYNMHSPVLLVS

SEQ ID NO: 184915 - protein, 17 aa, Artificial Sequence
  Description of Artificial Sequence: Synthetic peptide
  Seed: GMMMGMFNMLSTVLGVS
GMMMGMYNMHSPVLMVS

SEQ ID NO: 184916 - protein, 17 aa, Artificial Sequence
  Description of Artificial Sequence: Synthetic peptide
  Seed: GMMMGMFNMLSTVLGVS
GMMMGMYNMHSPVLNVS

SEQ ID NO: 184917 - protein, 17 aa, Artificial Sequence
  Description of Artificial Sequence: Synthetic peptide
  Seed: GMMMGMFNMLSTVLGVS
GMMMGMYNMHSPVLVVS

SEQ ID NO: 184918 - protein, 17 aa, Artificial Sequence
  Description of Artificial Sequence: Synthetic peptide
  Seed: GMMMGMFNMLSTVLGVS
GMMMGMYNMHSSVLAVS

SEQ ID NO: 184919 - protein, 17 aa, Artificial Sequence
  Description of Artificial Sequence: Synthetic peptide
  Seed: GMMMGMFNMLSTVLGVS
GMMMGMYNMHSSVLIVS

SEQ ID NO: 184920 - protein, 17 aa, Artificial Sequence
  Description of Artificial Sequence: Synthetic peptide
  Seed: GMMMGMFNMLSTVLGVS
GMMMGMYNMHSSVLLVS

SEQ ID NO: 184921 - protein, 17 aa, Artificial Sequence
  Description of Artificial Sequence: Synthetic peptide
  Seed: GMMMGMFNMLSTVLGVS
GMMMGMYNMHSSVLMVS

SEQ ID NO: 184922 - protein, 17 aa, Artificial Sequence
  Description of Artificial Sequence: Synthetic peptide
  Seed: GMMMGMFNMLSTVLGVS
GMMMGMYNMHSSVLSVS

SEQ ID NO: 184923 - protein, 17 aa, Artificial Sequence
  Description of Artificial Sequence: Synthetic peptide
  Seed: GMMMGMFNMLSTVLGVS
GMMMGMYNMHSSVLTVS

SEQ ID NO: 184924 - protein, 17 aa, Artificial Sequence
  Description of Artificial Sequence: Synthetic peptide
  Seed: GMMMGMFNMLSTVLGVS
GMMMGMYNMHSSVLVVS

SEQ ID NO: 184925 - protein, 17 aa, Artificial Sequence
  Description of Artificial Sequence: Synthetic peptide
  Seed: GMMMGMFNMLSTVLGVS
GMMMGMYNMHSTVLLVS

SEQ ID NO: 184926 - protein, 17 aa, Artificial Sequence
  Description of Artificial Sequence: Synthetic peptide
  Seed: GMMMGMFNMLSTVLGVS
GMMMGMYNMHSTVLVVS

SEQ ID NO: 184927 - protein, 17 aa, Artificial Sequence
  Description of Artificial Sequence: Synthetic peptide
  Seed: GMMMGMFNMLSTVLGVS
GMMMGMYNMISAVLAVS

SEQ ID NO: 184928 - protein, 17 aa, Artificial Sequence
  Description of Artificial Sequence: Synthetic peptide
  Seed: GMMMGMFNMLSTVLGVS
GMMMGMYNMISAVLDVS

SEQ ID NO: 184929 - protein, 17 aa, Artificial Sequence
  Description of Artificial Sequence: Synthetic peptide
  Seed: GMMMGMFNMLSTVLGVS
GMMMGMYNMISAVLEVS

SEQ ID NO: 184930 - protein, 17 aa, Artificial Sequence
  Description of Artificial Sequence: Synthetic peptide
  Seed: GMMMGMFNMLSTVLGVS
GMMMGMYNMISAVLGVS

SEQ ID NO: 184931 - protein, 17 aa, Artificial Sequence
  Description of Artificial Sequence: Synthetic peptide
  Seed: GMMMGMFNMLSTVLGVS
GMMMGMYNMISAVLHVS

SEQ ID NO: 184932 - protein, 17 aa, Artificial Sequence
  Description of Artificial Sequence: Synthetic peptide
  Seed: GMMMGMFNMLSTVLGVS
GMMMGMYNMISAVLIVS

SEQ ID NO: 184933 - protein, 17 aa, Artificial Sequence
  Description of Artificial Sequence: Synthetic peptide
  Seed: GMMMGMFNMLSTVLGVS
GMMMGMYNMISAVLKVS

SEQ ID NO: 184934 - protein, 17 aa, Artificial Sequence
  Description of Artificial Sequence: Synthetic peptide
  Seed: GMMMGMFNMLSTVLGVS
GMMMGMYNMISAVLLVS

SEQ ID NO: 184935 - protein, 17 aa, Artificial Sequence
  Description of Artificial Sequence: Synthetic peptide
  Seed: GMMMGMFNMLSTVLGVS
GMMMGMYNMISAVLMVS

SEQ ID NO: 184936 - protein, 17 aa, Artificial Sequence
  Description of Artificial Sequence: Synthetic peptide
  Seed: GMMMGMFNMLSTVLGVS
GMMMGMYNMISAVLNVS

SEQ ID NO: 184937 - protein, 17 aa, Artificial Sequence
  Description of Artificial Sequence: Synthetic peptide
  Seed: GMMMGMFNMLSTVLGVS
GMMMGMYNMISAVLPVS

SEQ ID NO: 184938 - protein, 17 aa, Artificial Sequence
  Description of Artificial Sequence: Synthetic peptide
  Seed: GMMMGMFNMLSTVLGVS
GMMMGMYNMISAVLQVS

SEQ ID NO: 184939 - protein, 17 aa, Artificial Sequence
  Description of Artificial Sequence: Synthetic peptide
  Seed: GMMMGMFNMLSTVLGVS
GMMMGMYNMISAVLRVS

SEQ ID NO: 184940 - protein, 17 aa, Artificial Sequence
  Description of Artificial Sequence: Synthetic peptide
  Seed: GMMMGMFNMLSTVLGVS
GMMMGMYNMISAVLSVS

SEQ ID NO: 184941 - protein, 17 aa, Artificial Sequence
  Description of Artificial Sequence: Synthetic peptide
  Seed: GMMMGMFNMLSTVLGVS
GMMMGMYNMISAVLTVS

SEQ ID NO: 184942 - protein, 17 aa, Artificial Sequence
  Description of Artificial Sequence: Synthetic peptide
  Seed: GMMMGMFNMLSTVLGVS
GMMMGMYNMISAVLVVS

SEQ ID NO: 184943 - protein, 17 aa, Artificial Sequence
  Description of Artificial Sequence: Synthetic peptide
  Seed: GMMMGMFNMLSTVLGVS
GMMMGMYNMISGVLAVS

SEQ ID NO: 184944 - protein, 17 aa, Artificial Sequence
  Description of Artificial Sequence: Synthetic peptide
  Seed: GMMMGMFNMLSTVLGVS
GMMMGMYNMISGVLGVS

SEQ ID NO: 184945 - protein, 17 aa, Artificial Sequence
  Description of Artificial Sequence: Synthetic peptide
  Seed: GMMMGMFNMLSTVLGVS
GMMMGMYNMISGVLHVS

SEQ ID NO: 184946 - protein, 17 aa, Artificial Sequence
  Description of Artificial Sequence: Synthetic peptide
  Seed: GMMMGMFNMLSTVLGVS
GMMMGMYNMISGVLIVS

SEQ ID NO: 184947 - protein, 17 aa, Artificial Sequence
  Description of Artificial Sequence: Synthetic peptide
  Seed: GMMMGMFNMLSTVLGVS
GMMMGMYNMISGVLKVS

SEQ ID NO: 184948 - protein, 17 aa, Artificial Sequence
  Description of Artificial Sequence: Synthetic peptide
  Seed: GMMMGMFNMLSTVLGVS
GMMMGMYNMISGVLLVS

SEQ ID NO: 184949 - protein, 17 aa, Artificial Sequence
  Description of Artificial Sequence: Synthetic peptide
  Seed: GMMMGMFNMLSTVLGVS
GMMMGMYNMISGVLMVS

SEQ ID NO: 184950 - protein, 17 aa, Artificial Sequence
  Description of Artificial Sequence: Synthetic peptide
  Seed: GMMMGMFNMLSTVLGVS
GMMMGMYNMISGVLNVS

SEQ ID NO: 184951 - protein, 17 aa, Artificial Sequence
  Description of Artificial Sequence: Synthetic peptide
  Seed: GMMMGMFNMLSTVLGVS
GMMMGMYNMISGVLPVS

SEQ ID NO: 184952 - protein, 17 aa, Artificial Sequence
  Description of Artificial Sequence: Synthetic peptide
  Seed: GMMMGMFNMLSTVLGVS
GMMMGMYNMISGVLRVS

SEQ ID NO: 184953 - protein, 17 aa, Artificial Sequence
  Description of Artificial Sequence: Synthetic peptide
  Seed: GMMMGMFNMLSTVLGVS
GMMMGMYNMISGVLSVS

SEQ ID NO: 184954 - protein, 17 aa, Artificial Sequence
  Description of Artificial Sequence: Synthetic peptide
  Seed: GMMMGMFNMLSTVLGVS
GMMMGMYNMISGVLTVS

SEQ ID NO: 184955 - protein, 17 aa, Artificial Sequence
  Description of Artificial Sequence: Synthetic peptide
  Seed: GMMMGMFNMLSTVLGVS
GMMMGMYNMISGVLVVS

SEQ ID NO: 184956 - protein, 17 aa, Artificial Sequence
  Description of Artificial Sequence: Synthetic peptide
  Seed: GMMMGMFNMLSTVLGVS
GMMMGMYNMISHVLAVS

SEQ ID NO: 184957 - protein, 17 aa, Artificial Sequence
  Description of Artificial Sequence: Synthetic peptide
  Seed: GMMMGMFNMLSTVLGVS
GMMMGMYNMISHVLNVS

SEQ ID NO: 184958 - protein, 17 aa, Artificial Sequence
  Description of Artificial Sequence: Synthetic peptide
  Seed: GMMMGMFNMLSTVLGVS
GMMMGMYNMISIVLHVS

SEQ ID NO: 184959 - protein, 17 aa, Artificial Sequence
  Description of Artificial Sequence: Synthetic peptide
  Seed: GMMMGMFNMLSTVLGVS
GMMMGMYNMISIVLNVS

SEQ ID NO: 184960 - protein, 17 aa, Artificial Sequence
  Description of Artificial Sequence: Synthetic peptide
  Seed: GMMMGMFNMLSTVLGVS
GMMMGMYNMISKVLAVS

SEQ ID NO: 184961 - protein, 17 aa, Artificial Sequence
  Description of Artificial Sequence: Synthetic peptide
  Seed: GMMMGMFNMLSTVLGVS
GMMMGMYNMISKVLGVS

SEQ ID NO: 184962 - protein, 17 aa, Artificial Sequence
  Description of Artificial Sequence: Synthetic peptide
  Seed: GMMMGMFNMLSTVLGVS
GMMMGMYNMISKVLHVS

SEQ ID NO: 184963 - protein, 17 aa, Artificial Sequence
  Description of Artificial Sequence: Synthetic peptide
  Seed: GMMMGMFNMLSTVLGVS
GMMMGMYNMISKVLKVS

SEQ ID NO: 184964 - protein, 17 aa, Artificial Sequence
  Description of Artificial Sequence: Synthetic peptide
  Seed: GMMMGMFNMLSTVLGVS
GMMMGMYNMISKVLSVS

SEQ ID NO: 184965 - protein, 17 aa, Artificial Sequence
  Description of Artificial Sequence: Synthetic peptide
  Seed: GMMMGMFNMLSTVLGVS
GMMMGMYNMISNVLAVS

SEQ ID NO: 184966 - protein, 17 aa, Artificial Sequence
  Description of Artificial Sequence: Synthetic peptide
  Seed: GMMMGMFNMLSTVLGVS
GMMMGMYNMISNVLDVS

SEQ ID NO: 184967 - protein, 17 aa, Artificial Sequence
  Description of Artificial Sequence: Synthetic peptide
  Seed: GMMMGMFNMLSTVLGVS
GMMMGMYNMISNVLEVS

SEQ ID NO: 184968 - protein, 17 aa, Artificial Sequence
  Description of Artificial Sequence: Synthetic peptide
  Seed: GMMMGMFNMLSTVLGVS
GMMMGMYNMISNVLGVS

SEQ ID NO: 184969 - protein, 17 aa, Artificial Sequence
  Description of Artificial Sequence: Synthetic peptide
  Seed: GMMMGMFNMLSTVLGVS
GMMMGMYNMISNVLHVS

SEQ ID NO: 184970 - protein, 17 aa, Artificial Sequence
  Description of Artificial Sequence: Synthetic peptide
  Seed: GMMMGMFNMLSTVLGVS
GMMMGMYNMISNVLIVS

SEQ ID NO: 184971 - protein, 17 aa, Artificial Sequence
  Description of Artificial Sequence: Synthetic peptide
  Seed: GMMMGMFNMLSTVLGVS
GMMMGMYNMISNVLLVS

SEQ ID NO: 184972 - protein, 17 aa, Artificial Sequence
  Description of Artificial Sequence: Synthetic peptide
  Seed: GMMMGMFNMLSTVLGVS
GMMMGMYNMISNVLNVS

SEQ ID NO: 184973 - protein, 17 aa, Artificial Sequence
  Description of Artificial Sequence: Synthetic peptide
  Seed: GMMMGMFNMLSTVLGVS
GMMMGMYNMISNVLRVS

SEQ ID NO: 184974 - protein, 17 aa, Artificial Sequence
  Description of Artificial Sequence: Synthetic peptide
  Seed: GMMMGMFNMLSTVLGVS
GMMMGMYNMISNVLSVS

SEQ ID NO: 184975 - protein, 17 aa, Artificial Sequence
  Description of Artificial Sequence: Synthetic peptide
  Seed: GMMMGMFNMLSTVLGVS
GMMMGMYNMISNVLTVS

SEQ ID NO: 184976 - protein, 17 aa, Artificial Sequence
  Description of Artificial Sequence: Synthetic peptide
  Seed: GMMMGMFNMLSTVLGVS
GMMMGMYNMISNVLVVS

SEQ ID NO: 184977 - protein, 17 aa, Artificial Sequence
  Description of Artificial Sequence: Synthetic peptide
  Seed: GMMMGMFNMLSTVLGVS
GMMMGMYNMISPVLAVS

SEQ ID NO: 184978 - protein, 17 aa, Artificial Sequence
  Description of Artificial Sequence: Synthetic peptide
  Seed: GMMMGMFNMLSTVLGVS
GMMMGMYNMISPVLDVS

SEQ ID NO: 184979 - protein, 17 aa, Artificial Sequence
  Description of Artificial Sequence: Synthetic peptide
  Seed: GMMMGMFNMLSTVLGVS
GMMMGMYNMISPVLEVS

SEQ ID NO: 184980 - protein, 17 aa, Artificial Sequence
  Description of Artificial Sequence: Synthetic peptide
  Seed: GMMMGMFNMLSTVLGVS
GMMMGMYNMISPVLFVS

SEQ ID NO: 184981 - protein, 17 aa, Artificial Sequence
  Description of Artificial Sequence: Synthetic peptide
  Seed: GMMMGMFNMLSTVLGVS
GMMMGMYNMISPVLGVS

SEQ ID NO: 184982 - protein, 17 aa, Artificial Sequence
  Description of Artificial Sequence: Synthetic peptide
  Seed: GMMMGMFNMLSTVLGVS
GMMMGMYNMISPVLHVS

SEQ ID NO: 184983 - protein, 17 aa, Artificial Sequence
  Description of Artificial Sequence: Synthetic peptide
  Seed: GMMMGMFNMLSTVLGVS
GMMMGMYNMISPVLIVS

SEQ ID NO: 184984 - protein, 17 aa, Artificial Sequence
  Description of Artificial Sequence: Synthetic peptide
  Seed: GMMMGMFNMLSTVLGVS
GMMMGMYNMISPVLKVS

SEQ ID NO: 184985 - protein, 17 aa, Artificial Sequence
  Description of Artificial Sequence: Synthetic peptide
  Seed: GMMMGMFNMLSTVLGVS
GMMMGMYNMISPVLLVS

SEQ ID NO: 184986 - protein, 17 aa, Artificial Sequence
  Description of Artificial Sequence: Synthetic peptide
  Seed: GMMMGMFNMLSTVLGVS
GMMMGMYNMISPVLMVS

SEQ ID NO: 184987 - protein, 17 aa, Artificial Sequence
  Description of Artificial Sequence: Synthetic peptide
  Seed: GMMMGMFNMLSTVLGVS
GMMMGMYNMISPVLNVS

SEQ ID NO: 184988 - protein, 17 aa, Artificial Sequence
  Description of Artificial Sequence: Synthetic peptide
  Seed: GMMMGMFNMLSTVLGVS
GMMMGMYNMISPVLPVS

SEQ ID NO: 184989 - protein, 17 aa, Artificial Sequence
  Description of Artificial Sequence: Synthetic peptide
  Seed: GMMMGMFNMLSTVLGVS
GMMMGMYNMISPVLQVS

SEQ ID NO: 184990 - protein, 17 aa, Artificial Sequence
  Description of Artificial Sequence: Synthetic peptide
  Seed: GMMMGMFNMLSTVLGVS
GMMMGMYNMISPVLRVS

SEQ ID NO: 184991 - protein, 17 aa, Artificial Sequence
  Description of Artificial Sequence: Synthetic peptide
  Seed: GMMMGMFNMLSTVLGVS
GMMMGMYNMISPVLSVS

SEQ ID NO: 184992 - protein, 17 aa, Artificial Sequence
  Description of Artificial Sequence: Synthetic peptide
  Seed: GMMMGMFNMLSTVLGVS
GMMMGMYNMISPVLTVS

SEQ ID NO: 184993 - protein, 17 aa, Artificial Sequence
  Description of Artificial Sequence: Synthetic peptide
  Seed: GMMMGMFNMLSTVLGVS
GMMMGMYNMISPVLVVS

SEQ ID NO: 184994 - protein, 17 aa, Artificial Sequence
  Description of Artificial Sequence: Synthetic peptide
  Seed: GMMMGMFNMLSTVLGVS
GMMMGMYNMISPVLYVS

SEQ ID NO: 184995 - protein, 17 aa, Artificial Sequence
  Description of Artificial Sequence: Synthetic peptide
  Seed: GMMMGMFNMLSTVLGVS
GMMMGMYNMISQVLNVS

SEQ ID NO: 184996 - protein, 17 aa, Artificial Sequence
  Description of Artificial Sequence: Synthetic peptide
  Seed: GMMMGMFNMLSTVLGVS
GMMMGMYNMISRVLHVS

SEQ ID NO: 184997 - protein, 17 aa, Artificial Sequence
  Description of Artificial Sequence: Synthetic peptide
  Seed: GMMMGMFNMLSTVLGVS
GMMMGMYNMISRVLKVS

SEQ ID NO: 184998 - protein, 17 aa, Artificial Sequence
  Description of Artificial Sequence: Synthetic peptide
  Seed: GMMMGMFNMLSTVLGVS
GMMMGMYNMISRVLSVS

SEQ ID NO: 184999 - protein, 17 aa, Artificial Sequence
  Description of Artificial Sequence: Synthetic peptide
  Seed: GMMMGMFNMLSTVLGVS
GMMMGMYNMISSVLAVS

SEQ ID NO: 185000 - protein, 17 aa, Artificial Sequence
  Description of Artificial Sequence: Synthetic peptide
  Seed: GMMMGMFNMLSTVLGVS
GMMMGMYNMISSVLDVS

SEQ ID NO: 185001 - protein, 17 aa, Artificial Sequence
  Description of Artificial Sequence: Synthetic peptide
  Seed: GMMMGMFNMLSTVLGVS
GMMMGMYNMISSVLGVS

SEQ ID NO: 185002 - protein, 17 aa, Artificial Sequence
  Description of Artificial Sequence: Synthetic peptide
  Seed: GMMMGMFNMLSTVLGVS
GMMMGMYNMISSVLHVS

SEQ ID NO: 185003 - protein, 17 aa, Artificial Sequence
  Description of Artificial Sequence: Synthetic peptide
  Seed: GMMMGMFNMLSTVLGVS
GMMMGMYNMISSVLIVS

SEQ ID NO: 185004 - protein, 17 aa, Artificial Sequence
  Description of Artificial Sequence: Synthetic peptide
  Seed: GMMMGMFNMLSTVLGVS
GMMMGMYNMISSVLKVS

SEQ ID NO: 185005 - protein, 17 aa, Artificial Sequence
  Description of Artificial Sequence: Synthetic peptide
  Seed: GMMMGMFNMLSTVLGVS
GMMMGMYNMISSVLLVS

SEQ ID NO: 185006 - protein, 17 aa, Artificial Sequence
  Description of Artificial Sequence: Synthetic peptide
  Seed: GMMMGMFNMLSTVLGVS
GMMMGMYNMISSVLMVS

SEQ ID NO: 185007 - protein, 17 aa, Artificial Sequence
  Description of Artificial Sequence: Synthetic peptide
  Seed: GMMMGMFNMLSTVLGVS
GMMMGMYNMISSVLNVS

SEQ ID NO: 185008 - protein, 17 aa, Artificial Sequence
  Description of Artificial Sequence: Synthetic peptide
  Seed: GMMMGMFNMLSTVLGVS
GMMMGMYNMISSVLRVS

SEQ ID NO: 185009 - protein, 17 aa, Artificial Sequence
  Description of Artificial Sequence: Synthetic peptide
  Seed: GMMMGMFNMLSTVLGVS
GMMMGMYNMISSVLSVS

SEQ ID NO: 185010 - protein, 17 aa, Artificial Sequence
  Description of Artificial Sequence: Synthetic peptide
  Seed: GMMMGMFNMLSTVLGVS
GMMMGMYNMISSVLTVS

SEQ ID NO: 185011 - protein, 17 aa, Artificial Sequence
  Description of Artificial Sequence: Synthetic peptide
  Seed: GMMMGMFNMLSTVLGVS
GMMMGMYNMISSVLVVS

SEQ ID NO: 185012 - protein, 17 aa, Artificial Sequence
  Description of Artificial Sequence: Synthetic peptide
  Seed: GMMMGMFNMLSTVLGVS
GMMMGMYNMISTVLAVS

SEQ ID NO: 185013 - protein, 17 aa, Artificial Sequence
  Description of Artificial Sequence: Synthetic peptide
  Seed: GMMMGMFNMLSTVLGVS
GMMMGMYNMISTVLDVS

SEQ ID NO: 185014 - protein, 17 aa, Artificial Sequence
  Description of Artificial Sequence: Synthetic peptide
  Seed: GMMMGMFNMLSTVLGVS
GMMMGMYNMISTVLGVS

SEQ ID NO: 185015 - protein, 17 aa, Artificial Sequence
  Description of Artificial Sequence: Synthetic peptide
  Seed: GMMMGMFNMLSTVLGVS
GMMMGMYNMISTVLHVS

SEQ ID NO: 185016 - protein, 17 aa, Artificial Sequence
  Description of Artificial Sequence: Synthetic peptide
  Seed: GMMMGMFNMLSTVLGVS
GMMMGMYNMISTVLKVS

SEQ ID NO: 185017 - protein, 17 aa, Artificial Sequence
  Description of Artificial Sequence: Synthetic peptide
  Seed: GMMMGMFNMLSTVLGVS
GMMMGMYNMISTVLNVS

SEQ ID NO: 185018 - protein, 17 aa, Artificial Sequence
  Description of Artificial Sequence: Synthetic peptide
  Seed: GMMMGMFNMLSTVLGVS
GMMMGMYNMISTVLRVS

SEQ ID NO: 185019 - protein, 17 aa, Artificial Sequence
  Description of Artificial Sequence: Synthetic peptide
  Seed: GMMMGMFNMLSTVLGVS
GMMMGMYNMISTVLSVS

SEQ ID NO: 185020 - protein, 17 aa, Artificial Sequence
  Description of Artificial Sequence: Synthetic peptide
  Seed: GMMMGMFNMLSTVLGVS
GMMMGMYNMISTVLTVS

SEQ ID NO: 185021 - protein, 17 aa, Artificial Sequence
  Description of Artificial Sequence: Synthetic peptide
  Seed: GMMMGMFNMLSTVLGVS
GMMMGMYNMISTVLVVS

SEQ ID NO: 185022 - protein, 17 aa, Artificial Sequence
  Description of Artificial Sequence: Synthetic peptide
  Seed: GMMMGMFNMLSTVLGVS
GMMMGMYNMISVVLHVS

SEQ ID NO: 185023 - protein, 17 aa, Artificial Sequence
  Description of Artificial Sequence: Synthetic peptide
  Seed: GMMMGMFNMLSTVLGVS
GMMMGMYNMISVVLNVS

SEQ ID NO: 185024 - protein, 17 aa, Artificial Sequence
  Description of Artificial Sequence: Synthetic peptide
  Seed: GMMMGMFNMLSTVLGVS
GMMMGMYNMKSAVLAVS

SEQ ID NO: 185025 - protein, 17 aa, Artificial Sequence
  Description of Artificial Sequence: Synthetic peptide
  Seed: GMMMGMFNMLSTVLGVS
GMMMGMYNMKSAVLCVS

SEQ ID NO: 185026 - protein, 17 aa, Artificial Sequence
  Description of Artificial Sequence: Synthetic peptide
  Seed: GMMMGMFNMLSTVLGVS
GMMMGMYNMKSAVLGVS

SEQ ID NO: 185027 - protein, 17 aa, Artificial Sequence
  Description of Artificial Sequence: Synthetic peptide
  Seed: GMMMGMFNMLSTVLGVS
GMMMGMYNMKSAVLHVS

SEQ ID NO: 185028 - protein, 17 aa, Artificial Sequence
  Description of Artificial Sequence: Synthetic peptide
  Seed: GMMMGMFNMLSTVLGVS
GMMMGMYNMKSAVLIVS

SEQ ID NO: 185029 - protein, 17 aa, Artificial Sequence
  Description of Artificial Sequence: Synthetic peptide
  Seed: GMMMGMFNMLSTVLGVS
GMMMGMYNMKSAVLLVS

SEQ ID NO: 185030 - protein, 17 aa, Artificial Sequence
  Description of Artificial Sequence: Synthetic peptide
  Seed: GMMMGMFNMLSTVLGVS
GMMMGMYNMKSAVLMVS

SEQ ID NO: 185031 - protein, 17 aa, Artificial Sequence
  Description of Artificial Sequence: Synthetic peptide
  Seed: GMMMGMFNMLSTVLGVS
GMMMGMYNMKSAVLNVS

SEQ ID NO: 185032 - protein, 17 aa, Artificial Sequence
  Description of Artificial Sequence: Synthetic peptide
  Seed: GMMMGMFNMLSTVLGVS
GMMMGMYNMKSAVLQVS

SEQ ID NO: 185033 - protein, 17 aa, Artificial Sequence
  Description of Artificial Sequence: Synthetic peptide
  Seed: GMMMGMFNMLSTVLGVS
GMMMGMYNMKSAVLSVS

SEQ ID NO: 185034 - protein, 17 aa, Artificial Sequence
  Description of Artificial Sequence: Synthetic peptide
  Seed: GMMMGMFNMLSTVLGVS
GMMMGMYNMKSAVLVVS

SEQ ID NO: 185035 - protein, 17 aa, Artificial Sequence
  Description of Artificial Sequence: Synthetic peptide
  Seed: GMMMGMFNMLSTVLGVS
GMMMGMYNMKSGVLAVS

SEQ ID NO: 185036 - protein, 17 aa, Artificial Sequence
  Description of Artificial Sequence: Synthetic peptide
  Seed: GMMMGMFNMLSTVLGVS
GMMMGMYNMKSGVLFVS

SEQ ID NO: 185037 - protein, 17 aa, Artificial Sequence
  Description of Artificial Sequence: Synthetic peptide
  Seed: GMMMGMFNMLSTVLGVS
GMMMGMYNMKSGVLIVS

SEQ ID NO: 185038 - protein, 17 aa, Artificial Sequence
  Description of Artificial Sequence: Synthetic peptide
  Seed: GMMMGMFNMLSTVLGVS
GMMMGMYNMKSGVLLVS

SEQ ID NO: 185039 - protein, 17 aa, Artificial Sequence
  Description of Artificial Sequence: Synthetic peptide
  Seed: GMMMGMFNMLSTVLGVS
GMMMGMYNMKSGVLMVS

SEQ ID NO: 185040 - protein, 17 aa, Artificial Sequence
  Description of Artificial Sequence: Synthetic peptide
  Seed: GMMMGMFNMLSTVLGVS
GMMMGMYNMKSGVLSVS

SEQ ID NO: 185041 - protein, 17 aa, Artificial Sequence
  Description of Artificial Sequence: Synthetic peptide
  Seed: GMMMGMFNMLSTVLGVS
GMMMGMYNMKSGVLTVS

SEQ ID NO: 185042 - protein, 17 aa, Artificial Sequence
  Description of Artificial Sequence: Synthetic peptide
  Seed: GMMMGMFNMLSTVLGVS
GMMMGMYNMKSGVLVVS

SEQ ID NO: 185043 - protein, 17 aa, Artificial Sequence
  Description of Artificial Sequence: Synthetic peptide
  Seed: GMMMGMFNMLSTVLGVS
GMMMGMYNMKSPVLAVS

SEQ ID NO: 185044 - protein, 17 aa, Artificial Sequence
  Description of Artificial Sequence: Synthetic peptide
  Seed: GMMMGMFNMLSTVLGVS
GMMMGMYNMKSPVLIVS

SEQ ID NO: 185045 - protein, 17 aa, Artificial Sequence
  Description of Artificial Sequence: Synthetic peptide
  Seed: GMMMGMFNMLSTVLGVS
GMMMGMYNMKSPVLLVS

SEQ ID NO: 185046 - protein, 17 aa, Artificial Sequence
  Description of Artificial Sequence: Synthetic peptide
  Seed: GMMMGMFNMLSTVLGVS
GMMMGMYNMKSPVLMVS

SEQ ID NO: 185047 - protein, 17 aa, Artificial Sequence
  Description of Artificial Sequence: Synthetic peptide
  Seed: GMMMGMFNMLSTVLGVS
GMMMGMYNMKSPVLVVS

SEQ ID NO: 185048 - protein, 17 aa, Artificial Sequence
  Description of Artificial Sequence: Synthetic peptide
  Seed: GMMMGMFNMLSTVLGVS
GMMMGMYNMKSSVLAVS

SEQ ID NO: 185049 - protein, 17 aa, Artificial Sequence
  Description of Artificial Sequence: Synthetic peptide
  Seed: GMMMGMFNMLSTVLGVS
GMMMGMYNMKSSVLIVS

SEQ ID NO: 185050 - protein, 17 aa, Artificial Sequence
  Description of Artificial Sequence: Synthetic peptide
  Seed: GMMMGMFNMLSTVLGVS
GMMMGMYNMKSSVLLVS

SEQ ID NO: 185051 - protein, 17 aa, Artificial Sequence
  Description of Artificial Sequence: Synthetic peptide
  Seed: GMMMGMFNMLSTVLGVS
GMMMGMYNMKSSVLMVS

SEQ ID NO: 185052 - protein, 17 aa, Artificial Sequence
  Description of Artificial Sequence: Synthetic peptide
  Seed: GMMMGMFNMLSTVLGVS
GMMMGMYNMKSSVLVVS

SEQ ID NO: 185053 - protein, 17 aa, Artificial Sequence
  Description of Artificial Sequence: Synthetic peptide
  Seed: GMMMGMFNMLSTVLGVS
GMMMGMYNMLSAVLAVS

SEQ ID NO: 185054 - protein, 17 aa, Artificial Sequence
  Description of Artificial Sequence: Synthetic peptide
  Seed: GMMMGMFNMLSTVLGVS
GMMMGMYNMLSAVLDVS

SEQ ID NO: 185055 - protein, 17 aa, Artificial Sequence
  Description of Artificial Sequence: Synthetic peptide
  Seed: GMMMGMFNMLSTVLGVS
GMMMGMYNMLSAVLEVS

SEQ ID NO: 185056 - protein, 17 aa, Artificial Sequence
  Description of Artificial Sequence: Synthetic peptide
  Seed: GMMMGMFNMLSTVLGVS
GMMMGMYNMLSAVLGVS

SEQ ID NO: 185057 - protein, 17 aa, Artificial Sequence
  Description of Artificial Sequence: Synthetic peptide
  Seed: GMMMGMFNMLSTVLGVS
GMMMGMYNMLSAVLHVS

SEQ ID NO: 185058 - protein, 17 aa, Artificial Sequence
  Description of Artificial Sequence: Synthetic peptide
  Seed: GMMMGMFNMLSTVLGVS
GMMMGMYNMLSAVLIVS

SEQ ID NO: 185059 - protein, 17 aa, Artificial Sequence
  Description of Artificial Sequence: Synthetic peptide
  Seed: GMMMGMFNMLSTVLGVS
GMMMGMYNMLSAVLKVS

SEQ ID NO: 185060 - protein, 17 aa, Artificial Sequence
  Description of Artificial Sequence: Synthetic peptide
  Seed: GMMMGMFNMLSTVLGVS
GMMMGMYNMLSAVLLVS

SEQ ID NO: 185061 - protein, 17 aa, Artificial Sequence
  Description of Artificial Sequence: Synthetic peptide
  Seed: GMMMGMFNMLSTVLGVS
GMMMGMYNMLSAVLMVS

SEQ ID NO: 185062 - protein, 17 aa, Artificial Sequence
  Description of Artificial Sequence: Synthetic peptide
  Seed: GMMMGMFNMLSTVLGVS
GMMMGMYNMLSAVLNVS

SEQ ID NO: 185063 - protein, 17 aa, Artificial Sequence
  Description of Artificial Sequence: Synthetic peptide
  Seed: GMMMGMFNMLSTVLGVS
GMMMGMYNMLSAVLPVS

SEQ ID NO: 185064 - protein, 17 aa, Artificial Sequence
  Description of Artificial Sequence: Synthetic peptide
  Seed: GMMMGMFNMLSTVLGVS
GMMMGMYNMLSAVLQVS

SEQ ID NO: 185065 - protein, 17 aa, Artificial Sequence
  Description of Artificial Sequence: Synthetic peptide
  Seed: GMMMGMFNMLSTVLGVS
GMMMGMYNMLSAVLRVS

SEQ ID NO: 185066 - protein, 17 aa, Artificial Sequence
  Description of Artificial Sequence: Synthetic peptide
  Seed: GMMMGMFNMLSTVLGVS
GMMMGMYNMLSAVLSVS

SEQ ID NO: 185067 - protein, 17 aa, Artificial Sequence
  Description of Artificial Sequence: Synthetic peptide
  Seed: GMMMGMFNMLSTVLGVS
GMMMGMYNMLSAVLTVS

SEQ ID NO: 185068 - protein, 17 aa, Artificial Sequence
  Description of Artificial Sequence: Synthetic peptide
  Seed: GMMMGMFNMLSTVLGVS
GMMMGMYNMLSAVLVVS

SEQ ID NO: 185069 - protein, 17 aa, Artificial Sequence
  Description of Artificial Sequence: Synthetic peptide
  Seed: GMMMGMFNMLSTVLGVS
GMMMGMYNMLSAVLYVS

SEQ ID NO: 185070 - protein, 17 aa, Artificial Sequence
  Description of Artificial Sequence: Synthetic peptide
  Seed: GMMMGMFNMLSTVLGVS
GMMMGMYNMLSEVLNVS

SEQ ID NO: 185071 - protein, 17 aa, Artificial Sequence
  Description of Artificial Sequence: Synthetic peptide
  Seed: GMMMGMFNMLSTVLGVS
GMMMGMYNMLSGVLAVS

SEQ ID NO: 185072 - protein, 17 aa, Artificial Sequence
  Description of Artificial Sequence: Synthetic peptide
  Seed: GMMMGMFNMLSTVLGVS
GMMMGMYNMLSGVLDVS

SEQ ID NO: 185073 - protein, 17 aa, Artificial Sequence
  Description of Artificial Sequence: Synthetic peptide
  Seed: GMMMGMFNMLSTVLGVS
GMMMGMYNMLSGVLEVS

SEQ ID NO: 185074 - protein, 17 aa, Artificial Sequence
  Description of Artificial Sequence: Synthetic peptide
  Seed: GMMMGMFNMLSTVLGVS
GMMMGMYNMLSGVLGVS

SEQ ID NO: 185075 - protein, 17 aa, Artificial Sequence
  Description of Artificial Sequence: Synthetic peptide
  Seed: GMMMGMFNMLSTVLGVS
GMMMGMYNMLSGVLHVS

SEQ ID NO: 185076 - protein, 17 aa, Artificial Sequence
  Description of Artificial Sequence: Synthetic peptide
  Seed: GMMMGMFNMLSTVLGVS
GMMMGMYNMLSGVLIVS

SEQ ID NO: 185077 - protein, 17 aa, Artificial Sequence
  Description of Artificial Sequence: Synthetic peptide
  Seed: GMMMGMFNMLSTVLGVS
GMMMGMYNMLSGVLKVS

SEQ ID NO: 185078 - protein, 17 aa, Artificial Sequence
  Description of Artificial Sequence: Synthetic peptide
  Seed: GMMMGMFNMLSTVLGVS
GMMMGMYNMLSGVLLVS

SEQ ID NO: 185079 - protein, 17 aa, Artificial Sequence
  Description of Artificial Sequence: Synthetic peptide
  Seed: GMMMGMFNMLSTVLGVS
GMMMGMYNMLSGVLMVS

SEQ ID NO: 185080 - protein, 17 aa, Artificial Sequence
  Description of Artificial Sequence: Synthetic peptide
  Seed: GMMMGMFNMLSTVLGVS
GMMMGMYNMLSGVLNVS

SEQ ID NO: 185081 - protein, 17 aa, Artificial Sequence
  Description of Artificial Sequence: Synthetic peptide
  Seed: GMMMGMFNMLSTVLGVS
GMMMGMYNMLSGVLPVS

SEQ ID NO: 185082 - protein, 17 aa, Artificial Sequence
  Description of Artificial Sequence: Synthetic peptide
  Seed: GMMMGMFNMLSTVLGVS
GMMMGMYNMLSGVLQVS

SEQ ID NO: 185083 - protein, 17 aa, Artificial Sequence
  Description of Artificial Sequence: Synthetic peptide
  Seed: GMMMGMFNMLSTVLGVS
GMMMGMYNMLSGVLRVS

SEQ ID NO: 185084 - protein, 17 aa, Artificial Sequence
  Description of Artificial Sequence: Synthetic peptide
  Seed: GMMMGMFNMLSTVLGVS
GMMMGMYNMLSGVLSVS

SEQ ID NO: 185085 - protein, 17 aa, Artificial Sequence
  Description of Artificial Sequence: Synthetic peptide
  Seed: GMMMGMFNMLSTVLGVS
GMMMGMYNMLSGVLTVS

SEQ ID NO: 185086 - protein, 17 aa, Artificial Sequence
  Description of Artificial Sequence: Synthetic peptide
  Seed: GMMMGMFNMLSTVLGVS
GMMMGMYNMLSGVLVVS

SEQ ID NO: 185087 - protein, 17 aa, Artificial Sequence
  Description of Artificial Sequence: Synthetic peptide
  Seed: GMMMGMFNMLSTVLGVS
GMMMGMYNMLSGVLYVS

SEQ ID NO: 185088 - protein, 17 aa, Artificial Sequence
  Description of Artificial Sequence: Synthetic peptide
  Seed: GMMMGMFNMLSTVLGVS
GMMMGMYNMLSHVLAVS

SEQ ID NO: 185089 - protein, 17 aa, Artificial Sequence
  Description of Artificial Sequence: Synthetic peptide
  Seed: GMMMGMFNMLSTVLGVS
GMMMGMYNMLSHVLHVS

SEQ ID NO: 185090 - protein, 17 aa, Artificial Sequence
  Description of Artificial Sequence: Synthetic peptide
  Seed: GMMMGMFNMLSTVLGVS
GMMMGMYNMLSHVLMVS

SEQ ID NO: 185091 - protein, 17 aa, Artificial Sequence
  Description of Artificial Sequence: Synthetic peptide
  Seed: GMMMGMFNMLSTVLGVS
GMMMGMYNMLSHVLNVS

SEQ ID NO: 185092 - protein, 17 aa, Artificial Sequence
  Description of Artificial Sequence: Synthetic peptide
  Seed: GMMMGMFNMLSTVLGVS
GMMMGMYNMLSHVLRVS

SEQ ID NO: 185093 - protein, 17 aa, Artificial Sequence
  Description of Artificial Sequence: Synthetic peptide
  Seed: GMMMGMFNMLSTVLGVS
GMMMGMYNMLSHVLSVS

SEQ ID NO: 185094 - protein, 17 aa, Artificial Sequence
  Description of Artificial Sequence: Synthetic peptide
  Seed: GMMMGMFNMLSTVLGVS
GMMMGMYNMLSHVLTVS

SEQ ID NO: 185095 - protein, 17 aa, Artificial Sequence
  Description of Artificial Sequence: Synthetic peptide
  Seed: GMMMGMFNMLSTVLGVS
GMMMGMYNMLSHVLVVS

SEQ ID NO: 185096 - protein, 17 aa, Artificial Sequence
  Description of Artificial Sequence: Synthetic peptide
  Seed: GMMMGMFNMLSTVLGVS
GMMMGMYNMLSIVLHVS

SEQ ID NO: 185097 - protein, 17 aa, Artificial Sequence
  Description of Artificial Sequence: Synthetic peptide
  Seed: GMMMGMFNMLSTVLGVS
GMMMGMYNMLSIVLNVS

SEQ ID NO: 185098 - protein, 17 aa, Artificial Sequence
  Description of Artificial Sequence: Synthetic peptide
  Seed: GMMMGMFNMLSTVLGVS
GMMMGMYNMLSKVLAVS

SEQ ID NO: 185099 - protein, 17 aa, Artificial Sequence
  Description of Artificial Sequence: Synthetic peptide
  Seed: GMMMGMFNMLSTVLGVS
GMMMGMYNMLSKVLHVS

SEQ ID NO: 185100 - protein, 17 aa, Artificial Sequence
  Description of Artificial Sequence: Synthetic peptide
  Seed: GMMMGMFNMLSTVLGVS
GMMMGMYNMLSKVLKVS

SEQ ID NO: 185101 - protein, 17 aa, Artificial Sequence
  Description of Artificial Sequence: Synthetic peptide
  Seed: GMMMGMFNMLSTVLGVS
GMMMGMYNMLSKVLSVS

SEQ ID NO: 185102 - protein, 17 aa, Artificial Sequence
  Description of Artificial Sequence: Synthetic peptide
  Seed: GMMMGMFNMLSTVLGVS
GMMMGMYNMLSKVLTVS

SEQ ID NO: 185103 - protein, 17 aa, Artificial Sequence
  Description of Artificial Sequence: Synthetic peptide
  Seed: GMMMGMFNMLSTVLGVS
GMMMGMYNMLSKVLVVS

SEQ ID NO: 185104 - protein, 17 aa, Artificial Sequence
  Description of Artificial Sequence: Synthetic peptide
  Seed: GMMMGMFNMLSTVLGVS
GMMMGMYNMLSNVLAVS

SEQ ID NO: 185105 - protein, 17 aa, Artificial Sequence
  Description of Artificial Sequence: Synthetic peptide
  Seed: GMMMGMFNMLSTVLGVS
GMMMGMYNMLSNVLDVS

SEQ ID NO: 185106 - protein, 17 aa, Artificial Sequence
  Description of Artificial Sequence: Synthetic peptide
  Seed: GMMMGMFNMLSTVLGVS
GMMMGMYNMLSNVLEVS

SEQ ID NO: 185107 - protein, 17 aa, Artificial Sequence
  Description of Artificial Sequence: Synthetic peptide
  Seed: GMMMGMFNMLSTVLGVS
GMMMGMYNMLSNVLGVS

SEQ ID NO: 185108 - protein, 17 aa, Artificial Sequence
  Description of Artificial Sequence: Synthetic peptide
  Seed: GMMMGMFNMLSTVLGVS
GMMMGMYNMLSNVLHVS

SEQ ID NO: 185109 - protein, 17 aa, Artificial Sequence
  Description of Artificial Sequence: Synthetic peptide
  Seed: GMMMGMFNMLSTVLGVS
GMMMGMYNMLSNVLIVS

SEQ ID NO: 185110 - protein, 17 aa, Artificial Sequence
  Description of Artificial Sequence: Synthetic peptide
  Seed: GMMMGMFNMLSTVLGVS
GMMMGMYNMLSNVLKVS

SEQ ID NO: 185111 - protein, 17 aa, Artificial Sequence
  Description of Artificial Sequence: Synthetic peptide
  Seed: GMMMGMFNMLSTVLGVS
GMMMGMYNMLSNVLLVS

SEQ ID NO: 185112 - protein, 17 aa, Artificial Sequence
  Description of Artificial Sequence: Synthetic peptide
  Seed: GMMMGMFNMLSTVLGVS
GMMMGMYNMLSNVLMVS

SEQ ID NO: 185113 - protein, 17 aa, Artificial Sequence
  Description of Artificial Sequence: Synthetic peptide
  Seed: GMMMGMFNMLSTVLGVS
GMMMGMYNMLSNVLNVS

SEQ ID NO: 185114 - protein, 17 aa, Artificial Sequence
  Description of Artificial Sequence: Synthetic peptide
  Seed: GMMMGMFNMLSTVLGVS
GMMMGMYNMLSNVLPVS

SEQ ID NO: 185115 - protein, 17 aa, Artificial Sequence
  Description of Artificial Sequence: Synthetic peptide
  Seed: GMMMGMFNMLSTVLGVS
GMMMGMYNMLSNVLQVS

SEQ ID NO: 185116 - protein, 17 aa, Artificial Sequence
  Description of Artificial Sequence: Synthetic peptide
  Seed: GMMMGMFNMLSTVLGVS
GMMMGMYNMLSNVLRVS

SEQ ID NO: 185117 - protein, 17 aa, Artificial Sequence
  Description of Artificial Sequence: Synthetic peptide
  Seed: GMMMGMFNMLSTVLGVS
GMMMGMYNMLSNVLSVS

SEQ ID NO: 185118 - protein, 17 aa, Artificial Sequence
  Description of Artificial Sequence: Synthetic peptide
  Seed: GMMMGMFNMLSTVLGVS
GMMMGMYNMLSNVLTVS

SEQ ID NO: 185119 - protein, 17 aa, Artificial Sequence
  Description of Artificial Sequence: Synthetic peptide
  Seed: GMMMGMFNMLSTVLGVS
GMMMGMYNMLSNVLVVS

SEQ ID NO: 185120 - protein, 17 aa, Artificial Sequence
  Description of Artificial Sequence: Synthetic peptide
  Seed: GMMMGMFNMLSTVLGVS
GMMMGMYNMLSPVLAVS

SEQ ID NO: 185121 - protein, 17 aa, Artificial Sequence
  Description of Artificial Sequence: Synthetic peptide
  Seed: GMMMGMFNMLSTVLGVS
GMMMGMYNMLSPVLCVS

SEQ ID NO: 185122 - protein, 17 aa, Artificial Sequence
  Description of Artificial Sequence: Synthetic peptide
  Seed: GMMMGMFNMLSTVLGVS
GMMMGMYNMLSPVLDVS

SEQ ID NO: 185123 - protein, 17 aa, Artificial Sequence
  Description of Artificial Sequence: Synthetic peptide
  Seed: GMMMGMFNMLSTVLGVS
GMMMGMYNMLSPVLEVS

SEQ ID NO: 185124 - protein, 17 aa, Artificial Sequence
  Description of Artificial Sequence: Synthetic peptide
  Seed: GMMMGMFNMLSTVLGVS
GMMMGMYNMLSPVLFVS

SEQ ID NO: 185125 - protein, 17 aa, Artificial Sequence
  Description of Artificial Sequence: Synthetic peptide
  Seed: GMMMGMFNMLSTVLGVS
GMMMGMYNMLSPVLGVS

SEQ ID NO: 185126 - protein, 17 aa, Artificial Sequence
  Description of Artificial Sequence: Synthetic peptide
  Seed: GMMMGMFNMLSTVLGVS
GMMMGMYNMLSPVLHVS

SEQ ID NO: 185127 - protein, 17 aa, Artificial Sequence
  Description of Artificial Sequence: Synthetic peptide
  Seed: GMMMGMFNMLSTVLGVS
GMMMGMYNMLSPVLIVS

SEQ ID NO: 185128 - protein, 17 aa, Artificial Sequence
  Description of Artificial Sequence: Synthetic peptide
  Seed: GMMMGMFNMLSTVLGVS
GMMMGMYNMLSPVLKVS

SEQ ID NO: 185129 - protein, 17 aa, Artificial Sequence
  Description of Artificial Sequence: Synthetic peptide
  Seed: GMMMGMFNMLSTVLGVS
GMMMGMYNMLSPVLLVS

SEQ ID NO: 185130 - protein, 17 aa, Artificial Sequence
  Description of Artificial Sequence: Synthetic peptide
  Seed: GMMMGMFNMLSTVLGVS
GMMMGMYNMLSPVLMVS

SEQ ID NO: 185131 - protein, 17 aa, Artificial Sequence
  Description of Artificial Sequence: Synthetic peptide
  Seed: GMMMGMFNMLSTVLGVS
GMMMGMYNMLSPVLNVS

SEQ ID NO: 185132 - protein, 17 aa, Artificial Sequence
  Description of Artificial Sequence: Synthetic peptide
  Seed: GMMMGMFNMLSTVLGVS
GMMMGMYNMLSPVLPVS

SEQ ID NO: 185133 - protein, 17 aa, Artificial Sequence
  Description of Artificial Sequence: Synthetic peptide
  Seed: GMMMGMFNMLSTVLGVS
GMMMGMYNMLSPVLQVS

SEQ ID NO: 185134 - protein, 17 aa, Artificial Sequence
  Description of Artificial Sequence: Synthetic peptide
  Seed: GMMMGMFNMLSTVLGVS
GMMMGMYNMLSPVLRVS

SEQ ID NO: 185135 - protein, 17 aa, Artificial Sequence
  Description of Artificial Sequence: Synthetic peptide
  Seed: GMMMGMFNMLSTVLGVS
GMMMGMYNMLSPVLSVS

SEQ ID NO: 185136 - protein, 17 aa, Artificial Sequence
  Description of Artificial Sequence: Synthetic peptide
  Seed: GMMMGMFNMLSTVLGVS
GMMMGMYNMLSPVLTVS

SEQ ID NO: 185137 - protein, 17 aa, Artificial Sequence
  Description of Artificial Sequence: Synthetic peptide
  Seed: GMMMGMFNMLSTVLGVS
GMMMGMYNMLSPVLVVS

SEQ ID NO: 185138 - protein, 17 aa, Artificial Sequence
  Description of Artificial Sequence: Synthetic peptide
  Seed: GMMMGMFNMLSTVLGVS
GMMMGMYNMLSPVLYVS

SEQ ID NO: 185139 - protein, 17 aa, Artificial Sequence
  Description of Artificial Sequence: Synthetic peptide
  Seed: GMMMGMFNMLSTVLGVS
GMMMGMYNMLSQVLAVS

SEQ ID NO: 185140 - protein, 17 aa, Artificial Sequence
  Description of Artificial Sequence: Synthetic peptide
  Seed: GMMMGMFNMLSTVLGVS
GMMMGMYNMLSQVLNVS

SEQ ID NO: 185141 - protein, 17 aa, Artificial Sequence
  Description of Artificial Sequence: Synthetic peptide
  Seed: GMMMGMFNMLSTVLGVS
GMMMGMYNMLSQVLSVS

SEQ ID NO: 185142 - protein, 17 aa, Artificial Sequence
  Description of Artificial Sequence: Synthetic peptide
  Seed: GMMMGMFNMLSTVLGVS
GMMMGMYNMLSRVLHVS

SEQ ID NO: 185143 - protein, 17 aa, Artificial Sequence
  Description of Artificial Sequence: Synthetic peptide
  Seed: GMMMGMFNMLSTVLGVS
GMMMGMYNMLSRVLKVS

SEQ ID NO: 185144 - protein, 17 aa, Artificial Sequence
  Description of Artificial Sequence: Synthetic peptide
  Seed: GMMMGMFNMLSTVLGVS
GMMMGMYNMLSRVLNVS

SEQ ID NO: 185145 - protein, 17 aa, Artificial Sequence
  Description of Artificial Sequence: Synthetic peptide
  Seed: GMMMGMFNMLSTVLGVS
GMMMGMYNMLSRVLSVS

SEQ ID NO: 185146 - protein, 17 aa, Artificial Sequence
  Description of Artificial Sequence: Synthetic peptide
  Seed: GMMMGMFNMLSTVLGVS
GMMMGMYNMLSRVLVVS

SEQ ID NO: 185147 - protein, 17 aa, Artificial Sequence
  Description of Artificial Sequence: Synthetic peptide
  Seed: GMMMGMFNMLSTVLGVS
GMMMGMYNMLSSVLAVS

SEQ ID NO: 185148 - protein, 17 aa, Artificial Sequence
  Description of Artificial Sequence: Synthetic peptide
  Seed: GMMMGMFNMLSTVLGVS
GMMMGMYNMLSSVLDVS

SEQ ID NO: 185149 - protein, 17 aa, Artificial Sequence
  Description of Artificial Sequence: Synthetic peptide
  Seed: GMMMGMFNMLSTVLGVS
GMMMGMYNMLSSVLEVS

SEQ ID NO: 185150 - protein, 17 aa, Artificial Sequence
  Description of Artificial Sequence: Synthetic peptide
  Seed: GMMMGMFNMLSTVLGVS
GMMMGMYNMLSSVLGVS

SEQ ID NO: 185151 - protein, 17 aa, Artificial Sequence
  Description of Artificial Sequence: Synthetic peptide
  Seed: GMMMGMFNMLSTVLGVS
GMMMGMYNMLSSVLHVS

SEQ ID NO: 185152 - protein, 17 aa, Artificial Sequence
  Description of Artificial Sequence: Synthetic peptide
  Seed: GMMMGMFNMLSTVLGVS
GMMMGMYNMLSSVLIVS

SEQ ID NO: 185153 - protein, 17 aa, Artificial Sequence
  Description of Artificial Sequence: Synthetic peptide
  Seed: GMMMGMFNMLSTVLGVS
GMMMGMYNMLSSVLKVS

SEQ ID NO: 185154 - protein, 17 aa, Artificial Sequence
  Description of Artificial Sequence: Synthetic peptide
  Seed: GMMMGMFNMLSTVLGVS
GMMMGMYNMLSSVLLVS

SEQ ID NO: 185155 - protein, 17 aa, Artificial Sequence
  Description of Artificial Sequence: Synthetic peptide
  Seed: GMMMGMFNMLSTVLGVS
GMMMGMYNMLSSVLMVS

SEQ ID NO: 185156 - protein, 17 aa, Artificial Sequence
  Description of Artificial Sequence: Synthetic peptide
  Seed: GMMMGMFNMLSTVLGVS
GMMMGMYNMLSSVLNVS

SEQ ID NO: 185157 - protein, 17 aa, Artificial Sequence
  Description of Artificial Sequence: Synthetic peptide
  Seed: GMMMGMFNMLSTVLGVS
GMMMGMYNMLSSVLPVS

SEQ ID NO: 185158 - protein, 17 aa, Artificial Sequence
  Description of Artificial Sequence: Synthetic peptide
  Seed: GMMMGMFNMLSTVLGVS
GMMMGMYNMLSSVLQVS

SEQ ID NO: 185159 - protein, 17 aa, Artificial Sequence
  Description of Artificial Sequence: Synthetic peptide
  Seed: GMMMGMFNMLSTVLGVS
GMMMGMYNMLSSVLRVS

SEQ ID NO: 185160 - protein, 17 aa, Artificial Sequence
  Description of Artificial Sequence: Synthetic peptide
  Seed: GMMMGMFNMLSTVLGVS
GMMMGMYNMLSSVLSVS

SEQ ID NO: 185161 - protein, 17 aa, Artificial Sequence
  Description of Artificial Sequence: Synthetic peptide
  Seed: GMMMGMFNMLSTVLGVS
GMMMGMYNMLSSVLTVS

SEQ ID NO: 185162 - protein, 17 aa, Artificial Sequence
  Description of Artificial Sequence: Synthetic peptide
  Seed: GMMMGMFNMLSTVLGVS
GMMMGMYNMLSSVLVVS

SEQ ID NO: 185163 - protein, 17 aa, Artificial Sequence
  Description of Artificial Sequence: Synthetic peptide
  Seed: GMMMGMFNMLSTVLGVS
GMMMGMYNMLSSVLYVS

SEQ ID NO: 185164 - protein, 17 aa, Artificial Sequence
  Description of Artificial Sequence: Synthetic peptide
  Seed: GMMMGMFNMLSTVLGVS
GMMMGMYNMLSTVLAVS

SEQ ID NO: 185165 - protein, 17 aa, Artificial Sequence
  Description of Artificial Sequence: Synthetic peptide
  Seed: GMMMGMFNMLSTVLGVS
GMMMGMYNMLSTVLDVS

SEQ ID NO: 185166 - protein, 17 aa, Artificial Sequence
  Description of Artificial Sequence: Synthetic peptide
  Seed: GMMMGMFNMLSTVLGVS
GMMMGMYNMLSTVLEVS

SEQ ID NO: 185167 - protein, 17 aa, Artificial Sequence
  Description of Artificial Sequence: Synthetic peptide
  Seed: GMMMGMFNMLSTVLGVS
GMMMGMYNMLSTVLGVS

SEQ ID NO: 185168 - protein, 17 aa, Artificial Sequence
  Description of Artificial Sequence: Synthetic peptide
  Seed: GMMMGMFNMLSTVLGVS
GMMMGMYNMLSTVLHVS

SEQ ID NO: 185169 - protein, 17 aa, Artificial Sequence
  Description of Artificial Sequence: Synthetic peptide
  Seed: GMMMGMFNMLSTVLGVS
GMMMGMYNMLSTVLIVS

SEQ ID NO: 185170 - protein, 17 aa, Artificial Sequence
  Description of Artificial Sequence: Synthetic peptide
  Seed: GMMMGMFNMLSTVLGVS
GMMMGMYNMLSTVLKVS

SEQ ID NO: 185171 - protein, 17 aa, Artificial Sequence
  Description of Artificial Sequence: Synthetic peptide
  Seed: GMMMGMFNMLSTVLGVS
GMMMGMYNMLSTVLLVS

SEQ ID NO: 185172 - protein, 17 aa, Artificial Sequence
  Description of Artificial Sequence: Synthetic peptide
  Seed: GMMMGMFNMLSTVLGVS
GMMMGMYNMLSTVLMVS

SEQ ID NO: 185173 - protein, 17 aa, Artificial Sequence
  Description of Artificial Sequence: Synthetic peptide
  Seed: GMMMGMFNMLSTVLGVS
GMMMGMYNMLSTVLNVS

SEQ ID NO: 185174 - protein, 17 aa, Artificial Sequence
  Description of Artificial Sequence: Synthetic peptide
  Seed: GMMMGMFNMLSTVLGVS
GMMMGMYNMLSTVLPVS

SEQ ID NO: 185175 - protein, 17 aa, Artificial Sequence
  Description of Artificial Sequence: Synthetic peptide
  Seed: GMMMGMFNMLSTVLGVS
GMMMGMYNMLSTVLQVS

SEQ ID NO: 185176 - protein, 17 aa, Artificial Sequence
  Description of Artificial Sequence: Synthetic peptide
  Seed: GMMMGMFNMLSTVLGVS
GMMMGMYNMLSTVLRVS

SEQ ID NO: 185177 - protein, 17 aa, Artificial Sequence
  Description of Artificial Sequence: Synthetic peptide
  Seed: GMMMGMFNMLSTVLGVS
GMMMGMYNMLSTVLSVS

SEQ ID NO: 185178 - protein, 17 aa, Artificial Sequence
  Description of Artificial Sequence: Synthetic peptide
  Seed: GMMMGMFNMLSTVLGVS
GMMMGMYNMLSTVLTVS

SEQ ID NO: 185179 - protein, 17 aa, Artificial Sequence
  Description of Artificial Sequence: Synthetic peptide
  Seed: GMMMGMFNMLSTVLGVS
GMMMGMYNMLSTVLVVS

SEQ ID NO: 185180 - protein, 17 aa, Artificial Sequence
  Description of Artificial Sequence: Synthetic peptide
  Seed: GMMMGMFNMLSTVLGVS
GMMMGMYNMLSVVLHVS

SEQ ID NO: 185181 - protein, 17 aa, Artificial Sequence
  Description of Artificial Sequence: Synthetic peptide
  Seed: GMMMGMFNMLSTVLGVS
GMMMGMYNMLSVVLNVS

SEQ ID NO: 185182 - protein, 17 aa, Artificial Sequence
  Description of Artificial Sequence: Synthetic peptide
  Seed: GMMMGMFNMLSTVLGVS
GMMMGMYNMMSAVLAVS

SEQ ID NO: 185183 - protein, 17 aa, Artificial Sequence
  Description of Artificial Sequence: Synthetic peptide
  Seed: GMMMGMFNMLSTVLGVS
GMMMGMYNMMSAVLDVS

SEQ ID NO: 185184 - protein, 17 aa, Artificial Sequence
  Description of Artificial Sequence: Synthetic peptide
  Seed: GMMMGMFNMLSTVLGVS
GMMMGMYNMMSAVLEVS

SEQ ID NO: 185185 - protein, 17 aa, Artificial Sequence
  Description of Artificial Sequence: Synthetic peptide
  Seed: GMMMGMFNMLSTVLGVS
GMMMGMYNMMSAVLGVS

SEQ ID NO: 185186 - protein, 17 aa, Artificial Sequence
  Description of Artificial Sequence: Synthetic peptide
  Seed: GMMMGMFNMLSTVLGVS
GMMMGMYNMMSAVLHVS

SEQ ID NO: 185187 - protein, 17 aa, Artificial Sequence
  Description of Artificial Sequence: Synthetic peptide
  Seed: GMMMGMFNMLSTVLGVS
GMMMGMYNMMSAVLIVS

SEQ ID NO: 185188 - protein, 17 aa, Artificial Sequence
  Description of Artificial Sequence: Synthetic peptide
  Seed: GMMMGMFNMLSTVLGVS
GMMMGMYNMMSAVLKVS

SEQ ID NO: 185189 - protein, 17 aa, Artificial Sequence
  Description of Artificial Sequence: Synthetic peptide
  Seed: GMMMGMFNMLSTVLGVS
GMMMGMYNMMSAVLLVS

SEQ ID NO: 185190 - protein, 17 aa, Artificial Sequence
  Description of Artificial Sequence: Synthetic peptide
  Seed: GMMMGMFNMLSTVLGVS
GMMMGMYNMMSAVLMVS

SEQ ID NO: 185191 - protein, 17 aa, Artificial Sequence
  Description of Artificial Sequence: Synthetic peptide
  Seed: GMMMGMFNMLSTVLGVS
GMMMGMYNMMSAVLNVS

SEQ ID NO: 185192 - protein, 17 aa, Artificial Sequence
  Description of Artificial Sequence: Synthetic peptide
  Seed: GMMMGMFNMLSTVLGVS
GMMMGMYNMMSAVLPVS

SEQ ID NO: 185193 - protein, 17 aa, Artificial Sequence
  Description of Artificial Sequence: Synthetic peptide
  Seed: GMMMGMFNMLSTVLGVS
GMMMGMYNMMSAVLQVS

SEQ ID NO: 185194 - protein, 17 aa, Artificial Sequence
  Description of Artificial Sequence: Synthetic peptide
  Seed: GMMMGMFNMLSTVLGVS
GMMMGMYNMMSAVLRVS

SEQ ID NO: 185195 - protein, 17 aa, Artificial Sequence
  Description of Artificial Sequence: Synthetic peptide
  Seed: GMMMGMFNMLSTVLGVS
GMMMGMYNMMSAVLSVS

SEQ ID NO: 185196 - protein, 17 aa, Artificial Sequence
  Description of Artificial Sequence: Synthetic peptide
  Seed: GMMMGMFNMLSTVLGVS
GMMMGMYNMMSAVLTVS

SEQ ID NO: 185197 - protein, 17 aa, Artificial Sequence
  Description of Artificial Sequence: Synthetic peptide
  Seed: GMMMGMFNMLSTVLGVS
GMMMGMYNMMSAVLVVS

SEQ ID NO: 185198 - protein, 17 aa, Artificial Sequence
  Description of Artificial Sequence: Synthetic peptide
  Seed: GMMMGMFNMLSTVLGVS
GMMMGMYNMMSAVLYVS

SEQ ID NO: 185199 - protein, 17 aa, Artificial Sequence
  Description of Artificial Sequence: Synthetic peptide
  Seed: GMMMGMFNMLSTVLGVS
GMMMGMYNMMSDVLNVS

SEQ ID NO: 185200 - protein, 17 aa, Artificial Sequence
  Description of Artificial Sequence: Synthetic peptide
  Seed: GMMMGMFNMLSTVLGVS
GMMMGMYNMMSEVLAVS

SEQ ID NO: 185201 - protein, 17 aa, Artificial Sequence
  Description of Artificial Sequence: Synthetic peptide
  Seed: GMMMGMFNMLSTVLGVS
GMMMGMYNMMSEVLHVS

SEQ ID NO: 185202 - protein, 17 aa, Artificial Sequence
  Description of Artificial Sequence: Synthetic peptide
  Seed: GMMMGMFNMLSTVLGVS
GMMMGMYNMMSEVLNVS

SEQ ID NO: 185203 - protein, 17 aa, Artificial Sequence
  Description of Artificial Sequence: Synthetic peptide
  Seed: GMMMGMFNMLSTVLGVS
GMMMGMYNMMSEVLSVS

SEQ ID NO: 185204 - protein, 17 aa, Artificial Sequence
  Description of Artificial Sequence: Synthetic peptide
  Seed: GMMMGMFNMLSTVLGVS
GMMMGMYNMMSGVLAVS

SEQ ID NO: 185205 - protein, 17 aa, Artificial Sequence
  Description of Artificial Sequence: Synthetic peptide
  Seed: GMMMGMFNMLSTVLGVS
GMMMGMYNMMSGVLDVS

SEQ ID NO: 185206 - protein, 17 aa, Artificial Sequence
  Description of Artificial Sequence: Synthetic peptide
  Seed: GMMMGMFNMLSTVLGVS
GMMMGMYNMMSGVLEVS

SEQ ID NO: 185207 - protein, 17 aa, Artificial Sequence
  Description of Artificial Sequence: Synthetic peptide
  Seed: GMMMGMFNMLSTVLGVS
GMMMGMYNMMSGVLFVS

SEQ ID NO: 185208 - protein, 17 aa, Artificial Sequence
  Description of Artificial Sequence: Synthetic peptide
  Seed: GMMMGMFNMLSTVLGVS
GMMMGMYNMMSGVLGVS

SEQ ID NO: 185209 - protein, 17 aa, Artificial Sequence
  Description of Artificial Sequence: Synthetic peptide
  Seed: GMMMGMFNMLSTVLGVS
GMMMGMYNMMSGVLHVS

SEQ ID NO: 185210 - protein, 17 aa, Artificial Sequence
  Description of Artificial Sequence: Synthetic peptide
  Seed: GMMMGMFNMLSTVLGVS
GMMMGMYNMMSGVLIVS

SEQ ID NO: 185211 - protein, 17 aa, Artificial Sequence
  Description of Artificial Sequence: Synthetic peptide
  Seed: GMMMGMFNMLSTVLGVS
GMMMGMYNMMSGVLKVS

SEQ ID NO: 185212 - protein, 17 aa, Artificial Sequence
  Description of Artificial Sequence: Synthetic peptide
  Seed: GMMMGMFNMLSTVLGVS
GMMMGMYNMMSGVLLVS

SEQ ID NO: 185213 - protein, 17 aa, Artificial Sequence
  Description of Artificial Sequence: Synthetic peptide
  Seed: GMMMGMFNMLSTVLGVS
GMMMGMYNMMSGVLMVS

SEQ ID NO: 185214 - protein, 17 aa, Artificial Sequence
  Description of Artificial Sequence: Synthetic peptide
  Seed: GMMMGMFNMLSTVLGVS
GMMMGMYNMMSGVLNVS

SEQ ID NO: 185215 - protein, 17 aa, Artificial Sequence
  Description of Artificial Sequence: Synthetic peptide
  Seed: GMMMGMFNMLSTVLGVS
GMMMGMYNMMSGVLPVS

SEQ ID NO: 185216 - protein, 17 aa, Artificial Sequence
  Description of Artificial Sequence: Synthetic peptide
  Seed: GMMMGMFNMLSTVLGVS
GMMMGMYNMMSGVLQVS

SEQ ID NO: 185217 - protein, 17 aa, Artificial Sequence
  Description of Artificial Sequence: Synthetic peptide
  Seed: GMMMGMFNMLSTVLGVS
GMMMGMYNMMSGVLRVS

SEQ ID NO: 185218 - protein, 17 aa, Artificial Sequence
  Description of Artificial Sequence: Synthetic peptide
  Seed: GMMMGMFNMLSTVLGVS
GMMMGMYNMMSGVLSVS

SEQ ID NO: 185219 - protein, 17 aa, Artificial Sequence
  Description of Artificial Sequence: Synthetic peptide
  Seed: GMMMGMFNMLSTVLGVS
GMMMGMYNMMSGVLTVS

SEQ ID NO: 185220 - protein, 17 aa, Artificial Sequence
  Description of Artificial Sequence: Synthetic peptide
  Seed: GMMMGMFNMLSTVLGVS
GMMMGMYNMMSGVLVVS

SEQ ID NO: 185221 - protein, 17 aa, Artificial Sequence
  Description of Artificial Sequence: Synthetic peptide
  Seed: GMMMGMFNMLSTVLGVS
GMMMGMYNMMSGVLYVS

SEQ ID NO: 185222 - protein, 17 aa, Artificial Sequence
  Description of Artificial Sequence: Synthetic peptide
  Seed: GMMMGMFNMLSTVLGVS
GMMMGMYNMMSHVLAVS

SEQ ID NO: 185223 - protein, 17 aa, Artificial Sequence
  Description of Artificial Sequence: Synthetic peptide
  Seed: GMMMGMFNMLSTVLGVS
GMMMGMYNMMSHVLGVS

SEQ ID NO: 185224 - protein, 17 aa, Artificial Sequence
  Description of Artificial Sequence: Synthetic peptide
  Seed: GMMMGMFNMLSTVLGVS
GMMMGMYNMMSHVLHVS

SEQ ID NO: 185225 - protein, 17 aa, Artificial Sequence
  Description of Artificial Sequence: Synthetic peptide
  Seed: GMMMGMFNMLSTVLGVS
GMMMGMYNMMSHVLIVS

SEQ ID NO: 185226 - protein, 17 aa, Artificial Sequence
  Description of Artificial Sequence: Synthetic peptide
  Seed: GMMMGMFNMLSTVLGVS
GMMMGMYNMMSHVLLVS

SEQ ID NO: 185227 - protein, 17 aa, Artificial Sequence
  Description of Artificial Sequence: Synthetic peptide
  Seed: GMMMGMFNMLSTVLGVS
GMMMGMYNMMSHVLMVS

SEQ ID NO: 185228 - protein, 17 aa, Artificial Sequence
  Description of Artificial Sequence: Synthetic peptide
  Seed: GMMMGMFNMLSTVLGVS
GMMMGMYNMMSHVLNVS

SEQ ID NO: 185229 - protein, 17 aa, Artificial Sequence
  Description of Artificial Sequence: Synthetic peptide
  Seed: GMMMGMFNMLSTVLGVS
GMMMGMYNMMSHVLRVS

SEQ ID NO: 185230 - protein, 17 aa, Artificial Sequence
  Description of Artificial Sequence: Synthetic peptide
  Seed: GMMMGMFNMLSTVLGVS
GMMMGMYNMMSHVLSVS

SEQ ID NO: 185231 - protein, 17 aa, Artificial Sequence
  Description of Artificial Sequence: Synthetic peptide
  Seed: GMMMGMFNMLSTVLGVS
GMMMGMYNMMSHVLTVS

SEQ ID NO: 185232 - protein, 17 aa, Artificial Sequence
  Description of Artificial Sequence: Synthetic peptide
  Seed: GMMMGMFNMLSTVLGVS
GMMMGMYNMMSHVLVVS

SEQ ID NO: 185233 - protein, 17 aa, Artificial Sequence
  Description of Artificial Sequence: Synthetic peptide
  Seed: GMMMGMFNMLSTVLGVS
GMMMGMYNMMSIVLHVS

SEQ ID NO: 185234 - protein, 17 aa, Artificial Sequence
  Description of Artificial Sequence: Synthetic peptide
  Seed: GMMMGMFNMLSTVLGVS
GMMMGMYNMMSIVLKVS

SEQ ID NO: 185235 - protein, 17 aa, Artificial Sequence
  Description of Artificial Sequence: Synthetic peptide
  Seed: GMMMGMFNMLSTVLGVS
GMMMGMYNMMSIVLNVS

SEQ ID NO: 185236 - protein, 17 aa, Artificial Sequence
  Description of Artificial Sequence: Synthetic peptide
  Seed: GMMMGMFNMLSTVLGVS
GMMMGMYNMMSIVLSVS

SEQ ID NO: 185237 - protein, 17 aa, Artificial Sequence
  Description of Artificial Sequence: Synthetic peptide
  Seed: GMMMGMFNMLSTVLGVS
GMMMGMYNMMSKVLAVS

SEQ ID NO: 185238 - protein, 17 aa, Artificial Sequence
  Description of Artificial Sequence: Synthetic peptide
  Seed: GMMMGMFNMLSTVLGVS
GMMMGMYNMMSKVLGVS

SEQ ID NO: 185239 - protein, 17 aa, Artificial Sequence
  Description of Artificial Sequence: Synthetic peptide
  Seed: GMMMGMFNMLSTVLGVS
GMMMGMYNMMSKVLHVS

SEQ ID NO: 185240 - protein, 17 aa, Artificial Sequence
  Description of Artificial Sequence: Synthetic peptide
  Seed: GMMMGMFNMLSTVLGVS
GMMMGMYNMMSKVLIVS

SEQ ID NO: 185241 - protein, 17 aa, Artificial Sequence
  Description of Artificial Sequence: Synthetic peptide
  Seed: GMMMGMFNMLSTVLGVS
GMMMGMYNMMSKVLKVS

SEQ ID NO: 185242 - protein, 17 aa, Artificial Sequence
  Description of Artificial Sequence: Synthetic peptide
  Seed: GMMMGMFNMLSTVLGVS
GMMMGMYNMMSKVLLVS

SEQ ID NO: 185243 - protein, 17 aa, Artificial Sequence
  Description of Artificial Sequence: Synthetic peptide
  Seed: GMMMGMFNMLSTVLGVS
GMMMGMYNMMSKVLMVS

SEQ ID NO: 185244 - protein, 17 aa, Artificial Sequence
  Description of Artificial Sequence: Synthetic peptide
  Seed: GMMMGMFNMLSTVLGVS
GMMMGMYNMMSKVLNVS

SEQ ID NO: 185245 - protein, 17 aa, Artificial Sequence
  Description of Artificial Sequence: Synthetic peptide
  Seed: GMMMGMFNMLSTVLGVS
GMMMGMYNMMSKVLSVS

SEQ ID NO: 185246 - protein, 17 aa, Artificial Sequence
  Description of Artificial Sequence: Synthetic peptide
  Seed: GMMMGMFNMLSTVLGVS
GMMMGMYNMMSKVLTVS

SEQ ID NO: 185247 - protein, 17 aa, Artificial Sequence
  Description of Artificial Sequence: Synthetic peptide
  Seed: GMMMGMFNMLSTVLGVS
GMMMGMYNMMSKVLVVS

SEQ ID NO: 185248 - protein, 17 aa, Artificial Sequence
  Description of Artificial Sequence: Synthetic peptide
  Seed: GMMMGMFNMLSTVLGVS
GMMMGMYNMMSLVLHVS

SEQ ID NO: 185249 - protein, 17 aa, Artificial Sequence
  Description of Artificial Sequence: Synthetic peptide
  Seed: GMMMGMFNMLSTVLGVS
GMMMGMYNMMSLVLNVS

SEQ ID NO: 185250 - protein, 17 aa, Artificial Sequence
  Description of Artificial Sequence: Synthetic peptide
  Seed: GMMMGMFNMLSTVLGVS
GMMMGMYNMMSMVLHVS

SEQ ID NO: 185251 - protein, 17 aa, Artificial Sequence
  Description of Artificial Sequence: Synthetic peptide
  Seed: GMMMGMFNMLSTVLGVS
GMMMGMYNMMSMVLNVS

SEQ ID NO: 185252 - protein, 17 aa, Artificial Sequence
  Description of Artificial Sequence: Synthetic peptide
  Seed: GMMMGMFNMLSTVLGVS
GMMMGMYNMMSNVLAVS

SEQ ID NO: 185253 - protein, 17 aa, Artificial Sequence
  Description of Artificial Sequence: Synthetic peptide
  Seed: GMMMGMFNMLSTVLGVS
GMMMGMYNMMSNVLDVS

SEQ ID NO: 185254 - protein, 17 aa, Artificial Sequence
  Description of Artificial Sequence: Synthetic peptide
  Seed: GMMMGMFNMLSTVLGVS
GMMMGMYNMMSNVLEVS

SEQ ID NO: 185255 - protein, 17 aa, Artificial Sequence
  Description of Artificial Sequence: Synthetic peptide
  Seed: GMMMGMFNMLSTVLGVS
GMMMGMYNMMSNVLGVS

SEQ ID NO: 185256 - protein, 17 aa, Artificial Sequence
  Description of Artificial Sequence: Synthetic peptide
  Seed: GMMMGMFNMLSTVLGVS
GMMMGMYNMMSNVLHVS

SEQ ID NO: 185257 - protein, 17 aa, Artificial Sequence
  Description of Artificial Sequence: Synthetic peptide
  Seed: GMMMGMFNMLSTVLGVS
GMMMGMYNMMSNVLIVS

SEQ ID NO: 185258 - protein, 17 aa, Artificial Sequence
  Description of Artificial Sequence: Synthetic peptide
  Seed: GMMMGMFNMLSTVLGVS
GMMMGMYNMMSNVLKVS

SEQ ID NO: 185259 - protein, 17 aa, Artificial Sequence
  Description of Artificial Sequence: Synthetic peptide
  Seed: GMMMGMFNMLSTVLGVS
GMMMGMYNMMSNVLLVS

SEQ ID NO: 185260 - protein, 17 aa, Artificial Sequence
  Description of Artificial Sequence: Synthetic peptide
  Seed: GMMMGMFNMLSTVLGVS
GMMMGMYNMMSNVLMVS

SEQ ID NO: 185261 - protein, 17 aa, Artificial Sequence
  Description of Artificial Sequence: Synthetic peptide
  Seed: GMMMGMFNMLSTVLGVS
GMMMGMYNMMSNVLNVS

SEQ ID NO: 185262 - protein, 17 aa, Artificial Sequence
  Description of Artificial Sequence: Synthetic peptide
  Seed: GMMMGMFNMLSTVLGVS
GMMMGMYNMMSNVLPVS

SEQ ID NO: 185263 - protein, 17 aa, Artificial Sequence
  Description of Artificial Sequence: Synthetic peptide
  Seed: GMMMGMFNMLSTVLGVS
GMMMGMYNMMSNVLQVS

SEQ ID NO: 185264 - protein, 17 aa, Artificial Sequence
  Description of Artificial Sequence: Synthetic peptide
  Seed: GMMMGMFNMLSTVLGVS
GMMMGMYNMMSNVLRVS

SEQ ID NO: 185265 - protein, 17 aa, Artificial Sequence
  Description of Artificial Sequence: Synthetic peptide
  Seed: GMMMGMFNMLSTVLGVS
GMMMGMYNMMSNVLSVS

SEQ ID NO: 185266 - protein, 17 aa, Artificial Sequence
  Description of Artificial Sequence: Synthetic peptide
  Seed: GMMMGMFNMLSTVLGVS
GMMMGMYNMMSNVLTVS

SEQ ID NO: 185267 - protein, 17 aa, Artificial Sequence
  Description of Artificial Sequence: Synthetic peptide
  Seed: GMMMGMFNMLSTVLGVS
GMMMGMYNMMSNVLVVS

SEQ ID NO: 185268 - protein, 17 aa, Artificial Sequence
  Description of Artificial Sequence: Synthetic peptide
  Seed: GMMMGMFNMLSTVLGVS
GMMMGMYNMMSNVLYVS

SEQ ID NO: 185269 - protein, 17 aa, Artificial Sequence
  Description of Artificial Sequence: Synthetic peptide
  Seed: GMMMGMFNMLSTVLGVS
GMMMGMYNMMSPVLAVS

SEQ ID NO: 185270 - protein, 17 aa, Artificial Sequence
  Description of Artificial Sequence: Synthetic peptide
  Seed: GMMMGMFNMLSTVLGVS
GMMMGMYNMMSPVLCVS

SEQ ID NO: 185271 - protein, 17 aa, Artificial Sequence
  Description of Artificial Sequence: Synthetic peptide
  Seed: GMMMGMFNMLSTVLGVS
GMMMGMYNMMSPVLDVS

SEQ ID NO: 185272 - protein, 17 aa, Artificial Sequence
  Description of Artificial Sequence: Synthetic peptide
  Seed: GMMMGMFNMLSTVLGVS
GMMMGMYNMMSPVLEVS

SEQ ID NO: 185273 - protein, 17 aa, Artificial Sequence
  Description of Artificial Sequence: Synthetic peptide
  Seed: GMMMGMFNMLSTVLGVS
GMMMGMYNMMSPVLFVS

SEQ ID NO: 185274 - protein, 17 aa, Artificial Sequence
  Description of Artificial Sequence: Synthetic peptide
  Seed: GMMMGMFNMLSTVLGVS
GMMMGMYNMMSPVLGVS

SEQ ID NO: 185275 - protein, 17 aa, Artificial Sequence
  Description of Artificial Sequence: Synthetic peptide
  Seed: GMMMGMFNMLSTVLGVS
GMMMGMYNMMSPVLHVS

SEQ ID NO: 185276 - protein, 17 aa, Artificial Sequence
  Description of Artificial Sequence: Synthetic peptide
  Seed: GMMMGMFNMLSTVLGVS
GMMMGMYNMMSPVLIVS

SEQ ID NO: 185277 - protein, 17 aa, Artificial Sequence
  Description of Artificial Sequence: Synthetic peptide
  Seed: GMMMGMFNMLSTVLGVS
GMMMGMYNMMSPVLKVS

SEQ ID NO: 185278 - protein, 17 aa, Artificial Sequence
  Description of Artificial Sequence: Synthetic peptide
  Seed: GMMMGMFNMLSTVLGVS
GMMMGMYNMMSPVLLVS

SEQ ID NO: 185279 - protein, 17 aa, Artificial Sequence
  Description of Artificial Sequence: Synthetic peptide
  Seed: GMMMGMFNMLSTVLGVS
GMMMGMYNMMSPVLMVS

SEQ ID NO: 185280 - protein, 17 aa, Artificial Sequence
  Description of Artificial Sequence: Synthetic peptide
  Seed: GMMMGMFNMLSTVLGVS
GMMMGMYNMMSPVLNVS

SEQ ID NO: 185281 - protein, 17 aa, Artificial Sequence
  Description of Artificial Sequence: Synthetic peptide
  Seed: GMMMGMFNMLSTVLGVS
GMMMGMYNMMSPVLPVS

SEQ ID NO: 185282 - protein, 17 aa, Artificial Sequence
  Description of Artificial Sequence: Synthetic peptide
  Seed: GMMMGMFNMLSTVLGVS
GMMMGMYNMMSPVLQVS

SEQ ID NO: 185283 - protein, 17 aa, Artificial Sequence
  Description of Artificial Sequence: Synthetic peptide
  Seed: GMMMGMFNMLSTVLGVS
GMMMGMYNMMSPVLRVS

SEQ ID NO: 185284 - protein, 17 aa, Artificial Sequence
  Description of Artificial Sequence: Synthetic peptide
  Seed: GMMMGMFNMLSTVLGVS
GMMMGMYNMMSPVLSVS

SEQ ID NO: 185285 - protein, 17 aa, Artificial Sequence
  Description of Artificial Sequence: Synthetic peptide
  Seed: GMMMGMFNMLSTVLGVS
GMMMGMYNMMSPVLTVS

SEQ ID NO: 185286 - protein, 17 aa, Artificial Sequence
  Description of Artificial Sequence: Synthetic peptide
  Seed: GMMMGMFNMLSTVLGVS
GMMMGMYNMMSPVLVVS

SEQ ID NO: 185287 - protein, 17 aa, Artificial Sequence
  Description of Artificial Sequence: Synthetic peptide
  Seed: GMMMGMFNMLSTVLGVS
GMMMGMYNMMSPVLYVS

SEQ ID NO: 185288 - protein, 17 aa, Artificial Sequence
  Description of Artificial Sequence: Synthetic peptide
  Seed: GMMMGMFNMLSTVLGVS
GMMMGMYNMMSQVLAVS

SEQ ID NO: 185289 - protein, 17 aa, Artificial Sequence
  Description of Artificial Sequence: Synthetic peptide
  Seed: GMMMGMFNMLSTVLGVS
GMMMGMYNMMSQVLHVS

SEQ ID NO: 185290 - protein, 17 aa, Artificial Sequence
  Description of Artificial Sequence: Synthetic peptide
  Seed: GMMMGMFNMLSTVLGVS
GMMMGMYNMMSQVLNVS

SEQ ID NO: 185291 - protein, 17 aa, Artificial Sequence
  Description of Artificial Sequence: Synthetic peptide
  Seed: GMMMGMFNMLSTVLGVS
GMMMGMYNMMSQVLRVS

SEQ ID NO: 185292 - protein, 17 aa, Artificial Sequence
  Description of Artificial Sequence: Synthetic peptide
  Seed: GMMMGMFNMLSTVLGVS
GMMMGMYNMMSQVLSVS

SEQ ID NO: 185293 - protein, 17 aa, Artificial Sequence
  Description of Artificial Sequence: Synthetic peptide
  Seed: GMMMGMFNMLSTVLGVS
GMMMGMYNMMSQVLTVS

SEQ ID NO: 185294 - protein, 17 aa, Artificial Sequence
  Description of Artificial Sequence: Synthetic peptide
  Seed: GMMMGMFNMLSTVLGVS
GMMMGMYNMMSRVLAVS

SEQ ID NO: 185295 - protein, 17 aa, Artificial Sequence
  Description of Artificial Sequence: Synthetic peptide
  Seed: GMMMGMFNMLSTVLGVS
GMMMGMYNMMSRVLHVS

SEQ ID NO: 185296 - protein, 17 aa, Artificial Sequence
  Description of Artificial Sequence: Synthetic peptide
  Seed: GMMMGMFNMLSTVLGVS
GMMMGMYNMMSRVLKVS

SEQ ID NO: 185297 - protein, 17 aa, Artificial Sequence
  Description of Artificial Sequence: Synthetic peptide
  Seed: GMMMGMFNMLSTVLGVS
GMMMGMYNMMSRVLLVS

SEQ ID NO: 185298 - protein, 17 aa, Artificial Sequence
  Description of Artificial Sequence: Synthetic peptide
  Seed: GMMMGMFNMLSTVLGVS
GMMMGMYNMMSRVLMVS

SEQ ID NO: 185299 - protein, 17 aa, Artificial Sequence
  Description of Artificial Sequence: Synthetic peptide
  Seed: GMMMGMFNMLSTVLGVS
GMMMGMYNMMSRVLNVS

SEQ ID NO: 185300 - protein, 17 aa, Artificial Sequence
  Description of Artificial Sequence: Synthetic peptide
  Seed: GMMMGMFNMLSTVLGVS
GMMMGMYNMMSRVLPVS

SEQ ID NO: 185301 - protein, 17 aa, Artificial Sequence
  Description of Artificial Sequence: Synthetic peptide
  Seed: GMMMGMFNMLSTVLGVS
GMMMGMYNMMSRVLRVS

SEQ ID NO: 185302 - protein, 17 aa, Artificial Sequence
  Description of Artificial Sequence: Synthetic peptide
  Seed: GMMMGMFNMLSTVLGVS
GMMMGMYNMMSRVLSVS

SEQ ID NO: 185303 - protein, 17 aa, Artificial Sequence
  Description of Artificial Sequence: Synthetic peptide
  Seed: GMMMGMFNMLSTVLGVS
GMMMGMYNMMSRVLTVS

SEQ ID NO: 185304 - protein, 17 aa, Artificial Sequence
  Description of Artificial Sequence: Synthetic peptide
  Seed: GMMMGMFNMLSTVLGVS
GMMMGMYNMMSRVLVVS

SEQ ID NO: 185305 - protein, 17 aa, Artificial Sequence
  Description of Artificial Sequence: Synthetic peptide
  Seed: GMMMGMFNMLSTVLGVS
GMMMGMYNMMSSVLAVS

SEQ ID NO: 185306 - protein, 17 aa, Artificial Sequence
  Description of Artificial Sequence: Synthetic peptide
  Seed: GMMMGMFNMLSTVLGVS
GMMMGMYNMMSSVLDVS

SEQ ID NO: 185307 - protein, 17 aa, Artificial Sequence
  Description of Artificial Sequence: Synthetic peptide
  Seed: GMMMGMFNMLSTVLGVS
GMMMGMYNMMSSVLEVS

SEQ ID NO: 185308 - protein, 17 aa, Artificial Sequence
  Description of Artificial Sequence: Synthetic peptide
  Seed: GMMMGMFNMLSTVLGVS
GMMMGMYNMMSSVLGVS

SEQ ID NO: 185309 - protein, 17 aa, Artificial Sequence
  Description of Artificial Sequence: Synthetic peptide
  Seed: GMMMGMFNMLSTVLGVS
GMMMGMYNMMSSVLHVS

SEQ ID NO: 185310 - protein, 17 aa, Artificial Sequence
  Description of Artificial Sequence: Synthetic peptide
  Seed: GMMMGMFNMLSTVLGVS
GMMMGMYNMMSSVLIVS

SEQ ID NO: 185311 - protein, 17 aa, Artificial Sequence
  Description of Artificial Sequence: Synthetic peptide
  Seed: GMMMGMFNMLSTVLGVS
GMMMGMYNMMSSVLKVS

SEQ ID NO: 185312 - protein, 17 aa, Artificial Sequence
  Description of Artificial Sequence: Synthetic peptide
  Seed: GMMMGMFNMLSTVLGVS
GMMMGMYNMMSSVLLVS

SEQ ID NO: 185313 - protein, 17 aa, Artificial Sequence
  Description of Artificial Sequence: Synthetic peptide
  Seed: GMMMGMFNMLSTVLGVS
GMMMGMYNMMSSVLMVS

SEQ ID NO: 185314 - protein, 17 aa, Artificial Sequence
  Description of Artificial Sequence: Synthetic peptide
  Seed: GMMMGMFNMLSTVLGVS
GMMMGMYNMMSSVLNVS

SEQ ID NO: 185315 - protein, 17 aa, Artificial Sequence
  Description of Artificial Sequence: Synthetic peptide
  Seed: GMMMGMFNMLSTVLGVS
GMMMGMYNMMSSVLPVS

SEQ ID NO: 185316 - protein, 17 aa, Artificial Sequence
  Description of Artificial Sequence: Synthetic peptide
  Seed: GMMMGMFNMLSTVLGVS
GMMMGMYNMMSSVLQVS

SEQ ID NO: 185317 - protein, 17 aa, Artificial Sequence
  Description of Artificial Sequence: Synthetic peptide
  Seed: GMMMGMFNMLSTVLGVS
GMMMGMYNMMSSVLRVS

SEQ ID NO: 185318 - protein, 17 aa, Artificial Sequence
  Description of Artificial Sequence: Synthetic peptide
  Seed: GMMMGMFNMLSTVLGVS
GMMMGMYNMMSSVLSVS

SEQ ID NO: 185319 - protein, 17 aa, Artificial Sequence
  Description of Artificial Sequence: Synthetic peptide
  Seed: GMMMGMFNMLSTVLGVS
GMMMGMYNMMSSVLTVS

SEQ ID NO: 185320 - protein, 17 aa, Artificial Sequence
  Description of Artificial Sequence: Synthetic peptide
  Seed: GMMMGMFNMLSTVLGVS
GMMMGMYNMMSSVLVVS

SEQ ID NO: 185321 - protein, 17 aa, Artificial Sequence
  Description of Artificial Sequence: Synthetic peptide
  Seed: GMMMGMFNMLSTVLGVS
GMMMGMYNMMSSVLYVS

SEQ ID NO: 185322 - protein, 17 aa, Artificial Sequence
  Description of Artificial Sequence: Synthetic peptide
  Seed: GMMMGMFNMLSTVLGVS
GMMMGMYNMMSTVLAVS

SEQ ID NO: 185323 - protein, 17 aa, Artificial Sequence
  Description of Artificial Sequence: Synthetic peptide
  Seed: GMMMGMFNMLSTVLGVS
GMMMGMYNMMSTVLDVS

SEQ ID NO: 185324 - protein, 17 aa, Artificial Sequence
  Description of Artificial Sequence: Synthetic peptide
  Seed: GMMMGMFNMLSTVLGVS
GMMMGMYNMMSTVLEVS

SEQ ID NO: 185325 - protein, 17 aa, Artificial Sequence
  Description of Artificial Sequence: Synthetic peptide
  Seed: GMMMGMFNMLSTVLGVS
GMMMGMYNMMSTVLGVS

SEQ ID NO: 185326 - protein, 17 aa, Artificial Sequence
  Description of Artificial Sequence: Synthetic peptide
  Seed: GMMMGMFNMLSTVLGVS
GMMMGMYNMMSTVLHVS

SEQ ID NO: 185327 - protein, 17 aa, Artificial Sequence
  Description of Artificial Sequence: Synthetic peptide
  Seed: GMMMGMFNMLSTVLGVS
GMMMGMYNMMSTVLIVS

SEQ ID NO: 185328 - protein, 17 aa, Artificial Sequence
  Description of Artificial Sequence: Synthetic peptide
  Seed: GMMMGMFNMLSTVLGVS
GMMMGMYNMMSTVLKVS

SEQ ID NO: 185329 - protein, 17 aa, Artificial Sequence
  Description of Artificial Sequence: Synthetic peptide
  Seed: GMMMGMFNMLSTVLGVS
GMMMGMYNMMSTVLLVS

SEQ ID NO: 185330 - protein, 17 aa, Artificial Sequence
  Description of Artificial Sequence: Synthetic peptide
  Seed: GMMMGMFNMLSTVLGVS
GMMMGMYNMMSTVLMVS

SEQ ID NO: 185331 - protein, 17 aa, Artificial Sequence
  Description of Artificial Sequence: Synthetic peptide
  Seed: GMMMGMFNMLSTVLGVS
GMMMGMYNMMSTVLNVS

SEQ ID NO: 185332 - protein, 17 aa, Artificial Sequence
  Description of Artificial Sequence: Synthetic peptide
  Seed: GMMMGMFNMLSTVLGVS
GMMMGMYNMMSTVLPVS

SEQ ID NO: 185333 - protein, 17 aa, Artificial Sequence
  Description of Artificial Sequence: Synthetic peptide
  Seed: GMMMGMFNMLSTVLGVS
GMMMGMYNMMSTVLQVS

SEQ ID NO: 185334 - protein, 17 aa, Artificial Sequence
  Description of Artificial Sequence: Synthetic peptide
  Seed: GMMMGMFNMLSTVLGVS
GMMMGMYNMMSTVLRVS

SEQ ID NO: 185335 - protein, 17 aa, Artificial Sequence
  Description of Artificial Sequence: Synthetic peptide
  Seed: GMMMGMFNMLSTVLGVS
GMMMGMYNMMSTVLSVS

SEQ ID NO: 185336 - protein, 17 aa, Artificial Sequence
  Description of Artificial Sequence: Synthetic peptide
  Seed: GMMMGMFNMLSTVLGVS
GMMMGMYNMMSTVLTVS

SEQ ID NO: 185337 - protein, 17 aa, Artificial Sequence
  Description of Artificial Sequence: Synthetic peptide
  Seed: GMMMGMFNMLSTVLGVS
GMMMGMYNMMSTVLVVS

SEQ ID NO: 185338 - protein, 17 aa, Artificial Sequence
  Description of Artificial Sequence: Synthetic peptide
  Seed: GMMMGMFNMLSTVLGVS
GMMMGMYNMMSVVLAVS

SEQ ID NO: 185339 - protein, 17 aa, Artificial Sequence
  Description of Artificial Sequence: Synthetic peptide
  Seed: GMMMGMFNMLSTVLGVS
GMMMGMYNMMSVVLHVS

SEQ ID NO: 185340 - protein, 17 aa, Artificial Sequence
  Description of Artificial Sequence: Synthetic peptide
  Seed: GMMMGMFNMLSTVLGVS
GMMMGMYNMMSVVLKVS

SEQ ID NO: 185341 - protein, 17 aa, Artificial Sequence
  Description of Artificial Sequence: Synthetic peptide
  Seed: GMMMGMFNMLSTVLGVS
GMMMGMYNMMSVVLNVS

SEQ ID NO: 185342 - protein, 17 aa, Artificial Sequence
  Description of Artificial Sequence: Synthetic peptide
  Seed: GMMMGMFNMLSTVLGVS
GMMMGMYNMMSVVLRVS

SEQ ID NO: 185343 - protein, 17 aa, Artificial Sequence
  Description of Artificial Sequence: Synthetic peptide
  Seed: GMMMGMFNMLSTVLGVS
GMMMGMYNMMSVVLSVS

SEQ ID NO: 185344 - protein, 17 aa, Artificial Sequence
  Description of Artificial Sequence: Synthetic peptide
  Seed: GMMMGMFNMLSTVLGVS
GMMMGMYNMMSVVLTVS

SEQ ID NO: 185345 - protein, 17 aa, Artificial Sequence
  Description of Artificial Sequence: Synthetic peptide
  Seed: GMMMGMFNMLSTVLGVS
GMMMGMYNMNSAVLAVS

SEQ ID NO: 185346 - protein, 17 aa, Artificial Sequence
  Description of Artificial Sequence: Synthetic peptide
  Seed: GMMMGMFNMLSTVLGVS
GMMMGMYNMNSAVLFVS

SEQ ID NO: 185347 - protein, 17 aa, Artificial Sequence
  Description of Artificial Sequence: Synthetic peptide
  Seed: GMMMGMFNMLSTVLGVS
GMMMGMYNMNSAVLGVS

SEQ ID NO: 185348 - protein, 17 aa, Artificial Sequence
  Description of Artificial Sequence: Synthetic peptide
  Seed: GMMMGMFNMLSTVLGVS
GMMMGMYNMNSAVLHVS

SEQ ID NO: 185349 - protein, 17 aa, Artificial Sequence
  Description of Artificial Sequence: Synthetic peptide
  Seed: GMMMGMFNMLSTVLGVS
GMMMGMYNMNSAVLIVS

SEQ ID NO: 185350 - protein, 17 aa, Artificial Sequence
  Description of Artificial Sequence: Synthetic peptide
  Seed: GMMMGMFNMLSTVLGVS
GMMMGMYNMNSAVLLVS

SEQ ID NO: 185351 - protein, 17 aa, Artificial Sequence
  Description of Artificial Sequence: Synthetic peptide
  Seed: GMMMGMFNMLSTVLGVS
GMMMGMYNMNSAVLMVS

SEQ ID NO: 185352 - protein, 17 aa, Artificial Sequence
  Description of Artificial Sequence: Synthetic peptide
  Seed: GMMMGMFNMLSTVLGVS
GMMMGMYNMNSAVLNVS

SEQ ID NO: 185353 - protein, 17 aa, Artificial Sequence
  Description of Artificial Sequence: Synthetic peptide
  Seed: GMMMGMFNMLSTVLGVS
GMMMGMYNMNSAVLRVS

SEQ ID NO: 185354 - protein, 17 aa, Artificial Sequence
  Description of Artificial Sequence: Synthetic peptide
  Seed: GMMMGMFNMLSTVLGVS
GMMMGMYNMNSAVLSVS

SEQ ID NO: 185355 - protein, 17 aa, Artificial Sequence
  Description of Artificial Sequence: Synthetic peptide
  Seed: GMMMGMFNMLSTVLGVS
GMMMGMYNMNSAVLTVS

SEQ ID NO: 185356 - protein, 17 aa, Artificial Sequence
  Description of Artificial Sequence: Synthetic peptide
  Seed: GMMMGMFNMLSTVLGVS
GMMMGMYNMNSAVLVVS

SEQ ID NO: 185357 - protein, 17 aa, Artificial Sequence
  Description of Artificial Sequence: Synthetic peptide
  Seed: GMMMGMFNMLSTVLGVS
GMMMGMYNMNSAVLYVS

SEQ ID NO: 185358 - protein, 17 aa, Artificial Sequence
  Description of Artificial Sequence: Synthetic peptide
  Seed: GMMMGMFNMLSTVLGVS
GMMMGMYNMNSGVLAVS

SEQ ID NO: 185359 - protein, 17 aa, Artificial Sequence
  Description of Artificial Sequence: Synthetic peptide
  Seed: GMMMGMFNMLSTVLGVS
GMMMGMYNMNSGVLIVS

SEQ ID NO: 185360 - protein, 17 aa, Artificial Sequence
  Description of Artificial Sequence: Synthetic peptide
  Seed: GMMMGMFNMLSTVLGVS
GMMMGMYNMNSGVLLVS

SEQ ID NO: 185361 - protein, 17 aa, Artificial Sequence
  Description of Artificial Sequence: Synthetic peptide
  Seed: GMMMGMFNMLSTVLGVS
GMMMGMYNMNSGVLMVS

SEQ ID NO: 185362 - protein, 17 aa, Artificial Sequence
  Description of Artificial Sequence: Synthetic peptide
  Seed: GMMMGMFNMLSTVLGVS
GMMMGMYNMNSGVLSVS

SEQ ID NO: 185363 - protein, 17 aa, Artificial Sequence
  Description of Artificial Sequence: Synthetic peptide
  Seed: GMMMGMFNMLSTVLGVS
GMMMGMYNMNSGVLTVS

SEQ ID NO: 185364 - protein, 17 aa, Artificial Sequence
  Description of Artificial Sequence: Synthetic peptide
  Seed: GMMMGMFNMLSTVLGVS
GMMMGMYNMNSGVLVVS

SEQ ID NO: 185365 - protein, 17 aa, Artificial Sequence
  Description of Artificial Sequence: Synthetic peptide
  Seed: GMMMGMFNMLSTVLGVS
GMMMGMYNMNSNVLAVS

SEQ ID NO: 185366 - protein, 17 aa, Artificial Sequence
  Description of Artificial Sequence: Synthetic peptide
  Seed: GMMMGMFNMLSTVLGVS
GMMMGMYNMNSNVLFVS

SEQ ID NO: 185367 - protein, 17 aa, Artificial Sequence
  Description of Artificial Sequence: Synthetic peptide
  Seed: GMMMGMFNMLSTVLGVS
GMMMGMYNMNSNVLIVS

SEQ ID NO: 185368 - protein, 17 aa, Artificial Sequence
  Description of Artificial Sequence: Synthetic peptide
  Seed: GMMMGMFNMLSTVLGVS
GMMMGMYNMNSNVLLVS

SEQ ID NO: 185369 - protein, 17 aa, Artificial Sequence
  Description of Artificial Sequence: Synthetic peptide
  Seed: GMMMGMFNMLSTVLGVS
GMMMGMYNMNSNVLVVS

SEQ ID NO: 185370 - protein, 17 aa, Artificial Sequence
  Description of Artificial Sequence: Synthetic peptide
  Seed: GMMMGMFNMLSTVLGVS
GMMMGMYNMNSNVLYVS

SEQ ID NO: 185371 - protein, 17 aa, Artificial Sequence
  Description of Artificial Sequence: Synthetic peptide
  Seed: GMMMGMFNMLSTVLGVS
GMMMGMYNMNSPVLAVS

SEQ ID NO: 185372 - protein, 17 aa, Artificial Sequence
  Description of Artificial Sequence: Synthetic peptide
  Seed: GMMMGMFNMLSTVLGVS
GMMMGMYNMNSPVLIVS

SEQ ID NO: 185373 - protein, 17 aa, Artificial Sequence
  Description of Artificial Sequence: Synthetic peptide
  Seed: GMMMGMFNMLSTVLGVS
GMMMGMYNMNSPVLLVS

SEQ ID NO: 185374 - protein, 17 aa, Artificial Sequence
  Description of Artificial Sequence: Synthetic peptide
  Seed: GMMMGMFNMLSTVLGVS
GMMMGMYNMNSPVLMVS

SEQ ID NO: 185375 - protein, 17 aa, Artificial Sequence
  Description of Artificial Sequence: Synthetic peptide
  Seed: GMMMGMFNMLSTVLGVS
GMMMGMYNMNSPVLSVS

SEQ ID NO: 185376 - protein, 17 aa, Artificial Sequence
  Description of Artificial Sequence: Synthetic peptide
  Seed: GMMMGMFNMLSTVLGVS
GMMMGMYNMNSPVLVVS

SEQ ID NO: 185377 - protein, 17 aa, Artificial Sequence
  Description of Artificial Sequence: Synthetic peptide
  Seed: GMMMGMFNMLSTVLGVS
GMMMGMYNMNSPVLYVS

SEQ ID NO: 185378 - protein, 17 aa, Artificial Sequence
  Description of Artificial Sequence: Synthetic peptide
  Seed: GMMMGMFNMLSTVLGVS
GMMMGMYNMNSSVLAVS

SEQ ID NO: 185379 - protein, 17 aa, Artificial Sequence
  Description of Artificial Sequence: Synthetic peptide
  Seed: GMMMGMFNMLSTVLGVS
GMMMGMYNMNSSVLIVS

SEQ ID NO: 185380 - protein, 17 aa, Artificial Sequence
  Description of Artificial Sequence: Synthetic peptide
  Seed: GMMMGMFNMLSTVLGVS
GMMMGMYNMNSSVLLVS

SEQ ID NO: 185381 - protein, 17 aa, Artificial Sequence
  Description of Artificial Sequence: Synthetic peptide
  Seed: GMMMGMFNMLSTVLGVS
GMMMGMYNMNSSVLTVS

SEQ ID NO: 185382 - protein, 17 aa, Artificial Sequence
  Description of Artificial Sequence: Synthetic peptide
  Seed: GMMMGMFNMLSTVLGVS
GMMMGMYNMNSSVLVVS

SEQ ID NO: 185383 - protein, 17 aa, Artificial Sequence
  Description of Artificial Sequence: Synthetic peptide
  Seed: GMMMGMFNMLSTVLGVS
GMMMGMYNMNSSVLYVS

SEQ ID NO: 185384 - protein, 17 aa, Artificial Sequence
  Description of Artificial Sequence: Synthetic peptide
  Seed: GMMMGMFNMLSTVLGVS
GMMMGMYNMNSTVLYVS

SEQ ID NO: 185385 - protein, 17 aa, Artificial Sequence
  Description of Artificial Sequence: Synthetic peptide
  Seed: GMMMGMFNMLSTVLGVS
GMMMGMYNMPSAVLAVS

SEQ ID NO: 185386 - protein, 17 aa, Artificial Sequence
  Description of Artificial Sequence: Synthetic peptide
  Seed: GMMMGMFNMLSTVLGVS
GMMMGMYNMPSAVLLVS

SEQ ID NO: 185387 - protein, 17 aa, Artificial Sequence
  Description of Artificial Sequence: Synthetic peptide
  Seed: GMMMGMFNMLSTVLGVS
GMMMGMYNMPSAVLVVS

SEQ ID NO: 185388 - protein, 17 aa, Artificial Sequence
  Description of Artificial Sequence: Synthetic peptide
  Seed: GMMMGMFNMLSTVLGVS
GMMMGMYNMPSSVLIVS

SEQ ID NO: 185389 - protein, 17 aa, Artificial Sequence
  Description of Artificial Sequence: Synthetic peptide
  Seed: GMMMGMFNMLSTVLGVS
GMMMGMYNMPSSVLLVS

SEQ ID NO: 185390 - protein, 17 aa, Artificial Sequence
  Description of Artificial Sequence: Synthetic peptide
  Seed: GMMMGMFNMLSTVLGVS
GMMMGMYNMPSSVLVVS

SEQ ID NO: 185391 - protein, 17 aa, Artificial Sequence
  Description of Artificial Sequence: Synthetic peptide
  Seed: GMMMGMFNMLSTVLGVS
GMMMGMYNMQSAVLAVS

SEQ ID NO: 185392 - protein, 17 aa, Artificial Sequence
  Description of Artificial Sequence: Synthetic peptide
  Seed: GMMMGMFNMLSTVLGVS
GMMMGMYNMQSAVLCVS

SEQ ID NO: 185393 - protein, 17 aa, Artificial Sequence
  Description of Artificial Sequence: Synthetic peptide
  Seed: GMMMGMFNMLSTVLGVS
GMMMGMYNMQSAVLDVS

SEQ ID NO: 185394 - protein, 17 aa, Artificial Sequence
  Description of Artificial Sequence: Synthetic peptide
  Seed: GMMMGMFNMLSTVLGVS
GMMMGMYNMQSAVLEVS

SEQ ID NO: 185395 - protein, 17 aa, Artificial Sequence
  Description of Artificial Sequence: Synthetic peptide
  Seed: GMMMGMFNMLSTVLGVS
GMMMGMYNMQSAVLFVS

SEQ ID NO: 185396 - protein, 17 aa, Artificial Sequence
  Description of Artificial Sequence: Synthetic peptide
  Seed: GMMMGMFNMLSTVLGVS
GMMMGMYNMQSAVLGVS

SEQ ID NO: 185397 - protein, 17 aa, Artificial Sequence
  Description of Artificial Sequence: Synthetic peptide
  Seed: GMMMGMFNMLSTVLGVS
GMMMGMYNMQSAVLHVS

SEQ ID NO: 185398 - protein, 17 aa, Artificial Sequence
  Description of Artificial Sequence: Synthetic peptide
  Seed: GMMMGMFNMLSTVLGVS
GMMMGMYNMQSAVLIVS

SEQ ID NO: 185399 - protein, 17 aa, Artificial Sequence
  Description of Artificial Sequence: Synthetic peptide
  Seed: GMMMGMFNMLSTVLGVS
GMMMGMYNMQSAVLKVS

SEQ ID NO: 185400 - protein, 17 aa, Artificial Sequence
  Description of Artificial Sequence: Synthetic peptide
  Seed: GMMMGMFNMLSTVLGVS
GMMMGMYNMQSAVLLVS

SEQ ID NO: 185401 - protein, 17 aa, Artificial Sequence
  Description of Artificial Sequence: Synthetic peptide
  Seed: GMMMGMFNMLSTVLGVS
GMMMGMYNMQSAVLMVS

SEQ ID NO: 185402 - protein, 17 aa, Artificial Sequence
  Description of Artificial Sequence: Synthetic peptide
  Seed: GMMMGMFNMLSTVLGVS
GMMMGMYNMQSAVLNVS

SEQ ID NO: 185403 - protein, 17 aa, Artificial Sequence
  Description of Artificial Sequence: Synthetic peptide
  Seed: GMMMGMFNMLSTVLGVS
GMMMGMYNMQSAVLPVS

SEQ ID NO: 185404 - protein, 17 aa, Artificial Sequence
  Description of Artificial Sequence: Synthetic peptide
  Seed: GMMMGMFNMLSTVLGVS
GMMMGMYNMQSAVLQVS

SEQ ID NO: 185405 - protein, 17 aa, Artificial Sequence
  Description of Artificial Sequence: Synthetic peptide
  Seed: GMMMGMFNMLSTVLGVS
GMMMGMYNMQSAVLRVS

SEQ ID NO: 185406 - protein, 17 aa, Artificial Sequence
  Description of Artificial Sequence: Synthetic peptide
  Seed: GMMMGMFNMLSTVLGVS
GMMMGMYNMQSAVLSVS

SEQ ID NO: 185407 - protein, 17 aa, Artificial Sequence
  Description of Artificial Sequence: Synthetic peptide
  Seed: GMMMGMFNMLSTVLGVS
GMMMGMYNMQSAVLTVS

SEQ ID NO: 185408 - protein, 17 aa, Artificial Sequence
  Description of Artificial Sequence: Synthetic peptide
  Seed: GMMMGMFNMLSTVLGVS
GMMMGMYNMQSAVLVVS

SEQ ID NO: 185409 - protein, 17 aa, Artificial Sequence
  Description of Artificial Sequence: Synthetic peptide
  Seed: GMMMGMFNMLSTVLGVS
GMMMGMYNMQSAVLYVS

SEQ ID NO: 185410 - protein, 17 aa, Artificial Sequence
  Description of Artificial Sequence: Synthetic peptide
  Seed: GMMMGMFNMLSTVLGVS
GMMMGMYNMQSGVLAVS

SEQ ID NO: 185411 - protein, 17 aa, Artificial Sequence
  Description of Artificial Sequence: Synthetic peptide
  Seed: GMMMGMFNMLSTVLGVS
GMMMGMYNMQSGVLFVS

SEQ ID NO: 185412 - protein, 17 aa, Artificial Sequence
  Description of Artificial Sequence: Synthetic peptide
  Seed: GMMMGMFNMLSTVLGVS
GMMMGMYNMQSGVLGVS

SEQ ID NO: 185413 - protein, 17 aa, Artificial Sequence
  Description of Artificial Sequence: Synthetic peptide
  Seed: GMMMGMFNMLSTVLGVS
GMMMGMYNMQSGVLHVS

SEQ ID NO: 185414 - protein, 17 aa, Artificial Sequence
  Description of Artificial Sequence: Synthetic peptide
  Seed: GMMMGMFNMLSTVLGVS
GMMMGMYNMQSGVLIVS

SEQ ID NO: 185415 - protein, 17 aa, Artificial Sequence
  Description of Artificial Sequence: Synthetic peptide
  Seed: GMMMGMFNMLSTVLGVS
GMMMGMYNMQSGVLKVS

SEQ ID NO: 185416 - protein, 17 aa, Artificial Sequence
  Description of Artificial Sequence: Synthetic peptide
  Seed: GMMMGMFNMLSTVLGVS
GMMMGMYNMQSGVLLVS

SEQ ID NO: 185417 - protein, 17 aa, Artificial Sequence
  Description of Artificial Sequence: Synthetic peptide
  Seed: GMMMGMFNMLSTVLGVS
GMMMGMYNMQSGVLMVS

SEQ ID NO: 185418 - protein, 17 aa, Artificial Sequence
  Description of Artificial Sequence: Synthetic peptide
  Seed: GMMMGMFNMLSTVLGVS
GMMMGMYNMQSGVLNVS

SEQ ID NO: 185419 - protein, 17 aa, Artificial Sequence
  Description of Artificial Sequence: Synthetic peptide
  Seed: GMMMGMFNMLSTVLGVS
GMMMGMYNMQSGVLPVS

SEQ ID NO: 185420 - protein, 17 aa, Artificial Sequence
  Description of Artificial Sequence: Synthetic peptide
  Seed: GMMMGMFNMLSTVLGVS
GMMMGMYNMQSGVLQVS

SEQ ID NO: 185421 - protein, 17 aa, Artificial Sequence
  Description of Artificial Sequence: Synthetic peptide
  Seed: GMMMGMFNMLSTVLGVS
GMMMGMYNMQSGVLRVS

SEQ ID NO: 185422 - protein, 17 aa, Artificial Sequence
  Description of Artificial Sequence: Synthetic peptide
  Seed: GMMMGMFNMLSTVLGVS
GMMMGMYNMQSGVLSVS

SEQ ID NO: 185423 - protein, 17 aa, Artificial Sequence
  Description of Artificial Sequence: Synthetic peptide
  Seed: GMMMGMFNMLSTVLGVS
GMMMGMYNMQSGVLTVS

SEQ ID NO: 185424 - protein, 17 aa, Artificial Sequence
  Description of Artificial Sequence: Synthetic peptide
  Seed: GMMMGMFNMLSTVLGVS
GMMMGMYNMQSGVLVVS

SEQ ID NO: 185425 - protein, 17 aa, Artificial Sequence
  Description of Artificial Sequence: Synthetic peptide
  Seed: GMMMGMFNMLSTVLGVS
GMMMGMYNMQSGVLYVS

SEQ ID NO: 185426 - protein, 17 aa, Artificial Sequence
  Description of Artificial Sequence: Synthetic peptide
  Seed: GMMMGMFNMLSTVLGVS
GMMMGMYNMQSHVLLVS

SEQ ID NO: 185427 - protein, 17 aa, Artificial Sequence
  Description of Artificial Sequence: Synthetic peptide
  Seed: GMMMGMFNMLSTVLGVS
GMMMGMYNMQSIVLAVS

SEQ ID NO: 185428 - protein, 17 aa, Artificial Sequence
  Description of Artificial Sequence: Synthetic peptide
  Seed: GMMMGMFNMLSTVLGVS
GMMMGMYNMQSIVLHVS

SEQ ID NO: 185429 - protein, 17 aa, Artificial Sequence
  Description of Artificial Sequence: Synthetic peptide
  Seed: GMMMGMFNMLSTVLGVS
GMMMGMYNMQSIVLNVS

SEQ ID NO: 185430 - protein, 17 aa, Artificial Sequence
  Description of Artificial Sequence: Synthetic peptide
  Seed: GMMMGMFNMLSTVLGVS
GMMMGMYNMQSIVLSVS

SEQ ID NO: 185431 - protein, 17 aa, Artificial Sequence
  Description of Artificial Sequence: Synthetic peptide
  Seed: GMMMGMFNMLSTVLGVS
GMMMGMYNMQSLVLNVS

SEQ ID NO: 185432 - protein, 17 aa, Artificial Sequence
  Description of Artificial Sequence: Synthetic peptide
  Seed: GMMMGMFNMLSTVLGVS
GMMMGMYNMQSMVLNVS

SEQ ID NO: 185433 - protein, 17 aa, Artificial Sequence
  Description of Artificial Sequence: Synthetic peptide
  Seed: GMMMGMFNMLSTVLGVS
GMMMGMYNMQSNVLAVS

SEQ ID NO: 185434 - protein, 17 aa, Artificial Sequence
  Description of Artificial Sequence: Synthetic peptide
  Seed: GMMMGMFNMLSTVLGVS
GMMMGMYNMQSNVLDVS

SEQ ID NO: 185435 - protein, 17 aa, Artificial Sequence
  Description of Artificial Sequence: Synthetic peptide
  Seed: GMMMGMFNMLSTVLGVS
GMMMGMYNMQSNVLGVS

SEQ ID NO: 185436 - protein, 17 aa, Artificial Sequence
  Description of Artificial Sequence: Synthetic peptide
  Seed: GMMMGMFNMLSTVLGVS
GMMMGMYNMQSNVLHVS

SEQ ID NO: 185437 - protein, 17 aa, Artificial Sequence
  Description of Artificial Sequence: Synthetic peptide
  Seed: GMMMGMFNMLSTVLGVS
GMMMGMYNMQSNVLIVS

SEQ ID NO: 185438 - protein, 17 aa, Artificial Sequence
  Description of Artificial Sequence: Synthetic peptide
  Seed: GMMMGMFNMLSTVLGVS
GMMMGMYNMQSNVLLVS

SEQ ID NO: 185439 - protein, 17 aa, Artificial Sequence
  Description of Artificial Sequence: Synthetic peptide
  Seed: GMMMGMFNMLSTVLGVS
GMMMGMYNMQSNVLMVS

SEQ ID NO: 185440 - protein, 17 aa, Artificial Sequence
  Description of Artificial Sequence: Synthetic peptide
  Seed: GMMMGMFNMLSTVLGVS
GMMMGMYNMQSNVLNVS

SEQ ID NO: 185441 - protein, 17 aa, Artificial Sequence
  Description of Artificial Sequence: Synthetic peptide
  Seed: GMMMGMFNMLSTVLGVS
GMMMGMYNMQSNVLSVS

SEQ ID NO: 185442 - protein, 17 aa, Artificial Sequence
  Description of Artificial Sequence: Synthetic peptide
  Seed: GMMMGMFNMLSTVLGVS
GMMMGMYNMQSNVLTVS

SEQ ID NO: 185443 - protein, 17 aa, Artificial Sequence
  Description of Artificial Sequence: Synthetic peptide
  Seed: GMMMGMFNMLSTVLGVS
GMMMGMYNMQSNVLVVS

SEQ ID NO: 185444 - protein, 17 aa, Artificial Sequence
  Description of Artificial Sequence: Synthetic peptide
  Seed: GMMMGMFNMLSTVLGVS
GMMMGMYNMQSPVLAVS

SEQ ID NO: 185445 - protein, 17 aa, Artificial Sequence
  Description of Artificial Sequence: Synthetic peptide
  Seed: GMMMGMFNMLSTVLGVS
GMMMGMYNMQSPVLFVS

SEQ ID NO: 185446 - protein, 17 aa, Artificial Sequence
  Description of Artificial Sequence: Synthetic peptide
  Seed: GMMMGMFNMLSTVLGVS
GMMMGMYNMQSPVLGVS

SEQ ID NO: 185447 - protein, 17 aa, Artificial Sequence
  Description of Artificial Sequence: Synthetic peptide
  Seed: GMMMGMFNMLSTVLGVS
GMMMGMYNMQSPVLHVS

SEQ ID NO: 185448 - protein, 17 aa, Artificial Sequence
  Description of Artificial Sequence: Synthetic peptide
  Seed: GMMMGMFNMLSTVLGVS
GMMMGMYNMQSPVLIVS

SEQ ID NO: 185449 - protein, 17 aa, Artificial Sequence
  Description of Artificial Sequence: Synthetic peptide
  Seed: GMMMGMFNMLSTVLGVS
GMMMGMYNMQSPVLLVS

SEQ ID NO: 185450 - protein, 17 aa, Artificial Sequence
  Description of Artificial Sequence: Synthetic peptide
  Seed: GMMMGMFNMLSTVLGVS
GMMMGMYNMQSPVLMVS

SEQ ID NO: 185451 - protein, 17 aa, Artificial Sequence
  Description of Artificial Sequence: Synthetic peptide
  Seed: GMMMGMFNMLSTVLGVS
GMMMGMYNMQSPVLNVS

SEQ ID NO: 185452 - protein, 17 aa, Artificial Sequence
  Description of Artificial Sequence: Synthetic peptide
  Seed: GMMMGMFNMLSTVLGVS
GMMMGMYNMQSPVLPVS

SEQ ID NO: 185453 - protein, 17 aa, Artificial Sequence
  Description of Artificial Sequence: Synthetic peptide
  Seed: GMMMGMFNMLSTVLGVS
GMMMGMYNMQSPVLQVS

SEQ ID NO: 185454 - protein, 17 aa, Artificial Sequence
  Description of Artificial Sequence: Synthetic peptide
  Seed: GMMMGMFNMLSTVLGVS
GMMMGMYNMQSPVLRVS

SEQ ID NO: 185455 - protein, 17 aa, Artificial Sequence
  Description of Artificial Sequence: Synthetic peptide
  Seed: GMMMGMFNMLSTVLGVS
GMMMGMYNMQSPVLSVS

SEQ ID NO: 185456 - protein, 17 aa, Artificial Sequence
  Description of Artificial Sequence: Synthetic peptide
  Seed: GMMMGMFNMLSTVLGVS
GMMMGMYNMQSPVLTVS

SEQ ID NO: 185457 - protein, 17 aa, Artificial Sequence
  Description of Artificial Sequence: Synthetic peptide
  Seed: GMMMGMFNMLSTVLGVS
GMMMGMYNMQSPVLVVS

SEQ ID NO: 185458 - protein, 17 aa, Artificial Sequence
  Description of Artificial Sequence: Synthetic peptide
  Seed: GMMMGMFNMLSTVLGVS
GMMMGMYNMQSPVLYVS

SEQ ID NO: 185459 - protein, 17 aa, Artificial Sequence
  Description of Artificial Sequence: Synthetic peptide
  Seed: GMMMGMFNMLSTVLGVS
GMMMGMYNMQSQVLIVS

SEQ ID NO: 185460 - protein, 17 aa, Artificial Sequence
  Description of Artificial Sequence: Synthetic peptide
  Seed: GMMMGMFNMLSTVLGVS
GMMMGMYNMQSQVLLVS

SEQ ID NO: 185461 - protein, 17 aa, Artificial Sequence
  Description of Artificial Sequence: Synthetic peptide
  Seed: GMMMGMFNMLSTVLGVS
GMMMGMYNMQSQVLVVS

SEQ ID NO: 185462 - protein, 17 aa, Artificial Sequence
  Description of Artificial Sequence: Synthetic peptide
  Seed: GMMMGMFNMLSTVLGVS
GMMMGMYNMQSSVLAVS

SEQ ID NO: 185463 - protein, 17 aa, Artificial Sequence
  Description of Artificial Sequence: Synthetic peptide
  Seed: GMMMGMFNMLSTVLGVS
GMMMGMYNMQSSVLFVS

SEQ ID NO: 185464 - protein, 17 aa, Artificial Sequence
  Description of Artificial Sequence: Synthetic peptide
  Seed: GMMMGMFNMLSTVLGVS
GMMMGMYNMQSSVLGVS

SEQ ID NO: 185465 - protein, 17 aa, Artificial Sequence
  Description of Artificial Sequence: Synthetic peptide
  Seed: GMMMGMFNMLSTVLGVS
GMMMGMYNMQSSVLHVS

SEQ ID NO: 185466 - protein, 17 aa, Artificial Sequence
  Description of Artificial Sequence: Synthetic peptide
  Seed: GMMMGMFNMLSTVLGVS
GMMMGMYNMQSSVLIVS

SEQ ID NO: 185467 - protein, 17 aa, Artificial Sequence
  Description of Artificial Sequence: Synthetic peptide
  Seed: GMMMGMFNMLSTVLGVS
GMMMGMYNMQSSVLLVS

SEQ ID NO: 185468 - protein, 17 aa, Artificial Sequence
  Description of Artificial Sequence: Synthetic peptide
  Seed: GMMMGMFNMLSTVLGVS
GMMMGMYNMQSSVLMVS

SEQ ID NO: 185469 - protein, 17 aa, Artificial Sequence
  Description of Artificial Sequence: Synthetic peptide
  Seed: GMMMGMFNMLSTVLGVS
GMMMGMYNMQSSVLNVS

SEQ ID NO: 185470 - protein, 17 aa, Artificial Sequence
  Description of Artificial Sequence: Synthetic peptide
  Seed: GMMMGMFNMLSTVLGVS
GMMMGMYNMQSSVLQVS

SEQ ID NO: 185471 - protein, 17 aa, Artificial Sequence
  Description of Artificial Sequence: Synthetic peptide
  Seed: GMMMGMFNMLSTVLGVS
GMMMGMYNMQSSVLRVS

SEQ ID NO: 185472 - protein, 17 aa, Artificial Sequence
  Description of Artificial Sequence: Synthetic peptide
  Seed: GMMMGMFNMLSTVLGVS
GMMMGMYNMQSSVLSVS

SEQ ID NO: 185473 - protein, 17 aa, Artificial Sequence
  Description of Artificial Sequence: Synthetic peptide
  Seed: GMMMGMFNMLSTVLGVS
GMMMGMYNMQSSVLTVS

SEQ ID NO: 185474 - protein, 17 aa, Artificial Sequence
  Description of Artificial Sequence: Synthetic peptide
  Seed: GMMMGMFNMLSTVLGVS
GMMMGMYNMQSSVLVVS

SEQ ID NO: 185475 - protein, 17 aa, Artificial Sequence
  Description of Artificial Sequence: Synthetic peptide
  Seed: GMMMGMFNMLSTVLGVS
GMMMGMYNMQSSVLYVS

SEQ ID NO: 185476 - protein, 17 aa, Artificial Sequence
  Description of Artificial Sequence: Synthetic peptide
  Seed: GMMMGMFNMLSTVLGVS
GMMMGMYNMQSTVLAVS

SEQ ID NO: 185477 - protein, 17 aa, Artificial Sequence
  Description of Artificial Sequence: Synthetic peptide
  Seed: GMMMGMFNMLSTVLGVS
GMMMGMYNMQSTVLGVS

SEQ ID NO: 185478 - protein, 17 aa, Artificial Sequence
  Description of Artificial Sequence: Synthetic peptide
  Seed: GMMMGMFNMLSTVLGVS
GMMMGMYNMQSTVLHVS

SEQ ID NO: 185479 - protein, 17 aa, Artificial Sequence
  Description of Artificial Sequence: Synthetic peptide
  Seed: GMMMGMFNMLSTVLGVS
GMMMGMYNMQSTVLIVS

SEQ ID NO: 185480 - protein, 17 aa, Artificial Sequence
  Description of Artificial Sequence: Synthetic peptide
  Seed: GMMMGMFNMLSTVLGVS
GMMMGMYNMQSTVLLVS

SEQ ID NO: 185481 - protein, 17 aa, Artificial Sequence
  Description of Artificial Sequence: Synthetic peptide
  Seed: GMMMGMFNMLSTVLGVS
GMMMGMYNMQSTVLMVS

SEQ ID NO: 185482 - protein, 17 aa, Artificial Sequence
  Description of Artificial Sequence: Synthetic peptide
  Seed: GMMMGMFNMLSTVLGVS
GMMMGMYNMQSTVLNVS

SEQ ID NO: 185483 - protein, 17 aa, Artificial Sequence
  Description of Artificial Sequence: Synthetic peptide
  Seed: GMMMGMFNMLSTVLGVS
GMMMGMYNMQSTVLQVS

SEQ ID NO: 185484 - protein, 17 aa, Artificial Sequence
  Description of Artificial Sequence: Synthetic peptide
  Seed: GMMMGMFNMLSTVLGVS
GMMMGMYNMQSTVLSVS

SEQ ID NO: 185485 - protein, 17 aa, Artificial Sequence
  Description of Artificial Sequence: Synthetic peptide
  Seed: GMMMGMFNMLSTVLGVS
GMMMGMYNMQSTVLTVS

SEQ ID NO: 185486 - protein, 17 aa, Artificial Sequence
  Description of Artificial Sequence: Synthetic peptide
  Seed: GMMMGMFNMLSTVLGVS
GMMMGMYNMQSTVLVVS

SEQ ID NO: 185487 - protein, 17 aa, Artificial Sequence
  Description of Artificial Sequence: Synthetic peptide
  Seed: GMMMGMFNMLSTVLGVS
GMMMGMYNMQSVVLAVS

SEQ ID NO: 185488 - protein, 17 aa, Artificial Sequence
  Description of Artificial Sequence: Synthetic peptide
  Seed: GMMMGMFNMLSTVLGVS
GMMMGMYNMQSVVLHVS

SEQ ID NO: 185489 - protein, 17 aa, Artificial Sequence
  Description of Artificial Sequence: Synthetic peptide
  Seed: GMMMGMFNMLSTVLGVS
GMMMGMYNMQSVVLNVS

SEQ ID NO: 185490 - protein, 17 aa, Artificial Sequence
  Description of Artificial Sequence: Synthetic peptide
  Seed: GMMMGMFNMLSTVLGVS
GMMMGMYNMQSVVLSVS

SEQ ID NO: 185491 - protein, 17 aa, Artificial Sequence
  Description of Artificial Sequence: Synthetic peptide
  Seed: GMMMGMFNMLSTVLGVS
GMMMGMYNMQSVVLTVS

SEQ ID NO: 185492 - protein, 17 aa, Artificial Sequence
  Description of Artificial Sequence: Synthetic peptide
  Seed: GMMMGMFNMLSTVLGVS
GMMMGMYNMRSAVLAVS

SEQ ID NO: 185493 - protein, 17 aa, Artificial Sequence
  Description of Artificial Sequence: Synthetic peptide
  Seed: GMMMGMFNMLSTVLGVS
GMMMGMYNMRSAVLCVS

SEQ ID NO: 185494 - protein, 17 aa, Artificial Sequence
  Description of Artificial Sequence: Synthetic peptide
  Seed: GMMMGMFNMLSTVLGVS
GMMMGMYNMRSAVLIVS

SEQ ID NO: 185495 - protein, 17 aa, Artificial Sequence
  Description of Artificial Sequence: Synthetic peptide
  Seed: GMMMGMFNMLSTVLGVS
GMMMGMYNMRSAVLLVS

SEQ ID NO: 185496 - protein, 17 aa, Artificial Sequence
  Description of Artificial Sequence: Synthetic peptide
  Seed: GMMMGMFNMLSTVLGVS
GMMMGMYNMRSAVLMVS

SEQ ID NO: 185497 - protein, 17 aa, Artificial Sequence
  Description of Artificial Sequence: Synthetic peptide
  Seed: GMMMGMFNMLSTVLGVS
GMMMGMYNMRSAVLNVS

SEQ ID NO: 185498 - protein, 17 aa, Artificial Sequence
  Description of Artificial Sequence: Synthetic peptide
  Seed: GMMMGMFNMLSTVLGVS
GMMMGMYNMRSAVLQVS

SEQ ID NO: 185499 - protein, 17 aa, Artificial Sequence
  Description of Artificial Sequence: Synthetic peptide
  Seed: GMMMGMFNMLSTVLGVS
GMMMGMYNMRSAVLSVS

SEQ ID NO: 185500 - protein, 17 aa, Artificial Sequence
  Description of Artificial Sequence: Synthetic peptide
  Seed: GMMMGMFNMLSTVLGVS
GMMMGMYNMRSAVLTVS

SEQ ID NO: 185501 - protein, 17 aa, Artificial Sequence
  Description of Artificial Sequence: Synthetic peptide
  Seed: GMMMGMFNMLSTVLGVS
GMMMGMYNMRSAVLVVS

SEQ ID NO: 185502 - protein, 17 aa, Artificial Sequence
  Description of Artificial Sequence: Synthetic peptide
  Seed: GMMMGMFNMLSTVLGVS
GMMMGMYNMRSGVLAVS

SEQ ID NO: 185503 - protein, 17 aa, Artificial Sequence
  Description of Artificial Sequence: Synthetic peptide
  Seed: GMMMGMFNMLSTVLGVS
GMMMGMYNMRSGVLIVS

SEQ ID NO: 185504 - protein, 17 aa, Artificial Sequence
  Description of Artificial Sequence: Synthetic peptide
  Seed: GMMMGMFNMLSTVLGVS
GMMMGMYNMRSGVLLVS

SEQ ID NO: 185505 - protein, 17 aa, Artificial Sequence
  Description of Artificial Sequence: Synthetic peptide
  Seed: GMMMGMFNMLSTVLGVS
GMMMGMYNMRSGVLMVS

SEQ ID NO: 185506 - protein, 17 aa, Artificial Sequence
  Description of Artificial Sequence: Synthetic peptide
  Seed: GMMMGMFNMLSTVLGVS
GMMMGMYNMRSGVLTVS

SEQ ID NO: 185507 - protein, 17 aa, Artificial Sequence
  Description of Artificial Sequence: Synthetic peptide
  Seed: GMMMGMFNMLSTVLGVS
GMMMGMYNMRSGVLVVS

SEQ ID NO: 185508 - protein, 17 aa, Artificial Sequence
  Description of Artificial Sequence: Synthetic peptide
  Seed: GMMMGMFNMLSTVLGVS
GMMMGMYNMRSPVLLVS

SEQ ID NO: 185509 - protein, 17 aa, Artificial Sequence
  Description of Artificial Sequence: Synthetic peptide
  Seed: GMMMGMFNMLSTVLGVS
GMMMGMYNMRSSVLLVS

SEQ ID NO: 185510 - protein, 17 aa, Artificial Sequence
  Description of Artificial Sequence: Synthetic peptide
  Seed: GMMMGMFNMLSTVLGVS
GMMMGMYNMRSSVLVVS

SEQ ID NO: 185511 - protein, 17 aa, Artificial Sequence
  Description of Artificial Sequence: Synthetic peptide
  Seed: GMMMGMFNMLSTVLGVS
GMMMGMYNMSSAVLAVS

SEQ ID NO: 185512 - protein, 17 aa, Artificial Sequence
  Description of Artificial Sequence: Synthetic peptide
  Seed: GMMMGMFNMLSTVLGVS
GMMMGMYNMSSAVLFVS

SEQ ID NO: 185513 - protein, 17 aa, Artificial Sequence
  Description of Artificial Sequence: Synthetic peptide
  Seed: GMMMGMFNMLSTVLGVS
GMMMGMYNMSSAVLGVS

SEQ ID NO: 185514 - protein, 17 aa, Artificial Sequence
  Description of Artificial Sequence: Synthetic peptide
  Seed: GMMMGMFNMLSTVLGVS
GMMMGMYNMSSAVLHVS

SEQ ID NO: 185515 - protein, 17 aa, Artificial Sequence
  Description of Artificial Sequence: Synthetic peptide
  Seed: GMMMGMFNMLSTVLGVS
GMMMGMYNMSSAVLIVS

SEQ ID NO: 185516 - protein, 17 aa, Artificial Sequence
  Description of Artificial Sequence: Synthetic peptide
  Seed: GMMMGMFNMLSTVLGVS
GMMMGMYNMSSAVLKVS

SEQ ID NO: 185517 - protein, 17 aa, Artificial Sequence
  Description of Artificial Sequence: Synthetic peptide
  Seed: GMMMGMFNMLSTVLGVS
GMMMGMYNMSSAVLLVS

SEQ ID NO: 185518 - protein, 17 aa, Artificial Sequence
  Description of Artificial Sequence: Synthetic peptide
  Seed: GMMMGMFNMLSTVLGVS
GMMMGMYNMSSAVLMVS

SEQ ID NO: 185519 - protein, 17 aa, Artificial Sequence
  Description of Artificial Sequence: Synthetic peptide
  Seed: GMMMGMFNMLSTVLGVS
GMMMGMYNMSSAVLNVS

SEQ ID NO: 185520 - protein, 17 aa, Artificial Sequence
  Description of Artificial Sequence: Synthetic peptide
  Seed: GMMMGMFNMLSTVLGVS
GMMMGMYNMSSAVLQVS

SEQ ID NO: 185521 - protein, 17 aa, Artificial Sequence
  Description of Artificial Sequence: Synthetic peptide
  Seed: GMMMGMFNMLSTVLGVS
GMMMGMYNMSSAVLRVS

SEQ ID NO: 185522 - protein, 17 aa, Artificial Sequence
  Description of Artificial Sequence: Synthetic peptide
  Seed: GMMMGMFNMLSTVLGVS
GMMMGMYNMSSAVLSVS

SEQ ID NO: 185523 - protein, 17 aa, Artificial Sequence
  Description of Artificial Sequence: Synthetic peptide
  Seed: GMMMGMFNMLSTVLGVS
GMMMGMYNMSSAVLTVS

SEQ ID NO: 185524 - protein, 17 aa, Artificial Sequence
  Description of Artificial Sequence: Synthetic peptide
  Seed: GMMMGMFNMLSTVLGVS
GMMMGMYNMSSAVLVVS

SEQ ID NO: 185525 - protein, 17 aa, Artificial Sequence
  Description of Artificial Sequence: Synthetic peptide
  Seed: GMMMGMFNMLSTVLGVS
GMMMGMYNMSSAVLYVS

SEQ ID NO: 185526 - protein, 17 aa, Artificial Sequence
  Description of Artificial Sequence: Synthetic peptide
  Seed: GMMMGMFNMLSTVLGVS
GMMMGMYNMSSGVLAVS

SEQ ID NO: 185527 - protein, 17 aa, Artificial Sequence
  Description of Artificial Sequence: Synthetic peptide
  Seed: GMMMGMFNMLSTVLGVS
GMMMGMYNMSSGVLGVS

SEQ ID NO: 185528 - protein, 17 aa, Artificial Sequence
  Description of Artificial Sequence: Synthetic peptide
  Seed: GMMMGMFNMLSTVLGVS
GMMMGMYNMSSGVLIVS

SEQ ID NO: 185529 - protein, 17 aa, Artificial Sequence
  Description of Artificial Sequence: Synthetic peptide
  Seed: GMMMGMFNMLSTVLGVS
GMMMGMYNMSSGVLKVS

SEQ ID NO: 185530 - protein, 17 aa, Artificial Sequence
  Description of Artificial Sequence: Synthetic peptide
  Seed: GMMMGMFNMLSTVLGVS
GMMMGMYNMSSGVLLVS

SEQ ID NO: 185531 - protein, 17 aa, Artificial Sequence
  Description of Artificial Sequence: Synthetic peptide
  Seed: GMMMGMFNMLSTVLGVS
GMMMGMYNMSSGVLMVS

SEQ ID NO: 185532 - protein, 17 aa, Artificial Sequence
  Description of Artificial Sequence: Synthetic peptide
  Seed: GMMMGMFNMLSTVLGVS
GMMMGMYNMSSGVLNVS

SEQ ID NO: 185533 - protein, 17 aa, Artificial Sequence
  Description of Artificial Sequence: Synthetic peptide
  Seed: GMMMGMFNMLSTVLGVS
GMMMGMYNMSSGVLRVS

SEQ ID NO: 185534 - protein, 17 aa, Artificial Sequence
  Description of Artificial Sequence: Synthetic peptide
  Seed: GMMMGMFNMLSTVLGVS
GMMMGMYNMSSGVLSVS

SEQ ID NO: 185535 - protein, 17 aa, Artificial Sequence
  Description of Artificial Sequence: Synthetic peptide
  Seed: GMMMGMFNMLSTVLGVS
GMMMGMYNMSSGVLTVS

SEQ ID NO: 185536 - protein, 17 aa, Artificial Sequence
  Description of Artificial Sequence: Synthetic peptide
  Seed: GMMMGMFNMLSTVLGVS
GMMMGMYNMSSGVLVVS

SEQ ID NO: 185537 - protein, 17 aa, Artificial Sequence
  Description of Artificial Sequence: Synthetic peptide
  Seed: GMMMGMFNMLSTVLGVS
GMMMGMYNMSSIVLNVS

SEQ ID NO: 185538 - protein, 17 aa, Artificial Sequence
  Description of Artificial Sequence: Synthetic peptide
  Seed: GMMMGMFNMLSTVLGVS
GMMMGMYNMSSNVLAVS

SEQ ID NO: 185539 - protein, 17 aa, Artificial Sequence
  Description of Artificial Sequence: Synthetic peptide
  Seed: GMMMGMFNMLSTVLGVS
GMMMGMYNMSSNVLIVS

SEQ ID NO: 185540 - protein, 17 aa, Artificial Sequence
  Description of Artificial Sequence: Synthetic peptide
  Seed: GMMMGMFNMLSTVLGVS
GMMMGMYNMSSNVLLVS

SEQ ID NO: 185541 - protein, 17 aa, Artificial Sequence
  Description of Artificial Sequence: Synthetic peptide
  Seed: GMMMGMFNMLSTVLGVS
GMMMGMYNMSSNVLNVS

SEQ ID NO: 185542 - protein, 17 aa, Artificial Sequence
  Description of Artificial Sequence: Synthetic peptide
  Seed: GMMMGMFNMLSTVLGVS
GMMMGMYNMSSNVLSVS

SEQ ID NO: 185543 - protein, 17 aa, Artificial Sequence
  Description of Artificial Sequence: Synthetic peptide
  Seed: GMMMGMFNMLSTVLGVS
GMMMGMYNMSSNVLVVS

SEQ ID NO: 185544 - protein, 17 aa, Artificial Sequence
  Description of Artificial Sequence: Synthetic peptide
  Seed: GMMMGMFNMLSTVLGVS
GMMMGMYNMSSPVLAVS

SEQ ID NO: 185545 - protein, 17 aa, Artificial Sequence
  Description of Artificial Sequence: Synthetic peptide
  Seed: GMMMGMFNMLSTVLGVS
GMMMGMYNMSSPVLFVS

SEQ ID NO: 185546 - protein, 17 aa, Artificial Sequence
  Description of Artificial Sequence: Synthetic peptide
  Seed: GMMMGMFNMLSTVLGVS
GMMMGMYNMSSPVLGVS

SEQ ID NO: 185547 - protein, 17 aa, Artificial Sequence
  Description of Artificial Sequence: Synthetic peptide
  Seed: GMMMGMFNMLSTVLGVS
GMMMGMYNMSSPVLHVS

SEQ ID NO: 185548 - protein, 17 aa, Artificial Sequence
  Description of Artificial Sequence: Synthetic peptide
  Seed: GMMMGMFNMLSTVLGVS
GMMMGMYNMSSPVLIVS

SEQ ID NO: 185549 - protein, 17 aa, Artificial Sequence
  Description of Artificial Sequence: Synthetic peptide
  Seed: GMMMGMFNMLSTVLGVS
GMMMGMYNMSSPVLLVS

SEQ ID NO: 185550 - protein, 17 aa, Artificial Sequence
  Description of Artificial Sequence: Synthetic peptide
  Seed: GMMMGMFNMLSTVLGVS
GMMMGMYNMSSPVLMVS

SEQ ID NO: 185551 - protein, 17 aa, Artificial Sequence
  Description of Artificial Sequence: Synthetic peptide
  Seed: GMMMGMFNMLSTVLGVS
GMMMGMYNMSSPVLNVS

SEQ ID NO: 185552 - protein, 17 aa, Artificial Sequence
  Description of Artificial Sequence: Synthetic peptide
  Seed: GMMMGMFNMLSTVLGVS
GMMMGMYNMSSPVLQVS

SEQ ID NO: 185553 - protein, 17 aa, Artificial Sequence
  Description of Artificial Sequence: Synthetic peptide
  Seed: GMMMGMFNMLSTVLGVS
GMMMGMYNMSSPVLSVS

SEQ ID NO: 185554 - protein, 17 aa, Artificial Sequence
  Description of Artificial Sequence: Synthetic peptide
  Seed: GMMMGMFNMLSTVLGVS
GMMMGMYNMSSPVLTVS

SEQ ID NO: 185555 - protein, 17 aa, Artificial Sequence
  Description of Artificial Sequence: Synthetic peptide
  Seed: GMMMGMFNMLSTVLGVS
GMMMGMYNMSSPVLVVS

SEQ ID NO: 185556 - protein, 17 aa, Artificial Sequence
  Description of Artificial Sequence: Synthetic peptide
  Seed: GMMMGMFNMLSTVLGVS
GMMMGMYNMSSPVLYVS

SEQ ID NO: 185557 - protein, 17 aa, Artificial Sequence
  Description of Artificial Sequence: Synthetic peptide
  Seed: GMMMGMFNMLSTVLGVS
GMMMGMYNMSSSVLAVS

SEQ ID NO: 185558 - protein, 17 aa, Artificial Sequence
  Description of Artificial Sequence: Synthetic peptide
  Seed: GMMMGMFNMLSTVLGVS
GMMMGMYNMSSSVLFVS

SEQ ID NO: 185559 - protein, 17 aa, Artificial Sequence
  Description of Artificial Sequence: Synthetic peptide
  Seed: GMMMGMFNMLSTVLGVS
GMMMGMYNMSSSVLGVS

SEQ ID NO: 185560 - protein, 17 aa, Artificial Sequence
  Description of Artificial Sequence: Synthetic peptide
  Seed: GMMMGMFNMLSTVLGVS
GMMMGMYNMSSSVLHVS

SEQ ID NO: 185561 - protein, 17 aa, Artificial Sequence
  Description of Artificial Sequence: Synthetic peptide
  Seed: GMMMGMFNMLSTVLGVS
GMMMGMYNMSSSVLIVS

SEQ ID NO: 185562 - protein, 17 aa, Artificial Sequence
  Description of Artificial Sequence: Synthetic peptide
  Seed: GMMMGMFNMLSTVLGVS
GMMMGMYNMSSSVLLVS

SEQ ID NO: 185563 - protein, 17 aa, Artificial Sequence
  Description of Artificial Sequence: Synthetic peptide
  Seed: GMMMGMFNMLSTVLGVS
GMMMGMYNMSSSVLMVS

SEQ ID NO: 185564 - protein, 17 aa, Artificial Sequence
  Description of Artificial Sequence: Synthetic peptide
  Seed: GMMMGMFNMLSTVLGVS
GMMMGMYNMSSSVLNVS

SEQ ID NO: 185565 - protein, 17 aa, Artificial Sequence
  Description of Artificial Sequence: Synthetic peptide
  Seed: GMMMGMFNMLSTVLGVS
GMMMGMYNMSSSVLSVS

SEQ ID NO: 185566 - protein, 17 aa, Artificial Sequence
  Description of Artificial Sequence: Synthetic peptide
  Seed: GMMMGMFNMLSTVLGVS
GMMMGMYNMSSSVLTVS

SEQ ID NO: 185567 - protein, 17 aa, Artificial Sequence
  Description of Artificial Sequence: Synthetic peptide
  Seed: GMMMGMFNMLSTVLGVS
GMMMGMYNMSSSVLVVS

SEQ ID NO: 185568 - protein, 17 aa, Artificial Sequence
  Description of Artificial Sequence: Synthetic peptide
  Seed: GMMMGMFNMLSTVLGVS
GMMMGMYNMSSSVLYVS

SEQ ID NO: 185569 - protein, 17 aa, Artificial Sequence
  Description of Artificial Sequence: Synthetic peptide
  Seed: GMMMGMFNMLSTVLGVS
GMMMGMYNMSSTVLAVS

SEQ ID NO: 185570 - protein, 17 aa, Artificial Sequence
  Description of Artificial Sequence: Synthetic peptide
  Seed: GMMMGMFNMLSTVLGVS
GMMMGMYNMSSTVLHVS

SEQ ID NO: 185571 - protein, 17 aa, Artificial Sequence
  Description of Artificial Sequence: Synthetic peptide
  Seed: GMMMGMFNMLSTVLGVS
GMMMGMYNMSSTVLIVS

SEQ ID NO: 185572 - protein, 17 aa, Artificial Sequence
  Description of Artificial Sequence: Synthetic peptide
  Seed: GMMMGMFNMLSTVLGVS
GMMMGMYNMSSTVLLVS

SEQ ID NO: 185573 - protein, 17 aa, Artificial Sequence
  Description of Artificial Sequence: Synthetic peptide
  Seed: GMMMGMFNMLSTVLGVS
GMMMGMYNMSSTVLNVS

SEQ ID NO: 185574 - protein, 17 aa, Artificial Sequence
  Description of Artificial Sequence: Synthetic peptide
  Seed: GMMMGMFNMLSTVLGVS
GMMMGMYNMSSTVLSVS

SEQ ID NO: 185575 - protein, 17 aa, Artificial Sequence
  Description of Artificial Sequence: Synthetic peptide
  Seed: GMMMGMFNMLSTVLGVS
GMMMGMYNMSSTVLTVS

SEQ ID NO: 185576 - protein, 17 aa, Artificial Sequence
  Description of Artificial Sequence: Synthetic peptide
  Seed: GMMMGMFNMLSTVLGVS
GMMMGMYNMSSTVLVVS

SEQ ID NO: 185577 - protein, 17 aa, Artificial Sequence
  Description of Artificial Sequence: Synthetic peptide
  Seed: GMMMGMFNMLSTVLGVS
GMMMGMYNMSSVVLHVS

SEQ ID NO: 185578 - protein, 17 aa, Artificial Sequence
  Description of Artificial Sequence: Synthetic peptide
  Seed: GMMMGMFNMLSTVLGVS
GMMMGMYNMSSVVLNVS

SEQ ID NO: 185579 - protein, 17 aa, Artificial Sequence
  Description of Artificial Sequence: Synthetic peptide
  Seed: GMMMGMFNMLSTVLGVS
GMMMGMYNMSSVVLSVS

SEQ ID NO: 185580 - protein, 17 aa, Artificial Sequence
  Description of Artificial Sequence: Synthetic peptide
  Seed: GMMMGMFNMLSTVLGVS
GMMMGMYNMTSAVLAVS

SEQ ID NO: 185581 - protein, 17 aa, Artificial Sequence
  Description of Artificial Sequence: Synthetic peptide
  Seed: GMMMGMFNMLSTVLGVS
GMMMGMYNMTSAVLGVS

SEQ ID NO: 185582 - protein, 17 aa, Artificial Sequence
  Description of Artificial Sequence: Synthetic peptide
  Seed: GMMMGMFNMLSTVLGVS
GMMMGMYNMTSAVLHVS

SEQ ID NO: 185583 - protein, 17 aa, Artificial Sequence
  Description of Artificial Sequence: Synthetic peptide
  Seed: GMMMGMFNMLSTVLGVS
GMMMGMYNMTSAVLIVS

SEQ ID NO: 185584 - protein, 17 aa, Artificial Sequence
  Description of Artificial Sequence: Synthetic peptide
  Seed: GMMMGMFNMLSTVLGVS
GMMMGMYNMTSAVLKVS

SEQ ID NO: 185585 - protein, 17 aa, Artificial Sequence
  Description of Artificial Sequence: Synthetic peptide
  Seed: GMMMGMFNMLSTVLGVS
GMMMGMYNMTSAVLLVS

SEQ ID NO: 185586 - protein, 17 aa, Artificial Sequence
  Description of Artificial Sequence: Synthetic peptide
  Seed: GMMMGMFNMLSTVLGVS
GMMMGMYNMTSAVLMVS

SEQ ID NO: 185587 - protein, 17 aa, Artificial Sequence
  Description of Artificial Sequence: Synthetic peptide
  Seed: GMMMGMFNMLSTVLGVS
GMMMGMYNMTSAVLNVS

SEQ ID NO: 185588 - protein, 17 aa, Artificial Sequence
  Description of Artificial Sequence: Synthetic peptide
  Seed: GMMMGMFNMLSTVLGVS
GMMMGMYNMTSAVLQVS

SEQ ID NO: 185589 - protein, 17 aa, Artificial Sequence
  Description of Artificial Sequence: Synthetic peptide
  Seed: GMMMGMFNMLSTVLGVS
GMMMGMYNMTSAVLRVS

SEQ ID NO: 185590 - protein, 17 aa, Artificial Sequence
  Description of Artificial Sequence: Synthetic peptide
  Seed: GMMMGMFNMLSTVLGVS
GMMMGMYNMTSAVLSVS

SEQ ID NO: 185591 - protein, 17 aa, Artificial Sequence
  Description of Artificial Sequence: Synthetic peptide
  Seed: GMMMGMFNMLSTVLGVS
GMMMGMYNMTSAVLTVS

SEQ ID NO: 185592 - protein, 17 aa, Artificial Sequence
  Description of Artificial Sequence: Synthetic peptide
  Seed: GMMMGMFNMLSTVLGVS
GMMMGMYNMTSAVLVVS

SEQ ID NO: 185593 - protein, 17 aa, Artificial Sequence
  Description of Artificial Sequence: Synthetic peptide
  Seed: GMMMGMFNMLSTVLGVS
GMMMGMYNMTSAVLYVS

SEQ ID NO: 185594 - protein, 17 aa, Artificial Sequence
  Description of Artificial Sequence: Synthetic peptide
  Seed: GMMMGMFNMLSTVLGVS
GMMMGMYNMTSGVLAVS

SEQ ID NO: 185595 - protein, 17 aa, Artificial Sequence
  Description of Artificial Sequence: Synthetic peptide
  Seed: GMMMGMFNMLSTVLGVS
GMMMGMYNMTSGVLGVS

SEQ ID NO: 185596 - protein, 17 aa, Artificial Sequence
  Description of Artificial Sequence: Synthetic peptide
  Seed: GMMMGMFNMLSTVLGVS
GMMMGMYNMTSGVLIVS

SEQ ID NO: 185597 - protein, 17 aa, Artificial Sequence
  Description of Artificial Sequence: Synthetic peptide
  Seed: GMMMGMFNMLSTVLGVS
GMMMGMYNMTSGVLLVS

SEQ ID NO: 185598 - protein, 17 aa, Artificial Sequence
  Description of Artificial Sequence: Synthetic peptide
  Seed: GMMMGMFNMLSTVLGVS
GMMMGMYNMTSGVLMVS

SEQ ID NO: 185599 - protein, 17 aa, Artificial Sequence
  Description of Artificial Sequence: Synthetic peptide
  Seed: GMMMGMFNMLSTVLGVS
GMMMGMYNMTSGVLNVS

SEQ ID NO: 185600 - protein, 17 aa, Artificial Sequence
  Description of Artificial Sequence: Synthetic peptide
  Seed: GMMMGMFNMLSTVLGVS
GMMMGMYNMTSGVLRVS

SEQ ID NO: 185601 - protein, 17 aa, Artificial Sequence
  Description of Artificial Sequence: Synthetic peptide
  Seed: GMMMGMFNMLSTVLGVS
GMMMGMYNMTSGVLSVS

SEQ ID NO: 185602 - protein, 17 aa, Artificial Sequence
  Description of Artificial Sequence: Synthetic peptide
  Seed: GMMMGMFNMLSTVLGVS
GMMMGMYNMTSGVLTVS

SEQ ID NO: 185603 - protein, 17 aa, Artificial Sequence
  Description of Artificial Sequence: Synthetic peptide
  Seed: GMMMGMFNMLSTVLGVS
GMMMGMYNMTSGVLVVS

SEQ ID NO: 185604 - protein, 17 aa, Artificial Sequence
  Description of Artificial Sequence: Synthetic peptide
  Seed: GMMMGMFNMLSTVLGVS
GMMMGMYNMTSNVLAVS

SEQ ID NO: 185605 - protein, 17 aa, Artificial Sequence
  Description of Artificial Sequence: Synthetic peptide
  Seed: GMMMGMFNMLSTVLGVS
GMMMGMYNMTSNVLIVS

SEQ ID NO: 185606 - protein, 17 aa, Artificial Sequence
  Description of Artificial Sequence: Synthetic peptide
  Seed: GMMMGMFNMLSTVLGVS
GMMMGMYNMTSNVLVVS

SEQ ID NO: 185607 - protein, 17 aa, Artificial Sequence
  Description of Artificial Sequence: Synthetic peptide
  Seed: GMMMGMFNMLSTVLGVS
GMMMGMYNMTSPVLAVS

SEQ ID NO: 185608 - protein, 17 aa, Artificial Sequence
  Description of Artificial Sequence: Synthetic peptide
  Seed: GMMMGMFNMLSTVLGVS
GMMMGMYNMTSPVLFVS

SEQ ID NO: 185609 - protein, 17 aa, Artificial Sequence
  Description of Artificial Sequence: Synthetic peptide
  Seed: GMMMGMFNMLSTVLGVS
GMMMGMYNMTSPVLGVS

SEQ ID NO: 185610 - protein, 17 aa, Artificial Sequence
  Description of Artificial Sequence: Synthetic peptide
  Seed: GMMMGMFNMLSTVLGVS
GMMMGMYNMTSPVLHVS

SEQ ID NO: 185611 - protein, 17 aa, Artificial Sequence
  Description of Artificial Sequence: Synthetic peptide
  Seed: GMMMGMFNMLSTVLGVS
GMMMGMYNMTSPVLIVS

SEQ ID NO: 185612 - protein, 17 aa, Artificial Sequence
  Description of Artificial Sequence: Synthetic peptide
  Seed: GMMMGMFNMLSTVLGVS
GMMMGMYNMTSPVLLVS

SEQ ID NO: 185613 - protein, 17 aa, Artificial Sequence
  Description of Artificial Sequence: Synthetic peptide
  Seed: GMMMGMFNMLSTVLGVS
GMMMGMYNMTSPVLMVS

SEQ ID NO: 185614 - protein, 17 aa, Artificial Sequence
  Description of Artificial Sequence: Synthetic peptide
  Seed: GMMMGMFNMLSTVLGVS
GMMMGMYNMTSPVLNVS

SEQ ID NO: 185615 - protein, 17 aa, Artificial Sequence
  Description of Artificial Sequence: Synthetic peptide
  Seed: GMMMGMFNMLSTVLGVS
GMMMGMYNMTSPVLQVS

SEQ ID NO: 185616 - protein, 17 aa, Artificial Sequence
  Description of Artificial Sequence: Synthetic peptide
  Seed: GMMMGMFNMLSTVLGVS
GMMMGMYNMTSPVLSVS

SEQ ID NO: 185617 - protein, 17 aa, Artificial Sequence
  Description of Artificial Sequence: Synthetic peptide
  Seed: GMMMGMFNMLSTVLGVS
GMMMGMYNMTSPVLTVS

SEQ ID NO: 185618 - protein, 17 aa, Artificial Sequence
  Description of Artificial Sequence: Synthetic peptide
  Seed: GMMMGMFNMLSTVLGVS
GMMMGMYNMTSPVLVVS

SEQ ID NO: 185619 - protein, 17 aa, Artificial Sequence
  Description of Artificial Sequence: Synthetic peptide
  Seed: GMMMGMFNMLSTVLGVS
GMMMGMYNMTSSVLAVS

SEQ ID NO: 185620 - protein, 17 aa, Artificial Sequence
  Description of Artificial Sequence: Synthetic peptide
  Seed: GMMMGMFNMLSTVLGVS
GMMMGMYNMTSSVLHVS

SEQ ID NO: 185621 - protein, 17 aa, Artificial Sequence
  Description of Artificial Sequence: Synthetic peptide
  Seed: GMMMGMFNMLSTVLGVS
GMMMGMYNMTSSVLIVS

SEQ ID NO: 185622 - protein, 17 aa, Artificial Sequence
  Description of Artificial Sequence: Synthetic peptide
  Seed: GMMMGMFNMLSTVLGVS
GMMMGMYNMTSSVLLVS

SEQ ID NO: 185623 - protein, 17 aa, Artificial Sequence
  Description of Artificial Sequence: Synthetic peptide
  Seed: GMMMGMFNMLSTVLGVS
GMMMGMYNMTSSVLMVS

SEQ ID NO: 185624 - protein, 17 aa, Artificial Sequence
  Description of Artificial Sequence: Synthetic peptide
  Seed: GMMMGMFNMLSTVLGVS
GMMMGMYNMTSSVLNVS

SEQ ID NO: 185625 - protein, 17 aa, Artificial Sequence
  Description of Artificial Sequence: Synthetic peptide
  Seed: GMMMGMFNMLSTVLGVS
GMMMGMYNMTSSVLSVS

SEQ ID NO: 185626 - protein, 17 aa, Artificial Sequence
  Description of Artificial Sequence: Synthetic peptide
  Seed: GMMMGMFNMLSTVLGVS
GMMMGMYNMTSSVLTVS

SEQ ID NO: 185627 - protein, 17 aa, Artificial Sequence
  Description of Artificial Sequence: Synthetic peptide
  Seed: GMMMGMFNMLSTVLGVS
GMMMGMYNMTSSVLVVS

SEQ ID NO: 185628 - protein, 17 aa, Artificial Sequence
  Description of Artificial Sequence: Synthetic peptide
  Seed: GMMMGMFNMLSTVLGVS
GMMMGMYNMTSSVLYVS

SEQ ID NO: 185629 - protein, 17 aa, Artificial Sequence
  Description of Artificial Sequence: Synthetic peptide
  Seed: GMMMGMFNMLSTVLGVS
GMMMGMYNMTSTVLAVS

SEQ ID NO: 185630 - protein, 17 aa, Artificial Sequence
  Description of Artificial Sequence: Synthetic peptide
  Seed: GMMMGMFNMLSTVLGVS
GMMMGMYNMTSTVLIVS

SEQ ID NO: 185631 - protein, 17 aa, Artificial Sequence
  Description of Artificial Sequence: Synthetic peptide
  Seed: GMMMGMFNMLSTVLGVS
GMMMGMYNMTSTVLNVS

SEQ ID NO: 185632 - protein, 17 aa, Artificial Sequence
  Description of Artificial Sequence: Synthetic peptide
  Seed: GMMMGMFNMLSTVLGVS
GMMMGMYNMTSTVLSVS

SEQ ID NO: 185633 - protein, 17 aa, Artificial Sequence
  Description of Artificial Sequence: Synthetic peptide
  Seed: GMMMGMFNMLSTVLGVS
GMMMGMYNMVSAVLAVS

SEQ ID NO: 185634 - protein, 17 aa, Artificial Sequence
  Description of Artificial Sequence: Synthetic peptide
  Seed: GMMMGMFNMLSTVLGVS
GMMMGMYNMVSAVLGVS

SEQ ID NO: 185635 - protein, 17 aa, Artificial Sequence
  Description of Artificial Sequence: Synthetic peptide
  Seed: GMMMGMFNMLSTVLGVS
GMMMGMYNMVSAVLHVS

SEQ ID NO: 185636 - protein, 17 aa, Artificial Sequence
  Description of Artificial Sequence: Synthetic peptide
  Seed: GMMMGMFNMLSTVLGVS
GMMMGMYNMVSAVLIVS

SEQ ID NO: 185637 - protein, 17 aa, Artificial Sequence
  Description of Artificial Sequence: Synthetic peptide
  Seed: GMMMGMFNMLSTVLGVS
GMMMGMYNMVSAVLKVS

SEQ ID NO: 185638 - protein, 17 aa, Artificial Sequence
  Description of Artificial Sequence: Synthetic peptide
  Seed: GMMMGMFNMLSTVLGVS
GMMMGMYNMVSAVLLVS

SEQ ID NO: 185639 - protein, 17 aa, Artificial Sequence
  Description of Artificial Sequence: Synthetic peptide
  Seed: GMMMGMFNMLSTVLGVS
GMMMGMYNMVSAVLNVS

SEQ ID NO: 185640 - protein, 17 aa, Artificial Sequence
  Description of Artificial Sequence: Synthetic peptide
  Seed: GMMMGMFNMLSTVLGVS
GMMMGMYNMVSAVLQVS

SEQ ID NO: 185641 - protein, 17 aa, Artificial Sequence
  Description of Artificial Sequence: Synthetic peptide
  Seed: GMMMGMFNMLSTVLGVS
GMMMGMYNMVSAVLRVS

SEQ ID NO: 185642 - protein, 17 aa, Artificial Sequence
  Description of Artificial Sequence: Synthetic peptide
  Seed: GMMMGMFNMLSTVLGVS
GMMMGMYNMVSAVLSVS

SEQ ID NO: 185643 - protein, 17 aa, Artificial Sequence
  Description of Artificial Sequence: Synthetic peptide
  Seed: GMMMGMFNMLSTVLGVS
GMMMGMYNMVSAVLTVS

SEQ ID NO: 185644 - protein, 17 aa, Artificial Sequence
  Description of Artificial Sequence: Synthetic peptide
  Seed: GMMMGMFNMLSTVLGVS
GMMMGMYNMVSAVLVVS

SEQ ID NO: 185645 - protein, 17 aa, Artificial Sequence
  Description of Artificial Sequence: Synthetic peptide
  Seed: GMMMGMFNMLSTVLGVS
GMMMGMYNMVSGVLAVS

SEQ ID NO: 185646 - protein, 17 aa, Artificial Sequence
  Description of Artificial Sequence: Synthetic peptide
  Seed: GMMMGMFNMLSTVLGVS
GMMMGMYNMVSGVLGVS

SEQ ID NO: 185647 - protein, 17 aa, Artificial Sequence
  Description of Artificial Sequence: Synthetic peptide
  Seed: GMMMGMFNMLSTVLGVS
GMMMGMYNMVSGVLHVS

SEQ ID NO: 185648 - protein, 17 aa, Artificial Sequence
  Description of Artificial Sequence: Synthetic peptide
  Seed: GMMMGMFNMLSTVLGVS
GMMMGMYNMVSGVLIVS

SEQ ID NO: 185649 - protein, 17 aa, Artificial Sequence
  Description of Artificial Sequence: Synthetic peptide
  Seed: GMMMGMFNMLSTVLGVS
GMMMGMYNMVSGVLKVS

SEQ ID NO: 185650 - protein, 17 aa, Artificial Sequence
  Description of Artificial Sequence: Synthetic peptide
  Seed: GMMMGMFNMLSTVLGVS
GMMMGMYNMVSGVLLVS

SEQ ID NO: 185651 - protein, 17 aa, Artificial Sequence
  Description of Artificial Sequence: Synthetic peptide
  Seed: GMMMGMFNMLSTVLGVS
GMMMGMYNMVSGVLMVS

SEQ ID NO: 185652 - protein, 17 aa, Artificial Sequence
  Description of Artificial Sequence: Synthetic peptide
  Seed: GMMMGMFNMLSTVLGVS
GMMMGMYNMVSGVLNVS

SEQ ID NO: 185653 - protein, 17 aa, Artificial Sequence
  Description of Artificial Sequence: Synthetic peptide
  Seed: GMMMGMFNMLSTVLGVS
GMMMGMYNMVSGVLRVS

SEQ ID NO: 185654 - protein, 17 aa, Artificial Sequence
  Description of Artificial Sequence: Synthetic peptide
  Seed: GMMMGMFNMLSTVLGVS
GMMMGMYNMVSGVLSVS

SEQ ID NO: 185655 - protein, 17 aa, Artificial Sequence
  Description of Artificial Sequence: Synthetic peptide
  Seed: GMMMGMFNMLSTVLGVS
GMMMGMYNMVSGVLTVS

SEQ ID NO: 185656 - protein, 17 aa, Artificial Sequence
  Description of Artificial Sequence: Synthetic peptide
  Seed: GMMMGMFNMLSTVLGVS
GMMMGMYNMVSGVLVVS

SEQ ID NO: 185657 - protein, 17 aa, Artificial Sequence
  Description of Artificial Sequence: Synthetic peptide
  Seed: GMMMGMFNMLSTVLGVS
GMMMGMYNMVSKVLHVS

SEQ ID NO: 185658 - protein, 17 aa, Artificial Sequence
  Description of Artificial Sequence: Synthetic peptide
  Seed: GMMMGMFNMLSTVLGVS
GMMMGMYNMVSKVLSVS

SEQ ID NO: 185659 - protein, 17 aa, Artificial Sequence
  Description of Artificial Sequence: Synthetic peptide
  Seed: GMMMGMFNMLSTVLGVS
GMMMGMYNMVSNVLAVS

SEQ ID NO: 185660 - protein, 17 aa, Artificial Sequence
  Description of Artificial Sequence: Synthetic peptide
  Seed: GMMMGMFNMLSTVLGVS
GMMMGMYNMVSNVLDVS

SEQ ID NO: 185661 - protein, 17 aa, Artificial Sequence
  Description of Artificial Sequence: Synthetic peptide
  Seed: GMMMGMFNMLSTVLGVS
GMMMGMYNMVSNVLNVS

SEQ ID NO: 185662 - protein, 17 aa, Artificial Sequence
  Description of Artificial Sequence: Synthetic peptide
  Seed: GMMMGMFNMLSTVLGVS
GMMMGMYNMVSNVLSVS

SEQ ID NO: 185663 - protein, 17 aa, Artificial Sequence
  Description of Artificial Sequence: Synthetic peptide
  Seed: GMMMGMFNMLSTVLGVS
GMMMGMYNMVSNVLVVS

SEQ ID NO: 185664 - protein, 17 aa, Artificial Sequence
  Description of Artificial Sequence: Synthetic peptide
  Seed: GMMMGMFNMLSTVLGVS
GMMMGMYNMVSPVLAVS

SEQ ID NO: 185665 - protein, 17 aa, Artificial Sequence
  Description of Artificial Sequence: Synthetic peptide
  Seed: GMMMGMFNMLSTVLGVS
GMMMGMYNMVSPVLDVS

SEQ ID NO: 185666 - protein, 17 aa, Artificial Sequence
  Description of Artificial Sequence: Synthetic peptide
  Seed: GMMMGMFNMLSTVLGVS
GMMMGMYNMVSPVLEVS

SEQ ID NO: 185667 - protein, 17 aa, Artificial Sequence
  Description of Artificial Sequence: Synthetic peptide
  Seed: GMMMGMFNMLSTVLGVS
GMMMGMYNMVSPVLGVS

SEQ ID NO: 185668 - protein, 17 aa, Artificial Sequence
  Description of Artificial Sequence: Synthetic peptide
  Seed: GMMMGMFNMLSTVLGVS
GMMMGMYNMVSPVLHVS

SEQ ID NO: 185669 - protein, 17 aa, Artificial Sequence
  Description of Artificial Sequence: Synthetic peptide
  Seed: GMMMGMFNMLSTVLGVS
GMMMGMYNMVSPVLIVS

SEQ ID NO: 185670 - protein, 17 aa, Artificial Sequence
  Description of Artificial Sequence: Synthetic peptide
  Seed: GMMMGMFNMLSTVLGVS
GMMMGMYNMVSPVLKVS

SEQ ID NO: 185671 - protein, 17 aa, Artificial Sequence
  Description of Artificial Sequence: Synthetic peptide
  Seed: GMMMGMFNMLSTVLGVS
GMMMGMYNMVSPVLLVS

SEQ ID NO: 185672 - protein, 17 aa, Artificial Sequence
  Description of Artificial Sequence: Synthetic peptide
  Seed: GMMMGMFNMLSTVLGVS
GMMMGMYNMVSPVLMVS

SEQ ID NO: 185673 - protein, 17 aa, Artificial Sequence
  Description of Artificial Sequence: Synthetic peptide
  Seed: GMMMGMFNMLSTVLGVS
GMMMGMYNMVSPVLNVS

SEQ ID NO: 185674 - protein, 17 aa, Artificial Sequence
  Description of Artificial Sequence: Synthetic peptide
  Seed: GMMMGMFNMLSTVLGVS
GMMMGMYNMVSPVLPVS

SEQ ID NO: 185675 - protein, 17 aa, Artificial Sequence
  Description of Artificial Sequence: Synthetic peptide
  Seed: GMMMGMFNMLSTVLGVS
GMMMGMYNMVSPVLQVS

SEQ ID NO: 185676 - protein, 17 aa, Artificial Sequence
  Description of Artificial Sequence: Synthetic peptide
  Seed: GMMMGMFNMLSTVLGVS
GMMMGMYNMVSPVLRVS

SEQ ID NO: 185677 - protein, 17 aa, Artificial Sequence
  Description of Artificial Sequence: Synthetic peptide
  Seed: GMMMGMFNMLSTVLGVS
GMMMGMYNMVSPVLSVS

SEQ ID NO: 185678 - protein, 17 aa, Artificial Sequence
  Description of Artificial Sequence: Synthetic peptide
  Seed: GMMMGMFNMLSTVLGVS
GMMMGMYNMVSPVLTVS

SEQ ID NO: 185679 - protein, 17 aa, Artificial Sequence
  Description of Artificial Sequence: Synthetic peptide
  Seed: GMMMGMFNMLSTVLGVS
GMMMGMYNMVSPVLVVS

SEQ ID NO: 185680 - protein, 17 aa, Artificial Sequence
  Description of Artificial Sequence: Synthetic peptide
  Seed: GMMMGMFNMLSTVLGVS
GMMMGMYNMVSRVLHVS

SEQ ID NO: 185681 - protein, 17 aa, Artificial Sequence
  Description of Artificial Sequence: Synthetic peptide
  Seed: GMMMGMFNMLSTVLGVS
GMMMGMYNMVSSVLAVS

SEQ ID NO: 185682 - protein, 17 aa, Artificial Sequence
  Description of Artificial Sequence: Synthetic peptide
  Seed: GMMMGMFNMLSTVLGVS
GMMMGMYNMVSSVLHVS

SEQ ID NO: 185683 - protein, 17 aa, Artificial Sequence
  Description of Artificial Sequence: Synthetic peptide
  Seed: GMMMGMFNMLSTVLGVS
GMMMGMYNMVSSVLKVS

SEQ ID NO: 185684 - protein, 17 aa, Artificial Sequence
  Description of Artificial Sequence: Synthetic peptide
  Seed: GMMMGMFNMLSTVLGVS
GMMMGMYNMVSSVLNVS

SEQ ID NO: 185685 - protein, 17 aa, Artificial Sequence
  Description of Artificial Sequence: Synthetic peptide
  Seed: GMMMGMFNMLSTVLGVS
GMMMGMYNMVSSVLRVS

SEQ ID NO: 185686 - protein, 17 aa, Artificial Sequence
  Description of Artificial Sequence: Synthetic peptide
  Seed: GMMMGMFNMLSTVLGVS
GMMMGMYNMVSSVLSVS

SEQ ID NO: 185687 - protein, 17 aa, Artificial Sequence
  Description of Artificial Sequence: Synthetic peptide
  Seed: GMMMGMFNMLSTVLGVS
GMMMGMYNMVSSVLTVS

SEQ ID NO: 185688 - protein, 17 aa, Artificial Sequence
  Description of Artificial Sequence: Synthetic peptide
  Seed: GMMMGMFNMLSTVLGVS
GMMMGMYNMVSSVLVVS

SEQ ID NO: 185689 - protein, 17 aa, Artificial Sequence
  Description of Artificial Sequence: Synthetic peptide
  Seed: GMMMGMFNMLSTVLGVS
GMMMGMYNMVSTVLAVS

SEQ ID NO: 185690 - protein, 17 aa, Artificial Sequence
  Description of Artificial Sequence: Synthetic peptide
  Seed: GMMMGMFNMLSTVLGVS
GMMMGMYNMVSTVLHVS

SEQ ID NO: 185691 - protein, 17 aa, Artificial Sequence
  Description of Artificial Sequence: Synthetic peptide
  Seed: GMMMGMFNMLSTVLGVS
GMMMGMYNMVSTVLNVS

SEQ ID NO: 185692 - protein, 17 aa, Artificial Sequence
  Description of Artificial Sequence: Synthetic peptide
  Seed: GMMMGMFNMLSTVLGVS
GMMMGMYNMVSTVLSVS

SEQ ID NO: 185693 - protein, 17 aa, Artificial Sequence
  Description of Artificial Sequence: Synthetic peptide
  Seed: GMMMGMFNMLSTVLGVS
GMMMGMYNMVSVVLHVS

SEQ ID NO: 185694 - protein, 17 aa, Artificial Sequence
  Description of Artificial Sequence: Synthetic peptide
  Seed: GMMMGMFNMLSTVLGVS
GMMMGMYNMVSVVLNVS

SEQ ID NO: 185695 - protein, 17 aa, Artificial Sequence
  Description of Artificial Sequence: Synthetic peptide
  Seed: GMMMGMFNMLSTVLGVS
GMMMGMYNMWSAVLAVS

SEQ ID NO: 185696 - protein, 17 aa, Artificial Sequence
  Description of Artificial Sequence: Synthetic peptide
  Seed: GMMMGMFNMLSTVLGVS
GMMMGMFNMLATVAGVS

SEQ ID NO: 185697 - protein, 17 aa, Artificial Sequence
  Description of Artificial Sequence: Synthetic peptide
  Seed: GMMMGMFNMLSTVLGVS
GMMMGMFNMLATVIGVS

SEQ ID NO: 185698 - protein, 17 aa, Artificial Sequence
  Description of Artificial Sequence: Synthetic peptide
  Seed: GMMMGMFNMLSTVLGVS
GMMMGMFNMLATVVGVS

SEQ ID NO: 185699 - protein, 17 aa, Artificial Sequence
  Description of Artificial Sequence: Synthetic peptide
  Seed: GMMMGMFNMLSTVLGVS
GMMFGMANFLSFVLGVS

SEQ ID NO: 185700 - protein, 17 aa, Artificial Sequence
  Description of Artificial Sequence: Synthetic peptide
  Seed: GMMMGMFNMLSTVLGVS
GMMFGMANFLSIVLGVS

SEQ ID NO: 185701 - protein, 17 aa, Artificial Sequence
  Description of Artificial Sequence: Synthetic peptide
  Seed: GMMMGMFNMLSTVLGVS
GMMFGMANFLSLVLGVS

SEQ ID NO: 185702 - protein, 17 aa, Artificial Sequence
  Description of Artificial Sequence: Synthetic peptide
  Seed: GMMMGMFNMLSTVLGVS
GMMFGMANFLSMVLGVS

SEQ ID NO: 185703 - protein, 17 aa, Artificial Sequence
  Description of Artificial Sequence: Synthetic peptide
  Seed: GMMMGMFNMLSTVLGVS
GMMFGMANFLSTVLGVS

SEQ ID NO: 185704 - protein, 17 aa, Artificial Sequence
  Description of Artificial Sequence: Synthetic peptide
  Seed: GMMMGMFNMLSTVLGVS
GMMFGMANFLSVVLGVS

SEQ ID NO: 185705 - protein, 17 aa, Artificial Sequence
  Description of Artificial Sequence: Synthetic peptide
  Seed: GMMMGMFNMLSTVLGVS
GMMFGMANFLSYVLGVS

SEQ ID NO: 185706 - protein, 17 aa, Artificial Sequence
  Description of Artificial Sequence: Synthetic peptide
  Seed: GMMMGMFNMLSTVLGVS
GMMFGMANYLSIVLGVS

SEQ ID NO: 185707 - protein, 17 aa, Artificial Sequence
  Description of Artificial Sequence: Synthetic peptide
  Seed: GMMMGMFNMLSTVLGVS
GMMFGMANYLSLVLGVS

SEQ ID NO: 185708 - protein, 17 aa, Artificial Sequence
  Description of Artificial Sequence: Synthetic peptide
  Seed: GMMMGMFNMLSTVLGVS
GMMFGMANYLSVVLGVS

SEQ ID NO: 185709 - protein, 17 aa, Artificial Sequence
  Description of Artificial Sequence: Synthetic peptide
  Seed: GMMMGMFNMLSTVLGVS
GMMFGMENFLSAVLGVS

SEQ ID NO: 185710 - protein, 17 aa, Artificial Sequence
  Description of Artificial Sequence: Synthetic peptide
  Seed: GMMMGMFNMLSTVLGVS
GMMFGMENFLSFVLGVS

SEQ ID NO: 185711 - protein, 17 aa, Artificial Sequence
  Description of Artificial Sequence: Synthetic peptide
  Seed: GMMMGMFNMLSTVLGVS
GMMFGMENFLSIVLGVS

SEQ ID NO: 185712 - protein, 17 aa, Artificial Sequence
  Description of Artificial Sequence: Synthetic peptide
  Seed: GMMMGMFNMLSTVLGVS
GMMFGMENFLSLVLGVS

SEQ ID NO: 185713 - protein, 17 aa, Artificial Sequence
  Description of Artificial Sequence: Synthetic peptide
  Seed: GMMMGMFNMLSTVLGVS
GMMFGMENFLSMVLGVS

SEQ ID NO: 185714 - protein, 17 aa, Artificial Sequence
  Description of Artificial Sequence: Synthetic peptide
  Seed: GMMMGMFNMLSTVLGVS
GMMFGMENFLSSVLGVS

SEQ ID NO: 185715 - protein, 17 aa, Artificial Sequence
  Description of Artificial Sequence: Synthetic peptide
  Seed: GMMMGMFNMLSTVLGVS
GMMFGMENFLSTVLGVS

SEQ ID NO: 185716 - protein, 17 aa, Artificial Sequence
  Description of Artificial Sequence: Synthetic peptide
  Seed: GMMMGMFNMLSTVLGVS
GMMFGMENFLSVVLGVS

SEQ ID NO: 185717 - protein, 17 aa, Artificial Sequence
  Description of Artificial Sequence: Synthetic peptide
  Seed: GMMMGMFNMLSTVLGVS
GMMFGMENFLSYVLGVS

SEQ ID NO: 185718 - protein, 17 aa, Artificial Sequence
  Description of Artificial Sequence: Synthetic peptide
  Seed: GMMMGMFNMLSTVLGVS
GMMFGMENYLSIVLGVS

SEQ ID NO: 185719 - protein, 17 aa, Artificial Sequence
  Description of Artificial Sequence: Synthetic peptide
  Seed: GMMMGMFNMLSTVLGVS
GMMFGMENYLSLVLGVS

SEQ ID NO: 185720 - protein, 17 aa, Artificial Sequence
  Description of Artificial Sequence: Synthetic peptide
  Seed: GMMMGMFNMLSTVLGVS
GMMFGMENYLSVVLGVS

SEQ ID NO: 185721 - protein, 17 aa, Artificial Sequence
  Description of Artificial Sequence: Synthetic peptide
  Seed: GMMMGMFNMLSTVLGVS
GMMFGMHNFLSAVLGVS

SEQ ID NO: 185722 - protein, 17 aa, Artificial Sequence
  Description of Artificial Sequence: Synthetic peptide
  Seed: GMMMGMFNMLSTVLGVS
GMMFGMHNFLSEVLGVS

SEQ ID NO: 185723 - protein, 17 aa, Artificial Sequence
  Description of Artificial Sequence: Synthetic peptide
  Seed: GMMMGMFNMLSTVLGVS
GMMFGMHNFLSFVLGVS

SEQ ID NO: 185724 - protein, 17 aa, Artificial Sequence
  Description of Artificial Sequence: Synthetic peptide
  Seed: GMMMGMFNMLSTVLGVS
GMMFGMHNFLSIVLGVS

SEQ ID NO: 185725 - protein, 17 aa, Artificial Sequence
  Description of Artificial Sequence: Synthetic peptide
  Seed: GMMMGMFNMLSTVLGVS
GMMFGMHNFLSLVLGVS

SEQ ID NO: 185726 - protein, 17 aa, Artificial Sequence
  Description of Artificial Sequence: Synthetic peptide
  Seed: GMMMGMFNMLSTVLGVS
GMMFGMHNFLSMVLGVS

SEQ ID NO: 185727 - protein, 17 aa, Artificial Sequence
  Description of Artificial Sequence: Synthetic peptide
  Seed: GMMMGMFNMLSTVLGVS
GMMFGMHNFLSNVLGVS

SEQ ID NO: 185728 - protein, 17 aa, Artificial Sequence
  Description of Artificial Sequence: Synthetic peptide
  Seed: GMMMGMFNMLSTVLGVS
GMMFGMHNFLSSVLGVS

SEQ ID NO: 185729 - protein, 17 aa, Artificial Sequence
  Description of Artificial Sequence: Synthetic peptide
  Seed: GMMMGMFNMLSTVLGVS
GMMFGMHNFLSTVLGVS

SEQ ID NO: 185730 - protein, 17 aa, Artificial Sequence
  Description of Artificial Sequence: Synthetic peptide
  Seed: GMMMGMFNMLSTVLGVS
GMMFGMHNFLSVVLGVS

SEQ ID NO: 185731 - protein, 17 aa, Artificial Sequence
  Description of Artificial Sequence: Synthetic peptide
  Seed: GMMMGMFNMLSTVLGVS
GMMFGMHNFLSYVLGVS

SEQ ID NO: 185732 - protein, 17 aa, Artificial Sequence
  Description of Artificial Sequence: Synthetic peptide
  Seed: GMMMGMFNMLSTVLGVS
GMMFGMHNLLSLVLGVS

SEQ ID NO: 185733 - protein, 17 aa, Artificial Sequence
  Description of Artificial Sequence: Synthetic peptide
  Seed: GMMMGMFNMLSTVLGVS
GMMFGMHNYLSFVLGVS

SEQ ID NO: 185734 - protein, 17 aa, Artificial Sequence
  Description of Artificial Sequence: Synthetic peptide
  Seed: GMMMGMFNMLSTVLGVS
GMMFGMHNYLSIVLGVS

SEQ ID NO: 185735 - protein, 17 aa, Artificial Sequence
  Description of Artificial Sequence: Synthetic peptide
  Seed: GMMMGMFNMLSTVLGVS
GMMFGMHNYLSLVLGVS

SEQ ID NO: 185736 - protein, 17 aa, Artificial Sequence
  Description of Artificial Sequence: Synthetic peptide
  Seed: GMMMGMFNMLSTVLGVS
GMMFGMHNYLSVVLGVS

SEQ ID NO: 185737 - protein, 17 aa, Artificial Sequence
  Description of Artificial Sequence: Synthetic peptide
  Seed: GMMMGMFNMLSTVLGVS
GMMFGMINFLSEVLGVS

SEQ ID NO: 185738 - protein, 17 aa, Artificial Sequence
  Description of Artificial Sequence: Synthetic peptide
  Seed: GMMMGMFNMLSTVLGVS
GMMFGMINFLSHVLGVS

SEQ ID NO: 185739 - protein, 17 aa, Artificial Sequence
  Description of Artificial Sequence: Synthetic peptide
  Seed: GMMMGMFNMLSTVLGVS
GMMFGMINFLSIVLGVS

SEQ ID NO: 185740 - protein, 17 aa, Artificial Sequence
  Description of Artificial Sequence: Synthetic peptide
  Seed: GMMMGMFNMLSTVLGVS
GMMFGMINFLSLVLGVS

SEQ ID NO: 185741 - protein, 17 aa, Artificial Sequence
  Description of Artificial Sequence: Synthetic peptide
  Seed: GMMMGMFNMLSTVLGVS
GMMFGMINFLSNVLGVS

SEQ ID NO: 185742 - protein, 17 aa, Artificial Sequence
  Description of Artificial Sequence: Synthetic peptide
  Seed: GMMMGMFNMLSTVLGVS
GMMFGMINFLSTVLGVS

SEQ ID NO: 185743 - protein, 17 aa, Artificial Sequence
  Description of Artificial Sequence: Synthetic peptide
  Seed: GMMMGMFNMLSTVLGVS
GMMFGMINFLSVVLGVS

SEQ ID NO: 185744 - protein, 17 aa, Artificial Sequence
  Description of Artificial Sequence: Synthetic peptide
  Seed: GMMMGMFNMLSTVLGVS
GMMFGMINYLSIVLGVS

SEQ ID NO: 185745 - protein, 17 aa, Artificial Sequence
  Description of Artificial Sequence: Synthetic peptide
  Seed: GMMMGMFNMLSTVLGVS
GMMFGMINYLSLVLGVS

SEQ ID NO: 185746 - protein, 17 aa, Artificial Sequence
  Description of Artificial Sequence: Synthetic peptide
  Seed: GMMMGMFNMLSTVLGVS
GMMFGMINYLSVVLGVS

SEQ ID NO: 185747 - protein, 17 aa, Artificial Sequence
  Description of Artificial Sequence: Synthetic peptide
  Seed: GMMMGMFNMLSTVLGVS
GMMFGMKNFLSFVLGVS

SEQ ID NO: 185748 - protein, 17 aa, Artificial Sequence
  Description of Artificial Sequence: Synthetic peptide
  Seed: GMMMGMFNMLSTVLGVS
GMMFGMKNFLSIVLGVS

SEQ ID NO: 185749 - protein, 17 aa, Artificial Sequence
  Description of Artificial Sequence: Synthetic peptide
  Seed: GMMMGMFNMLSTVLGVS
GMMFGMKNFLSLVLGVS

SEQ ID NO: 185750 - protein, 17 aa, Artificial Sequence
  Description of Artificial Sequence: Synthetic peptide
  Seed: GMMMGMFNMLSTVLGVS
GMMFGMKNFLSMVLGVS

SEQ ID NO: 185751 - protein, 17 aa, Artificial Sequence
  Description of Artificial Sequence: Synthetic peptide
  Seed: GMMMGMFNMLSTVLGVS
GMMFGMKNFLSVVLGVS

SEQ ID NO: 185752 - protein, 17 aa, Artificial Sequence
  Description of Artificial Sequence: Synthetic peptide
  Seed: GMMMGMFNMLSTVLGVS
GMMFGMLNFLSVVLGVS

SEQ ID NO: 185753 - protein, 17 aa, Artificial Sequence
  Description of Artificial Sequence: Synthetic peptide
  Seed: GMMMGMFNMLSTVLGVS
GMMFGMMNFLSIVLGVS

SEQ ID NO: 185754 - protein, 17 aa, Artificial Sequence
  Description of Artificial Sequence: Synthetic peptide
  Seed: GMMMGMFNMLSTVLGVS
GMMFGMMNFLSLVLGVS

SEQ ID NO: 185755 - protein, 17 aa, Artificial Sequence
  Description of Artificial Sequence: Synthetic peptide
  Seed: GMMMGMFNMLSTVLGVS
GMMFGMMNFLSVVLGVS

SEQ ID NO: 185756 - protein, 17 aa, Artificial Sequence
  Description of Artificial Sequence: Synthetic peptide
  Seed: GMMMGMFNMLSTVLGVS
GMMFGMNNFLSFVLGVS

SEQ ID NO: 185757 - protein, 17 aa, Artificial Sequence
  Description of Artificial Sequence: Synthetic peptide
  Seed: GMMMGMFNMLSTVLGVS
GMMFGMNNFLSIVLGVS

SEQ ID NO: 185758 - protein, 17 aa, Artificial Sequence
  Description of Artificial Sequence: Synthetic peptide
  Seed: GMMMGMFNMLSTVLGVS
GMMFGMNNFLSLVLGVS

SEQ ID NO: 185759 - protein, 17 aa, Artificial Sequence
  Description of Artificial Sequence: Synthetic peptide
  Seed: GMMMGMFNMLSTVLGVS
GMMFGMNNFLSVVLGVS

SEQ ID NO: 185760 - protein, 17 aa, Artificial Sequence
  Description of Artificial Sequence: Synthetic peptide
  Seed: GMMMGMFNMLSTVLGVS
GMMFGMQNFLSFVLGVS

SEQ ID NO: 185761 - protein, 17 aa, Artificial Sequence
  Description of Artificial Sequence: Synthetic peptide
  Seed: GMMMGMFNMLSTVLGVS
GMMFGMQNFLSIVLGVS

SEQ ID NO: 185762 - protein, 17 aa, Artificial Sequence
  Description of Artificial Sequence: Synthetic peptide
  Seed: GMMMGMFNMLSTVLGVS
GMMFGMQNFLSLVLGVS

SEQ ID NO: 185763 - protein, 17 aa, Artificial Sequence
  Description of Artificial Sequence: Synthetic peptide
  Seed: GMMMGMFNMLSTVLGVS
GMMFGMQNFLSMVLGVS

SEQ ID NO: 185764 - protein, 17 aa, Artificial Sequence
  Description of Artificial Sequence: Synthetic peptide
  Seed: GMMMGMFNMLSTVLGVS
GMMFGMQNFLSTVLGVS

SEQ ID NO: 185765 - protein, 17 aa, Artificial Sequence
  Description of Artificial Sequence: Synthetic peptide
  Seed: GMMMGMFNMLSTVLGVS
GMMFGMQNFLSVVLGVS

SEQ ID NO: 185766 - protein, 17 aa, Artificial Sequence
  Description of Artificial Sequence: Synthetic peptide
  Seed: GMMMGMFNMLSTVLGVS
GMMFGMQNYLSLVLGVS

SEQ ID NO: 185767 - protein, 17 aa, Artificial Sequence
  Description of Artificial Sequence: Synthetic peptide
  Seed: GMMMGMFNMLSTVLGVS
GMMFGMRNFLSIVLGVS

SEQ ID NO: 185768 - protein, 17 aa, Artificial Sequence
  Description of Artificial Sequence: Synthetic peptide
  Seed: GMMMGMFNMLSTVLGVS
GMMFGMRNFLSLVLGVS

SEQ ID NO: 185769 - protein, 17 aa, Artificial Sequence
  Description of Artificial Sequence: Synthetic peptide
  Seed: GMMMGMFNMLSTVLGVS
GMMFGMRNFLSVVLGVS

SEQ ID NO: 185770 - protein, 17 aa, Artificial Sequence
  Description of Artificial Sequence: Synthetic peptide
  Seed: GMMMGMFNMLSTVLGVS
GMMFGMSNFLSAVLGVS

SEQ ID NO: 185771 - protein, 17 aa, Artificial Sequence
  Description of Artificial Sequence: Synthetic peptide
  Seed: GMMMGMFNMLSTVLGVS
GMMFGMSNFLSEVLGVS

SEQ ID NO: 185772 - protein, 17 aa, Artificial Sequence
  Description of Artificial Sequence: Synthetic peptide
  Seed: GMMMGMFNMLSTVLGVS
GMMFGMSNFLSFVLGVS

SEQ ID NO: 185773 - protein, 17 aa, Artificial Sequence
  Description of Artificial Sequence: Synthetic peptide
  Seed: GMMMGMFNMLSTVLGVS
GMMFGMSNFLSIVLGVS

SEQ ID NO: 185774 - protein, 17 aa, Artificial Sequence
  Description of Artificial Sequence: Synthetic peptide
  Seed: GMMMGMFNMLSTVLGVS
GMMFGMSNFLSLVLGVS

SEQ ID NO: 185775 - protein, 17 aa, Artificial Sequence
  Description of Artificial Sequence: Synthetic peptide
  Seed: GMMMGMFNMLSTVLGVS
GMMFGMSNFLSMVLGVS

SEQ ID NO: 185776 - protein, 17 aa, Artificial Sequence
  Description of Artificial Sequence: Synthetic peptide
  Seed: GMMMGMFNMLSTVLGVS
GMMFGMSNFLSNVLGVS

SEQ ID NO: 185777 - protein, 17 aa, Artificial Sequence
  Description of Artificial Sequence: Synthetic peptide
  Seed: GMMMGMFNMLSTVLGVS
GMMFGMSNFLSSVLGVS

SEQ ID NO: 185778 - protein, 17 aa, Artificial Sequence
  Description of Artificial Sequence: Synthetic peptide
  Seed: GMMMGMFNMLSTVLGVS
GMMFGMSNFLSTVLGVS

SEQ ID NO: 185779 - protein, 17 aa, Artificial Sequence
  Description of Artificial Sequence: Synthetic peptide
  Seed: GMMMGMFNMLSTVLGVS
GMMFGMSNFLSVVLGVS

SEQ ID NO: 185780 - protein, 17 aa, Artificial Sequence
  Description of Artificial Sequence: Synthetic peptide
  Seed: GMMMGMFNMLSTVLGVS
GMMFGMSNFLSYVLGVS

SEQ ID NO: 185781 - protein, 17 aa, Artificial Sequence
  Description of Artificial Sequence: Synthetic peptide
  Seed: GMMMGMFNMLSTVLGVS
GMMFGMSNYLSIVLGVS

SEQ ID NO: 185782 - protein, 17 aa, Artificial Sequence
  Description of Artificial Sequence: Synthetic peptide
  Seed: GMMMGMFNMLSTVLGVS
GMMFGMSNYLSLVLGVS

SEQ ID NO: 185783 - protein, 17 aa, Artificial Sequence
  Description of Artificial Sequence: Synthetic peptide
  Seed: GMMMGMFNMLSTVLGVS
GMMFGMSNYLSVVLGVS

SEQ ID NO: 185784 - protein, 17 aa, Artificial Sequence
  Description of Artificial Sequence: Synthetic peptide
  Seed: GMMMGMFNMLSTVLGVS
GMMFGMTNFLSAVLGVS

SEQ ID NO: 185785 - protein, 17 aa, Artificial Sequence
  Description of Artificial Sequence: Synthetic peptide
  Seed: GMMMGMFNMLSTVLGVS
GMMFGMTNFLSEVLGVS

SEQ ID NO: 185786 - protein, 17 aa, Artificial Sequence
  Description of Artificial Sequence: Synthetic peptide
  Seed: GMMMGMFNMLSTVLGVS
GMMFGMTNFLSFVLGVS

SEQ ID NO: 185787 - protein, 17 aa, Artificial Sequence
  Description of Artificial Sequence: Synthetic peptide
  Seed: GMMMGMFNMLSTVLGVS
GMMFGMTNFLSHVLGVS

SEQ ID NO: 185788 - protein, 17 aa, Artificial Sequence
  Description of Artificial Sequence: Synthetic peptide
  Seed: GMMMGMFNMLSTVLGVS
GMMFGMTNFLSIVLGVS

SEQ ID NO: 185789 - protein, 17 aa, Artificial Sequence
  Description of Artificial Sequence: Synthetic peptide
  Seed: GMMMGMFNMLSTVLGVS
GMMFGMTNFLSLVLGVS

SEQ ID NO: 185790 - protein, 17 aa, Artificial Sequence
  Description of Artificial Sequence: Synthetic peptide
  Seed: GMMMGMFNMLSTVLGVS
GMMFGMTNFLSMVLGVS

SEQ ID NO: 185791 - protein, 17 aa, Artificial Sequence
  Description of Artificial Sequence: Synthetic peptide
  Seed: GMMMGMFNMLSTVLGVS
GMMFGMTNFLSNVLGVS

SEQ ID NO: 185792 - protein, 17 aa, Artificial Sequence
  Description of Artificial Sequence: Synthetic peptide
  Seed: GMMMGMFNMLSTVLGVS
GMMFGMTNFLSSVLGVS

SEQ ID NO: 185793 - protein, 17 aa, Artificial Sequence
  Description of Artificial Sequence: Synthetic peptide
  Seed: GMMMGMFNMLSTVLGVS
GMMFGMTNFLSTVLGVS

SEQ ID NO: 185794 - protein, 17 aa, Artificial Sequence
  Description of Artificial Sequence: Synthetic peptide
  Seed: GMMMGMFNMLSTVLGVS
GMMFGMTNFLSVVLGVS

SEQ ID NO: 185795 - protein, 17 aa, Artificial Sequence
  Description of Artificial Sequence: Synthetic peptide
  Seed: GMMMGMFNMLSTVLGVS
GMMFGMTNFLSYVLGVS

SEQ ID NO: 185796 - protein, 17 aa, Artificial Sequence
  Description of Artificial Sequence: Synthetic peptide
  Seed: GMMMGMFNMLSTVLGVS
GMMFGMTNYLSIVLGVS

SEQ ID NO: 185797 - protein, 17 aa, Artificial Sequence
  Description of Artificial Sequence: Synthetic peptide
  Seed: GMMMGMFNMLSTVLGVS
GMMFGMTNYLSLVLGVS

SEQ ID NO: 185798 - protein, 17 aa, Artificial Sequence
  Description of Artificial Sequence: Synthetic peptide
  Seed: GMMMGMFNMLSTVLGVS
GMMFGMTNYLSMVLGVS

SEQ ID NO: 185799 - protein, 17 aa, Artificial Sequence
  Description of Artificial Sequence: Synthetic peptide
  Seed: GMMMGMFNMLSTVLGVS
GMMFGMTNYLSVVLGVS

SEQ ID NO: 185800 - protein, 17 aa, Artificial Sequence
  Description of Artificial Sequence: Synthetic peptide
  Seed: GMMMGMFNMLSTVLGVS
GMMFGMVNFLSHVLGVS

SEQ ID NO: 185801 - protein, 17 aa, Artificial Sequence
  Description of Artificial Sequence: Synthetic peptide
  Seed: GMMMGMFNMLSTVLGVS
GMMFGMVNFLSIVLGVS

SEQ ID NO: 185802 - protein, 17 aa, Artificial Sequence
  Description of Artificial Sequence: Synthetic peptide
  Seed: GMMMGMFNMLSTVLGVS
GMMFGMVNFLSLVLGVS

SEQ ID NO: 185803 - protein, 17 aa, Artificial Sequence
  Description of Artificial Sequence: Synthetic peptide
  Seed: GMMMGMFNMLSTVLGVS
GMMFGMVNFLSNVLGVS

SEQ ID NO: 185804 - protein, 17 aa, Artificial Sequence
  Description of Artificial Sequence: Synthetic peptide
  Seed: GMMMGMFNMLSTVLGVS
GMMFGMVNFLSTVLGVS

SEQ ID NO: 185805 - protein, 17 aa, Artificial Sequence
  Description of Artificial Sequence: Synthetic peptide
  Seed: GMMMGMFNMLSTVLGVS
GMMFGMVNFLSVVLGVS

SEQ ID NO: 185806 - protein, 17 aa, Artificial Sequence
  Description of Artificial Sequence: Synthetic peptide
  Seed: GMMMGMFNMLSTVLGVS
GMMFGMVNYLSIVLGVS

SEQ ID NO: 185807 - protein, 17 aa, Artificial Sequence
  Description of Artificial Sequence: Synthetic peptide
  Seed: GMMMGMFNMLSTVLGVS
GMMFGMVNYLSLVLGVS

SEQ ID NO: 185808 - protein, 17 aa, Artificial Sequence
  Description of Artificial Sequence: Synthetic peptide
  Seed: GMMMGMFNMLSTVLGVS
GMMFGMVNYLSVVLGVS

SEQ ID NO: 185809 - protein, 17 aa, Artificial Sequence
  Description of Artificial Sequence: Synthetic peptide
  Seed: GMMMGMFNMLSTVLGVS
GMMIGMANFLSVVLGVS

SEQ ID NO: 185810 - protein, 17 aa, Artificial Sequence
  Description of Artificial Sequence: Synthetic peptide
  Seed: GMMMGMFNMLSTVLGVS
GMMIGMENFLSIVLGVS

SEQ ID NO: 185811 - protein, 17 aa, Artificial Sequence
  Description of Artificial Sequence: Synthetic peptide
  Seed: GMMMGMFNMLSTVLGVS
GMMIGMENFLSLVLGVS

SEQ ID NO: 185812 - protein, 17 aa, Artificial Sequence
  Description of Artificial Sequence: Synthetic peptide
  Seed: GMMMGMFNMLSTVLGVS
GMMIGMENFLSVVLGVS

SEQ ID NO: 185813 - protein, 17 aa, Artificial Sequence
  Description of Artificial Sequence: Synthetic peptide
  Seed: GMMMGMFNMLSTVLGVS
GMMIGMHNFLSIVLGVS

SEQ ID NO: 185814 - protein, 17 aa, Artificial Sequence
  Description of Artificial Sequence: Synthetic peptide
  Seed: GMMMGMFNMLSTVLGVS
GMMIGMHNFLSLVLGVS

SEQ ID NO: 185815 - protein, 17 aa, Artificial Sequence
  Description of Artificial Sequence: Synthetic peptide
  Seed: GMMMGMFNMLSTVLGVS
GMMIGMHNFLSVVLGVS

SEQ ID NO: 185816 - protein, 17 aa, Artificial Sequence
  Description of Artificial Sequence: Synthetic peptide
  Seed: GMMMGMFNMLSTVLGVS
GMMIGMQNFLSIVLGVS

SEQ ID NO: 185817 - protein, 17 aa, Artificial Sequence
  Description of Artificial Sequence: Synthetic peptide
  Seed: GMMMGMFNMLSTVLGVS
GMMIGMQNFLSVVLGVS

SEQ ID NO: 185818 - protein, 17 aa, Artificial Sequence
  Description of Artificial Sequence: Synthetic peptide
  Seed: GMMMGMFNMLSTVLGVS
GMMIGMSNFLSIVLGVS

SEQ ID NO: 185819 - protein, 17 aa, Artificial Sequence
  Description of Artificial Sequence: Synthetic peptide
  Seed: GMMMGMFNMLSTVLGVS
GMMIGMSNFLSLVLGVS

SEQ ID NO: 185820 - protein, 17 aa, Artificial Sequence
  Description of Artificial Sequence: Synthetic peptide
  Seed: GMMMGMFNMLSTVLGVS
GMMIGMSNFLSVVLGVS

SEQ ID NO: 185821 - protein, 17 aa, Artificial Sequence
  Description of Artificial Sequence: Synthetic peptide
  Seed: GMMMGMFNMLSTVLGVS
GMMIGMTNFLSIVLGVS

SEQ ID NO: 185822 - protein, 17 aa, Artificial Sequence
  Description of Artificial Sequence: Synthetic peptide
  Seed: GMMMGMFNMLSTVLGVS
GMMIGMTNFLSLVLGVS

SEQ ID NO: 185823 - protein, 17 aa, Artificial Sequence
  Description of Artificial Sequence: Synthetic peptide
  Seed: GMMMGMFNMLSTVLGVS
GMMIGMTNFLSVVLGVS

SEQ ID NO: 185824 - protein, 17 aa, Artificial Sequence
  Description of Artificial Sequence: Synthetic peptide
  Seed: GMMMGMFNMLSTVLGVS
GMMLGMANFLSIVLGVS

SEQ ID NO: 185825 - protein, 17 aa, Artificial Sequence
  Description of Artificial Sequence: Synthetic peptide
  Seed: GMMMGMFNMLSTVLGVS
GMMLGMANFLSLVLGVS

SEQ ID NO: 185826 - protein, 17 aa, Artificial Sequence
  Description of Artificial Sequence: Synthetic peptide
  Seed: GMMMGMFNMLSTVLGVS
GMMLGMANFLSVVLGVS

SEQ ID NO: 185827 - protein, 17 aa, Artificial Sequence
  Description of Artificial Sequence: Synthetic peptide
  Seed: GMMMGMFNMLSTVLGVS
GMMLGMENFLSIVLGVS

SEQ ID NO: 185828 - protein, 17 aa, Artificial Sequence
  Description of Artificial Sequence: Synthetic peptide
  Seed: GMMMGMFNMLSTVLGVS
GMMLGMENFLSLVLGVS

SEQ ID NO: 185829 - protein, 17 aa, Artificial Sequence
  Description of Artificial Sequence: Synthetic peptide
  Seed: GMMMGMFNMLSTVLGVS
GMMLGMENFLSVVLGVS

SEQ ID NO: 185830 - protein, 17 aa, Artificial Sequence
  Description of Artificial Sequence: Synthetic peptide
  Seed: GMMMGMFNMLSTVLGVS
GMMLGMHNFLSIVLGVS

SEQ ID NO: 185831 - protein, 17 aa, Artificial Sequence
  Description of Artificial Sequence: Synthetic peptide
  Seed: GMMMGMFNMLSTVLGVS
GMMLGMHNFLSLVLGVS

SEQ ID NO: 185832 - protein, 17 aa, Artificial Sequence
  Description of Artificial Sequence: Synthetic peptide
  Seed: GMMMGMFNMLSTVLGVS
GMMLGMHNFLSVVLGVS

SEQ ID NO: 185833 - protein, 17 aa, Artificial Sequence
  Description of Artificial Sequence: Synthetic peptide
  Seed: GMMMGMFNMLSTVLGVS
GMMLGMQNFLSIVLGVS

SEQ ID NO: 185834 - protein, 17 aa, Artificial Sequence
  Description of Artificial Sequence: Synthetic peptide
  Seed: GMMMGMFNMLSTVLGVS
GMMLGMQNFLSLVLGVS

SEQ ID NO: 185835 - protein, 17 aa, Artificial Sequence
  Description of Artificial Sequence: Synthetic peptide
  Seed: GMMMGMFNMLSTVLGVS
GMMLGMQNFLSVVLGVS

SEQ ID NO: 185836 - protein, 17 aa, Artificial Sequence
  Description of Artificial Sequence: Synthetic peptide
  Seed: GMMMGMFNMLSTVLGVS
GMMLGMSNFLSIVLGVS

SEQ ID NO: 185837 - protein, 17 aa, Artificial Sequence
  Description of Artificial Sequence: Synthetic peptide
  Seed: GMMMGMFNMLSTVLGVS
GMMLGMSNFLSLVLGVS

SEQ ID NO: 185838 - protein, 17 aa, Artificial Sequence
  Description of Artificial Sequence: Synthetic peptide
  Seed: GMMMGMFNMLSTVLGVS
GMMLGMSNFLSVVLGVS

SEQ ID NO: 185839 - protein, 17 aa, Artificial Sequence
  Description of Artificial Sequence: Synthetic peptide
  Seed: GMMMGMFNMLSTVLGVS
GMMLGMTNFLSIVLGVS

SEQ ID NO: 185840 - protein, 17 aa, Artificial Sequence
  Description of Artificial Sequence: Synthetic peptide
  Seed: GMMMGMFNMLSTVLGVS
GMMLGMTNFLSLVLGVS

SEQ ID NO: 185841 - protein, 17 aa, Artificial Sequence
  Description of Artificial Sequence: Synthetic peptide
  Seed: GMMMGMFNMLSTVLGVS
GMMLGMTNFLSMVLGVS

SEQ ID NO: 185842 - protein, 17 aa, Artificial Sequence
  Description of Artificial Sequence: Synthetic peptide
  Seed: GMMMGMFNMLSTVLGVS
GMMLGMTNFLSTVLGVS

SEQ ID NO: 185843 - protein, 17 aa, Artificial Sequence
  Description of Artificial Sequence: Synthetic peptide
  Seed: GMMMGMFNMLSTVLGVS
GMMLGMTNFLSVVLGVS

SEQ ID NO: 185844 - protein, 17 aa, Artificial Sequence
  Description of Artificial Sequence: Synthetic peptide
  Seed: GMMMGMFNMLSTVLGVS
GMMMGMHNFLSIVLGVS

SEQ ID NO: 185845 - protein, 17 aa, Artificial Sequence
  Description of Artificial Sequence: Synthetic peptide
  Seed: GMMMGMFNMLSTVLGVS
GMMMGMTNFLSIVLGVS

SEQ ID NO: 185846 - protein, 17 aa, Artificial Sequence
  Description of Artificial Sequence: Synthetic peptide
  Seed: GMMMGMFNMLSTVLGVS
GMMMGMTNFLSLVLGVS

SEQ ID NO: 185847 - protein, 17 aa, Artificial Sequence
  Description of Artificial Sequence: Synthetic peptide
  Seed: GMMMGMFNMLSTVLGVS
GMMMGMTNFLSVVLGVS

SEQ ID NO: 185848 - protein, 17 aa, Artificial Sequence
  Description of Artificial Sequence: Synthetic peptide
  Seed: GMMMGMFNMLSTVLGVS
GMMVGMTNFLSIVLGVS

SEQ ID NO: 185849 - protein, 17 aa, Artificial Sequence
  Description of Artificial Sequence: Synthetic peptide
  Seed: GMMMGMFNMLSTVLGVS
GMMVGMTNFLSVVLGVS

SEQ ID NO: 185850 - protein, 17 aa, Artificial Sequence
  Description of Artificial Sequence: Synthetic peptide
  Seed: GMMMGMFNMLSTVLGVS
GMMWGMHNFLSIVLGVS

SEQ ID NO: 185851 - protein, 17 aa, Artificial Sequence
  Description of Artificial Sequence: Synthetic peptide
  Seed: GMMMGMFNMLSTVLGVS
GMMWGMHNFLSLVLGVS

SEQ ID NO: 185852 - protein, 17 aa, Artificial Sequence
  Description of Artificial Sequence: Synthetic peptide
  Seed: GMMMGMFNMLSTVLGVS
GMMWGMHNFLSVVLGVS

SEQ ID NO: 185853 - protein, 17 aa, Artificial Sequence
  Description of Artificial Sequence: Synthetic peptide
  Seed: GMMMGMFNMLSTVLGVS
GMMYGMANFLSIVLGVS

SEQ ID NO: 185854 - protein, 17 aa, Artificial Sequence
  Description of Artificial Sequence: Synthetic peptide
  Seed: GMMMGMFNMLSTVLGVS
GMMYGMANFLSLVLGVS

SEQ ID NO: 185855 - protein, 17 aa, Artificial Sequence
  Description of Artificial Sequence: Synthetic peptide
  Seed: GMMMGMFNMLSTVLGVS
GMMYGMANFLSVVLGVS

SEQ ID NO: 185856 - protein, 17 aa, Artificial Sequence
  Description of Artificial Sequence: Synthetic peptide
  Seed: GMMMGMFNMLSTVLGVS
GMMYGMENFLSIVLGVS

SEQ ID NO: 185857 - protein, 17 aa, Artificial Sequence
  Description of Artificial Sequence: Synthetic peptide
  Seed: GMMMGMFNMLSTVLGVS
GMMYGMENFLSLVLGVS

SEQ ID NO: 185858 - protein, 17 aa, Artificial Sequence
  Description of Artificial Sequence: Synthetic peptide
  Seed: GMMMGMFNMLSTVLGVS
GMMYGMENFLSVVLGVS

SEQ ID NO: 185859 - protein, 17 aa, Artificial Sequence
  Description of Artificial Sequence: Synthetic peptide
  Seed: GMMMGMFNMLSTVLGVS
GMMYGMHNFLSFVLGVS

SEQ ID NO: 185860 - protein, 17 aa, Artificial Sequence
  Description of Artificial Sequence: Synthetic peptide
  Seed: GMMMGMFNMLSTVLGVS
GMMYGMHNFLSIVLGVS

SEQ ID NO: 185861 - protein, 17 aa, Artificial Sequence
  Description of Artificial Sequence: Synthetic peptide
  Seed: GMMMGMFNMLSTVLGVS
GMMYGMHNFLSLVLGVS

SEQ ID NO: 185862 - protein, 17 aa, Artificial Sequence
  Description of Artificial Sequence: Synthetic peptide
  Seed: GMMMGMFNMLSTVLGVS
GMMYGMHNFLSVVLGVS

SEQ ID NO: 185863 - protein, 17 aa, Artificial Sequence
  Description of Artificial Sequence: Synthetic peptide
  Seed: GMMMGMFNMLSTVLGVS
GMMYGMKNFLSLVLGVS

SEQ ID NO: 185864 - protein, 17 aa, Artificial Sequence
  Description of Artificial Sequence: Synthetic peptide
  Seed: GMMMGMFNMLSTVLGVS
GMMYGMQNFLSIVLGVS

SEQ ID NO: 185865 - protein, 17 aa, Artificial Sequence
  Description of Artificial Sequence: Synthetic peptide
  Seed: GMMMGMFNMLSTVLGVS
GMMYGMQNFLSLVLGVS

SEQ ID NO: 185866 - protein, 17 aa, Artificial Sequence
  Description of Artificial Sequence: Synthetic peptide
  Seed: GMMMGMFNMLSTVLGVS
GMMYGMQNFLSVVLGVS

SEQ ID NO: 185867 - protein, 17 aa, Artificial Sequence
  Description of Artificial Sequence: Synthetic peptide
  Seed: GMMMGMFNMLSTVLGVS
GMMYGMSNFLSIVLGVS

SEQ ID NO: 185868 - protein, 17 aa, Artificial Sequence
  Description of Artificial Sequence: Synthetic peptide
  Seed: GMMMGMFNMLSTVLGVS
GMMYGMSNFLSLVLGVS

SEQ ID NO: 185869 - protein, 17 aa, Artificial Sequence
  Description of Artificial Sequence: Synthetic peptide
  Seed: GMMMGMFNMLSTVLGVS
GMMYGMSNFLSVVLGVS

SEQ ID NO: 185870 - protein, 17 aa, Artificial Sequence
  Description of Artificial Sequence: Synthetic peptide
  Seed: GMMMGMFNMLSTVLGVS
GMMYGMTNFLSIVLGVS

SEQ ID NO: 185871 - protein, 17 aa, Artificial Sequence
  Description of Artificial Sequence: Synthetic peptide
  Seed: GMMMGMFNMLSTVLGVS
GMMYGMTNFLSLVLGVS

SEQ ID NO: 185872 - protein, 17 aa, Artificial Sequence
  Description of Artificial Sequence: Synthetic peptide
  Seed: GMMMGMFNMLSTVLGVS
GMMYGMTNFLSMVLGVS

SEQ ID NO: 185873 - protein, 17 aa, Artificial Sequence
  Description of Artificial Sequence: Synthetic peptide
  Seed: GMMMGMFNMLSTVLGVS
GMMYGMTNFLSVVLGVS

SEQ ID NO: 185874 - protein, 17 aa, Artificial Sequence
  Description of Artificial Sequence: Synthetic peptide
  Seed: GMMMGMFNMLSTVLGVS
GMMMGMFNFLSHVFGVI

SEQ ID NO: 185875 - protein, 17 aa, Artificial Sequence
  Description of Artificial Sequence: Synthetic peptide
  Seed: GMMMGMFNMLSTVLGVS
GMMMGMFNFLSHVFGVL

SEQ ID NO: 185876 - protein, 17 aa, Artificial Sequence
  Description of Artificial Sequence: Synthetic peptide
  Seed: GMMMGMFNMLSTVLGVS
GMMMGMFNFLSHVFGVV

SEQ ID NO: 185877 - protein, 17 aa, Artificial Sequence
  Description of Artificial Sequence: Synthetic peptide
  Seed: GMMMGMFNMLSTVLGVS
GMMMGMFNFLSNVFGVV

SEQ ID NO: 185878 - protein, 17 aa, Artificial Sequence
  Description of Artificial Sequence: Synthetic peptide
  Seed: GMMMGMFNMLSTVLGVS
GFMMHMFNMISTVLGVS

SEQ ID NO: 185879 - protein, 17 aa, Artificial Sequence
  Description of Artificial Sequence: Synthetic peptide
  Seed: GMMMGMFNMLSTVLGVS
GFMMHMFNMLSTVLGVS

SEQ ID NO: 185880 - protein, 17 aa, Artificial Sequence
  Description of Artificial Sequence: Synthetic peptide
  Seed: GMMMGMFNMLSTVLGVS
GFMMHMFNMTSTVLGVS

SEQ ID NO: 185881 - protein, 17 aa, Artificial Sequence
  Description of Artificial Sequence: Synthetic peptide
  Seed: GMMMGMFNMLSTVLGVS
GFMMHMFNMVSTVLGVS

SEQ ID NO: 185882 - protein, 17 aa, Artificial Sequence
  Description of Artificial Sequence: Synthetic peptide
  Seed: GMMMGMFNMLSTVLGVS
GYMMHMFNMVSTVLGVS

SEQ ID NO: 185883 - protein, 20 aa, Artificial Sequence
  Description of Artificial Sequence: Synthetic peptide
  Seed: GNEKKAKLANVVRKMMTNSQ
GNEKKAKFANIVRKMMTNSQ

SEQ ID NO: 185884 - protein, 20 aa, Artificial Sequence
  Description of Artificial Sequence: Synthetic peptide
  Seed: GNEKKAKLANVVRKMMTNSQ
GNEKKAKFANLVRKMMTNSQ

SEQ ID NO: 185885 - protein, 20 aa, Artificial Sequence
  Description of Artificial Sequence: Synthetic peptide
  Seed: GNEKKAKLANVVRKMMTNSQ
GNEKKAKFANMVRKMMTNSQ

SEQ ID NO: 185886 - protein, 20 aa, Artificial Sequence
  Description of Artificial Sequence: Synthetic peptide
  Seed: GNEKKAKLANVVRKMMTNSQ
GNEKKAKIANIVRKMMTNSQ

SEQ ID NO: 185887 - protein, 20 aa, Artificial Sequence
  Description of Artificial Sequence: Synthetic peptide
  Seed: GNEKKAKLANVVRKMMTNSQ
GNEKKAKIANLVRKMMTNSQ

SEQ ID NO: 185888 - protein, 20 aa, Artificial Sequence
  Description of Artificial Sequence: Synthetic peptide
  Seed: GNEKKAKLANVVRKMMTNSQ
GNEKKAKIANMVRKMMTNSQ

SEQ ID NO: 185889 - protein, 20 aa, Artificial Sequence
  Description of Artificial Sequence: Synthetic peptide
  Seed: GNEKKAKLANVVRKMMTNSQ
GNEKKAKLANMVRKMMTNSQ

SEQ ID NO: 185890 - protein, 20 aa, Artificial Sequence
  Description of Artificial Sequence: Synthetic peptide
  Seed: GNEKKAKLANVVRKMMTNSQ
GNEKKAKMANMVRKMMTNSQ

SEQ ID NO: 185891 - protein, 20 aa, Artificial Sequence
  Description of Artificial Sequence: Synthetic peptide
  Seed: GNEKKAKLANVVRKMMTNSQ
GNEKKAKVANMVRKMMTNSQ

SEQ ID NO: 185892 - protein, 20 aa, Artificial Sequence
  Description of Artificial Sequence: Synthetic peptide
  Seed: GNEKKAKLANVVRKMMTNSQ
GNEKKAKYANMVRKMMTNSQ

SEQ ID NO: 185893 - protein, 20 aa, Artificial Sequence
  Description of Artificial Sequence: Synthetic peptide
  Seed: GNEKKAKLANVVRKMMTNSQ
GNECKAALFNVIRKMMTNSQ

SEQ ID NO: 185894 - protein, 20 aa, Artificial Sequence
  Description of Artificial Sequence: Synthetic peptide
  Seed: GNEKKAKLANVVRKMMTNSQ
GNECKAALFNVLRKMMTNSQ

SEQ ID NO: 185895 - protein, 20 aa, Artificial Sequence
  Description of Artificial Sequence: Synthetic peptide
  Seed: GNEKKAKLANVVRKMMTNSQ
GNECKAALFNVVRKMMTNSQ

SEQ ID NO: 185896 - protein, 20 aa, Artificial Sequence
  Description of Artificial Sequence: Synthetic peptide
  Seed: GNEKKAKLANVVRKMMTNSQ
GNECKAELFNVIRKMMTNSQ

SEQ ID NO: 185897 - protein, 20 aa, Artificial Sequence
  Description of Artificial Sequence: Synthetic peptide
  Seed: GNEKKAKLANVVRKMMTNSQ
GNECKAELFNVVRKMMTNSQ

SEQ ID NO: 185898 - protein, 20 aa, Artificial Sequence
  Description of Artificial Sequence: Synthetic peptide
  Seed: GNEKKAKLANVVRKMMTNSQ
GNECKAHLFNVFRKMMTNSQ

SEQ ID NO: 185899 - protein, 20 aa, Artificial Sequence
  Description of Artificial Sequence: Synthetic peptide
  Seed: GNEKKAKLANVVRKMMTNSQ
GNECKAHLFNVIRKMMTNSQ

SEQ ID NO: 185900 - protein, 20 aa, Artificial Sequence
  Description of Artificial Sequence: Synthetic peptide
  Seed: GNEKKAKLANVVRKMMTNSQ
GNECKAHLFNVLRKMMTNSQ

SEQ ID NO: 185901 - protein, 20 aa, Artificial Sequence
  Description of Artificial Sequence: Synthetic peptide
  Seed: GNEKKAKLANVVRKMMTNSQ
GNECKAHLFNVVRKMMTNSQ

SEQ ID NO: 185902 - protein, 20 aa, Artificial Sequence
  Description of Artificial Sequence: Synthetic peptide
  Seed: GNEKKAKLANVVRKMMTNSQ
GNECKAILFNVIRKMMTNSQ

SEQ ID NO: 185903 - protein, 20 aa, Artificial Sequence
  Description of Artificial Sequence: Synthetic peptide
  Seed: GNEKKAKLANVVRKMMTNSQ
GNECKAILFNVVRKMMTNSQ

SEQ ID NO: 185904 - protein, 20 aa, Artificial Sequence
  Description of Artificial Sequence: Synthetic peptide
  Seed: GNEKKAKLANVVRKMMTNSQ
GNECKALLANVARKMMTNSQ

SEQ ID NO: 185905 - protein, 20 aa, Artificial Sequence
  Description of Artificial Sequence: Synthetic peptide
  Seed: GNEKKAKLANVVRKMMTNSQ
GNECKALLANVIRKMMTNSQ

SEQ ID NO: 185906 - protein, 20 aa, Artificial Sequence
  Description of Artificial Sequence: Synthetic peptide
  Seed: GNEKKAKLANVVRKMMTNSQ
GNECKALLANVLRKMMTNSQ

SEQ ID NO: 185907 - protein, 20 aa, Artificial Sequence
  Description of Artificial Sequence: Synthetic peptide
  Seed: GNEKKAKLANVVRKMMTNSQ
GNECKALLANVVRKMMTNSQ

SEQ ID NO: 185908 - protein, 20 aa, Artificial Sequence
  Description of Artificial Sequence: Synthetic peptide
  Seed: GNEKKAKLANVVRKMMTNSQ
GNECKALLFNVVRKMMTNSQ

SEQ ID NO: 185909 - protein, 20 aa, Artificial Sequence
  Description of Artificial Sequence: Synthetic peptide
  Seed: GNEKKAKLANVVRKMMTNSQ
GNECKALLGNVIRKMMTNSQ

SEQ ID NO: 185910 - protein, 20 aa, Artificial Sequence
  Description of Artificial Sequence: Synthetic peptide
  Seed: GNEKKAKLANVVRKMMTNSQ
GNECKALLGNVLRKMMTNSQ

SEQ ID NO: 185911 - protein, 20 aa, Artificial Sequence
  Description of Artificial Sequence: Synthetic peptide
  Seed: GNEKKAKLANVVRKMMTNSQ
GNECKALLGNVVRKMMTNSQ

SEQ ID NO: 185912 - protein, 20 aa, Artificial Sequence
  Description of Artificial Sequence: Synthetic peptide
  Seed: GNEKKAKLANVVRKMMTNSQ
GNECKALLSNVIRKMMTNSQ

SEQ ID NO: 185913 - protein, 20 aa, Artificial Sequence
  Description of Artificial Sequence: Synthetic peptide
  Seed: GNEKKAKLANVVRKMMTNSQ
GNECKALLSNVVRKMMTNSQ

SEQ ID NO: 185914 - protein, 20 aa, Artificial Sequence
  Description of Artificial Sequence: Synthetic peptide
  Seed: GNEKKAKLANVVRKMMTNSQ
GNECKAMLANVARKMMTNSQ

SEQ ID NO: 185915 - protein, 20 aa, Artificial Sequence
  Description of Artificial Sequence: Synthetic peptide
  Seed: GNEKKAKLANVVRKMMTNSQ
GNECKAMLANVIRKMMTNSQ

SEQ ID NO: 185916 - protein, 20 aa, Artificial Sequence
  Description of Artificial Sequence: Synthetic peptide
  Seed: GNEKKAKLANVVRKMMTNSQ
GNECKAMLANVLRKMMTNSQ

SEQ ID NO: 185917 - protein, 20 aa, Artificial Sequence
  Description of Artificial Sequence: Synthetic peptide
  Seed: GNEKKAKLANVVRKMMTNSQ
GNECKAMLANVVRKMMTNSQ

SEQ ID NO: 185918 - protein, 20 aa, Artificial Sequence
  Description of Artificial Sequence: Synthetic peptide
  Seed: GNEKKAKLANVVRKMMTNSQ
GNECKAMLFNVIRKMMTNSQ

SEQ ID NO: 185919 - protein, 20 aa, Artificial Sequence
  Description of Artificial Sequence: Synthetic peptide
  Seed: GNEKKAKLANVVRKMMTNSQ
GNECKAMLFNVVRKMMTNSQ

SEQ ID NO: 185920 - protein, 20 aa, Artificial Sequence
  Description of Artificial Sequence: Synthetic peptide
  Seed: GNEKKAKLANVVRKMMTNSQ
GNECKAMLGNVIRKMMTNSQ

SEQ ID NO: 185921 - protein, 20 aa, Artificial Sequence
  Description of Artificial Sequence: Synthetic peptide
  Seed: GNEKKAKLANVVRKMMTNSQ
GNECKAMLGNVLRKMMTNSQ

SEQ ID NO: 185922 - protein, 20 aa, Artificial Sequence
  Description of Artificial Sequence: Synthetic peptide
  Seed: GNEKKAKLANVVRKMMTNSQ
GNECKAMLGNVVRKMMTNSQ

SEQ ID NO: 185923 - protein, 20 aa, Artificial Sequence
  Description of Artificial Sequence: Synthetic peptide
  Seed: GNEKKAKLANVVRKMMTNSQ
GNECKAMLSNVIRKMMTNSQ

SEQ ID NO: 185924 - protein, 20 aa, Artificial Sequence
  Description of Artificial Sequence: Synthetic peptide
  Seed: GNEKKAKLANVVRKMMTNSQ
GNECKAMLSNVVRKMMTNSQ

SEQ ID NO: 185925 - protein, 20 aa, Artificial Sequence
  Description of Artificial Sequence: Synthetic peptide
  Seed: GNEKKAKLANVVRKMMTNSQ
GNECKAQLFNVIRKMMTNSQ

SEQ ID NO: 185926 - protein, 20 aa, Artificial Sequence
  Description of Artificial Sequence: Synthetic peptide
  Seed: GNEKKAKLANVVRKMMTNSQ
GNECKASLFNVIRKMMTNSQ

SEQ ID NO: 185927 - protein, 20 aa, Artificial Sequence
  Description of Artificial Sequence: Synthetic peptide
  Seed: GNEKKAKLANVVRKMMTNSQ
GNECKASLFNVLRKMMTNSQ

SEQ ID NO: 185928 - protein, 20 aa, Artificial Sequence
  Description of Artificial Sequence: Synthetic peptide
  Seed: GNEKKAKLANVVRKMMTNSQ
GNECKASLFNVVRKMMTNSQ

SEQ ID NO: 185929 - protein, 20 aa, Artificial Sequence
  Description of Artificial Sequence: Synthetic peptide
  Seed: GNEKKAKLANVVRKMMTNSQ
GNECKATLFNVFRKMMTNSQ

SEQ ID NO: 185930 - protein, 20 aa, Artificial Sequence
  Description of Artificial Sequence: Synthetic peptide
  Seed: GNEKKAKLANVVRKMMTNSQ
GNECKATLFNVIRKMMTNSQ

SEQ ID NO: 185931 - protein, 20 aa, Artificial Sequence
  Description of Artificial Sequence: Synthetic peptide
  Seed: GNEKKAKLANVVRKMMTNSQ
GNECKATLFNVLRKMMTNSQ

SEQ ID NO: 185932 - protein, 20 aa, Artificial Sequence
  Description of Artificial Sequence: Synthetic peptide
  Seed: GNEKKAKLANVVRKMMTNSQ
GNECKATLFNVVRKMMTNSQ

SEQ ID NO: 185933 - protein, 20 aa, Artificial Sequence
  Description of Artificial Sequence: Synthetic peptide
  Seed: GNEKKAKLANVVRKMMTNSQ
GNECKAVLFNVIRKMMTNSQ

SEQ ID NO: 185934 - protein, 20 aa, Artificial Sequence
  Description of Artificial Sequence: Synthetic peptide
  Seed: GNEKKAKLANVVRKMMTNSQ
GNECKAVLFNVLRKMMTNSQ

SEQ ID NO: 185935 - protein, 20 aa, Artificial Sequence
  Description of Artificial Sequence: Synthetic peptide
  Seed: GNEKKAKLANVVRKMMTNSQ
GNECKAVLFNVVRKMMTNSQ

SEQ ID NO: 185936 - protein, 20 aa, Artificial Sequence
  Description of Artificial Sequence: Synthetic peptide
  Seed: GNEKKAKLANVVRKMMTNSQ
GNECKAVLYNVIRKMMTNSQ

SEQ ID NO: 185937 - protein, 20 aa, Artificial Sequence
  Description of Artificial Sequence: Synthetic peptide
  Seed: GNEKKAKLANVVRKMMTNSQ
GNEFKAALANVARKMMTNSQ

SEQ ID NO: 185938 - protein, 20 aa, Artificial Sequence
  Description of Artificial Sequence: Synthetic peptide
  Seed: GNEKKAKLANVVRKMMTNSQ
GNEFKAALANVCRKMMTNSQ

SEQ ID NO: 185939 - protein, 20 aa, Artificial Sequence
  Description of Artificial Sequence: Synthetic peptide
  Seed: GNEKKAKLANVVRKMMTNSQ
GNEFKAALANVDRKMMTNSQ

SEQ ID NO: 185940 - protein, 20 aa, Artificial Sequence
  Description of Artificial Sequence: Synthetic peptide
  Seed: GNEKKAKLANVVRKMMTNSQ
GNEFKAALANVERKMMTNSQ

SEQ ID NO: 185941 - protein, 20 aa, Artificial Sequence
  Description of Artificial Sequence: Synthetic peptide
  Seed: GNEKKAKLANVVRKMMTNSQ
GNEFKAALANVFRKMMTNSQ

SEQ ID NO: 185942 - protein, 20 aa, Artificial Sequence
  Description of Artificial Sequence: Synthetic peptide
  Seed: GNEKKAKLANVVRKMMTNSQ
GNEFKAALANVGRKMMTNSQ

SEQ ID NO: 185943 - protein, 20 aa, Artificial Sequence
  Description of Artificial Sequence: Synthetic peptide
  Seed: GNEKKAKLANVVRKMMTNSQ
GNEFKAALANVHRKMMTNSQ

SEQ ID NO: 185944 - protein, 20 aa, Artificial Sequence
  Description of Artificial Sequence: Synthetic peptide
  Seed: GNEKKAKLANVVRKMMTNSQ
GNEFKAALANVIRKMMTNSQ

SEQ ID NO: 185945 - protein, 20 aa, Artificial Sequence
  Description of Artificial Sequence: Synthetic peptide
  Seed: GNEKKAKLANVVRKMMTNSQ
GNEFKAALANVKRKMMTNSQ

SEQ ID NO: 185946 - protein, 20 aa, Artificial Sequence
  Description of Artificial Sequence: Synthetic peptide
  Seed: GNEKKAKLANVVRKMMTNSQ
GNEFKAALANVLRKMMTNSQ

SEQ ID NO: 185947 - protein, 20 aa, Artificial Sequence
  Description of Artificial Sequence: Synthetic peptide
  Seed: GNEKKAKLANVVRKMMTNSQ
GNEFKAALANVMRKMMTNSQ

SEQ ID NO: 185948 - protein, 20 aa, Artificial Sequence
  Description of Artificial Sequence: Synthetic peptide
  Seed: GNEKKAKLANVVRKMMTNSQ
GNEFKAALANVNRKMMTNSQ

SEQ ID NO: 185949 - protein, 20 aa, Artificial Sequence
  Description of Artificial Sequence: Synthetic peptide
  Seed: GNEKKAKLANVVRKMMTNSQ
GNEFKAALANVPRKMMTNSQ

SEQ ID NO: 185950 - protein, 20 aa, Artificial Sequence
  Description of Artificial Sequence: Synthetic peptide
  Seed: GNEKKAKLANVVRKMMTNSQ
GNEFKAALANVQRKMMTNSQ

SEQ ID NO: 185951 - protein, 20 aa, Artificial Sequence
  Description of Artificial Sequence: Synthetic peptide
  Seed: GNEKKAKLANVVRKMMTNSQ
GNEFKAALANVRRKMMTNSQ

SEQ ID NO: 185952 - protein, 20 aa, Artificial Sequence
  Description of Artificial Sequence: Synthetic peptide
  Seed: GNEKKAKLANVVRKMMTNSQ
GNEFKAALANVSRKMMTNSQ

SEQ ID NO: 185953 - protein, 20 aa, Artificial Sequence
  Description of Artificial Sequence: Synthetic peptide
  Seed: GNEKKAKLANVVRKMMTNSQ
GNEFKAALANVTRKMMTNSQ

SEQ ID NO: 185954 - protein, 20 aa, Artificial Sequence
  Description of Artificial Sequence: Synthetic peptide
  Seed: GNEKKAKLANVVRKMMTNSQ
GNEFKAALANVVRKMMTNSQ

SEQ ID NO: 185955 - protein, 20 aa, Artificial Sequence
  Description of Artificial Sequence: Synthetic peptide
  Seed: GNEKKAKLANVVRKMMTNSQ
GNEFKAALANVWRKMMTNSQ

SEQ ID NO: 185956 - protein, 20 aa, Artificial Sequence
  Description of Artificial Sequence: Synthetic peptide
  Seed: GNEKKAKLANVVRKMMTNSQ
GNEFKAALANVYRKMMTNSQ

SEQ ID NO: 185957 - protein, 20 aa, Artificial Sequence
  Description of Artificial Sequence: Synthetic peptide
  Seed: GNEKKAKLANVVRKMMTNSQ
GNEFKAALCNVARKMMTNSQ

SEQ ID NO: 185958 - protein, 20 aa, Artificial Sequence
  Description of Artificial Sequence: Synthetic peptide
  Seed: GNEKKAKLANVVRKMMTNSQ
GNEFKAALCNVNRKMMTNSQ

SEQ ID NO: 185959 - protein, 20 aa, Artificial Sequence
  Description of Artificial Sequence: Synthetic peptide
  Seed: GNEKKAKLANVVRKMMTNSQ
GNEFKAALCNVSRKMMTNSQ

SEQ ID NO: 185960 - protein, 20 aa, Artificial Sequence
  Description of Artificial Sequence: Synthetic peptide
  Seed: GNEKKAKLANVVRKMMTNSQ
GNEFKAALDNVARKMMTNSQ

SEQ ID NO: 185961 - protein, 20 aa, Artificial Sequence
  Description of Artificial Sequence: Synthetic peptide
  Seed: GNEKKAKLANVVRKMMTNSQ
GNEFKAALDNVNRKMMTNSQ

SEQ ID NO: 185962 - protein, 20 aa, Artificial Sequence
  Description of Artificial Sequence: Synthetic peptide
  Seed: GNEKKAKLANVVRKMMTNSQ
GNEFKAALDNVSRKMMTNSQ

SEQ ID NO: 185963 - protein, 20 aa, Artificial Sequence
  Description of Artificial Sequence: Synthetic peptide
  Seed: GNEKKAKLANVVRKMMTNSQ
GNEFKAALDNVVRKMMTNSQ

SEQ ID NO: 185964 - protein, 20 aa, Artificial Sequence
  Description of Artificial Sequence: Synthetic peptide
  Seed: GNEKKAKLANVVRKMMTNSQ
GNEFKAALENVARKMMTNSQ

SEQ ID NO: 185965 - protein, 20 aa, Artificial Sequence
  Description of Artificial Sequence: Synthetic peptide
  Seed: GNEKKAKLANVVRKMMTNSQ
GNEFKAALENVIRKMMTNSQ

SEQ ID NO: 185966 - protein, 20 aa, Artificial Sequence
  Description of Artificial Sequence: Synthetic peptide
  Seed: GNEKKAKLANVVRKMMTNSQ
GNEFKAALENVLRKMMTNSQ

SEQ ID NO: 185967 - protein, 20 aa, Artificial Sequence
  Description of Artificial Sequence: Synthetic peptide
  Seed: GNEKKAKLANVVRKMMTNSQ
GNEFKAALENVNRKMMTNSQ

SEQ ID NO: 185968 - protein, 20 aa, Artificial Sequence
  Description of Artificial Sequence: Synthetic peptide
  Seed: GNEKKAKLANVVRKMMTNSQ
GNEFKAALENVSRKMMTNSQ

SEQ ID NO: 185969 - protein, 20 aa, Artificial Sequence
  Description of Artificial Sequence: Synthetic peptide
  Seed: GNEKKAKLANVVRKMMTNSQ
GNEFKAALENVVRKMMTNSQ

SEQ ID NO: 185970 - protein, 20 aa, Artificial Sequence
  Description of Artificial Sequence: Synthetic peptide
  Seed: GNEKKAKLANVVRKMMTNSQ
GNEFKAALFNVARKMMTNSQ

SEQ ID NO: 185971 - protein, 20 aa, Artificial Sequence
  Description of Artificial Sequence: Synthetic peptide
  Seed: GNEKKAKLANVVRKMMTNSQ
GNEFKAALFNVCRKMMTNSQ

SEQ ID NO: 185972 - protein, 20 aa, Artificial Sequence
  Description of Artificial Sequence: Synthetic peptide
  Seed: GNEKKAKLANVVRKMMTNSQ
GNEFKAALFNVDRKMMTNSQ

SEQ ID NO: 185973 - protein, 20 aa, Artificial Sequence
  Description of Artificial Sequence: Synthetic peptide
  Seed: GNEKKAKLANVVRKMMTNSQ
GNEFKAALFNVERKMMTNSQ

SEQ ID NO: 185974 - protein, 20 aa, Artificial Sequence
  Description of Artificial Sequence: Synthetic peptide
  Seed: GNEKKAKLANVVRKMMTNSQ
GNEFKAALFNVFRKMMTNSQ

SEQ ID NO: 185975 - protein, 20 aa, Artificial Sequence
  Description of Artificial Sequence: Synthetic peptide
  Seed: GNEKKAKLANVVRKMMTNSQ
GNEFKAALFNVGRKMMTNSQ

SEQ ID NO: 185976 - protein, 20 aa, Artificial Sequence
  Description of Artificial Sequence: Synthetic peptide
  Seed: GNEKKAKLANVVRKMMTNSQ
GNEFKAALFNVHRKMMTNSQ

SEQ ID NO: 185977 - protein, 20 aa, Artificial Sequence
  Description of Artificial Sequence: Synthetic peptide
  Seed: GNEKKAKLANVVRKMMTNSQ
GNEFKAALFNVIRKMMTNSQ

SEQ ID NO: 185978 - protein, 20 aa, Artificial Sequence
  Description of Artificial Sequence: Synthetic peptide
  Seed: GNEKKAKLANVVRKMMTNSQ
GNEFKAALFNVLRKMMTNSQ

SEQ ID NO: 185979 - protein, 20 aa, Artificial Sequence
  Description of Artificial Sequence: Synthetic peptide
  Seed: GNEKKAKLANVVRKMMTNSQ
GNEFKAALFNVMRKMMTNSQ

SEQ ID NO: 185980 - protein, 20 aa, Artificial Sequence
  Description of Artificial Sequence: Synthetic peptide
  Seed: GNEKKAKLANVVRKMMTNSQ
GNEFKAALFNVNRKMMTNSQ

SEQ ID NO: 185981 - protein, 20 aa, Artificial Sequence
  Description of Artificial Sequence: Synthetic peptide
  Seed: GNEKKAKLANVVRKMMTNSQ
GNEFKAALFNVPRKMMTNSQ

SEQ ID NO: 185982 - protein, 20 aa, Artificial Sequence
  Description of Artificial Sequence: Synthetic peptide
  Seed: GNEKKAKLANVVRKMMTNSQ
GNEFKAALFNVQRKMMTNSQ

SEQ ID NO: 185983 - protein, 20 aa, Artificial Sequence
  Description of Artificial Sequence: Synthetic peptide
  Seed: GNEKKAKLANVVRKMMTNSQ
GNEFKAALFNVRRKMMTNSQ

SEQ ID NO: 185984 - protein, 20 aa, Artificial Sequence
  Description of Artificial Sequence: Synthetic peptide
  Seed: GNEKKAKLANVVRKMMTNSQ
GNEFKAALFNVSRKMMTNSQ

SEQ ID NO: 185985 - protein, 20 aa, Artificial Sequence
  Description of Artificial Sequence: Synthetic peptide
  Seed: GNEKKAKLANVVRKMMTNSQ
GNEFKAALFNVTRKMMTNSQ

SEQ ID NO: 185986 - protein, 20 aa, Artificial Sequence
  Description of Artificial Sequence: Synthetic peptide
  Seed: GNEKKAKLANVVRKMMTNSQ
GNEFKAALFNVVRKMMTNSQ

SEQ ID NO: 185987 - protein, 20 aa, Artificial Sequence
  Description of Artificial Sequence: Synthetic peptide
  Seed: GNEKKAKLANVVRKMMTNSQ
GNEFKAALFNVYRKMMTNSQ

SEQ ID NO: 185988 - protein, 20 aa, Artificial Sequence
  Description of Artificial Sequence: Synthetic peptide
  Seed: GNEKKAKLANVVRKMMTNSQ
GNEFKAALGNVARKMMTNSQ

SEQ ID NO: 185989 - protein, 20 aa, Artificial Sequence
  Description of Artificial Sequence: Synthetic peptide
  Seed: GNEKKAKLANVVRKMMTNSQ
GNEFKAALGNVCRKMMTNSQ

SEQ ID NO: 185990 - protein, 20 aa, Artificial Sequence
  Description of Artificial Sequence: Synthetic peptide
  Seed: GNEKKAKLANVVRKMMTNSQ
GNEFKAALGNVDRKMMTNSQ

SEQ ID NO: 185991 - protein, 20 aa, Artificial Sequence
  Description of Artificial Sequence: Synthetic peptide
  Seed: GNEKKAKLANVVRKMMTNSQ
GNEFKAALGNVERKMMTNSQ

SEQ ID NO: 185992 - protein, 20 aa, Artificial Sequence
  Description of Artificial Sequence: Synthetic peptide
  Seed: GNEKKAKLANVVRKMMTNSQ
GNEFKAALGNVFRKMMTNSQ

SEQ ID NO: 185993 - protein, 20 aa, Artificial Sequence
  Description of Artificial Sequence: Synthetic peptide
  Seed: GNEKKAKLANVVRKMMTNSQ
GNEFKAALGNVGRKMMTNSQ

SEQ ID NO: 185994 - protein, 20 aa, Artificial Sequence
  Description of Artificial Sequence: Synthetic peptide
  Seed: GNEKKAKLANVVRKMMTNSQ
GNEFKAALGNVHRKMMTNSQ

SEQ ID NO: 185995 - protein, 20 aa, Artificial Sequence
  Description of Artificial Sequence: Synthetic peptide
  Seed: GNEKKAKLANVVRKMMTNSQ
GNEFKAALGNVIRKMMTNSQ

SEQ ID NO: 185996 - protein, 20 aa, Artificial Sequence
  Description of Artificial Sequence: Synthetic peptide
  Seed: GNEKKAKLANVVRKMMTNSQ
GNEFKAALGNVLRKMMTNSQ

SEQ ID NO: 185997 - protein, 20 aa, Artificial Sequence
  Description of Artificial Sequence: Synthetic peptide
  Seed: GNEKKAKLANVVRKMMTNSQ
GNEFKAALGNVMRKMMTNSQ

SEQ ID NO: 185998 - protein, 20 aa, Artificial Sequence
  Description of Artificial Sequence: Synthetic peptide
  Seed: GNEKKAKLANVVRKMMTNSQ
GNEFKAALGNVNRKMMTNSQ

SEQ ID NO: 185999 - protein, 20 aa, Artificial Sequence
  Description of Artificial Sequence: Synthetic peptide
  Seed: GNEKKAKLANVVRKMMTNSQ
GNEFKAALGNVPRKMMTNSQ

SEQ ID NO: 186000 - protein, 20 aa, Artificial Sequence
  Description of Artificial Sequence: Synthetic peptide
  Seed: GNEKKAKLANVVRKMMTNSQ
GNEFKAALGNVQRKMMTNSQ

SEQ ID NO: 186001 - protein, 20 aa, Artificial Sequence
  Description of Artificial Sequence: Synthetic peptide
  Seed: GNEKKAKLANVVRKMMTNSQ
GNEFKAALGNVRRKMMTNSQ

SEQ ID NO: 186002 - protein, 20 aa, Artificial Sequence
  Description of Artificial Sequence: Synthetic peptide
  Seed: GNEKKAKLANVVRKMMTNSQ
GNEFKAALGNVSRKMMTNSQ

SEQ ID NO: 186003 - protein, 20 aa, Artificial Sequence
  Description of Artificial Sequence: Synthetic peptide
  Seed: GNEKKAKLANVVRKMMTNSQ
GNEFKAALGNVTRKMMTNSQ

SEQ ID NO: 186004 - protein, 20 aa, Artificial Sequence
  Description of Artificial Sequence: Synthetic peptide
  Seed: GNEKKAKLANVVRKMMTNSQ
GNEFKAALGNVVRKMMTNSQ

SEQ ID NO: 186005 - protein, 20 aa, Artificial Sequence
  Description of Artificial Sequence: Synthetic peptide
  Seed: GNEKKAKLANVVRKMMTNSQ
GNEFKAALGNVYRKMMTNSQ

SEQ ID NO: 186006 - protein, 20 aa, Artificial Sequence
  Description of Artificial Sequence: Synthetic peptide
  Seed: GNEKKAKLANVVRKMMTNSQ
GNEFKAALHNVARKMMTNSQ

SEQ ID NO: 186007 - protein, 20 aa, Artificial Sequence
  Description of Artificial Sequence: Synthetic peptide
  Seed: GNEKKAKLANVVRKMMTNSQ
GNEFKAALHNVIRKMMTNSQ

SEQ ID NO: 186008 - protein, 20 aa, Artificial Sequence
  Description of Artificial Sequence: Synthetic peptide
  Seed: GNEKKAKLANVVRKMMTNSQ
GNEFKAALHNVLRKMMTNSQ

SEQ ID NO: 186009 - protein, 20 aa, Artificial Sequence
  Description of Artificial Sequence: Synthetic peptide
  Seed: GNEKKAKLANVVRKMMTNSQ
GNEFKAALHNVNRKMMTNSQ

SEQ ID NO: 186010 - protein, 20 aa, Artificial Sequence
  Description of Artificial Sequence: Synthetic peptide
  Seed: GNEKKAKLANVVRKMMTNSQ
GNEFKAALHNVSRKMMTNSQ

SEQ ID NO: 186011 - protein, 20 aa, Artificial Sequence
  Description of Artificial Sequence: Synthetic peptide
  Seed: GNEKKAKLANVVRKMMTNSQ
GNEFKAALHNVVRKMMTNSQ

SEQ ID NO: 186012 - protein, 20 aa, Artificial Sequence
  Description of Artificial Sequence: Synthetic peptide
  Seed: GNEKKAKLANVVRKMMTNSQ
GNEFKAALINVARKMMTNSQ

SEQ ID NO: 186013 - protein, 20 aa, Artificial Sequence
  Description of Artificial Sequence: Synthetic peptide
  Seed: GNEKKAKLANVVRKMMTNSQ
GNEFKAALINVCRKMMTNSQ

SEQ ID NO: 186014 - protein, 20 aa, Artificial Sequence
  Description of Artificial Sequence: Synthetic peptide
  Seed: GNEKKAKLANVVRKMMTNSQ
GNEFKAALINVDRKMMTNSQ

SEQ ID NO: 186015 - protein, 20 aa, Artificial Sequence
  Description of Artificial Sequence: Synthetic peptide
  Seed: GNEKKAKLANVVRKMMTNSQ
GNEFKAALINVERKMMTNSQ

SEQ ID NO: 186016 - protein, 20 aa, Artificial Sequence
  Description of Artificial Sequence: Synthetic peptide
  Seed: GNEKKAKLANVVRKMMTNSQ
GNEFKAALINVFRKMMTNSQ

SEQ ID NO: 186017 - protein, 20 aa, Artificial Sequence
  Description of Artificial Sequence: Synthetic peptide
  Seed: GNEKKAKLANVVRKMMTNSQ
GNEFKAALINVGRKMMTNSQ

SEQ ID NO: 186018 - protein, 20 aa, Artificial Sequence
  Description of Artificial Sequence: Synthetic peptide
  Seed: GNEKKAKLANVVRKMMTNSQ
GNEFKAALINVHRKMMTNSQ

SEQ ID NO: 186019 - protein, 20 aa, Artificial Sequence
  Description of Artificial Sequence: Synthetic peptide
  Seed: GNEKKAKLANVVRKMMTNSQ
GNEFKAALINVIRKMMTNSQ

SEQ ID NO: 186020 - protein, 20 aa, Artificial Sequence
  Description of Artificial Sequence: Synthetic peptide
  Seed: GNEKKAKLANVVRKMMTNSQ
GNEFKAALINVKRKMMTNSQ

SEQ ID NO: 186021 - protein, 20 aa, Artificial Sequence
  Description of Artificial Sequence: Synthetic peptide
  Seed: GNEKKAKLANVVRKMMTNSQ
GNEFKAALINVLRKMMTNSQ

SEQ ID NO: 186022 - protein, 20 aa, Artificial Sequence
  Description of Artificial Sequence: Synthetic peptide
  Seed: GNEKKAKLANVVRKMMTNSQ
GNEFKAALINVMRKMMTNSQ

SEQ ID NO: 186023 - protein, 20 aa, Artificial Sequence
  Description of Artificial Sequence: Synthetic peptide
  Seed: GNEKKAKLANVVRKMMTNSQ
GNEFKAALINVNRKMMTNSQ

SEQ ID NO: 186024 - protein, 20 aa, Artificial Sequence
  Description of Artificial Sequence: Synthetic peptide
  Seed: GNEKKAKLANVVRKMMTNSQ
GNEFKAALINVPRKMMTNSQ

SEQ ID NO: 186025 - protein, 20 aa, Artificial Sequence
  Description of Artificial Sequence: Synthetic peptide
  Seed: GNEKKAKLANVVRKMMTNSQ
GNEFKAALINVQRKMMTNSQ

SEQ ID NO: 186026 - protein, 20 aa, Artificial Sequence
  Description of Artificial Sequence: Synthetic peptide
  Seed: GNEKKAKLANVVRKMMTNSQ
GNEFKAALINVSRKMMTNSQ

SEQ ID NO: 186027 - protein, 20 aa, Artificial Sequence
  Description of Artificial Sequence: Synthetic peptide
  Seed: GNEKKAKLANVVRKMMTNSQ
GNEFKAALINVTRKMMTNSQ

SEQ ID NO: 186028 - protein, 20 aa, Artificial Sequence
  Description of Artificial Sequence: Synthetic peptide
  Seed: GNEKKAKLANVVRKMMTNSQ
GNEFKAALINVVRKMMTNSQ

SEQ ID NO: 186029 - protein, 20 aa, Artificial Sequence
  Description of Artificial Sequence: Synthetic peptide
  Seed: GNEKKAKLANVVRKMMTNSQ
GNEFKAALINVYRKMMTNSQ

SEQ ID NO: 186030 - protein, 20 aa, Artificial Sequence
  Description of Artificial Sequence: Synthetic peptide
  Seed: GNEKKAKLANVVRKMMTNSQ
GNEFKAALLNVARKMMTNSQ

SEQ ID NO: 186031 - protein, 20 aa, Artificial Sequence
  Description of Artificial Sequence: Synthetic peptide
  Seed: GNEKKAKLANVVRKMMTNSQ
GNEFKAALLNVFRKMMTNSQ

SEQ ID NO: 186032 - protein, 20 aa, Artificial Sequence
  Description of Artificial Sequence: Synthetic peptide
  Seed: GNEKKAKLANVVRKMMTNSQ
GNEFKAALLNVGRKMMTNSQ

SEQ ID NO: 186033 - protein, 20 aa, Artificial Sequence
  Description of Artificial Sequence: Synthetic peptide
  Seed: GNEKKAKLANVVRKMMTNSQ
GNEFKAALLNVHRKMMTNSQ

SEQ ID NO: 186034 - protein, 20 aa, Artificial Sequence
  Description of Artificial Sequence: Synthetic peptide
  Seed: GNEKKAKLANVVRKMMTNSQ
GNEFKAALLNVIRKMMTNSQ

SEQ ID NO: 186035 - protein, 20 aa, Artificial Sequence
  Description of Artificial Sequence: Synthetic peptide
  Seed: GNEKKAKLANVVRKMMTNSQ
GNEFKAALLNVLRKMMTNSQ

SEQ ID NO: 186036 - protein, 20 aa, Artificial Sequence
  Description of Artificial Sequence: Synthetic peptide
  Seed: GNEKKAKLANVVRKMMTNSQ
GNEFKAALLNVMRKMMTNSQ

SEQ ID NO: 186037 - protein, 20 aa, Artificial Sequence
  Description of Artificial Sequence: Synthetic peptide
  Seed: GNEKKAKLANVVRKMMTNSQ
GNEFKAALLNVNRKMMTNSQ

SEQ ID NO: 186038 - protein, 20 aa, Artificial Sequence
  Description of Artificial Sequence: Synthetic peptide
  Seed: GNEKKAKLANVVRKMMTNSQ
GNEFKAALLNVSRKMMTNSQ

SEQ ID NO: 186039 - protein, 20 aa, Artificial Sequence
  Description of Artificial Sequence: Synthetic peptide
  Seed: GNEKKAKLANVVRKMMTNSQ
GNEFKAALLNVTRKMMTNSQ

SEQ ID NO: 186040 - protein, 20 aa, Artificial Sequence
  Description of Artificial Sequence: Synthetic peptide
  Seed: GNEKKAKLANVVRKMMTNSQ
GNEFKAALLNVVRKMMTNSQ

SEQ ID NO: 186041 - protein, 20 aa, Artificial Sequence
  Description of Artificial Sequence: Synthetic peptide
  Seed: GNEKKAKLANVVRKMMTNSQ
GNEFKAALLNVYRKMMTNSQ

SEQ ID NO: 186042 - protein, 20 aa, Artificial Sequence
  Description of Artificial Sequence: Synthetic peptide
  Seed: GNEKKAKLANVVRKMMTNSQ
GNEFKAALMNVARKMMTNSQ

SEQ ID NO: 186043 - protein, 20 aa, Artificial Sequence
  Description of Artificial Sequence: Synthetic peptide
  Seed: GNEKKAKLANVVRKMMTNSQ
GNEFKAALMNVFRKMMTNSQ

SEQ ID NO: 186044 - protein, 20 aa, Artificial Sequence
  Description of Artificial Sequence: Synthetic peptide
  Seed: GNEKKAKLANVVRKMMTNSQ
GNEFKAALMNVGRKMMTNSQ

SEQ ID NO: 186045 - protein, 20 aa, Artificial Sequence
  Description of Artificial Sequence: Synthetic peptide
  Seed: GNEKKAKLANVVRKMMTNSQ
GNEFKAALMNVHRKMMTNSQ

SEQ ID NO: 186046 - protein, 20 aa, Artificial Sequence
  Description of Artificial Sequence: Synthetic peptide
  Seed: GNEKKAKLANVVRKMMTNSQ
GNEFKAALMNVIRKMMTNSQ

SEQ ID NO: 186047 - protein, 20 aa, Artificial Sequence
  Description of Artificial Sequence: Synthetic peptide
  Seed: GNEKKAKLANVVRKMMTNSQ
GNEFKAALMNVLRKMMTNSQ

SEQ ID NO: 186048 - protein, 20 aa, Artificial Sequence
  Description of Artificial Sequence: Synthetic peptide
  Seed: GNEKKAKLANVVRKMMTNSQ
GNEFKAALMNVMRKMMTNSQ

SEQ ID NO: 186049 - protein, 20 aa, Artificial Sequence
  Description of Artificial Sequence: Synthetic peptide
  Seed: GNEKKAKLANVVRKMMTNSQ
GNEFKAALMNVNRKMMTNSQ

SEQ ID NO: 186050 - protein, 20 aa, Artificial Sequence
  Description of Artificial Sequence: Synthetic peptide
  Seed: GNEKKAKLANVVRKMMTNSQ
GNEFKAALMNVQRKMMTNSQ

SEQ ID NO: 186051 - protein, 20 aa, Artificial Sequence
  Description of Artificial Sequence: Synthetic peptide
  Seed: GNEKKAKLANVVRKMMTNSQ
GNEFKAALMNVSRKMMTNSQ

SEQ ID NO: 186052 - protein, 20 aa, Artificial Sequence
  Description of Artificial Sequence: Synthetic peptide
  Seed: GNEKKAKLANVVRKMMTNSQ
GNEFKAALMNVTRKMMTNSQ

SEQ ID NO: 186053 - protein, 20 aa, Artificial Sequence
  Description of Artificial Sequence: Synthetic peptide
  Seed: GNEKKAKLANVVRKMMTNSQ
GNEFKAALMNVVRKMMTNSQ

SEQ ID NO: 186054 - protein, 20 aa, Artificial Sequence
  Description of Artificial Sequence: Synthetic peptide
  Seed: GNEKKAKLANVVRKMMTNSQ
GNEFKAALNNVARKMMTNSQ

SEQ ID NO: 186055 - protein, 20 aa, Artificial Sequence
  Description of Artificial Sequence: Synthetic peptide
  Seed: GNEKKAKLANVVRKMMTNSQ
GNEFKAALNNVCRKMMTNSQ

SEQ ID NO: 186056 - protein, 20 aa, Artificial Sequence
  Description of Artificial Sequence: Synthetic peptide
  Seed: GNEKKAKLANVVRKMMTNSQ
GNEFKAALNNVDRKMMTNSQ

SEQ ID NO: 186057 - protein, 20 aa, Artificial Sequence
  Description of Artificial Sequence: Synthetic peptide
  Seed: GNEKKAKLANVVRKMMTNSQ
GNEFKAALNNVERKMMTNSQ

SEQ ID NO: 186058 - protein, 20 aa, Artificial Sequence
  Description of Artificial Sequence: Synthetic peptide
  Seed: GNEKKAKLANVVRKMMTNSQ
GNEFKAALNNVFRKMMTNSQ

SEQ ID NO: 186059 - protein, 20 aa, Artificial Sequence
  Description of Artificial Sequence: Synthetic peptide
  Seed: GNEKKAKLANVVRKMMTNSQ
GNEFKAALNNVGRKMMTNSQ

SEQ ID NO: 186060 - protein, 20 aa, Artificial Sequence
  Description of Artificial Sequence: Synthetic peptide
  Seed: GNEKKAKLANVVRKMMTNSQ
GNEFKAALNNVHRKMMTNSQ

SEQ ID NO: 186061 - protein, 20 aa, Artificial Sequence
  Description of Artificial Sequence: Synthetic peptide
  Seed: GNEKKAKLANVVRKMMTNSQ
GNEFKAALNNVIRKMMTNSQ

SEQ ID NO: 186062 - protein, 20 aa, Artificial Sequence
  Description of Artificial Sequence: Synthetic peptide
  Seed: GNEKKAKLANVVRKMMTNSQ
GNEFKAALNNVLRKMMTNSQ

SEQ ID NO: 186063 - protein, 20 aa, Artificial Sequence
  Description of Artificial Sequence: Synthetic peptide
  Seed: GNEKKAKLANVVRKMMTNSQ
GNEFKAALNNVMRKMMTNSQ

SEQ ID NO: 186064 - protein, 20 aa, Artificial Sequence
  Description of Artificial Sequence: Synthetic peptide
  Seed: GNEKKAKLANVVRKMMTNSQ
GNEFKAALNNVNRKMMTNSQ

SEQ ID NO: 186065 - protein, 20 aa, Artificial Sequence
  Description of Artificial Sequence: Synthetic peptide
  Seed: GNEKKAKLANVVRKMMTNSQ
GNEFKAALNNVPRKMMTNSQ

SEQ ID NO: 186066 - protein, 20 aa, Artificial Sequence
  Description of Artificial Sequence: Synthetic peptide
  Seed: GNEKKAKLANVVRKMMTNSQ
GNEFKAALNNVQRKMMTNSQ

SEQ ID NO: 186067 - protein, 20 aa, Artificial Sequence
  Description of Artificial Sequence: Synthetic peptide
  Seed: GNEKKAKLANVVRKMMTNSQ
GNEFKAALNNVSRKMMTNSQ

SEQ ID NO: 186068 - protein, 20 aa, Artificial Sequence
  Description of Artificial Sequence: Synthetic peptide
  Seed: GNEKKAKLANVVRKMMTNSQ
GNEFKAALNNVTRKMMTNSQ

SEQ ID NO: 186069 - protein, 20 aa, Artificial Sequence
  Description of Artificial Sequence: Synthetic peptide
  Seed: GNEKKAKLANVVRKMMTNSQ
GNEFKAALNNVVRKMMTNSQ

SEQ ID NO: 186070 - protein, 20 aa, Artificial Sequence
  Description of Artificial Sequence: Synthetic peptide
  Seed: GNEKKAKLANVVRKMMTNSQ
GNEFKAALNNVYRKMMTNSQ

SEQ ID NO: 186071 - protein, 20 aa, Artificial Sequence
  Description of Artificial Sequence: Synthetic peptide
  Seed: GNEKKAKLANVVRKMMTNSQ
GNEFKAALPNVARKMMTNSQ

SEQ ID NO: 186072 - protein, 20 aa, Artificial Sequence
  Description of Artificial Sequence: Synthetic peptide
  Seed: GNEKKAKLANVVRKMMTNSQ
GNEFKAALPNVCRKMMTNSQ

SEQ ID NO: 186073 - protein, 20 aa, Artificial Sequence
  Description of Artificial Sequence: Synthetic peptide
  Seed: GNEKKAKLANVVRKMMTNSQ
GNEFKAALPNVDRKMMTNSQ

SEQ ID NO: 186074 - protein, 20 aa, Artificial Sequence
  Description of Artificial Sequence: Synthetic peptide
  Seed: GNEKKAKLANVVRKMMTNSQ
GNEFKAALPNVERKMMTNSQ

SEQ ID NO: 186075 - protein, 20 aa, Artificial Sequence
  Description of Artificial Sequence: Synthetic peptide
  Seed: GNEKKAKLANVVRKMMTNSQ
GNEFKAALPNVFRKMMTNSQ

SEQ ID NO: 186076 - protein, 20 aa, Artificial Sequence
  Description of Artificial Sequence: Synthetic peptide
  Seed: GNEKKAKLANVVRKMMTNSQ
GNEFKAALPNVGRKMMTNSQ

SEQ ID NO: 186077 - protein, 20 aa, Artificial Sequence
  Description of Artificial Sequence: Synthetic peptide
  Seed: GNEKKAKLANVVRKMMTNSQ
GNEFKAALPNVHRKMMTNSQ

SEQ ID NO: 186078 - protein, 20 aa, Artificial Sequence
  Description of Artificial Sequence: Synthetic peptide
  Seed: GNEKKAKLANVVRKMMTNSQ
GNEFKAALPNVIRKMMTNSQ

SEQ ID NO: 186079 - protein, 20 aa, Artificial Sequence
  Description of Artificial Sequence: Synthetic peptide
  Seed: GNEKKAKLANVVRKMMTNSQ
GNEFKAALPNVKRKMMTNSQ

SEQ ID NO: 186080 - protein, 20 aa, Artificial Sequence
  Description of Artificial Sequence: Synthetic peptide
  Seed: GNEKKAKLANVVRKMMTNSQ
GNEFKAALPNVLRKMMTNSQ

SEQ ID NO: 186081 - protein, 20 aa, Artificial Sequence
  Description of Artificial Sequence: Synthetic peptide
  Seed: GNEKKAKLANVVRKMMTNSQ
GNEFKAALPNVMRKMMTNSQ

SEQ ID NO: 186082 - protein, 20 aa, Artificial Sequence
  Description of Artificial Sequence: Synthetic peptide
  Seed: GNEKKAKLANVVRKMMTNSQ
GNEFKAALPNVNRKMMTNSQ

SEQ ID NO: 186083 - protein, 20 aa, Artificial Sequence
  Description of Artificial Sequence: Synthetic peptide
  Seed: GNEKKAKLANVVRKMMTNSQ
GNEFKAALPNVPRKMMTNSQ

SEQ ID NO: 186084 - protein, 20 aa, Artificial Sequence
  Description of Artificial Sequence: Synthetic peptide
  Seed: GNEKKAKLANVVRKMMTNSQ
GNEFKAALPNVQRKMMTNSQ

SEQ ID NO: 186085 - protein, 20 aa, Artificial Sequence
  Description of Artificial Sequence: Synthetic peptide
  Seed: GNEKKAKLANVVRKMMTNSQ
GNEFKAALPNVRRKMMTNSQ

SEQ ID NO: 186086 - protein, 20 aa, Artificial Sequence
  Description of Artificial Sequence: Synthetic peptide
  Seed: GNEKKAKLANVVRKMMTNSQ
GNEFKAALPNVSRKMMTNSQ

SEQ ID NO: 186087 - protein, 20 aa, Artificial Sequence
  Description of Artificial Sequence: Synthetic peptide
  Seed: GNEKKAKLANVVRKMMTNSQ
GNEFKAALPNVTRKMMTNSQ

SEQ ID NO: 186088 - protein, 20 aa, Artificial Sequence
  Description of Artificial Sequence: Synthetic peptide
  Seed: GNEKKAKLANVVRKMMTNSQ
GNEFKAALPNVVRKMMTNSQ

SEQ ID NO: 186089 - protein, 20 aa, Artificial Sequence
  Description of Artificial Sequence: Synthetic peptide
  Seed: GNEKKAKLANVVRKMMTNSQ
GNEFKAALPNVWRKMMTNSQ

SEQ ID NO: 186090 - protein, 20 aa, Artificial Sequence
  Description of Artificial Sequence: Synthetic peptide
  Seed: GNEKKAKLANVVRKMMTNSQ
GNEFKAALPNVYRKMMTNSQ

SEQ ID NO: 186091 - protein, 20 aa, Artificial Sequence
  Description of Artificial Sequence: Synthetic peptide
  Seed: GNEKKAKLANVVRKMMTNSQ
GNEFKAALQNVARKMMTNSQ

SEQ ID NO: 186092 - protein, 20 aa, Artificial Sequence
  Description of Artificial Sequence: Synthetic peptide
  Seed: GNEKKAKLANVVRKMMTNSQ
GNEFKAALQNVIRKMMTNSQ

SEQ ID NO: 186093 - protein, 20 aa, Artificial Sequence
  Description of Artificial Sequence: Synthetic peptide
  Seed: GNEKKAKLANVVRKMMTNSQ
GNEFKAALQNVLRKMMTNSQ

SEQ ID NO: 186094 - protein, 20 aa, Artificial Sequence
  Description of Artificial Sequence: Synthetic peptide
  Seed: GNEKKAKLANVVRKMMTNSQ
GNEFKAALQNVNRKMMTNSQ

SEQ ID NO: 186095 - protein, 20 aa, Artificial Sequence
  Description of Artificial Sequence: Synthetic peptide
  Seed: GNEKKAKLANVVRKMMTNSQ
GNEFKAALQNVSRKMMTNSQ

SEQ ID NO: 186096 - protein, 20 aa, Artificial Sequence
  Description of Artificial Sequence: Synthetic peptide
  Seed: GNEKKAKLANVVRKMMTNSQ
GNEFKAALQNVTRKMMTNSQ

SEQ ID NO: 186097 - protein, 20 aa, Artificial Sequence
  Description of Artificial Sequence: Synthetic peptide
  Seed: GNEKKAKLANVVRKMMTNSQ
GNEFKAALQNVVRKMMTNSQ

SEQ ID NO: 186098 - protein, 20 aa, Artificial Sequence
  Description of Artificial Sequence: Synthetic peptide
  Seed: GNEKKAKLANVVRKMMTNSQ
GNEFKAALSNVARKMMTNSQ

SEQ ID NO: 186099 - protein, 20 aa, Artificial Sequence
  Description of Artificial Sequence: Synthetic peptide
  Seed: GNEKKAKLANVVRKMMTNSQ
GNEFKAALSNVCRKMMTNSQ

SEQ ID NO: 186100 - protein, 20 aa, Artificial Sequence
  Description of Artificial Sequence: Synthetic peptide
  Seed: GNEKKAKLANVVRKMMTNSQ
GNEFKAALSNVDRKMMTNSQ

SEQ ID NO: 186101 - protein, 20 aa, Artificial Sequence
  Description of Artificial Sequence: Synthetic peptide
  Seed: GNEKKAKLANVVRKMMTNSQ
GNEFKAALSNVERKMMTNSQ

SEQ ID NO: 186102 - protein, 20 aa, Artificial Sequence
  Description of Artificial Sequence: Synthetic peptide
  Seed: GNEKKAKLANVVRKMMTNSQ
GNEFKAALSNVFRKMMTNSQ

SEQ ID NO: 186103 - protein, 20 aa, Artificial Sequence
  Description of Artificial Sequence: Synthetic peptide
  Seed: GNEKKAKLANVVRKMMTNSQ
GNEFKAALSNVGRKMMTNSQ

SEQ ID NO: 186104 - protein, 20 aa, Artificial Sequence
  Description of Artificial Sequence: Synthetic peptide
  Seed: GNEKKAKLANVVRKMMTNSQ
GNEFKAALSNVHRKMMTNSQ

SEQ ID NO: 186105 - protein, 20 aa, Artificial Sequence
  Description of Artificial Sequence: Synthetic peptide
  Seed: GNEKKAKLANVVRKMMTNSQ
GNEFKAALSNVIRKMMTNSQ

SEQ ID NO: 186106 - protein, 20 aa, Artificial Sequence
  Description of Artificial Sequence: Synthetic peptide
  Seed: GNEKKAKLANVVRKMMTNSQ
GNEFKAALSNVKRKMMTNSQ

SEQ ID NO: 186107 - protein, 20 aa, Artificial Sequence
  Description of Artificial Sequence: Synthetic peptide
  Seed: GNEKKAKLANVVRKMMTNSQ
GNEFKAALSNVLRKMMTNSQ

SEQ ID NO: 186108 - protein, 20 aa, Artificial Sequence
  Description of Artificial Sequence: Synthetic peptide
  Seed: GNEKKAKLANVVRKMMTNSQ
GNEFKAALSNVMRKMMTNSQ

SEQ ID NO: 186109 - protein, 20 aa, Artificial Sequence
  Description of Artificial Sequence: Synthetic peptide
  Seed: GNEKKAKLANVVRKMMTNSQ
GNEFKAALSNVNRKMMTNSQ

SEQ ID NO: 186110 - protein, 20 aa, Artificial Sequence
  Description of Artificial Sequence: Synthetic peptide
  Seed: GNEKKAKLANVVRKMMTNSQ
GNEFKAALSNVPRKMMTNSQ

SEQ ID NO: 186111 - protein, 20 aa, Artificial Sequence
  Description of Artificial Sequence: Synthetic peptide
  Seed: GNEKKAKLANVVRKMMTNSQ
GNEFKAALSNVQRKMMTNSQ

SEQ ID NO: 186112 - protein, 20 aa, Artificial Sequence
  Description of Artificial Sequence: Synthetic peptide
  Seed: GNEKKAKLANVVRKMMTNSQ
GNEFKAALSNVRRKMMTNSQ

SEQ ID NO: 186113 - protein, 20 aa, Artificial Sequence
  Description of Artificial Sequence: Synthetic peptide
  Seed: GNEKKAKLANVVRKMMTNSQ
GNEFKAALSNVSRKMMTNSQ

SEQ ID NO: 186114 - protein, 20 aa, Artificial Sequence
  Description of Artificial Sequence: Synthetic peptide
  Seed: GNEKKAKLANVVRKMMTNSQ
GNEFKAALSNVTRKMMTNSQ

SEQ ID NO: 186115 - protein, 20 aa, Artificial Sequence
  Description of Artificial Sequence: Synthetic peptide
  Seed: GNEKKAKLANVVRKMMTNSQ
GNEFKAALSNVVRKMMTNSQ

SEQ ID NO: 186116 - protein, 20 aa, Artificial Sequence
  Description of Artificial Sequence: Synthetic peptide
  Seed: GNEKKAKLANVVRKMMTNSQ
GNEFKAALSNVWRKMMTNSQ

SEQ ID NO: 186117 - protein, 20 aa, Artificial Sequence
  Description of Artificial Sequence: Synthetic peptide
  Seed: GNEKKAKLANVVRKMMTNSQ
GNEFKAALSNVYRKMMTNSQ

SEQ ID NO: 186118 - protein, 20 aa, Artificial Sequence
  Description of Artificial Sequence: Synthetic peptide
  Seed: GNEKKAKLANVVRKMMTNSQ
GNEFKAALTNVARKMMTNSQ

SEQ ID NO: 186119 - protein, 20 aa, Artificial Sequence
  Description of Artificial Sequence: Synthetic peptide
  Seed: GNEKKAKLANVVRKMMTNSQ
GNEFKAALTNVCRKMMTNSQ

SEQ ID NO: 186120 - protein, 20 aa, Artificial Sequence
  Description of Artificial Sequence: Synthetic peptide
  Seed: GNEKKAKLANVVRKMMTNSQ
GNEFKAALTNVDRKMMTNSQ

SEQ ID NO: 186121 - protein, 20 aa, Artificial Sequence
  Description of Artificial Sequence: Synthetic peptide
  Seed: GNEKKAKLANVVRKMMTNSQ
GNEFKAALTNVERKMMTNSQ

SEQ ID NO: 186122 - protein, 20 aa, Artificial Sequence
  Description of Artificial Sequence: Synthetic peptide
  Seed: GNEKKAKLANVVRKMMTNSQ
GNEFKAALTNVFRKMMTNSQ

SEQ ID NO: 186123 - protein, 20 aa, Artificial Sequence
  Description of Artificial Sequence: Synthetic peptide
  Seed: GNEKKAKLANVVRKMMTNSQ
GNEFKAALTNVGRKMMTNSQ

SEQ ID NO: 186124 - protein, 20 aa, Artificial Sequence
  Description of Artificial Sequence: Synthetic peptide
  Seed: GNEKKAKLANVVRKMMTNSQ
GNEFKAALTNVHRKMMTNSQ

SEQ ID NO: 186125 - protein, 20 aa, Artificial Sequence
  Description of Artificial Sequence: Synthetic peptide
  Seed: GNEKKAKLANVVRKMMTNSQ
GNEFKAALTNVIRKMMTNSQ

SEQ ID NO: 186126 - protein, 20 aa, Artificial Sequence
  Description of Artificial Sequence: Synthetic peptide
  Seed: GNEKKAKLANVVRKMMTNSQ
GNEFKAALTNVKRKMMTNSQ

SEQ ID NO: 186127 - protein, 20 aa, Artificial Sequence
  Description of Artificial Sequence: Synthetic peptide
  Seed: GNEKKAKLANVVRKMMTNSQ
GNEFKAALTNVLRKMMTNSQ

SEQ ID NO: 186128 - protein, 20 aa, Artificial Sequence
  Description of Artificial Sequence: Synthetic peptide
  Seed: GNEKKAKLANVVRKMMTNSQ
GNEFKAALTNVMRKMMTNSQ

SEQ ID NO: 186129 - protein, 20 aa, Artificial Sequence
  Description of Artificial Sequence: Synthetic peptide
  Seed: GNEKKAKLANVVRKMMTNSQ
GNEFKAALTNVNRKMMTNSQ

SEQ ID NO: 186130 - protein, 20 aa, Artificial Sequence
  Description of Artificial Sequence: Synthetic peptide
  Seed: GNEKKAKLANVVRKMMTNSQ
GNEFKAALTNVPRKMMTNSQ

SEQ ID NO: 186131 - protein, 20 aa, Artificial Sequence
  Description of Artificial Sequence: Synthetic peptide
  Seed: GNEKKAKLANVVRKMMTNSQ
GNEFKAALTNVQRKMMTNSQ

SEQ ID NO: 186132 - protein, 20 aa, Artificial Sequence
  Description of Artificial Sequence: Synthetic peptide
  Seed: GNEKKAKLANVVRKMMTNSQ
GNEFKAALTNVRRKMMTNSQ

SEQ ID NO: 186133 - protein, 20 aa, Artificial Sequence
  Description of Artificial Sequence: Synthetic peptide
  Seed: GNEKKAKLANVVRKMMTNSQ
GNEFKAALTNVSRKMMTNSQ

SEQ ID NO: 186134 - protein, 20 aa, Artificial Sequence
  Description of Artificial Sequence: Synthetic peptide
  Seed: GNEKKAKLANVVRKMMTNSQ
GNEFKAALTNVTRKMMTNSQ

SEQ ID NO: 186135 - protein, 20 aa, Artificial Sequence
  Description of Artificial Sequence: Synthetic peptide
  Seed: GNEKKAKLANVVRKMMTNSQ
GNEFKAALTNVVRKMMTNSQ

SEQ ID NO: 186136 - protein, 20 aa, Artificial Sequence
  Description of Artificial Sequence: Synthetic peptide
  Seed: GNEKKAKLANVVRKMMTNSQ
GNEFKAALTNVWRKMMTNSQ

SEQ ID NO: 186137 - protein, 20 aa, Artificial Sequence
  Description of Artificial Sequence: Synthetic peptide
  Seed: GNEKKAKLANVVRKMMTNSQ
GNEFKAALTNVYRKMMTNSQ

SEQ ID NO: 186138 - protein, 20 aa, Artificial Sequence
  Description of Artificial Sequence: Synthetic peptide
  Seed: GNEKKAKLANVVRKMMTNSQ
GNEFKAALVNVARKMMTNSQ

SEQ ID NO: 186139 - protein, 20 aa, Artificial Sequence
  Description of Artificial Sequence: Synthetic peptide
  Seed: GNEKKAKLANVVRKMMTNSQ
GNEFKAALVNVCRKMMTNSQ

SEQ ID NO: 186140 - protein, 20 aa, Artificial Sequence
  Description of Artificial Sequence: Synthetic peptide
  Seed: GNEKKAKLANVVRKMMTNSQ
GNEFKAALVNVDRKMMTNSQ

SEQ ID NO: 186141 - protein, 20 aa, Artificial Sequence
  Description of Artificial Sequence: Synthetic peptide
  Seed: GNEKKAKLANVVRKMMTNSQ
GNEFKAALVNVERKMMTNSQ

SEQ ID NO: 186142 - protein, 20 aa, Artificial Sequence
  Description of Artificial Sequence: Synthetic peptide
  Seed: GNEKKAKLANVVRKMMTNSQ
GNEFKAALVNVFRKMMTNSQ

SEQ ID NO: 186143 - protein, 20 aa, Artificial Sequence
  Description of Artificial Sequence: Synthetic peptide
  Seed: GNEKKAKLANVVRKMMTNSQ
GNEFKAALVNVGRKMMTNSQ

SEQ ID NO: 186144 - protein, 20 aa, Artificial Sequence
  Description of Artificial Sequence: Synthetic peptide
  Seed: GNEKKAKLANVVRKMMTNSQ
GNEFKAALVNVHRKMMTNSQ

SEQ ID NO: 186145 - protein, 20 aa, Artificial Sequence
  Description of Artificial Sequence: Synthetic peptide
  Seed: GNEKKAKLANVVRKMMTNSQ
GNEFKAALVNVIRKMMTNSQ

SEQ ID NO: 186146 - protein, 20 aa, Artificial Sequence
  Description of Artificial Sequence: Synthetic peptide
  Seed: GNEKKAKLANVVRKMMTNSQ
GNEFKAALVNVKRKMMTNSQ

SEQ ID NO: 186147 - protein, 20 aa, Artificial Sequence
  Description of Artificial Sequence: Synthetic peptide
  Seed: GNEKKAKLANVVRKMMTNSQ
GNEFKAALVNVLRKMMTNSQ

SEQ ID NO: 186148 - protein, 20 aa, Artificial Sequence
  Description of Artificial Sequence: Synthetic peptide
  Seed: GNEKKAKLANVVRKMMTNSQ
GNEFKAALVNVMRKMMTNSQ

SEQ ID NO: 186149 - protein, 20 aa, Artificial Sequence
  Description of Artificial Sequence: Synthetic peptide
  Seed: GNEKKAKLANVVRKMMTNSQ
GNEFKAALVNVNRKMMTNSQ

SEQ ID NO: 186150 - protein, 20 aa, Artificial Sequence
  Description of Artificial Sequence: Synthetic peptide
  Seed: GNEKKAKLANVVRKMMTNSQ
GNEFKAALVNVPRKMMTNSQ

SEQ ID NO: 186151 - protein, 20 aa, Artificial Sequence
  Description of Artificial Sequence: Synthetic peptide
  Seed: GNEKKAKLANVVRKMMTNSQ
GNEFKAALVNVQRKMMTNSQ

SEQ ID NO: 186152 - protein, 20 aa, Artificial Sequence
  Description of Artificial Sequence: Synthetic peptide
  Seed: GNEKKAKLANVVRKMMTNSQ
GNEFKAALVNVRRKMMTNSQ

SEQ ID NO: 186153 - protein, 20 aa, Artificial Sequence
  Description of Artificial Sequence: Synthetic peptide
  Seed: GNEKKAKLANVVRKMMTNSQ
GNEFKAALVNVSRKMMTNSQ

SEQ ID NO: 186154 - protein, 20 aa, Artificial Sequence
  Description of Artificial Sequence: Synthetic peptide
  Seed: GNEKKAKLANVVRKMMTNSQ
GNEFKAALVNVTRKMMTNSQ

SEQ ID NO: 186155 - protein, 20 aa, Artificial Sequence
  Description of Artificial Sequence: Synthetic peptide
  Seed: GNEKKAKLANVVRKMMTNSQ
GNEFKAALVNVVRKMMTNSQ

SEQ ID NO: 186156 - protein, 20 aa, Artificial Sequence
  Description of Artificial Sequence: Synthetic peptide
  Seed: GNEKKAKLANVVRKMMTNSQ
GNEFKAALVNVYRKMMTNSQ

SEQ ID NO: 186157 - protein, 20 aa, Artificial Sequence
  Description of Artificial Sequence: Synthetic peptide
  Seed: GNEKKAKLANVVRKMMTNSQ
GNEFKAALWNVARKMMTNSQ

SEQ ID NO: 186158 - protein, 20 aa, Artificial Sequence
  Description of Artificial Sequence: Synthetic peptide
  Seed: GNEKKAKLANVVRKMMTNSQ
GNEFKAALWNVFRKMMTNSQ

SEQ ID NO: 186159 - protein, 20 aa, Artificial Sequence
  Description of Artificial Sequence: Synthetic peptide
  Seed: GNEKKAKLANVVRKMMTNSQ
GNEFKAALWNVIRKMMTNSQ

SEQ ID NO: 186160 - protein, 20 aa, Artificial Sequence
  Description of Artificial Sequence: Synthetic peptide
  Seed: GNEKKAKLANVVRKMMTNSQ
GNEFKAALWNVLRKMMTNSQ

SEQ ID NO: 186161 - protein, 20 aa, Artificial Sequence
  Description of Artificial Sequence: Synthetic peptide
  Seed: GNEKKAKLANVVRKMMTNSQ
GNEFKAALWNVMRKMMTNSQ

SEQ ID NO: 186162 - protein, 20 aa, Artificial Sequence
  Description of Artificial Sequence: Synthetic peptide
  Seed: GNEKKAKLANVVRKMMTNSQ
GNEFKAALWNVTRKMMTNSQ

SEQ ID NO: 186163 - protein, 20 aa, Artificial Sequence
  Description of Artificial Sequence: Synthetic peptide
  Seed: GNEKKAKLANVVRKMMTNSQ
GNEFKAALWNVVRKMMTNSQ

SEQ ID NO: 186164 - protein, 20 aa, Artificial Sequence
  Description of Artificial Sequence: Synthetic peptide
  Seed: GNEKKAKLANVVRKMMTNSQ
GNEFKAALWNVYRKMMTNSQ

SEQ ID NO: 186165 - protein, 20 aa, Artificial Sequence
  Description of Artificial Sequence: Synthetic peptide
  Seed: GNEKKAKLANVVRKMMTNSQ
GNEFKAALYNVARKMMTNSQ

SEQ ID NO: 186166 - protein, 20 aa, Artificial Sequence
  Description of Artificial Sequence: Synthetic peptide
  Seed: GNEKKAKLANVVRKMMTNSQ
GNEFKAALYNVERKMMTNSQ

SEQ ID NO: 186167 - protein, 20 aa, Artificial Sequence
  Description of Artificial Sequence: Synthetic peptide
  Seed: GNEKKAKLANVVRKMMTNSQ
GNEFKAALYNVFRKMMTNSQ

SEQ ID NO: 186168 - protein, 20 aa, Artificial Sequence
  Description of Artificial Sequence: Synthetic peptide
  Seed: GNEKKAKLANVVRKMMTNSQ
GNEFKAALYNVIRKMMTNSQ

SEQ ID NO: 186169 - protein, 20 aa, Artificial Sequence
  Description of Artificial Sequence: Synthetic peptide
  Seed: GNEKKAKLANVVRKMMTNSQ
GNEFKAALYNVLRKMMTNSQ

SEQ ID NO: 186170 - protein, 20 aa, Artificial Sequence
  Description of Artificial Sequence: Synthetic peptide
  Seed: GNEKKAKLANVVRKMMTNSQ
GNEFKAALYNVMRKMMTNSQ

SEQ ID NO: 186171 - protein, 20 aa, Artificial Sequence
  Description of Artificial Sequence: Synthetic peptide
  Seed: GNEKKAKLANVVRKMMTNSQ
GNEFKAALYNVNRKMMTNSQ

SEQ ID NO: 186172 - protein, 20 aa, Artificial Sequence
  Description of Artificial Sequence: Synthetic peptide
  Seed: GNEKKAKLANVVRKMMTNSQ
GNEFKAALYNVSRKMMTNSQ

SEQ ID NO: 186173 - protein, 20 aa, Artificial Sequence
  Description of Artificial Sequence: Synthetic peptide
  Seed: GNEKKAKLANVVRKMMTNSQ
GNEFKAALYNVTRKMMTNSQ

SEQ ID NO: 186174 - protein, 20 aa, Artificial Sequence
  Description of Artificial Sequence: Synthetic peptide
  Seed: GNEKKAKLANVVRKMMTNSQ
GNEFKAALYNVVRKMMTNSQ

SEQ ID NO: 186175 - protein, 20 aa, Artificial Sequence
  Description of Artificial Sequence: Synthetic peptide
  Seed: GNEKKAKLANVVRKMMTNSQ
GNEFKAALYNVYRKMMTNSQ

SEQ ID NO: 186176 - protein, 20 aa, Artificial Sequence
  Description of Artificial Sequence: Synthetic peptide
  Seed: GNEKKAKLANVVRKMMTNSQ
GNEFKACLANVARKMMTNSQ

SEQ ID NO: 186177 - protein, 20 aa, Artificial Sequence
  Description of Artificial Sequence: Synthetic peptide
  Seed: GNEKKAKLANVVRKMMTNSQ
GNEFKACLANVFRKMMTNSQ

SEQ ID NO: 186178 - protein, 20 aa, Artificial Sequence
  Description of Artificial Sequence: Synthetic peptide
  Seed: GNEKKAKLANVVRKMMTNSQ
GNEFKACLANVGRKMMTNSQ

SEQ ID NO: 186179 - protein, 20 aa, Artificial Sequence
  Description of Artificial Sequence: Synthetic peptide
  Seed: GNEKKAKLANVVRKMMTNSQ
GNEFKACLANVIRKMMTNSQ

SEQ ID NO: 186180 - protein, 20 aa, Artificial Sequence
  Description of Artificial Sequence: Synthetic peptide
  Seed: GNEKKAKLANVVRKMMTNSQ
GNEFKACLANVLRKMMTNSQ

SEQ ID NO: 186181 - protein, 20 aa, Artificial Sequence
  Description of Artificial Sequence: Synthetic peptide
  Seed: GNEKKAKLANVVRKMMTNSQ
GNEFKACLANVMRKMMTNSQ

SEQ ID NO: 186182 - protein, 20 aa, Artificial Sequence
  Description of Artificial Sequence: Synthetic peptide
  Seed: GNEKKAKLANVVRKMMTNSQ
GNEFKACLANVNRKMMTNSQ

SEQ ID NO: 186183 - protein, 20 aa, Artificial Sequence
  Description of Artificial Sequence: Synthetic peptide
  Seed: GNEKKAKLANVVRKMMTNSQ
GNEFKACLANVSRKMMTNSQ

SEQ ID NO: 186184 - protein, 20 aa, Artificial Sequence
  Description of Artificial Sequence: Synthetic peptide
  Seed: GNEKKAKLANVVRKMMTNSQ
GNEFKACLANVTRKMMTNSQ

SEQ ID NO: 186185 - protein, 20 aa, Artificial Sequence
  Description of Artificial Sequence: Synthetic peptide
  Seed: GNEKKAKLANVVRKMMTNSQ
GNEFKACLANVVRKMMTNSQ

SEQ ID NO: 186186 - protein, 20 aa, Artificial Sequence
  Description of Artificial Sequence: Synthetic peptide
  Seed: GNEKKAKLANVVRKMMTNSQ
GNEFKACLFNVARKMMTNSQ

SEQ ID NO: 186187 - protein, 20 aa, Artificial Sequence
  Description of Artificial Sequence: Synthetic peptide
  Seed: GNEKKAKLANVVRKMMTNSQ
GNEFKACLFNVERKMMTNSQ

SEQ ID NO: 186188 - protein, 20 aa, Artificial Sequence
  Description of Artificial Sequence: Synthetic peptide
  Seed: GNEKKAKLANVVRKMMTNSQ
GNEFKACLFNVFRKMMTNSQ

SEQ ID NO: 186189 - protein, 20 aa, Artificial Sequence
  Description of Artificial Sequence: Synthetic peptide
  Seed: GNEKKAKLANVVRKMMTNSQ
GNEFKACLFNVIRKMMTNSQ

SEQ ID NO: 186190 - protein, 20 aa, Artificial Sequence
  Description of Artificial Sequence: Synthetic peptide
  Seed: GNEKKAKLANVVRKMMTNSQ
GNEFKACLFNVLRKMMTNSQ

SEQ ID NO: 186191 - protein, 20 aa, Artificial Sequence
  Description of Artificial Sequence: Synthetic peptide
  Seed: GNEKKAKLANVVRKMMTNSQ
GNEFKACLFNVMRKMMTNSQ

SEQ ID NO: 186192 - protein, 20 aa, Artificial Sequence
  Description of Artificial Sequence: Synthetic peptide
  Seed: GNEKKAKLANVVRKMMTNSQ
GNEFKACLFNVVRKMMTNSQ

SEQ ID NO: 186193 - protein, 20 aa, Artificial Sequence
  Description of Artificial Sequence: Synthetic peptide
  Seed: GNEKKAKLANVVRKMMTNSQ
GNEFKACLFNVYRKMMTNSQ

SEQ ID NO: 186194 - protein, 20 aa, Artificial Sequence
  Description of Artificial Sequence: Synthetic peptide
  Seed: GNEKKAKLANVVRKMMTNSQ
GNEFKACLGNVARKMMTNSQ

SEQ ID NO: 186195 - protein, 20 aa, Artificial Sequence
  Description of Artificial Sequence: Synthetic peptide
  Seed: GNEKKAKLANVVRKMMTNSQ
GNEFKACLGNVIRKMMTNSQ

SEQ ID NO: 186196 - protein, 20 aa, Artificial Sequence
  Description of Artificial Sequence: Synthetic peptide
  Seed: GNEKKAKLANVVRKMMTNSQ
GNEFKACLGNVLRKMMTNSQ

SEQ ID NO: 186197 - protein, 20 aa, Artificial Sequence
  Description of Artificial Sequence: Synthetic peptide
  Seed: GNEKKAKLANVVRKMMTNSQ
GNEFKACLGNVMRKMMTNSQ

SEQ ID NO: 186198 - protein, 20 aa, Artificial Sequence
  Description of Artificial Sequence: Synthetic peptide
  Seed: GNEKKAKLANVVRKMMTNSQ
GNEFKACLGNVVRKMMTNSQ

SEQ ID NO: 186199 - protein, 20 aa, Artificial Sequence
  Description of Artificial Sequence: Synthetic peptide
  Seed: GNEKKAKLANVVRKMMTNSQ
GNEFKACLPNVARKMMTNSQ

SEQ ID NO: 186200 - protein, 20 aa, Artificial Sequence
  Description of Artificial Sequence: Synthetic peptide
  Seed: GNEKKAKLANVVRKMMTNSQ
GNEFKACLPNVIRKMMTNSQ

SEQ ID NO: 186201 - protein, 20 aa, Artificial Sequence
  Description of Artificial Sequence: Synthetic peptide
  Seed: GNEKKAKLANVVRKMMTNSQ
GNEFKACLPNVLRKMMTNSQ

SEQ ID NO: 186202 - protein, 20 aa, Artificial Sequence
  Description of Artificial Sequence: Synthetic peptide
  Seed: GNEKKAKLANVVRKMMTNSQ
GNEFKACLPNVNRKMMTNSQ

SEQ ID NO: 186203 - protein, 20 aa, Artificial Sequence
  Description of Artificial Sequence: Synthetic peptide
  Seed: GNEKKAKLANVVRKMMTNSQ
GNEFKACLPNVSRKMMTNSQ

SEQ ID NO: 186204 - protein, 20 aa, Artificial Sequence
  Description of Artificial Sequence: Synthetic peptide
  Seed: GNEKKAKLANVVRKMMTNSQ
GNEFKACLPNVVRKMMTNSQ

SEQ ID NO: 186205 - protein, 20 aa, Artificial Sequence
  Description of Artificial Sequence: Synthetic peptide
  Seed: GNEKKAKLANVVRKMMTNSQ
GNEFKACLSNVARKMMTNSQ

SEQ ID NO: 186206 - protein, 20 aa, Artificial Sequence
  Description of Artificial Sequence: Synthetic peptide
  Seed: GNEKKAKLANVVRKMMTNSQ
GNEFKACLSNVIRKMMTNSQ

SEQ ID NO: 186207 - protein, 20 aa, Artificial Sequence
  Description of Artificial Sequence: Synthetic peptide
  Seed: GNEKKAKLANVVRKMMTNSQ
GNEFKACLSNVLRKMMTNSQ

SEQ ID NO: 186208 - protein, 20 aa, Artificial Sequence
  Description of Artificial Sequence: Synthetic peptide
  Seed: GNEKKAKLANVVRKMMTNSQ
GNEFKACLSNVMRKMMTNSQ

SEQ ID NO: 186209 - protein, 20 aa, Artificial Sequence
  Description of Artificial Sequence: Synthetic peptide
  Seed: GNEKKAKLANVVRKMMTNSQ
GNEFKACLSNVNRKMMTNSQ

SEQ ID NO: 186210 - protein, 20 aa, Artificial Sequence
  Description of Artificial Sequence: Synthetic peptide
  Seed: GNEKKAKLANVVRKMMTNSQ
GNEFKACLSNVSRKMMTNSQ

SEQ ID NO: 186211 - protein, 20 aa, Artificial Sequence
  Description of Artificial Sequence: Synthetic peptide
  Seed: GNEKKAKLANVVRKMMTNSQ
GNEFKACLSNVVRKMMTNSQ

SEQ ID NO: 186212 - protein, 20 aa, Artificial Sequence
  Description of Artificial Sequence: Synthetic peptide
  Seed: GNEKKAKLANVVRKMMTNSQ
GNEFKACLTNVARKMMTNSQ

SEQ ID NO: 186213 - protein, 20 aa, Artificial Sequence
  Description of Artificial Sequence: Synthetic peptide
  Seed: GNEKKAKLANVVRKMMTNSQ
GNEFKACLTNVIRKMMTNSQ

SEQ ID NO: 186214 - protein, 20 aa, Artificial Sequence
  Description of Artificial Sequence: Synthetic peptide
  Seed: GNEKKAKLANVVRKMMTNSQ
GNEFKACLTNVLRKMMTNSQ

SEQ ID NO: 186215 - protein, 20 aa, Artificial Sequence
  Description of Artificial Sequence: Synthetic peptide
  Seed: GNEKKAKLANVVRKMMTNSQ
GNEFKACLTNVNRKMMTNSQ

SEQ ID NO: 186216 - protein, 20 aa, Artificial Sequence
  Description of Artificial Sequence: Synthetic peptide
  Seed: GNEKKAKLANVVRKMMTNSQ
GNEFKACLTNVVRKMMTNSQ

SEQ ID NO: 186217 - protein, 20 aa, Artificial Sequence
  Description of Artificial Sequence: Synthetic peptide
  Seed: GNEKKAKLANVVRKMMTNSQ
GNEFKACLVNVARKMMTNSQ

SEQ ID NO: 186218 - protein, 20 aa, Artificial Sequence
  Description of Artificial Sequence: Synthetic peptide
  Seed: GNEKKAKLANVVRKMMTNSQ
GNEFKACLVNVNRKMMTNSQ

SEQ ID NO: 186219 - protein, 20 aa, Artificial Sequence
  Description of Artificial Sequence: Synthetic peptide
  Seed: GNEKKAKLANVVRKMMTNSQ
GNEFKACLVNVSRKMMTNSQ

SEQ ID NO: 186220 - protein, 20 aa, Artificial Sequence
  Description of Artificial Sequence: Synthetic peptide
  Seed: GNEKKAKLANVVRKMMTNSQ
GNEFKACLYNVFRKMMTNSQ

SEQ ID NO: 186221 - protein, 20 aa, Artificial Sequence
  Description of Artificial Sequence: Synthetic peptide
  Seed: GNEKKAKLANVVRKMMTNSQ
GNEFKACLYNVIRKMMTNSQ

SEQ ID NO: 186222 - protein, 20 aa, Artificial Sequence
  Description of Artificial Sequence: Synthetic peptide
  Seed: GNEKKAKLANVVRKMMTNSQ
GNEFKACLYNVLRKMMTNSQ

SEQ ID NO: 186223 - protein, 20 aa, Artificial Sequence
  Description of Artificial Sequence: Synthetic peptide
  Seed: GNEKKAKLANVVRKMMTNSQ
GNEFKACLYNVVRKMMTNSQ

SEQ ID NO: 186224 - protein, 20 aa, Artificial Sequence
  Description of Artificial Sequence: Synthetic peptide
  Seed: GNEKKAKLANVVRKMMTNSQ
GNEFKADLANVARKMMTNSQ

SEQ ID NO: 186225 - protein, 20 aa, Artificial Sequence
  Description of Artificial Sequence: Synthetic peptide
  Seed: GNEKKAKLANVVRKMMTNSQ
GNEFKADLANVIRKMMTNSQ

SEQ ID NO: 186226 - protein, 20 aa, Artificial Sequence
  Description of Artificial Sequence: Synthetic peptide
  Seed: GNEKKAKLANVVRKMMTNSQ
GNEFKADLANVLRKMMTNSQ

SEQ ID NO: 186227 - protein, 20 aa, Artificial Sequence
  Description of Artificial Sequence: Synthetic peptide
  Seed: GNEKKAKLANVVRKMMTNSQ
GNEFKADLANVMRKMMTNSQ

SEQ ID NO: 186228 - protein, 20 aa, Artificial Sequence
  Description of Artificial Sequence: Synthetic peptide
  Seed: GNEKKAKLANVVRKMMTNSQ
GNEFKADLANVNRKMMTNSQ

SEQ ID NO: 186229 - protein, 20 aa, Artificial Sequence
  Description of Artificial Sequence: Synthetic peptide
  Seed: GNEKKAKLANVVRKMMTNSQ
GNEFKADLANVSRKMMTNSQ

SEQ ID NO: 186230 - protein, 20 aa, Artificial Sequence
  Description of Artificial Sequence: Synthetic peptide
  Seed: GNEKKAKLANVVRKMMTNSQ
GNEFKADLANVTRKMMTNSQ

SEQ ID NO: 186231 - protein, 20 aa, Artificial Sequence
  Description of Artificial Sequence: Synthetic peptide
  Seed: GNEKKAKLANVVRKMMTNSQ
GNEFKADLANVVRKMMTNSQ

SEQ ID NO: 186232 - protein, 20 aa, Artificial Sequence
  Description of Artificial Sequence: Synthetic peptide
  Seed: GNEKKAKLANVVRKMMTNSQ
GNEFKADLFNVARKMMTNSQ

SEQ ID NO: 186233 - protein, 20 aa, Artificial Sequence
  Description of Artificial Sequence: Synthetic peptide
  Seed: GNEKKAKLANVVRKMMTNSQ
GNEFKADLFNVFRKMMTNSQ

SEQ ID NO: 186234 - protein, 20 aa, Artificial Sequence
  Description of Artificial Sequence: Synthetic peptide
  Seed: GNEKKAKLANVVRKMMTNSQ
GNEFKADLFNVIRKMMTNSQ

SEQ ID NO: 186235 - protein, 20 aa, Artificial Sequence
  Description of Artificial Sequence: Synthetic peptide
  Seed: GNEKKAKLANVVRKMMTNSQ
GNEFKADLFNVLRKMMTNSQ

SEQ ID NO: 186236 - protein, 20 aa, Artificial Sequence
  Description of Artificial Sequence: Synthetic peptide
  Seed: GNEKKAKLANVVRKMMTNSQ
GNEFKADLFNVMRKMMTNSQ

SEQ ID NO: 186237 - protein, 20 aa, Artificial Sequence
  Description of Artificial Sequence: Synthetic peptide
  Seed: GNEKKAKLANVVRKMMTNSQ
GNEFKADLFNVNRKMMTNSQ

SEQ ID NO: 186238 - protein, 20 aa, Artificial Sequence
  Description of Artificial Sequence: Synthetic peptide
  Seed: GNEKKAKLANVVRKMMTNSQ
GNEFKADLFNVSRKMMTNSQ

SEQ ID NO: 186239 - protein, 20 aa, Artificial Sequence
  Description of Artificial Sequence: Synthetic peptide
  Seed: GNEKKAKLANVVRKMMTNSQ
GNEFKADLFNVTRKMMTNSQ

SEQ ID NO: 186240 - protein, 20 aa, Artificial Sequence
  Description of Artificial Sequence: Synthetic peptide
  Seed: GNEKKAKLANVVRKMMTNSQ
GNEFKADLFNVVRKMMTNSQ

SEQ ID NO: 186241 - protein, 20 aa, Artificial Sequence
  Description of Artificial Sequence: Synthetic peptide
  Seed: GNEKKAKLANVVRKMMTNSQ
GNEFKADLFNVYRKMMTNSQ

SEQ ID NO: 186242 - protein, 20 aa, Artificial Sequence
  Description of Artificial Sequence: Synthetic peptide
  Seed: GNEKKAKLANVVRKMMTNSQ
GNEFKADLGNVIRKMMTNSQ

SEQ ID NO: 186243 - protein, 20 aa, Artificial Sequence
  Description of Artificial Sequence: Synthetic peptide
  Seed: GNEKKAKLANVVRKMMTNSQ
GNEFKADLGNVLRKMMTNSQ

SEQ ID NO: 186244 - protein, 20 aa, Artificial Sequence
  Description of Artificial Sequence: Synthetic peptide
  Seed: GNEKKAKLANVVRKMMTNSQ
GNEFKADLGNVVRKMMTNSQ

SEQ ID NO: 186245 - protein, 20 aa, Artificial Sequence
  Description of Artificial Sequence: Synthetic peptide
  Seed: GNEKKAKLANVVRKMMTNSQ
GNEFKADLSNVIRKMMTNSQ

SEQ ID NO: 186246 - protein, 20 aa, Artificial Sequence
  Description of Artificial Sequence: Synthetic peptide
  Seed: GNEKKAKLANVVRKMMTNSQ
GNEFKADLSNVVRKMMTNSQ

SEQ ID NO: 186247 - protein, 20 aa, Artificial Sequence
  Description of Artificial Sequence: Synthetic peptide
  Seed: GNEKKAKLANVVRKMMTNSQ
GNEFKADLWNVIRKMMTNSQ

SEQ ID NO: 186248 - protein, 20 aa, Artificial Sequence
  Description of Artificial Sequence: Synthetic peptide
  Seed: GNEKKAKLANVVRKMMTNSQ
GNEFKADLWNVVRKMMTNSQ

SEQ ID NO: 186249 - protein, 20 aa, Artificial Sequence
  Description of Artificial Sequence: Synthetic peptide
  Seed: GNEKKAKLANVVRKMMTNSQ
GNEFKADLYNVFRKMMTNSQ

SEQ ID NO: 186250 - protein, 20 aa, Artificial Sequence
  Description of Artificial Sequence: Synthetic peptide
  Seed: GNEKKAKLANVVRKMMTNSQ
GNEFKADLYNVIRKMMTNSQ

SEQ ID NO: 186251 - protein, 20 aa, Artificial Sequence
  Description of Artificial Sequence: Synthetic peptide
  Seed: GNEKKAKLANVVRKMMTNSQ
GNEFKADLYNVLRKMMTNSQ

SEQ ID NO: 186252 - protein, 20 aa, Artificial Sequence
  Description of Artificial Sequence: Synthetic peptide
  Seed: GNEKKAKLANVVRKMMTNSQ
GNEFKADLYNVVRKMMTNSQ

SEQ ID NO: 186253 - protein, 20 aa, Artificial Sequence
  Description of Artificial Sequence: Synthetic peptide
  Seed: GNEKKAKLANVVRKMMTNSQ
GNEFKAELANVARKMMTNSQ

SEQ ID NO: 186254 - protein, 20 aa, Artificial Sequence
  Description of Artificial Sequence: Synthetic peptide
  Seed: GNEKKAKLANVVRKMMTNSQ
GNEFKAELANVCRKMMTNSQ

SEQ ID NO: 186255 - protein, 20 aa, Artificial Sequence
  Description of Artificial Sequence: Synthetic peptide
  Seed: GNEKKAKLANVVRKMMTNSQ
GNEFKAELANVDRKMMTNSQ

SEQ ID NO: 186256 - protein, 20 aa, Artificial Sequence
  Description of Artificial Sequence: Synthetic peptide
  Seed: GNEKKAKLANVVRKMMTNSQ
GNEFKAELANVERKMMTNSQ

SEQ ID NO: 186257 - protein, 20 aa, Artificial Sequence
  Description of Artificial Sequence: Synthetic peptide
  Seed: GNEKKAKLANVVRKMMTNSQ
GNEFKAELANVFRKMMTNSQ

SEQ ID NO: 186258 - protein, 20 aa, Artificial Sequence
  Description of Artificial Sequence: Synthetic peptide
  Seed: GNEKKAKLANVVRKMMTNSQ
GNEFKAELANVGRKMMTNSQ

SEQ ID NO: 186259 - protein, 20 aa, Artificial Sequence
  Description of Artificial Sequence: Synthetic peptide
  Seed: GNEKKAKLANVVRKMMTNSQ
GNEFKAELANVHRKMMTNSQ

SEQ ID NO: 186260 - protein, 20 aa, Artificial Sequence
  Description of Artificial Sequence: Synthetic peptide
  Seed: GNEKKAKLANVVRKMMTNSQ
GNEFKAELANVIRKMMTNSQ

SEQ ID NO: 186261 - protein, 20 aa, Artificial Sequence
  Description of Artificial Sequence: Synthetic peptide
  Seed: GNEKKAKLANVVRKMMTNSQ
GNEFKAELANVLRKMMTNSQ

SEQ ID NO: 186262 - protein, 20 aa, Artificial Sequence
  Description of Artificial Sequence: Synthetic peptide
  Seed: GNEKKAKLANVVRKMMTNSQ
GNEFKAELANVMRKMMTNSQ

SEQ ID NO: 186263 - protein, 20 aa, Artificial Sequence
  Description of Artificial Sequence: Synthetic peptide
  Seed: GNEKKAKLANVVRKMMTNSQ
GNEFKAELANVNRKMMTNSQ

SEQ ID NO: 186264 - protein, 20 aa, Artificial Sequence
  Description of Artificial Sequence: Synthetic peptide
  Seed: GNEKKAKLANVVRKMMTNSQ
GNEFKAELANVPRKMMTNSQ

SEQ ID NO: 186265 - protein, 20 aa, Artificial Sequence
  Description of Artificial Sequence: Synthetic peptide
  Seed: GNEKKAKLANVVRKMMTNSQ
GNEFKAELANVQRKMMTNSQ

SEQ ID NO: 186266 - protein, 20 aa, Artificial Sequence
  Description of Artificial Sequence: Synthetic peptide
  Seed: GNEKKAKLANVVRKMMTNSQ
GNEFKAELANVSRKMMTNSQ

SEQ ID NO: 186267 - protein, 20 aa, Artificial Sequence
  Description of Artificial Sequence: Synthetic peptide
  Seed: GNEKKAKLANVVRKMMTNSQ
GNEFKAELANVTRKMMTNSQ

SEQ ID NO: 186268 - protein, 20 aa, Artificial Sequence
  Description of Artificial Sequence: Synthetic peptide
  Seed: GNEKKAKLANVVRKMMTNSQ
GNEFKAELANVVRKMMTNSQ

SEQ ID NO: 186269 - protein, 20 aa, Artificial Sequence
  Description of Artificial Sequence: Synthetic peptide
  Seed: GNEKKAKLANVVRKMMTNSQ
GNEFKAELANVYRKMMTNSQ

SEQ ID NO: 186270 - protein, 20 aa, Artificial Sequence
  Description of Artificial Sequence: Synthetic peptide
  Seed: GNEKKAKLANVVRKMMTNSQ
GNEFKAELFNVARKMMTNSQ

SEQ ID NO: 186271 - protein, 20 aa, Artificial Sequence
  Description of Artificial Sequence: Synthetic peptide
  Seed: GNEKKAKLANVVRKMMTNSQ
GNEFKAELFNVCRKMMTNSQ

SEQ ID NO: 186272 - protein, 20 aa, Artificial Sequence
  Description of Artificial Sequence: Synthetic peptide
  Seed: GNEKKAKLANVVRKMMTNSQ
GNEFKAELFNVDRKMMTNSQ

SEQ ID NO: 186273 - protein, 20 aa, Artificial Sequence
  Description of Artificial Sequence: Synthetic peptide
  Seed: GNEKKAKLANVVRKMMTNSQ
GNEFKAELFNVERKMMTNSQ

SEQ ID NO: 186274 - protein, 20 aa, Artificial Sequence
  Description of Artificial Sequence: Synthetic peptide
  Seed: GNEKKAKLANVVRKMMTNSQ
GNEFKAELFNVFRKMMTNSQ

SEQ ID NO: 186275 - protein, 20 aa, Artificial Sequence
  Description of Artificial Sequence: Synthetic peptide
  Seed: GNEKKAKLANVVRKMMTNSQ
GNEFKAELFNVGRKMMTNSQ

SEQ ID NO: 186276 - protein, 20 aa, Artificial Sequence
  Description of Artificial Sequence: Synthetic peptide
  Seed: GNEKKAKLANVVRKMMTNSQ
GNEFKAELFNVHRKMMTNSQ

SEQ ID NO: 186277 - protein, 20 aa, Artificial Sequence
  Description of Artificial Sequence: Synthetic peptide
  Seed: GNEKKAKLANVVRKMMTNSQ
GNEFKAELFNVIRKMMTNSQ

SEQ ID NO: 186278 - protein, 20 aa, Artificial Sequence
  Description of Artificial Sequence: Synthetic peptide
  Seed: GNEKKAKLANVVRKMMTNSQ
GNEFKAELFNVLRKMMTNSQ

SEQ ID NO: 186279 - protein, 20 aa, Artificial Sequence
  Description of Artificial Sequence: Synthetic peptide
  Seed: GNEKKAKLANVVRKMMTNSQ
GNEFKAELFNVMRKMMTNSQ

SEQ ID NO: 186280 - protein, 20 aa, Artificial Sequence
  Description of Artificial Sequence: Synthetic peptide
  Seed: GNEKKAKLANVVRKMMTNSQ
GNEFKAELFNVNRKMMTNSQ

SEQ ID NO: 186281 - protein, 20 aa, Artificial Sequence
  Description of Artificial Sequence: Synthetic peptide
  Seed: GNEKKAKLANVVRKMMTNSQ
GNEFKAELFNVPRKMMTNSQ

SEQ ID NO: 186282 - protein, 20 aa, Artificial Sequence
  Description of Artificial Sequence: Synthetic peptide
  Seed: GNEKKAKLANVVRKMMTNSQ
GNEFKAELFNVQRKMMTNSQ

SEQ ID NO: 186283 - protein, 20 aa, Artificial Sequence
  Description of Artificial Sequence: Synthetic peptide
  Seed: GNEKKAKLANVVRKMMTNSQ
GNEFKAELFNVRRKMMTNSQ

SEQ ID NO: 186284 - protein, 20 aa, Artificial Sequence
  Description of Artificial Sequence: Synthetic peptide
  Seed: GNEKKAKLANVVRKMMTNSQ
GNEFKAELFNVSRKMMTNSQ

SEQ ID NO: 186285 - protein, 20 aa, Artificial Sequence
  Description of Artificial Sequence: Synthetic peptide
  Seed: GNEKKAKLANVVRKMMTNSQ
GNEFKAELFNVTRKMMTNSQ

SEQ ID NO: 186286 - protein, 20 aa, Artificial Sequence
  Description of Artificial Sequence: Synthetic peptide
  Seed: GNEKKAKLANVVRKMMTNSQ
GNEFKAELFNVVRKMMTNSQ

SEQ ID NO: 186287 - protein, 20 aa, Artificial Sequence
  Description of Artificial Sequence: Synthetic peptide
  Seed: GNEKKAKLANVVRKMMTNSQ
GNEFKAELFNVWRKMMTNSQ

SEQ ID NO: 186288 - protein, 20 aa, Artificial Sequence
  Description of Artificial Sequence: Synthetic peptide
  Seed: GNEKKAKLANVVRKMMTNSQ
GNEFKAELFNVYRKMMTNSQ

SEQ ID NO: 186289 - protein, 20 aa, Artificial Sequence
  Description of Artificial Sequence: Synthetic peptide
  Seed: GNEKKAKLANVVRKMMTNSQ
GNEFKAELGNVARKMMTNSQ

SEQ ID NO: 186290 - protein, 20 aa, Artificial Sequence
  Description of Artificial Sequence: Synthetic peptide
  Seed: GNEKKAKLANVVRKMMTNSQ
GNEFKAELGNVFRKMMTNSQ

SEQ ID NO: 186291 - protein, 20 aa, Artificial Sequence
  Description of Artificial Sequence: Synthetic peptide
  Seed: GNEKKAKLANVVRKMMTNSQ
GNEFKAELGNVGRKMMTNSQ

SEQ ID NO: 186292 - protein, 20 aa, Artificial Sequence
  Description of Artificial Sequence: Synthetic peptide
  Seed: GNEKKAKLANVVRKMMTNSQ
GNEFKAELGNVIRKMMTNSQ

SEQ ID NO: 186293 - protein, 20 aa, Artificial Sequence
  Description of Artificial Sequence: Synthetic peptide
  Seed: GNEKKAKLANVVRKMMTNSQ
GNEFKAELGNVLRKMMTNSQ

SEQ ID NO: 186294 - protein, 20 aa, Artificial Sequence
  Description of Artificial Sequence: Synthetic peptide
  Seed: GNEKKAKLANVVRKMMTNSQ
GNEFKAELGNVMRKMMTNSQ

SEQ ID NO: 186295 - protein, 20 aa, Artificial Sequence
  Description of Artificial Sequence: Synthetic peptide
  Seed: GNEKKAKLANVVRKMMTNSQ
GNEFKAELGNVNRKMMTNSQ

SEQ ID NO: 186296 - protein, 20 aa, Artificial Sequence
  Description of Artificial Sequence: Synthetic peptide
  Seed: GNEKKAKLANVVRKMMTNSQ
GNEFKAELGNVSRKMMTNSQ

SEQ ID NO: 186297 - protein, 20 aa, Artificial Sequence
  Description of Artificial Sequence: Synthetic peptide
  Seed: GNEKKAKLANVVRKMMTNSQ
GNEFKAELGNVTRKMMTNSQ

SEQ ID NO: 186298 - protein, 20 aa, Artificial Sequence
  Description of Artificial Sequence: Synthetic peptide
  Seed: GNEKKAKLANVVRKMMTNSQ
GNEFKAELGNVVRKMMTNSQ

SEQ ID NO: 186299 - protein, 20 aa, Artificial Sequence
  Description of Artificial Sequence: Synthetic peptide
  Seed: GNEKKAKLANVVRKMMTNSQ
GNEFKAELINVARKMMTNSQ

SEQ ID NO: 186300 - protein, 20 aa, Artificial Sequence
  Description of Artificial Sequence: Synthetic peptide
  Seed: GNEKKAKLANVVRKMMTNSQ
GNEFKAELINVFRKMMTNSQ

SEQ ID NO: 186301 - protein, 20 aa, Artificial Sequence
  Description of Artificial Sequence: Synthetic peptide
  Seed: GNEKKAKLANVVRKMMTNSQ
GNEFKAELINVGRKMMTNSQ

SEQ ID NO: 186302 - protein, 20 aa, Artificial Sequence
  Description of Artificial Sequence: Synthetic peptide
  Seed: GNEKKAKLANVVRKMMTNSQ
GNEFKAELINVIRKMMTNSQ

SEQ ID NO: 186303 - protein, 20 aa, Artificial Sequence
  Description of Artificial Sequence: Synthetic peptide
  Seed: GNEKKAKLANVVRKMMTNSQ
GNEFKAELINVLRKMMTNSQ

SEQ ID NO: 186304 - protein, 20 aa, Artificial Sequence
  Description of Artificial Sequence: Synthetic peptide
  Seed: GNEKKAKLANVVRKMMTNSQ
GNEFKAELINVMRKMMTNSQ

SEQ ID NO: 186305 - protein, 20 aa, Artificial Sequence
  Description of Artificial Sequence: Synthetic peptide
  Seed: GNEKKAKLANVVRKMMTNSQ
GNEFKAELINVNRKMMTNSQ

SEQ ID NO: 186306 - protein, 20 aa, Artificial Sequence
  Description of Artificial Sequence: Synthetic peptide
  Seed: GNEKKAKLANVVRKMMTNSQ
GNEFKAELINVSRKMMTNSQ

SEQ ID NO: 186307 - protein, 20 aa, Artificial Sequence
  Description of Artificial Sequence: Synthetic peptide
  Seed: GNEKKAKLANVVRKMMTNSQ
GNEFKAELINVTRKMMTNSQ

SEQ ID NO: 186308 - protein, 20 aa, Artificial Sequence
  Description of Artificial Sequence: Synthetic peptide
  Seed: GNEKKAKLANVVRKMMTNSQ
GNEFKAELINVVRKMMTNSQ

SEQ ID NO: 186309 - protein, 20 aa, Artificial Sequence
  Description of Artificial Sequence: Synthetic peptide
  Seed: GNEKKAKLANVVRKMMTNSQ
GNEFKAELLNVARKMMTNSQ

SEQ ID NO: 186310 - protein, 20 aa, Artificial Sequence
  Description of Artificial Sequence: Synthetic peptide
  Seed: GNEKKAKLANVVRKMMTNSQ
GNEFKAELLNVFRKMMTNSQ

SEQ ID NO: 186311 - protein, 20 aa, Artificial Sequence
  Description of Artificial Sequence: Synthetic peptide
  Seed: GNEKKAKLANVVRKMMTNSQ
GNEFKAELLNVIRKMMTNSQ

SEQ ID NO: 186312 - protein, 20 aa, Artificial Sequence
  Description of Artificial Sequence: Synthetic peptide
  Seed: GNEKKAKLANVVRKMMTNSQ
GNEFKAELLNVLRKMMTNSQ

SEQ ID NO: 186313 - protein, 20 aa, Artificial Sequence
  Description of Artificial Sequence: Synthetic peptide
  Seed: GNEKKAKLANVVRKMMTNSQ
GNEFKAELLNVMRKMMTNSQ

SEQ ID NO: 186314 - protein, 20 aa, Artificial Sequence
  Description of Artificial Sequence: Synthetic peptide
  Seed: GNEKKAKLANVVRKMMTNSQ
GNEFKAELLNVVRKMMTNSQ

SEQ ID NO: 186315 - protein, 20 aa, Artificial Sequence
  Description of Artificial Sequence: Synthetic peptide
  Seed: GNEKKAKLANVVRKMMTNSQ
GNEFKAELLNVYRKMMTNSQ

SEQ ID NO: 186316 - protein, 20 aa, Artificial Sequence
  Description of Artificial Sequence: Synthetic peptide
  Seed: GNEKKAKLANVVRKMMTNSQ
GNEFKAELMNVARKMMTNSQ

SEQ ID NO: 186317 - protein, 20 aa, Artificial Sequence
  Description of Artificial Sequence: Synthetic peptide
  Seed: GNEKKAKLANVVRKMMTNSQ
GNEFKAELMNVFRKMMTNSQ

SEQ ID NO: 186318 - protein, 20 aa, Artificial Sequence
  Description of Artificial Sequence: Synthetic peptide
  Seed: GNEKKAKLANVVRKMMTNSQ
GNEFKAELMNVIRKMMTNSQ

SEQ ID NO: 186319 - protein, 20 aa, Artificial Sequence
  Description of Artificial Sequence: Synthetic peptide
  Seed: GNEKKAKLANVVRKMMTNSQ
GNEFKAELMNVLRKMMTNSQ

SEQ ID NO: 186320 - protein, 20 aa, Artificial Sequence
  Description of Artificial Sequence: Synthetic peptide
  Seed: GNEKKAKLANVVRKMMTNSQ
GNEFKAELMNVVRKMMTNSQ

SEQ ID NO: 186321 - protein, 20 aa, Artificial Sequence
  Description of Artificial Sequence: Synthetic peptide
  Seed: GNEKKAKLANVVRKMMTNSQ
GNEFKAELNNVARKMMTNSQ

SEQ ID NO: 186322 - protein, 20 aa, Artificial Sequence
  Description of Artificial Sequence: Synthetic peptide
  Seed: GNEKKAKLANVVRKMMTNSQ
GNEFKAELNNVIRKMMTNSQ

SEQ ID NO: 186323 - protein, 20 aa, Artificial Sequence
  Description of Artificial Sequence: Synthetic peptide
  Seed: GNEKKAKLANVVRKMMTNSQ
GNEFKAELNNVLRKMMTNSQ

SEQ ID NO: 186324 - protein, 20 aa, Artificial Sequence
  Description of Artificial Sequence: Synthetic peptide
  Seed: GNEKKAKLANVVRKMMTNSQ
GNEFKAELNNVMRKMMTNSQ

SEQ ID NO: 186325 - protein, 20 aa, Artificial Sequence
  Description of Artificial Sequence: Synthetic peptide
  Seed: GNEKKAKLANVVRKMMTNSQ
GNEFKAELNNVNRKMMTNSQ

SEQ ID NO: 186326 - protein, 20 aa, Artificial Sequence
  Description of Artificial Sequence: Synthetic peptide
  Seed: GNEKKAKLANVVRKMMTNSQ
GNEFKAELNNVSRKMMTNSQ

SEQ ID NO: 186327 - protein, 20 aa, Artificial Sequence
  Description of Artificial Sequence: Synthetic peptide
  Seed: GNEKKAKLANVVRKMMTNSQ
GNEFKAELNNVTRKMMTNSQ

SEQ ID NO: 186328 - protein, 20 aa, Artificial Sequence
  Description of Artificial Sequence: Synthetic peptide
  Seed: GNEKKAKLANVVRKMMTNSQ
GNEFKAELNNVVRKMMTNSQ

SEQ ID NO: 186329 - protein, 20 aa, Artificial Sequence
  Description of Artificial Sequence: Synthetic peptide
  Seed: GNEKKAKLANVVRKMMTNSQ
GNEFKAELPNVARKMMTNSQ

SEQ ID NO: 186330 - protein, 20 aa, Artificial Sequence
  Description of Artificial Sequence: Synthetic peptide
  Seed: GNEKKAKLANVVRKMMTNSQ
GNEFKAELPNVFRKMMTNSQ

SEQ ID NO: 186331 - protein, 20 aa, Artificial Sequence
  Description of Artificial Sequence: Synthetic peptide
  Seed: GNEKKAKLANVVRKMMTNSQ
GNEFKAELPNVGRKMMTNSQ

SEQ ID NO: 186332 - protein, 20 aa, Artificial Sequence
  Description of Artificial Sequence: Synthetic peptide
  Seed: GNEKKAKLANVVRKMMTNSQ
GNEFKAELPNVHRKMMTNSQ

SEQ ID NO: 186333 - protein, 20 aa, Artificial Sequence
  Description of Artificial Sequence: Synthetic peptide
  Seed: GNEKKAKLANVVRKMMTNSQ
GNEFKAELPNVIRKMMTNSQ

SEQ ID NO: 186334 - protein, 20 aa, Artificial Sequence
  Description of Artificial Sequence: Synthetic peptide
  Seed: GNEKKAKLANVVRKMMTNSQ
GNEFKAELPNVLRKMMTNSQ

SEQ ID NO: 186335 - protein, 20 aa, Artificial Sequence
  Description of Artificial Sequence: Synthetic peptide
  Seed: GNEKKAKLANVVRKMMTNSQ
GNEFKAELPNVMRKMMTNSQ

SEQ ID NO: 186336 - protein, 20 aa, Artificial Sequence
  Description of Artificial Sequence: Synthetic peptide
  Seed: GNEKKAKLANVVRKMMTNSQ
GNEFKAELPNVNRKMMTNSQ

SEQ ID NO: 186337 - protein, 20 aa, Artificial Sequence
  Description of Artificial Sequence: Synthetic peptide
  Seed: GNEKKAKLANVVRKMMTNSQ
GNEFKAELPNVQRKMMTNSQ

SEQ ID NO: 186338 - protein, 20 aa, Artificial Sequence
  Description of Artificial Sequence: Synthetic peptide
  Seed: GNEKKAKLANVVRKMMTNSQ
GNEFKAELPNVSRKMMTNSQ

SEQ ID NO: 186339 - protein, 20 aa, Artificial Sequence
  Description of Artificial Sequence: Synthetic peptide
  Seed: GNEKKAKLANVVRKMMTNSQ
GNEFKAELPNVTRKMMTNSQ

SEQ ID NO: 186340 - protein, 20 aa, Artificial Sequence
  Description of Artificial Sequence: Synthetic peptide
  Seed: GNEKKAKLANVVRKMMTNSQ
GNEFKAELPNVVRKMMTNSQ

SEQ ID NO: 186341 - protein, 20 aa, Artificial Sequence
  Description of Artificial Sequence: Synthetic peptide
  Seed: GNEKKAKLANVVRKMMTNSQ
GNEFKAELSNVARKMMTNSQ

SEQ ID NO: 186342 - protein, 20 aa, Artificial Sequence
  Description of Artificial Sequence: Synthetic peptide
  Seed: GNEKKAKLANVVRKMMTNSQ
GNEFKAELSNVGRKMMTNSQ

SEQ ID NO: 186343 - protein, 20 aa, Artificial Sequence
  Description of Artificial Sequence: Synthetic peptide
  Seed: GNEKKAKLANVVRKMMTNSQ
GNEFKAELSNVHRKMMTNSQ

SEQ ID NO: 186344 - protein, 20 aa, Artificial Sequence
  Description of Artificial Sequence: Synthetic peptide
  Seed: GNEKKAKLANVVRKMMTNSQ
GNEFKAELSNVIRKMMTNSQ

SEQ ID NO: 186345 - protein, 20 aa, Artificial Sequence
  Description of Artificial Sequence: Synthetic peptide
  Seed: GNEKKAKLANVVRKMMTNSQ
GNEFKAELSNVLRKMMTNSQ

SEQ ID NO: 186346 - protein, 20 aa, Artificial Sequence
  Description of Artificial Sequence: Synthetic peptide
  Seed: GNEKKAKLANVVRKMMTNSQ
GNEFKAELSNVMRKMMTNSQ

SEQ ID NO: 186347 - protein, 20 aa, Artificial Sequence
  Description of Artificial Sequence: Synthetic peptide
  Seed: GNEKKAKLANVVRKMMTNSQ
GNEFKAELSNVNRKMMTNSQ

SEQ ID NO: 186348 - protein, 20 aa, Artificial Sequence
  Description of Artificial Sequence: Synthetic peptide
  Seed: GNEKKAKLANVVRKMMTNSQ
GNEFKAELSNVSRKMMTNSQ

SEQ ID NO: 186349 - protein, 20 aa, Artificial Sequence
  Description of Artificial Sequence: Synthetic peptide
  Seed: GNEKKAKLANVVRKMMTNSQ
GNEFKAELSNVTRKMMTNSQ

SEQ ID NO: 186350 - protein, 20 aa, Artificial Sequence
  Description of Artificial Sequence: Synthetic peptide
  Seed: GNEKKAKLANVVRKMMTNSQ
GNEFKAELSNVVRKMMTNSQ

SEQ ID NO: 186351 - protein, 20 aa, Artificial Sequence
  Description of Artificial Sequence: Synthetic peptide
  Seed: GNEKKAKLANVVRKMMTNSQ
GNEFKAELTNVARKMMTNSQ

SEQ ID NO: 186352 - protein, 20 aa, Artificial Sequence
  Description of Artificial Sequence: Synthetic peptide
  Seed: GNEKKAKLANVVRKMMTNSQ
GNEFKAELTNVGRKMMTNSQ

SEQ ID NO: 186353 - protein, 20 aa, Artificial Sequence
  Description of Artificial Sequence: Synthetic peptide
  Seed: GNEKKAKLANVVRKMMTNSQ
GNEFKAELTNVHRKMMTNSQ

SEQ ID NO: 186354 - protein, 20 aa, Artificial Sequence
  Description of Artificial Sequence: Synthetic peptide
  Seed: GNEKKAKLANVVRKMMTNSQ
GNEFKAELTNVIRKMMTNSQ

SEQ ID NO: 186355 - protein, 20 aa, Artificial Sequence
  Description of Artificial Sequence: Synthetic peptide
  Seed: GNEKKAKLANVVRKMMTNSQ
GNEFKAELTNVLRKMMTNSQ

SEQ ID NO: 186356 - protein, 20 aa, Artificial Sequence
  Description of Artificial Sequence: Synthetic peptide
  Seed: GNEKKAKLANVVRKMMTNSQ
GNEFKAELTNVMRKMMTNSQ

SEQ ID NO: 186357 - protein, 20 aa, Artificial Sequence
  Description of Artificial Sequence: Synthetic peptide
  Seed: GNEKKAKLANVVRKMMTNSQ
GNEFKAELTNVNRKMMTNSQ

SEQ ID NO: 186358 - protein, 20 aa, Artificial Sequence
  Description of Artificial Sequence: Synthetic peptide
  Seed: GNEKKAKLANVVRKMMTNSQ
GNEFKAELTNVSRKMMTNSQ

SEQ ID NO: 186359 - protein, 20 aa, Artificial Sequence
  Description of Artificial Sequence: Synthetic peptide
  Seed: GNEKKAKLANVVRKMMTNSQ
GNEFKAELTNVTRKMMTNSQ

SEQ ID NO: 186360 - protein, 20 aa, Artificial Sequence
  Description of Artificial Sequence: Synthetic peptide
  Seed: GNEKKAKLANVVRKMMTNSQ
GNEFKAELTNVVRKMMTNSQ

SEQ ID NO: 186361 - protein, 20 aa, Artificial Sequence
  Description of Artificial Sequence: Synthetic peptide
  Seed: GNEKKAKLANVVRKMMTNSQ
GNEFKAELVNVARKMMTNSQ

SEQ ID NO: 186362 - protein, 20 aa, Artificial Sequence
  Description of Artificial Sequence: Synthetic peptide
  Seed: GNEKKAKLANVVRKMMTNSQ
GNEFKAELVNVGRKMMTNSQ

SEQ ID NO: 186363 - protein, 20 aa, Artificial Sequence
  Description of Artificial Sequence: Synthetic peptide
  Seed: GNEKKAKLANVVRKMMTNSQ
GNEFKAELVNVHRKMMTNSQ

SEQ ID NO: 186364 - protein, 20 aa, Artificial Sequence
  Description of Artificial Sequence: Synthetic peptide
  Seed: GNEKKAKLANVVRKMMTNSQ
GNEFKAELVNVIRKMMTNSQ

SEQ ID NO: 186365 - protein, 20 aa, Artificial Sequence
  Description of Artificial Sequence: Synthetic peptide
  Seed: GNEKKAKLANVVRKMMTNSQ
GNEFKAELVNVLRKMMTNSQ

SEQ ID NO: 186366 - protein, 20 aa, Artificial Sequence
  Description of Artificial Sequence: Synthetic peptide
  Seed: GNEKKAKLANVVRKMMTNSQ
GNEFKAELVNVMRKMMTNSQ

SEQ ID NO: 186367 - protein, 20 aa, Artificial Sequence
  Description of Artificial Sequence: Synthetic peptide
  Seed: GNEKKAKLANVVRKMMTNSQ
GNEFKAELVNVNRKMMTNSQ

SEQ ID NO: 186368 - protein, 20 aa, Artificial Sequence
  Description of Artificial Sequence: Synthetic peptide
  Seed: GNEKKAKLANVVRKMMTNSQ
GNEFKAELVNVQRKMMTNSQ

SEQ ID NO: 186369 - protein, 20 aa, Artificial Sequence
  Description of Artificial Sequence: Synthetic peptide
  Seed: GNEKKAKLANVVRKMMTNSQ
GNEFKAELVNVSRKMMTNSQ

SEQ ID NO: 186370 - protein, 20 aa, Artificial Sequence
  Description of Artificial Sequence: Synthetic peptide
  Seed: GNEKKAKLANVVRKMMTNSQ
GNEFKAELVNVTRKMMTNSQ

SEQ ID NO: 186371 - protein, 20 aa, Artificial Sequence
  Description of Artificial Sequence: Synthetic peptide
  Seed: GNEKKAKLANVVRKMMTNSQ
GNEFKAELVNVVRKMMTNSQ

SEQ ID NO: 186372 - protein, 20 aa, Artificial Sequence
  Description of Artificial Sequence: Synthetic peptide
  Seed: GNEKKAKLANVVRKMMTNSQ
GNEFKAELWNVARKMMTNSQ

SEQ ID NO: 186373 - protein, 20 aa, Artificial Sequence
  Description of Artificial Sequence: Synthetic peptide
  Seed: GNEKKAKLANVVRKMMTNSQ
GNEFKAELWNVFRKMMTNSQ

SEQ ID NO: 186374 - protein, 20 aa, Artificial Sequence
  Description of Artificial Sequence: Synthetic peptide
  Seed: GNEKKAKLANVVRKMMTNSQ
GNEFKAELWNVIRKMMTNSQ

SEQ ID NO: 186375 - protein, 20 aa, Artificial Sequence
  Description of Artificial Sequence: Synthetic peptide
  Seed: GNEKKAKLANVVRKMMTNSQ
GNEFKAELWNVLRKMMTNSQ

SEQ ID NO: 186376 - protein, 20 aa, Artificial Sequence
  Description of Artificial Sequence: Synthetic peptide
  Seed: GNEKKAKLANVVRKMMTNSQ
GNEFKAELWNVMRKMMTNSQ

SEQ ID NO: 186377 - protein, 20 aa, Artificial Sequence
  Description of Artificial Sequence: Synthetic peptide
  Seed: GNEKKAKLANVVRKMMTNSQ
GNEFKAELWNVTRKMMTNSQ

SEQ ID NO: 186378 - protein, 20 aa, Artificial Sequence
  Description of Artificial Sequence: Synthetic peptide
  Seed: GNEKKAKLANVVRKMMTNSQ
GNEFKAELWNVVRKMMTNSQ

SEQ ID NO: 186379 - protein, 20 aa, Artificial Sequence
  Description of Artificial Sequence: Synthetic peptide
  Seed: GNEKKAKLANVVRKMMTNSQ
GNEFKAELYNVARKMMTNSQ

SEQ ID NO: 186380 - protein, 20 aa, Artificial Sequence
  Description of Artificial Sequence: Synthetic peptide
  Seed: GNEKKAKLANVVRKMMTNSQ
GNEFKAELYNVFRKMMTNSQ

SEQ ID NO: 186381 - protein, 20 aa, Artificial Sequence
  Description of Artificial Sequence: Synthetic peptide
  Seed: GNEKKAKLANVVRKMMTNSQ
GNEFKAELYNVIRKMMTNSQ

SEQ ID NO: 186382 - protein, 20 aa, Artificial Sequence
  Description of Artificial Sequence: Synthetic peptide
  Seed: GNEKKAKLANVVRKMMTNSQ
GNEFKAELYNVLRKMMTNSQ

SEQ ID NO: 186383 - protein, 20 aa, Artificial Sequence
  Description of Artificial Sequence: Synthetic peptide
  Seed: GNEKKAKLANVVRKMMTNSQ
GNEFKAELYNVMRKMMTNSQ

SEQ ID NO: 186384 - protein, 20 aa, Artificial Sequence
  Description of Artificial Sequence: Synthetic peptide
  Seed: GNEKKAKLANVVRKMMTNSQ
GNEFKAELYNVSRKMMTNSQ

SEQ ID NO: 186385 - protein, 20 aa, Artificial Sequence
  Description of Artificial Sequence: Synthetic peptide
  Seed: GNEKKAKLANVVRKMMTNSQ
GNEFKAELYNVTRKMMTNSQ

SEQ ID NO: 186386 - protein, 20 aa, Artificial Sequence
  Description of Artificial Sequence: Synthetic peptide
  Seed: GNEKKAKLANVVRKMMTNSQ
GNEFKAELYNVVRKMMTNSQ

SEQ ID NO: 186387 - protein, 20 aa, Artificial Sequence
  Description of Artificial Sequence: Synthetic peptide
  Seed: GNEKKAKLANVVRKMMTNSQ
GNEFKAELYNVYRKMMTNSQ

SEQ ID NO: 186388 - protein, 20 aa, Artificial Sequence
  Description of Artificial Sequence: Synthetic peptide
  Seed: GNEKKAKLANVVRKMMTNSQ
GNEFKAFLANVARKMMTNSQ

SEQ ID NO: 186389 - protein, 20 aa, Artificial Sequence
  Description of Artificial Sequence: Synthetic peptide
  Seed: GNEKKAKLANVVRKMMTNSQ
GNEFKAFLANVCRKMMTNSQ

SEQ ID NO: 186390 - protein, 20 aa, Artificial Sequence
  Description of Artificial Sequence: Synthetic peptide
  Seed: GNEKKAKLANVVRKMMTNSQ
GNEFKAFLANVDRKMMTNSQ

SEQ ID NO: 186391 - protein, 20 aa, Artificial Sequence
  Description of Artificial Sequence: Synthetic peptide
  Seed: GNEKKAKLANVVRKMMTNSQ
GNEFKAFLANVERKMMTNSQ

SEQ ID NO: 186392 - protein, 20 aa, Artificial Sequence
  Description of Artificial Sequence: Synthetic peptide
  Seed: GNEKKAKLANVVRKMMTNSQ
GNEFKAFLANVFRKMMTNSQ

SEQ ID NO: 186393 - protein, 20 aa, Artificial Sequence
  Description of Artificial Sequence: Synthetic peptide
  Seed: GNEKKAKLANVVRKMMTNSQ
GNEFKAFLANVGRKMMTNSQ

SEQ ID NO: 186394 - protein, 20 aa, Artificial Sequence
  Description of Artificial Sequence: Synthetic peptide
  Seed: GNEKKAKLANVVRKMMTNSQ
GNEFKAFLANVHRKMMTNSQ

SEQ ID NO: 186395 - protein, 20 aa, Artificial Sequence
  Description of Artificial Sequence: Synthetic peptide
  Seed: GNEKKAKLANVVRKMMTNSQ
GNEFKAFLANVIRKMMTNSQ

SEQ ID NO: 186396 - protein, 20 aa, Artificial Sequence
  Description of Artificial Sequence: Synthetic peptide
  Seed: GNEKKAKLANVVRKMMTNSQ
GNEFKAFLANVLRKMMTNSQ

SEQ ID NO: 186397 - protein, 20 aa, Artificial Sequence
  Description of Artificial Sequence: Synthetic peptide
  Seed: GNEKKAKLANVVRKMMTNSQ
GNEFKAFLANVMRKMMTNSQ

SEQ ID NO: 186398 - protein, 20 aa, Artificial Sequence
  Description of Artificial Sequence: Synthetic peptide
  Seed: GNEKKAKLANVVRKMMTNSQ
GNEFKAFLANVNRKMMTNSQ

SEQ ID NO: 186399 - protein, 20 aa, Artificial Sequence
  Description of Artificial Sequence: Synthetic peptide
  Seed: GNEKKAKLANVVRKMMTNSQ
GNEFKAFLANVPRKMMTNSQ

SEQ ID NO: 186400 - protein, 20 aa, Artificial Sequence
  Description of Artificial Sequence: Synthetic peptide
  Seed: GNEKKAKLANVVRKMMTNSQ
GNEFKAFLANVQRKMMTNSQ

SEQ ID NO: 186401 - protein, 20 aa, Artificial Sequence
  Description of Artificial Sequence: Synthetic peptide
  Seed: GNEKKAKLANVVRKMMTNSQ
GNEFKAFLANVSRKMMTNSQ

SEQ ID NO: 186402 - protein, 20 aa, Artificial Sequence
  Description of Artificial Sequence: Synthetic peptide
  Seed: GNEKKAKLANVVRKMMTNSQ
GNEFKAFLANVTRKMMTNSQ

SEQ ID NO: 186403 - protein, 20 aa, Artificial Sequence
  Description of Artificial Sequence: Synthetic peptide
  Seed: GNEKKAKLANVVRKMMTNSQ
GNEFKAFLANVVRKMMTNSQ

SEQ ID NO: 186404 - protein, 20 aa, Artificial Sequence
  Description of Artificial Sequence: Synthetic peptide
  Seed: GNEKKAKLANVVRKMMTNSQ
GNEFKAFLANVYRKMMTNSQ

SEQ ID NO: 186405 - protein, 20 aa, Artificial Sequence
  Description of Artificial Sequence: Synthetic peptide
  Seed: GNEKKAKLANVVRKMMTNSQ
GNEFKAFLDNVIRKMMTNSQ

SEQ ID NO: 186406 - protein, 20 aa, Artificial Sequence
  Description of Artificial Sequence: Synthetic peptide
  Seed: GNEKKAKLANVVRKMMTNSQ
GNEFKAFLDNVVRKMMTNSQ

SEQ ID NO: 186407 - protein, 20 aa, Artificial Sequence
  Description of Artificial Sequence: Synthetic peptide
  Seed: GNEKKAKLANVVRKMMTNSQ
GNEFKAFLFNVARKMMTNSQ

SEQ ID NO: 186408 - protein, 20 aa, Artificial Sequence
  Description of Artificial Sequence: Synthetic peptide
  Seed: GNEKKAKLANVVRKMMTNSQ
GNEFKAFLFNVDRKMMTNSQ

SEQ ID NO: 186409 - protein, 20 aa, Artificial Sequence
  Description of Artificial Sequence: Synthetic peptide
  Seed: GNEKKAKLANVVRKMMTNSQ
GNEFKAFLFNVERKMMTNSQ

SEQ ID NO: 186410 - protein, 20 aa, Artificial Sequence
  Description of Artificial Sequence: Synthetic peptide
  Seed: GNEKKAKLANVVRKMMTNSQ
GNEFKAFLFNVGRKMMTNSQ

SEQ ID NO: 186411 - protein, 20 aa, Artificial Sequence
  Description of Artificial Sequence: Synthetic peptide
  Seed: GNEKKAKLANVVRKMMTNSQ
GNEFKAFLFNVHRKMMTNSQ

SEQ ID NO: 186412 - protein, 20 aa, Artificial Sequence
  Description of Artificial Sequence: Synthetic peptide
  Seed: GNEKKAKLANVVRKMMTNSQ
GNEFKAFLFNVIRKMMTNSQ

SEQ ID NO: 186413 - protein, 20 aa, Artificial Sequence
  Description of Artificial Sequence: Synthetic peptide
  Seed: GNEKKAKLANVVRKMMTNSQ
GNEFKAFLFNVKRKMMTNSQ

SEQ ID NO: 186414 - protein, 20 aa, Artificial Sequence
  Description of Artificial Sequence: Synthetic peptide
  Seed: GNEKKAKLANVVRKMMTNSQ
GNEFKAFLFNVLRKMMTNSQ

SEQ ID NO: 186415 - protein, 20 aa, Artificial Sequence
  Description of Artificial Sequence: Synthetic peptide
  Seed: GNEKKAKLANVVRKMMTNSQ
GNEFKAFLFNVMRKMMTNSQ

SEQ ID NO: 186416 - protein, 20 aa, Artificial Sequence
  Description of Artificial Sequence: Synthetic peptide
  Seed: GNEKKAKLANVVRKMMTNSQ
GNEFKAFLFNVNRKMMTNSQ

SEQ ID NO: 186417 - protein, 20 aa, Artificial Sequence
  Description of Artificial Sequence: Synthetic peptide
  Seed: GNEKKAKLANVVRKMMTNSQ
GNEFKAFLFNVPRKMMTNSQ

SEQ ID NO: 186418 - protein, 20 aa, Artificial Sequence
  Description of Artificial Sequence: Synthetic peptide
  Seed: GNEKKAKLANVVRKMMTNSQ
GNEFKAFLFNVQRKMMTNSQ

SEQ ID NO: 186419 - protein, 20 aa, Artificial Sequence
  Description of Artificial Sequence: Synthetic peptide
  Seed: GNEKKAKLANVVRKMMTNSQ
GNEFKAFLFNVRRKMMTNSQ

SEQ ID NO: 186420 - protein, 20 aa, Artificial Sequence
  Description of Artificial Sequence: Synthetic peptide
  Seed: GNEKKAKLANVVRKMMTNSQ
GNEFKAFLFNVSRKMMTNSQ

SEQ ID NO: 186421 - protein, 20 aa, Artificial Sequence
  Description of Artificial Sequence: Synthetic peptide
  Seed: GNEKKAKLANVVRKMMTNSQ
GNEFKAFLFNVTRKMMTNSQ

SEQ ID NO: 186422 - protein, 20 aa, Artificial Sequence
  Description of Artificial Sequence: Synthetic peptide
  Seed: GNEKKAKLANVVRKMMTNSQ
GNEFKAFLFNVVRKMMTNSQ

SEQ ID NO: 186423 - protein, 20 aa, Artificial Sequence
  Description of Artificial Sequence: Synthetic peptide
  Seed: GNEKKAKLANVVRKMMTNSQ
GNEFKAFLFNVYRKMMTNSQ

SEQ ID NO: 186424 - protein, 20 aa, Artificial Sequence
  Description of Artificial Sequence: Synthetic peptide
  Seed: GNEKKAKLANVVRKMMTNSQ
GNEFKAFLGNVARKMMTNSQ

SEQ ID NO: 186425 - protein, 20 aa, Artificial Sequence
  Description of Artificial Sequence: Synthetic peptide
  Seed: GNEKKAKLANVVRKMMTNSQ
GNEFKAFLGNVGRKMMTNSQ

SEQ ID NO: 186426 - protein, 20 aa, Artificial Sequence
  Description of Artificial Sequence: Synthetic peptide
  Seed: GNEKKAKLANVVRKMMTNSQ
GNEFKAFLGNVIRKMMTNSQ

SEQ ID NO: 186427 - protein, 20 aa, Artificial Sequence
  Description of Artificial Sequence: Synthetic peptide
  Seed: GNEKKAKLANVVRKMMTNSQ
GNEFKAFLGNVLRKMMTNSQ

SEQ ID NO: 186428 - protein, 20 aa, Artificial Sequence
  Description of Artificial Sequence: Synthetic peptide
  Seed: GNEKKAKLANVVRKMMTNSQ
GNEFKAFLGNVMRKMMTNSQ

SEQ ID NO: 186429 - protein, 20 aa, Artificial Sequence
  Description of Artificial Sequence: Synthetic peptide
  Seed: GNEKKAKLANVVRKMMTNSQ
GNEFKAFLGNVNRKMMTNSQ

SEQ ID NO: 186430 - protein, 20 aa, Artificial Sequence
  Description of Artificial Sequence: Synthetic peptide
  Seed: GNEKKAKLANVVRKMMTNSQ
GNEFKAFLGNVSRKMMTNSQ

SEQ ID NO: 186431 - protein, 20 aa, Artificial Sequence
  Description of Artificial Sequence: Synthetic peptide
  Seed: GNEKKAKLANVVRKMMTNSQ
GNEFKAFLGNVTRKMMTNSQ

SEQ ID NO: 186432 - protein, 20 aa, Artificial Sequence
  Description of Artificial Sequence: Synthetic peptide
  Seed: GNEKKAKLANVVRKMMTNSQ
GNEFKAFLGNVVRKMMTNSQ

SEQ ID NO: 186433 - protein, 20 aa, Artificial Sequence
  Description of Artificial Sequence: Synthetic peptide
  Seed: GNEKKAKLANVVRKMMTNSQ
GNEFKAFLHNVARKMMTNSQ

SEQ ID NO: 186434 - protein, 20 aa, Artificial Sequence
  Description of Artificial Sequence: Synthetic peptide
  Seed: GNEKKAKLANVVRKMMTNSQ
GNEFKAFLINVARKMMTNSQ

SEQ ID NO: 186435 - protein, 20 aa, Artificial Sequence
  Description of Artificial Sequence: Synthetic peptide
  Seed: GNEKKAKLANVVRKMMTNSQ
GNEFKAFLINVGRKMMTNSQ

SEQ ID NO: 186436 - protein, 20 aa, Artificial Sequence
  Description of Artificial Sequence: Synthetic peptide
  Seed: GNEKKAKLANVVRKMMTNSQ
GNEFKAFLINVHRKMMTNSQ

SEQ ID NO: 186437 - protein, 20 aa, Artificial Sequence
  Description of Artificial Sequence: Synthetic peptide
  Seed: GNEKKAKLANVVRKMMTNSQ
GNEFKAFLINVIRKMMTNSQ

SEQ ID NO: 186438 - protein, 20 aa, Artificial Sequence
  Description of Artificial Sequence: Synthetic peptide
  Seed: GNEKKAKLANVVRKMMTNSQ
GNEFKAFLINVLRKMMTNSQ

SEQ ID NO: 186439 - protein, 20 aa, Artificial Sequence
  Description of Artificial Sequence: Synthetic peptide
  Seed: GNEKKAKLANVVRKMMTNSQ
GNEFKAFLINVMRKMMTNSQ

SEQ ID NO: 186440 - protein, 20 aa, Artificial Sequence
  Description of Artificial Sequence: Synthetic peptide
  Seed: GNEKKAKLANVVRKMMTNSQ
GNEFKAFLINVNRKMMTNSQ

SEQ ID NO: 186441 - protein, 20 aa, Artificial Sequence
  Description of Artificial Sequence: Synthetic peptide
  Seed: GNEKKAKLANVVRKMMTNSQ
GNEFKAFLINVSRKMMTNSQ

SEQ ID NO: 186442 - protein, 20 aa, Artificial Sequence
  Description of Artificial Sequence: Synthetic peptide
  Seed: GNEKKAKLANVVRKMMTNSQ
GNEFKAFLINVTRKMMTNSQ

SEQ ID NO: 186443 - protein, 20 aa, Artificial Sequence
  Description of Artificial Sequence: Synthetic peptide
  Seed: GNEKKAKLANVVRKMMTNSQ
GNEFKAFLINVVRKMMTNSQ

SEQ ID NO: 186444 - protein, 20 aa, Artificial Sequence
  Description of Artificial Sequence: Synthetic peptide
  Seed: GNEKKAKLANVVRKMMTNSQ
GNEFKAFLLNVARKMMTNSQ

SEQ ID NO: 186445 - protein, 20 aa, Artificial Sequence
  Description of Artificial Sequence: Synthetic peptide
  Seed: GNEKKAKLANVVRKMMTNSQ
GNEFKAFLLNVDRKMMTNSQ

SEQ ID NO: 186446 - protein, 20 aa, Artificial Sequence
  Description of Artificial Sequence: Synthetic peptide
  Seed: GNEKKAKLANVVRKMMTNSQ
GNEFKAFLLNVERKMMTNSQ

SEQ ID NO: 186447 - protein, 20 aa, Artificial Sequence
  Description of Artificial Sequence: Synthetic peptide
  Seed: GNEKKAKLANVVRKMMTNSQ
GNEFKAFLLNVIRKMMTNSQ

SEQ ID NO: 186448 - protein, 20 aa, Artificial Sequence
  Description of Artificial Sequence: Synthetic peptide
  Seed: GNEKKAKLANVVRKMMTNSQ
GNEFKAFLLNVLRKMMTNSQ

SEQ ID NO: 186449 - protein, 20 aa, Artificial Sequence
  Description of Artificial Sequence: Synthetic peptide
  Seed: GNEKKAKLANVVRKMMTNSQ
GNEFKAFLLNVMRKMMTNSQ

SEQ ID NO: 186450 - protein, 20 aa, Artificial Sequence
  Description of Artificial Sequence: Synthetic peptide
  Seed: GNEKKAKLANVVRKMMTNSQ
GNEFKAFLLNVNRKMMTNSQ

SEQ ID NO: 186451 - protein, 20 aa, Artificial Sequence
  Description of Artificial Sequence: Synthetic peptide
  Seed: GNEKKAKLANVVRKMMTNSQ
GNEFKAFLLNVSRKMMTNSQ

SEQ ID NO: 186452 - protein, 20 aa, Artificial Sequence
  Description of Artificial Sequence: Synthetic peptide
  Seed: GNEKKAKLANVVRKMMTNSQ
GNEFKAFLLNVTRKMMTNSQ

SEQ ID NO: 186453 - protein, 20 aa, Artificial Sequence
  Description of Artificial Sequence: Synthetic peptide
  Seed: GNEKKAKLANVVRKMMTNSQ
GNEFKAFLLNVVRKMMTNSQ

SEQ ID NO: 186454 - protein, 20 aa, Artificial Sequence
  Description of Artificial Sequence: Synthetic peptide
  Seed: GNEKKAKLANVVRKMMTNSQ
GNEFKAFLMNVARKMMTNSQ

SEQ ID NO: 186455 - protein, 20 aa, Artificial Sequence
  Description of Artificial Sequence: Synthetic peptide
  Seed: GNEKKAKLANVVRKMMTNSQ
GNEFKAFLMNVIRKMMTNSQ

SEQ ID NO: 186456 - protein, 20 aa, Artificial Sequence
  Description of Artificial Sequence: Synthetic peptide
  Seed: GNEKKAKLANVVRKMMTNSQ
GNEFKAFLMNVMRKMMTNSQ

SEQ ID NO: 186457 - protein, 20 aa, Artificial Sequence
  Description of Artificial Sequence: Synthetic peptide
  Seed: GNEKKAKLANVVRKMMTNSQ
GNEFKAFLMNVNRKMMTNSQ

SEQ ID NO: 186458 - protein, 20 aa, Artificial Sequence
  Description of Artificial Sequence: Synthetic peptide
  Seed: GNEKKAKLANVVRKMMTNSQ
GNEFKAFLMNVTRKMMTNSQ

SEQ ID NO: 186459 - protein, 20 aa, Artificial Sequence
  Description of Artificial Sequence: Synthetic peptide
  Seed: GNEKKAKLANVVRKMMTNSQ
GNEFKAFLMNVVRKMMTNSQ

SEQ ID NO: 186460 - protein, 20 aa, Artificial Sequence
  Description of Artificial Sequence: Synthetic peptide
  Seed: GNEKKAKLANVVRKMMTNSQ
GNEFKAFLNNVARKMMTNSQ

SEQ ID NO: 186461 - protein, 20 aa, Artificial Sequence
  Description of Artificial Sequence: Synthetic peptide
  Seed: GNEKKAKLANVVRKMMTNSQ
GNEFKAFLNNVGRKMMTNSQ

SEQ ID NO: 186462 - protein, 20 aa, Artificial Sequence
  Description of Artificial Sequence: Synthetic peptide
  Seed: GNEKKAKLANVVRKMMTNSQ
GNEFKAFLNNVIRKMMTNSQ

SEQ ID NO: 186463 - protein, 20 aa, Artificial Sequence
  Description of Artificial Sequence: Synthetic peptide
  Seed: GNEKKAKLANVVRKMMTNSQ
GNEFKAFLNNVLRKMMTNSQ

SEQ ID NO: 186464 - protein, 20 aa, Artificial Sequence
  Description of Artificial Sequence: Synthetic peptide
  Seed: GNEKKAKLANVVRKMMTNSQ
GNEFKAFLNNVNRKMMTNSQ

SEQ ID NO: 186465 - protein, 20 aa, Artificial Sequence
  Description of Artificial Sequence: Synthetic peptide
  Seed: GNEKKAKLANVVRKMMTNSQ
GNEFKAFLNNVSRKMMTNSQ

SEQ ID NO: 186466 - protein, 20 aa, Artificial Sequence
  Description of Artificial Sequence: Synthetic peptide
  Seed: GNEKKAKLANVVRKMMTNSQ
GNEFKAFLNNVTRKMMTNSQ

SEQ ID NO: 186467 - protein, 20 aa, Artificial Sequence
  Description of Artificial Sequence: Synthetic peptide
  Seed: GNEKKAKLANVVRKMMTNSQ
GNEFKAFLNNVVRKMMTNSQ

SEQ ID NO: 186468 - protein, 20 aa, Artificial Sequence
  Description of Artificial Sequence: Synthetic peptide
  Seed: GNEKKAKLANVVRKMMTNSQ
GNEFKAFLPNVARKMMTNSQ

SEQ ID NO: 186469 - protein, 20 aa, Artificial Sequence
  Description of Artificial Sequence: Synthetic peptide
  Seed: GNEKKAKLANVVRKMMTNSQ
GNEFKAFLPNVDRKMMTNSQ

SEQ ID NO: 186470 - protein, 20 aa, Artificial Sequence
  Description of Artificial Sequence: Synthetic peptide
  Seed: GNEKKAKLANVVRKMMTNSQ
GNEFKAFLPNVERKMMTNSQ

SEQ ID NO: 186471 - protein, 20 aa, Artificial Sequence
  Description of Artificial Sequence: Synthetic peptide
  Seed: GNEKKAKLANVVRKMMTNSQ
GNEFKAFLPNVFRKMMTNSQ

SEQ ID NO: 186472 - protein, 20 aa, Artificial Sequence
  Description of Artificial Sequence: Synthetic peptide
  Seed: GNEKKAKLANVVRKMMTNSQ
GNEFKAFLPNVGRKMMTNSQ

SEQ ID NO: 186473 - protein, 20 aa, Artificial Sequence
  Description of Artificial Sequence: Synthetic peptide
  Seed: GNEKKAKLANVVRKMMTNSQ
GNEFKAFLPNVHRKMMTNSQ

SEQ ID NO: 186474 - protein, 20 aa, Artificial Sequence
  Description of Artificial Sequence: Synthetic peptide
  Seed: GNEKKAKLANVVRKMMTNSQ
GNEFKAFLPNVIRKMMTNSQ

SEQ ID NO: 186475 - protein, 20 aa, Artificial Sequence
  Description of Artificial Sequence: Synthetic peptide
  Seed: GNEKKAKLANVVRKMMTNSQ
GNEFKAFLPNVLRKMMTNSQ

SEQ ID NO: 186476 - protein, 20 aa, Artificial Sequence
  Description of Artificial Sequence: Synthetic peptide
  Seed: GNEKKAKLANVVRKMMTNSQ
GNEFKAFLPNVMRKMMTNSQ

SEQ ID NO: 186477 - protein, 20 aa, Artificial Sequence
  Description of Artificial Sequence: Synthetic peptide
  Seed: GNEKKAKLANVVRKMMTNSQ
GNEFKAFLPNVNRKMMTNSQ

SEQ ID NO: 186478 - protein, 20 aa, Artificial Sequence
  Description of Artificial Sequence: Synthetic peptide
  Seed: GNEKKAKLANVVRKMMTNSQ
GNEFKAFLPNVPRKMMTNSQ

SEQ ID NO: 186479 - protein, 20 aa, Artificial Sequence
  Description of Artificial Sequence: Synthetic peptide
  Seed: GNEKKAKLANVVRKMMTNSQ
GNEFKAFLPNVQRKMMTNSQ

SEQ ID NO: 186480 - protein, 20 aa, Artificial Sequence
  Description of Artificial Sequence: Synthetic peptide
  Seed: GNEKKAKLANVVRKMMTNSQ
GNEFKAFLPNVSRKMMTNSQ

SEQ ID NO: 186481 - protein, 20 aa, Artificial Sequence
  Description of Artificial Sequence: Synthetic peptide
  Seed: GNEKKAKLANVVRKMMTNSQ
GNEFKAFLPNVTRKMMTNSQ

SEQ ID NO: 186482 - protein, 20 aa, Artificial Sequence
  Description of Artificial Sequence: Synthetic peptide
  Seed: GNEKKAKLANVVRKMMTNSQ
GNEFKAFLPNVVRKMMTNSQ

SEQ ID NO: 186483 - protein, 20 aa, Artificial Sequence
  Description of Artificial Sequence: Synthetic peptide
  Seed: GNEKKAKLANVVRKMMTNSQ
GNEFKAFLSNVARKMMTNSQ

SEQ ID NO: 186484 - protein, 20 aa, Artificial Sequence
  Description of Artificial Sequence: Synthetic peptide
  Seed: GNEKKAKLANVVRKMMTNSQ
GNEFKAFLSNVFRKMMTNSQ

SEQ ID NO: 186485 - protein, 20 aa, Artificial Sequence
  Description of Artificial Sequence: Synthetic peptide
  Seed: GNEKKAKLANVVRKMMTNSQ
GNEFKAFLSNVGRKMMTNSQ

SEQ ID NO: 186486 - protein, 20 aa, Artificial Sequence
  Description of Artificial Sequence: Synthetic peptide
  Seed: GNEKKAKLANVVRKMMTNSQ
GNEFKAFLSNVHRKMMTNSQ

SEQ ID NO: 186487 - protein, 20 aa, Artificial Sequence
  Description of Artificial Sequence: Synthetic peptide
  Seed: GNEKKAKLANVVRKMMTNSQ
GNEFKAFLSNVIRKMMTNSQ

SEQ ID NO: 186488 - protein, 20 aa, Artificial Sequence
  Description of Artificial Sequence: Synthetic peptide
  Seed: GNEKKAKLANVVRKMMTNSQ
GNEFKAFLSNVLRKMMTNSQ

SEQ ID NO: 186489 - protein, 20 aa, Artificial Sequence
  Description of Artificial Sequence: Synthetic peptide
  Seed: GNEKKAKLANVVRKMMTNSQ
GNEFKAFLSNVMRKMMTNSQ

SEQ ID NO: 186490 - protein, 20 aa, Artificial Sequence
  Description of Artificial Sequence: Synthetic peptide
  Seed: GNEKKAKLANVVRKMMTNSQ
GNEFKAFLSNVNRKMMTNSQ

SEQ ID NO: 186491 - protein, 20 aa, Artificial Sequence
  Description of Artificial Sequence: Synthetic peptide
  Seed: GNEKKAKLANVVRKMMTNSQ
GNEFKAFLSNVQRKMMTNSQ

SEQ ID NO: 186492 - protein, 20 aa, Artificial Sequence
  Description of Artificial Sequence: Synthetic peptide
  Seed: GNEKKAKLANVVRKMMTNSQ
GNEFKAFLSNVSRKMMTNSQ

SEQ ID NO: 186493 - protein, 20 aa, Artificial Sequence
  Description of Artificial Sequence: Synthetic peptide
  Seed: GNEKKAKLANVVRKMMTNSQ
GNEFKAFLSNVTRKMMTNSQ

SEQ ID NO: 186494 - protein, 20 aa, Artificial Sequence
  Description of Artificial Sequence: Synthetic peptide
  Seed: GNEKKAKLANVVRKMMTNSQ
GNEFKAFLSNVVRKMMTNSQ

SEQ ID NO: 186495 - protein, 20 aa, Artificial Sequence
  Description of Artificial Sequence: Synthetic peptide
  Seed: GNEKKAKLANVVRKMMTNSQ
GNEFKAFLTNVARKMMTNSQ

SEQ ID NO: 186496 - protein, 20 aa, Artificial Sequence
  Description of Artificial Sequence: Synthetic peptide
  Seed: GNEKKAKLANVVRKMMTNSQ
GNEFKAFLTNVFRKMMTNSQ

SEQ ID NO: 186497 - protein, 20 aa, Artificial Sequence
  Description of Artificial Sequence: Synthetic peptide
  Seed: GNEKKAKLANVVRKMMTNSQ
GNEFKAFLTNVGRKMMTNSQ

SEQ ID NO: 186498 - protein, 20 aa, Artificial Sequence
  Description of Artificial Sequence: Synthetic peptide
  Seed: GNEKKAKLANVVRKMMTNSQ
GNEFKAFLTNVHRKMMTNSQ

SEQ ID NO: 186499 - protein, 20 aa, Artificial Sequence
  Description of Artificial Sequence: Synthetic peptide
  Seed: GNEKKAKLANVVRKMMTNSQ
GNEFKAFLTNVIRKMMTNSQ

SEQ ID NO: 186500 - protein, 20 aa, Artificial Sequence
  Description of Artificial Sequence: Synthetic peptide
  Seed: GNEKKAKLANVVRKMMTNSQ
GNEFKAFLTNVLRKMMTNSQ

SEQ ID NO: 186501 - protein, 20 aa, Artificial Sequence
  Description of Artificial Sequence: Synthetic peptide
  Seed: GNEKKAKLANVVRKMMTNSQ
GNEFKAFLTNVMRKMMTNSQ

SEQ ID NO: 186502 - protein, 20 aa, Artificial Sequence
  Description of Artificial Sequence: Synthetic peptide
  Seed: GNEKKAKLANVVRKMMTNSQ
GNEFKAFLTNVNRKMMTNSQ

SEQ ID NO: 186503 - protein, 20 aa, Artificial Sequence
  Description of Artificial Sequence: Synthetic peptide
  Seed: GNEKKAKLANVVRKMMTNSQ
GNEFKAFLTNVPRKMMTNSQ

SEQ ID NO: 186504 - protein, 20 aa, Artificial Sequence
  Description of Artificial Sequence: Synthetic peptide
  Seed: GNEKKAKLANVVRKMMTNSQ
GNEFKAFLTNVQRKMMTNSQ

SEQ ID NO: 186505 - protein, 20 aa, Artificial Sequence
  Description of Artificial Sequence: Synthetic peptide
  Seed: GNEKKAKLANVVRKMMTNSQ
GNEFKAFLTNVSRKMMTNSQ

SEQ ID NO: 186506 - protein, 20 aa, Artificial Sequence
  Description of Artificial Sequence: Synthetic peptide
  Seed: GNEKKAKLANVVRKMMTNSQ
GNEFKAFLTNVTRKMMTNSQ

SEQ ID NO: 186507 - protein, 20 aa, Artificial Sequence
  Description of Artificial Sequence: Synthetic peptide
  Seed: GNEKKAKLANVVRKMMTNSQ
GNEFKAFLTNVVRKMMTNSQ

SEQ ID NO: 186508 - protein, 20 aa, Artificial Sequence
  Description of Artificial Sequence: Synthetic peptide
  Seed: GNEKKAKLANVVRKMMTNSQ
GNEFKAFLVNVARKMMTNSQ

SEQ ID NO: 186509 - protein, 20 aa, Artificial Sequence
  Description of Artificial Sequence: Synthetic peptide
  Seed: GNEKKAKLANVVRKMMTNSQ
GNEFKAFLVNVDRKMMTNSQ

SEQ ID NO: 186510 - protein, 20 aa, Artificial Sequence
  Description of Artificial Sequence: Synthetic peptide
  Seed: GNEKKAKLANVVRKMMTNSQ
GNEFKAFLVNVGRKMMTNSQ

SEQ ID NO: 186511 - protein, 20 aa, Artificial Sequence
  Description of Artificial Sequence: Synthetic peptide
  Seed: GNEKKAKLANVVRKMMTNSQ
GNEFKAFLVNVHRKMMTNSQ

SEQ ID NO: 186512 - protein, 20 aa, Artificial Sequence
  Description of Artificial Sequence: Synthetic peptide
  Seed: GNEKKAKLANVVRKMMTNSQ
GNEFKAFLVNVIRKMMTNSQ

SEQ ID NO: 186513 - protein, 20 aa, Artificial Sequence
  Description of Artificial Sequence: Synthetic peptide
  Seed: GNEKKAKLANVVRKMMTNSQ
GNEFKAFLVNVLRKMMTNSQ

SEQ ID NO: 186514 - protein, 20 aa, Artificial Sequence
  Description of Artificial Sequence: Synthetic peptide
  Seed: GNEKKAKLANVVRKMMTNSQ
GNEFKAFLVNVMRKMMTNSQ

SEQ ID NO: 186515 - protein, 20 aa, Artificial Sequence
  Description of Artificial Sequence: Synthetic peptide
  Seed: GNEKKAKLANVVRKMMTNSQ
GNEFKAFLVNVNRKMMTNSQ

SEQ ID NO: 186516 - protein, 20 aa, Artificial Sequence
  Description of Artificial Sequence: Synthetic peptide
  Seed: GNEKKAKLANVVRKMMTNSQ
GNEFKAFLVNVPRKMMTNSQ

SEQ ID NO: 186517 - protein, 20 aa, Artificial Sequence
  Description of Artificial Sequence: Synthetic peptide
  Seed: GNEKKAKLANVVRKMMTNSQ
GNEFKAFLVNVSRKMMTNSQ

SEQ ID NO: 186518 - protein, 20 aa, Artificial Sequence
  Description of Artificial Sequence: Synthetic peptide
  Seed: GNEKKAKLANVVRKMMTNSQ
GNEFKAFLVNVTRKMMTNSQ

SEQ ID NO: 186519 - protein, 20 aa, Artificial Sequence
  Description of Artificial Sequence: Synthetic peptide
  Seed: GNEKKAKLANVVRKMMTNSQ
GNEFKAFLVNVVRKMMTNSQ

SEQ ID NO: 186520 - protein, 20 aa, Artificial Sequence
  Description of Artificial Sequence: Synthetic peptide
  Seed: GNEKKAKLANVVRKMMTNSQ
GNEFKAFLWNVARKMMTNSQ

SEQ ID NO: 186521 - protein, 20 aa, Artificial Sequence
  Description of Artificial Sequence: Synthetic peptide
  Seed: GNEKKAKLANVVRKMMTNSQ
GNEFKAFLWNVERKMMTNSQ

SEQ ID NO: 186522 - protein, 20 aa, Artificial Sequence
  Description of Artificial Sequence: Synthetic peptide
  Seed: GNEKKAKLANVVRKMMTNSQ
GNEFKAFLWNVIRKMMTNSQ

SEQ ID NO: 186523 - protein, 20 aa, Artificial Sequence
  Description of Artificial Sequence: Synthetic peptide
  Seed: GNEKKAKLANVVRKMMTNSQ
GNEFKAFLWNVLRKMMTNSQ

SEQ ID NO: 186524 - protein, 20 aa, Artificial Sequence
  Description of Artificial Sequence: Synthetic peptide
  Seed: GNEKKAKLANVVRKMMTNSQ
GNEFKAFLWNVMRKMMTNSQ

SEQ ID NO: 186525 - protein, 20 aa, Artificial Sequence
  Description of Artificial Sequence: Synthetic peptide
  Seed: GNEKKAKLANVVRKMMTNSQ
GNEFKAFLWNVNRKMMTNSQ

SEQ ID NO: 186526 - protein, 20 aa, Artificial Sequence
  Description of Artificial Sequence: Synthetic peptide
  Seed: GNEKKAKLANVVRKMMTNSQ
GNEFKAFLWNVSRKMMTNSQ

SEQ ID NO: 186527 - protein, 20 aa, Artificial Sequence
  Description of Artificial Sequence: Synthetic peptide
  Seed: GNEKKAKLANVVRKMMTNSQ
GNEFKAFLWNVTRKMMTNSQ

SEQ ID NO: 186528 - protein, 20 aa, Artificial Sequence
  Description of Artificial Sequence: Synthetic peptide
  Seed: GNEKKAKLANVVRKMMTNSQ
GNEFKAFLWNVVRKMMTNSQ

SEQ ID NO: 186529 - protein, 20 aa, Artificial Sequence
  Description of Artificial Sequence: Synthetic peptide
  Seed: GNEKKAKLANVVRKMMTNSQ
GNEFKAFLYNVARKMMTNSQ

SEQ ID NO: 186530 - protein, 20 aa, Artificial Sequence
  Description of Artificial Sequence: Synthetic peptide
  Seed: GNEKKAKLANVVRKMMTNSQ
GNEFKAFLYNVDRKMMTNSQ

SEQ ID NO: 186531 - protein, 20 aa, Artificial Sequence
  Description of Artificial Sequence: Synthetic peptide
  Seed: GNEKKAKLANVVRKMMTNSQ
GNEFKAFLYNVERKMMTNSQ

SEQ ID NO: 186532 - protein, 20 aa, Artificial Sequence
  Description of Artificial Sequence: Synthetic peptide
  Seed: GNEKKAKLANVVRKMMTNSQ
GNEFKAFLYNVIRKMMTNSQ

SEQ ID NO: 186533 - protein, 20 aa, Artificial Sequence
  Description of Artificial Sequence: Synthetic peptide
  Seed: GNEKKAKLANVVRKMMTNSQ
GNEFKAFLYNVLRKMMTNSQ

SEQ ID NO: 186534 - protein, 20 aa, Artificial Sequence
  Description of Artificial Sequence: Synthetic peptide
  Seed: GNEKKAKLANVVRKMMTNSQ
GNEFKAFLYNVMRKMMTNSQ

SEQ ID NO: 186535 - protein, 20 aa, Artificial Sequence
  Description of Artificial Sequence: Synthetic peptide
  Seed: GNEKKAKLANVVRKMMTNSQ
GNEFKAFLYNVNRKMMTNSQ

SEQ ID NO: 186536 - protein, 20 aa, Artificial Sequence
  Description of Artificial Sequence: Synthetic peptide
  Seed: GNEKKAKLANVVRKMMTNSQ
GNEFKAFLYNVSRKMMTNSQ

SEQ ID NO: 186537 - protein, 20 aa, Artificial Sequence
  Description of Artificial Sequence: Synthetic peptide
  Seed: GNEKKAKLANVVRKMMTNSQ
GNEFKAFLYNVTRKMMTNSQ

SEQ ID NO: 186538 - protein, 20 aa, Artificial Sequence
  Description of Artificial Sequence: Synthetic peptide
  Seed: GNEKKAKLANVVRKMMTNSQ
GNEFKAFLYNVVRKMMTNSQ

SEQ ID NO: 186539 - protein, 20 aa, Artificial Sequence
  Description of Artificial Sequence: Synthetic peptide
  Seed: GNEKKAKLANVVRKMMTNSQ
GNEFKAGLANVARKMMTNSQ

SEQ ID NO: 186540 - protein, 20 aa, Artificial Sequence
  Description of Artificial Sequence: Synthetic peptide
  Seed: GNEKKAKLANVVRKMMTNSQ
GNEFKAGLANVCRKMMTNSQ

SEQ ID NO: 186541 - protein, 20 aa, Artificial Sequence
  Description of Artificial Sequence: Synthetic peptide
  Seed: GNEKKAKLANVVRKMMTNSQ
GNEFKAGLANVFRKMMTNSQ

SEQ ID NO: 186542 - protein, 20 aa, Artificial Sequence
  Description of Artificial Sequence: Synthetic peptide
  Seed: GNEKKAKLANVVRKMMTNSQ
GNEFKAGLANVGRKMMTNSQ

SEQ ID NO: 186543 - protein, 20 aa, Artificial Sequence
  Description of Artificial Sequence: Synthetic peptide
  Seed: GNEKKAKLANVVRKMMTNSQ
GNEFKAGLANVHRKMMTNSQ

SEQ ID NO: 186544 - protein, 20 aa, Artificial Sequence
  Description of Artificial Sequence: Synthetic peptide
  Seed: GNEKKAKLANVVRKMMTNSQ
GNEFKAGLANVIRKMMTNSQ

SEQ ID NO: 186545 - protein, 20 aa, Artificial Sequence
  Description of Artificial Sequence: Synthetic peptide
  Seed: GNEKKAKLANVVRKMMTNSQ
GNEFKAGLANVLRKMMTNSQ

SEQ ID NO: 186546 - protein, 20 aa, Artificial Sequence
  Description of Artificial Sequence: Synthetic peptide
  Seed: GNEKKAKLANVVRKMMTNSQ
GNEFKAGLANVMRKMMTNSQ

SEQ ID NO: 186547 - protein, 20 aa, Artificial Sequence
  Description of Artificial Sequence: Synthetic peptide
  Seed: GNEKKAKLANVVRKMMTNSQ
GNEFKAGLANVNRKMMTNSQ

SEQ ID NO: 186548 - protein, 20 aa, Artificial Sequence
  Description of Artificial Sequence: Synthetic peptide
  Seed: GNEKKAKLANVVRKMMTNSQ
GNEFKAGLANVQRKMMTNSQ

SEQ ID NO: 186549 - protein, 20 aa, Artificial Sequence
  Description of Artificial Sequence: Synthetic peptide
  Seed: GNEKKAKLANVVRKMMTNSQ
GNEFKAGLANVSRKMMTNSQ

SEQ ID NO: 186550 - protein, 20 aa, Artificial Sequence
  Description of Artificial Sequence: Synthetic peptide
  Seed: GNEKKAKLANVVRKMMTNSQ
GNEFKAGLANVTRKMMTNSQ

SEQ ID NO: 186551 - protein, 20 aa, Artificial Sequence
  Description of Artificial Sequence: Synthetic peptide
  Seed: GNEKKAKLANVVRKMMTNSQ
GNEFKAGLANVVRKMMTNSQ

SEQ ID NO: 186552 - protein, 20 aa, Artificial Sequence
  Description of Artificial Sequence: Synthetic peptide
  Seed: GNEKKAKLANVVRKMMTNSQ
GNEFKAGLANVYRKMMTNSQ

SEQ ID NO: 186553 - protein, 20 aa, Artificial Sequence
  Description of Artificial Sequence: Synthetic peptide
  Seed: GNEKKAKLANVVRKMMTNSQ
GNEFKAGLFNVARKMMTNSQ

SEQ ID NO: 186554 - protein, 20 aa, Artificial Sequence
  Description of Artificial Sequence: Synthetic peptide
  Seed: GNEKKAKLANVVRKMMTNSQ
GNEFKAGLFNVFRKMMTNSQ

SEQ ID NO: 186555 - protein, 20 aa, Artificial Sequence
  Description of Artificial Sequence: Synthetic peptide
  Seed: GNEKKAKLANVVRKMMTNSQ
GNEFKAGLFNVIRKMMTNSQ

SEQ ID NO: 186556 - protein, 20 aa, Artificial Sequence
  Description of Artificial Sequence: Synthetic peptide
  Seed: GNEKKAKLANVVRKMMTNSQ
GNEFKAGLFNVLRKMMTNSQ

SEQ ID NO: 186557 - protein, 20 aa, Artificial Sequence
  Description of Artificial Sequence: Synthetic peptide
  Seed: GNEKKAKLANVVRKMMTNSQ
GNEFKAGLFNVMRKMMTNSQ

SEQ ID NO: 186558 - protein, 20 aa, Artificial Sequence
  Description of Artificial Sequence: Synthetic peptide
  Seed: GNEKKAKLANVVRKMMTNSQ
GNEFKAGLFNVSRKMMTNSQ

SEQ ID NO: 186559 - protein, 20 aa, Artificial Sequence
  Description of Artificial Sequence: Synthetic peptide
  Seed: GNEKKAKLANVVRKMMTNSQ
GNEFKAGLFNVTRKMMTNSQ

SEQ ID NO: 186560 - protein, 20 aa, Artificial Sequence
  Description of Artificial Sequence: Synthetic peptide
  Seed: GNEKKAKLANVVRKMMTNSQ
GNEFKAGLFNVVRKMMTNSQ

SEQ ID NO: 186561 - protein, 20 aa, Artificial Sequence
  Description of Artificial Sequence: Synthetic peptide
  Seed: GNEKKAKLANVVRKMMTNSQ
GNEFKAGLFNVYRKMMTNSQ

SEQ ID NO: 186562 - protein, 20 aa, Artificial Sequence
  Description of Artificial Sequence: Synthetic peptide
  Seed: GNEKKAKLANVVRKMMTNSQ
GNEFKAGLGNVARKMMTNSQ

SEQ ID NO: 186563 - protein, 20 aa, Artificial Sequence
  Description of Artificial Sequence: Synthetic peptide
  Seed: GNEKKAKLANVVRKMMTNSQ
GNEFKAGLGNVFRKMMTNSQ

SEQ ID NO: 186564 - protein, 20 aa, Artificial Sequence
  Description of Artificial Sequence: Synthetic peptide
  Seed: GNEKKAKLANVVRKMMTNSQ
GNEFKAGLGNVIRKMMTNSQ

SEQ ID NO: 186565 - protein, 20 aa, Artificial Sequence
  Description of Artificial Sequence: Synthetic peptide
  Seed: GNEKKAKLANVVRKMMTNSQ
GNEFKAGLGNVLRKMMTNSQ

SEQ ID NO: 186566 - protein, 20 aa, Artificial Sequence
  Description of Artificial Sequence: Synthetic peptide
  Seed: GNEKKAKLANVVRKMMTNSQ
GNEFKAGLGNVMRKMMTNSQ

SEQ ID NO: 186567 - protein, 20 aa, Artificial Sequence
  Description of Artificial Sequence: Synthetic peptide
  Seed: GNEKKAKLANVVRKMMTNSQ
GNEFKAGLGNVSRKMMTNSQ

SEQ ID NO: 186568 - protein, 20 aa, Artificial Sequence
  Description of Artificial Sequence: Synthetic peptide
  Seed: GNEKKAKLANVVRKMMTNSQ
GNEFKAGLGNVTRKMMTNSQ

SEQ ID NO: 186569 - protein, 20 aa, Artificial Sequence
  Description of Artificial Sequence: Synthetic peptide
  Seed: GNEKKAKLANVVRKMMTNSQ
GNEFKAGLGNVVRKMMTNSQ

SEQ ID NO: 186570 - protein, 20 aa, Artificial Sequence
  Description of Artificial Sequence: Synthetic peptide
  Seed: GNEKKAKLANVVRKMMTNSQ
GNEFKAGLINVARKMMTNSQ

SEQ ID NO: 186571 - protein, 20 aa, Artificial Sequence
  Description of Artificial Sequence: Synthetic peptide
  Seed: GNEKKAKLANVVRKMMTNSQ
GNEFKAGLINVIRKMMTNSQ

SEQ ID NO: 186572 - protein, 20 aa, Artificial Sequence
  Description of Artificial Sequence: Synthetic peptide
  Seed: GNEKKAKLANVVRKMMTNSQ
GNEFKAGLINVLRKMMTNSQ

SEQ ID NO: 186573 - protein, 20 aa, Artificial Sequence
  Description of Artificial Sequence: Synthetic peptide
  Seed: GNEKKAKLANVVRKMMTNSQ
GNEFKAGLINVNRKMMTNSQ

SEQ ID NO: 186574 - protein, 20 aa, Artificial Sequence
  Description of Artificial Sequence: Synthetic peptide
  Seed: GNEKKAKLANVVRKMMTNSQ
GNEFKAGLINVSRKMMTNSQ

SEQ ID NO: 186575 - protein, 20 aa, Artificial Sequence
  Description of Artificial Sequence: Synthetic peptide
  Seed: GNEKKAKLANVVRKMMTNSQ
GNEFKAGLINVVRKMMTNSQ

SEQ ID NO: 186576 - protein, 20 aa, Artificial Sequence
  Description of Artificial Sequence: Synthetic peptide
  Seed: GNEKKAKLANVVRKMMTNSQ
GNEFKAGLLNVIRKMMTNSQ

SEQ ID NO: 186577 - protein, 20 aa, Artificial Sequence
  Description of Artificial Sequence: Synthetic peptide
  Seed: GNEKKAKLANVVRKMMTNSQ
GNEFKAGLNNVARKMMTNSQ

SEQ ID NO: 186578 - protein, 20 aa, Artificial Sequence
  Description of Artificial Sequence: Synthetic peptide
  Seed: GNEKKAKLANVVRKMMTNSQ
GNEFKAGLNNVIRKMMTNSQ

SEQ ID NO: 186579 - protein, 20 aa, Artificial Sequence
  Description of Artificial Sequence: Synthetic peptide
  Seed: GNEKKAKLANVVRKMMTNSQ
GNEFKAGLNNVLRKMMTNSQ

SEQ ID NO: 186580 - protein, 20 aa, Artificial Sequence
  Description of Artificial Sequence: Synthetic peptide
  Seed: GNEKKAKLANVVRKMMTNSQ
GNEFKAGLNNVMRKMMTNSQ

SEQ ID NO: 186581 - protein, 20 aa, Artificial Sequence
  Description of Artificial Sequence: Synthetic peptide
  Seed: GNEKKAKLANVVRKMMTNSQ
GNEFKAGLNNVNRKMMTNSQ

SEQ ID NO: 186582 - protein, 20 aa, Artificial Sequence
  Description of Artificial Sequence: Synthetic peptide
  Seed: GNEKKAKLANVVRKMMTNSQ
GNEFKAGLNNVSRKMMTNSQ

SEQ ID NO: 186583 - protein, 20 aa, Artificial Sequence
  Description of Artificial Sequence: Synthetic peptide
  Seed: GNEKKAKLANVVRKMMTNSQ
GNEFKAGLNNVVRKMMTNSQ

SEQ ID NO: 186584 - protein, 20 aa, Artificial Sequence
  Description of Artificial Sequence: Synthetic peptide
  Seed: GNEKKAKLANVVRKMMTNSQ
GNEFKAGLPNVARKMMTNSQ

SEQ ID NO: 186585 - protein, 20 aa, Artificial Sequence
  Description of Artificial Sequence: Synthetic peptide
  Seed: GNEKKAKLANVVRKMMTNSQ
GNEFKAGLPNVFRKMMTNSQ

SEQ ID NO: 186586 - protein, 20 aa, Artificial Sequence
  Description of Artificial Sequence: Synthetic peptide
  Seed: GNEKKAKLANVVRKMMTNSQ
GNEFKAGLPNVIRKMMTNSQ

SEQ ID NO: 186587 - protein, 20 aa, Artificial Sequence
  Description of Artificial Sequence: Synthetic peptide
  Seed: GNEKKAKLANVVRKMMTNSQ
GNEFKAGLPNVLRKMMTNSQ

SEQ ID NO: 186588 - protein, 20 aa, Artificial Sequence
  Description of Artificial Sequence: Synthetic peptide
  Seed: GNEKKAKLANVVRKMMTNSQ
GNEFKAGLPNVMRKMMTNSQ

SEQ ID NO: 186589 - protein, 20 aa, Artificial Sequence
  Description of Artificial Sequence: Synthetic peptide
  Seed: GNEKKAKLANVVRKMMTNSQ
GNEFKAGLPNVNRKMMTNSQ

SEQ ID NO: 186590 - protein, 20 aa, Artificial Sequence
  Description of Artificial Sequence: Synthetic peptide
  Seed: GNEKKAKLANVVRKMMTNSQ
GNEFKAGLPNVSRKMMTNSQ

SEQ ID NO: 186591 - protein, 20 aa, Artificial Sequence
  Description of Artificial Sequence: Synthetic peptide
  Seed: GNEKKAKLANVVRKMMTNSQ
GNEFKAGLPNVTRKMMTNSQ

SEQ ID NO: 186592 - protein, 20 aa, Artificial Sequence
  Description of Artificial Sequence: Synthetic peptide
  Seed: GNEKKAKLANVVRKMMTNSQ
GNEFKAGLPNVVRKMMTNSQ

SEQ ID NO: 186593 - protein, 20 aa, Artificial Sequence
  Description of Artificial Sequence: Synthetic peptide
  Seed: GNEKKAKLANVVRKMMTNSQ
GNEFKAGLSNVARKMMTNSQ

SEQ ID NO: 186594 - protein, 20 aa, Artificial Sequence
  Description of Artificial Sequence: Synthetic peptide
  Seed: GNEKKAKLANVVRKMMTNSQ
GNEFKAGLSNVFRKMMTNSQ

SEQ ID NO: 186595 - protein, 20 aa, Artificial Sequence
  Description of Artificial Sequence: Synthetic peptide
  Seed: GNEKKAKLANVVRKMMTNSQ
GNEFKAGLSNVGRKMMTNSQ

SEQ ID NO: 186596 - protein, 20 aa, Artificial Sequence
  Description of Artificial Sequence: Synthetic peptide
  Seed: GNEKKAKLANVVRKMMTNSQ
GNEFKAGLSNVIRKMMTNSQ

SEQ ID NO: 186597 - protein, 20 aa, Artificial Sequence
  Description of Artificial Sequence: Synthetic peptide
  Seed: GNEKKAKLANVVRKMMTNSQ
GNEFKAGLSNVLRKMMTNSQ

SEQ ID NO: 186598 - protein, 20 aa, Artificial Sequence
  Description of Artificial Sequence: Synthetic peptide
  Seed: GNEKKAKLANVVRKMMTNSQ
GNEFKAGLSNVMRKMMTNSQ

SEQ ID NO: 186599 - protein, 20 aa, Artificial Sequence
  Description of Artificial Sequence: Synthetic peptide
  Seed: GNEKKAKLANVVRKMMTNSQ
GNEFKAGLSNVNRKMMTNSQ

SEQ ID NO: 186600 - protein, 20 aa, Artificial Sequence
  Description of Artificial Sequence: Synthetic peptide
  Seed: GNEKKAKLANVVRKMMTNSQ
GNEFKAGLSNVSRKMMTNSQ

SEQ ID NO: 186601 - protein, 20 aa, Artificial Sequence
  Description of Artificial Sequence: Synthetic peptide
  Seed: GNEKKAKLANVVRKMMTNSQ
GNEFKAGLSNVTRKMMTNSQ

SEQ ID NO: 186602 - protein, 20 aa, Artificial Sequence
  Description of Artificial Sequence: Synthetic peptide
  Seed: GNEKKAKLANVVRKMMTNSQ
GNEFKAGLSNVVRKMMTNSQ

SEQ ID NO: 186603 - protein, 20 aa, Artificial Sequence
  Description of Artificial Sequence: Synthetic peptide
  Seed: GNEKKAKLANVVRKMMTNSQ
GNEFKAGLTNVARKMMTNSQ

SEQ ID NO: 186604 - protein, 20 aa, Artificial Sequence
  Description of Artificial Sequence: Synthetic peptide
  Seed: GNEKKAKLANVVRKMMTNSQ
GNEFKAGLTNVIRKMMTNSQ

SEQ ID NO: 186605 - protein, 20 aa, Artificial Sequence
  Description of Artificial Sequence: Synthetic peptide
  Seed: GNEKKAKLANVVRKMMTNSQ
GNEFKAGLTNVLRKMMTNSQ

SEQ ID NO: 186606 - protein, 20 aa, Artificial Sequence
  Description of Artificial Sequence: Synthetic peptide
  Seed: GNEKKAKLANVVRKMMTNSQ
GNEFKAGLTNVMRKMMTNSQ

SEQ ID NO: 186607 - protein, 20 aa, Artificial Sequence
  Description of Artificial Sequence: Synthetic peptide
  Seed: GNEKKAKLANVVRKMMTNSQ
GNEFKAGLTNVNRKMMTNSQ

SEQ ID NO: 186608 - protein, 20 aa, Artificial Sequence
  Description of Artificial Sequence: Synthetic peptide
  Seed: GNEKKAKLANVVRKMMTNSQ
GNEFKAGLTNVSRKMMTNSQ

SEQ ID NO: 186609 - protein, 20 aa, Artificial Sequence
  Description of Artificial Sequence: Synthetic peptide
  Seed: GNEKKAKLANVVRKMMTNSQ
GNEFKAGLTNVTRKMMTNSQ

SEQ ID NO: 186610 - protein, 20 aa, Artificial Sequence
  Description of Artificial Sequence: Synthetic peptide
  Seed: GNEKKAKLANVVRKMMTNSQ
GNEFKAGLTNVVRKMMTNSQ

SEQ ID NO: 186611 - protein, 20 aa, Artificial Sequence
  Description of Artificial Sequence: Synthetic peptide
  Seed: GNEKKAKLANVVRKMMTNSQ
GNEFKAGLVNVARKMMTNSQ

SEQ ID NO: 186612 - protein, 20 aa, Artificial Sequence
  Description of Artificial Sequence: Synthetic peptide
  Seed: GNEKKAKLANVVRKMMTNSQ
GNEFKAGLVNVIRKMMTNSQ

SEQ ID NO: 186613 - protein, 20 aa, Artificial Sequence
  Description of Artificial Sequence: Synthetic peptide
  Seed: GNEKKAKLANVVRKMMTNSQ
GNEFKAGLVNVLRKMMTNSQ

SEQ ID NO: 186614 - protein, 20 aa, Artificial Sequence
  Description of Artificial Sequence: Synthetic peptide
  Seed: GNEKKAKLANVVRKMMTNSQ
GNEFKAGLVNVMRKMMTNSQ

SEQ ID NO: 186615 - protein, 20 aa, Artificial Sequence
  Description of Artificial Sequence: Synthetic peptide
  Seed: GNEKKAKLANVVRKMMTNSQ
GNEFKAGLVNVNRKMMTNSQ

SEQ ID NO: 186616 - protein, 20 aa, Artificial Sequence
  Description of Artificial Sequence: Synthetic peptide
  Seed: GNEKKAKLANVVRKMMTNSQ
GNEFKAGLVNVSRKMMTNSQ

SEQ ID NO: 186617 - protein, 20 aa, Artificial Sequence
  Description of Artificial Sequence: Synthetic peptide
  Seed: GNEKKAKLANVVRKMMTNSQ
GNEFKAGLVNVTRKMMTNSQ

SEQ ID NO: 186618 - protein, 20 aa, Artificial Sequence
  Description of Artificial Sequence: Synthetic peptide
  Seed: GNEKKAKLANVVRKMMTNSQ
GNEFKAGLVNVVRKMMTNSQ

SEQ ID NO: 186619 - protein, 20 aa, Artificial Sequence
  Description of Artificial Sequence: Synthetic peptide
  Seed: GNEKKAKLANVVRKMMTNSQ
GNEFKAGLYNVFRKMMTNSQ

SEQ ID NO: 186620 - protein, 20 aa, Artificial Sequence
  Description of Artificial Sequence: Synthetic peptide
  Seed: GNEKKAKLANVVRKMMTNSQ
GNEFKAGLYNVIRKMMTNSQ

SEQ ID NO: 186621 - protein, 20 aa, Artificial Sequence
  Description of Artificial Sequence: Synthetic peptide
  Seed: GNEKKAKLANVVRKMMTNSQ
GNEFKAGLYNVLRKMMTNSQ

SEQ ID NO: 186622 - protein, 20 aa, Artificial Sequence
  Description of Artificial Sequence: Synthetic peptide
  Seed: GNEKKAKLANVVRKMMTNSQ
GNEFKAGLYNVVRKMMTNSQ

SEQ ID NO: 186623 - protein, 20 aa, Artificial Sequence
  Description of Artificial Sequence: Synthetic peptide
  Seed: GNEKKAKLANVVRKMMTNSQ
GNEFKAHLANVARKMMTNSQ

SEQ ID NO: 186624 - protein, 20 aa, Artificial Sequence
  Description of Artificial Sequence: Synthetic peptide
  Seed: GNEKKAKLANVVRKMMTNSQ
GNEFKAHLANVFRKMMTNSQ

SEQ ID NO: 186625 - protein, 20 aa, Artificial Sequence
  Description of Artificial Sequence: Synthetic peptide
  Seed: GNEKKAKLANVVRKMMTNSQ
GNEFKAHLANVIRKMMTNSQ

SEQ ID NO: 186626 - protein, 20 aa, Artificial Sequence
  Description of Artificial Sequence: Synthetic peptide
  Seed: GNEKKAKLANVVRKMMTNSQ
GNEFKAHLANVLRKMMTNSQ

SEQ ID NO: 186627 - protein, 20 aa, Artificial Sequence
  Description of Artificial Sequence: Synthetic peptide
  Seed: GNEKKAKLANVVRKMMTNSQ
GNEFKAHLANVMRKMMTNSQ

SEQ ID NO: 186628 - protein, 20 aa, Artificial Sequence
  Description of Artificial Sequence: Synthetic peptide
  Seed: GNEKKAKLANVVRKMMTNSQ
GNEFKAHLANVNRKMMTNSQ

SEQ ID NO: 186629 - protein, 20 aa, Artificial Sequence
  Description of Artificial Sequence: Synthetic peptide
  Seed: GNEKKAKLANVVRKMMTNSQ
GNEFKAHLANVSRKMMTNSQ

SEQ ID NO: 186630 - protein, 20 aa, Artificial Sequence
  Description of Artificial Sequence: Synthetic peptide
  Seed: GNEKKAKLANVVRKMMTNSQ
GNEFKAHLANVTRKMMTNSQ

SEQ ID NO: 186631 - protein, 20 aa, Artificial Sequence
  Description of Artificial Sequence: Synthetic peptide
  Seed: GNEKKAKLANVVRKMMTNSQ
GNEFKAHLANVVRKMMTNSQ

SEQ ID NO: 186632 - protein, 20 aa, Artificial Sequence
  Description of Artificial Sequence: Synthetic peptide
  Seed: GNEKKAKLANVVRKMMTNSQ
GNEFKAHLFNVARKMMTNSQ

SEQ ID NO: 186633 - protein, 20 aa, Artificial Sequence
  Description of Artificial Sequence: Synthetic peptide
  Seed: GNEKKAKLANVVRKMMTNSQ
GNEFKAHLFNVCRKMMTNSQ

SEQ ID NO: 186634 - protein, 20 aa, Artificial Sequence
  Description of Artificial Sequence: Synthetic peptide
  Seed: GNEKKAKLANVVRKMMTNSQ
GNEFKAHLFNVDRKMMTNSQ

SEQ ID NO: 186635 - protein, 20 aa, Artificial Sequence
  Description of Artificial Sequence: Synthetic peptide
  Seed: GNEKKAKLANVVRKMMTNSQ
GNEFKAHLFNVERKMMTNSQ

SEQ ID NO: 186636 - protein, 20 aa, Artificial Sequence
  Description of Artificial Sequence: Synthetic peptide
  Seed: GNEKKAKLANVVRKMMTNSQ
GNEFKAHLFNVFRKMMTNSQ

SEQ ID NO: 186637 - protein, 20 aa, Artificial Sequence
  Description of Artificial Sequence: Synthetic peptide
  Seed: GNEKKAKLANVVRKMMTNSQ
GNEFKAHLFNVGRKMMTNSQ

SEQ ID NO: 186638 - protein, 20 aa, Artificial Sequence
  Description of Artificial Sequence: Synthetic peptide
  Seed: GNEKKAKLANVVRKMMTNSQ
GNEFKAHLFNVHRKMMTNSQ

SEQ ID NO: 186639 - protein, 20 aa, Artificial Sequence
  Description of Artificial Sequence: Synthetic peptide
  Seed: GNEKKAKLANVVRKMMTNSQ
GNEFKAHLFNVKRKMMTNSQ

SEQ ID NO: 186640 - protein, 20 aa, Artificial Sequence
  Description of Artificial Sequence: Synthetic peptide
  Seed: GNEKKAKLANVVRKMMTNSQ
GNEFKAHLFNVLRKMMTNSQ

SEQ ID NO: 186641 - protein, 20 aa, Artificial Sequence
  Description of Artificial Sequence: Synthetic peptide
  Seed: GNEKKAKLANVVRKMMTNSQ
GNEFKAHLFNVMRKMMTNSQ

SEQ ID NO: 186642 - protein, 20 aa, Artificial Sequence
  Description of Artificial Sequence: Synthetic peptide
  Seed: GNEKKAKLANVVRKMMTNSQ
GNEFKAHLFNVNRKMMTNSQ

SEQ ID NO: 186643 - protein, 20 aa, Artificial Sequence
  Description of Artificial Sequence: Synthetic peptide
  Seed: GNEKKAKLANVVRKMMTNSQ
GNEFKAHLFNVPRKMMTNSQ

SEQ ID NO: 186644 - protein, 20 aa, Artificial Sequence
  Description of Artificial Sequence: Synthetic peptide
  Seed: GNEKKAKLANVVRKMMTNSQ
GNEFKAHLFNVQRKMMTNSQ

SEQ ID NO: 186645 - protein, 20 aa, Artificial Sequence
  Description of Artificial Sequence: Synthetic peptide
  Seed: GNEKKAKLANVVRKMMTNSQ
GNEFKAHLFNVRRKMMTNSQ

SEQ ID NO: 186646 - protein, 20 aa, Artificial Sequence
  Description of Artificial Sequence: Synthetic peptide
  Seed: GNEKKAKLANVVRKMMTNSQ
GNEFKAHLFNVSRKMMTNSQ

SEQ ID NO: 186647 - protein, 20 aa, Artificial Sequence
  Description of Artificial Sequence: Synthetic peptide
  Seed: GNEKKAKLANVVRKMMTNSQ
GNEFKAHLFNVTRKMMTNSQ

SEQ ID NO: 186648 - protein, 20 aa, Artificial Sequence
  Description of Artificial Sequence: Synthetic peptide
  Seed: GNEKKAKLANVVRKMMTNSQ
GNEFKAHLFNVVRKMMTNSQ

SEQ ID NO: 186649 - protein, 20 aa, Artificial Sequence
  Description of Artificial Sequence: Synthetic peptide
  Seed: GNEKKAKLANVVRKMMTNSQ
GNEFKAHLFNVWRKMMTNSQ

SEQ ID NO: 186650 - protein, 20 aa, Artificial Sequence
  Description of Artificial Sequence: Synthetic peptide
  Seed: GNEKKAKLANVVRKMMTNSQ
GNEFKAHLFNVYRKMMTNSQ

SEQ ID NO: 186651 - protein, 20 aa, Artificial Sequence
  Description of Artificial Sequence: Synthetic peptide
  Seed: GNEKKAKLANVVRKMMTNSQ
GNEFKAHLGNVARKMMTNSQ

SEQ ID NO: 186652 - protein, 20 aa, Artificial Sequence
  Description of Artificial Sequence: Synthetic peptide
  Seed: GNEKKAKLANVVRKMMTNSQ
GNEFKAHLGNVIRKMMTNSQ

SEQ ID NO: 186653 - protein, 20 aa, Artificial Sequence
  Description of Artificial Sequence: Synthetic peptide
  Seed: GNEKKAKLANVVRKMMTNSQ
GNEFKAHLGNVLRKMMTNSQ

SEQ ID NO: 186654 - protein, 20 aa, Artificial Sequence
  Description of Artificial Sequence: Synthetic peptide
  Seed: GNEKKAKLANVVRKMMTNSQ
GNEFKAHLGNVMRKMMTNSQ

SEQ ID NO: 186655 - protein, 20 aa, Artificial Sequence
  Description of Artificial Sequence: Synthetic peptide
  Seed: GNEKKAKLANVVRKMMTNSQ
GNEFKAHLGNVVRKMMTNSQ

SEQ ID NO: 186656 - protein, 20 aa, Artificial Sequence
  Description of Artificial Sequence: Synthetic peptide
  Seed: GNEKKAKLANVVRKMMTNSQ
GNEFKAHLINVARKMMTNSQ

SEQ ID NO: 186657 - protein, 20 aa, Artificial Sequence
  Description of Artificial Sequence: Synthetic peptide
  Seed: GNEKKAKLANVVRKMMTNSQ
GNEFKAHLINVFRKMMTNSQ

SEQ ID NO: 186658 - protein, 20 aa, Artificial Sequence
  Description of Artificial Sequence: Synthetic peptide
  Seed: GNEKKAKLANVVRKMMTNSQ
GNEFKAHLINVIRKMMTNSQ

SEQ ID NO: 186659 - protein, 20 aa, Artificial Sequence
  Description of Artificial Sequence: Synthetic peptide
  Seed: GNEKKAKLANVVRKMMTNSQ
GNEFKAHLINVLRKMMTNSQ

SEQ ID NO: 186660 - protein, 20 aa, Artificial Sequence
  Description of Artificial Sequence: Synthetic peptide
  Seed: GNEKKAKLANVVRKMMTNSQ
GNEFKAHLINVMRKMMTNSQ

SEQ ID NO: 186661 - protein, 20 aa, Artificial Sequence
  Description of Artificial Sequence: Synthetic peptide
  Seed: GNEKKAKLANVVRKMMTNSQ
GNEFKAHLINVVRKMMTNSQ

SEQ ID NO: 186662 - protein, 20 aa, Artificial Sequence
  Description of Artificial Sequence: Synthetic peptide
  Seed: GNEKKAKLANVVRKMMTNSQ
GNEFKAHLINVYRKMMTNSQ

SEQ ID NO: 186663 - protein, 20 aa, Artificial Sequence
  Description of Artificial Sequence: Synthetic peptide
  Seed: GNEKKAKLANVVRKMMTNSQ
GNEFKAHLLNVARKMMTNSQ

SEQ ID NO: 186664 - protein, 20 aa, Artificial Sequence
  Description of Artificial Sequence: Synthetic peptide
  Seed: GNEKKAKLANVVRKMMTNSQ
GNEFKAHLLNVDRKMMTNSQ

SEQ ID NO: 186665 - protein, 20 aa, Artificial Sequence
  Description of Artificial Sequence: Synthetic peptide
  Seed: GNEKKAKLANVVRKMMTNSQ
GNEFKAHLLNVERKMMTNSQ

SEQ ID NO: 186666 - protein, 20 aa, Artificial Sequence
  Description of Artificial Sequence: Synthetic peptide
  Seed: GNEKKAKLANVVRKMMTNSQ
GNEFKAHLLNVFRKMMTNSQ

SEQ ID NO: 186667 - protein, 20 aa, Artificial Sequence
  Description of Artificial Sequence: Synthetic peptide
  Seed: GNEKKAKLANVVRKMMTNSQ
GNEFKAHLLNVIRKMMTNSQ

SEQ ID NO: 186668 - protein, 20 aa, Artificial Sequence
  Description of Artificial Sequence: Synthetic peptide
  Seed: GNEKKAKLANVVRKMMTNSQ
GNEFKAHLLNVLRKMMTNSQ

SEQ ID NO: 186669 - protein, 20 aa, Artificial Sequence
  Description of Artificial Sequence: Synthetic peptide
  Seed: GNEKKAKLANVVRKMMTNSQ
GNEFKAHLLNVMRKMMTNSQ

SEQ ID NO: 186670 - protein, 20 aa, Artificial Sequence
  Description of Artificial Sequence: Synthetic peptide
  Seed: GNEKKAKLANVVRKMMTNSQ
GNEFKAHLLNVNRKMMTNSQ

SEQ ID NO: 186671 - protein, 20 aa, Artificial Sequence
  Description of Artificial Sequence: Synthetic peptide
  Seed: GNEKKAKLANVVRKMMTNSQ
GNEFKAHLLNVSRKMMTNSQ

SEQ ID NO: 186672 - protein, 20 aa, Artificial Sequence
  Description of Artificial Sequence: Synthetic peptide
  Seed: GNEKKAKLANVVRKMMTNSQ
GNEFKAHLLNVTRKMMTNSQ

SEQ ID NO: 186673 - protein, 20 aa, Artificial Sequence
  Description of Artificial Sequence: Synthetic peptide
  Seed: GNEKKAKLANVVRKMMTNSQ
GNEFKAHLLNVVRKMMTNSQ

SEQ ID NO: 186674 - protein, 20 aa, Artificial Sequence
  Description of Artificial Sequence: Synthetic peptide
  Seed: GNEKKAKLANVVRKMMTNSQ
GNEFKAHLLNVWRKMMTNSQ

SEQ ID NO: 186675 - protein, 20 aa, Artificial Sequence
  Description of Artificial Sequence: Synthetic peptide
  Seed: GNEKKAKLANVVRKMMTNSQ
GNEFKAHLLNVYRKMMTNSQ

SEQ ID NO: 186676 - protein, 20 aa, Artificial Sequence
  Description of Artificial Sequence: Synthetic peptide
  Seed: GNEKKAKLANVVRKMMTNSQ
GNEFKAHLMNVFRKMMTNSQ

SEQ ID NO: 186677 - protein, 20 aa, Artificial Sequence
  Description of Artificial Sequence: Synthetic peptide
  Seed: GNEKKAKLANVVRKMMTNSQ
GNEFKAHLMNVIRKMMTNSQ

SEQ ID NO: 186678 - protein, 20 aa, Artificial Sequence
  Description of Artificial Sequence: Synthetic peptide
  Seed: GNEKKAKLANVVRKMMTNSQ
GNEFKAHLMNVLRKMMTNSQ

SEQ ID NO: 186679 - protein, 20 aa, Artificial Sequence
  Description of Artificial Sequence: Synthetic peptide
  Seed: GNEKKAKLANVVRKMMTNSQ
GNEFKAHLMNVMRKMMTNSQ

SEQ ID NO: 186680 - protein, 20 aa, Artificial Sequence
  Description of Artificial Sequence: Synthetic peptide
  Seed: GNEKKAKLANVVRKMMTNSQ
GNEFKAHLMNVVRKMMTNSQ

SEQ ID NO: 186681 - protein, 20 aa, Artificial Sequence
  Description of Artificial Sequence: Synthetic peptide
  Seed: GNEKKAKLANVVRKMMTNSQ
GNEFKAHLMNVYRKMMTNSQ

SEQ ID NO: 186682 - protein, 20 aa, Artificial Sequence
  Description of Artificial Sequence: Synthetic peptide
  Seed: GNEKKAKLANVVRKMMTNSQ
GNEFKAHLNNVVRKMMTNSQ

SEQ ID NO: 186683 - protein, 20 aa, Artificial Sequence
  Description of Artificial Sequence: Synthetic peptide
  Seed: GNEKKAKLANVVRKMMTNSQ
GNEFKAHLPNVARKMMTNSQ

SEQ ID NO: 186684 - protein, 20 aa, Artificial Sequence
  Description of Artificial Sequence: Synthetic peptide
  Seed: GNEKKAKLANVVRKMMTNSQ
GNEFKAHLPNVIRKMMTNSQ

SEQ ID NO: 186685 - protein, 20 aa, Artificial Sequence
  Description of Artificial Sequence: Synthetic peptide
  Seed: GNEKKAKLANVVRKMMTNSQ
GNEFKAHLPNVLRKMMTNSQ

SEQ ID NO: 186686 - protein, 20 aa, Artificial Sequence
  Description of Artificial Sequence: Synthetic peptide
  Seed: GNEKKAKLANVVRKMMTNSQ
GNEFKAHLPNVNRKMMTNSQ

SEQ ID NO: 186687 - protein, 20 aa, Artificial Sequence
  Description of Artificial Sequence: Synthetic peptide
  Seed: GNEKKAKLANVVRKMMTNSQ
GNEFKAHLPNVSRKMMTNSQ

SEQ ID NO: 186688 - protein, 20 aa, Artificial Sequence
  Description of Artificial Sequence: Synthetic peptide
  Seed: GNEKKAKLANVVRKMMTNSQ
GNEFKAHLPNVVRKMMTNSQ

SEQ ID NO: 186689 - protein, 20 aa, Artificial Sequence
  Description of Artificial Sequence: Synthetic peptide
  Seed: GNEKKAKLANVVRKMMTNSQ
GNEFKAHLSNVARKMMTNSQ

SEQ ID NO: 186690 - protein, 20 aa, Artificial Sequence
  Description of Artificial Sequence: Synthetic peptide
  Seed: GNEKKAKLANVVRKMMTNSQ
GNEFKAHLSNVIRKMMTNSQ

SEQ ID NO: 186691 - protein, 20 aa, Artificial Sequence
  Description of Artificial Sequence: Synthetic peptide
  Seed: GNEKKAKLANVVRKMMTNSQ
GNEFKAHLSNVLRKMMTNSQ

SEQ ID NO: 186692 - protein, 20 aa, Artificial Sequence
  Description of Artificial Sequence: Synthetic peptide
  Seed: GNEKKAKLANVVRKMMTNSQ
GNEFKAHLSNVMRKMMTNSQ

SEQ ID NO: 186693 - protein, 20 aa, Artificial Sequence
  Description of Artificial Sequence: Synthetic peptide
  Seed: GNEKKAKLANVVRKMMTNSQ
GNEFKAHLSNVNRKMMTNSQ

SEQ ID NO: 186694 - protein, 20 aa, Artificial Sequence
  Description of Artificial Sequence: Synthetic peptide
  Seed: GNEKKAKLANVVRKMMTNSQ
GNEFKAHLSNVVRKMMTNSQ

SEQ ID NO: 186695 - protein, 20 aa, Artificial Sequence
  Description of Artificial Sequence: Synthetic peptide
  Seed: GNEKKAKLANVVRKMMTNSQ
GNEFKAHLTNVARKMMTNSQ

SEQ ID NO: 186696 - protein, 20 aa, Artificial Sequence
  Description of Artificial Sequence: Synthetic peptide
  Seed: GNEKKAKLANVVRKMMTNSQ
GNEFKAHLTNVNRKMMTNSQ

SEQ ID NO: 186697 - protein, 20 aa, Artificial Sequence
  Description of Artificial Sequence: Synthetic peptide
  Seed: GNEKKAKLANVVRKMMTNSQ
GNEFKAHLTNVVRKMMTNSQ

SEQ ID NO: 186698 - protein, 20 aa, Artificial Sequence
  Description of Artificial Sequence: Synthetic peptide
  Seed: GNEKKAKLANVVRKMMTNSQ
GNEFKAHLVNVARKMMTNSQ

SEQ ID NO: 186699 - protein, 20 aa, Artificial Sequence
  Description of Artificial Sequence: Synthetic peptide
  Seed: GNEKKAKLANVVRKMMTNSQ
GNEFKAHLVNVFRKMMTNSQ

SEQ ID NO: 186700 - protein, 20 aa, Artificial Sequence
  Description of Artificial Sequence: Synthetic peptide
  Seed: GNEKKAKLANVVRKMMTNSQ
GNEFKAHLVNVIRKMMTNSQ

SEQ ID NO: 186701 - protein, 20 aa, Artificial Sequence
  Description of Artificial Sequence: Synthetic peptide
  Seed: GNEKKAKLANVVRKMMTNSQ
GNEFKAHLVNVLRKMMTNSQ

SEQ ID NO: 186702 - protein, 20 aa, Artificial Sequence
  Description of Artificial Sequence: Synthetic peptide
  Seed: GNEKKAKLANVVRKMMTNSQ
GNEFKAHLVNVNRKMMTNSQ

SEQ ID NO: 186703 - protein, 20 aa, Artificial Sequence
  Description of Artificial Sequence: Synthetic peptide
  Seed: GNEKKAKLANVVRKMMTNSQ
GNEFKAHLVNVSRKMMTNSQ

SEQ ID NO: 186704 - protein, 20 aa, Artificial Sequence
  Description of Artificial Sequence: Synthetic peptide
  Seed: GNEKKAKLANVVRKMMTNSQ
GNEFKAHLVNVVRKMMTNSQ

SEQ ID NO: 186705 - protein, 20 aa, Artificial Sequence
  Description of Artificial Sequence: Synthetic peptide
  Seed: GNEKKAKLANVVRKMMTNSQ
GNEFKAHLWNVARKMMTNSQ

SEQ ID NO: 186706 - protein, 20 aa, Artificial Sequence
  Description of Artificial Sequence: Synthetic peptide
  Seed: GNEKKAKLANVVRKMMTNSQ
GNEFKAHLWNVERKMMTNSQ

SEQ ID NO: 186707 - protein, 20 aa, Artificial Sequence
  Description of Artificial Sequence: Synthetic peptide
  Seed: GNEKKAKLANVVRKMMTNSQ
GNEFKAHLWNVFRKMMTNSQ

SEQ ID NO: 186708 - protein, 20 aa, Artificial Sequence
  Description of Artificial Sequence: Synthetic peptide
  Seed: GNEKKAKLANVVRKMMTNSQ
GNEFKAHLWNVIRKMMTNSQ

SEQ ID NO: 186709 - protein, 20 aa, Artificial Sequence
  Description of Artificial Sequence: Synthetic peptide
  Seed: GNEKKAKLANVVRKMMTNSQ
GNEFKAHLWNVLRKMMTNSQ

SEQ ID NO: 186710 - protein, 20 aa, Artificial Sequence
  Description of Artificial Sequence: Synthetic peptide
  Seed: GNEKKAKLANVVRKMMTNSQ
GNEFKAHLWNVMRKMMTNSQ

SEQ ID NO: 186711 - protein, 20 aa, Artificial Sequence
  Description of Artificial Sequence: Synthetic peptide
  Seed: GNEKKAKLANVVRKMMTNSQ
GNEFKAHLWNVNRKMMTNSQ

SEQ ID NO: 186712 - protein, 20 aa, Artificial Sequence
  Description of Artificial Sequence: Synthetic peptide
  Seed: GNEKKAKLANVVRKMMTNSQ
GNEFKAHLWNVSRKMMTNSQ

SEQ ID NO: 186713 - protein, 20 aa, Artificial Sequence
  Description of Artificial Sequence: Synthetic peptide
  Seed: GNEKKAKLANVVRKMMTNSQ
GNEFKAHLWNVTRKMMTNSQ

SEQ ID NO: 186714 - protein, 20 aa, Artificial Sequence
  Description of Artificial Sequence: Synthetic peptide
  Seed: GNEKKAKLANVVRKMMTNSQ
GNEFKAHLWNVVRKMMTNSQ

SEQ ID NO: 186715 - protein, 20 aa, Artificial Sequence
  Description of Artificial Sequence: Synthetic peptide
  Seed: GNEKKAKLANVVRKMMTNSQ
GNEFKAHLWNVYRKMMTNSQ

SEQ ID NO: 186716 - protein, 20 aa, Artificial Sequence
  Description of Artificial Sequence: Synthetic peptide
  Seed: GNEKKAKLANVVRKMMTNSQ
GNEFKAHLYNVARKMMTNSQ

SEQ ID NO: 186717 - protein, 20 aa, Artificial Sequence
  Description of Artificial Sequence: Synthetic peptide
  Seed: GNEKKAKLANVVRKMMTNSQ
GNEFKAHLYNVERKMMTNSQ

SEQ ID NO: 186718 - protein, 20 aa, Artificial Sequence
  Description of Artificial Sequence: Synthetic peptide
  Seed: GNEKKAKLANVVRKMMTNSQ
GNEFKAHLYNVFRKMMTNSQ

SEQ ID NO: 186719 - protein, 20 aa, Artificial Sequence
  Description of Artificial Sequence: Synthetic peptide
  Seed: GNEKKAKLANVVRKMMTNSQ
GNEFKAHLYNVIRKMMTNSQ

SEQ ID NO: 186720 - protein, 20 aa, Artificial Sequence
  Description of Artificial Sequence: Synthetic peptide
  Seed: GNEKKAKLANVVRKMMTNSQ
GNEFKAHLYNVLRKMMTNSQ

SEQ ID NO: 186721 - protein, 20 aa, Artificial Sequence
  Description of Artificial Sequence: Synthetic peptide
  Seed: GNEKKAKLANVVRKMMTNSQ
GNEFKAHLYNVMRKMMTNSQ

SEQ ID NO: 186722 - protein, 20 aa, Artificial Sequence
  Description of Artificial Sequence: Synthetic peptide
  Seed: GNEKKAKLANVVRKMMTNSQ
GNEFKAHLYNVNRKMMTNSQ

SEQ ID NO: 186723 - protein, 20 aa, Artificial Sequence
  Description of Artificial Sequence: Synthetic peptide
  Seed: GNEKKAKLANVVRKMMTNSQ
GNEFKAHLYNVSRKMMTNSQ

SEQ ID NO: 186724 - protein, 20 aa, Artificial Sequence
  Description of Artificial Sequence: Synthetic peptide
  Seed: GNEKKAKLANVVRKMMTNSQ
GNEFKAHLYNVTRKMMTNSQ

SEQ ID NO: 186725 - protein, 20 aa, Artificial Sequence
  Description of Artificial Sequence: Synthetic peptide
  Seed: GNEKKAKLANVVRKMMTNSQ
GNEFKAHLYNVVRKMMTNSQ

SEQ ID NO: 186726 - protein, 20 aa, Artificial Sequence
  Description of Artificial Sequence: Synthetic peptide
  Seed: GNEKKAKLANVVRKMMTNSQ
GNEFKAHLYNVWRKMMTNSQ

SEQ ID NO: 186727 - protein, 20 aa, Artificial Sequence
  Description of Artificial Sequence: Synthetic peptide
  Seed: GNEKKAKLANVVRKMMTNSQ
GNEFKAHLYNVYRKMMTNSQ

SEQ ID NO: 186728 - protein, 20 aa, Artificial Sequence
  Description of Artificial Sequence: Synthetic peptide
  Seed: GNEKKAKLANVVRKMMTNSQ
GNEFKAILANVARKMMTNSQ

SEQ ID NO: 186729 - protein, 20 aa, Artificial Sequence
  Description of Artificial Sequence: Synthetic peptide
  Seed: GNEKKAKLANVVRKMMTNSQ
GNEFKAILANVCRKMMTNSQ

SEQ ID NO: 186730 - protein, 20 aa, Artificial Sequence
  Description of Artificial Sequence: Synthetic peptide
  Seed: GNEKKAKLANVVRKMMTNSQ
GNEFKAILANVDRKMMTNSQ

SEQ ID NO: 186731 - protein, 20 aa, Artificial Sequence
  Description of Artificial Sequence: Synthetic peptide
  Seed: GNEKKAKLANVVRKMMTNSQ
GNEFKAILANVERKMMTNSQ

SEQ ID NO: 186732 - protein, 20 aa, Artificial Sequence
  Description of Artificial Sequence: Synthetic peptide
  Seed: GNEKKAKLANVVRKMMTNSQ
GNEFKAILANVFRKMMTNSQ

SEQ ID NO: 186733 - protein, 20 aa, Artificial Sequence
  Description of Artificial Sequence: Synthetic peptide
  Seed: GNEKKAKLANVVRKMMTNSQ
GNEFKAILANVGRKMMTNSQ

SEQ ID NO: 186734 - protein, 20 aa, Artificial Sequence
  Description of Artificial Sequence: Synthetic peptide
  Seed: GNEKKAKLANVVRKMMTNSQ
GNEFKAILANVHRKMMTNSQ

SEQ ID NO: 186735 - protein, 20 aa, Artificial Sequence
  Description of Artificial Sequence: Synthetic peptide
  Seed: GNEKKAKLANVVRKMMTNSQ
GNEFKAILANVIRKMMTNSQ

SEQ ID NO: 186736 - protein, 20 aa, Artificial Sequence
  Description of Artificial Sequence: Synthetic peptide
  Seed: GNEKKAKLANVVRKMMTNSQ
GNEFKAILANVKRKMMTNSQ

SEQ ID NO: 186737 - protein, 20 aa, Artificial Sequence
  Description of Artificial Sequence: Synthetic peptide
  Seed: GNEKKAKLANVVRKMMTNSQ
GNEFKAILANVLRKMMTNSQ

SEQ ID NO: 186738 - protein, 20 aa, Artificial Sequence
  Description of Artificial Sequence: Synthetic peptide
  Seed: GNEKKAKLANVVRKMMTNSQ
GNEFKAILANVMRKMMTNSQ

SEQ ID NO: 186739 - protein, 20 aa, Artificial Sequence
  Description of Artificial Sequence: Synthetic peptide
  Seed: GNEKKAKLANVVRKMMTNSQ
GNEFKAILANVNRKMMTNSQ

SEQ ID NO: 186740 - protein, 20 aa, Artificial Sequence
  Description of Artificial Sequence: Synthetic peptide
  Seed: GNEKKAKLANVVRKMMTNSQ
GNEFKAILANVPRKMMTNSQ

SEQ ID NO: 186741 - protein, 20 aa, Artificial Sequence
  Description of Artificial Sequence: Synthetic peptide
  Seed: GNEKKAKLANVVRKMMTNSQ
GNEFKAILANVQRKMMTNSQ

SEQ ID NO: 186742 - protein, 20 aa, Artificial Sequence
  Description of Artificial Sequence: Synthetic peptide
  Seed: GNEKKAKLANVVRKMMTNSQ
GNEFKAILANVRRKMMTNSQ

SEQ ID NO: 186743 - protein, 20 aa, Artificial Sequence
  Description of Artificial Sequence: Synthetic peptide
  Seed: GNEKKAKLANVVRKMMTNSQ
GNEFKAILANVSRKMMTNSQ

SEQ ID NO: 186744 - protein, 20 aa, Artificial Sequence
  Description of Artificial Sequence: Synthetic peptide
  Seed: GNEKKAKLANVVRKMMTNSQ
GNEFKAILANVTRKMMTNSQ

SEQ ID NO: 186745 - protein, 20 aa, Artificial Sequence
  Description of Artificial Sequence: Synthetic peptide
  Seed: GNEKKAKLANVVRKMMTNSQ
GNEFKAILANVVRKMMTNSQ

SEQ ID NO: 186746 - protein, 20 aa, Artificial Sequence
  Description of Artificial Sequence: Synthetic peptide
  Seed: GNEKKAKLANVVRKMMTNSQ
GNEFKAILANVYRKMMTNSQ

SEQ ID NO: 186747 - protein, 20 aa, Artificial Sequence
  Description of Artificial Sequence: Synthetic peptide
  Seed: GNEKKAKLANVVRKMMTNSQ
GNEFKAILCNVARKMMTNSQ

SEQ ID NO: 186748 - protein, 20 aa, Artificial Sequence
  Description of Artificial Sequence: Synthetic peptide
  Seed: GNEKKAKLANVVRKMMTNSQ
GNEFKAILCNVNRKMMTNSQ

SEQ ID NO: 186749 - protein, 20 aa, Artificial Sequence
  Description of Artificial Sequence: Synthetic peptide
  Seed: GNEKKAKLANVVRKMMTNSQ
GNEFKAILCNVSRKMMTNSQ

SEQ ID NO: 186750 - protein, 20 aa, Artificial Sequence
  Description of Artificial Sequence: Synthetic peptide
  Seed: GNEKKAKLANVVRKMMTNSQ
GNEFKAILDNVARKMMTNSQ

SEQ ID NO: 186751 - protein, 20 aa, Artificial Sequence
  Description of Artificial Sequence: Synthetic peptide
  Seed: GNEKKAKLANVVRKMMTNSQ
GNEFKAILDNVNRKMMTNSQ

SEQ ID NO: 186752 - protein, 20 aa, Artificial Sequence
  Description of Artificial Sequence: Synthetic peptide
  Seed: GNEKKAKLANVVRKMMTNSQ
GNEFKAILDNVSRKMMTNSQ

SEQ ID NO: 186753 - protein, 20 aa, Artificial Sequence
  Description of Artificial Sequence: Synthetic peptide
  Seed: GNEKKAKLANVVRKMMTNSQ
GNEFKAILDNVTRKMMTNSQ

SEQ ID NO: 186754 - protein, 20 aa, Artificial Sequence
  Description of Artificial Sequence: Synthetic peptide
  Seed: GNEKKAKLANVVRKMMTNSQ
GNEFKAILDNVVRKMMTNSQ

SEQ ID NO: 186755 - protein, 20 aa, Artificial Sequence
  Description of Artificial Sequence: Synthetic peptide
  Seed: GNEKKAKLANVVRKMMTNSQ
GNEFKAILENVARKMMTNSQ

SEQ ID NO: 186756 - protein, 20 aa, Artificial Sequence
  Description of Artificial Sequence: Synthetic peptide
  Seed: GNEKKAKLANVVRKMMTNSQ
GNEFKAILENVNRKMMTNSQ

SEQ ID NO: 186757 - protein, 20 aa, Artificial Sequence
  Description of Artificial Sequence: Synthetic peptide
  Seed: GNEKKAKLANVVRKMMTNSQ
GNEFKAILENVSRKMMTNSQ

SEQ ID NO: 186758 - protein, 20 aa, Artificial Sequence
  Description of Artificial Sequence: Synthetic peptide
  Seed: GNEKKAKLANVVRKMMTNSQ
GNEFKAILENVTRKMMTNSQ

SEQ ID NO: 186759 - protein, 20 aa, Artificial Sequence
  Description of Artificial Sequence: Synthetic peptide
  Seed: GNEKKAKLANVVRKMMTNSQ
GNEFKAILENVVRKMMTNSQ

SEQ ID NO: 186760 - protein, 20 aa, Artificial Sequence
  Description of Artificial Sequence: Synthetic peptide
  Seed: GNEKKAKLANVVRKMMTNSQ
GNEFKAILFNVARKMMTNSQ

SEQ ID NO: 186761 - protein, 20 aa, Artificial Sequence
  Description of Artificial Sequence: Synthetic peptide
  Seed: GNEKKAKLANVVRKMMTNSQ
GNEFKAILFNVDRKMMTNSQ

SEQ ID NO: 186762 - protein, 20 aa, Artificial Sequence
  Description of Artificial Sequence: Synthetic peptide
  Seed: GNEKKAKLANVVRKMMTNSQ
GNEFKAILFNVERKMMTNSQ

SEQ ID NO: 186763 - protein, 20 aa, Artificial Sequence
  Description of Artificial Sequence: Synthetic peptide
  Seed: GNEKKAKLANVVRKMMTNSQ
GNEFKAILFNVFRKMMTNSQ

SEQ ID NO: 186764 - protein, 20 aa, Artificial Sequence
  Description of Artificial Sequence: Synthetic peptide
  Seed: GNEKKAKLANVVRKMMTNSQ
GNEFKAILFNVGRKMMTNSQ

SEQ ID NO: 186765 - protein, 20 aa, Artificial Sequence
  Description of Artificial Sequence: Synthetic peptide
  Seed: GNEKKAKLANVVRKMMTNSQ
GNEFKAILFNVHRKMMTNSQ

SEQ ID NO: 186766 - protein, 20 aa, Artificial Sequence
  Description of Artificial Sequence: Synthetic peptide
  Seed: GNEKKAKLANVVRKMMTNSQ
GNEFKAILFNVIRKMMTNSQ

SEQ ID NO: 186767 - protein, 20 aa, Artificial Sequence
  Description of Artificial Sequence: Synthetic peptide
  Seed: GNEKKAKLANVVRKMMTNSQ
GNEFKAILFNVKRKMMTNSQ

SEQ ID NO: 186768 - protein, 20 aa, Artificial Sequence
  Description of Artificial Sequence: Synthetic peptide
  Seed: GNEKKAKLANVVRKMMTNSQ
GNEFKAILFNVLRKMMTNSQ

SEQ ID NO: 186769 - protein, 20 aa, Artificial Sequence
  Description of Artificial Sequence: Synthetic peptide
  Seed: GNEKKAKLANVVRKMMTNSQ
GNEFKAILFNVMRKMMTNSQ

SEQ ID NO: 186770 - protein, 20 aa, Artificial Sequence
  Description of Artificial Sequence: Synthetic peptide
  Seed: GNEKKAKLANVVRKMMTNSQ
GNEFKAILFNVNRKMMTNSQ

SEQ ID NO: 186771 - protein, 20 aa, Artificial Sequence
  Description of Artificial Sequence: Synthetic peptide
  Seed: GNEKKAKLANVVRKMMTNSQ
GNEFKAILFNVPRKMMTNSQ

SEQ ID NO: 186772 - protein, 20 aa, Artificial Sequence
  Description of Artificial Sequence: Synthetic peptide
  Seed: GNEKKAKLANVVRKMMTNSQ
GNEFKAILFNVQRKMMTNSQ

SEQ ID NO: 186773 - protein, 20 aa, Artificial Sequence
  Description of Artificial Sequence: Synthetic peptide
  Seed: GNEKKAKLANVVRKMMTNSQ
GNEFKAILFNVRRKMMTNSQ

SEQ ID NO: 186774 - protein, 20 aa, Artificial Sequence
  Description of Artificial Sequence: Synthetic peptide
  Seed: GNEKKAKLANVVRKMMTNSQ
GNEFKAILFNVSRKMMTNSQ

SEQ ID NO: 186775 - protein, 20 aa, Artificial Sequence
  Description of Artificial Sequence: Synthetic peptide
  Seed: GNEKKAKLANVVRKMMTNSQ
GNEFKAILFNVTRKMMTNSQ

SEQ ID NO: 186776 - protein, 20 aa, Artificial Sequence
  Description of Artificial Sequence: Synthetic peptide
  Seed: GNEKKAKLANVVRKMMTNSQ
GNEFKAILFNVVRKMMTNSQ

SEQ ID NO: 186777 - protein, 20 aa, Artificial Sequence
  Description of Artificial Sequence: Synthetic peptide
  Seed: GNEKKAKLANVVRKMMTNSQ
GNEFKAILFNVYRKMMTNSQ

SEQ ID NO: 186778 - protein, 20 aa, Artificial Sequence
  Description of Artificial Sequence: Synthetic peptide
  Seed: GNEKKAKLANVVRKMMTNSQ
GNEFKAILGNVARKMMTNSQ

SEQ ID NO: 186779 - protein, 20 aa, Artificial Sequence
  Description of Artificial Sequence: Synthetic peptide
  Seed: GNEKKAKLANVVRKMMTNSQ
GNEFKAILGNVCRKMMTNSQ

SEQ ID NO: 186780 - protein, 20 aa, Artificial Sequence
  Description of Artificial Sequence: Synthetic peptide
  Seed: GNEKKAKLANVVRKMMTNSQ
GNEFKAILGNVDRKMMTNSQ

SEQ ID NO: 186781 - protein, 20 aa, Artificial Sequence
  Description of Artificial Sequence: Synthetic peptide
  Seed: GNEKKAKLANVVRKMMTNSQ
GNEFKAILGNVERKMMTNSQ

SEQ ID NO: 186782 - protein, 20 aa, Artificial Sequence
  Description of Artificial Sequence: Synthetic peptide
  Seed: GNEKKAKLANVVRKMMTNSQ
GNEFKAILGNVFRKMMTNSQ

SEQ ID NO: 186783 - protein, 20 aa, Artificial Sequence
  Description of Artificial Sequence: Synthetic peptide
  Seed: GNEKKAKLANVVRKMMTNSQ
GNEFKAILGNVGRKMMTNSQ

SEQ ID NO: 186784 - protein, 20 aa, Artificial Sequence
  Description of Artificial Sequence: Synthetic peptide
  Seed: GNEKKAKLANVVRKMMTNSQ
GNEFKAILGNVHRKMMTNSQ

SEQ ID NO: 186785 - protein, 20 aa, Artificial Sequence
  Description of Artificial Sequence: Synthetic peptide
  Seed: GNEKKAKLANVVRKMMTNSQ
GNEFKAILGNVIRKMMTNSQ

SEQ ID NO: 186786 - protein, 20 aa, Artificial Sequence
  Description of Artificial Sequence: Synthetic peptide
  Seed: GNEKKAKLANVVRKMMTNSQ
GNEFKAILGNVLRKMMTNSQ

SEQ ID NO: 186787 - protein, 20 aa, Artificial Sequence
  Description of Artificial Sequence: Synthetic peptide
  Seed: GNEKKAKLANVVRKMMTNSQ
GNEFKAILGNVMRKMMTNSQ

SEQ ID NO: 186788 - protein, 20 aa, Artificial Sequence
  Description of Artificial Sequence: Synthetic peptide
  Seed: GNEKKAKLANVVRKMMTNSQ
GNEFKAILGNVNRKMMTNSQ

SEQ ID NO: 186789 - protein, 20 aa, Artificial Sequence
  Description of Artificial Sequence: Synthetic peptide
  Seed: GNEKKAKLANVVRKMMTNSQ
GNEFKAILGNVPRKMMTNSQ

SEQ ID NO: 186790 - protein, 20 aa, Artificial Sequence
  Description of Artificial Sequence: Synthetic peptide
  Seed: GNEKKAKLANVVRKMMTNSQ
GNEFKAILGNVQRKMMTNSQ

SEQ ID NO: 186791 - protein, 20 aa, Artificial Sequence
  Description of Artificial Sequence: Synthetic peptide
  Seed: GNEKKAKLANVVRKMMTNSQ
GNEFKAILGNVSRKMMTNSQ

SEQ ID NO: 186792 - protein, 20 aa, Artificial Sequence
  Description of Artificial Sequence: Synthetic peptide
  Seed: GNEKKAKLANVVRKMMTNSQ
GNEFKAILGNVTRKMMTNSQ

SEQ ID NO: 186793 - protein, 20 aa, Artificial Sequence
  Description of Artificial Sequence: Synthetic peptide
  Seed: GNEKKAKLANVVRKMMTNSQ
GNEFKAILGNVVRKMMTNSQ

SEQ ID NO: 186794 - protein, 20 aa, Artificial Sequence
  Description of Artificial Sequence: Synthetic peptide
  Seed: GNEKKAKLANVVRKMMTNSQ
GNEFKAILGNVYRKMMTNSQ

SEQ ID NO: 186795 - protein, 20 aa, Artificial Sequence
  Description of Artificial Sequence: Synthetic peptide
  Seed: GNEKKAKLANVVRKMMTNSQ
GNEFKAILHNVARKMMTNSQ

SEQ ID NO: 186796 - protein, 20 aa, Artificial Sequence
  Description of Artificial Sequence: Synthetic peptide
  Seed: GNEKKAKLANVVRKMMTNSQ
GNEFKAILHNVIRKMMTNSQ

SEQ ID NO: 186797 - protein, 20 aa, Artificial Sequence
  Description of Artificial Sequence: Synthetic peptide
  Seed: GNEKKAKLANVVRKMMTNSQ
GNEFKAILHNVLRKMMTNSQ

SEQ ID NO: 186798 - protein, 20 aa, Artificial Sequence
  Description of Artificial Sequence: Synthetic peptide
  Seed: GNEKKAKLANVVRKMMTNSQ
GNEFKAILHNVNRKMMTNSQ

SEQ ID NO: 186799 - protein, 20 aa, Artificial Sequence
  Description of Artificial Sequence: Synthetic peptide
  Seed: GNEKKAKLANVVRKMMTNSQ
GNEFKAILHNVSRKMMTNSQ

SEQ ID NO: 186800 - protein, 20 aa, Artificial Sequence
  Description of Artificial Sequence: Synthetic peptide
  Seed: GNEKKAKLANVVRKMMTNSQ
GNEFKAILHNVTRKMMTNSQ

SEQ ID NO: 186801 - protein, 20 aa, Artificial Sequence
  Description of Artificial Sequence: Synthetic peptide
  Seed: GNEKKAKLANVVRKMMTNSQ
GNEFKAILHNVVRKMMTNSQ

SEQ ID NO: 186802 - protein, 20 aa, Artificial Sequence
  Description of Artificial Sequence: Synthetic peptide
  Seed: GNEKKAKLANVVRKMMTNSQ
GNEFKAILINVARKMMTNSQ

SEQ ID NO: 186803 - protein, 20 aa, Artificial Sequence
  Description of Artificial Sequence: Synthetic peptide
  Seed: GNEKKAKLANVVRKMMTNSQ
GNEFKAILINVDRKMMTNSQ

SEQ ID NO: 186804 - protein, 20 aa, Artificial Sequence
  Description of Artificial Sequence: Synthetic peptide
  Seed: GNEKKAKLANVVRKMMTNSQ
GNEFKAILINVERKMMTNSQ

SEQ ID NO: 186805 - protein, 20 aa, Artificial Sequence
  Description of Artificial Sequence: Synthetic peptide
  Seed: GNEKKAKLANVVRKMMTNSQ
GNEFKAILINVGRKMMTNSQ

SEQ ID NO: 186806 - protein, 20 aa, Artificial Sequence
  Description of Artificial Sequence: Synthetic peptide
  Seed: GNEKKAKLANVVRKMMTNSQ
GNEFKAILINVHRKMMTNSQ

SEQ ID NO: 186807 - protein, 20 aa, Artificial Sequence
  Description of Artificial Sequence: Synthetic peptide
  Seed: GNEKKAKLANVVRKMMTNSQ
GNEFKAILINVIRKMMTNSQ

SEQ ID NO: 186808 - protein, 20 aa, Artificial Sequence
  Description of Artificial Sequence: Synthetic peptide
  Seed: GNEKKAKLANVVRKMMTNSQ
GNEFKAILINVKRKMMTNSQ

SEQ ID NO: 186809 - protein, 20 aa, Artificial Sequence
  Description of Artificial Sequence: Synthetic peptide
  Seed: GNEKKAKLANVVRKMMTNSQ
GNEFKAILINVLRKMMTNSQ

SEQ ID NO: 186810 - protein, 20 aa, Artificial Sequence
  Description of Artificial Sequence: Synthetic peptide
  Seed: GNEKKAKLANVVRKMMTNSQ
GNEFKAILINVMRKMMTNSQ

SEQ ID NO: 186811 - protein, 20 aa, Artificial Sequence
  Description of Artificial Sequence: Synthetic peptide
  Seed: GNEKKAKLANVVRKMMTNSQ
GNEFKAILINVNRKMMTNSQ

SEQ ID NO: 186812 - protein, 20 aa, Artificial Sequence
  Description of Artificial Sequence: Synthetic peptide
  Seed: GNEKKAKLANVVRKMMTNSQ
GNEFKAILINVPRKMMTNSQ

SEQ ID NO: 186813 - protein, 20 aa, Artificial Sequence
  Description of Artificial Sequence: Synthetic peptide
  Seed: GNEKKAKLANVVRKMMTNSQ
GNEFKAILINVQRKMMTNSQ

SEQ ID NO: 186814 - protein, 20 aa, Artificial Sequence
  Description of Artificial Sequence: Synthetic peptide
  Seed: GNEKKAKLANVVRKMMTNSQ
GNEFKAILINVSRKMMTNSQ

SEQ ID NO: 186815 - protein, 20 aa, Artificial Sequence
  Description of Artificial Sequence: Synthetic peptide
  Seed: GNEKKAKLANVVRKMMTNSQ
GNEFKAILINVTRKMMTNSQ

SEQ ID NO: 186816 - protein, 20 aa, Artificial Sequence
  Description of Artificial Sequence: Synthetic peptide
  Seed: GNEKKAKLANVVRKMMTNSQ
GNEFKAILINVVRKMMTNSQ

SEQ ID NO: 186817 - protein, 20 aa, Artificial Sequence
  Description of Artificial Sequence: Synthetic peptide
  Seed: GNEKKAKLANVVRKMMTNSQ
GNEFKAILINVYRKMMTNSQ

SEQ ID NO: 186818 - protein, 20 aa, Artificial Sequence
  Description of Artificial Sequence: Synthetic peptide
  Seed: GNEKKAKLANVVRKMMTNSQ
GNEFKAILLNVARKMMTNSQ

SEQ ID NO: 186819 - protein, 20 aa, Artificial Sequence
  Description of Artificial Sequence: Synthetic peptide
  Seed: GNEKKAKLANVVRKMMTNSQ
GNEFKAILLNVDRKMMTNSQ

SEQ ID NO: 186820 - protein, 20 aa, Artificial Sequence
  Description of Artificial Sequence: Synthetic peptide
  Seed: GNEKKAKLANVVRKMMTNSQ
GNEFKAILLNVERKMMTNSQ

SEQ ID NO: 186821 - protein, 20 aa, Artificial Sequence
  Description of Artificial Sequence: Synthetic peptide
  Seed: GNEKKAKLANVVRKMMTNSQ
GNEFKAILLNVGRKMMTNSQ

SEQ ID NO: 186822 - protein, 20 aa, Artificial Sequence
  Description of Artificial Sequence: Synthetic peptide
  Seed: GNEKKAKLANVVRKMMTNSQ
GNEFKAILLNVHRKMMTNSQ

SEQ ID NO: 186823 - protein, 20 aa, Artificial Sequence
  Description of Artificial Sequence: Synthetic peptide
  Seed: GNEKKAKLANVVRKMMTNSQ
GNEFKAILLNVIRKMMTNSQ

SEQ ID NO: 186824 - protein, 20 aa, Artificial Sequence
  Description of Artificial Sequence: Synthetic peptide
  Seed: GNEKKAKLANVVRKMMTNSQ
GNEFKAILLNVLRKMMTNSQ

SEQ ID NO: 186825 - protein, 20 aa, Artificial Sequence
  Description of Artificial Sequence: Synthetic peptide
  Seed: GNEKKAKLANVVRKMMTNSQ
GNEFKAILLNVMRKMMTNSQ

SEQ ID NO: 186826 - protein, 20 aa, Artificial Sequence
  Description of Artificial Sequence: Synthetic peptide
  Seed: GNEKKAKLANVVRKMMTNSQ
GNEFKAILLNVNRKMMTNSQ

SEQ ID NO: 186827 - protein, 20 aa, Artificial Sequence
  Description of Artificial Sequence: Synthetic peptide
  Seed: GNEKKAKLANVVRKMMTNSQ
GNEFKAILLNVSRKMMTNSQ

SEQ ID NO: 186828 - protein, 20 aa, Artificial Sequence
  Description of Artificial Sequence: Synthetic peptide
  Seed: GNEKKAKLANVVRKMMTNSQ
GNEFKAILLNVTRKMMTNSQ

SEQ ID NO: 186829 - protein, 20 aa, Artificial Sequence
  Description of Artificial Sequence: Synthetic peptide
  Seed: GNEKKAKLANVVRKMMTNSQ
GNEFKAILLNVVRKMMTNSQ

SEQ ID NO: 186830 - protein, 20 aa, Artificial Sequence
  Description of Artificial Sequence: Synthetic peptide
  Seed: GNEKKAKLANVVRKMMTNSQ
GNEFKAILLNVYRKMMTNSQ

SEQ ID NO: 186831 - protein, 20 aa, Artificial Sequence
  Description of Artificial Sequence: Synthetic peptide
  Seed: GNEKKAKLANVVRKMMTNSQ
GNEFKAILMNVARKMMTNSQ

SEQ ID NO: 186832 - protein, 20 aa, Artificial Sequence
  Description of Artificial Sequence: Synthetic peptide
  Seed: GNEKKAKLANVVRKMMTNSQ
GNEFKAILMNVGRKMMTNSQ

SEQ ID NO: 186833 - protein, 20 aa, Artificial Sequence
  Description of Artificial Sequence: Synthetic peptide
  Seed: GNEKKAKLANVVRKMMTNSQ
GNEFKAILMNVHRKMMTNSQ

SEQ ID NO: 186834 - protein, 20 aa, Artificial Sequence
  Description of Artificial Sequence: Synthetic peptide
  Seed: GNEKKAKLANVVRKMMTNSQ
GNEFKAILMNVIRKMMTNSQ

SEQ ID NO: 186835 - protein, 20 aa, Artificial Sequence
  Description of Artificial Sequence: Synthetic peptide
  Seed: GNEKKAKLANVVRKMMTNSQ
GNEFKAILMNVLRKMMTNSQ

SEQ ID NO: 186836 - protein, 20 aa, Artificial Sequence
  Description of Artificial Sequence: Synthetic peptide
  Seed: GNEKKAKLANVVRKMMTNSQ
GNEFKAILMNVMRKMMTNSQ

SEQ ID NO: 186837 - protein, 20 aa, Artificial Sequence
  Description of Artificial Sequence: Synthetic peptide
  Seed: GNEKKAKLANVVRKMMTNSQ
GNEFKAILMNVNRKMMTNSQ

SEQ ID NO: 186838 - protein, 20 aa, Artificial Sequence
  Description of Artificial Sequence: Synthetic peptide
  Seed: GNEKKAKLANVVRKMMTNSQ
GNEFKAILMNVSRKMMTNSQ

SEQ ID NO: 186839 - protein, 20 aa, Artificial Sequence
  Description of Artificial Sequence: Synthetic peptide
  Seed: GNEKKAKLANVVRKMMTNSQ
GNEFKAILMNVTRKMMTNSQ

SEQ ID NO: 186840 - protein, 20 aa, Artificial Sequence
  Description of Artificial Sequence: Synthetic peptide
  Seed: GNEKKAKLANVVRKMMTNSQ
GNEFKAILMNVVRKMMTNSQ

SEQ ID NO: 186841 - protein, 20 aa, Artificial Sequence
  Description of Artificial Sequence: Synthetic peptide
  Seed: GNEKKAKLANVVRKMMTNSQ
GNEFKAILNNVARKMMTNSQ

SEQ ID NO: 186842 - protein, 20 aa, Artificial Sequence
  Description of Artificial Sequence: Synthetic peptide
  Seed: GNEKKAKLANVVRKMMTNSQ
GNEFKAILNNVCRKMMTNSQ

SEQ ID NO: 186843 - protein, 20 aa, Artificial Sequence
  Description of Artificial Sequence: Synthetic peptide
  Seed: GNEKKAKLANVVRKMMTNSQ
GNEFKAILNNVDRKMMTNSQ

SEQ ID NO: 186844 - protein, 20 aa, Artificial Sequence
  Description of Artificial Sequence: Synthetic peptide
  Seed: GNEKKAKLANVVRKMMTNSQ
GNEFKAILNNVERKMMTNSQ

SEQ ID NO: 186845 - protein, 20 aa, Artificial Sequence
  Description of Artificial Sequence: Synthetic peptide
  Seed: GNEKKAKLANVVRKMMTNSQ
GNEFKAILNNVFRKMMTNSQ

SEQ ID NO: 186846 - protein, 20 aa, Artificial Sequence
  Description of Artificial Sequence: Synthetic peptide
  Seed: GNEKKAKLANVVRKMMTNSQ
GNEFKAILNNVGRKMMTNSQ

SEQ ID NO: 186847 - protein, 20 aa, Artificial Sequence
  Description of Artificial Sequence: Synthetic peptide
  Seed: GNEKKAKLANVVRKMMTNSQ
GNEFKAILNNVHRKMMTNSQ

SEQ ID NO: 186848 - protein, 20 aa, Artificial Sequence
  Description of Artificial Sequence: Synthetic peptide
  Seed: GNEKKAKLANVVRKMMTNSQ
GNEFKAILNNVIRKMMTNSQ

SEQ ID NO: 186849 - protein, 20 aa, Artificial Sequence
  Description of Artificial Sequence: Synthetic peptide
  Seed: GNEKKAKLANVVRKMMTNSQ
GNEFKAILNNVLRKMMTNSQ

SEQ ID NO: 186850 - protein, 20 aa, Artificial Sequence
  Description of Artificial Sequence: Synthetic peptide
  Seed: GNEKKAKLANVVRKMMTNSQ
GNEFKAILNNVMRKMMTNSQ

SEQ ID NO: 186851 - protein, 20 aa, Artificial Sequence
  Description of Artificial Sequence: Synthetic peptide
  Seed: GNEKKAKLANVVRKMMTNSQ
GNEFKAILNNVNRKMMTNSQ

SEQ ID NO: 186852 - protein, 20 aa, Artificial Sequence
  Description of Artificial Sequence: Synthetic peptide
  Seed: GNEKKAKLANVVRKMMTNSQ
GNEFKAILNNVPRKMMTNSQ

SEQ ID NO: 186853 - protein, 20 aa, Artificial Sequence
  Description of Artificial Sequence: Synthetic peptide
  Seed: GNEKKAKLANVVRKMMTNSQ
GNEFKAILNNVQRKMMTNSQ

SEQ ID NO: 186854 - protein, 20 aa, Artificial Sequence
  Description of Artificial Sequence: Synthetic peptide
  Seed: GNEKKAKLANVVRKMMTNSQ
GNEFKAILNNVSRKMMTNSQ

SEQ ID NO: 186855 - protein, 20 aa, Artificial Sequence
  Description of Artificial Sequence: Synthetic peptide
  Seed: GNEKKAKLANVVRKMMTNSQ
GNEFKAILNNVTRKMMTNSQ

SEQ ID NO: 186856 - protein, 20 aa, Artificial Sequence
  Description of Artificial Sequence: Synthetic peptide
  Seed: GNEKKAKLANVVRKMMTNSQ
GNEFKAILNNVVRKMMTNSQ

SEQ ID NO: 186857 - protein, 20 aa, Artificial Sequence
  Description of Artificial Sequence: Synthetic peptide
  Seed: GNEKKAKLANVVRKMMTNSQ
GNEFKAILNNVYRKMMTNSQ

SEQ ID NO: 186858 - protein, 20 aa, Artificial Sequence
  Description of Artificial Sequence: Synthetic peptide
  Seed: GNEKKAKLANVVRKMMTNSQ
GNEFKAILPNVARKMMTNSQ

SEQ ID NO: 186859 - protein, 20 aa, Artificial Sequence
  Description of Artificial Sequence: Synthetic peptide
  Seed: GNEKKAKLANVVRKMMTNSQ
GNEFKAILPNVCRKMMTNSQ

SEQ ID NO: 186860 - protein, 20 aa, Artificial Sequence
  Description of Artificial Sequence: Synthetic peptide
  Seed: GNEKKAKLANVVRKMMTNSQ
GNEFKAILPNVDRKMMTNSQ

SEQ ID NO: 186861 - protein, 20 aa, Artificial Sequence
  Description of Artificial Sequence: Synthetic peptide
  Seed: GNEKKAKLANVVRKMMTNSQ
GNEFKAILPNVERKMMTNSQ

SEQ ID NO: 186862 - protein, 20 aa, Artificial Sequence
  Description of Artificial Sequence: Synthetic peptide
  Seed: GNEKKAKLANVVRKMMTNSQ
GNEFKAILPNVFRKMMTNSQ

SEQ ID NO: 186863 - protein, 20 aa, Artificial Sequence
  Description of Artificial Sequence: Synthetic peptide
  Seed: GNEKKAKLANVVRKMMTNSQ
GNEFKAILPNVGRKMMTNSQ

SEQ ID NO: 186864 - protein, 20 aa, Artificial Sequence
  Description of Artificial Sequence: Synthetic peptide
  Seed: GNEKKAKLANVVRKMMTNSQ
GNEFKAILPNVHRKMMTNSQ

SEQ ID NO: 186865 - protein, 20 aa, Artificial Sequence
  Description of Artificial Sequence: Synthetic peptide
  Seed: GNEKKAKLANVVRKMMTNSQ
GNEFKAILPNVIRKMMTNSQ

SEQ ID NO: 186866 - protein, 20 aa, Artificial Sequence
  Description of Artificial Sequence: Synthetic peptide
  Seed: GNEKKAKLANVVRKMMTNSQ
GNEFKAILPNVKRKMMTNSQ

SEQ ID NO: 186867 - protein, 20 aa, Artificial Sequence
  Description of Artificial Sequence: Synthetic peptide
  Seed: GNEKKAKLANVVRKMMTNSQ
GNEFKAILPNVLRKMMTNSQ

SEQ ID NO: 186868 - protein, 20 aa, Artificial Sequence
  Description of Artificial Sequence: Synthetic peptide
  Seed: GNEKKAKLANVVRKMMTNSQ
GNEFKAILPNVMRKMMTNSQ

SEQ ID NO: 186869 - protein, 20 aa, Artificial Sequence
  Description of Artificial Sequence: Synthetic peptide
  Seed: GNEKKAKLANVVRKMMTNSQ
GNEFKAILPNVNRKMMTNSQ

SEQ ID NO: 186870 - protein, 20 aa, Artificial Sequence
  Description of Artificial Sequence: Synthetic peptide
  Seed: GNEKKAKLANVVRKMMTNSQ
GNEFKAILPNVPRKMMTNSQ

SEQ ID NO: 186871 - protein, 20 aa, Artificial Sequence
  Description of Artificial Sequence: Synthetic peptide
  Seed: GNEKKAKLANVVRKMMTNSQ
GNEFKAILPNVQRKMMTNSQ

SEQ ID NO: 186872 - protein, 20 aa, Artificial Sequence
  Description of Artificial Sequence: Synthetic peptide
  Seed: GNEKKAKLANVVRKMMTNSQ
GNEFKAILPNVRRKMMTNSQ

SEQ ID NO: 186873 - protein, 20 aa, Artificial Sequence
  Description of Artificial Sequence: Synthetic peptide
  Seed: GNEKKAKLANVVRKMMTNSQ
GNEFKAILPNVSRKMMTNSQ

SEQ ID NO: 186874 - protein, 20 aa, Artificial Sequence
  Description of Artificial Sequence: Synthetic peptide
  Seed: GNEKKAKLANVVRKMMTNSQ
GNEFKAILPNVTRKMMTNSQ

SEQ ID NO: 186875 - protein, 20 aa, Artificial Sequence
  Description of Artificial Sequence: Synthetic peptide
  Seed: GNEKKAKLANVVRKMMTNSQ
GNEFKAILPNVVRKMMTNSQ

SEQ ID NO: 186876 - protein, 20 aa, Artificial Sequence
  Description of Artificial Sequence: Synthetic peptide
  Seed: GNEKKAKLANVVRKMMTNSQ
GNEFKAILPNVWRKMMTNSQ

SEQ ID NO: 186877 - protein, 20 aa, Artificial Sequence
  Description of Artificial Sequence: Synthetic peptide
  Seed: GNEKKAKLANVVRKMMTNSQ
GNEFKAILPNVYRKMMTNSQ

SEQ ID NO: 186878 - protein, 20 aa, Artificial Sequence
  Description of Artificial Sequence: Synthetic peptide
  Seed: GNEKKAKLANVVRKMMTNSQ
GNEFKAILQNVARKMMTNSQ

SEQ ID NO: 186879 - protein, 20 aa, Artificial Sequence
  Description of Artificial Sequence: Synthetic peptide
  Seed: GNEKKAKLANVVRKMMTNSQ
GNEFKAILQNVNRKMMTNSQ

SEQ ID NO: 186880 - protein, 20 aa, Artificial Sequence
  Description of Artificial Sequence: Synthetic peptide
  Seed: GNEKKAKLANVVRKMMTNSQ
GNEFKAILQNVSRKMMTNSQ

SEQ ID NO: 186881 - protein, 20 aa, Artificial Sequence
  Description of Artificial Sequence: Synthetic peptide
  Seed: GNEKKAKLANVVRKMMTNSQ
GNEFKAILQNVTRKMMTNSQ

SEQ ID NO: 186882 - protein, 20 aa, Artificial Sequence
  Description of Artificial Sequence: Synthetic peptide
  Seed: GNEKKAKLANVVRKMMTNSQ
GNEFKAILQNVVRKMMTNSQ

SEQ ID NO: 186883 - protein, 20 aa, Artificial Sequence
  Description of Artificial Sequence: Synthetic peptide
  Seed: GNEKKAKLANVVRKMMTNSQ
GNEFKAILSNVARKMMTNSQ

SEQ ID NO: 186884 - protein, 20 aa, Artificial Sequence
  Description of Artificial Sequence: Synthetic peptide
  Seed: GNEKKAKLANVVRKMMTNSQ
GNEFKAILSNVCRKMMTNSQ

SEQ ID NO: 186885 - protein, 20 aa, Artificial Sequence
  Description of Artificial Sequence: Synthetic peptide
  Seed: GNEKKAKLANVVRKMMTNSQ
GNEFKAILSNVDRKMMTNSQ

SEQ ID NO: 186886 - protein, 20 aa, Artificial Sequence
  Description of Artificial Sequence: Synthetic peptide
  Seed: GNEKKAKLANVVRKMMTNSQ
GNEFKAILSNVERKMMTNSQ

SEQ ID NO: 186887 - protein, 20 aa, Artificial Sequence
  Description of Artificial Sequence: Synthetic peptide
  Seed: GNEKKAKLANVVRKMMTNSQ
GNEFKAILSNVFRKMMTNSQ

SEQ ID NO: 186888 - protein, 20 aa, Artificial Sequence
  Description of Artificial Sequence: Synthetic peptide
  Seed: GNEKKAKLANVVRKMMTNSQ
GNEFKAILSNVGRKMMTNSQ

SEQ ID NO: 186889 - protein, 20 aa, Artificial Sequence
  Description of Artificial Sequence: Synthetic peptide
  Seed: GNEKKAKLANVVRKMMTNSQ
GNEFKAILSNVHRKMMTNSQ

SEQ ID NO: 186890 - protein, 20 aa, Artificial Sequence
  Description of Artificial Sequence: Synthetic peptide
  Seed: GNEKKAKLANVVRKMMTNSQ
GNEFKAILSNVIRKMMTNSQ

SEQ ID NO: 186891 - protein, 20 aa, Artificial Sequence
  Description of Artificial Sequence: Synthetic peptide
  Seed: GNEKKAKLANVVRKMMTNSQ
GNEFKAILSNVKRKMMTNSQ

SEQ ID NO: 186892 - protein, 20 aa, Artificial Sequence
  Description of Artificial Sequence: Synthetic peptide
  Seed: GNEKKAKLANVVRKMMTNSQ
GNEFKAILSNVLRKMMTNSQ

SEQ ID NO: 186893 - protein, 20 aa, Artificial Sequence
  Description of Artificial Sequence: Synthetic peptide
  Seed: GNEKKAKLANVVRKMMTNSQ
GNEFKAILSNVMRKMMTNSQ

SEQ ID NO: 186894 - protein, 20 aa, Artificial Sequence
  Description of Artificial Sequence: Synthetic peptide
  Seed: GNEKKAKLANVVRKMMTNSQ
GNEFKAILSNVNRKMMTNSQ

SEQ ID NO: 186895 - protein, 20 aa, Artificial Sequence
  Description of Artificial Sequence: Synthetic peptide
  Seed: GNEKKAKLANVVRKMMTNSQ
GNEFKAILSNVPRKMMTNSQ

SEQ ID NO: 186896 - protein, 20 aa, Artificial Sequence
  Description of Artificial Sequence: Synthetic peptide
  Seed: GNEKKAKLANVVRKMMTNSQ
GNEFKAILSNVQRKMMTNSQ

SEQ ID NO: 186897 - protein, 20 aa, Artificial Sequence
  Description of Artificial Sequence: Synthetic peptide
  Seed: GNEKKAKLANVVRKMMTNSQ
GNEFKAILSNVRRKMMTNSQ

SEQ ID NO: 186898 - protein, 20 aa, Artificial Sequence
  Description of Artificial Sequence: Synthetic peptide
  Seed: GNEKKAKLANVVRKMMTNSQ
GNEFKAILSNVSRKMMTNSQ

SEQ ID NO: 186899 - protein, 20 aa, Artificial Sequence
  Description of Artificial Sequence: Synthetic peptide
  Seed: GNEKKAKLANVVRKMMTNSQ
GNEFKAILSNVTRKMMTNSQ

SEQ ID NO: 186900 - protein, 20 aa, Artificial Sequence
  Description of Artificial Sequence: Synthetic peptide
  Seed: GNEKKAKLANVVRKMMTNSQ
GNEFKAILSNVVRKMMTNSQ

SEQ ID NO: 186901 - protein, 20 aa, Artificial Sequence
  Description of Artificial Sequence: Synthetic peptide
  Seed: GNEKKAKLANVVRKMMTNSQ
GNEFKAILSNVYRKMMTNSQ

SEQ ID NO: 186902 - protein, 20 aa, Artificial Sequence
  Description of Artificial Sequence: Synthetic peptide
  Seed: GNEKKAKLANVVRKMMTNSQ
GNEFKAILTNVARKMMTNSQ

SEQ ID NO: 186903 - protein, 20 aa, Artificial Sequence
  Description of Artificial Sequence: Synthetic peptide
  Seed: GNEKKAKLANVVRKMMTNSQ
GNEFKAILTNVCRKMMTNSQ

SEQ ID NO: 186904 - protein, 20 aa, Artificial Sequence
  Description of Artificial Sequence: Synthetic peptide
  Seed: GNEKKAKLANVVRKMMTNSQ
GNEFKAILTNVDRKMMTNSQ

SEQ ID NO: 186905 - protein, 20 aa, Artificial Sequence
  Description of Artificial Sequence: Synthetic peptide
  Seed: GNEKKAKLANVVRKMMTNSQ
GNEFKAILTNVERKMMTNSQ

SEQ ID NO: 186906 - protein, 20 aa, Artificial Sequence
  Description of Artificial Sequence: Synthetic peptide
  Seed: GNEKKAKLANVVRKMMTNSQ
GNEFKAILTNVFRKMMTNSQ

SEQ ID NO: 186907 - protein, 20 aa, Artificial Sequence
  Description of Artificial Sequence: Synthetic peptide
  Seed: GNEKKAKLANVVRKMMTNSQ
GNEFKAILTNVGRKMMTNSQ

SEQ ID NO: 186908 - protein, 20 aa, Artificial Sequence
  Description of Artificial Sequence: Synthetic peptide
  Seed: GNEKKAKLANVVRKMMTNSQ
GNEFKAILTNVHRKMMTNSQ

SEQ ID NO: 186909 - protein, 20 aa, Artificial Sequence
  Description of Artificial Sequence: Synthetic peptide
  Seed: GNEKKAKLANVVRKMMTNSQ
GNEFKAILTNVIRKMMTNSQ

SEQ ID NO: 186910 - protein, 20 aa, Artificial Sequence
  Description of Artificial Sequence: Synthetic peptide
  Seed: GNEKKAKLANVVRKMMTNSQ
GNEFKAILTNVKRKMMTNSQ

SEQ ID NO: 186911 - protein, 20 aa, Artificial Sequence
  Description of Artificial Sequence: Synthetic peptide
  Seed: GNEKKAKLANVVRKMMTNSQ
GNEFKAILTNVLRKMMTNSQ

SEQ ID NO: 186912 - protein, 20 aa, Artificial Sequence
  Description of Artificial Sequence: Synthetic peptide
  Seed: GNEKKAKLANVVRKMMTNSQ
GNEFKAILTNVMRKMMTNSQ

SEQ ID NO: 186913 - protein, 20 aa, Artificial Sequence
  Description of Artificial Sequence: Synthetic peptide
  Seed: GNEKKAKLANVVRKMMTNSQ
GNEFKAILTNVNRKMMTNSQ

SEQ ID NO: 186914 - protein, 20 aa, Artificial Sequence
  Description of Artificial Sequence: Synthetic peptide
  Seed: GNEKKAKLANVVRKMMTNSQ
GNEFKAILTNVPRKMMTNSQ

SEQ ID NO: 186915 - protein, 20 aa, Artificial Sequence
  Description of Artificial Sequence: Synthetic peptide
  Seed: GNEKKAKLANVVRKMMTNSQ
GNEFKAILTNVQRKMMTNSQ

SEQ ID NO: 186916 - protein, 20 aa, Artificial Sequence
  Description of Artificial Sequence: Synthetic peptide
  Seed: GNEKKAKLANVVRKMMTNSQ
GNEFKAILTNVRRKMMTNSQ

SEQ ID NO: 186917 - protein, 20 aa, Artificial Sequence
  Description of Artificial Sequence: Synthetic peptide
  Seed: GNEKKAKLANVVRKMMTNSQ
GNEFKAILTNVSRKMMTNSQ

SEQ ID NO: 186918 - protein, 20 aa, Artificial Sequence
  Description of Artificial Sequence: Synthetic peptide
  Seed: GNEKKAKLANVVRKMMTNSQ
GNEFKAILTNVTRKMMTNSQ

SEQ ID NO: 186919 - protein, 20 aa, Artificial Sequence
  Description of Artificial Sequence: Synthetic peptide
  Seed: GNEKKAKLANVVRKMMTNSQ
GNEFKAILTNVVRKMMTNSQ

SEQ ID NO: 186920 - protein, 20 aa, Artificial Sequence
  Description of Artificial Sequence: Synthetic peptide
  Seed: GNEKKAKLANVVRKMMTNSQ
GNEFKAILTNVYRKMMTNSQ

SEQ ID NO: 186921 - protein, 20 aa, Artificial Sequence
  Description of Artificial Sequence: Synthetic peptide
  Seed: GNEKKAKLANVVRKMMTNSQ
GNEFKAILVNVARKMMTNSQ

SEQ ID NO: 186922 - protein, 20 aa, Artificial Sequence
  Description of Artificial Sequence: Synthetic peptide
  Seed: GNEKKAKLANVVRKMMTNSQ
GNEFKAILVNVCRKMMTNSQ

SEQ ID NO: 186923 - protein, 20 aa, Artificial Sequence
  Description of Artificial Sequence: Synthetic peptide
  Seed: GNEKKAKLANVVRKMMTNSQ
GNEFKAILVNVDRKMMTNSQ

SEQ ID NO: 186924 - protein, 20 aa, Artificial Sequence
  Description of Artificial Sequence: Synthetic peptide
  Seed: GNEKKAKLANVVRKMMTNSQ
GNEFKAILVNVERKMMTNSQ

SEQ ID NO: 186925 - protein, 20 aa, Artificial Sequence
  Description of Artificial Sequence: Synthetic peptide
  Seed: GNEKKAKLANVVRKMMTNSQ
GNEFKAILVNVFRKMMTNSQ

SEQ ID NO: 186926 - protein, 20 aa, Artificial Sequence
  Description of Artificial Sequence: Synthetic peptide
  Seed: GNEKKAKLANVVRKMMTNSQ
GNEFKAILVNVGRKMMTNSQ

SEQ ID NO: 186927 - protein, 20 aa, Artificial Sequence
  Description of Artificial Sequence: Synthetic peptide
  Seed: GNEKKAKLANVVRKMMTNSQ
GNEFKAILVNVHRKMMTNSQ

SEQ ID NO: 186928 - protein, 20 aa, Artificial Sequence
  Description of Artificial Sequence: Synthetic peptide
  Seed: GNEKKAKLANVVRKMMTNSQ
GNEFKAILVNVIRKMMTNSQ

SEQ ID NO: 186929 - protein, 20 aa, Artificial Sequence
  Description of Artificial Sequence: Synthetic peptide
  Seed: GNEKKAKLANVVRKMMTNSQ
GNEFKAILVNVKRKMMTNSQ

SEQ ID NO: 186930 - protein, 20 aa, Artificial Sequence
  Description of Artificial Sequence: Synthetic peptide
  Seed: GNEKKAKLANVVRKMMTNSQ
GNEFKAILVNVLRKMMTNSQ

SEQ ID NO: 186931 - protein, 20 aa, Artificial Sequence
  Description of Artificial Sequence: Synthetic peptide
  Seed: GNEKKAKLANVVRKMMTNSQ
GNEFKAILVNVMRKMMTNSQ

SEQ ID NO: 186932 - protein, 20 aa, Artificial Sequence
  Description of Artificial Sequence: Synthetic peptide
  Seed: GNEKKAKLANVVRKMMTNSQ
GNEFKAILVNVNRKMMTNSQ

SEQ ID NO: 186933 - protein, 20 aa, Artificial Sequence
  Description of Artificial Sequence: Synthetic peptide
  Seed: GNEKKAKLANVVRKMMTNSQ
GNEFKAILVNVPRKMMTNSQ

SEQ ID NO: 186934 - protein, 20 aa, Artificial Sequence
  Description of Artificial Sequence: Synthetic peptide
  Seed: GNEKKAKLANVVRKMMTNSQ
GNEFKAILVNVQRKMMTNSQ

SEQ ID NO: 186935 - protein, 20 aa, Artificial Sequence
  Description of Artificial Sequence: Synthetic peptide
  Seed: GNEKKAKLANVVRKMMTNSQ
GNEFKAILVNVRRKMMTNSQ

SEQ ID NO: 186936 - protein, 20 aa, Artificial Sequence
  Description of Artificial Sequence: Synthetic peptide
  Seed: GNEKKAKLANVVRKMMTNSQ
GNEFKAILVNVSRKMMTNSQ

SEQ ID NO: 186937 - protein, 20 aa, Artificial Sequence
  Description of Artificial Sequence: Synthetic peptide
  Seed: GNEKKAKLANVVRKMMTNSQ
GNEFKAILVNVTRKMMTNSQ

SEQ ID NO: 186938 - protein, 20 aa, Artificial Sequence
  Description of Artificial Sequence: Synthetic peptide
  Seed: GNEKKAKLANVVRKMMTNSQ
GNEFKAILVNVVRKMMTNSQ

SEQ ID NO: 186939 - protein, 20 aa, Artificial Sequence
  Description of Artificial Sequence: Synthetic peptide
  Seed: GNEKKAKLANVVRKMMTNSQ
GNEFKAILVNVYRKMMTNSQ

SEQ ID NO: 186940 - protein, 20 aa, Artificial Sequence
  Description of Artificial Sequence: Synthetic peptide
  Seed: GNEKKAKLANVVRKMMTNSQ
GNEFKAILWNVARKMMTNSQ

SEQ ID NO: 186941 - protein, 20 aa, Artificial Sequence
  Description of Artificial Sequence: Synthetic peptide
  Seed: GNEKKAKLANVVRKMMTNSQ
GNEFKAILWNVDRKMMTNSQ

SEQ ID NO: 186942 - protein, 20 aa, Artificial Sequence
  Description of Artificial Sequence: Synthetic peptide
  Seed: GNEKKAKLANVVRKMMTNSQ
GNEFKAILWNVERKMMTNSQ

SEQ ID NO: 186943 - protein, 20 aa, Artificial Sequence
  Description of Artificial Sequence: Synthetic peptide
  Seed: GNEKKAKLANVVRKMMTNSQ
GNEFKAILWNVIRKMMTNSQ

SEQ ID NO: 186944 - protein, 20 aa, Artificial Sequence
  Description of Artificial Sequence: Synthetic peptide
  Seed: GNEKKAKLANVVRKMMTNSQ
GNEFKAILWNVLRKMMTNSQ

SEQ ID NO: 186945 - protein, 20 aa, Artificial Sequence
  Description of Artificial Sequence: Synthetic peptide
  Seed: GNEKKAKLANVVRKMMTNSQ
GNEFKAILWNVMRKMMTNSQ

SEQ ID NO: 186946 - protein, 20 aa, Artificial Sequence
  Description of Artificial Sequence: Synthetic peptide
  Seed: GNEKKAKLANVVRKMMTNSQ
GNEFKAILWNVNRKMMTNSQ

SEQ ID NO: 186947 - protein, 20 aa, Artificial Sequence
  Description of Artificial Sequence: Synthetic peptide
  Seed: GNEKKAKLANVVRKMMTNSQ
GNEFKAILWNVSRKMMTNSQ

SEQ ID NO: 186948 - protein, 20 aa, Artificial Sequence
  Description of Artificial Sequence: Synthetic peptide
  Seed: GNEKKAKLANVVRKMMTNSQ
GNEFKAILWNVTRKMMTNSQ

SEQ ID NO: 186949 - protein, 20 aa, Artificial Sequence
  Description of Artificial Sequence: Synthetic peptide
  Seed: GNEKKAKLANVVRKMMTNSQ
GNEFKAILWNVVRKMMTNSQ

SEQ ID NO: 186950 - protein, 20 aa, Artificial Sequence
  Description of Artificial Sequence: Synthetic peptide
  Seed: GNEKKAKLANVVRKMMTNSQ
GNEFKAILWNVYRKMMTNSQ

SEQ ID NO: 186951 - protein, 20 aa, Artificial Sequence
  Description of Artificial Sequence: Synthetic peptide
  Seed: GNEKKAKLANVVRKMMTNSQ
GNEFKAILYNVARKMMTNSQ

SEQ ID NO: 186952 - protein, 20 aa, Artificial Sequence
  Description of Artificial Sequence: Synthetic peptide
  Seed: GNEKKAKLANVVRKMMTNSQ
GNEFKAILYNVDRKMMTNSQ

SEQ ID NO: 186953 - protein, 20 aa, Artificial Sequence
  Description of Artificial Sequence: Synthetic peptide
  Seed: GNEKKAKLANVVRKMMTNSQ
GNEFKAILYNVERKMMTNSQ

SEQ ID NO: 186954 - protein, 20 aa, Artificial Sequence
  Description of Artificial Sequence: Synthetic peptide
  Seed: GNEKKAKLANVVRKMMTNSQ
GNEFKAILYNVIRKMMTNSQ

SEQ ID NO: 186955 - protein, 20 aa, Artificial Sequence
  Description of Artificial Sequence: Synthetic peptide
  Seed: GNEKKAKLANVVRKMMTNSQ
GNEFKAILYNVLRKMMTNSQ

SEQ ID NO: 186956 - protein, 20 aa, Artificial Sequence
  Description of Artificial Sequence: Synthetic peptide
  Seed: GNEKKAKLANVVRKMMTNSQ
GNEFKAILYNVMRKMMTNSQ

SEQ ID NO: 186957 - protein, 20 aa, Artificial Sequence
  Description of Artificial Sequence: Synthetic peptide
  Seed: GNEKKAKLANVVRKMMTNSQ
GNEFKAILYNVNRKMMTNSQ

SEQ ID NO: 186958 - protein, 20 aa, Artificial Sequence
  Description of Artificial Sequence: Synthetic peptide
  Seed: GNEKKAKLANVVRKMMTNSQ
GNEFKAILYNVPRKMMTNSQ

SEQ ID NO: 186959 - protein, 20 aa, Artificial Sequence
  Description of Artificial Sequence: Synthetic peptide
  Seed: GNEKKAKLANVVRKMMTNSQ
GNEFKAILYNVSRKMMTNSQ

SEQ ID NO: 186960 - protein, 20 aa, Artificial Sequence
  Description of Artificial Sequence: Synthetic peptide
  Seed: GNEKKAKLANVVRKMMTNSQ
GNEFKAILYNVTRKMMTNSQ

SEQ ID NO: 186961 - protein, 20 aa, Artificial Sequence
  Description of Artificial Sequence: Synthetic peptide
  Seed: GNEKKAKLANVVRKMMTNSQ
GNEFKAILYNVVRKMMTNSQ

SEQ ID NO: 186962 - protein, 20 aa, Artificial Sequence
  Description of Artificial Sequence: Synthetic peptide
  Seed: GNEKKAKLANVVRKMMTNSQ
GNEFKAILYNVYRKMMTNSQ

SEQ ID NO: 186963 - protein, 20 aa, Artificial Sequence
  Description of Artificial Sequence: Synthetic peptide
  Seed: GNEKKAKLANVVRKMMTNSQ
GNEFKAKLANVARKMMTNSQ

SEQ ID NO: 186964 - protein, 20 aa, Artificial Sequence
  Description of Artificial Sequence: Synthetic peptide
  Seed: GNEKKAKLANVVRKMMTNSQ
GNEFKAKLANVIRKMMTNSQ

SEQ ID NO: 186965 - protein, 20 aa, Artificial Sequence
  Description of Artificial Sequence: Synthetic peptide
  Seed: GNEKKAKLANVVRKMMTNSQ
GNEFKAKLANVLRKMMTNSQ

SEQ ID NO: 186966 - protein, 20 aa, Artificial Sequence
  Description of Artificial Sequence: Synthetic peptide
  Seed: GNEKKAKLANVVRKMMTNSQ
GNEFKAKLANVVRKMMTNSQ

SEQ ID NO: 186967 - protein, 20 aa, Artificial Sequence
  Description of Artificial Sequence: Synthetic peptide
  Seed: GNEKKAKLANVVRKMMTNSQ
GNEFKAKLFNVARKMMTNSQ

SEQ ID NO: 186968 - protein, 20 aa, Artificial Sequence
  Description of Artificial Sequence: Synthetic peptide
  Seed: GNEKKAKLANVVRKMMTNSQ
GNEFKAKLFNVDRKMMTNSQ

SEQ ID NO: 186969 - protein, 20 aa, Artificial Sequence
  Description of Artificial Sequence: Synthetic peptide
  Seed: GNEKKAKLANVVRKMMTNSQ
GNEFKAKLFNVERKMMTNSQ

SEQ ID NO: 186970 - protein, 20 aa, Artificial Sequence
  Description of Artificial Sequence: Synthetic peptide
  Seed: GNEKKAKLANVVRKMMTNSQ
GNEFKAKLFNVFRKMMTNSQ

SEQ ID NO: 186971 - protein, 20 aa, Artificial Sequence
  Description of Artificial Sequence: Synthetic peptide
  Seed: GNEKKAKLANVVRKMMTNSQ
GNEFKAKLFNVIRKMMTNSQ

SEQ ID NO: 186972 - protein, 20 aa, Artificial Sequence
  Description of Artificial Sequence: Synthetic peptide
  Seed: GNEKKAKLANVVRKMMTNSQ
GNEFKAKLFNVLRKMMTNSQ

SEQ ID NO: 186973 - protein, 20 aa, Artificial Sequence
  Description of Artificial Sequence: Synthetic peptide
  Seed: GNEKKAKLANVVRKMMTNSQ
GNEFKAKLFNVMRKMMTNSQ

SEQ ID NO: 186974 - protein, 20 aa, Artificial Sequence
  Description of Artificial Sequence: Synthetic peptide
  Seed: GNEKKAKLANVVRKMMTNSQ
GNEFKAKLFNVNRKMMTNSQ

SEQ ID NO: 186975 - protein, 20 aa, Artificial Sequence
  Description of Artificial Sequence: Synthetic peptide
  Seed: GNEKKAKLANVVRKMMTNSQ
GNEFKAKLFNVPRKMMTNSQ

SEQ ID NO: 186976 - protein, 20 aa, Artificial Sequence
  Description of Artificial Sequence: Synthetic peptide
  Seed: GNEKKAKLANVVRKMMTNSQ
GNEFKAKLFNVQRKMMTNSQ

SEQ ID NO: 186977 - protein, 20 aa, Artificial Sequence
  Description of Artificial Sequence: Synthetic peptide
  Seed: GNEKKAKLANVVRKMMTNSQ
GNEFKAKLFNVSRKMMTNSQ

SEQ ID NO: 186978 - protein, 20 aa, Artificial Sequence
  Description of Artificial Sequence: Synthetic peptide
  Seed: GNEKKAKLANVVRKMMTNSQ
GNEFKAKLFNVTRKMMTNSQ

SEQ ID NO: 186979 - protein, 20 aa, Artificial Sequence
  Description of Artificial Sequence: Synthetic peptide
  Seed: GNEKKAKLANVVRKMMTNSQ
GNEFKAKLFNVVRKMMTNSQ

SEQ ID NO: 186980 - protein, 20 aa, Artificial Sequence
  Description of Artificial Sequence: Synthetic peptide
  Seed: GNEKKAKLANVVRKMMTNSQ
GNEFKAKLFNVYRKMMTNSQ

SEQ ID NO: 186981 - protein, 20 aa, Artificial Sequence
  Description of Artificial Sequence: Synthetic peptide
  Seed: GNEKKAKLANVVRKMMTNSQ
GNEFKAKLGNVIRKMMTNSQ

SEQ ID NO: 186982 - protein, 20 aa, Artificial Sequence
  Description of Artificial Sequence: Synthetic peptide
  Seed: GNEKKAKLANVVRKMMTNSQ
GNEFKAKLGNVLRKMMTNSQ

SEQ ID NO: 186983 - protein, 20 aa, Artificial Sequence
  Description of Artificial Sequence: Synthetic peptide
  Seed: GNEKKAKLANVVRKMMTNSQ
GNEFKAKLGNVVRKMMTNSQ

SEQ ID NO: 186984 - protein, 20 aa, Artificial Sequence
  Description of Artificial Sequence: Synthetic peptide
  Seed: GNEKKAKLANVVRKMMTNSQ
GNEFKAKLINVFRKMMTNSQ

SEQ ID NO: 186985 - protein, 20 aa, Artificial Sequence
  Description of Artificial Sequence: Synthetic peptide
  Seed: GNEKKAKLANVVRKMMTNSQ
GNEFKAKLINVIRKMMTNSQ

SEQ ID NO: 186986 - protein, 20 aa, Artificial Sequence
  Description of Artificial Sequence: Synthetic peptide
  Seed: GNEKKAKLANVVRKMMTNSQ
GNEFKAKLINVLRKMMTNSQ

SEQ ID NO: 186987 - protein, 20 aa, Artificial Sequence
  Description of Artificial Sequence: Synthetic peptide
  Seed: GNEKKAKLANVVRKMMTNSQ
GNEFKAKLINVVRKMMTNSQ

SEQ ID NO: 186988 - protein, 20 aa, Artificial Sequence
  Description of Artificial Sequence: Synthetic peptide
  Seed: GNEKKAKLANVVRKMMTNSQ
GNEFKAKLLNVFRKMMTNSQ

SEQ ID NO: 186989 - protein, 20 aa, Artificial Sequence
  Description of Artificial Sequence: Synthetic peptide
  Seed: GNEKKAKLANVVRKMMTNSQ
GNEFKAKLLNVIRKMMTNSQ

SEQ ID NO: 186990 - protein, 20 aa, Artificial Sequence
  Description of Artificial Sequence: Synthetic peptide
  Seed: GNEKKAKLANVVRKMMTNSQ
GNEFKAKLLNVLRKMMTNSQ

SEQ ID NO: 186991 - protein, 20 aa, Artificial Sequence
  Description of Artificial Sequence: Synthetic peptide
  Seed: GNEKKAKLANVVRKMMTNSQ
GNEFKAKLLNVMRKMMTNSQ

SEQ ID NO: 186992 - protein, 20 aa, Artificial Sequence
  Description of Artificial Sequence: Synthetic peptide
  Seed: GNEKKAKLANVVRKMMTNSQ
GNEFKAKLLNVVRKMMTNSQ

SEQ ID NO: 186993 - protein, 20 aa, Artificial Sequence
  Description of Artificial Sequence: Synthetic peptide
  Seed: GNEKKAKLANVVRKMMTNSQ
GNEFKAKLMNVFRKMMTNSQ

SEQ ID NO: 186994 - protein, 20 aa, Artificial Sequence
  Description of Artificial Sequence: Synthetic peptide
  Seed: GNEKKAKLANVVRKMMTNSQ
GNEFKAKLMNVIRKMMTNSQ

SEQ ID NO: 186995 - protein, 20 aa, Artificial Sequence
  Description of Artificial Sequence: Synthetic peptide
  Seed: GNEKKAKLANVVRKMMTNSQ
GNEFKAKLMNVLRKMMTNSQ

SEQ ID NO: 186996 - protein, 20 aa, Artificial Sequence
  Description of Artificial Sequence: Synthetic peptide
  Seed: GNEKKAKLANVVRKMMTNSQ
GNEFKAKLMNVVRKMMTNSQ

SEQ ID NO: 186997 - protein, 20 aa, Artificial Sequence
  Description of Artificial Sequence: Synthetic peptide
  Seed: GNEKKAKLANVVRKMMTNSQ
GNEFKAKLSNVARKMMTNSQ

SEQ ID NO: 186998 - protein, 20 aa, Artificial Sequence
  Description of Artificial Sequence: Synthetic peptide
  Seed: GNEKKAKLANVVRKMMTNSQ
GNEFKAKLSNVIRKMMTNSQ

SEQ ID NO: 186999 - protein, 20 aa, Artificial Sequence
  Description of Artificial Sequence: Synthetic peptide
  Seed: GNEKKAKLANVVRKMMTNSQ
GNEFKAKLSNVLRKMMTNSQ

SEQ ID NO: 187000 - protein, 20 aa, Artificial Sequence
  Description of Artificial Sequence: Synthetic peptide
  Seed: GNEKKAKLANVVRKMMTNSQ
GNEFKAKLSNVVRKMMTNSQ

SEQ ID NO: 187001 - protein, 20 aa, Artificial Sequence
  Description of Artificial Sequence: Synthetic peptide
  Seed: GNEKKAKLANVVRKMMTNSQ
GNEFKAKLWNVFRKMMTNSQ

SEQ ID NO: 187002 - protein, 20 aa, Artificial Sequence
  Description of Artificial Sequence: Synthetic peptide
  Seed: GNEKKAKLANVVRKMMTNSQ
GNEFKAKLWNVIRKMMTNSQ

SEQ ID NO: 187003 - protein, 20 aa, Artificial Sequence
  Description of Artificial Sequence: Synthetic peptide
  Seed: GNEKKAKLANVVRKMMTNSQ
GNEFKAKLWNVLRKMMTNSQ

SEQ ID NO: 187004 - protein, 20 aa, Artificial Sequence
  Description of Artificial Sequence: Synthetic peptide
  Seed: GNEKKAKLANVVRKMMTNSQ
GNEFKAKLWNVMRKMMTNSQ

SEQ ID NO: 187005 - protein, 20 aa, Artificial Sequence
  Description of Artificial Sequence: Synthetic peptide
  Seed: GNEKKAKLANVVRKMMTNSQ
GNEFKAKLWNVVRKMMTNSQ

SEQ ID NO: 187006 - protein, 20 aa, Artificial Sequence
  Description of Artificial Sequence: Synthetic peptide
  Seed: GNEKKAKLANVVRKMMTNSQ
GNEFKAKLYNVFRKMMTNSQ

SEQ ID NO: 187007 - protein, 20 aa, Artificial Sequence
  Description of Artificial Sequence: Synthetic peptide
  Seed: GNEKKAKLANVVRKMMTNSQ
GNEFKAKLYNVIRKMMTNSQ

SEQ ID NO: 187008 - protein, 20 aa, Artificial Sequence
  Description of Artificial Sequence: Synthetic peptide
  Seed: GNEKKAKLANVVRKMMTNSQ
GNEFKAKLYNVLRKMMTNSQ

SEQ ID NO: 187009 - protein, 20 aa, Artificial Sequence
  Description of Artificial Sequence: Synthetic peptide
  Seed: GNEKKAKLANVVRKMMTNSQ
GNEFKAKLYNVMRKMMTNSQ

SEQ ID NO: 187010 - protein, 20 aa, Artificial Sequence
  Description of Artificial Sequence: Synthetic peptide
  Seed: GNEKKAKLANVVRKMMTNSQ
GNEFKAKLYNVVRKMMTNSQ

SEQ ID NO: 187011 - protein, 20 aa, Artificial Sequence
  Description of Artificial Sequence: Synthetic peptide
  Seed: GNEKKAKLANVVRKMMTNSQ
GNEFKALLANVARKMMTNSQ

SEQ ID NO: 187012 - protein, 20 aa, Artificial Sequence
  Description of Artificial Sequence: Synthetic peptide
  Seed: GNEKKAKLANVVRKMMTNSQ
GNEFKALLANVCRKMMTNSQ

SEQ ID NO: 187013 - protein, 20 aa, Artificial Sequence
  Description of Artificial Sequence: Synthetic peptide
  Seed: GNEKKAKLANVVRKMMTNSQ
GNEFKALLANVDRKMMTNSQ

SEQ ID NO: 187014 - protein, 20 aa, Artificial Sequence
  Description of Artificial Sequence: Synthetic peptide
  Seed: GNEKKAKLANVVRKMMTNSQ
GNEFKALLANVERKMMTNSQ

SEQ ID NO: 187015 - protein, 20 aa, Artificial Sequence
  Description of Artificial Sequence: Synthetic peptide
  Seed: GNEKKAKLANVVRKMMTNSQ
GNEFKALLANVFRKMMTNSQ

SEQ ID NO: 187016 - protein, 20 aa, Artificial Sequence
  Description of Artificial Sequence: Synthetic peptide
  Seed: GNEKKAKLANVVRKMMTNSQ
GNEFKALLANVGRKMMTNSQ

SEQ ID NO: 187017 - protein, 20 aa, Artificial Sequence
  Description of Artificial Sequence: Synthetic peptide
  Seed: GNEKKAKLANVVRKMMTNSQ
GNEFKALLANVHRKMMTNSQ

SEQ ID NO: 187018 - protein, 20 aa, Artificial Sequence
  Description of Artificial Sequence: Synthetic peptide
  Seed: GNEKKAKLANVVRKMMTNSQ
GNEFKALLANVIRKMMTNSQ

SEQ ID NO: 187019 - protein, 20 aa, Artificial Sequence
  Description of Artificial Sequence: Synthetic peptide
  Seed: GNEKKAKLANVVRKMMTNSQ
GNEFKALLANVKRKMMTNSQ

SEQ ID NO: 187020 - protein, 20 aa, Artificial Sequence
  Description of Artificial Sequence: Synthetic peptide
  Seed: GNEKKAKLANVVRKMMTNSQ
GNEFKALLANVLRKMMTNSQ

SEQ ID NO: 187021 - protein, 20 aa, Artificial Sequence
  Description of Artificial Sequence: Synthetic peptide
  Seed: GNEKKAKLANVVRKMMTNSQ
GNEFKALLANVMRKMMTNSQ

SEQ ID NO: 187022 - protein, 20 aa, Artificial Sequence
  Description of Artificial Sequence: Synthetic peptide
  Seed: GNEKKAKLANVVRKMMTNSQ
GNEFKALLANVNRKMMTNSQ

SEQ ID NO: 187023 - protein, 20 aa, Artificial Sequence
  Description of Artificial Sequence: Synthetic peptide
  Seed: GNEKKAKLANVVRKMMTNSQ
GNEFKALLANVPRKMMTNSQ

SEQ ID NO: 187024 - protein, 20 aa, Artificial Sequence
  Description of Artificial Sequence: Synthetic peptide
  Seed: GNEKKAKLANVVRKMMTNSQ
GNEFKALLANVQRKMMTNSQ

SEQ ID NO: 187025 - protein, 20 aa, Artificial Sequence
  Description of Artificial Sequence: Synthetic peptide
  Seed: GNEKKAKLANVVRKMMTNSQ
GNEFKALLANVRRKMMTNSQ

SEQ ID NO: 187026 - protein, 20 aa, Artificial Sequence
  Description of Artificial Sequence: Synthetic peptide
  Seed: GNEKKAKLANVVRKMMTNSQ
GNEFKALLANVSRKMMTNSQ

SEQ ID NO: 187027 - protein, 20 aa, Artificial Sequence
  Description of Artificial Sequence: Synthetic peptide
  Seed: GNEKKAKLANVVRKMMTNSQ
GNEFKALLANVTRKMMTNSQ

SEQ ID NO: 187028 - protein, 20 aa, Artificial Sequence
  Description of Artificial Sequence: Synthetic peptide
  Seed: GNEKKAKLANVVRKMMTNSQ
GNEFKALLANVVRKMMTNSQ

SEQ ID NO: 187029 - protein, 20 aa, Artificial Sequence
  Description of Artificial Sequence: Synthetic peptide
  Seed: GNEKKAKLANVVRKMMTNSQ
GNEFKALLANVWRKMMTNSQ

SEQ ID NO: 187030 - protein, 20 aa, Artificial Sequence
  Description of Artificial Sequence: Synthetic peptide
  Seed: GNEKKAKLANVVRKMMTNSQ
GNEFKALLANVYRKMMTNSQ

SEQ ID NO: 187031 - protein, 20 aa, Artificial Sequence
  Description of Artificial Sequence: Synthetic peptide
  Seed: GNEKKAKLANVVRKMMTNSQ
GNEFKALLCNVARKMMTNSQ

SEQ ID NO: 187032 - protein, 20 aa, Artificial Sequence
  Description of Artificial Sequence: Synthetic peptide
  Seed: GNEKKAKLANVVRKMMTNSQ
GNEFKALLCNVNRKMMTNSQ

SEQ ID NO: 187033 - protein, 20 aa, Artificial Sequence
  Description of Artificial Sequence: Synthetic peptide
  Seed: GNEKKAKLANVVRKMMTNSQ
GNEFKALLCNVSRKMMTNSQ

SEQ ID NO: 187034 - protein, 20 aa, Artificial Sequence
  Description of Artificial Sequence: Synthetic peptide
  Seed: GNEKKAKLANVVRKMMTNSQ
GNEFKALLCNVVRKMMTNSQ

SEQ ID NO: 187035 - protein, 20 aa, Artificial Sequence
  Description of Artificial Sequence: Synthetic peptide
  Seed: GNEKKAKLANVVRKMMTNSQ
GNEFKALLDNVARKMMTNSQ

SEQ ID NO: 187036 - protein, 20 aa, Artificial Sequence
  Description of Artificial Sequence: Synthetic peptide
  Seed: GNEKKAKLANVVRKMMTNSQ
GNEFKALLDNVIRKMMTNSQ

SEQ ID NO: 187037 - protein, 20 aa, Artificial Sequence
  Description of Artificial Sequence: Synthetic peptide
  Seed: GNEKKAKLANVVRKMMTNSQ
GNEFKALLDNVLRKMMTNSQ

SEQ ID NO: 187038 - protein, 20 aa, Artificial Sequence
  Description of Artificial Sequence: Synthetic peptide
  Seed: GNEKKAKLANVVRKMMTNSQ
GNEFKALLDNVMRKMMTNSQ

SEQ ID NO: 187039 - protein, 20 aa, Artificial Sequence
  Description of Artificial Sequence: Synthetic peptide
  Seed: GNEKKAKLANVVRKMMTNSQ
GNEFKALLDNVNRKMMTNSQ

SEQ ID NO: 187040 - protein, 20 aa, Artificial Sequence
  Description of Artificial Sequence: Synthetic peptide
  Seed: GNEKKAKLANVVRKMMTNSQ
GNEFKALLDNVSRKMMTNSQ

SEQ ID NO: 187041 - protein, 20 aa, Artificial Sequence
  Description of Artificial Sequence: Synthetic peptide
  Seed: GNEKKAKLANVVRKMMTNSQ
GNEFKALLDNVTRKMMTNSQ

SEQ ID NO: 187042 - protein, 20 aa, Artificial Sequence
  Description of Artificial Sequence: Synthetic peptide
  Seed: GNEKKAKLANVVRKMMTNSQ
GNEFKALLDNVVRKMMTNSQ

SEQ ID NO: 187043 - protein, 20 aa, Artificial Sequence
  Description of Artificial Sequence: Synthetic peptide
  Seed: GNEKKAKLANVVRKMMTNSQ
GNEFKALLENVARKMMTNSQ

SEQ ID NO: 187044 - protein, 20 aa, Artificial Sequence
  Description of Artificial Sequence: Synthetic peptide
  Seed: GNEKKAKLANVVRKMMTNSQ
GNEFKALLENVGRKMMTNSQ

SEQ ID NO: 187045 - protein, 20 aa, Artificial Sequence
  Description of Artificial Sequence: Synthetic peptide
  Seed: GNEKKAKLANVVRKMMTNSQ
GNEFKALLENVIRKMMTNSQ

SEQ ID NO: 187046 - protein, 20 aa, Artificial Sequence
  Description of Artificial Sequence: Synthetic peptide
  Seed: GNEKKAKLANVVRKMMTNSQ
GNEFKALLENVLRKMMTNSQ

SEQ ID NO: 187047 - protein, 20 aa, Artificial Sequence
  Description of Artificial Sequence: Synthetic peptide
  Seed: GNEKKAKLANVVRKMMTNSQ
GNEFKALLENVMRKMMTNSQ

SEQ ID NO: 187048 - protein, 20 aa, Artificial Sequence
  Description of Artificial Sequence: Synthetic peptide
  Seed: GNEKKAKLANVVRKMMTNSQ
GNEFKALLENVNRKMMTNSQ

SEQ ID NO: 187049 - protein, 20 aa, Artificial Sequence
  Description of Artificial Sequence: Synthetic peptide
  Seed: GNEKKAKLANVVRKMMTNSQ
GNEFKALLENVSRKMMTNSQ

SEQ ID NO: 187050 - protein, 20 aa, Artificial Sequence
  Description of Artificial Sequence: Synthetic peptide
  Seed: GNEKKAKLANVVRKMMTNSQ
GNEFKALLENVTRKMMTNSQ

SEQ ID NO: 187051 - protein, 20 aa, Artificial Sequence
  Description of Artificial Sequence: Synthetic peptide
  Seed: GNEKKAKLANVVRKMMTNSQ
GNEFKALLENVVRKMMTNSQ

SEQ ID NO: 187052 - protein, 20 aa, Artificial Sequence
  Description of Artificial Sequence: Synthetic peptide
  Seed: GNEKKAKLANVVRKMMTNSQ
GNEFKALLFNVARKMMTNSQ

SEQ ID NO: 187053 - protein, 20 aa, Artificial Sequence
  Description of Artificial Sequence: Synthetic peptide
  Seed: GNEKKAKLANVVRKMMTNSQ
GNEFKALLFNVDRKMMTNSQ

SEQ ID NO: 187054 - protein, 20 aa, Artificial Sequence
  Description of Artificial Sequence: Synthetic peptide
  Seed: GNEKKAKLANVVRKMMTNSQ
GNEFKALLFNVERKMMTNSQ

SEQ ID NO: 187055 - protein, 20 aa, Artificial Sequence
  Description of Artificial Sequence: Synthetic peptide
  Seed: GNEKKAKLANVVRKMMTNSQ
GNEFKALLFNVFRKMMTNSQ

SEQ ID NO: 187056 - protein, 20 aa, Artificial Sequence
  Description of Artificial Sequence: Synthetic peptide
  Seed: GNEKKAKLANVVRKMMTNSQ
GNEFKALLFNVHRKMMTNSQ

SEQ ID NO: 187057 - protein, 20 aa, Artificial Sequence
  Description of Artificial Sequence: Synthetic peptide
  Seed: GNEKKAKLANVVRKMMTNSQ
GNEFKALLFNVIRKMMTNSQ

SEQ ID NO: 187058 - protein, 20 aa, Artificial Sequence
  Description of Artificial Sequence: Synthetic peptide
  Seed: GNEKKAKLANVVRKMMTNSQ
GNEFKALLFNVLRKMMTNSQ

SEQ ID NO: 187059 - protein, 20 aa, Artificial Sequence
  Description of Artificial Sequence: Synthetic peptide
  Seed: GNEKKAKLANVVRKMMTNSQ
GNEFKALLFNVMRKMMTNSQ

SEQ ID NO: 187060 - protein, 20 aa, Artificial Sequence
  Description of Artificial Sequence: Synthetic peptide
  Seed: GNEKKAKLANVVRKMMTNSQ
GNEFKALLFNVNRKMMTNSQ

SEQ ID NO: 187061 - protein, 20 aa, Artificial Sequence
  Description of Artificial Sequence: Synthetic peptide
  Seed: GNEKKAKLANVVRKMMTNSQ
GNEFKALLFNVPRKMMTNSQ

SEQ ID NO: 187062 - protein, 20 aa, Artificial Sequence
  Description of Artificial Sequence: Synthetic peptide
  Seed: GNEKKAKLANVVRKMMTNSQ
GNEFKALLFNVQRKMMTNSQ

SEQ ID NO: 187063 - protein, 20 aa, Artificial Sequence
  Description of Artificial Sequence: Synthetic peptide
  Seed: GNEKKAKLANVVRKMMTNSQ
GNEFKALLFNVSRKMMTNSQ

SEQ ID NO: 187064 - protein, 20 aa, Artificial Sequence
  Description of Artificial Sequence: Synthetic peptide
  Seed: GNEKKAKLANVVRKMMTNSQ
GNEFKALLFNVTRKMMTNSQ

SEQ ID NO: 187065 - protein, 20 aa, Artificial Sequence
  Description of Artificial Sequence: Synthetic peptide
  Seed: GNEKKAKLANVVRKMMTNSQ
GNEFKALLFNVVRKMMTNSQ

SEQ ID NO: 187066 - protein, 20 aa, Artificial Sequence
  Description of Artificial Sequence: Synthetic peptide
  Seed: GNEKKAKLANVVRKMMTNSQ
GNEFKALLFNVYRKMMTNSQ

SEQ ID NO: 187067 - protein, 20 aa, Artificial Sequence
  Description of Artificial Sequence: Synthetic peptide
  Seed: GNEKKAKLANVVRKMMTNSQ
GNEFKALLGNVARKMMTNSQ

SEQ ID NO: 187068 - protein, 20 aa, Artificial Sequence
  Description of Artificial Sequence: Synthetic peptide
  Seed: GNEKKAKLANVVRKMMTNSQ
GNEFKALLGNVCRKMMTNSQ

SEQ ID NO: 187069 - protein, 20 aa, Artificial Sequence
  Description of Artificial Sequence: Synthetic peptide
  Seed: GNEKKAKLANVVRKMMTNSQ
GNEFKALLGNVDRKMMTNSQ

SEQ ID NO: 187070 - protein, 20 aa, Artificial Sequence
  Description of Artificial Sequence: Synthetic peptide
  Seed: GNEKKAKLANVVRKMMTNSQ
GNEFKALLGNVERKMMTNSQ

SEQ ID NO: 187071 - protein, 20 aa, Artificial Sequence
  Description of Artificial Sequence: Synthetic peptide
  Seed: GNEKKAKLANVVRKMMTNSQ
GNEFKALLGNVFRKMMTNSQ

SEQ ID NO: 187072 - protein, 20 aa, Artificial Sequence
  Description of Artificial Sequence: Synthetic peptide
  Seed: GNEKKAKLANVVRKMMTNSQ
GNEFKALLGNVGRKMMTNSQ

SEQ ID NO: 187073 - protein, 20 aa, Artificial Sequence
  Description of Artificial Sequence: Synthetic peptide
  Seed: GNEKKAKLANVVRKMMTNSQ
GNEFKALLGNVHRKMMTNSQ

SEQ ID NO: 187074 - protein, 20 aa, Artificial Sequence
  Description of Artificial Sequence: Synthetic peptide
  Seed: GNEKKAKLANVVRKMMTNSQ
GNEFKALLGNVIRKMMTNSQ

SEQ ID NO: 187075 - protein, 20 aa, Artificial Sequence
  Description of Artificial Sequence: Synthetic peptide
  Seed: GNEKKAKLANVVRKMMTNSQ
GNEFKALLGNVKRKMMTNSQ

SEQ ID NO: 187076 - protein, 20 aa, Artificial Sequence
  Description of Artificial Sequence: Synthetic peptide
  Seed: GNEKKAKLANVVRKMMTNSQ
GNEFKALLGNVLRKMMTNSQ

SEQ ID NO: 187077 - protein, 20 aa, Artificial Sequence
  Description of Artificial Sequence: Synthetic peptide
  Seed: GNEKKAKLANVVRKMMTNSQ
GNEFKALLGNVMRKMMTNSQ

SEQ ID NO: 187078 - protein, 20 aa, Artificial Sequence
  Description of Artificial Sequence: Synthetic peptide
  Seed: GNEKKAKLANVVRKMMTNSQ
GNEFKALLGNVNRKMMTNSQ

SEQ ID NO: 187079 - protein, 20 aa, Artificial Sequence
  Description of Artificial Sequence: Synthetic peptide
  Seed: GNEKKAKLANVVRKMMTNSQ
GNEFKALLGNVPRKMMTNSQ

SEQ ID NO: 187080 - protein, 20 aa, Artificial Sequence
  Description of Artificial Sequence: Synthetic peptide
  Seed: GNEKKAKLANVVRKMMTNSQ
GNEFKALLGNVQRKMMTNSQ

SEQ ID NO: 187081 - protein, 20 aa, Artificial Sequence
  Description of Artificial Sequence: Synthetic peptide
  Seed: GNEKKAKLANVVRKMMTNSQ
GNEFKALLGNVRRKMMTNSQ

SEQ ID NO: 187082 - protein, 20 aa, Artificial Sequence
  Description of Artificial Sequence: Synthetic peptide
  Seed: GNEKKAKLANVVRKMMTNSQ
GNEFKALLGNVSRKMMTNSQ

SEQ ID NO: 187083 - protein, 20 aa, Artificial Sequence
  Description of Artificial Sequence: Synthetic peptide
  Seed: GNEKKAKLANVVRKMMTNSQ
GNEFKALLGNVTRKMMTNSQ

SEQ ID NO: 187084 - protein, 20 aa, Artificial Sequence
  Description of Artificial Sequence: Synthetic peptide
  Seed: GNEKKAKLANVVRKMMTNSQ
GNEFKALLGNVVRKMMTNSQ

SEQ ID NO: 187085 - protein, 20 aa, Artificial Sequence
  Description of Artificial Sequence: Synthetic peptide
  Seed: GNEKKAKLANVVRKMMTNSQ
GNEFKALLGNVWRKMMTNSQ

SEQ ID NO: 187086 - protein, 20 aa, Artificial Sequence
  Description of Artificial Sequence: Synthetic peptide
  Seed: GNEKKAKLANVVRKMMTNSQ
GNEFKALLGNVYRKMMTNSQ

SEQ ID NO: 187087 - protein, 20 aa, Artificial Sequence
  Description of Artificial Sequence: Synthetic peptide
  Seed: GNEKKAKLANVVRKMMTNSQ
GNEFKALLHNVARKMMTNSQ

SEQ ID NO: 187088 - protein, 20 aa, Artificial Sequence
  Description of Artificial Sequence: Synthetic peptide
  Seed: GNEKKAKLANVVRKMMTNSQ
GNEFKALLHNVGRKMMTNSQ

SEQ ID NO: 187089 - protein, 20 aa, Artificial Sequence
  Description of Artificial Sequence: Synthetic peptide
  Seed: GNEKKAKLANVVRKMMTNSQ
GNEFKALLHNVIRKMMTNSQ

SEQ ID NO: 187090 - protein, 20 aa, Artificial Sequence
  Description of Artificial Sequence: Synthetic peptide
  Seed: GNEKKAKLANVVRKMMTNSQ
GNEFKALLHNVLRKMMTNSQ

SEQ ID NO: 187091 - protein, 20 aa, Artificial Sequence
  Description of Artificial Sequence: Synthetic peptide
  Seed: GNEKKAKLANVVRKMMTNSQ
GNEFKALLHNVMRKMMTNSQ

SEQ ID NO: 187092 - protein, 20 aa, Artificial Sequence
  Description of Artificial Sequence: Synthetic peptide
  Seed: GNEKKAKLANVVRKMMTNSQ
GNEFKALLHNVNRKMMTNSQ

SEQ ID NO: 187093 - protein, 20 aa, Artificial Sequence
  Description of Artificial Sequence: Synthetic peptide
  Seed: GNEKKAKLANVVRKMMTNSQ
GNEFKALLHNVSRKMMTNSQ

SEQ ID NO: 187094 - protein, 20 aa, Artificial Sequence
  Description of Artificial Sequence: Synthetic peptide
  Seed: GNEKKAKLANVVRKMMTNSQ
GNEFKALLHNVTRKMMTNSQ

SEQ ID NO: 187095 - protein, 20 aa, Artificial Sequence
  Description of Artificial Sequence: Synthetic peptide
  Seed: GNEKKAKLANVVRKMMTNSQ
GNEFKALLHNVVRKMMTNSQ

SEQ ID NO: 187096 - protein, 20 aa, Artificial Sequence
  Description of Artificial Sequence: Synthetic peptide
  Seed: GNEKKAKLANVVRKMMTNSQ
GNEFKALLINVARKMMTNSQ

SEQ ID NO: 187097 - protein, 20 aa, Artificial Sequence
  Description of Artificial Sequence: Synthetic peptide
  Seed: GNEKKAKLANVVRKMMTNSQ
GNEFKALLINVDRKMMTNSQ

SEQ ID NO: 187098 - protein, 20 aa, Artificial Sequence
  Description of Artificial Sequence: Synthetic peptide
  Seed: GNEKKAKLANVVRKMMTNSQ
GNEFKALLINVERKMMTNSQ

SEQ ID NO: 187099 - protein, 20 aa, Artificial Sequence
  Description of Artificial Sequence: Synthetic peptide
  Seed: GNEKKAKLANVVRKMMTNSQ
GNEFKALLINVFRKMMTNSQ

SEQ ID NO: 187100 - protein, 20 aa, Artificial Sequence
  Description of Artificial Sequence: Synthetic peptide
  Seed: GNEKKAKLANVVRKMMTNSQ
GNEFKALLINVGRKMMTNSQ

SEQ ID NO: 187101 - protein, 20 aa, Artificial Sequence
  Description of Artificial Sequence: Synthetic peptide
  Seed: GNEKKAKLANVVRKMMTNSQ
GNEFKALLINVHRKMMTNSQ

SEQ ID NO: 187102 - protein, 20 aa, Artificial Sequence
  Description of Artificial Sequence: Synthetic peptide
  Seed: GNEKKAKLANVVRKMMTNSQ
GNEFKALLINVIRKMMTNSQ

SEQ ID NO: 187103 - protein, 20 aa, Artificial Sequence
  Description of Artificial Sequence: Synthetic peptide
  Seed: GNEKKAKLANVVRKMMTNSQ
GNEFKALLINVKRKMMTNSQ

SEQ ID NO: 187104 - protein, 20 aa, Artificial Sequence
  Description of Artificial Sequence: Synthetic peptide
  Seed: GNEKKAKLANVVRKMMTNSQ
GNEFKALLINVLRKMMTNSQ

SEQ ID NO: 187105 - protein, 20 aa, Artificial Sequence
  Description of Artificial Sequence: Synthetic peptide
  Seed: GNEKKAKLANVVRKMMTNSQ
GNEFKALLINVMRKMMTNSQ

SEQ ID NO: 187106 - protein, 20 aa, Artificial Sequence
  Description of Artificial Sequence: Synthetic peptide
  Seed: GNEKKAKLANVVRKMMTNSQ
GNEFKALLINVNRKMMTNSQ

SEQ ID NO: 187107 - protein, 20 aa, Artificial Sequence
  Description of Artificial Sequence: Synthetic peptide
  Seed: GNEKKAKLANVVRKMMTNSQ
GNEFKALLINVPRKMMTNSQ

SEQ ID NO: 187108 - protein, 20 aa, Artificial Sequence
  Description of Artificial Sequence: Synthetic peptide
  Seed: GNEKKAKLANVVRKMMTNSQ
GNEFKALLINVQRKMMTNSQ

SEQ ID NO: 187109 - protein, 20 aa, Artificial Sequence
  Description of Artificial Sequence: Synthetic peptide
  Seed: GNEKKAKLANVVRKMMTNSQ
GNEFKALLINVRRKMMTNSQ

SEQ ID NO: 187110 - protein, 20 aa, Artificial Sequence
  Description of Artificial Sequence: Synthetic peptide
  Seed: GNEKKAKLANVVRKMMTNSQ
GNEFKALLINVSRKMMTNSQ

SEQ ID NO: 187111 - protein, 20 aa, Artificial Sequence
  Description of Artificial Sequence: Synthetic peptide
  Seed: GNEKKAKLANVVRKMMTNSQ
GNEFKALLINVTRKMMTNSQ

SEQ ID NO: 187112 - protein, 20 aa, Artificial Sequence
  Description of Artificial Sequence: Synthetic peptide
  Seed: GNEKKAKLANVVRKMMTNSQ
GNEFKALLINVVRKMMTNSQ

SEQ ID NO: 187113 - protein, 20 aa, Artificial Sequence
  Description of Artificial Sequence: Synthetic peptide
  Seed: GNEKKAKLANVVRKMMTNSQ
GNEFKALLINVYRKMMTNSQ

SEQ ID NO: 187114 - protein, 20 aa, Artificial Sequence
  Description of Artificial Sequence: Synthetic peptide
  Seed: GNEKKAKLANVVRKMMTNSQ
GNEFKALLLNVARKMMTNSQ

SEQ ID NO: 187115 - protein, 20 aa, Artificial Sequence
  Description of Artificial Sequence: Synthetic peptide
  Seed: GNEKKAKLANVVRKMMTNSQ
GNEFKALLLNVDRKMMTNSQ

SEQ ID NO: 187116 - protein, 20 aa, Artificial Sequence
  Description of Artificial Sequence: Synthetic peptide
  Seed: GNEKKAKLANVVRKMMTNSQ
GNEFKALLLNVERKMMTNSQ

SEQ ID NO: 187117 - protein, 20 aa, Artificial Sequence
  Description of Artificial Sequence: Synthetic peptide
  Seed: GNEKKAKLANVVRKMMTNSQ
GNEFKALLLNVGRKMMTNSQ

SEQ ID NO: 187118 - protein, 20 aa, Artificial Sequence
  Description of Artificial Sequence: Synthetic peptide
  Seed: GNEKKAKLANVVRKMMTNSQ
GNEFKALLLNVHRKMMTNSQ

SEQ ID NO: 187119 - protein, 20 aa, Artificial Sequence
  Description of Artificial Sequence: Synthetic peptide
  Seed: GNEKKAKLANVVRKMMTNSQ
GNEFKALLLNVIRKMMTNSQ

SEQ ID NO: 187120 - protein, 20 aa, Artificial Sequence
  Description of Artificial Sequence: Synthetic peptide
  Seed: GNEKKAKLANVVRKMMTNSQ
GNEFKALLLNVLRKMMTNSQ

SEQ ID NO: 187121 - protein, 20 aa, Artificial Sequence
  Description of Artificial Sequence: Synthetic peptide
  Seed: GNEKKAKLANVVRKMMTNSQ
GNEFKALLLNVMRKMMTNSQ

SEQ ID NO: 187122 - protein, 20 aa, Artificial Sequence
  Description of Artificial Sequence: Synthetic peptide
  Seed: GNEKKAKLANVVRKMMTNSQ
GNEFKALLLNVNRKMMTNSQ

SEQ ID NO: 187123 - protein, 20 aa, Artificial Sequence
  Description of Artificial Sequence: Synthetic peptide
  Seed: GNEKKAKLANVVRKMMTNSQ
GNEFKALLLNVSRKMMTNSQ

SEQ ID NO: 187124 - protein, 20 aa, Artificial Sequence
  Description of Artificial Sequence: Synthetic peptide
  Seed: GNEKKAKLANVVRKMMTNSQ
GNEFKALLLNVTRKMMTNSQ

SEQ ID NO: 187125 - protein, 20 aa, Artificial Sequence
  Description of Artificial Sequence: Synthetic peptide
  Seed: GNEKKAKLANVVRKMMTNSQ
GNEFKALLLNVVRKMMTNSQ

SEQ ID NO: 187126 - protein, 20 aa, Artificial Sequence
  Description of Artificial Sequence: Synthetic peptide
  Seed: GNEKKAKLANVVRKMMTNSQ
GNEFKALLLNVYRKMMTNSQ

SEQ ID NO: 187127 - protein, 20 aa, Artificial Sequence
  Description of Artificial Sequence: Synthetic peptide
  Seed: GNEKKAKLANVVRKMMTNSQ
GNEFKALLMNVARKMMTNSQ

SEQ ID NO: 187128 - protein, 20 aa, Artificial Sequence
  Description of Artificial Sequence: Synthetic peptide
  Seed: GNEKKAKLANVVRKMMTNSQ
GNEFKALLMNVDRKMMTNSQ

SEQ ID NO: 187129 - protein, 20 aa, Artificial Sequence
  Description of Artificial Sequence: Synthetic peptide
  Seed: GNEKKAKLANVVRKMMTNSQ
GNEFKALLMNVERKMMTNSQ

SEQ ID NO: 187130 - protein, 20 aa, Artificial Sequence
  Description of Artificial Sequence: Synthetic peptide
  Seed: GNEKKAKLANVVRKMMTNSQ
GNEFKALLMNVGRKMMTNSQ

SEQ ID NO: 187131 - protein, 20 aa, Artificial Sequence
  Description of Artificial Sequence: Synthetic peptide
  Seed: GNEKKAKLANVVRKMMTNSQ
GNEFKALLMNVHRKMMTNSQ

SEQ ID NO: 187132 - protein, 20 aa, Artificial Sequence
  Description of Artificial Sequence: Synthetic peptide
  Seed: GNEKKAKLANVVRKMMTNSQ
GNEFKALLMNVIRKMMTNSQ

SEQ ID NO: 187133 - protein, 20 aa, Artificial Sequence
  Description of Artificial Sequence: Synthetic peptide
  Seed: GNEKKAKLANVVRKMMTNSQ
GNEFKALLMNVLRKMMTNSQ

SEQ ID NO: 187134 - protein, 20 aa, Artificial Sequence
  Description of Artificial Sequence: Synthetic peptide
  Seed: GNEKKAKLANVVRKMMTNSQ
GNEFKALLMNVMRKMMTNSQ

SEQ ID NO: 187135 - protein, 20 aa, Artificial Sequence
  Description of Artificial Sequence: Synthetic peptide
  Seed: GNEKKAKLANVVRKMMTNSQ
GNEFKALLMNVNRKMMTNSQ

SEQ ID NO: 187136 - protein, 20 aa, Artificial Sequence
  Description of Artificial Sequence: Synthetic peptide
  Seed: GNEKKAKLANVVRKMMTNSQ
GNEFKALLMNVPRKMMTNSQ

SEQ ID NO: 187137 - protein, 20 aa, Artificial Sequence
  Description of Artificial Sequence: Synthetic peptide
  Seed: GNEKKAKLANVVRKMMTNSQ
GNEFKALLMNVQRKMMTNSQ

SEQ ID NO: 187138 - protein, 20 aa, Artificial Sequence
  Description of Artificial Sequence: Synthetic peptide
  Seed: GNEKKAKLANVVRKMMTNSQ
GNEFKALLMNVSRKMMTNSQ

SEQ ID NO: 187139 - protein, 20 aa, Artificial Sequence
  Description of Artificial Sequence: Synthetic peptide
  Seed: GNEKKAKLANVVRKMMTNSQ
GNEFKALLMNVTRKMMTNSQ

SEQ ID NO: 187140 - protein, 20 aa, Artificial Sequence
  Description of Artificial Sequence: Synthetic peptide
  Seed: GNEKKAKLANVVRKMMTNSQ
GNEFKALLMNVVRKMMTNSQ

SEQ ID NO: 187141 - protein, 20 aa, Artificial Sequence
  Description of Artificial Sequence: Synthetic peptide
  Seed: GNEKKAKLANVVRKMMTNSQ
GNEFKALLNNVARKMMTNSQ

SEQ ID NO: 187142 - protein, 20 aa, Artificial Sequence
  Description of Artificial Sequence: Synthetic peptide
  Seed: GNEKKAKLANVVRKMMTNSQ
GNEFKALLNNVCRKMMTNSQ

SEQ ID NO: 187143 - protein, 20 aa, Artificial Sequence
  Description of Artificial Sequence: Synthetic peptide
  Seed: GNEKKAKLANVVRKMMTNSQ
GNEFKALLNNVDRKMMTNSQ

SEQ ID NO: 187144 - protein, 20 aa, Artificial Sequence
  Description of Artificial Sequence: Synthetic peptide
  Seed: GNEKKAKLANVVRKMMTNSQ
GNEFKALLNNVERKMMTNSQ

SEQ ID NO: 187145 - protein, 20 aa, Artificial Sequence
  Description of Artificial Sequence: Synthetic peptide
  Seed: GNEKKAKLANVVRKMMTNSQ
GNEFKALLNNVFRKMMTNSQ

SEQ ID NO: 187146 - protein, 20 aa, Artificial Sequence
  Description of Artificial Sequence: Synthetic peptide
  Seed: GNEKKAKLANVVRKMMTNSQ
GNEFKALLNNVGRKMMTNSQ

SEQ ID NO: 187147 - protein, 20 aa, Artificial Sequence
  Description of Artificial Sequence: Synthetic peptide
  Seed: GNEKKAKLANVVRKMMTNSQ
GNEFKALLNNVHRKMMTNSQ

SEQ ID NO: 187148 - protein, 20 aa, Artificial Sequence
  Description of Artificial Sequence: Synthetic peptide
  Seed: GNEKKAKLANVVRKMMTNSQ
GNEFKALLNNVIRKMMTNSQ

SEQ ID NO: 187149 - protein, 20 aa, Artificial Sequence
  Description of Artificial Sequence: Synthetic peptide
  Seed: GNEKKAKLANVVRKMMTNSQ
GNEFKALLNNVLRKMMTNSQ

SEQ ID NO: 187150 - protein, 20 aa, Artificial Sequence
  Description of Artificial Sequence: Synthetic peptide
  Seed: GNEKKAKLANVVRKMMTNSQ
GNEFKALLNNVMRKMMTNSQ

SEQ ID NO: 187151 - protein, 20 aa, Artificial Sequence
  Description of Artificial Sequence: Synthetic peptide
  Seed: GNEKKAKLANVVRKMMTNSQ
GNEFKALLNNVNRKMMTNSQ

SEQ ID NO: 187152 - protein, 20 aa, Artificial Sequence
  Description of Artificial Sequence: Synthetic peptide
  Seed: GNEKKAKLANVVRKMMTNSQ
GNEFKALLNNVPRKMMTNSQ

SEQ ID NO: 187153 - protein, 20 aa, Artificial Sequence
  Description of Artificial Sequence: Synthetic peptide
  Seed: GNEKKAKLANVVRKMMTNSQ
GNEFKALLNNVQRKMMTNSQ

SEQ ID NO: 187154 - protein, 20 aa, Artificial Sequence
  Description of Artificial Sequence: Synthetic peptide
  Seed: GNEKKAKLANVVRKMMTNSQ
GNEFKALLNNVRRKMMTNSQ

SEQ ID NO: 187155 - protein, 20 aa, Artificial Sequence
  Description of Artificial Sequence: Synthetic peptide
  Seed: GNEKKAKLANVVRKMMTNSQ
GNEFKALLNNVSRKMMTNSQ

SEQ ID NO: 187156 - protein, 20 aa, Artificial Sequence
  Description of Artificial Sequence: Synthetic peptide
  Seed: GNEKKAKLANVVRKMMTNSQ
GNEFKALLNNVTRKMMTNSQ

SEQ ID NO: 187157 - protein, 20 aa, Artificial Sequence
  Description of Artificial Sequence: Synthetic peptide
  Seed: GNEKKAKLANVVRKMMTNSQ
GNEFKALLNNVVRKMMTNSQ

SEQ ID NO: 187158 - protein, 20 aa, Artificial Sequence
  Description of Artificial Sequence: Synthetic peptide
  Seed: GNEKKAKLANVVRKMMTNSQ
GNEFKALLNNVYRKMMTNSQ

SEQ ID NO: 187159 - protein, 20 aa, Artificial Sequence
  Description of Artificial Sequence: Synthetic peptide
  Seed: GNEKKAKLANVVRKMMTNSQ
GNEFKALLPNVARKMMTNSQ

SEQ ID NO: 187160 - protein, 20 aa, Artificial Sequence
  Description of Artificial Sequence: Synthetic peptide
  Seed: GNEKKAKLANVVRKMMTNSQ
GNEFKALLPNVCRKMMTNSQ

SEQ ID NO: 187161 - protein, 20 aa, Artificial Sequence
  Description of Artificial Sequence: Synthetic peptide
  Seed: GNEKKAKLANVVRKMMTNSQ
GNEFKALLPNVDRKMMTNSQ

SEQ ID NO: 187162 - protein, 20 aa, Artificial Sequence
  Description of Artificial Sequence: Synthetic peptide
  Seed: GNEKKAKLANVVRKMMTNSQ
GNEFKALLPNVERKMMTNSQ

SEQ ID NO: 187163 - protein, 20 aa, Artificial Sequence
  Description of Artificial Sequence: Synthetic peptide
  Seed: GNEKKAKLANVVRKMMTNSQ
GNEFKALLPNVFRKMMTNSQ

SEQ ID NO: 187164 - protein, 20 aa, Artificial Sequence
  Description of Artificial Sequence: Synthetic peptide
  Seed: GNEKKAKLANVVRKMMTNSQ
GNEFKALLPNVGRKMMTNSQ

SEQ ID NO: 187165 - protein, 20 aa, Artificial Sequence
  Description of Artificial Sequence: Synthetic peptide
  Seed: GNEKKAKLANVVRKMMTNSQ
GNEFKALLPNVHRKMMTNSQ

SEQ ID NO: 187166 - protein, 20 aa, Artificial Sequence
  Description of Artificial Sequence: Synthetic peptide
  Seed: GNEKKAKLANVVRKMMTNSQ
GNEFKALLPNVIRKMMTNSQ

SEQ ID NO: 187167 - protein, 20 aa, Artificial Sequence
  Description of Artificial Sequence: Synthetic peptide
  Seed: GNEKKAKLANVVRKMMTNSQ
GNEFKALLPNVKRKMMTNSQ

SEQ ID NO: 187168 - protein, 20 aa, Artificial Sequence
  Description of Artificial Sequence: Synthetic peptide
  Seed: GNEKKAKLANVVRKMMTNSQ
GNEFKALLPNVLRKMMTNSQ

SEQ ID NO: 187169 - protein, 20 aa, Artificial Sequence
  Description of Artificial Sequence: Synthetic peptide
  Seed: GNEKKAKLANVVRKMMTNSQ
GNEFKALLPNVMRKMMTNSQ

SEQ ID NO: 187170 - protein, 20 aa, Artificial Sequence
  Description of Artificial Sequence: Synthetic peptide
  Seed: GNEKKAKLANVVRKMMTNSQ
GNEFKALLPNVNRKMMTNSQ

SEQ ID NO: 187171 - protein, 20 aa, Artificial Sequence
  Description of Artificial Sequence: Synthetic peptide
  Seed: GNEKKAKLANVVRKMMTNSQ
GNEFKALLPNVPRKMMTNSQ

SEQ ID NO: 187172 - protein, 20 aa, Artificial Sequence
  Description of Artificial Sequence: Synthetic peptide
  Seed: GNEKKAKLANVVRKMMTNSQ
GNEFKALLPNVQRKMMTNSQ

SEQ ID NO: 187173 - protein, 20 aa, Artificial Sequence
  Description of Artificial Sequence: Synthetic peptide
  Seed: GNEKKAKLANVVRKMMTNSQ
GNEFKALLPNVRRKMMTNSQ

SEQ ID NO: 187174 - protein, 20 aa, Artificial Sequence
  Description of Artificial Sequence: Synthetic peptide
  Seed: GNEKKAKLANVVRKMMTNSQ
GNEFKALLPNVSRKMMTNSQ

SEQ ID NO: 187175 - protein, 20 aa, Artificial Sequence
  Description of Artificial Sequence: Synthetic peptide
  Seed: GNEKKAKLANVVRKMMTNSQ
GNEFKALLPNVTRKMMTNSQ

SEQ ID NO: 187176 - protein, 20 aa, Artificial Sequence
  Description of Artificial Sequence: Synthetic peptide
  Seed: GNEKKAKLANVVRKMMTNSQ
GNEFKALLPNVVRKMMTNSQ

SEQ ID NO: 187177 - protein, 20 aa, Artificial Sequence
  Description of Artificial Sequence: Synthetic peptide
  Seed: GNEKKAKLANVVRKMMTNSQ
GNEFKALLPNVWRKMMTNSQ

SEQ ID NO: 187178 - protein, 20 aa, Artificial Sequence
  Description of Artificial Sequence: Synthetic peptide
  Seed: GNEKKAKLANVVRKMMTNSQ
GNEFKALLPNVYRKMMTNSQ

SEQ ID NO: 187179 - protein, 20 aa, Artificial Sequence
  Description of Artificial Sequence: Synthetic peptide
  Seed: GNEKKAKLANVVRKMMTNSQ
GNEFKALLQNVARKMMTNSQ

SEQ ID NO: 187180 - protein, 20 aa, Artificial Sequence
  Description of Artificial Sequence: Synthetic peptide
  Seed: GNEKKAKLANVVRKMMTNSQ
GNEFKALLQNVGRKMMTNSQ

SEQ ID NO: 187181 - protein, 20 aa, Artificial Sequence
  Description of Artificial Sequence: Synthetic peptide
  Seed: GNEKKAKLANVVRKMMTNSQ
GNEFKALLQNVIRKMMTNSQ

SEQ ID NO: 187182 - protein, 20 aa, Artificial Sequence
  Description of Artificial Sequence: Synthetic peptide
  Seed: GNEKKAKLANVVRKMMTNSQ
GNEFKALLQNVLRKMMTNSQ

SEQ ID NO: 187183 - protein, 20 aa, Artificial Sequence
  Description of Artificial Sequence: Synthetic peptide
  Seed: GNEKKAKLANVVRKMMTNSQ
GNEFKALLQNVMRKMMTNSQ

SEQ ID NO: 187184 - protein, 20 aa, Artificial Sequence
  Description of Artificial Sequence: Synthetic peptide
  Seed: GNEKKAKLANVVRKMMTNSQ
GNEFKALLQNVNRKMMTNSQ

SEQ ID NO: 187185 - protein, 20 aa, Artificial Sequence
  Description of Artificial Sequence: Synthetic peptide
  Seed: GNEKKAKLANVVRKMMTNSQ
GNEFKALLQNVSRKMMTNSQ

SEQ ID NO: 187186 - protein, 20 aa, Artificial Sequence
  Description of Artificial Sequence: Synthetic peptide
  Seed: GNEKKAKLANVVRKMMTNSQ
GNEFKALLQNVTRKMMTNSQ

SEQ ID NO: 187187 - protein, 20 aa, Artificial Sequence
  Description of Artificial Sequence: Synthetic peptide
  Seed: GNEKKAKLANVVRKMMTNSQ
GNEFKALLQNVVRKMMTNSQ

SEQ ID NO: 187188 - protein, 20 aa, Artificial Sequence
  Description of Artificial Sequence: Synthetic peptide
  Seed: GNEKKAKLANVVRKMMTNSQ
GNEFKALLSNVARKMMTNSQ

SEQ ID NO: 187189 - protein, 20 aa, Artificial Sequence
  Description of Artificial Sequence: Synthetic peptide
  Seed: GNEKKAKLANVVRKMMTNSQ
GNEFKALLSNVCRKMMTNSQ

SEQ ID NO: 187190 - protein, 20 aa, Artificial Sequence
  Description of Artificial Sequence: Synthetic peptide
  Seed: GNEKKAKLANVVRKMMTNSQ
GNEFKALLSNVDRKMMTNSQ

SEQ ID NO: 187191 - protein, 20 aa, Artificial Sequence
  Description of Artificial Sequence: Synthetic peptide
  Seed: GNEKKAKLANVVRKMMTNSQ
GNEFKALLSNVERKMMTNSQ

SEQ ID NO: 187192 - protein, 20 aa, Artificial Sequence
  Description of Artificial Sequence: Synthetic peptide
  Seed: GNEKKAKLANVVRKMMTNSQ
GNEFKALLSNVFRKMMTNSQ

SEQ ID NO: 187193 - protein, 20 aa, Artificial Sequence
  Description of Artificial Sequence: Synthetic peptide
  Seed: GNEKKAKLANVVRKMMTNSQ
GNEFKALLSNVGRKMMTNSQ

SEQ ID NO: 187194 - protein, 20 aa, Artificial Sequence
  Description of Artificial Sequence: Synthetic peptide
  Seed: GNEKKAKLANVVRKMMTNSQ
GNEFKALLSNVHRKMMTNSQ

SEQ ID NO: 187195 - protein, 20 aa, Artificial Sequence
  Description of Artificial Sequence: Synthetic peptide
  Seed: GNEKKAKLANVVRKMMTNSQ
GNEFKALLSNVIRKMMTNSQ

SEQ ID NO: 187196 - protein, 20 aa, Artificial Sequence
  Description of Artificial Sequence: Synthetic peptide
  Seed: GNEKKAKLANVVRKMMTNSQ
GNEFKALLSNVKRKMMTNSQ

SEQ ID NO: 187197 - protein, 20 aa, Artificial Sequence
  Description of Artificial Sequence: Synthetic peptide
  Seed: GNEKKAKLANVVRKMMTNSQ
GNEFKALLSNVLRKMMTNSQ

SEQ ID NO: 187198 - protein, 20 aa, Artificial Sequence
  Description of Artificial Sequence: Synthetic peptide
  Seed: GNEKKAKLANVVRKMMTNSQ
GNEFKALLSNVMRKMMTNSQ

SEQ ID NO: 187199 - protein, 20 aa, Artificial Sequence
  Description of Artificial Sequence: Synthetic peptide
  Seed: GNEKKAKLANVVRKMMTNSQ
GNEFKALLSNVNRKMMTNSQ

SEQ ID NO: 187200 - protein, 20 aa, Artificial Sequence
  Description of Artificial Sequence: Synthetic peptide
  Seed: GNEKKAKLANVVRKMMTNSQ
GNEFKALLSNVPRKMMTNSQ

SEQ ID NO: 187201 - protein, 20 aa, Artificial Sequence
  Description of Artificial Sequence: Synthetic peptide
  Seed: GNEKKAKLANVVRKMMTNSQ
GNEFKALLSNVQRKMMTNSQ

SEQ ID NO: 187202 - protein, 20 aa, Artificial Sequence
  Description of Artificial Sequence: Synthetic peptide
  Seed: GNEKKAKLANVVRKMMTNSQ
GNEFKALLSNVRRKMMTNSQ

SEQ ID NO: 187203 - protein, 20 aa, Artificial Sequence
  Description of Artificial Sequence: Synthetic peptide
  Seed: GNEKKAKLANVVRKMMTNSQ
GNEFKALLSNVSRKMMTNSQ

SEQ ID NO: 187204 - protein, 20 aa, Artificial Sequence
  Description of Artificial Sequence: Synthetic peptide
  Seed: GNEKKAKLANVVRKMMTNSQ
GNEFKALLSNVTRKMMTNSQ

SEQ ID NO: 187205 - protein, 20 aa, Artificial Sequence
  Description of Artificial Sequence: Synthetic peptide
  Seed: GNEKKAKLANVVRKMMTNSQ
GNEFKALLSNVVRKMMTNSQ

SEQ ID NO: 187206 - protein, 20 aa, Artificial Sequence
  Description of Artificial Sequence: Synthetic peptide
  Seed: GNEKKAKLANVVRKMMTNSQ
GNEFKALLSNVYRKMMTNSQ

SEQ ID NO: 187207 - protein, 20 aa, Artificial Sequence
  Description of Artificial Sequence: Synthetic peptide
  Seed: GNEKKAKLANVVRKMMTNSQ
GNEFKALLTNVARKMMTNSQ

SEQ ID NO: 187208 - protein, 20 aa, Artificial Sequence
  Description of Artificial Sequence: Synthetic peptide
  Seed: GNEKKAKLANVVRKMMTNSQ
GNEFKALLTNVCRKMMTNSQ

SEQ ID NO: 187209 - protein, 20 aa, Artificial Sequence
  Description of Artificial Sequence: Synthetic peptide
  Seed: GNEKKAKLANVVRKMMTNSQ
GNEFKALLTNVDRKMMTNSQ

SEQ ID NO: 187210 - protein, 20 aa, Artificial Sequence
  Description of Artificial Sequence: Synthetic peptide
  Seed: GNEKKAKLANVVRKMMTNSQ
GNEFKALLTNVERKMMTNSQ

SEQ ID NO: 187211 - protein, 20 aa, Artificial Sequence
  Description of Artificial Sequence: Synthetic peptide
  Seed: GNEKKAKLANVVRKMMTNSQ
GNEFKALLTNVFRKMMTNSQ

SEQ ID NO: 187212 - protein, 20 aa, Artificial Sequence
  Description of Artificial Sequence: Synthetic peptide
  Seed: GNEKKAKLANVVRKMMTNSQ
GNEFKALLTNVGRKMMTNSQ

SEQ ID NO: 187213 - protein, 20 aa, Artificial Sequence
  Description of Artificial Sequence: Synthetic peptide
  Seed: GNEKKAKLANVVRKMMTNSQ
GNEFKALLTNVHRKMMTNSQ

SEQ ID NO: 187214 - protein, 20 aa, Artificial Sequence
  Description of Artificial Sequence: Synthetic peptide
  Seed: GNEKKAKLANVVRKMMTNSQ
GNEFKALLTNVIRKMMTNSQ

SEQ ID NO: 187215 - protein, 20 aa, Artificial Sequence
  Description of Artificial Sequence: Synthetic peptide
  Seed: GNEKKAKLANVVRKMMTNSQ
GNEFKALLTNVKRKMMTNSQ

SEQ ID NO: 187216 - protein, 20 aa, Artificial Sequence
  Description of Artificial Sequence: Synthetic peptide
  Seed: GNEKKAKLANVVRKMMTNSQ
GNEFKALLTNVLRKMMTNSQ

SEQ ID NO: 187217 - protein, 20 aa, Artificial Sequence
  Description of Artificial Sequence: Synthetic peptide
  Seed: GNEKKAKLANVVRKMMTNSQ
GNEFKALLTNVMRKMMTNSQ

SEQ ID NO: 187218 - protein, 20 aa, Artificial Sequence
  Description of Artificial Sequence: Synthetic peptide
  Seed: GNEKKAKLANVVRKMMTNSQ
GNEFKALLTNVNRKMMTNSQ

SEQ ID NO: 187219 - protein, 20 aa, Artificial Sequence
  Description of Artificial Sequence: Synthetic peptide
  Seed: GNEKKAKLANVVRKMMTNSQ
GNEFKALLTNVPRKMMTNSQ

SEQ ID NO: 187220 - protein, 20 aa, Artificial Sequence
  Description of Artificial Sequence: Synthetic peptide
  Seed: GNEKKAKLANVVRKMMTNSQ
GNEFKALLTNVQRKMMTNSQ

SEQ ID NO: 187221 - protein, 20 aa, Artificial Sequence
  Description of Artificial Sequence: Synthetic peptide
  Seed: GNEKKAKLANVVRKMMTNSQ
GNEFKALLTNVRRKMMTNSQ

SEQ ID NO: 187222 - protein, 20 aa, Artificial Sequence
  Description of Artificial Sequence: Synthetic peptide
  Seed: GNEKKAKLANVVRKMMTNSQ
GNEFKALLTNVSRKMMTNSQ

SEQ ID NO: 187223 - protein, 20 aa, Artificial Sequence
  Description of Artificial Sequence: Synthetic peptide
  Seed: GNEKKAKLANVVRKMMTNSQ
GNEFKALLTNVTRKMMTNSQ

SEQ ID NO: 187224 - protein, 20 aa, Artificial Sequence
  Description of Artificial Sequence: Synthetic peptide
  Seed: GNEKKAKLANVVRKMMTNSQ
GNEFKALLTNVVRKMMTNSQ

SEQ ID NO: 187225 - protein, 20 aa, Artificial Sequence
  Description of Artificial Sequence: Synthetic peptide
  Seed: GNEKKAKLANVVRKMMTNSQ
GNEFKALLTNVWRKMMTNSQ

SEQ ID NO: 187226 - protein, 20 aa, Artificial Sequence
  Description of Artificial Sequence: Synthetic peptide
  Seed: GNEKKAKLANVVRKMMTNSQ
GNEFKALLTNVYRKMMTNSQ

SEQ ID NO: 187227 - protein, 20 aa, Artificial Sequence
  Description of Artificial Sequence: Synthetic peptide
  Seed: GNEKKAKLANVVRKMMTNSQ
GNEFKALLVNVARKMMTNSQ

SEQ ID NO: 187228 - protein, 20 aa, Artificial Sequence
  Description of Artificial Sequence: Synthetic peptide
  Seed: GNEKKAKLANVVRKMMTNSQ
GNEFKALLVNVCRKMMTNSQ

SEQ ID NO: 187229 - protein, 20 aa, Artificial Sequence
  Description of Artificial Sequence: Synthetic peptide
  Seed: GNEKKAKLANVVRKMMTNSQ
GNEFKALLVNVDRKMMTNSQ

SEQ ID NO: 187230 - protein, 20 aa, Artificial Sequence
  Description of Artificial Sequence: Synthetic peptide
  Seed: GNEKKAKLANVVRKMMTNSQ
GNEFKALLVNVERKMMTNSQ

SEQ ID NO: 187231 - protein, 20 aa, Artificial Sequence
  Description of Artificial Sequence: Synthetic peptide
  Seed: GNEKKAKLANVVRKMMTNSQ
GNEFKALLVNVFRKMMTNSQ

SEQ ID NO: 187232 - protein, 20 aa, Artificial Sequence
  Description of Artificial Sequence: Synthetic peptide
  Seed: GNEKKAKLANVVRKMMTNSQ
GNEFKALLVNVGRKMMTNSQ

SEQ ID NO: 187233 - protein, 20 aa, Artificial Sequence
  Description of Artificial Sequence: Synthetic peptide
  Seed: GNEKKAKLANVVRKMMTNSQ
GNEFKALLVNVHRKMMTNSQ

SEQ ID NO: 187234 - protein, 20 aa, Artificial Sequence
  Description of Artificial Sequence: Synthetic peptide
  Seed: GNEKKAKLANVVRKMMTNSQ
GNEFKALLVNVIRKMMTNSQ

SEQ ID NO: 187235 - protein, 20 aa, Artificial Sequence
  Description of Artificial Sequence: Synthetic peptide
  Seed: GNEKKAKLANVVRKMMTNSQ
GNEFKALLVNVKRKMMTNSQ

SEQ ID NO: 187236 - protein, 20 aa, Artificial Sequence
  Description of Artificial Sequence: Synthetic peptide
  Seed: GNEKKAKLANVVRKMMTNSQ
GNEFKALLVNVLRKMMTNSQ

SEQ ID NO: 187237 - protein, 20 aa, Artificial Sequence
  Description of Artificial Sequence: Synthetic peptide
  Seed: GNEKKAKLANVVRKMMTNSQ
GNEFKALLVNVMRKMMTNSQ

SEQ ID NO: 187238 - protein, 20 aa, Artificial Sequence
  Description of Artificial Sequence: Synthetic peptide
  Seed: GNEKKAKLANVVRKMMTNSQ
GNEFKALLVNVNRKMMTNSQ

SEQ ID NO: 187239 - protein, 20 aa, Artificial Sequence
  Description of Artificial Sequence: Synthetic peptide
  Seed: GNEKKAKLANVVRKMMTNSQ
GNEFKALLVNVPRKMMTNSQ

SEQ ID NO: 187240 - protein, 20 aa, Artificial Sequence
  Description of Artificial Sequence: Synthetic peptide
  Seed: GNEKKAKLANVVRKMMTNSQ
GNEFKALLVNVQRKMMTNSQ

SEQ ID NO: 187241 - protein, 20 aa, Artificial Sequence
  Description of Artificial Sequence: Synthetic peptide
  Seed: GNEKKAKLANVVRKMMTNSQ
GNEFKALLVNVRRKMMTNSQ

SEQ ID NO: 187242 - protein, 20 aa, Artificial Sequence
  Description of Artificial Sequence: Synthetic peptide
  Seed: GNEKKAKLANVVRKMMTNSQ
GNEFKALLVNVSRKMMTNSQ

SEQ ID NO: 187243 - protein, 20 aa, Artificial Sequence
  Description of Artificial Sequence: Synthetic peptide
  Seed: GNEKKAKLANVVRKMMTNSQ
GNEFKALLVNVTRKMMTNSQ

SEQ ID NO: 187244 - protein, 20 aa, Artificial Sequence
  Description of Artificial Sequence: Synthetic peptide
  Seed: GNEKKAKLANVVRKMMTNSQ
GNEFKALLVNVVRKMMTNSQ

SEQ ID NO: 187245 - protein, 20 aa, Artificial Sequence
  Description of Artificial Sequence: Synthetic peptide
  Seed: GNEKKAKLANVVRKMMTNSQ
GNEFKALLVNVYRKMMTNSQ

SEQ ID NO: 187246 - protein, 20 aa, Artificial Sequence
  Description of Artificial Sequence: Synthetic peptide
  Seed: GNEKKAKLANVVRKMMTNSQ
GNEFKALLWNVARKMMTNSQ

SEQ ID NO: 187247 - protein, 20 aa, Artificial Sequence
  Description of Artificial Sequence: Synthetic peptide
  Seed: GNEKKAKLANVVRKMMTNSQ
GNEFKALLWNVIRKMMTNSQ

SEQ ID NO: 187248 - protein, 20 aa, Artificial Sequence
  Description of Artificial Sequence: Synthetic peptide
  Seed: GNEKKAKLANVVRKMMTNSQ
GNEFKALLWNVLRKMMTNSQ

SEQ ID NO: 187249 - protein, 20 aa, Artificial Sequence
  Description of Artificial Sequence: Synthetic peptide
  Seed: GNEKKAKLANVVRKMMTNSQ
GNEFKALLWNVMRKMMTNSQ

SEQ ID NO: 187250 - protein, 20 aa, Artificial Sequence
  Description of Artificial Sequence: Synthetic peptide
  Seed: GNEKKAKLANVVRKMMTNSQ
GNEFKALLWNVVRKMMTNSQ

SEQ ID NO: 187251 - protein, 20 aa, Artificial Sequence
  Description of Artificial Sequence: Synthetic peptide
  Seed: GNEKKAKLANVVRKMMTNSQ
GNEFKALLYNVARKMMTNSQ

SEQ ID NO: 187252 - protein, 20 aa, Artificial Sequence
  Description of Artificial Sequence: Synthetic peptide
  Seed: GNEKKAKLANVVRKMMTNSQ
GNEFKALLYNVERKMMTNSQ

SEQ ID NO: 187253 - protein, 20 aa, Artificial Sequence
  Description of Artificial Sequence: Synthetic peptide
  Seed: GNEKKAKLANVVRKMMTNSQ
GNEFKALLYNVIRKMMTNSQ

SEQ ID NO: 187254 - protein, 20 aa, Artificial Sequence
  Description of Artificial Sequence: Synthetic peptide
  Seed: GNEKKAKLANVVRKMMTNSQ
GNEFKALLYNVLRKMMTNSQ

SEQ ID NO: 187255 - protein, 20 aa, Artificial Sequence
  Description of Artificial Sequence: Synthetic peptide
  Seed: GNEKKAKLANVVRKMMTNSQ
GNEFKALLYNVMRKMMTNSQ

SEQ ID NO: 187256 - protein, 20 aa, Artificial Sequence
  Description of Artificial Sequence: Synthetic peptide
  Seed: GNEKKAKLANVVRKMMTNSQ
GNEFKALLYNVNRKMMTNSQ

SEQ ID NO: 187257 - protein, 20 aa, Artificial Sequence
  Description of Artificial Sequence: Synthetic peptide
  Seed: GNEKKAKLANVVRKMMTNSQ
GNEFKALLYNVSRKMMTNSQ

SEQ ID NO: 187258 - protein, 20 aa, Artificial Sequence
  Description of Artificial Sequence: Synthetic peptide
  Seed: GNEKKAKLANVVRKMMTNSQ
GNEFKALLYNVTRKMMTNSQ

SEQ ID NO: 187259 - protein, 20 aa, Artificial Sequence
  Description of Artificial Sequence: Synthetic peptide
  Seed: GNEKKAKLANVVRKMMTNSQ
GNEFKALLYNVVRKMMTNSQ

SEQ ID NO: 187260 - protein, 20 aa, Artificial Sequence
  Description of Artificial Sequence: Synthetic peptide
  Seed: GNEKKAKLANVVRKMMTNSQ
GNEFKAMLANVARKMMTNSQ

SEQ ID NO: 187261 - protein, 20 aa, Artificial Sequence
  Description of Artificial Sequence: Synthetic peptide
  Seed: GNEKKAKLANVVRKMMTNSQ
GNEFKAMLANVCRKMMTNSQ

SEQ ID NO: 187262 - protein, 20 aa, Artificial Sequence
  Description of Artificial Sequence: Synthetic peptide
  Seed: GNEKKAKLANVVRKMMTNSQ
GNEFKAMLANVDRKMMTNSQ

SEQ ID NO: 187263 - protein, 20 aa, Artificial Sequence
  Description of Artificial Sequence: Synthetic peptide
  Seed: GNEKKAKLANVVRKMMTNSQ
GNEFKAMLANVERKMMTNSQ

SEQ ID NO: 187264 - protein, 20 aa, Artificial Sequence
  Description of Artificial Sequence: Synthetic peptide
  Seed: GNEKKAKLANVVRKMMTNSQ
GNEFKAMLANVFRKMMTNSQ

SEQ ID NO: 187265 - protein, 20 aa, Artificial Sequence
  Description of Artificial Sequence: Synthetic peptide
  Seed: GNEKKAKLANVVRKMMTNSQ
GNEFKAMLANVGRKMMTNSQ

SEQ ID NO: 187266 - protein, 20 aa, Artificial Sequence
  Description of Artificial Sequence: Synthetic peptide
  Seed: GNEKKAKLANVVRKMMTNSQ
GNEFKAMLANVHRKMMTNSQ

SEQ ID NO: 187267 - protein, 20 aa, Artificial Sequence
  Description of Artificial Sequence: Synthetic peptide
  Seed: GNEKKAKLANVVRKMMTNSQ
GNEFKAMLANVIRKMMTNSQ

SEQ ID NO: 187268 - protein, 20 aa, Artificial Sequence
  Description of Artificial Sequence: Synthetic peptide
  Seed: GNEKKAKLANVVRKMMTNSQ
GNEFKAMLANVKRKMMTNSQ

SEQ ID NO: 187269 - protein, 20 aa, Artificial Sequence
  Description of Artificial Sequence: Synthetic peptide
  Seed: GNEKKAKLANVVRKMMTNSQ
GNEFKAMLANVLRKMMTNSQ

SEQ ID NO: 187270 - protein, 20 aa, Artificial Sequence
  Description of Artificial Sequence: Synthetic peptide
  Seed: GNEKKAKLANVVRKMMTNSQ
GNEFKAMLANVMRKMMTNSQ

SEQ ID NO: 187271 - protein, 20 aa, Artificial Sequence
  Description of Artificial Sequence: Synthetic peptide
  Seed: GNEKKAKLANVVRKMMTNSQ
GNEFKAMLANVNRKMMTNSQ

SEQ ID NO: 187272 - protein, 20 aa, Artificial Sequence
  Description of Artificial Sequence: Synthetic peptide
  Seed: GNEKKAKLANVVRKMMTNSQ
GNEFKAMLANVPRKMMTNSQ

SEQ ID NO: 187273 - protein, 20 aa, Artificial Sequence
  Description of Artificial Sequence: Synthetic peptide
  Seed: GNEKKAKLANVVRKMMTNSQ
GNEFKAMLANVQRKMMTNSQ

SEQ ID NO: 187274 - protein, 20 aa, Artificial Sequence
  Description of Artificial Sequence: Synthetic peptide
  Seed: GNEKKAKLANVVRKMMTNSQ
GNEFKAMLANVRRKMMTNSQ

SEQ ID NO: 187275 - protein, 20 aa, Artificial Sequence
  Description of Artificial Sequence: Synthetic peptide
  Seed: GNEKKAKLANVVRKMMTNSQ
GNEFKAMLANVSRKMMTNSQ

SEQ ID NO: 187276 - protein, 20 aa, Artificial Sequence
  Description of Artificial Sequence: Synthetic peptide
  Seed: GNEKKAKLANVVRKMMTNSQ
GNEFKAMLANVTRKMMTNSQ

SEQ ID NO: 187277 - protein, 20 aa, Artificial Sequence
  Description of Artificial Sequence: Synthetic peptide
  Seed: GNEKKAKLANVVRKMMTNSQ
GNEFKAMLANVVRKMMTNSQ

SEQ ID NO: 187278 - protein, 20 aa, Artificial Sequence
  Description of Artificial Sequence: Synthetic peptide
  Seed: GNEKKAKLANVVRKMMTNSQ
GNEFKAMLANVWRKMMTNSQ

SEQ ID NO: 187279 - protein, 20 aa, Artificial Sequence
  Description of Artificial Sequence: Synthetic peptide
  Seed: GNEKKAKLANVVRKMMTNSQ
GNEFKAMLANVYRKMMTNSQ

SEQ ID NO: 187280 - protein, 20 aa, Artificial Sequence
  Description of Artificial Sequence: Synthetic peptide
  Seed: GNEKKAKLANVVRKMMTNSQ
GNEFKAMLCNVARKMMTNSQ

SEQ ID NO: 187281 - protein, 20 aa, Artificial Sequence
  Description of Artificial Sequence: Synthetic peptide
  Seed: GNEKKAKLANVVRKMMTNSQ
GNEFKAMLCNVNRKMMTNSQ

SEQ ID NO: 187282 - protein, 20 aa, Artificial Sequence
  Description of Artificial Sequence: Synthetic peptide
  Seed: GNEKKAKLANVVRKMMTNSQ
GNEFKAMLCNVSRKMMTNSQ

SEQ ID NO: 187283 - protein, 20 aa, Artificial Sequence
  Description of Artificial Sequence: Synthetic peptide
  Seed: GNEKKAKLANVVRKMMTNSQ
GNEFKAMLCNVTRKMMTNSQ

SEQ ID NO: 187284 - protein, 20 aa, Artificial Sequence
  Description of Artificial Sequence: Synthetic peptide
  Seed: GNEKKAKLANVVRKMMTNSQ
GNEFKAMLCNVVRKMMTNSQ

SEQ ID NO: 187285 - protein, 20 aa, Artificial Sequence
  Description of Artificial Sequence: Synthetic peptide
  Seed: GNEKKAKLANVVRKMMTNSQ
GNEFKAMLDNVARKMMTNSQ

SEQ ID NO: 187286 - protein, 20 aa, Artificial Sequence
  Description of Artificial Sequence: Synthetic peptide
  Seed: GNEKKAKLANVVRKMMTNSQ
GNEFKAMLDNVIRKMMTNSQ

SEQ ID NO: 187287 - protein, 20 aa, Artificial Sequence
  Description of Artificial Sequence: Synthetic peptide
  Seed: GNEKKAKLANVVRKMMTNSQ
GNEFKAMLDNVLRKMMTNSQ

SEQ ID NO: 187288 - protein, 20 aa, Artificial Sequence
  Description of Artificial Sequence: Synthetic peptide
  Seed: GNEKKAKLANVVRKMMTNSQ
GNEFKAMLDNVMRKMMTNSQ

SEQ ID NO: 187289 - protein, 20 aa, Artificial Sequence
  Description of Artificial Sequence: Synthetic peptide
  Seed: GNEKKAKLANVVRKMMTNSQ
GNEFKAMLDNVNRKMMTNSQ

SEQ ID NO: 187290 - protein, 20 aa, Artificial Sequence
  Description of Artificial Sequence: Synthetic peptide
  Seed: GNEKKAKLANVVRKMMTNSQ
GNEFKAMLDNVSRKMMTNSQ

SEQ ID NO: 187291 - protein, 20 aa, Artificial Sequence
  Description of Artificial Sequence: Synthetic peptide
  Seed: GNEKKAKLANVVRKMMTNSQ
GNEFKAMLDNVTRKMMTNSQ

SEQ ID NO: 187292 - protein, 20 aa, Artificial Sequence
  Description of Artificial Sequence: Synthetic peptide
  Seed: GNEKKAKLANVVRKMMTNSQ
GNEFKAMLDNVVRKMMTNSQ

SEQ ID NO: 187293 - protein, 20 aa, Artificial Sequence
  Description of Artificial Sequence: Synthetic peptide
  Seed: GNEKKAKLANVVRKMMTNSQ
GNEFKAMLENVARKMMTNSQ

SEQ ID NO: 187294 - protein, 20 aa, Artificial Sequence
  Description of Artificial Sequence: Synthetic peptide
  Seed: GNEKKAKLANVVRKMMTNSQ
GNEFKAMLENVGRKMMTNSQ

SEQ ID NO: 187295 - protein, 20 aa, Artificial Sequence
  Description of Artificial Sequence: Synthetic peptide
  Seed: GNEKKAKLANVVRKMMTNSQ
GNEFKAMLENVHRKMMTNSQ

SEQ ID NO: 187296 - protein, 20 aa, Artificial Sequence
  Description of Artificial Sequence: Synthetic peptide
  Seed: GNEKKAKLANVVRKMMTNSQ
GNEFKAMLENVIRKMMTNSQ

SEQ ID NO: 187297 - protein, 20 aa, Artificial Sequence
  Description of Artificial Sequence: Synthetic peptide
  Seed: GNEKKAKLANVVRKMMTNSQ
GNEFKAMLENVLRKMMTNSQ

SEQ ID NO: 187298 - protein, 20 aa, Artificial Sequence
  Description of Artificial Sequence: Synthetic peptide
  Seed: GNEKKAKLANVVRKMMTNSQ
GNEFKAMLENVMRKMMTNSQ

SEQ ID NO: 187299 - protein, 20 aa, Artificial Sequence
  Description of Artificial Sequence: Synthetic peptide
  Seed: GNEKKAKLANVVRKMMTNSQ
GNEFKAMLENVNRKMMTNSQ

SEQ ID NO: 187300 - protein, 20 aa, Artificial Sequence
  Description of Artificial Sequence: Synthetic peptide
  Seed: GNEKKAKLANVVRKMMTNSQ
GNEFKAMLENVSRKMMTNSQ

SEQ ID NO: 187301 - protein, 20 aa, Artificial Sequence
  Description of Artificial Sequence: Synthetic peptide
  Seed: GNEKKAKLANVVRKMMTNSQ
GNEFKAMLENVTRKMMTNSQ

SEQ ID NO: 187302 - protein, 20 aa, Artificial Sequence
  Description of Artificial Sequence: Synthetic peptide
  Seed: GNEKKAKLANVVRKMMTNSQ
GNEFKAMLENVVRKMMTNSQ

SEQ ID NO: 187303 - protein, 20 aa, Artificial Sequence
  Description of Artificial Sequence: Synthetic peptide
  Seed: GNEKKAKLANVVRKMMTNSQ
GNEFKAMLFNVARKMMTNSQ

SEQ ID NO: 187304 - protein, 20 aa, Artificial Sequence
  Description of Artificial Sequence: Synthetic peptide
  Seed: GNEKKAKLANVVRKMMTNSQ
GNEFKAMLFNVDRKMMTNSQ

SEQ ID NO: 187305 - protein, 20 aa, Artificial Sequence
  Description of Artificial Sequence: Synthetic peptide
  Seed: GNEKKAKLANVVRKMMTNSQ
GNEFKAMLFNVERKMMTNSQ

SEQ ID NO: 187306 - protein, 20 aa, Artificial Sequence
  Description of Artificial Sequence: Synthetic peptide
  Seed: GNEKKAKLANVVRKMMTNSQ
GNEFKAMLFNVFRKMMTNSQ

SEQ ID NO: 187307 - protein, 20 aa, Artificial Sequence
  Description of Artificial Sequence: Synthetic peptide
  Seed: GNEKKAKLANVVRKMMTNSQ
GNEFKAMLFNVHRKMMTNSQ

SEQ ID NO: 187308 - protein, 20 aa, Artificial Sequence
  Description of Artificial Sequence: Synthetic peptide
  Seed: GNEKKAKLANVVRKMMTNSQ
GNEFKAMLFNVIRKMMTNSQ

SEQ ID NO: 187309 - protein, 20 aa, Artificial Sequence
  Description of Artificial Sequence: Synthetic peptide
  Seed: GNEKKAKLANVVRKMMTNSQ
GNEFKAMLFNVLRKMMTNSQ

SEQ ID NO: 187310 - protein, 20 aa, Artificial Sequence
  Description of Artificial Sequence: Synthetic peptide
  Seed: GNEKKAKLANVVRKMMTNSQ
GNEFKAMLFNVMRKMMTNSQ

SEQ ID NO: 187311 - protein, 20 aa, Artificial Sequence
  Description of Artificial Sequence: Synthetic peptide
  Seed: GNEKKAKLANVVRKMMTNSQ
GNEFKAMLFNVNRKMMTNSQ

SEQ ID NO: 187312 - protein, 20 aa, Artificial Sequence
  Description of Artificial Sequence: Synthetic peptide
  Seed: GNEKKAKLANVVRKMMTNSQ
GNEFKAMLFNVPRKMMTNSQ

SEQ ID NO: 187313 - protein, 20 aa, Artificial Sequence
  Description of Artificial Sequence: Synthetic peptide
  Seed: GNEKKAKLANVVRKMMTNSQ
GNEFKAMLFNVQRKMMTNSQ

SEQ ID NO: 187314 - protein, 20 aa, Artificial Sequence
  Description of Artificial Sequence: Synthetic peptide
  Seed: GNEKKAKLANVVRKMMTNSQ
GNEFKAMLFNVSRKMMTNSQ

SEQ ID NO: 187315 - protein, 20 aa, Artificial Sequence
  Description of Artificial Sequence: Synthetic peptide
  Seed: GNEKKAKLANVVRKMMTNSQ
GNEFKAMLFNVTRKMMTNSQ

SEQ ID NO: 187316 - protein, 20 aa, Artificial Sequence
  Description of Artificial Sequence: Synthetic peptide
  Seed: GNEKKAKLANVVRKMMTNSQ
GNEFKAMLFNVVRKMMTNSQ

SEQ ID NO: 187317 - protein, 20 aa, Artificial Sequence
  Description of Artificial Sequence: Synthetic peptide
  Seed: GNEKKAKLANVVRKMMTNSQ
GNEFKAMLFNVYRKMMTNSQ

SEQ ID NO: 187318 - protein, 20 aa, Artificial Sequence
  Description of Artificial Sequence: Synthetic peptide
  Seed: GNEKKAKLANVVRKMMTNSQ
GNEFKAMLGNVARKMMTNSQ

SEQ ID NO: 187319 - protein, 20 aa, Artificial Sequence
  Description of Artificial Sequence: Synthetic peptide
  Seed: GNEKKAKLANVVRKMMTNSQ
GNEFKAMLGNVCRKMMTNSQ

SEQ ID NO: 187320 - protein, 20 aa, Artificial Sequence
  Description of Artificial Sequence: Synthetic peptide
  Seed: GNEKKAKLANVVRKMMTNSQ
GNEFKAMLGNVDRKMMTNSQ

SEQ ID NO: 187321 - protein, 20 aa, Artificial Sequence
  Description of Artificial Sequence: Synthetic peptide
  Seed: GNEKKAKLANVVRKMMTNSQ
GNEFKAMLGNVERKMMTNSQ

SEQ ID NO: 187322 - protein, 20 aa, Artificial Sequence
  Description of Artificial Sequence: Synthetic peptide
  Seed: GNEKKAKLANVVRKMMTNSQ
GNEFKAMLGNVFRKMMTNSQ

SEQ ID NO: 187323 - protein, 20 aa, Artificial Sequence
  Description of Artificial Sequence: Synthetic peptide
  Seed: GNEKKAKLANVVRKMMTNSQ
GNEFKAMLGNVGRKMMTNSQ

SEQ ID NO: 187324 - protein, 20 aa, Artificial Sequence
  Description of Artificial Sequence: Synthetic peptide
  Seed: GNEKKAKLANVVRKMMTNSQ
GNEFKAMLGNVHRKMMTNSQ

SEQ ID NO: 187325 - protein, 20 aa, Artificial Sequence
  Description of Artificial Sequence: Synthetic peptide
  Seed: GNEKKAKLANVVRKMMTNSQ
GNEFKAMLGNVIRKMMTNSQ

SEQ ID NO: 187326 - protein, 20 aa, Artificial Sequence
  Description of Artificial Sequence: Synthetic peptide
  Seed: GNEKKAKLANVVRKMMTNSQ
GNEFKAMLGNVKRKMMTNSQ

SEQ ID NO: 187327 - protein, 20 aa, Artificial Sequence
  Description of Artificial Sequence: Synthetic peptide
  Seed: GNEKKAKLANVVRKMMTNSQ
GNEFKAMLGNVLRKMMTNSQ

SEQ ID NO: 187328 - protein, 20 aa, Artificial Sequence
  Description of Artificial Sequence: Synthetic peptide
  Seed: GNEKKAKLANVVRKMMTNSQ
GNEFKAMLGNVMRKMMTNSQ

SEQ ID NO: 187329 - protein, 20 aa, Artificial Sequence
  Description of Artificial Sequence: Synthetic peptide
  Seed: GNEKKAKLANVVRKMMTNSQ
GNEFKAMLGNVNRKMMTNSQ

SEQ ID NO: 187330 - protein, 20 aa, Artificial Sequence
  Description of Artificial Sequence: Synthetic peptide
  Seed: GNEKKAKLANVVRKMMTNSQ
GNEFKAMLGNVPRKMMTNSQ

SEQ ID NO: 187331 - protein, 20 aa, Artificial Sequence
  Description of Artificial Sequence: Synthetic peptide
  Seed: GNEKKAKLANVVRKMMTNSQ
GNEFKAMLGNVQRKMMTNSQ

SEQ ID NO: 187332 - protein, 20 aa, Artificial Sequence
  Description of Artificial Sequence: Synthetic peptide
  Seed: GNEKKAKLANVVRKMMTNSQ
GNEFKAMLGNVRRKMMTNSQ

SEQ ID NO: 187333 - protein, 20 aa, Artificial Sequence
  Description of Artificial Sequence: Synthetic peptide
  Seed: GNEKKAKLANVVRKMMTNSQ
GNEFKAMLGNVSRKMMTNSQ

SEQ ID NO: 187334 - protein, 20 aa, Artificial Sequence
  Description of Artificial Sequence: Synthetic peptide
  Seed: GNEKKAKLANVVRKMMTNSQ
GNEFKAMLGNVTRKMMTNSQ

SEQ ID NO: 187335 - protein, 20 aa, Artificial Sequence
  Description of Artificial Sequence: Synthetic peptide
  Seed: GNEKKAKLANVVRKMMTNSQ
GNEFKAMLGNVVRKMMTNSQ

SEQ ID NO: 187336 - protein, 20 aa, Artificial Sequence
  Description of Artificial Sequence: Synthetic peptide
  Seed: GNEKKAKLANVVRKMMTNSQ
GNEFKAMLGNVWRKMMTNSQ

SEQ ID NO: 187337 - protein, 20 aa, Artificial Sequence
  Description of Artificial Sequence: Synthetic peptide
  Seed: GNEKKAKLANVVRKMMTNSQ
GNEFKAMLGNVYRKMMTNSQ

SEQ ID NO: 187338 - protein, 20 aa, Artificial Sequence
  Description of Artificial Sequence: Synthetic peptide
  Seed: GNEKKAKLANVVRKMMTNSQ
GNEFKAMLHNVARKMMTNSQ

SEQ ID NO: 187339 - protein, 20 aa, Artificial Sequence
  Description of Artificial Sequence: Synthetic peptide
  Seed: GNEKKAKLANVVRKMMTNSQ
GNEFKAMLHNVGRKMMTNSQ

SEQ ID NO: 187340 - protein, 20 aa, Artificial Sequence
  Description of Artificial Sequence: Synthetic peptide
  Seed: GNEKKAKLANVVRKMMTNSQ
GNEFKAMLHNVIRKMMTNSQ

SEQ ID NO: 187341 - protein, 20 aa, Artificial Sequence
  Description of Artificial Sequence: Synthetic peptide
  Seed: GNEKKAKLANVVRKMMTNSQ
GNEFKAMLHNVLRKMMTNSQ

SEQ ID NO: 187342 - protein, 20 aa, Artificial Sequence
  Description of Artificial Sequence: Synthetic peptide
  Seed: GNEKKAKLANVVRKMMTNSQ
GNEFKAMLHNVMRKMMTNSQ

SEQ ID NO: 187343 - protein, 20 aa, Artificial Sequence
  Description of Artificial Sequence: Synthetic peptide
  Seed: GNEKKAKLANVVRKMMTNSQ
GNEFKAMLHNVNRKMMTNSQ

SEQ ID NO: 187344 - protein, 20 aa, Artificial Sequence
  Description of Artificial Sequence: Synthetic peptide
  Seed: GNEKKAKLANVVRKMMTNSQ
GNEFKAMLHNVSRKMMTNSQ

SEQ ID NO: 187345 - protein, 20 aa, Artificial Sequence
  Description of Artificial Sequence: Synthetic peptide
  Seed: GNEKKAKLANVVRKMMTNSQ
GNEFKAMLHNVTRKMMTNSQ

SEQ ID NO: 187346 - protein, 20 aa, Artificial Sequence
  Description of Artificial Sequence: Synthetic peptide
  Seed: GNEKKAKLANVVRKMMTNSQ
GNEFKAMLHNVVRKMMTNSQ

SEQ ID NO: 187347 - protein, 20 aa, Artificial Sequence
  Description of Artificial Sequence: Synthetic peptide
  Seed: GNEKKAKLANVVRKMMTNSQ
GNEFKAMLINVARKMMTNSQ

SEQ ID NO: 187348 - protein, 20 aa, Artificial Sequence
  Description of Artificial Sequence: Synthetic peptide
  Seed: GNEKKAKLANVVRKMMTNSQ
GNEFKAMLINVCRKMMTNSQ

SEQ ID NO: 187349 - protein, 20 aa, Artificial Sequence
  Description of Artificial Sequence: Synthetic peptide
  Seed: GNEKKAKLANVVRKMMTNSQ
GNEFKAMLINVDRKMMTNSQ

SEQ ID NO: 187350 - protein, 20 aa, Artificial Sequence
  Description of Artificial Sequence: Synthetic peptide
  Seed: GNEKKAKLANVVRKMMTNSQ
GNEFKAMLINVERKMMTNSQ

SEQ ID NO: 187351 - protein, 20 aa, Artificial Sequence
  Description of Artificial Sequence: Synthetic peptide
  Seed: GNEKKAKLANVVRKMMTNSQ
GNEFKAMLINVFRKMMTNSQ

SEQ ID NO: 187352 - protein, 20 aa, Artificial Sequence
  Description of Artificial Sequence: Synthetic peptide
  Seed: GNEKKAKLANVVRKMMTNSQ
GNEFKAMLINVGRKMMTNSQ

SEQ ID NO: 187353 - protein, 20 aa, Artificial Sequence
  Description of Artificial Sequence: Synthetic peptide
  Seed: GNEKKAKLANVVRKMMTNSQ
GNEFKAMLINVHRKMMTNSQ

SEQ ID NO: 187354 - protein, 20 aa, Artificial Sequence
  Description of Artificial Sequence: Synthetic peptide
  Seed: GNEKKAKLANVVRKMMTNSQ
GNEFKAMLINVIRKMMTNSQ

SEQ ID NO: 187355 - protein, 20 aa, Artificial Sequence
  Description of Artificial Sequence: Synthetic peptide
  Seed: GNEKKAKLANVVRKMMTNSQ
GNEFKAMLINVKRKMMTNSQ

SEQ ID NO: 187356 - protein, 20 aa, Artificial Sequence
  Description of Artificial Sequence: Synthetic peptide
  Seed: GNEKKAKLANVVRKMMTNSQ
GNEFKAMLINVLRKMMTNSQ

SEQ ID NO: 187357 - protein, 20 aa, Artificial Sequence
  Description of Artificial Sequence: Synthetic peptide
  Seed: GNEKKAKLANVVRKMMTNSQ
GNEFKAMLINVMRKMMTNSQ

SEQ ID NO: 187358 - protein, 20 aa, Artificial Sequence
  Description of Artificial Sequence: Synthetic peptide
  Seed: GNEKKAKLANVVRKMMTNSQ
GNEFKAMLINVNRKMMTNSQ

SEQ ID NO: 187359 - protein, 20 aa, Artificial Sequence
  Description of Artificial Sequence: Synthetic peptide
  Seed: GNEKKAKLANVVRKMMTNSQ
GNEFKAMLINVPRKMMTNSQ

SEQ ID NO: 187360 - protein, 20 aa, Artificial Sequence
  Description of Artificial Sequence: Synthetic peptide
  Seed: GNEKKAKLANVVRKMMTNSQ
GNEFKAMLINVQRKMMTNSQ

SEQ ID NO: 187361 - protein, 20 aa, Artificial Sequence
  Description of Artificial Sequence: Synthetic peptide
  Seed: GNEKKAKLANVVRKMMTNSQ
GNEFKAMLINVRRKMMTNSQ

SEQ ID NO: 187362 - protein, 20 aa, Artificial Sequence
  Description of Artificial Sequence: Synthetic peptide
  Seed: GNEKKAKLANVVRKMMTNSQ
GNEFKAMLINVSRKMMTNSQ

SEQ ID NO: 187363 - protein, 20 aa, Artificial Sequence
  Description of Artificial Sequence: Synthetic peptide
  Seed: GNEKKAKLANVVRKMMTNSQ
GNEFKAMLINVTRKMMTNSQ

SEQ ID NO: 187364 - protein, 20 aa, Artificial Sequence
  Description of Artificial Sequence: Synthetic peptide
  Seed: GNEKKAKLANVVRKMMTNSQ
GNEFKAMLINVVRKMMTNSQ

SEQ ID NO: 187365 - protein, 20 aa, Artificial Sequence
  Description of Artificial Sequence: Synthetic peptide
  Seed: GNEKKAKLANVVRKMMTNSQ
GNEFKAMLINVYRKMMTNSQ

SEQ ID NO: 187366 - protein, 20 aa, Artificial Sequence
  Description of Artificial Sequence: Synthetic peptide
  Seed: GNEKKAKLANVVRKMMTNSQ
GNEFKAMLLNVARKMMTNSQ

SEQ ID NO: 187367 - protein, 20 aa, Artificial Sequence
  Description of Artificial Sequence: Synthetic peptide
  Seed: GNEKKAKLANVVRKMMTNSQ
GNEFKAMLLNVDRKMMTNSQ

SEQ ID NO: 187368 - protein, 20 aa, Artificial Sequence
  Description of Artificial Sequence: Synthetic peptide
  Seed: GNEKKAKLANVVRKMMTNSQ
GNEFKAMLLNVERKMMTNSQ

SEQ ID NO: 187369 - protein, 20 aa, Artificial Sequence
  Description of Artificial Sequence: Synthetic peptide
  Seed: GNEKKAKLANVVRKMMTNSQ
GNEFKAMLLNVGRKMMTNSQ

SEQ ID NO: 187370 - protein, 20 aa, Artificial Sequence
  Description of Artificial Sequence: Synthetic peptide
  Seed: GNEKKAKLANVVRKMMTNSQ
GNEFKAMLLNVHRKMMTNSQ

SEQ ID NO: 187371 - protein, 20 aa, Artificial Sequence
  Description of Artificial Sequence: Synthetic peptide
  Seed: GNEKKAKLANVVRKMMTNSQ
GNEFKAMLLNVIRKMMTNSQ

SEQ ID NO: 187372 - protein, 20 aa, Artificial Sequence
  Description of Artificial Sequence: Synthetic peptide
  Seed: GNEKKAKLANVVRKMMTNSQ
GNEFKAMLLNVLRKMMTNSQ

SEQ ID NO: 187373 - protein, 20 aa, Artificial Sequence
  Description of Artificial Sequence: Synthetic peptide
  Seed: GNEKKAKLANVVRKMMTNSQ
GNEFKAMLLNVMRKMMTNSQ

SEQ ID NO: 187374 - protein, 20 aa, Artificial Sequence
  Description of Artificial Sequence: Synthetic peptide
  Seed: GNEKKAKLANVVRKMMTNSQ
GNEFKAMLLNVNRKMMTNSQ

SEQ ID NO: 187375 - protein, 20 aa, Artificial Sequence
  Description of Artificial Sequence: Synthetic peptide
  Seed: GNEKKAKLANVVRKMMTNSQ
GNEFKAMLLNVPRKMMTNSQ

SEQ ID NO: 187376 - protein, 20 aa, Artificial Sequence
  Description of Artificial Sequence: Synthetic peptide
  Seed: GNEKKAKLANVVRKMMTNSQ
GNEFKAMLLNVQRKMMTNSQ

SEQ ID NO: 187377 - protein, 20 aa, Artificial Sequence
  Description of Artificial Sequence: Synthetic peptide
  Seed: GNEKKAKLANVVRKMMTNSQ
GNEFKAMLLNVSRKMMTNSQ

SEQ ID NO: 187378 - protein, 20 aa, Artificial Sequence
  Description of Artificial Sequence: Synthetic peptide
  Seed: GNEKKAKLANVVRKMMTNSQ
GNEFKAMLLNVTRKMMTNSQ

SEQ ID NO: 187379 - protein, 20 aa, Artificial Sequence
  Description of Artificial Sequence: Synthetic peptide
  Seed: GNEKKAKLANVVRKMMTNSQ
GNEFKAMLLNVVRKMMTNSQ

SEQ ID NO: 187380 - protein, 20 aa, Artificial Sequence
  Description of Artificial Sequence: Synthetic peptide
  Seed: GNEKKAKLANVVRKMMTNSQ
GNEFKAMLLNVYRKMMTNSQ

SEQ ID NO: 187381 - protein, 20 aa, Artificial Sequence
  Description of Artificial Sequence: Synthetic peptide
  Seed: GNEKKAKLANVVRKMMTNSQ
GNEFKAMLMNVARKMMTNSQ

SEQ ID NO: 187382 - protein, 20 aa, Artificial Sequence
  Description of Artificial Sequence: Synthetic peptide
  Seed: GNEKKAKLANVVRKMMTNSQ
GNEFKAMLMNVDRKMMTNSQ

SEQ ID NO: 187383 - protein, 20 aa, Artificial Sequence
  Description of Artificial Sequence: Synthetic peptide
  Seed: GNEKKAKLANVVRKMMTNSQ
GNEFKAMLMNVERKMMTNSQ

SEQ ID NO: 187384 - protein, 20 aa, Artificial Sequence
  Description of Artificial Sequence: Synthetic peptide
  Seed: GNEKKAKLANVVRKMMTNSQ
GNEFKAMLMNVGRKMMTNSQ

SEQ ID NO: 187385 - protein, 20 aa, Artificial Sequence
  Description of Artificial Sequence: Synthetic peptide
  Seed: GNEKKAKLANVVRKMMTNSQ
GNEFKAMLMNVHRKMMTNSQ

SEQ ID NO: 187386 - protein, 20 aa, Artificial Sequence
  Description of Artificial Sequence: Synthetic peptide
  Seed: GNEKKAKLANVVRKMMTNSQ
GNEFKAMLMNVIRKMMTNSQ

SEQ ID NO: 187387 - protein, 20 aa, Artificial Sequence
  Description of Artificial Sequence: Synthetic peptide
  Seed: GNEKKAKLANVVRKMMTNSQ
GNEFKAMLMNVLRKMMTNSQ

SEQ ID NO: 187388 - protein, 20 aa, Artificial Sequence
  Description of Artificial Sequence: Synthetic peptide
  Seed: GNEKKAKLANVVRKMMTNSQ
GNEFKAMLMNVMRKMMTNSQ

SEQ ID NO: 187389 - protein, 20 aa, Artificial Sequence
  Description of Artificial Sequence: Synthetic peptide
  Seed: GNEKKAKLANVVRKMMTNSQ
GNEFKAMLMNVNRKMMTNSQ

SEQ ID NO: 187390 - protein, 20 aa, Artificial Sequence
  Description of Artificial Sequence: Synthetic peptide
  Seed: GNEKKAKLANVVRKMMTNSQ
GNEFKAMLMNVPRKMMTNSQ

SEQ ID NO: 187391 - protein, 20 aa, Artificial Sequence
  Description of Artificial Sequence: Synthetic peptide
  Seed: GNEKKAKLANVVRKMMTNSQ
GNEFKAMLMNVQRKMMTNSQ

SEQ ID NO: 187392 - protein, 20 aa, Artificial Sequence
  Description of Artificial Sequence: Synthetic peptide
  Seed: GNEKKAKLANVVRKMMTNSQ
GNEFKAMLMNVSRKMMTNSQ

SEQ ID NO: 187393 - protein, 20 aa, Artificial Sequence
  Description of Artificial Sequence: Synthetic peptide
  Seed: GNEKKAKLANVVRKMMTNSQ
GNEFKAMLMNVTRKMMTNSQ

SEQ ID NO: 187394 - protein, 20 aa, Artificial Sequence
  Description of Artificial Sequence: Synthetic peptide
  Seed: GNEKKAKLANVVRKMMTNSQ
GNEFKAMLMNVVRKMMTNSQ

SEQ ID NO: 187395 - protein, 20 aa, Artificial Sequence
  Description of Artificial Sequence: Synthetic peptide
  Seed: GNEKKAKLANVVRKMMTNSQ
GNEFKAMLNNVARKMMTNSQ

SEQ ID NO: 187396 - protein, 20 aa, Artificial Sequence
  Description of Artificial Sequence: Synthetic peptide
  Seed: GNEKKAKLANVVRKMMTNSQ
GNEFKAMLNNVCRKMMTNSQ

SEQ ID NO: 187397 - protein, 20 aa, Artificial Sequence
  Description of Artificial Sequence: Synthetic peptide
  Seed: GNEKKAKLANVVRKMMTNSQ
GNEFKAMLNNVDRKMMTNSQ

SEQ ID NO: 187398 - protein, 20 aa, Artificial Sequence
  Description of Artificial Sequence: Synthetic peptide
  Seed: GNEKKAKLANVVRKMMTNSQ
GNEFKAMLNNVERKMMTNSQ

SEQ ID NO: 187399 - protein, 20 aa, Artificial Sequence
  Description of Artificial Sequence: Synthetic peptide
  Seed: GNEKKAKLANVVRKMMTNSQ
GNEFKAMLNNVFRKMMTNSQ

SEQ ID NO: 187400 - protein, 20 aa, Artificial Sequence
  Description of Artificial Sequence: Synthetic peptide
  Seed: GNEKKAKLANVVRKMMTNSQ
GNEFKAMLNNVGRKMMTNSQ

SEQ ID NO: 187401 - protein, 20 aa, Artificial Sequence
  Description of Artificial Sequence: Synthetic peptide
  Seed: GNEKKAKLANVVRKMMTNSQ
GNEFKAMLNNVHRKMMTNSQ

SEQ ID NO: 187402 - protein, 20 aa, Artificial Sequence
  Description of Artificial Sequence: Synthetic peptide
  Seed: GNEKKAKLANVVRKMMTNSQ
GNEFKAMLNNVIRKMMTNSQ

SEQ ID NO: 187403 - protein, 20 aa, Artificial Sequence
  Description of Artificial Sequence: Synthetic peptide
  Seed: GNEKKAKLANVVRKMMTNSQ
GNEFKAMLNNVLRKMMTNSQ

SEQ ID NO: 187404 - protein, 20 aa, Artificial Sequence
  Description of Artificial Sequence: Synthetic peptide
  Seed: GNEKKAKLANVVRKMMTNSQ
GNEFKAMLNNVMRKMMTNSQ

SEQ ID NO: 187405 - protein, 20 aa, Artificial Sequence
  Description of Artificial Sequence: Synthetic peptide
  Seed: GNEKKAKLANVVRKMMTNSQ
GNEFKAMLNNVNRKMMTNSQ

SEQ ID NO: 187406 - protein, 20 aa, Artificial Sequence
  Description of Artificial Sequence: Synthetic peptide
  Seed: GNEKKAKLANVVRKMMTNSQ
GNEFKAMLNNVPRKMMTNSQ

SEQ ID NO: 187407 - protein, 20 aa, Artificial Sequence
  Description of Artificial Sequence: Synthetic peptide
  Seed: GNEKKAKLANVVRKMMTNSQ
GNEFKAMLNNVQRKMMTNSQ

SEQ ID NO: 187408 - protein, 20 aa, Artificial Sequence
  Description of Artificial Sequence: Synthetic peptide
  Seed: GNEKKAKLANVVRKMMTNSQ
GNEFKAMLNNVRRKMMTNSQ

SEQ ID NO: 187409 - protein, 20 aa, Artificial Sequence
  Description of Artificial Sequence: Synthetic peptide
  Seed: GNEKKAKLANVVRKMMTNSQ
GNEFKAMLNNVSRKMMTNSQ

SEQ ID NO: 187410 - protein, 20 aa, Artificial Sequence
  Description of Artificial Sequence: Synthetic peptide
  Seed: GNEKKAKLANVVRKMMTNSQ
GNEFKAMLNNVTRKMMTNSQ

SEQ ID NO: 187411 - protein, 20 aa, Artificial Sequence
  Description of Artificial Sequence: Synthetic peptide
  Seed: GNEKKAKLANVVRKMMTNSQ
GNEFKAMLNNVVRKMMTNSQ

SEQ ID NO: 187412 - protein, 20 aa, Artificial Sequence
  Description of Artificial Sequence: Synthetic peptide
  Seed: GNEKKAKLANVVRKMMTNSQ
GNEFKAMLNNVYRKMMTNSQ

SEQ ID NO: 187413 - protein, 20 aa, Artificial Sequence
  Description of Artificial Sequence: Synthetic peptide
  Seed: GNEKKAKLANVVRKMMTNSQ
GNEFKAMLPNVARKMMTNSQ

SEQ ID NO: 187414 - protein, 20 aa, Artificial Sequence
  Description of Artificial Sequence: Synthetic peptide
  Seed: GNEKKAKLANVVRKMMTNSQ
GNEFKAMLPNVCRKMMTNSQ

SEQ ID NO: 187415 - protein, 20 aa, Artificial Sequence
  Description of Artificial Sequence: Synthetic peptide
  Seed: GNEKKAKLANVVRKMMTNSQ
GNEFKAMLPNVDRKMMTNSQ

SEQ ID NO: 187416 - protein, 20 aa, Artificial Sequence
  Description of Artificial Sequence: Synthetic peptide
  Seed: GNEKKAKLANVVRKMMTNSQ
GNEFKAMLPNVERKMMTNSQ

SEQ ID NO: 187417 - protein, 20 aa, Artificial Sequence
  Description of Artificial Sequence: Synthetic peptide
  Seed: GNEKKAKLANVVRKMMTNSQ
GNEFKAMLPNVFRKMMTNSQ

SEQ ID NO: 187418 - protein, 20 aa, Artificial Sequence
  Description of Artificial Sequence: Synthetic peptide
  Seed: GNEKKAKLANVVRKMMTNSQ
GNEFKAMLPNVGRKMMTNSQ

SEQ ID NO: 187419 - protein, 20 aa, Artificial Sequence
  Description of Artificial Sequence: Synthetic peptide
  Seed: GNEKKAKLANVVRKMMTNSQ
GNEFKAMLPNVHRKMMTNSQ

SEQ ID NO: 187420 - protein, 20 aa, Artificial Sequence
  Description of Artificial Sequence: Synthetic peptide
  Seed: GNEKKAKLANVVRKMMTNSQ
GNEFKAMLPNVIRKMMTNSQ

SEQ ID NO: 187421 - protein, 20 aa, Artificial Sequence
  Description of Artificial Sequence: Synthetic peptide
  Seed: GNEKKAKLANVVRKMMTNSQ
GNEFKAMLPNVKRKMMTNSQ

SEQ ID NO: 187422 - protein, 20 aa, Artificial Sequence
  Description of Artificial Sequence: Synthetic peptide
  Seed: GNEKKAKLANVVRKMMTNSQ
GNEFKAMLPNVLRKMMTNSQ

SEQ ID NO: 187423 - protein, 20 aa, Artificial Sequence
  Description of Artificial Sequence: Synthetic peptide
  Seed: GNEKKAKLANVVRKMMTNSQ
GNEFKAMLPNVMRKMMTNSQ

SEQ ID NO: 187424 - protein, 20 aa, Artificial Sequence
  Description of Artificial Sequence: Synthetic peptide
  Seed: GNEKKAKLANVVRKMMTNSQ
GNEFKAMLPNVNRKMMTNSQ

SEQ ID NO: 187425 - protein, 20 aa, Artificial Sequence
  Description of Artificial Sequence: Synthetic peptide
  Seed: GNEKKAKLANVVRKMMTNSQ
GNEFKAMLPNVPRKMMTNSQ

SEQ ID NO: 187426 - protein, 20 aa, Artificial Sequence
  Description of Artificial Sequence: Synthetic peptide
  Seed: GNEKKAKLANVVRKMMTNSQ
GNEFKAMLPNVQRKMMTNSQ

SEQ ID NO: 187427 - protein, 20 aa, Artificial Sequence
  Description of Artificial Sequence: Synthetic peptide
  Seed: GNEKKAKLANVVRKMMTNSQ
GNEFKAMLPNVRRKMMTNSQ

SEQ ID NO: 187428 - protein, 20 aa, Artificial Sequence
  Description of Artificial Sequence: Synthetic peptide
  Seed: GNEKKAKLANVVRKMMTNSQ
GNEFKAMLPNVSRKMMTNSQ

SEQ ID NO: 187429 - protein, 20 aa, Artificial Sequence
  Description of Artificial Sequence: Synthetic peptide
  Seed: GNEKKAKLANVVRKMMTNSQ
GNEFKAMLPNVTRKMMTNSQ

SEQ ID NO: 187430 - protein, 20 aa, Artificial Sequence
  Description of Artificial Sequence: Synthetic peptide
  Seed: GNEKKAKLANVVRKMMTNSQ
GNEFKAMLPNVVRKMMTNSQ

SEQ ID NO: 187431 - protein, 20 aa, Artificial Sequence
  Description of Artificial Sequence: Synthetic peptide
  Seed: GNEKKAKLANVVRKMMTNSQ
GNEFKAMLPNVWRKMMTNSQ

SEQ ID NO: 187432 - protein, 20 aa, Artificial Sequence
  Description of Artificial Sequence: Synthetic peptide
  Seed: GNEKKAKLANVVRKMMTNSQ
GNEFKAMLPNVYRKMMTNSQ

SEQ ID NO: 187433 - protein, 20 aa, Artificial Sequence
  Description of Artificial Sequence: Synthetic peptide
  Seed: GNEKKAKLANVVRKMMTNSQ
GNEFKAMLQNVARKMMTNSQ

SEQ ID NO: 187434 - protein, 20 aa, Artificial Sequence
  Description of Artificial Sequence: Synthetic peptide
  Seed: GNEKKAKLANVVRKMMTNSQ
GNEFKAMLQNVGRKMMTNSQ

SEQ ID NO: 187435 - protein, 20 aa, Artificial Sequence
  Description of Artificial Sequence: Synthetic peptide
  Seed: GNEKKAKLANVVRKMMTNSQ
GNEFKAMLQNVHRKMMTNSQ

SEQ ID NO: 187436 - protein, 20 aa, Artificial Sequence
  Description of Artificial Sequence: Synthetic peptide
  Seed: GNEKKAKLANVVRKMMTNSQ
GNEFKAMLQNVIRKMMTNSQ

SEQ ID NO: 187437 - protein, 20 aa, Artificial Sequence
  Description of Artificial Sequence: Synthetic peptide
  Seed: GNEKKAKLANVVRKMMTNSQ
GNEFKAMLQNVLRKMMTNSQ

SEQ ID NO: 187438 - protein, 20 aa, Artificial Sequence
  Description of Artificial Sequence: Synthetic peptide
  Seed: GNEKKAKLANVVRKMMTNSQ
GNEFKAMLQNVMRKMMTNSQ

SEQ ID NO: 187439 - protein, 20 aa, Artificial Sequence
  Description of Artificial Sequence: Synthetic peptide
  Seed: GNEKKAKLANVVRKMMTNSQ
GNEFKAMLQNVNRKMMTNSQ

SEQ ID NO: 187440 - protein, 20 aa, Artificial Sequence
  Description of Artificial Sequence: Synthetic peptide
  Seed: GNEKKAKLANVVRKMMTNSQ
GNEFKAMLQNVSRKMMTNSQ

SEQ ID NO: 187441 - protein, 20 aa, Artificial Sequence
  Description of Artificial Sequence: Synthetic peptide
  Seed: GNEKKAKLANVVRKMMTNSQ
GNEFKAMLQNVTRKMMTNSQ

SEQ ID NO: 187442 - protein, 20 aa, Artificial Sequence
  Description of Artificial Sequence: Synthetic peptide
  Seed: GNEKKAKLANVVRKMMTNSQ
GNEFKAMLQNVVRKMMTNSQ

SEQ ID NO: 187443 - protein, 20 aa, Artificial Sequence
  Description of Artificial Sequence: Synthetic peptide
  Seed: GNEKKAKLANVVRKMMTNSQ
GNEFKAMLSNVARKMMTNSQ

SEQ ID NO: 187444 - protein, 20 aa, Artificial Sequence
  Description of Artificial Sequence: Synthetic peptide
  Seed: GNEKKAKLANVVRKMMTNSQ
GNEFKAMLSNVCRKMMTNSQ

SEQ ID NO: 187445 - protein, 20 aa, Artificial Sequence
  Description of Artificial Sequence: Synthetic peptide
  Seed: GNEKKAKLANVVRKMMTNSQ
GNEFKAMLSNVDRKMMTNSQ

SEQ ID NO: 187446 - protein, 20 aa, Artificial Sequence
  Description of Artificial Sequence: Synthetic peptide
  Seed: GNEKKAKLANVVRKMMTNSQ
GNEFKAMLSNVERKMMTNSQ

SEQ ID NO: 187447 - protein, 20 aa, Artificial Sequence
  Description of Artificial Sequence: Synthetic peptide
  Seed: GNEKKAKLANVVRKMMTNSQ
GNEFKAMLSNVFRKMMTNSQ

SEQ ID NO: 187448 - protein, 20 aa, Artificial Sequence
  Description of Artificial Sequence: Synthetic peptide
  Seed: GNEKKAKLANVVRKMMTNSQ
GNEFKAMLSNVGRKMMTNSQ

SEQ ID NO: 187449 - protein, 20 aa, Artificial Sequence
  Description of Artificial Sequence: Synthetic peptide
  Seed: GNEKKAKLANVVRKMMTNSQ
GNEFKAMLSNVHRKMMTNSQ

SEQ ID NO: 187450 - protein, 20 aa, Artificial Sequence
  Description of Artificial Sequence: Synthetic peptide
  Seed: GNEKKAKLANVVRKMMTNSQ
GNEFKAMLSNVIRKMMTNSQ

SEQ ID NO: 187451 - protein, 20 aa, Artificial Sequence
  Description of Artificial Sequence: Synthetic peptide
  Seed: GNEKKAKLANVVRKMMTNSQ
GNEFKAMLSNVKRKMMTNSQ

SEQ ID NO: 187452 - protein, 20 aa, Artificial Sequence
  Description of Artificial Sequence: Synthetic peptide
  Seed: GNEKKAKLANVVRKMMTNSQ
GNEFKAMLSNVLRKMMTNSQ

SEQ ID NO: 187453 - protein, 20 aa, Artificial Sequence
  Description of Artificial Sequence: Synthetic peptide
  Seed: GNEKKAKLANVVRKMMTNSQ
GNEFKAMLSNVMRKMMTNSQ

SEQ ID NO: 187454 - protein, 20 aa, Artificial Sequence
  Description of Artificial Sequence: Synthetic peptide
  Seed: GNEKKAKLANVVRKMMTNSQ
GNEFKAMLSNVNRKMMTNSQ

SEQ ID NO: 187455 - protein, 20 aa, Artificial Sequence
  Description of Artificial Sequence: Synthetic peptide
  Seed: GNEKKAKLANVVRKMMTNSQ
GNEFKAMLSNVPRKMMTNSQ

SEQ ID NO: 187456 - protein, 20 aa, Artificial Sequence
  Description of Artificial Sequence: Synthetic peptide
  Seed: GNEKKAKLANVVRKMMTNSQ
GNEFKAMLSNVQRKMMTNSQ

SEQ ID NO: 187457 - protein, 20 aa, Artificial Sequence
  Description of Artificial Sequence: Synthetic peptide
  Seed: GNEKKAKLANVVRKMMTNSQ
GNEFKAMLSNVRRKMMTNSQ

SEQ ID NO: 187458 - protein, 20 aa, Artificial Sequence
  Description of Artificial Sequence: Synthetic peptide
  Seed: GNEKKAKLANVVRKMMTNSQ
GNEFKAMLSNVSRKMMTNSQ

SEQ ID NO: 187459 - protein, 20 aa, Artificial Sequence
  Description of Artificial Sequence: Synthetic peptide
  Seed: GNEKKAKLANVVRKMMTNSQ
GNEFKAMLSNVTRKMMTNSQ

SEQ ID NO: 187460 - protein, 20 aa, Artificial Sequence
  Description of Artificial Sequence: Synthetic peptide
  Seed: GNEKKAKLANVVRKMMTNSQ
GNEFKAMLSNVVRKMMTNSQ

SEQ ID NO: 187461 - protein, 20 aa, Artificial Sequence
  Description of Artificial Sequence: Synthetic peptide
  Seed: GNEKKAKLANVVRKMMTNSQ
GNEFKAMLSNVWRKMMTNSQ

SEQ ID NO: 187462 - protein, 20 aa, Artificial Sequence
  Description of Artificial Sequence: Synthetic peptide
  Seed: GNEKKAKLANVVRKMMTNSQ
GNEFKAMLSNVYRKMMTNSQ

SEQ ID NO: 187463 - protein, 20 aa, Artificial Sequence
  Description of Artificial Sequence: Synthetic peptide
  Seed: GNEKKAKLANVVRKMMTNSQ
GNEFKAMLTNVARKMMTNSQ

SEQ ID NO: 187464 - protein, 20 aa, Artificial Sequence
  Description of Artificial Sequence: Synthetic peptide
  Seed: GNEKKAKLANVVRKMMTNSQ
GNEFKAMLTNVCRKMMTNSQ

SEQ ID NO: 187465 - protein, 20 aa, Artificial Sequence
  Description of Artificial Sequence: Synthetic peptide
  Seed: GNEKKAKLANVVRKMMTNSQ
GNEFKAMLTNVDRKMMTNSQ

SEQ ID NO: 187466 - protein, 20 aa, Artificial Sequence
  Description of Artificial Sequence: Synthetic peptide
  Seed: GNEKKAKLANVVRKMMTNSQ
GNEFKAMLTNVERKMMTNSQ

SEQ ID NO: 187467 - protein, 20 aa, Artificial Sequence
  Description of Artificial Sequence: Synthetic peptide
  Seed: GNEKKAKLANVVRKMMTNSQ
GNEFKAMLTNVFRKMMTNSQ

SEQ ID NO: 187468 - protein, 20 aa, Artificial Sequence
  Description of Artificial Sequence: Synthetic peptide
  Seed: GNEKKAKLANVVRKMMTNSQ
GNEFKAMLTNVGRKMMTNSQ

SEQ ID NO: 187469 - protein, 20 aa, Artificial Sequence
  Description of Artificial Sequence: Synthetic peptide
  Seed: GNEKKAKLANVVRKMMTNSQ
GNEFKAMLTNVHRKMMTNSQ

SEQ ID NO: 187470 - protein, 20 aa, Artificial Sequence
  Description of Artificial Sequence: Synthetic peptide
  Seed: GNEKKAKLANVVRKMMTNSQ
GNEFKAMLTNVIRKMMTNSQ

SEQ ID NO: 187471 - protein, 20 aa, Artificial Sequence
  Description of Artificial Sequence: Synthetic peptide
  Seed: GNEKKAKLANVVRKMMTNSQ
GNEFKAMLTNVKRKMMTNSQ

SEQ ID NO: 187472 - protein, 20 aa, Artificial Sequence
  Description of Artificial Sequence: Synthetic peptide
  Seed: GNEKKAKLANVVRKMMTNSQ
GNEFKAMLTNVLRKMMTNSQ

SEQ ID NO: 187473 - protein, 20 aa, Artificial Sequence
  Description of Artificial Sequence: Synthetic peptide
  Seed: GNEKKAKLANVVRKMMTNSQ
GNEFKAMLTNVMRKMMTNSQ

SEQ ID NO: 187474 - protein, 20 aa, Artificial Sequence
  Description of Artificial Sequence: Synthetic peptide
  Seed: GNEKKAKLANVVRKMMTNSQ
GNEFKAMLTNVNRKMMTNSQ

SEQ ID NO: 187475 - protein, 20 aa, Artificial Sequence
  Description of Artificial Sequence: Synthetic peptide
  Seed: GNEKKAKLANVVRKMMTNSQ
GNEFKAMLTNVPRKMMTNSQ

SEQ ID NO: 187476 - protein, 20 aa, Artificial Sequence
  Description of Artificial Sequence: Synthetic peptide
  Seed: GNEKKAKLANVVRKMMTNSQ
GNEFKAMLTNVQRKMMTNSQ

SEQ ID NO: 187477 - protein, 20 aa, Artificial Sequence
  Description of Artificial Sequence: Synthetic peptide
  Seed: GNEKKAKLANVVRKMMTNSQ
GNEFKAMLTNVRRKMMTNSQ

SEQ ID NO: 187478 - protein, 20 aa, Artificial Sequence
  Description of Artificial Sequence: Synthetic peptide
  Seed: GNEKKAKLANVVRKMMTNSQ
GNEFKAMLTNVSRKMMTNSQ

SEQ ID NO: 187479 - protein, 20 aa, Artificial Sequence
  Description of Artificial Sequence: Synthetic peptide
  Seed: GNEKKAKLANVVRKMMTNSQ
GNEFKAMLTNVTRKMMTNSQ

SEQ ID NO: 187480 - protein, 20 aa, Artificial Sequence
  Description of Artificial Sequence: Synthetic peptide
  Seed: GNEKKAKLANVVRKMMTNSQ
GNEFKAMLTNVVRKMMTNSQ

SEQ ID NO: 187481 - protein, 20 aa, Artificial Sequence
  Description of Artificial Sequence: Synthetic peptide
  Seed: GNEKKAKLANVVRKMMTNSQ
GNEFKAMLTNVWRKMMTNSQ

SEQ ID NO: 187482 - protein, 20 aa, Artificial Sequence
  Description of Artificial Sequence: Synthetic peptide
  Seed: GNEKKAKLANVVRKMMTNSQ
GNEFKAMLTNVYRKMMTNSQ

SEQ ID NO: 187483 - protein, 20 aa, Artificial Sequence
  Description of Artificial Sequence: Synthetic peptide
  Seed: GNEKKAKLANVVRKMMTNSQ
GNEFKAMLVNVARKMMTNSQ

SEQ ID NO: 187484 - protein, 20 aa, Artificial Sequence
  Description of Artificial Sequence: Synthetic peptide
  Seed: GNEKKAKLANVVRKMMTNSQ
GNEFKAMLVNVCRKMMTNSQ

SEQ ID NO: 187485 - protein, 20 aa, Artificial Sequence
  Description of Artificial Sequence: Synthetic peptide
  Seed: GNEKKAKLANVVRKMMTNSQ
GNEFKAMLVNVDRKMMTNSQ

SEQ ID NO: 187486 - protein, 20 aa, Artificial Sequence
  Description of Artificial Sequence: Synthetic peptide
  Seed: GNEKKAKLANVVRKMMTNSQ
GNEFKAMLVNVERKMMTNSQ

SEQ ID NO: 187487 - protein, 20 aa, Artificial Sequence
  Description of Artificial Sequence: Synthetic peptide
  Seed: GNEKKAKLANVVRKMMTNSQ
GNEFKAMLVNVFRKMMTNSQ

SEQ ID NO: 187488 - protein, 20 aa, Artificial Sequence
  Description of Artificial Sequence: Synthetic peptide
  Seed: GNEKKAKLANVVRKMMTNSQ
GNEFKAMLVNVGRKMMTNSQ

SEQ ID NO: 187489 - protein, 20 aa, Artificial Sequence
  Description of Artificial Sequence: Synthetic peptide
  Seed: GNEKKAKLANVVRKMMTNSQ
GNEFKAMLVNVHRKMMTNSQ

SEQ ID NO: 187490 - protein, 20 aa, Artificial Sequence
  Description of Artificial Sequence: Synthetic peptide
  Seed: GNEKKAKLANVVRKMMTNSQ
GNEFKAMLVNVIRKMMTNSQ

SEQ ID NO: 187491 - protein, 20 aa, Artificial Sequence
  Description of Artificial Sequence: Synthetic peptide
  Seed: GNEKKAKLANVVRKMMTNSQ
GNEFKAMLVNVKRKMMTNSQ

SEQ ID NO: 187492 - protein, 20 aa, Artificial Sequence
  Description of Artificial Sequence: Synthetic peptide
  Seed: GNEKKAKLANVVRKMMTNSQ
GNEFKAMLVNVLRKMMTNSQ

SEQ ID NO: 187493 - protein, 20 aa, Artificial Sequence
  Description of Artificial Sequence: Synthetic peptide
  Seed: GNEKKAKLANVVRKMMTNSQ
GNEFKAMLVNVMRKMMTNSQ

SEQ ID NO: 187494 - protein, 20 aa, Artificial Sequence
  Description of Artificial Sequence: Synthetic peptide
  Seed: GNEKKAKLANVVRKMMTNSQ
GNEFKAMLVNVNRKMMTNSQ

SEQ ID NO: 187495 - protein, 20 aa, Artificial Sequence
  Description of Artificial Sequence: Synthetic peptide
  Seed: GNEKKAKLANVVRKMMTNSQ
GNEFKAMLVNVPRKMMTNSQ

SEQ ID NO: 187496 - protein, 20 aa, Artificial Sequence
  Description of Artificial Sequence: Synthetic peptide
  Seed: GNEKKAKLANVVRKMMTNSQ
GNEFKAMLVNVQRKMMTNSQ

SEQ ID NO: 187497 - protein, 20 aa, Artificial Sequence
  Description of Artificial Sequence: Synthetic peptide
  Seed: GNEKKAKLANVVRKMMTNSQ
GNEFKAMLVNVRRKMMTNSQ

SEQ ID NO: 187498 - protein, 20 aa, Artificial Sequence
  Description of Artificial Sequence: Synthetic peptide
  Seed: GNEKKAKLANVVRKMMTNSQ
GNEFKAMLVNVSRKMMTNSQ

SEQ ID NO: 187499 - protein, 20 aa, Artificial Sequence
  Description of Artificial Sequence: Synthetic peptide
  Seed: GNEKKAKLANVVRKMMTNSQ
GNEFKAMLVNVTRKMMTNSQ

SEQ ID NO: 187500 - protein, 20 aa, Artificial Sequence
  Description of Artificial Sequence: Synthetic peptide
  Seed: GNEKKAKLANVVRKMMTNSQ
GNEFKAMLVNVVRKMMTNSQ

SEQ ID NO: 187501 - protein, 20 aa, Artificial Sequence
  Description of Artificial Sequence: Synthetic peptide
  Seed: GNEKKAKLANVVRKMMTNSQ
GNEFKAMLVNVYRKMMTNSQ

SEQ ID NO: 187502 - protein, 20 aa, Artificial Sequence
  Description of Artificial Sequence: Synthetic peptide
  Seed: GNEKKAKLANVVRKMMTNSQ
GNEFKAMLWNVARKMMTNSQ

SEQ ID NO: 187503 - protein, 20 aa, Artificial Sequence
  Description of Artificial Sequence: Synthetic peptide
  Seed: GNEKKAKLANVVRKMMTNSQ
GNEFKAMLWNVIRKMMTNSQ

SEQ ID NO: 187504 - protein, 20 aa, Artificial Sequence
  Description of Artificial Sequence: Synthetic peptide
  Seed: GNEKKAKLANVVRKMMTNSQ
GNEFKAMLWNVLRKMMTNSQ

SEQ ID NO: 187505 - protein, 20 aa, Artificial Sequence
  Description of Artificial Sequence: Synthetic peptide
  Seed: GNEKKAKLANVVRKMMTNSQ
GNEFKAMLWNVMRKMMTNSQ

SEQ ID NO: 187506 - protein, 20 aa, Artificial Sequence
  Description of Artificial Sequence: Synthetic peptide
  Seed: GNEKKAKLANVVRKMMTNSQ
GNEFKAMLWNVNRKMMTNSQ

SEQ ID NO: 187507 - protein, 20 aa, Artificial Sequence
  Description of Artificial Sequence: Synthetic peptide
  Seed: GNEKKAKLANVVRKMMTNSQ
GNEFKAMLWNVSRKMMTNSQ

SEQ ID NO: 187508 - protein, 20 aa, Artificial Sequence
  Description of Artificial Sequence: Synthetic peptide
  Seed: GNEKKAKLANVVRKMMTNSQ
GNEFKAMLWNVVRKMMTNSQ

SEQ ID NO: 187509 - protein, 20 aa, Artificial Sequence
  Description of Artificial Sequence: Synthetic peptide
  Seed: GNEKKAKLANVVRKMMTNSQ
GNEFKAMLWNVYRKMMTNSQ

SEQ ID NO: 187510 - protein, 20 aa, Artificial Sequence
  Description of Artificial Sequence: Synthetic peptide
  Seed: GNEKKAKLANVVRKMMTNSQ
GNEFKAMLYNVARKMMTNSQ

SEQ ID NO: 187511 - protein, 20 aa, Artificial Sequence
  Description of Artificial Sequence: Synthetic peptide
  Seed: GNEKKAKLANVVRKMMTNSQ
GNEFKAMLYNVIRKMMTNSQ

SEQ ID NO: 187512 - protein, 20 aa, Artificial Sequence
  Description of Artificial Sequence: Synthetic peptide
  Seed: GNEKKAKLANVVRKMMTNSQ
GNEFKAMLYNVLRKMMTNSQ

SEQ ID NO: 187513 - protein, 20 aa, Artificial Sequence
  Description of Artificial Sequence: Synthetic peptide
  Seed: GNEKKAKLANVVRKMMTNSQ
GNEFKAMLYNVMRKMMTNSQ

SEQ ID NO: 187514 - protein, 20 aa, Artificial Sequence
  Description of Artificial Sequence: Synthetic peptide
  Seed: GNEKKAKLANVVRKMMTNSQ
GNEFKAMLYNVNRKMMTNSQ

SEQ ID NO: 187515 - protein, 20 aa, Artificial Sequence
  Description of Artificial Sequence: Synthetic peptide
  Seed: GNEKKAKLANVVRKMMTNSQ
GNEFKAMLYNVSRKMMTNSQ

SEQ ID NO: 187516 - protein, 20 aa, Artificial Sequence
  Description of Artificial Sequence: Synthetic peptide
  Seed: GNEKKAKLANVVRKMMTNSQ
GNEFKAMLYNVTRKMMTNSQ

SEQ ID NO: 187517 - protein, 20 aa, Artificial Sequence
  Description of Artificial Sequence: Synthetic peptide
  Seed: GNEKKAKLANVVRKMMTNSQ
GNEFKAMLYNVVRKMMTNSQ

SEQ ID NO: 187518 - protein, 20 aa, Artificial Sequence
  Description of Artificial Sequence: Synthetic peptide
  Seed: GNEKKAKLANVVRKMMTNSQ
GNEFKAMLYNVYRKMMTNSQ

SEQ ID NO: 187519 - protein, 20 aa, Artificial Sequence
  Description of Artificial Sequence: Synthetic peptide
  Seed: GNEKKAKLANVVRKMMTNSQ
GNEFKANLANVARKMMTNSQ

SEQ ID NO: 187520 - protein, 20 aa, Artificial Sequence
  Description of Artificial Sequence: Synthetic peptide
  Seed: GNEKKAKLANVVRKMMTNSQ
GNEFKANLANVCRKMMTNSQ

SEQ ID NO: 187521 - protein, 20 aa, Artificial Sequence
  Description of Artificial Sequence: Synthetic peptide
  Seed: GNEKKAKLANVVRKMMTNSQ
GNEFKANLANVFRKMMTNSQ

SEQ ID NO: 187522 - protein, 20 aa, Artificial Sequence
  Description of Artificial Sequence: Synthetic peptide
  Seed: GNEKKAKLANVVRKMMTNSQ
GNEFKANLANVGRKMMTNSQ

SEQ ID NO: 187523 - protein, 20 aa, Artificial Sequence
  Description of Artificial Sequence: Synthetic peptide
  Seed: GNEKKAKLANVVRKMMTNSQ
GNEFKANLANVIRKMMTNSQ

SEQ ID NO: 187524 - protein, 20 aa, Artificial Sequence
  Description of Artificial Sequence: Synthetic peptide
  Seed: GNEKKAKLANVVRKMMTNSQ
GNEFKANLANVLRKMMTNSQ

SEQ ID NO: 187525 - protein, 20 aa, Artificial Sequence
  Description of Artificial Sequence: Synthetic peptide
  Seed: GNEKKAKLANVVRKMMTNSQ
GNEFKANLANVMRKMMTNSQ

SEQ ID NO: 187526 - protein, 20 aa, Artificial Sequence
  Description of Artificial Sequence: Synthetic peptide
  Seed: GNEKKAKLANVVRKMMTNSQ
GNEFKANLANVNRKMMTNSQ

SEQ ID NO: 187527 - protein, 20 aa, Artificial Sequence
  Description of Artificial Sequence: Synthetic peptide
  Seed: GNEKKAKLANVVRKMMTNSQ
GNEFKANLANVSRKMMTNSQ

SEQ ID NO: 187528 - protein, 20 aa, Artificial Sequence
  Description of Artificial Sequence: Synthetic peptide
  Seed: GNEKKAKLANVVRKMMTNSQ
GNEFKANLANVTRKMMTNSQ

SEQ ID NO: 187529 - protein, 20 aa, Artificial Sequence
  Description of Artificial Sequence: Synthetic peptide
  Seed: GNEKKAKLANVVRKMMTNSQ
GNEFKANLANVVRKMMTNSQ

SEQ ID NO: 187530 - protein, 20 aa, Artificial Sequence
  Description of Artificial Sequence: Synthetic peptide
  Seed: GNEKKAKLANVVRKMMTNSQ
GNEFKANLANVYRKMMTNSQ

SEQ ID NO: 187531 - protein, 20 aa, Artificial Sequence
  Description of Artificial Sequence: Synthetic peptide
  Seed: GNEKKAKLANVVRKMMTNSQ
GNEFKANLFNVARKMMTNSQ

SEQ ID NO: 187532 - protein, 20 aa, Artificial Sequence
  Description of Artificial Sequence: Synthetic peptide
  Seed: GNEKKAKLANVVRKMMTNSQ
GNEFKANLFNVCRKMMTNSQ

SEQ ID NO: 187533 - protein, 20 aa, Artificial Sequence
  Description of Artificial Sequence: Synthetic peptide
  Seed: GNEKKAKLANVVRKMMTNSQ
GNEFKANLFNVDRKMMTNSQ

SEQ ID NO: 187534 - protein, 20 aa, Artificial Sequence
  Description of Artificial Sequence: Synthetic peptide
  Seed: GNEKKAKLANVVRKMMTNSQ
GNEFKANLFNVERKMMTNSQ

SEQ ID NO: 187535 - protein, 20 aa, Artificial Sequence
  Description of Artificial Sequence: Synthetic peptide
  Seed: GNEKKAKLANVVRKMMTNSQ
GNEFKANLFNVFRKMMTNSQ

SEQ ID NO: 187536 - protein, 20 aa, Artificial Sequence
  Description of Artificial Sequence: Synthetic peptide
  Seed: GNEKKAKLANVVRKMMTNSQ
GNEFKANLFNVHRKMMTNSQ

SEQ ID NO: 187537 - protein, 20 aa, Artificial Sequence
  Description of Artificial Sequence: Synthetic peptide
  Seed: GNEKKAKLANVVRKMMTNSQ
GNEFKANLFNVIRKMMTNSQ

SEQ ID NO: 187538 - protein, 20 aa, Artificial Sequence
  Description of Artificial Sequence: Synthetic peptide
  Seed: GNEKKAKLANVVRKMMTNSQ
GNEFKANLFNVLRKMMTNSQ

SEQ ID NO: 187539 - protein, 20 aa, Artificial Sequence
  Description of Artificial Sequence: Synthetic peptide
  Seed: GNEKKAKLANVVRKMMTNSQ
GNEFKANLFNVMRKMMTNSQ

SEQ ID NO: 187540 - protein, 20 aa, Artificial Sequence
  Description of Artificial Sequence: Synthetic peptide
  Seed: GNEKKAKLANVVRKMMTNSQ
GNEFKANLFNVNRKMMTNSQ

SEQ ID NO: 187541 - protein, 20 aa, Artificial Sequence
  Description of Artificial Sequence: Synthetic peptide
  Seed: GNEKKAKLANVVRKMMTNSQ
GNEFKANLFNVPRKMMTNSQ

SEQ ID NO: 187542 - protein, 20 aa, Artificial Sequence
  Description of Artificial Sequence: Synthetic peptide
  Seed: GNEKKAKLANVVRKMMTNSQ
GNEFKANLFNVQRKMMTNSQ

SEQ ID NO: 187543 - protein, 20 aa, Artificial Sequence
  Description of Artificial Sequence: Synthetic peptide
  Seed: GNEKKAKLANVVRKMMTNSQ
GNEFKANLFNVSRKMMTNSQ

SEQ ID NO: 187544 - protein, 20 aa, Artificial Sequence
  Description of Artificial Sequence: Synthetic peptide
  Seed: GNEKKAKLANVVRKMMTNSQ
GNEFKANLFNVTRKMMTNSQ

SEQ ID NO: 187545 - protein, 20 aa, Artificial Sequence
  Description of Artificial Sequence: Synthetic peptide
  Seed: GNEKKAKLANVVRKMMTNSQ
GNEFKANLFNVVRKMMTNSQ

SEQ ID NO: 187546 - protein, 20 aa, Artificial Sequence
  Description of Artificial Sequence: Synthetic peptide
  Seed: GNEKKAKLANVVRKMMTNSQ
GNEFKANLFNVWRKMMTNSQ

SEQ ID NO: 187547 - protein, 20 aa, Artificial Sequence
  Description of Artificial Sequence: Synthetic peptide
  Seed: GNEKKAKLANVVRKMMTNSQ
GNEFKANLFNVYRKMMTNSQ

SEQ ID NO: 187548 - protein, 20 aa, Artificial Sequence
  Description of Artificial Sequence: Synthetic peptide
  Seed: GNEKKAKLANVVRKMMTNSQ
GNEFKANLGNVARKMMTNSQ

SEQ ID NO: 187549 - protein, 20 aa, Artificial Sequence
  Description of Artificial Sequence: Synthetic peptide
  Seed: GNEKKAKLANVVRKMMTNSQ
GNEFKANLGNVFRKMMTNSQ

SEQ ID NO: 187550 - protein, 20 aa, Artificial Sequence
  Description of Artificial Sequence: Synthetic peptide
  Seed: GNEKKAKLANVVRKMMTNSQ
GNEFKANLGNVIRKMMTNSQ

SEQ ID NO: 187551 - protein, 20 aa, Artificial Sequence
  Description of Artificial Sequence: Synthetic peptide
  Seed: GNEKKAKLANVVRKMMTNSQ
GNEFKANLGNVLRKMMTNSQ

SEQ ID NO: 187552 - protein, 20 aa, Artificial Sequence
  Description of Artificial Sequence: Synthetic peptide
  Seed: GNEKKAKLANVVRKMMTNSQ
GNEFKANLGNVMRKMMTNSQ

SEQ ID NO: 187553 - protein, 20 aa, Artificial Sequence
  Description of Artificial Sequence: Synthetic peptide
  Seed: GNEKKAKLANVVRKMMTNSQ
GNEFKANLGNVSRKMMTNSQ

SEQ ID NO: 187554 - protein, 20 aa, Artificial Sequence
  Description of Artificial Sequence: Synthetic peptide
  Seed: GNEKKAKLANVVRKMMTNSQ
GNEFKANLGNVTRKMMTNSQ

SEQ ID NO: 187555 - protein, 20 aa, Artificial Sequence
  Description of Artificial Sequence: Synthetic peptide
  Seed: GNEKKAKLANVVRKMMTNSQ
GNEFKANLGNVVRKMMTNSQ

SEQ ID NO: 187556 - protein, 20 aa, Artificial Sequence
  Description of Artificial Sequence: Synthetic peptide
  Seed: GNEKKAKLANVVRKMMTNSQ
GNEFKANLINVARKMMTNSQ

SEQ ID NO: 187557 - protein, 20 aa, Artificial Sequence
  Description of Artificial Sequence: Synthetic peptide
  Seed: GNEKKAKLANVVRKMMTNSQ
GNEFKANLINVFRKMMTNSQ

SEQ ID NO: 187558 - protein, 20 aa, Artificial Sequence
  Description of Artificial Sequence: Synthetic peptide
  Seed: GNEKKAKLANVVRKMMTNSQ
GNEFKANLINVIRKMMTNSQ

SEQ ID NO: 187559 - protein, 20 aa, Artificial Sequence
  Description of Artificial Sequence: Synthetic peptide
  Seed: GNEKKAKLANVVRKMMTNSQ
GNEFKANLINVLRKMMTNSQ

SEQ ID NO: 187560 - protein, 20 aa, Artificial Sequence
  Description of Artificial Sequence: Synthetic peptide
  Seed: GNEKKAKLANVVRKMMTNSQ
GNEFKANLINVNRKMMTNSQ

SEQ ID NO: 187561 - protein, 20 aa, Artificial Sequence
  Description of Artificial Sequence: Synthetic peptide
  Seed: GNEKKAKLANVVRKMMTNSQ
GNEFKANLINVSRKMMTNSQ

SEQ ID NO: 187562 - protein, 20 aa, Artificial Sequence
  Description of Artificial Sequence: Synthetic peptide
  Seed: GNEKKAKLANVVRKMMTNSQ
GNEFKANLINVVRKMMTNSQ

SEQ ID NO: 187563 - protein, 20 aa, Artificial Sequence
  Description of Artificial Sequence: Synthetic peptide
  Seed: GNEKKAKLANVVRKMMTNSQ
GNEFKANLLNVFRKMMTNSQ

SEQ ID NO: 187564 - protein, 20 aa, Artificial Sequence
  Description of Artificial Sequence: Synthetic peptide
  Seed: GNEKKAKLANVVRKMMTNSQ
GNEFKANLLNVIRKMMTNSQ

SEQ ID NO: 187565 - protein, 20 aa, Artificial Sequence
  Description of Artificial Sequence: Synthetic peptide
  Seed: GNEKKAKLANVVRKMMTNSQ
GNEFKANLLNVLRKMMTNSQ

SEQ ID NO: 187566 - protein, 20 aa, Artificial Sequence
  Description of Artificial Sequence: Synthetic peptide
  Seed: GNEKKAKLANVVRKMMTNSQ
GNEFKANLLNVMRKMMTNSQ

SEQ ID NO: 187567 - protein, 20 aa, Artificial Sequence
  Description of Artificial Sequence: Synthetic peptide
  Seed: GNEKKAKLANVVRKMMTNSQ
GNEFKANLLNVVRKMMTNSQ

SEQ ID NO: 187568 - protein, 20 aa, Artificial Sequence
  Description of Artificial Sequence: Synthetic peptide
  Seed: GNEKKAKLANVVRKMMTNSQ
GNEFKANLMNVFRKMMTNSQ

SEQ ID NO: 187569 - protein, 20 aa, Artificial Sequence
  Description of Artificial Sequence: Synthetic peptide
  Seed: GNEKKAKLANVVRKMMTNSQ
GNEFKANLMNVIRKMMTNSQ

SEQ ID NO: 187570 - protein, 20 aa, Artificial Sequence
  Description of Artificial Sequence: Synthetic peptide
  Seed: GNEKKAKLANVVRKMMTNSQ
GNEFKANLMNVLRKMMTNSQ

SEQ ID NO: 187571 - protein, 20 aa, Artificial Sequence
  Description of Artificial Sequence: Synthetic peptide
  Seed: GNEKKAKLANVVRKMMTNSQ
GNEFKANLMNVVRKMMTNSQ

SEQ ID NO: 187572 - protein, 20 aa, Artificial Sequence
  Description of Artificial Sequence: Synthetic peptide
  Seed: GNEKKAKLANVVRKMMTNSQ
GNEFKANLNNVARKMMTNSQ

SEQ ID NO: 187573 - protein, 20 aa, Artificial Sequence
  Description of Artificial Sequence: Synthetic peptide
  Seed: GNEKKAKLANVVRKMMTNSQ
GNEFKANLNNVIRKMMTNSQ

SEQ ID NO: 187574 - protein, 20 aa, Artificial Sequence
  Description of Artificial Sequence: Synthetic peptide
  Seed: GNEKKAKLANVVRKMMTNSQ
GNEFKANLNNVLRKMMTNSQ

SEQ ID NO: 187575 - protein, 20 aa, Artificial Sequence
  Description of Artificial Sequence: Synthetic peptide
  Seed: GNEKKAKLANVVRKMMTNSQ
GNEFKANLNNVVRKMMTNSQ

SEQ ID NO: 187576 - protein, 20 aa, Artificial Sequence
  Description of Artificial Sequence: Synthetic peptide
  Seed: GNEKKAKLANVVRKMMTNSQ
GNEFKANLPNVARKMMTNSQ

SEQ ID NO: 187577 - protein, 20 aa, Artificial Sequence
  Description of Artificial Sequence: Synthetic peptide
  Seed: GNEKKAKLANVVRKMMTNSQ
GNEFKANLPNVFRKMMTNSQ

SEQ ID NO: 187578 - protein, 20 aa, Artificial Sequence
  Description of Artificial Sequence: Synthetic peptide
  Seed: GNEKKAKLANVVRKMMTNSQ
GNEFKANLPNVIRKMMTNSQ

SEQ ID NO: 187579 - protein, 20 aa, Artificial Sequence
  Description of Artificial Sequence: Synthetic peptide
  Seed: GNEKKAKLANVVRKMMTNSQ
GNEFKANLPNVLRKMMTNSQ

SEQ ID NO: 187580 - protein, 20 aa, Artificial Sequence
  Description of Artificial Sequence: Synthetic peptide
  Seed: GNEKKAKLANVVRKMMTNSQ
GNEFKANLPNVMRKMMTNSQ

SEQ ID NO: 187581 - protein, 20 aa, Artificial Sequence
  Description of Artificial Sequence: Synthetic peptide
  Seed: GNEKKAKLANVVRKMMTNSQ
GNEFKANLPNVNRKMMTNSQ

SEQ ID NO: 187582 - protein, 20 aa, Artificial Sequence
  Description of Artificial Sequence: Synthetic peptide
  Seed: GNEKKAKLANVVRKMMTNSQ
GNEFKANLPNVSRKMMTNSQ

SEQ ID NO: 187583 - protein, 20 aa, Artificial Sequence
  Description of Artificial Sequence: Synthetic peptide
  Seed: GNEKKAKLANVVRKMMTNSQ
GNEFKANLPNVTRKMMTNSQ

SEQ ID NO: 187584 - protein, 20 aa, Artificial Sequence
  Description of Artificial Sequence: Synthetic peptide
  Seed: GNEKKAKLANVVRKMMTNSQ
GNEFKANLPNVVRKMMTNSQ

SEQ ID NO: 187585 - protein, 20 aa, Artificial Sequence
  Description of Artificial Sequence: Synthetic peptide
  Seed: GNEKKAKLANVVRKMMTNSQ
GNEFKANLSNVARKMMTNSQ

SEQ ID NO: 187586 - protein, 20 aa, Artificial Sequence
  Description of Artificial Sequence: Synthetic peptide
  Seed: GNEKKAKLANVVRKMMTNSQ
GNEFKANLSNVFRKMMTNSQ

SEQ ID NO: 187587 - protein, 20 aa, Artificial Sequence
  Description of Artificial Sequence: Synthetic peptide
  Seed: GNEKKAKLANVVRKMMTNSQ
GNEFKANLSNVIRKMMTNSQ

SEQ ID NO: 187588 - protein, 20 aa, Artificial Sequence
  Description of Artificial Sequence: Synthetic peptide
  Seed: GNEKKAKLANVVRKMMTNSQ
GNEFKANLSNVLRKMMTNSQ

SEQ ID NO: 187589 - protein, 20 aa, Artificial Sequence
  Description of Artificial Sequence: Synthetic peptide
  Seed: GNEKKAKLANVVRKMMTNSQ
GNEFKANLSNVMRKMMTNSQ

SEQ ID NO: 187590 - protein, 20 aa, Artificial Sequence
  Description of Artificial Sequence: Synthetic peptide
  Seed: GNEKKAKLANVVRKMMTNSQ
GNEFKANLSNVNRKMMTNSQ

SEQ ID NO: 187591 - protein, 20 aa, Artificial Sequence
  Description of Artificial Sequence: Synthetic peptide
  Seed: GNEKKAKLANVVRKMMTNSQ
GNEFKANLSNVSRKMMTNSQ

SEQ ID NO: 187592 - protein, 20 aa, Artificial Sequence
  Description of Artificial Sequence: Synthetic peptide
  Seed: GNEKKAKLANVVRKMMTNSQ
GNEFKANLSNVTRKMMTNSQ

SEQ ID NO: 187593 - protein, 20 aa, Artificial Sequence
  Description of Artificial Sequence: Synthetic peptide
  Seed: GNEKKAKLANVVRKMMTNSQ
GNEFKANLSNVVRKMMTNSQ

SEQ ID NO: 187594 - protein, 20 aa, Artificial Sequence
  Description of Artificial Sequence: Synthetic peptide
  Seed: GNEKKAKLANVVRKMMTNSQ
GNEFKANLTNVARKMMTNSQ

SEQ ID NO: 187595 - protein, 20 aa, Artificial Sequence
  Description of Artificial Sequence: Synthetic peptide
  Seed: GNEKKAKLANVVRKMMTNSQ
GNEFKANLTNVIRKMMTNSQ

SEQ ID NO: 187596 - protein, 20 aa, Artificial Sequence
  Description of Artificial Sequence: Synthetic peptide
  Seed: GNEKKAKLANVVRKMMTNSQ
GNEFKANLTNVLRKMMTNSQ

SEQ ID NO: 187597 - protein, 20 aa, Artificial Sequence
  Description of Artificial Sequence: Synthetic peptide
  Seed: GNEKKAKLANVVRKMMTNSQ
GNEFKANLTNVNRKMMTNSQ

SEQ ID NO: 187598 - protein, 20 aa, Artificial Sequence
  Description of Artificial Sequence: Synthetic peptide
  Seed: GNEKKAKLANVVRKMMTNSQ
GNEFKANLTNVSRKMMTNSQ

SEQ ID NO: 187599 - protein, 20 aa, Artificial Sequence
  Description of Artificial Sequence: Synthetic peptide
  Seed: GNEKKAKLANVVRKMMTNSQ
GNEFKANLTNVVRKMMTNSQ

SEQ ID NO: 187600 - protein, 20 aa, Artificial Sequence
  Description of Artificial Sequence: Synthetic peptide
  Seed: GNEKKAKLANVVRKMMTNSQ
GNEFKANLVNVARKMMTNSQ

SEQ ID NO: 187601 - protein, 20 aa, Artificial Sequence
  Description of Artificial Sequence: Synthetic peptide
  Seed: GNEKKAKLANVVRKMMTNSQ
GNEFKANLVNVIRKMMTNSQ

SEQ ID NO: 187602 - protein, 20 aa, Artificial Sequence
  Description of Artificial Sequence: Synthetic peptide
  Seed: GNEKKAKLANVVRKMMTNSQ
GNEFKANLVNVLRKMMTNSQ

SEQ ID NO: 187603 - protein, 20 aa, Artificial Sequence
  Description of Artificial Sequence: Synthetic peptide
  Seed: GNEKKAKLANVVRKMMTNSQ
GNEFKANLVNVNRKMMTNSQ

SEQ ID NO: 187604 - protein, 20 aa, Artificial Sequence
  Description of Artificial Sequence: Synthetic peptide
  Seed: GNEKKAKLANVVRKMMTNSQ
GNEFKANLVNVSRKMMTNSQ

SEQ ID NO: 187605 - protein, 20 aa, Artificial Sequence
  Description of Artificial Sequence: Synthetic peptide
  Seed: GNEKKAKLANVVRKMMTNSQ
GNEFKANLVNVVRKMMTNSQ

SEQ ID NO: 187606 - protein, 20 aa, Artificial Sequence
  Description of Artificial Sequence: Synthetic peptide
  Seed: GNEKKAKLANVVRKMMTNSQ
GNEFKANLWNVARKMMTNSQ

SEQ ID NO: 187607 - protein, 20 aa, Artificial Sequence
  Description of Artificial Sequence: Synthetic peptide
  Seed: GNEKKAKLANVVRKMMTNSQ
GNEFKANLWNVFRKMMTNSQ

SEQ ID NO: 187608 - protein, 20 aa, Artificial Sequence
  Description of Artificial Sequence: Synthetic peptide
  Seed: GNEKKAKLANVVRKMMTNSQ
GNEFKANLWNVIRKMMTNSQ

SEQ ID NO: 187609 - protein, 20 aa, Artificial Sequence
  Description of Artificial Sequence: Synthetic peptide
  Seed: GNEKKAKLANVVRKMMTNSQ
GNEFKANLWNVLRKMMTNSQ

SEQ ID NO: 187610 - protein, 20 aa, Artificial Sequence
  Description of Artificial Sequence: Synthetic peptide
  Seed: GNEKKAKLANVVRKMMTNSQ
GNEFKANLWNVMRKMMTNSQ

SEQ ID NO: 187611 - protein, 20 aa, Artificial Sequence
  Description of Artificial Sequence: Synthetic peptide
  Seed: GNEKKAKLANVVRKMMTNSQ
GNEFKANLWNVVRKMMTNSQ

SEQ ID NO: 187612 - protein, 20 aa, Artificial Sequence
  Description of Artificial Sequence: Synthetic peptide
  Seed: GNEKKAKLANVVRKMMTNSQ
GNEFKANLYNVARKMMTNSQ

SEQ ID NO: 187613 - protein, 20 aa, Artificial Sequence
  Description of Artificial Sequence: Synthetic peptide
  Seed: GNEKKAKLANVVRKMMTNSQ
GNEFKANLYNVFRKMMTNSQ

SEQ ID NO: 187614 - protein, 20 aa, Artificial Sequence
  Description of Artificial Sequence: Synthetic peptide
  Seed: GNEKKAKLANVVRKMMTNSQ
GNEFKANLYNVIRKMMTNSQ

SEQ ID NO: 187615 - protein, 20 aa, Artificial Sequence
  Description of Artificial Sequence: Synthetic peptide
  Seed: GNEKKAKLANVVRKMMTNSQ
GNEFKANLYNVLRKMMTNSQ

SEQ ID NO: 187616 - protein, 20 aa, Artificial Sequence
  Description of Artificial Sequence: Synthetic peptide
  Seed: GNEKKAKLANVVRKMMTNSQ
GNEFKANLYNVMRKMMTNSQ

SEQ ID NO: 187617 - protein, 20 aa, Artificial Sequence
  Description of Artificial Sequence: Synthetic peptide
  Seed: GNEKKAKLANVVRKMMTNSQ
GNEFKANLYNVTRKMMTNSQ

SEQ ID NO: 187618 - protein, 20 aa, Artificial Sequence
  Description of Artificial Sequence: Synthetic peptide
  Seed: GNEKKAKLANVVRKMMTNSQ
GNEFKANLYNVVRKMMTNSQ

SEQ ID NO: 187619 - protein, 20 aa, Artificial Sequence
  Description of Artificial Sequence: Synthetic peptide
  Seed: GNEKKAKLANVVRKMMTNSQ
GNEFKANLYNVYRKMMTNSQ

SEQ ID NO: 187620 - protein, 20 aa, Artificial Sequence
  Description of Artificial Sequence: Synthetic peptide
  Seed: GNEKKAKLANVVRKMMTNSQ
GNEFKAPLFNVFRKMMTNSQ

SEQ ID NO: 187621 - protein, 20 aa, Artificial Sequence
  Description of Artificial Sequence: Synthetic peptide
  Seed: GNEKKAKLANVVRKMMTNSQ
GNEFKAPLFNVIRKMMTNSQ

SEQ ID NO: 187622 - protein, 20 aa, Artificial Sequence
  Description of Artificial Sequence: Synthetic peptide
  Seed: GNEKKAKLANVVRKMMTNSQ
GNEFKAPLFNVLRKMMTNSQ

SEQ ID NO: 187623 - protein, 20 aa, Artificial Sequence
  Description of Artificial Sequence: Synthetic peptide
  Seed: GNEKKAKLANVVRKMMTNSQ
GNEFKAPLFNVMRKMMTNSQ

SEQ ID NO: 187624 - protein, 20 aa, Artificial Sequence
  Description of Artificial Sequence: Synthetic peptide
  Seed: GNEKKAKLANVVRKMMTNSQ
GNEFKAPLFNVVRKMMTNSQ

SEQ ID NO: 187625 - protein, 20 aa, Artificial Sequence
  Description of Artificial Sequence: Synthetic peptide
  Seed: GNEKKAKLANVVRKMMTNSQ
GNEFKAQLANVARKMMTNSQ

SEQ ID NO: 187626 - protein, 20 aa, Artificial Sequence
  Description of Artificial Sequence: Synthetic peptide
  Seed: GNEKKAKLANVVRKMMTNSQ
GNEFKAQLANVCRKMMTNSQ

SEQ ID NO: 187627 - protein, 20 aa, Artificial Sequence
  Description of Artificial Sequence: Synthetic peptide
  Seed: GNEKKAKLANVVRKMMTNSQ
GNEFKAQLANVDRKMMTNSQ

SEQ ID NO: 187628 - protein, 20 aa, Artificial Sequence
  Description of Artificial Sequence: Synthetic peptide
  Seed: GNEKKAKLANVVRKMMTNSQ
GNEFKAQLANVERKMMTNSQ

SEQ ID NO: 187629 - protein, 20 aa, Artificial Sequence
  Description of Artificial Sequence: Synthetic peptide
  Seed: GNEKKAKLANVVRKMMTNSQ
GNEFKAQLANVFRKMMTNSQ

SEQ ID NO: 187630 - protein, 20 aa, Artificial Sequence
  Description of Artificial Sequence: Synthetic peptide
  Seed: GNEKKAKLANVVRKMMTNSQ
GNEFKAQLANVGRKMMTNSQ

SEQ ID NO: 187631 - protein, 20 aa, Artificial Sequence
  Description of Artificial Sequence: Synthetic peptide
  Seed: GNEKKAKLANVVRKMMTNSQ
GNEFKAQLANVHRKMMTNSQ

SEQ ID NO: 187632 - protein, 20 aa, Artificial Sequence
  Description of Artificial Sequence: Synthetic peptide
  Seed: GNEKKAKLANVVRKMMTNSQ
GNEFKAQLANVIRKMMTNSQ

SEQ ID NO: 187633 - protein, 20 aa, Artificial Sequence
  Description of Artificial Sequence: Synthetic peptide
  Seed: GNEKKAKLANVVRKMMTNSQ
GNEFKAQLANVKRKMMTNSQ

SEQ ID NO: 187634 - protein, 20 aa, Artificial Sequence
  Description of Artificial Sequence: Synthetic peptide
  Seed: GNEKKAKLANVVRKMMTNSQ
GNEFKAQLANVLRKMMTNSQ

SEQ ID NO: 187635 - protein, 20 aa, Artificial Sequence
  Description of Artificial Sequence: Synthetic peptide
  Seed: GNEKKAKLANVVRKMMTNSQ
GNEFKAQLANVMRKMMTNSQ

SEQ ID NO: 187636 - protein, 20 aa, Artificial Sequence
  Description of Artificial Sequence: Synthetic peptide
  Seed: GNEKKAKLANVVRKMMTNSQ
GNEFKAQLANVNRKMMTNSQ

SEQ ID NO: 187637 - protein, 20 aa, Artificial Sequence
  Description of Artificial Sequence: Synthetic peptide
  Seed: GNEKKAKLANVVRKMMTNSQ
GNEFKAQLANVPRKMMTNSQ

SEQ ID NO: 187638 - protein, 20 aa, Artificial Sequence
  Description of Artificial Sequence: Synthetic peptide
  Seed: GNEKKAKLANVVRKMMTNSQ
GNEFKAQLANVQRKMMTNSQ

SEQ ID NO: 187639 - protein, 20 aa, Artificial Sequence
  Description of Artificial Sequence: Synthetic peptide
  Seed: GNEKKAKLANVVRKMMTNSQ
GNEFKAQLANVRRKMMTNSQ

SEQ ID NO: 187640 - protein, 20 aa, Artificial Sequence
  Description of Artificial Sequence: Synthetic peptide
  Seed: GNEKKAKLANVVRKMMTNSQ
GNEFKAQLANVSRKMMTNSQ

SEQ ID NO: 187641 - protein, 20 aa, Artificial Sequence
  Description of Artificial Sequence: Synthetic peptide
  Seed: GNEKKAKLANVVRKMMTNSQ
GNEFKAQLANVTRKMMTNSQ

SEQ ID NO: 187642 - protein, 20 aa, Artificial Sequence
  Description of Artificial Sequence: Synthetic peptide
  Seed: GNEKKAKLANVVRKMMTNSQ
GNEFKAQLANVVRKMMTNSQ

SEQ ID NO: 187643 - protein, 20 aa, Artificial Sequence
  Description of Artificial Sequence: Synthetic peptide
  Seed: GNEKKAKLANVVRKMMTNSQ
GNEFKAQLANVWRKMMTNSQ

SEQ ID NO: 187644 - protein, 20 aa, Artificial Sequence
  Description of Artificial Sequence: Synthetic peptide
  Seed: GNEKKAKLANVVRKMMTNSQ
GNEFKAQLANVYRKMMTNSQ

SEQ ID NO: 187645 - protein, 20 aa, Artificial Sequence
  Description of Artificial Sequence: Synthetic peptide
  Seed: GNEKKAKLANVVRKMMTNSQ
GNEFKAQLFNVARKMMTNSQ

SEQ ID NO: 187646 - protein, 20 aa, Artificial Sequence
  Description of Artificial Sequence: Synthetic peptide
  Seed: GNEKKAKLANVVRKMMTNSQ
GNEFKAQLFNVCRKMMTNSQ

SEQ ID NO: 187647 - protein, 20 aa, Artificial Sequence
  Description of Artificial Sequence: Synthetic peptide
  Seed: GNEKKAKLANVVRKMMTNSQ
GNEFKAQLFNVDRKMMTNSQ

SEQ ID NO: 187648 - protein, 20 aa, Artificial Sequence
  Description of Artificial Sequence: Synthetic peptide
  Seed: GNEKKAKLANVVRKMMTNSQ
GNEFKAQLFNVERKMMTNSQ

SEQ ID NO: 187649 - protein, 20 aa, Artificial Sequence
  Description of Artificial Sequence: Synthetic peptide
  Seed: GNEKKAKLANVVRKMMTNSQ
GNEFKAQLFNVFRKMMTNSQ

SEQ ID NO: 187650 - protein, 20 aa, Artificial Sequence
  Description of Artificial Sequence: Synthetic peptide
  Seed: GNEKKAKLANVVRKMMTNSQ
GNEFKAQLFNVHRKMMTNSQ

SEQ ID NO: 187651 - protein, 20 aa, Artificial Sequence
  Description of Artificial Sequence: Synthetic peptide
  Seed: GNEKKAKLANVVRKMMTNSQ
GNEFKAQLFNVIRKMMTNSQ

SEQ ID NO: 187652 - protein, 20 aa, Artificial Sequence
  Description of Artificial Sequence: Synthetic peptide
  Seed: GNEKKAKLANVVRKMMTNSQ
GNEFKAQLFNVLRKMMTNSQ

SEQ ID NO: 187653 - protein, 20 aa, Artificial Sequence
  Description of Artificial Sequence: Synthetic peptide
  Seed: GNEKKAKLANVVRKMMTNSQ
GNEFKAQLFNVMRKMMTNSQ

SEQ ID NO: 187654 - protein, 20 aa, Artificial Sequence
  Description of Artificial Sequence: Synthetic peptide
  Seed: GNEKKAKLANVVRKMMTNSQ
GNEFKAQLFNVNRKMMTNSQ

SEQ ID NO: 187655 - protein, 20 aa, Artificial Sequence
  Description of Artificial Sequence: Synthetic peptide
  Seed: GNEKKAKLANVVRKMMTNSQ
GNEFKAQLFNVPRKMMTNSQ

SEQ ID NO: 187656 - protein, 20 aa, Artificial Sequence
  Description of Artificial Sequence: Synthetic peptide
  Seed: GNEKKAKLANVVRKMMTNSQ
GNEFKAQLFNVQRKMMTNSQ

SEQ ID NO: 187657 - protein, 20 aa, Artificial Sequence
  Description of Artificial Sequence: Synthetic peptide
  Seed: GNEKKAKLANVVRKMMTNSQ
GNEFKAQLFNVSRKMMTNSQ

SEQ ID NO: 187658 - protein, 20 aa, Artificial Sequence
  Description of Artificial Sequence: Synthetic peptide
  Seed: GNEKKAKLANVVRKMMTNSQ
GNEFKAQLFNVTRKMMTNSQ

SEQ ID NO: 187659 - protein, 20 aa, Artificial Sequence
  Description of Artificial Sequence: Synthetic peptide
  Seed: GNEKKAKLANVVRKMMTNSQ
GNEFKAQLFNVVRKMMTNSQ

SEQ ID NO: 187660 - protein, 20 aa, Artificial Sequence
  Description of Artificial Sequence: Synthetic peptide
  Seed: GNEKKAKLANVVRKMMTNSQ
GNEFKAQLFNVYRKMMTNSQ

SEQ ID NO: 187661 - protein, 20 aa, Artificial Sequence
  Description of Artificial Sequence: Synthetic peptide
  Seed: GNEKKAKLANVVRKMMTNSQ
GNEFKAQLGNVARKMMTNSQ

SEQ ID NO: 187662 - protein, 20 aa, Artificial Sequence
  Description of Artificial Sequence: Synthetic peptide
  Seed: GNEKKAKLANVVRKMMTNSQ
GNEFKAQLGNVCRKMMTNSQ

SEQ ID NO: 187663 - protein, 20 aa, Artificial Sequence
  Description of Artificial Sequence: Synthetic peptide
  Seed: GNEKKAKLANVVRKMMTNSQ
GNEFKAQLGNVFRKMMTNSQ

SEQ ID NO: 187664 - protein, 20 aa, Artificial Sequence
  Description of Artificial Sequence: Synthetic peptide
  Seed: GNEKKAKLANVVRKMMTNSQ
GNEFKAQLGNVGRKMMTNSQ

SEQ ID NO: 187665 - protein, 20 aa, Artificial Sequence
  Description of Artificial Sequence: Synthetic peptide
  Seed: GNEKKAKLANVVRKMMTNSQ
GNEFKAQLGNVHRKMMTNSQ

SEQ ID NO: 187666 - protein, 20 aa, Artificial Sequence
  Description of Artificial Sequence: Synthetic peptide
  Seed: GNEKKAKLANVVRKMMTNSQ
GNEFKAQLGNVIRKMMTNSQ

SEQ ID NO: 187667 - protein, 20 aa, Artificial Sequence
  Description of Artificial Sequence: Synthetic peptide
  Seed: GNEKKAKLANVVRKMMTNSQ
GNEFKAQLGNVLRKMMTNSQ

SEQ ID NO: 187668 - protein, 20 aa, Artificial Sequence
  Description of Artificial Sequence: Synthetic peptide
  Seed: GNEKKAKLANVVRKMMTNSQ
GNEFKAQLGNVMRKMMTNSQ

SEQ ID NO: 187669 - protein, 20 aa, Artificial Sequence
  Description of Artificial Sequence: Synthetic peptide
  Seed: GNEKKAKLANVVRKMMTNSQ
GNEFKAQLGNVNRKMMTNSQ

SEQ ID NO: 187670 - protein, 20 aa, Artificial Sequence
  Description of Artificial Sequence: Synthetic peptide
  Seed: GNEKKAKLANVVRKMMTNSQ
GNEFKAQLGNVQRKMMTNSQ

SEQ ID NO: 187671 - protein, 20 aa, Artificial Sequence
  Description of Artificial Sequence: Synthetic peptide
  Seed: GNEKKAKLANVVRKMMTNSQ
GNEFKAQLGNVSRKMMTNSQ

SEQ ID NO: 187672 - protein, 20 aa, Artificial Sequence
  Description of Artificial Sequence: Synthetic peptide
  Seed: GNEKKAKLANVVRKMMTNSQ
GNEFKAQLGNVTRKMMTNSQ

SEQ ID NO: 187673 - protein, 20 aa, Artificial Sequence
  Description of Artificial Sequence: Synthetic peptide
  Seed: GNEKKAKLANVVRKMMTNSQ
GNEFKAQLGNVVRKMMTNSQ

SEQ ID NO: 187674 - protein, 20 aa, Artificial Sequence
  Description of Artificial Sequence: Synthetic peptide
  Seed: GNEKKAKLANVVRKMMTNSQ
GNEFKAQLGNVYRKMMTNSQ

SEQ ID NO: 187675 - protein, 20 aa, Artificial Sequence
  Description of Artificial Sequence: Synthetic peptide
  Seed: GNEKKAKLANVVRKMMTNSQ
GNEFKAQLINVARKMMTNSQ

SEQ ID NO: 187676 - protein, 20 aa, Artificial Sequence
  Description of Artificial Sequence: Synthetic peptide
  Seed: GNEKKAKLANVVRKMMTNSQ
GNEFKAQLINVDRKMMTNSQ

SEQ ID NO: 187677 - protein, 20 aa, Artificial Sequence
  Description of Artificial Sequence: Synthetic peptide
  Seed: GNEKKAKLANVVRKMMTNSQ
GNEFKAQLINVFRKMMTNSQ

SEQ ID NO: 187678 - protein, 20 aa, Artificial Sequence
  Description of Artificial Sequence: Synthetic peptide
  Seed: GNEKKAKLANVVRKMMTNSQ
GNEFKAQLINVGRKMMTNSQ

SEQ ID NO: 187679 - protein, 20 aa, Artificial Sequence
  Description of Artificial Sequence: Synthetic peptide
  Seed: GNEKKAKLANVVRKMMTNSQ
GNEFKAQLINVHRKMMTNSQ

SEQ ID NO: 187680 - protein, 20 aa, Artificial Sequence
  Description of Artificial Sequence: Synthetic peptide
  Seed: GNEKKAKLANVVRKMMTNSQ
GNEFKAQLINVIRKMMTNSQ

SEQ ID NO: 187681 - protein, 20 aa, Artificial Sequence
  Description of Artificial Sequence: Synthetic peptide
  Seed: GNEKKAKLANVVRKMMTNSQ
GNEFKAQLINVLRKMMTNSQ

SEQ ID NO: 187682 - protein, 20 aa, Artificial Sequence
  Description of Artificial Sequence: Synthetic peptide
  Seed: GNEKKAKLANVVRKMMTNSQ
GNEFKAQLINVMRKMMTNSQ

SEQ ID NO: 187683 - protein, 20 aa, Artificial Sequence
  Description of Artificial Sequence: Synthetic peptide
  Seed: GNEKKAKLANVVRKMMTNSQ
GNEFKAQLINVNRKMMTNSQ

SEQ ID NO: 187684 - protein, 20 aa, Artificial Sequence
  Description of Artificial Sequence: Synthetic peptide
  Seed: GNEKKAKLANVVRKMMTNSQ
GNEFKAQLINVQRKMMTNSQ

SEQ ID NO: 187685 - protein, 20 aa, Artificial Sequence
  Description of Artificial Sequence: Synthetic peptide
  Seed: GNEKKAKLANVVRKMMTNSQ
GNEFKAQLINVSRKMMTNSQ

SEQ ID NO: 187686 - protein, 20 aa, Artificial Sequence
  Description of Artificial Sequence: Synthetic peptide
  Seed: GNEKKAKLANVVRKMMTNSQ
GNEFKAQLINVTRKMMTNSQ

SEQ ID NO: 187687 - protein, 20 aa, Artificial Sequence
  Description of Artificial Sequence: Synthetic peptide
  Seed: GNEKKAKLANVVRKMMTNSQ
GNEFKAQLINVVRKMMTNSQ

SEQ ID NO: 187688 - protein, 20 aa, Artificial Sequence
  Description of Artificial Sequence: Synthetic peptide
  Seed: GNEKKAKLANVVRKMMTNSQ
GNEFKAQLLNVARKMMTNSQ

SEQ ID NO: 187689 - protein, 20 aa, Artificial Sequence
  Description of Artificial Sequence: Synthetic peptide
  Seed: GNEKKAKLANVVRKMMTNSQ
GNEFKAQLLNVFRKMMTNSQ

SEQ ID NO: 187690 - protein, 20 aa, Artificial Sequence
  Description of Artificial Sequence: Synthetic peptide
  Seed: GNEKKAKLANVVRKMMTNSQ
GNEFKAQLLNVIRKMMTNSQ

SEQ ID NO: 187691 - protein, 20 aa, Artificial Sequence
  Description of Artificial Sequence: Synthetic peptide
  Seed: GNEKKAKLANVVRKMMTNSQ
GNEFKAQLLNVLRKMMTNSQ

SEQ ID NO: 187692 - protein, 20 aa, Artificial Sequence
  Description of Artificial Sequence: Synthetic peptide
  Seed: GNEKKAKLANVVRKMMTNSQ
GNEFKAQLLNVMRKMMTNSQ

SEQ ID NO: 187693 - protein, 20 aa, Artificial Sequence
  Description of Artificial Sequence: Synthetic peptide
  Seed: GNEKKAKLANVVRKMMTNSQ
GNEFKAQLLNVNRKMMTNSQ

SEQ ID NO: 187694 - protein, 20 aa, Artificial Sequence
  Description of Artificial Sequence: Synthetic peptide
  Seed: GNEKKAKLANVVRKMMTNSQ
GNEFKAQLLNVSRKMMTNSQ

SEQ ID NO: 187695 - protein, 20 aa, Artificial Sequence
  Description of Artificial Sequence: Synthetic peptide
  Seed: GNEKKAKLANVVRKMMTNSQ
GNEFKAQLLNVTRKMMTNSQ

SEQ ID NO: 187696 - protein, 20 aa, Artificial Sequence
  Description of Artificial Sequence: Synthetic peptide
  Seed: GNEKKAKLANVVRKMMTNSQ
GNEFKAQLLNVVRKMMTNSQ

SEQ ID NO: 187697 - protein, 20 aa, Artificial Sequence
  Description of Artificial Sequence: Synthetic peptide
  Seed: GNEKKAKLANVVRKMMTNSQ
GNEFKAQLMNVARKMMTNSQ

SEQ ID NO: 187698 - protein, 20 aa, Artificial Sequence
  Description of Artificial Sequence: Synthetic peptide
  Seed: GNEKKAKLANVVRKMMTNSQ
GNEFKAQLMNVFRKMMTNSQ

SEQ ID NO: 187699 - protein, 20 aa, Artificial Sequence
  Description of Artificial Sequence: Synthetic peptide
  Seed: GNEKKAKLANVVRKMMTNSQ
GNEFKAQLMNVIRKMMTNSQ

SEQ ID NO: 187700 - protein, 20 aa, Artificial Sequence
  Description of Artificial Sequence: Synthetic peptide
  Seed: GNEKKAKLANVVRKMMTNSQ
GNEFKAQLMNVLRKMMTNSQ

SEQ ID NO: 187701 - protein, 20 aa, Artificial Sequence
  Description of Artificial Sequence: Synthetic peptide
  Seed: GNEKKAKLANVVRKMMTNSQ
GNEFKAQLMNVMRKMMTNSQ

SEQ ID NO: 187702 - protein, 20 aa, Artificial Sequence
  Description of Artificial Sequence: Synthetic peptide
  Seed: GNEKKAKLANVVRKMMTNSQ
GNEFKAQLMNVNRKMMTNSQ

SEQ ID NO: 187703 - protein, 20 aa, Artificial Sequence
  Description of Artificial Sequence: Synthetic peptide
  Seed: GNEKKAKLANVVRKMMTNSQ
GNEFKAQLMNVSRKMMTNSQ

SEQ ID NO: 187704 - protein, 20 aa, Artificial Sequence
  Description of Artificial Sequence: Synthetic peptide
  Seed: GNEKKAKLANVVRKMMTNSQ
GNEFKAQLMNVTRKMMTNSQ

SEQ ID NO: 187705 - protein, 20 aa, Artificial Sequence
  Description of Artificial Sequence: Synthetic peptide
  Seed: GNEKKAKLANVVRKMMTNSQ
GNEFKAQLMNVVRKMMTNSQ

SEQ ID NO: 187706 - protein, 20 aa, Artificial Sequence
  Description of Artificial Sequence: Synthetic peptide
  Seed: GNEKKAKLANVVRKMMTNSQ
GNEFKAQLNNVARKMMTNSQ

SEQ ID NO: 187707 - protein, 20 aa, Artificial Sequence
  Description of Artificial Sequence: Synthetic peptide
  Seed: GNEKKAKLANVVRKMMTNSQ
GNEFKAQLNNVFRKMMTNSQ

SEQ ID NO: 187708 - protein, 20 aa, Artificial Sequence
  Description of Artificial Sequence: Synthetic peptide
  Seed: GNEKKAKLANVVRKMMTNSQ
GNEFKAQLNNVGRKMMTNSQ

SEQ ID NO: 187709 - protein, 20 aa, Artificial Sequence
  Description of Artificial Sequence: Synthetic peptide
  Seed: GNEKKAKLANVVRKMMTNSQ
GNEFKAQLNNVIRKMMTNSQ

SEQ ID NO: 187710 - protein, 20 aa, Artificial Sequence
  Description of Artificial Sequence: Synthetic peptide
  Seed: GNEKKAKLANVVRKMMTNSQ
GNEFKAQLNNVLRKMMTNSQ

SEQ ID NO: 187711 - protein, 20 aa, Artificial Sequence
  Description of Artificial Sequence: Synthetic peptide
  Seed: GNEKKAKLANVVRKMMTNSQ
GNEFKAQLNNVMRKMMTNSQ

SEQ ID NO: 187712 - protein, 20 aa, Artificial Sequence
  Description of Artificial Sequence: Synthetic peptide
  Seed: GNEKKAKLANVVRKMMTNSQ
GNEFKAQLNNVNRKMMTNSQ

SEQ ID NO: 187713 - protein, 20 aa, Artificial Sequence
  Description of Artificial Sequence: Synthetic peptide
  Seed: GNEKKAKLANVVRKMMTNSQ
GNEFKAQLNNVSRKMMTNSQ

SEQ ID NO: 187714 - protein, 20 aa, Artificial Sequence
  Description of Artificial Sequence: Synthetic peptide
  Seed: GNEKKAKLANVVRKMMTNSQ
GNEFKAQLNNVTRKMMTNSQ

SEQ ID NO: 187715 - protein, 20 aa, Artificial Sequence
  Description of Artificial Sequence: Synthetic peptide
  Seed: GNEKKAKLANVVRKMMTNSQ
GNEFKAQLNNVVRKMMTNSQ

SEQ ID NO: 187716 - protein, 20 aa, Artificial Sequence
  Description of Artificial Sequence: Synthetic peptide
  Seed: GNEKKAKLANVVRKMMTNSQ
GNEFKAQLPNVARKMMTNSQ

SEQ ID NO: 187717 - protein, 20 aa, Artificial Sequence
  Description of Artificial Sequence: Synthetic peptide
  Seed: GNEKKAKLANVVRKMMTNSQ
GNEFKAQLPNVCRKMMTNSQ

SEQ ID NO: 187718 - protein, 20 aa, Artificial Sequence
  Description of Artificial Sequence: Synthetic peptide
  Seed: GNEKKAKLANVVRKMMTNSQ
GNEFKAQLPNVDRKMMTNSQ

SEQ ID NO: 187719 - protein, 20 aa, Artificial Sequence
  Description of Artificial Sequence: Synthetic peptide
  Seed: GNEKKAKLANVVRKMMTNSQ
GNEFKAQLPNVERKMMTNSQ

SEQ ID NO: 187720 - protein, 20 aa, Artificial Sequence
  Description of Artificial Sequence: Synthetic peptide
  Seed: GNEKKAKLANVVRKMMTNSQ
GNEFKAQLPNVFRKMMTNSQ

SEQ ID NO: 187721 - protein, 20 aa, Artificial Sequence
  Description of Artificial Sequence: Synthetic peptide
  Seed: GNEKKAKLANVVRKMMTNSQ
GNEFKAQLPNVGRKMMTNSQ

SEQ ID NO: 187722 - protein, 20 aa, Artificial Sequence
  Description of Artificial Sequence: Synthetic peptide
  Seed: GNEKKAKLANVVRKMMTNSQ
GNEFKAQLPNVHRKMMTNSQ

SEQ ID NO: 187723 - protein, 20 aa, Artificial Sequence
  Description of Artificial Sequence: Synthetic peptide
  Seed: GNEKKAKLANVVRKMMTNSQ
GNEFKAQLPNVIRKMMTNSQ

SEQ ID NO: 187724 - protein, 20 aa, Artificial Sequence
  Description of Artificial Sequence: Synthetic peptide
  Seed: GNEKKAKLANVVRKMMTNSQ
GNEFKAQLPNVLRKMMTNSQ

SEQ ID NO: 187725 - protein, 20 aa, Artificial Sequence
  Description of Artificial Sequence: Synthetic peptide
  Seed: GNEKKAKLANVVRKMMTNSQ
GNEFKAQLPNVMRKMMTNSQ

SEQ ID NO: 187726 - protein, 20 aa, Artificial Sequence
  Description of Artificial Sequence: Synthetic peptide
  Seed: GNEKKAKLANVVRKMMTNSQ
GNEFKAQLPNVNRKMMTNSQ

SEQ ID NO: 187727 - protein, 20 aa, Artificial Sequence
  Description of Artificial Sequence: Synthetic peptide
  Seed: GNEKKAKLANVVRKMMTNSQ
GNEFKAQLPNVPRKMMTNSQ

SEQ ID NO: 187728 - protein, 20 aa, Artificial Sequence
  Description of Artificial Sequence: Synthetic peptide
  Seed: GNEKKAKLANVVRKMMTNSQ
GNEFKAQLPNVQRKMMTNSQ

SEQ ID NO: 187729 - protein, 20 aa, Artificial Sequence
  Description of Artificial Sequence: Synthetic peptide
  Seed: GNEKKAKLANVVRKMMTNSQ
GNEFKAQLPNVSRKMMTNSQ

SEQ ID NO: 187730 - protein, 20 aa, Artificial Sequence
  Description of Artificial Sequence: Synthetic peptide
  Seed: GNEKKAKLANVVRKMMTNSQ
GNEFKAQLPNVTRKMMTNSQ

SEQ ID NO: 187731 - protein, 20 aa, Artificial Sequence
  Description of Artificial Sequence: Synthetic peptide
  Seed: GNEKKAKLANVVRKMMTNSQ
GNEFKAQLPNVVRKMMTNSQ

SEQ ID NO: 187732 - protein, 20 aa, Artificial Sequence
  Description of Artificial Sequence: Synthetic peptide
  Seed: GNEKKAKLANVVRKMMTNSQ
GNEFKAQLPNVWRKMMTNSQ

SEQ ID NO: 187733 - protein, 20 aa, Artificial Sequence
  Description of Artificial Sequence: Synthetic peptide
  Seed: GNEKKAKLANVVRKMMTNSQ
GNEFKAQLPNVYRKMMTNSQ

SEQ ID NO: 187734 - protein, 20 aa, Artificial Sequence
  Description of Artificial Sequence: Synthetic peptide
  Seed: GNEKKAKLANVVRKMMTNSQ
GNEFKAQLSNVARKMMTNSQ

SEQ ID NO: 187735 - protein, 20 aa, Artificial Sequence
  Description of Artificial Sequence: Synthetic peptide
  Seed: GNEKKAKLANVVRKMMTNSQ
GNEFKAQLSNVCRKMMTNSQ

SEQ ID NO: 187736 - protein, 20 aa, Artificial Sequence
  Description of Artificial Sequence: Synthetic peptide
  Seed: GNEKKAKLANVVRKMMTNSQ
GNEFKAQLSNVDRKMMTNSQ

SEQ ID NO: 187737 - protein, 20 aa, Artificial Sequence
  Description of Artificial Sequence: Synthetic peptide
  Seed: GNEKKAKLANVVRKMMTNSQ
GNEFKAQLSNVERKMMTNSQ

SEQ ID NO: 187738 - protein, 20 aa, Artificial Sequence
  Description of Artificial Sequence: Synthetic peptide
  Seed: GNEKKAKLANVVRKMMTNSQ
GNEFKAQLSNVFRKMMTNSQ

SEQ ID NO: 187739 - protein, 20 aa, Artificial Sequence
  Description of Artificial Sequence: Synthetic peptide
  Seed: GNEKKAKLANVVRKMMTNSQ
GNEFKAQLSNVGRKMMTNSQ

SEQ ID NO: 187740 - protein, 20 aa, Artificial Sequence
  Description of Artificial Sequence: Synthetic peptide
  Seed: GNEKKAKLANVVRKMMTNSQ
GNEFKAQLSNVHRKMMTNSQ

SEQ ID NO: 187741 - protein, 20 aa, Artificial Sequence
  Description of Artificial Sequence: Synthetic peptide
  Seed: GNEKKAKLANVVRKMMTNSQ
GNEFKAQLSNVIRKMMTNSQ

SEQ ID NO: 187742 - protein, 20 aa, Artificial Sequence
  Description of Artificial Sequence: Synthetic peptide
  Seed: GNEKKAKLANVVRKMMTNSQ
GNEFKAQLSNVLRKMMTNSQ

SEQ ID NO: 187743 - protein, 20 aa, Artificial Sequence
  Description of Artificial Sequence: Synthetic peptide
  Seed: GNEKKAKLANVVRKMMTNSQ
GNEFKAQLSNVMRKMMTNSQ

SEQ ID NO: 187744 - protein, 20 aa, Artificial Sequence
  Description of Artificial Sequence: Synthetic peptide
  Seed: GNEKKAKLANVVRKMMTNSQ
GNEFKAQLSNVNRKMMTNSQ

SEQ ID NO: 187745 - protein, 20 aa, Artificial Sequence
  Description of Artificial Sequence: Synthetic peptide
  Seed: GNEKKAKLANVVRKMMTNSQ
GNEFKAQLSNVPRKMMTNSQ

SEQ ID NO: 187746 - protein, 20 aa, Artificial Sequence
  Description of Artificial Sequence: Synthetic peptide
  Seed: GNEKKAKLANVVRKMMTNSQ
GNEFKAQLSNVQRKMMTNSQ

SEQ ID NO: 187747 - protein, 20 aa, Artificial Sequence
  Description of Artificial Sequence: Synthetic peptide
  Seed: GNEKKAKLANVVRKMMTNSQ
GNEFKAQLSNVSRKMMTNSQ

SEQ ID NO: 187748 - protein, 20 aa, Artificial Sequence
  Description of Artificial Sequence: Synthetic peptide
  Seed: GNEKKAKLANVVRKMMTNSQ
GNEFKAQLSNVTRKMMTNSQ

SEQ ID NO: 187749 - protein, 20 aa, Artificial Sequence
  Description of Artificial Sequence: Synthetic peptide
  Seed: GNEKKAKLANVVRKMMTNSQ
GNEFKAQLSNVVRKMMTNSQ

SEQ ID NO: 187750 - protein, 20 aa, Artificial Sequence
  Description of Artificial Sequence: Synthetic peptide
  Seed: GNEKKAKLANVVRKMMTNSQ
GNEFKAQLSNVYRKMMTNSQ

SEQ ID NO: 187751 - protein, 20 aa, Artificial Sequence
  Description of Artificial Sequence: Synthetic peptide
  Seed: GNEKKAKLANVVRKMMTNSQ
GNEFKAQLTNVARKMMTNSQ

SEQ ID NO: 187752 - protein, 20 aa, Artificial Sequence
  Description of Artificial Sequence: Synthetic peptide
  Seed: GNEKKAKLANVVRKMMTNSQ
GNEFKAQLTNVCRKMMTNSQ

SEQ ID NO: 187753 - protein, 20 aa, Artificial Sequence
  Description of Artificial Sequence: Synthetic peptide
  Seed: GNEKKAKLANVVRKMMTNSQ
GNEFKAQLTNVDRKMMTNSQ

SEQ ID NO: 187754 - protein, 20 aa, Artificial Sequence
  Description of Artificial Sequence: Synthetic peptide
  Seed: GNEKKAKLANVVRKMMTNSQ
GNEFKAQLTNVERKMMTNSQ

SEQ ID NO: 187755 - protein, 20 aa, Artificial Sequence
  Description of Artificial Sequence: Synthetic peptide
  Seed: GNEKKAKLANVVRKMMTNSQ
GNEFKAQLTNVFRKMMTNSQ

SEQ ID NO: 187756 - protein, 20 aa, Artificial Sequence
  Description of Artificial Sequence: Synthetic peptide
  Seed: GNEKKAKLANVVRKMMTNSQ
GNEFKAQLTNVGRKMMTNSQ

SEQ ID NO: 187757 - protein, 20 aa, Artificial Sequence
  Description of Artificial Sequence: Synthetic peptide
  Seed: GNEKKAKLANVVRKMMTNSQ
GNEFKAQLTNVHRKMMTNSQ

SEQ ID NO: 187758 - protein, 20 aa, Artificial Sequence
  Description of Artificial Sequence: Synthetic peptide
  Seed: GNEKKAKLANVVRKMMTNSQ
GNEFKAQLTNVIRKMMTNSQ

SEQ ID NO: 187759 - protein, 20 aa, Artificial Sequence
  Description of Artificial Sequence: Synthetic peptide
  Seed: GNEKKAKLANVVRKMMTNSQ
GNEFKAQLTNVLRKMMTNSQ

SEQ ID NO: 187760 - protein, 20 aa, Artificial Sequence
  Description of Artificial Sequence: Synthetic peptide
  Seed: GNEKKAKLANVVRKMMTNSQ
GNEFKAQLTNVMRKMMTNSQ

SEQ ID NO: 187761 - protein, 20 aa, Artificial Sequence
  Description of Artificial Sequence: Synthetic peptide
  Seed: GNEKKAKLANVVRKMMTNSQ
GNEFKAQLTNVNRKMMTNSQ

SEQ ID NO: 187762 - protein, 20 aa, Artificial Sequence
  Description of Artificial Sequence: Synthetic peptide
  Seed: GNEKKAKLANVVRKMMTNSQ
GNEFKAQLTNVPRKMMTNSQ

SEQ ID NO: 187763 - protein, 20 aa, Artificial Sequence
  Description of Artificial Sequence: Synthetic peptide
  Seed: GNEKKAKLANVVRKMMTNSQ
GNEFKAQLTNVQRKMMTNSQ

SEQ ID NO: 187764 - protein, 20 aa, Artificial Sequence
  Description of Artificial Sequence: Synthetic peptide
  Seed: GNEKKAKLANVVRKMMTNSQ
GNEFKAQLTNVSRKMMTNSQ

SEQ ID NO: 187765 - protein, 20 aa, Artificial Sequence
  Description of Artificial Sequence: Synthetic peptide
  Seed: GNEKKAKLANVVRKMMTNSQ
GNEFKAQLTNVTRKMMTNSQ

SEQ ID NO: 187766 - protein, 20 aa, Artificial Sequence
  Description of Artificial Sequence: Synthetic peptide
  Seed: GNEKKAKLANVVRKMMTNSQ
GNEFKAQLTNVVRKMMTNSQ

SEQ ID NO: 187767 - protein, 20 aa, Artificial Sequence
  Description of Artificial Sequence: Synthetic peptide
  Seed: GNEKKAKLANVVRKMMTNSQ
GNEFKAQLTNVYRKMMTNSQ

SEQ ID NO: 187768 - protein, 20 aa, Artificial Sequence
  Description of Artificial Sequence: Synthetic peptide
  Seed: GNEKKAKLANVVRKMMTNSQ
GNEFKAQLVNVARKMMTNSQ

SEQ ID NO: 187769 - protein, 20 aa, Artificial Sequence
  Description of Artificial Sequence: Synthetic peptide
  Seed: GNEKKAKLANVVRKMMTNSQ
GNEFKAQLVNVCRKMMTNSQ

SEQ ID NO: 187770 - protein, 20 aa, Artificial Sequence
  Description of Artificial Sequence: Synthetic peptide
  Seed: GNEKKAKLANVVRKMMTNSQ
GNEFKAQLVNVDRKMMTNSQ

SEQ ID NO: 187771 - protein, 20 aa, Artificial Sequence
  Description of Artificial Sequence: Synthetic peptide
  Seed: GNEKKAKLANVVRKMMTNSQ
GNEFKAQLVNVERKMMTNSQ

SEQ ID NO: 187772 - protein, 20 aa, Artificial Sequence
  Description of Artificial Sequence: Synthetic peptide
  Seed: GNEKKAKLANVVRKMMTNSQ
GNEFKAQLVNVFRKMMTNSQ

SEQ ID NO: 187773 - protein, 20 aa, Artificial Sequence
  Description of Artificial Sequence: Synthetic peptide
  Seed: GNEKKAKLANVVRKMMTNSQ
GNEFKAQLVNVGRKMMTNSQ

SEQ ID NO: 187774 - protein, 20 aa, Artificial Sequence
  Description of Artificial Sequence: Synthetic peptide
  Seed: GNEKKAKLANVVRKMMTNSQ
GNEFKAQLVNVHRKMMTNSQ

SEQ ID NO: 187775 - protein, 20 aa, Artificial Sequence
  Description of Artificial Sequence: Synthetic peptide
  Seed: GNEKKAKLANVVRKMMTNSQ
GNEFKAQLVNVIRKMMTNSQ

SEQ ID NO: 187776 - protein, 20 aa, Artificial Sequence
  Description of Artificial Sequence: Synthetic peptide
  Seed: GNEKKAKLANVVRKMMTNSQ
GNEFKAQLVNVLRKMMTNSQ

SEQ ID NO: 187777 - protein, 20 aa, Artificial Sequence
  Description of Artificial Sequence: Synthetic peptide
  Seed: GNEKKAKLANVVRKMMTNSQ
GNEFKAQLVNVMRKMMTNSQ

SEQ ID NO: 187778 - protein, 20 aa, Artificial Sequence
  Description of Artificial Sequence: Synthetic peptide
  Seed: GNEKKAKLANVVRKMMTNSQ
GNEFKAQLVNVNRKMMTNSQ

SEQ ID NO: 187779 - protein, 20 aa, Artificial Sequence
  Description of Artificial Sequence: Synthetic peptide
  Seed: GNEKKAKLANVVRKMMTNSQ
GNEFKAQLVNVPRKMMTNSQ

SEQ ID NO: 187780 - protein, 20 aa, Artificial Sequence
  Description of Artificial Sequence: Synthetic peptide
  Seed: GNEKKAKLANVVRKMMTNSQ
GNEFKAQLVNVQRKMMTNSQ

SEQ ID NO: 187781 - protein, 20 aa, Artificial Sequence
  Description of Artificial Sequence: Synthetic peptide
  Seed: GNEKKAKLANVVRKMMTNSQ
GNEFKAQLVNVSRKMMTNSQ

SEQ ID NO: 187782 - protein, 20 aa, Artificial Sequence
  Description of Artificial Sequence: Synthetic peptide
  Seed: GNEKKAKLANVVRKMMTNSQ
GNEFKAQLVNVTRKMMTNSQ

SEQ ID NO: 187783 - protein, 20 aa, Artificial Sequence
  Description of Artificial Sequence: Synthetic peptide
  Seed: GNEKKAKLANVVRKMMTNSQ
GNEFKAQLVNVVRKMMTNSQ

SEQ ID NO: 187784 - protein, 20 aa, Artificial Sequence
  Description of Artificial Sequence: Synthetic peptide
  Seed: GNEKKAKLANVVRKMMTNSQ
GNEFKAQLWNVFRKMMTNSQ

SEQ ID NO: 187785 - protein, 20 aa, Artificial Sequence
  Description of Artificial Sequence: Synthetic peptide
  Seed: GNEKKAKLANVVRKMMTNSQ
GNEFKAQLWNVIRKMMTNSQ

SEQ ID NO: 187786 - protein, 20 aa, Artificial Sequence
  Description of Artificial Sequence: Synthetic peptide
  Seed: GNEKKAKLANVVRKMMTNSQ
GNEFKAQLWNVLRKMMTNSQ

SEQ ID NO: 187787 - protein, 20 aa, Artificial Sequence
  Description of Artificial Sequence: Synthetic peptide
  Seed: GNEKKAKLANVVRKMMTNSQ
GNEFKAQLWNVMRKMMTNSQ

SEQ ID NO: 187788 - protein, 20 aa, Artificial Sequence
  Description of Artificial Sequence: Synthetic peptide
  Seed: GNEKKAKLANVVRKMMTNSQ
GNEFKAQLWNVVRKMMTNSQ

SEQ ID NO: 187789 - protein, 20 aa, Artificial Sequence
  Description of Artificial Sequence: Synthetic peptide
  Seed: GNEKKAKLANVVRKMMTNSQ
GNEFKAQLYNVFRKMMTNSQ

SEQ ID NO: 187790 - protein, 20 aa, Artificial Sequence
  Description of Artificial Sequence: Synthetic peptide
  Seed: GNEKKAKLANVVRKMMTNSQ
GNEFKAQLYNVIRKMMTNSQ

SEQ ID NO: 187791 - protein, 20 aa, Artificial Sequence
  Description of Artificial Sequence: Synthetic peptide
  Seed: GNEKKAKLANVVRKMMTNSQ
GNEFKAQLYNVLRKMMTNSQ

SEQ ID NO: 187792 - protein, 20 aa, Artificial Sequence
  Description of Artificial Sequence: Synthetic peptide
  Seed: GNEKKAKLANVVRKMMTNSQ
GNEFKAQLYNVMRKMMTNSQ

SEQ ID NO: 187793 - protein, 20 aa, Artificial Sequence
  Description of Artificial Sequence: Synthetic peptide
  Seed: GNEKKAKLANVVRKMMTNSQ
GNEFKAQLYNVTRKMMTNSQ

SEQ ID NO: 187794 - protein, 20 aa, Artificial Sequence
  Description of Artificial Sequence: Synthetic peptide
  Seed: GNEKKAKLANVVRKMMTNSQ
GNEFKAQLYNVVRKMMTNSQ

SEQ ID NO: 187795 - protein, 20 aa, Artificial Sequence
  Description of Artificial Sequence: Synthetic peptide
  Seed: GNEKKAKLANVVRKMMTNSQ
GNEFKAQLYNVYRKMMTNSQ

SEQ ID NO: 187796 - protein, 20 aa, Artificial Sequence
  Description of Artificial Sequence: Synthetic peptide
  Seed: GNEKKAKLANVVRKMMTNSQ
GNEFKARLANVIRKMMTNSQ

SEQ ID NO: 187797 - protein, 20 aa, Artificial Sequence
  Description of Artificial Sequence: Synthetic peptide
  Seed: GNEKKAKLANVVRKMMTNSQ
GNEFKARLANVLRKMMTNSQ

SEQ ID NO: 187798 - protein, 20 aa, Artificial Sequence
  Description of Artificial Sequence: Synthetic peptide
  Seed: GNEKKAKLANVVRKMMTNSQ
GNEFKARLANVVRKMMTNSQ

SEQ ID NO: 187799 - protein, 20 aa, Artificial Sequence
  Description of Artificial Sequence: Synthetic peptide
  Seed: GNEKKAKLANVVRKMMTNSQ
GNEFKARLFNVARKMMTNSQ

SEQ ID NO: 187800 - protein, 20 aa, Artificial Sequence
  Description of Artificial Sequence: Synthetic peptide
  Seed: GNEKKAKLANVVRKMMTNSQ
GNEFKARLFNVERKMMTNSQ

SEQ ID NO: 187801 - protein, 20 aa, Artificial Sequence
  Description of Artificial Sequence: Synthetic peptide
  Seed: GNEKKAKLANVVRKMMTNSQ
GNEFKARLFNVFRKMMTNSQ

SEQ ID NO: 187802 - protein, 20 aa, Artificial Sequence
  Description of Artificial Sequence: Synthetic peptide
  Seed: GNEKKAKLANVVRKMMTNSQ
GNEFKARLFNVIRKMMTNSQ

SEQ ID NO: 187803 - protein, 20 aa, Artificial Sequence
  Description of Artificial Sequence: Synthetic peptide
  Seed: GNEKKAKLANVVRKMMTNSQ
GNEFKARLFNVLRKMMTNSQ

SEQ ID NO: 187804 - protein, 20 aa, Artificial Sequence
  Description of Artificial Sequence: Synthetic peptide
  Seed: GNEKKAKLANVVRKMMTNSQ
GNEFKARLFNVMRKMMTNSQ

SEQ ID NO: 187805 - protein, 20 aa, Artificial Sequence
  Description of Artificial Sequence: Synthetic peptide
  Seed: GNEKKAKLANVVRKMMTNSQ
GNEFKARLFNVNRKMMTNSQ

SEQ ID NO: 187806 - protein, 20 aa, Artificial Sequence
  Description of Artificial Sequence: Synthetic peptide
  Seed: GNEKKAKLANVVRKMMTNSQ
GNEFKARLFNVSRKMMTNSQ

SEQ ID NO: 187807 - protein, 20 aa, Artificial Sequence
  Description of Artificial Sequence: Synthetic peptide
  Seed: GNEKKAKLANVVRKMMTNSQ
GNEFKARLFNVTRKMMTNSQ

SEQ ID NO: 187808 - protein, 20 aa, Artificial Sequence
  Description of Artificial Sequence: Synthetic peptide
  Seed: GNEKKAKLANVVRKMMTNSQ
GNEFKARLFNVVRKMMTNSQ

SEQ ID NO: 187809 - protein, 20 aa, Artificial Sequence
  Description of Artificial Sequence: Synthetic peptide
  Seed: GNEKKAKLANVVRKMMTNSQ
GNEFKARLFNVYRKMMTNSQ

SEQ ID NO: 187810 - protein, 20 aa, Artificial Sequence
  Description of Artificial Sequence: Synthetic peptide
  Seed: GNEKKAKLANVVRKMMTNSQ
GNEFKARLINVFRKMMTNSQ

SEQ ID NO: 187811 - protein, 20 aa, Artificial Sequence
  Description of Artificial Sequence: Synthetic peptide
  Seed: GNEKKAKLANVVRKMMTNSQ
GNEFKARLINVLRKMMTNSQ

SEQ ID NO: 187812 - protein, 20 aa, Artificial Sequence
  Description of Artificial Sequence: Synthetic peptide
  Seed: GNEKKAKLANVVRKMMTNSQ
GNEFKARLLNVFRKMMTNSQ

SEQ ID NO: 187813 - protein, 20 aa, Artificial Sequence
  Description of Artificial Sequence: Synthetic peptide
  Seed: GNEKKAKLANVVRKMMTNSQ
GNEFKARLLNVIRKMMTNSQ

SEQ ID NO: 187814 - protein, 20 aa, Artificial Sequence
  Description of Artificial Sequence: Synthetic peptide
  Seed: GNEKKAKLANVVRKMMTNSQ
GNEFKARLLNVLRKMMTNSQ

SEQ ID NO: 187815 - protein, 20 aa, Artificial Sequence
  Description of Artificial Sequence: Synthetic peptide
  Seed: GNEKKAKLANVVRKMMTNSQ
GNEFKARLLNVVRKMMTNSQ

SEQ ID NO: 187816 - protein, 20 aa, Artificial Sequence
  Description of Artificial Sequence: Synthetic peptide
  Seed: GNEKKAKLANVVRKMMTNSQ
GNEFKARLWNVFRKMMTNSQ

SEQ ID NO: 187817 - protein, 20 aa, Artificial Sequence
  Description of Artificial Sequence: Synthetic peptide
  Seed: GNEKKAKLANVVRKMMTNSQ
GNEFKARLWNVIRKMMTNSQ

SEQ ID NO: 187818 - protein, 20 aa, Artificial Sequence
  Description of Artificial Sequence: Synthetic peptide
  Seed: GNEKKAKLANVVRKMMTNSQ
GNEFKARLWNVLRKMMTNSQ

SEQ ID NO: 187819 - protein, 20 aa, Artificial Sequence
  Description of Artificial Sequence: Synthetic peptide
  Seed: GNEKKAKLANVVRKMMTNSQ
GNEFKARLWNVVRKMMTNSQ

SEQ ID NO: 187820 - protein, 20 aa, Artificial Sequence
  Description of Artificial Sequence: Synthetic peptide
  Seed: GNEKKAKLANVVRKMMTNSQ
GNEFKARLYNVFRKMMTNSQ

SEQ ID NO: 187821 - protein, 20 aa, Artificial Sequence
  Description of Artificial Sequence: Synthetic peptide
  Seed: GNEKKAKLANVVRKMMTNSQ
GNEFKARLYNVIRKMMTNSQ

SEQ ID NO: 187822 - protein, 20 aa, Artificial Sequence
  Description of Artificial Sequence: Synthetic peptide
  Seed: GNEKKAKLANVVRKMMTNSQ
GNEFKARLYNVLRKMMTNSQ

SEQ ID NO: 187823 - protein, 20 aa, Artificial Sequence
  Description of Artificial Sequence: Synthetic peptide
  Seed: GNEKKAKLANVVRKMMTNSQ
GNEFKARLYNVVRKMMTNSQ

SEQ ID NO: 187824 - protein, 20 aa, Artificial Sequence
  Description of Artificial Sequence: Synthetic peptide
  Seed: GNEKKAKLANVVRKMMTNSQ
GNEFKASLANVARKMMTNSQ

SEQ ID NO: 187825 - protein, 20 aa, Artificial Sequence
  Description of Artificial Sequence: Synthetic peptide
  Seed: GNEKKAKLANVVRKMMTNSQ
GNEFKASLANVCRKMMTNSQ

SEQ ID NO: 187826 - protein, 20 aa, Artificial Sequence
  Description of Artificial Sequence: Synthetic peptide
  Seed: GNEKKAKLANVVRKMMTNSQ
GNEFKASLANVDRKMMTNSQ

SEQ ID NO: 187827 - protein, 20 aa, Artificial Sequence
  Description of Artificial Sequence: Synthetic peptide
  Seed: GNEKKAKLANVVRKMMTNSQ
GNEFKASLANVERKMMTNSQ

SEQ ID NO: 187828 - protein, 20 aa, Artificial Sequence
  Description of Artificial Sequence: Synthetic peptide
  Seed: GNEKKAKLANVVRKMMTNSQ
GNEFKASLANVFRKMMTNSQ

SEQ ID NO: 187829 - protein, 20 aa, Artificial Sequence
  Description of Artificial Sequence: Synthetic peptide
  Seed: GNEKKAKLANVVRKMMTNSQ
GNEFKASLANVGRKMMTNSQ

SEQ ID NO: 187830 - protein, 20 aa, Artificial Sequence
  Description of Artificial Sequence: Synthetic peptide
  Seed: GNEKKAKLANVVRKMMTNSQ
GNEFKASLANVHRKMMTNSQ

SEQ ID NO: 187831 - protein, 20 aa, Artificial Sequence
  Description of Artificial Sequence: Synthetic peptide
  Seed: GNEKKAKLANVVRKMMTNSQ
GNEFKASLANVIRKMMTNSQ

SEQ ID NO: 187832 - protein, 20 aa, Artificial Sequence
  Description of Artificial Sequence: Synthetic peptide
  Seed: GNEKKAKLANVVRKMMTNSQ
GNEFKASLANVKRKMMTNSQ

SEQ ID NO: 187833 - protein, 20 aa, Artificial Sequence
  Description of Artificial Sequence: Synthetic peptide
  Seed: GNEKKAKLANVVRKMMTNSQ
GNEFKASLANVLRKMMTNSQ

SEQ ID NO: 187834 - protein, 20 aa, Artificial Sequence
  Description of Artificial Sequence: Synthetic peptide
  Seed: GNEKKAKLANVVRKMMTNSQ
GNEFKASLANVMRKMMTNSQ

SEQ ID NO: 187835 - protein, 20 aa, Artificial Sequence
  Description of Artificial Sequence: Synthetic peptide
  Seed: GNEKKAKLANVVRKMMTNSQ
GNEFKASLANVNRKMMTNSQ

SEQ ID NO: 187836 - protein, 20 aa, Artificial Sequence
  Description of Artificial Sequence: Synthetic peptide
  Seed: GNEKKAKLANVVRKMMTNSQ
GNEFKASLANVPRKMMTNSQ

SEQ ID NO: 187837 - protein, 20 aa, Artificial Sequence
  Description of Artificial Sequence: Synthetic peptide
  Seed: GNEKKAKLANVVRKMMTNSQ
GNEFKASLANVQRKMMTNSQ

SEQ ID NO: 187838 - protein, 20 aa, Artificial Sequence
  Description of Artificial Sequence: Synthetic peptide
  Seed: GNEKKAKLANVVRKMMTNSQ
GNEFKASLANVRRKMMTNSQ

SEQ ID NO: 187839 - protein, 20 aa, Artificial Sequence
  Description of Artificial Sequence: Synthetic peptide
  Seed: GNEKKAKLANVVRKMMTNSQ
GNEFKASLANVSRKMMTNSQ

SEQ ID NO: 187840 - protein, 20 aa, Artificial Sequence
  Description of Artificial Sequence: Synthetic peptide
  Seed: GNEKKAKLANVVRKMMTNSQ
GNEFKASLANVTRKMMTNSQ

SEQ ID NO: 187841 - protein, 20 aa, Artificial Sequence
  Description of Artificial Sequence: Synthetic peptide
  Seed: GNEKKAKLANVVRKMMTNSQ
GNEFKASLANVVRKMMTNSQ

SEQ ID NO: 187842 - protein, 20 aa, Artificial Sequence
  Description of Artificial Sequence: Synthetic peptide
  Seed: GNEKKAKLANVVRKMMTNSQ
GNEFKASLANVYRKMMTNSQ

SEQ ID NO: 187843 - protein, 20 aa, Artificial Sequence
  Description of Artificial Sequence: Synthetic peptide
  Seed: GNEKKAKLANVVRKMMTNSQ
GNEFKASLFNVARKMMTNSQ

SEQ ID NO: 187844 - protein, 20 aa, Artificial Sequence
  Description of Artificial Sequence: Synthetic peptide
  Seed: GNEKKAKLANVVRKMMTNSQ
GNEFKASLFNVCRKMMTNSQ

SEQ ID NO: 187845 - protein, 20 aa, Artificial Sequence
  Description of Artificial Sequence: Synthetic peptide
  Seed: GNEKKAKLANVVRKMMTNSQ
GNEFKASLFNVDRKMMTNSQ

SEQ ID NO: 187846 - protein, 20 aa, Artificial Sequence
  Description of Artificial Sequence: Synthetic peptide
  Seed: GNEKKAKLANVVRKMMTNSQ
GNEFKASLFNVERKMMTNSQ

SEQ ID NO: 187847 - protein, 20 aa, Artificial Sequence
  Description of Artificial Sequence: Synthetic peptide
  Seed: GNEKKAKLANVVRKMMTNSQ
GNEFKASLFNVFRKMMTNSQ

SEQ ID NO: 187848 - protein, 20 aa, Artificial Sequence
  Description of Artificial Sequence: Synthetic peptide
  Seed: GNEKKAKLANVVRKMMTNSQ
GNEFKASLFNVGRKMMTNSQ

SEQ ID NO: 187849 - protein, 20 aa, Artificial Sequence
  Description of Artificial Sequence: Synthetic peptide
  Seed: GNEKKAKLANVVRKMMTNSQ
GNEFKASLFNVHRKMMTNSQ

SEQ ID NO: 187850 - protein, 20 aa, Artificial Sequence
  Description of Artificial Sequence: Synthetic peptide
  Seed: GNEKKAKLANVVRKMMTNSQ
GNEFKASLFNVKRKMMTNSQ

SEQ ID NO: 187851 - protein, 20 aa, Artificial Sequence
  Description of Artificial Sequence: Synthetic peptide
  Seed: GNEKKAKLANVVRKMMTNSQ
GNEFKASLFNVLRKMMTNSQ

SEQ ID NO: 187852 - protein, 20 aa, Artificial Sequence
  Description of Artificial Sequence: Synthetic peptide
  Seed: GNEKKAKLANVVRKMMTNSQ
GNEFKASLFNVMRKMMTNSQ

SEQ ID NO: 187853 - protein, 20 aa, Artificial Sequence
  Description of Artificial Sequence: Synthetic peptide
  Seed: GNEKKAKLANVVRKMMTNSQ
GNEFKASLFNVPRKMMTNSQ

SEQ ID NO: 187854 - protein, 20 aa, Artificial Sequence
  Description of Artificial Sequence: Synthetic peptide
  Seed: GNEKKAKLANVVRKMMTNSQ
GNEFKASLFNVQRKMMTNSQ

SEQ ID NO: 187855 - protein, 20 aa, Artificial Sequence
  Description of Artificial Sequence: Synthetic peptide
  Seed: GNEKKAKLANVVRKMMTNSQ
GNEFKASLFNVRRKMMTNSQ

SEQ ID NO: 187856 - protein, 20 aa, Artificial Sequence
  Description of Artificial Sequence: Synthetic peptide
  Seed: GNEKKAKLANVVRKMMTNSQ
GNEFKASLFNVSRKMMTNSQ

SEQ ID NO: 187857 - protein, 20 aa, Artificial Sequence
  Description of Artificial Sequence: Synthetic peptide
  Seed: GNEKKAKLANVVRKMMTNSQ
GNEFKASLFNVTRKMMTNSQ

SEQ ID NO: 187858 - protein, 20 aa, Artificial Sequence
  Description of Artificial Sequence: Synthetic peptide
  Seed: GNEKKAKLANVVRKMMTNSQ
GNEFKASLFNVWRKMMTNSQ

SEQ ID NO: 187859 - protein, 20 aa, Artificial Sequence
  Description of Artificial Sequence: Synthetic peptide
  Seed: GNEKKAKLANVVRKMMTNSQ
GNEFKASLFNVYRKMMTNSQ

SEQ ID NO: 187860 - protein, 20 aa, Artificial Sequence
  Description of Artificial Sequence: Synthetic peptide
  Seed: GNEKKAKLANVVRKMMTNSQ
GNEFKASLGNVARKMMTNSQ

SEQ ID NO: 187861 - protein, 20 aa, Artificial Sequence
  Description of Artificial Sequence: Synthetic peptide
  Seed: GNEKKAKLANVVRKMMTNSQ
GNEFKASLGNVCRKMMTNSQ

SEQ ID NO: 187862 - protein, 20 aa, Artificial Sequence
  Description of Artificial Sequence: Synthetic peptide
  Seed: GNEKKAKLANVVRKMMTNSQ
GNEFKASLGNVFRKMMTNSQ

SEQ ID NO: 187863 - protein, 20 aa, Artificial Sequence
  Description of Artificial Sequence: Synthetic peptide
  Seed: GNEKKAKLANVVRKMMTNSQ
GNEFKASLGNVGRKMMTNSQ

SEQ ID NO: 187864 - protein, 20 aa, Artificial Sequence
  Description of Artificial Sequence: Synthetic peptide
  Seed: GNEKKAKLANVVRKMMTNSQ
GNEFKASLGNVIRKMMTNSQ

SEQ ID NO: 187865 - protein, 20 aa, Artificial Sequence
  Description of Artificial Sequence: Synthetic peptide
  Seed: GNEKKAKLANVVRKMMTNSQ
GNEFKASLGNVLRKMMTNSQ

SEQ ID NO: 187866 - protein, 20 aa, Artificial Sequence
  Description of Artificial Sequence: Synthetic peptide
  Seed: GNEKKAKLANVVRKMMTNSQ
GNEFKASLGNVMRKMMTNSQ

SEQ ID NO: 187867 - protein, 20 aa, Artificial Sequence
  Description of Artificial Sequence: Synthetic peptide
  Seed: GNEKKAKLANVVRKMMTNSQ
GNEFKASLGNVNRKMMTNSQ

SEQ ID NO: 187868 - protein, 20 aa, Artificial Sequence
  Description of Artificial Sequence: Synthetic peptide
  Seed: GNEKKAKLANVVRKMMTNSQ
GNEFKASLGNVSRKMMTNSQ

SEQ ID NO: 187869 - protein, 20 aa, Artificial Sequence
  Description of Artificial Sequence: Synthetic peptide
  Seed: GNEKKAKLANVVRKMMTNSQ
GNEFKASLGNVTRKMMTNSQ

SEQ ID NO: 187870 - protein, 20 aa, Artificial Sequence
  Description of Artificial Sequence: Synthetic peptide
  Seed: GNEKKAKLANVVRKMMTNSQ
GNEFKASLGNVVRKMMTNSQ

SEQ ID NO: 187871 - protein, 20 aa, Artificial Sequence
  Description of Artificial Sequence: Synthetic peptide
  Seed: GNEKKAKLANVVRKMMTNSQ
GNEFKASLGNVYRKMMTNSQ

SEQ ID NO: 187872 - protein, 20 aa, Artificial Sequence
  Description of Artificial Sequence: Synthetic peptide
  Seed: GNEKKAKLANVVRKMMTNSQ
GNEFKASLINVARKMMTNSQ

SEQ ID NO: 187873 - protein, 20 aa, Artificial Sequence
  Description of Artificial Sequence: Synthetic peptide
  Seed: GNEKKAKLANVVRKMMTNSQ
GNEFKASLINVFRKMMTNSQ

SEQ ID NO: 187874 - protein, 20 aa, Artificial Sequence
  Description of Artificial Sequence: Synthetic peptide
  Seed: GNEKKAKLANVVRKMMTNSQ
GNEFKASLINVGRKMMTNSQ

SEQ ID NO: 187875 - protein, 20 aa, Artificial Sequence
  Description of Artificial Sequence: Synthetic peptide
  Seed: GNEKKAKLANVVRKMMTNSQ
GNEFKASLINVIRKMMTNSQ

SEQ ID NO: 187876 - protein, 20 aa, Artificial Sequence
  Description of Artificial Sequence: Synthetic peptide
  Seed: GNEKKAKLANVVRKMMTNSQ
GNEFKASLINVLRKMMTNSQ

SEQ ID NO: 187877 - protein, 20 aa, Artificial Sequence
  Description of Artificial Sequence: Synthetic peptide
  Seed: GNEKKAKLANVVRKMMTNSQ
GNEFKASLINVMRKMMTNSQ

SEQ ID NO: 187878 - protein, 20 aa, Artificial Sequence
  Description of Artificial Sequence: Synthetic peptide
  Seed: GNEKKAKLANVVRKMMTNSQ
GNEFKASLINVNRKMMTNSQ

SEQ ID NO: 187879 - protein, 20 aa, Artificial Sequence
  Description of Artificial Sequence: Synthetic peptide
  Seed: GNEKKAKLANVVRKMMTNSQ
GNEFKASLINVSRKMMTNSQ

SEQ ID NO: 187880 - protein, 20 aa, Artificial Sequence
  Description of Artificial Sequence: Synthetic peptide
  Seed: GNEKKAKLANVVRKMMTNSQ
GNEFKASLINVTRKMMTNSQ

SEQ ID NO: 187881 - protein, 20 aa, Artificial Sequence
  Description of Artificial Sequence: Synthetic peptide
  Seed: GNEKKAKLANVVRKMMTNSQ
GNEFKASLINVVRKMMTNSQ

SEQ ID NO: 187882 - protein, 20 aa, Artificial Sequence
  Description of Artificial Sequence: Synthetic peptide
  Seed: GNEKKAKLANVVRKMMTNSQ
GNEFKASLLNVARKMMTNSQ

SEQ ID NO: 187883 - protein, 20 aa, Artificial Sequence
  Description of Artificial Sequence: Synthetic peptide
  Seed: GNEKKAKLANVVRKMMTNSQ
GNEFKASLLNVFRKMMTNSQ

SEQ ID NO: 187884 - protein, 20 aa, Artificial Sequence
  Description of Artificial Sequence: Synthetic peptide
  Seed: GNEKKAKLANVVRKMMTNSQ
GNEFKASLLNVIRKMMTNSQ

SEQ ID NO: 187885 - protein, 20 aa, Artificial Sequence
  Description of Artificial Sequence: Synthetic peptide
  Seed: GNEKKAKLANVVRKMMTNSQ
GNEFKASLLNVLRKMMTNSQ

SEQ ID NO: 187886 - protein, 20 aa, Artificial Sequence
  Description of Artificial Sequence: Synthetic peptide
  Seed: GNEKKAKLANVVRKMMTNSQ
GNEFKASLLNVMRKMMTNSQ

SEQ ID NO: 187887 - protein, 20 aa, Artificial Sequence
  Description of Artificial Sequence: Synthetic peptide
  Seed: GNEKKAKLANVVRKMMTNSQ
GNEFKASLLNVNRKMMTNSQ

SEQ ID NO: 187888 - protein, 20 aa, Artificial Sequence
  Description of Artificial Sequence: Synthetic peptide
  Seed: GNEKKAKLANVVRKMMTNSQ
GNEFKASLLNVSRKMMTNSQ

SEQ ID NO: 187889 - protein, 20 aa, Artificial Sequence
  Description of Artificial Sequence: Synthetic peptide
  Seed: GNEKKAKLANVVRKMMTNSQ
GNEFKASLLNVTRKMMTNSQ

SEQ ID NO: 187890 - protein, 20 aa, Artificial Sequence
  Description of Artificial Sequence: Synthetic peptide
  Seed: GNEKKAKLANVVRKMMTNSQ
GNEFKASLLNVVRKMMTNSQ

SEQ ID NO: 187891 - protein, 20 aa, Artificial Sequence
  Description of Artificial Sequence: Synthetic peptide
  Seed: GNEKKAKLANVVRKMMTNSQ
GNEFKASLLNVYRKMMTNSQ

SEQ ID NO: 187892 - protein, 20 aa, Artificial Sequence
  Description of Artificial Sequence: Synthetic peptide
  Seed: GNEKKAKLANVVRKMMTNSQ
GNEFKASLMNVARKMMTNSQ

SEQ ID NO: 187893 - protein, 20 aa, Artificial Sequence
  Description of Artificial Sequence: Synthetic peptide
  Seed: GNEKKAKLANVVRKMMTNSQ
GNEFKASLMNVFRKMMTNSQ

SEQ ID NO: 187894 - protein, 20 aa, Artificial Sequence
  Description of Artificial Sequence: Synthetic peptide
  Seed: GNEKKAKLANVVRKMMTNSQ
GNEFKASLMNVIRKMMTNSQ

SEQ ID NO: 187895 - protein, 20 aa, Artificial Sequence
  Description of Artificial Sequence: Synthetic peptide
  Seed: GNEKKAKLANVVRKMMTNSQ
GNEFKASLMNVLRKMMTNSQ

SEQ ID NO: 187896 - protein, 20 aa, Artificial Sequence
  Description of Artificial Sequence: Synthetic peptide
  Seed: GNEKKAKLANVVRKMMTNSQ
GNEFKASLMNVMRKMMTNSQ

SEQ ID NO: 187897 - protein, 20 aa, Artificial Sequence
  Description of Artificial Sequence: Synthetic peptide
  Seed: GNEKKAKLANVVRKMMTNSQ
GNEFKASLMNVNRKMMTNSQ

SEQ ID NO: 187898 - protein, 20 aa, Artificial Sequence
  Description of Artificial Sequence: Synthetic peptide
  Seed: GNEKKAKLANVVRKMMTNSQ
GNEFKASLMNVSRKMMTNSQ

SEQ ID NO: 187899 - protein, 20 aa, Artificial Sequence
  Description of Artificial Sequence: Synthetic peptide
  Seed: GNEKKAKLANVVRKMMTNSQ
GNEFKASLMNVVRKMMTNSQ

SEQ ID NO: 187900 - protein, 20 aa, Artificial Sequence
  Description of Artificial Sequence: Synthetic peptide
  Seed: GNEKKAKLANVVRKMMTNSQ
GNEFKASLMNVYRKMMTNSQ

SEQ ID NO: 187901 - protein, 20 aa, Artificial Sequence
  Description of Artificial Sequence: Synthetic peptide
  Seed: GNEKKAKLANVVRKMMTNSQ
GNEFKASLNNVARKMMTNSQ

SEQ ID NO: 187902 - protein, 20 aa, Artificial Sequence
  Description of Artificial Sequence: Synthetic peptide
  Seed: GNEKKAKLANVVRKMMTNSQ
GNEFKASLNNVGRKMMTNSQ

SEQ ID NO: 187903 - protein, 20 aa, Artificial Sequence
  Description of Artificial Sequence: Synthetic peptide
  Seed: GNEKKAKLANVVRKMMTNSQ
GNEFKASLNNVIRKMMTNSQ

SEQ ID NO: 187904 - protein, 20 aa, Artificial Sequence
  Description of Artificial Sequence: Synthetic peptide
  Seed: GNEKKAKLANVVRKMMTNSQ
GNEFKASLNNVLRKMMTNSQ

SEQ ID NO: 187905 - protein, 20 aa, Artificial Sequence
  Description of Artificial Sequence: Synthetic peptide
  Seed: GNEKKAKLANVVRKMMTNSQ
GNEFKASLNNVMRKMMTNSQ

SEQ ID NO: 187906 - protein, 20 aa, Artificial Sequence
  Description of Artificial Sequence: Synthetic peptide
  Seed: GNEKKAKLANVVRKMMTNSQ
GNEFKASLNNVNRKMMTNSQ

SEQ ID NO: 187907 - protein, 20 aa, Artificial Sequence
  Description of Artificial Sequence: Synthetic peptide
  Seed: GNEKKAKLANVVRKMMTNSQ
GNEFKASLNNVSRKMMTNSQ

SEQ ID NO: 187908 - protein, 20 aa, Artificial Sequence
  Description of Artificial Sequence: Synthetic peptide
  Seed: GNEKKAKLANVVRKMMTNSQ
GNEFKASLNNVTRKMMTNSQ

SEQ ID NO: 187909 - protein, 20 aa, Artificial Sequence
  Description of Artificial Sequence: Synthetic peptide
  Seed: GNEKKAKLANVVRKMMTNSQ
GNEFKASLNNVVRKMMTNSQ

SEQ ID NO: 187910 - protein, 20 aa, Artificial Sequence
  Description of Artificial Sequence: Synthetic peptide
  Seed: GNEKKAKLANVVRKMMTNSQ
GNEFKASLPNVARKMMTNSQ

SEQ ID NO: 187911 - protein, 20 aa, Artificial Sequence
  Description of Artificial Sequence: Synthetic peptide
  Seed: GNEKKAKLANVVRKMMTNSQ
GNEFKASLPNVFRKMMTNSQ

SEQ ID NO: 187912 - protein, 20 aa, Artificial Sequence
  Description of Artificial Sequence: Synthetic peptide
  Seed: GNEKKAKLANVVRKMMTNSQ
GNEFKASLPNVGRKMMTNSQ

SEQ ID NO: 187913 - protein, 20 aa, Artificial Sequence
  Description of Artificial Sequence: Synthetic peptide
  Seed: GNEKKAKLANVVRKMMTNSQ
GNEFKASLPNVHRKMMTNSQ

SEQ ID NO: 187914 - protein, 20 aa, Artificial Sequence
  Description of Artificial Sequence: Synthetic peptide
  Seed: GNEKKAKLANVVRKMMTNSQ
GNEFKASLPNVIRKMMTNSQ

SEQ ID NO: 187915 - protein, 20 aa, Artificial Sequence
  Description of Artificial Sequence: Synthetic peptide
  Seed: GNEKKAKLANVVRKMMTNSQ
GNEFKASLPNVLRKMMTNSQ

SEQ ID NO: 187916 - protein, 20 aa, Artificial Sequence
  Description of Artificial Sequence: Synthetic peptide
  Seed: GNEKKAKLANVVRKMMTNSQ
GNEFKASLPNVMRKMMTNSQ

SEQ ID NO: 187917 - protein, 20 aa, Artificial Sequence
  Description of Artificial Sequence: Synthetic peptide
  Seed: GNEKKAKLANVVRKMMTNSQ
GNEFKASLPNVNRKMMTNSQ

SEQ ID NO: 187918 - protein, 20 aa, Artificial Sequence
  Description of Artificial Sequence: Synthetic peptide
  Seed: GNEKKAKLANVVRKMMTNSQ
GNEFKASLPNVPRKMMTNSQ

SEQ ID NO: 187919 - protein, 20 aa, Artificial Sequence
  Description of Artificial Sequence: Synthetic peptide
  Seed: GNEKKAKLANVVRKMMTNSQ
GNEFKASLPNVQRKMMTNSQ

SEQ ID NO: 187920 - protein, 20 aa, Artificial Sequence
  Description of Artificial Sequence: Synthetic peptide
  Seed: GNEKKAKLANVVRKMMTNSQ
GNEFKASLPNVSRKMMTNSQ

SEQ ID NO: 187921 - protein, 20 aa, Artificial Sequence
  Description of Artificial Sequence: Synthetic peptide
  Seed: GNEKKAKLANVVRKMMTNSQ
GNEFKASLPNVTRKMMTNSQ

SEQ ID NO: 187922 - protein, 20 aa, Artificial Sequence
  Description of Artificial Sequence: Synthetic peptide
  Seed: GNEKKAKLANVVRKMMTNSQ
GNEFKASLPNVVRKMMTNSQ

SEQ ID NO: 187923 - protein, 20 aa, Artificial Sequence
  Description of Artificial Sequence: Synthetic peptide
  Seed: GNEKKAKLANVVRKMMTNSQ
GNEFKASLPNVYRKMMTNSQ

SEQ ID NO: 187924 - protein, 20 aa, Artificial Sequence
  Description of Artificial Sequence: Synthetic peptide
  Seed: GNEKKAKLANVVRKMMTNSQ
GNEFKASLSNVARKMMTNSQ

SEQ ID NO: 187925 - protein, 20 aa, Artificial Sequence
  Description of Artificial Sequence: Synthetic peptide
  Seed: GNEKKAKLANVVRKMMTNSQ
GNEFKASLSNVCRKMMTNSQ

SEQ ID NO: 187926 - protein, 20 aa, Artificial Sequence
  Description of Artificial Sequence: Synthetic peptide
  Seed: GNEKKAKLANVVRKMMTNSQ
GNEFKASLSNVFRKMMTNSQ

SEQ ID NO: 187927 - protein, 20 aa, Artificial Sequence
  Description of Artificial Sequence: Synthetic peptide
  Seed: GNEKKAKLANVVRKMMTNSQ
GNEFKASLSNVGRKMMTNSQ

SEQ ID NO: 187928 - protein, 20 aa, Artificial Sequence
  Description of Artificial Sequence: Synthetic peptide
  Seed: GNEKKAKLANVVRKMMTNSQ
GNEFKASLSNVHRKMMTNSQ

SEQ ID NO: 187929 - protein, 20 aa, Artificial Sequence
  Description of Artificial Sequence: Synthetic peptide
  Seed: GNEKKAKLANVVRKMMTNSQ
GNEFKASLSNVIRKMMTNSQ

SEQ ID NO: 187930 - protein, 20 aa, Artificial Sequence
  Description of Artificial Sequence: Synthetic peptide
  Seed: GNEKKAKLANVVRKMMTNSQ
GNEFKASLSNVLRKMMTNSQ

SEQ ID NO: 187931 - protein, 20 aa, Artificial Sequence
  Description of Artificial Sequence: Synthetic peptide
  Seed: GNEKKAKLANVVRKMMTNSQ
GNEFKASLSNVMRKMMTNSQ

SEQ ID NO: 187932 - protein, 20 aa, Artificial Sequence
  Description of Artificial Sequence: Synthetic peptide
  Seed: GNEKKAKLANVVRKMMTNSQ
GNEFKASLSNVNRKMMTNSQ

SEQ ID NO: 187933 - protein, 20 aa, Artificial Sequence
  Description of Artificial Sequence: Synthetic peptide
  Seed: GNEKKAKLANVVRKMMTNSQ
GNEFKASLSNVQRKMMTNSQ

SEQ ID NO: 187934 - protein, 20 aa, Artificial Sequence
  Description of Artificial Sequence: Synthetic peptide
  Seed: GNEKKAKLANVVRKMMTNSQ
GNEFKASLSNVSRKMMTNSQ

SEQ ID NO: 187935 - protein, 20 aa, Artificial Sequence
  Description of Artificial Sequence: Synthetic peptide
  Seed: GNEKKAKLANVVRKMMTNSQ
GNEFKASLSNVTRKMMTNSQ

SEQ ID NO: 187936 - protein, 20 aa, Artificial Sequence
  Description of Artificial Sequence: Synthetic peptide
  Seed: GNEKKAKLANVVRKMMTNSQ
GNEFKASLSNVVRKMMTNSQ

SEQ ID NO: 187937 - protein, 20 aa, Artificial Sequence
  Description of Artificial Sequence: Synthetic peptide
  Seed: GNEKKAKLANVVRKMMTNSQ
GNEFKASLSNVYRKMMTNSQ

SEQ ID NO: 187938 - protein, 20 aa, Artificial Sequence
  Description of Artificial Sequence: Synthetic peptide
  Seed: GNEKKAKLANVVRKMMTNSQ
GNEFKASLTNVARKMMTNSQ

SEQ ID NO: 187939 - protein, 20 aa, Artificial Sequence
  Description of Artificial Sequence: Synthetic peptide
  Seed: GNEKKAKLANVVRKMMTNSQ
GNEFKASLTNVFRKMMTNSQ

SEQ ID NO: 187940 - protein, 20 aa, Artificial Sequence
  Description of Artificial Sequence: Synthetic peptide
  Seed: GNEKKAKLANVVRKMMTNSQ
GNEFKASLTNVGRKMMTNSQ

SEQ ID NO: 187941 - protein, 20 aa, Artificial Sequence
  Description of Artificial Sequence: Synthetic peptide
  Seed: GNEKKAKLANVVRKMMTNSQ
GNEFKASLTNVHRKMMTNSQ

SEQ ID NO: 187942 - protein, 20 aa, Artificial Sequence
  Description of Artificial Sequence: Synthetic peptide
  Seed: GNEKKAKLANVVRKMMTNSQ
GNEFKASLTNVIRKMMTNSQ

SEQ ID NO: 187943 - protein, 20 aa, Artificial Sequence
  Description of Artificial Sequence: Synthetic peptide
  Seed: GNEKKAKLANVVRKMMTNSQ
GNEFKASLTNVLRKMMTNSQ

SEQ ID NO: 187944 - protein, 20 aa, Artificial Sequence
  Description of Artificial Sequence: Synthetic peptide
  Seed: GNEKKAKLANVVRKMMTNSQ
GNEFKASLTNVMRKMMTNSQ

SEQ ID NO: 187945 - protein, 20 aa, Artificial Sequence
  Description of Artificial Sequence: Synthetic peptide
  Seed: GNEKKAKLANVVRKMMTNSQ
GNEFKASLTNVNRKMMTNSQ

SEQ ID NO: 187946 - protein, 20 aa, Artificial Sequence
  Description of Artificial Sequence: Synthetic peptide
  Seed: GNEKKAKLANVVRKMMTNSQ
GNEFKASLTNVQRKMMTNSQ

SEQ ID NO: 187947 - protein, 20 aa, Artificial Sequence
  Description of Artificial Sequence: Synthetic peptide
  Seed: GNEKKAKLANVVRKMMTNSQ
GNEFKASLTNVSRKMMTNSQ

SEQ ID NO: 187948 - protein, 20 aa, Artificial Sequence
  Description of Artificial Sequence: Synthetic peptide
  Seed: GNEKKAKLANVVRKMMTNSQ
GNEFKASLTNVTRKMMTNSQ

SEQ ID NO: 187949 - protein, 20 aa, Artificial Sequence
  Description of Artificial Sequence: Synthetic peptide
  Seed: GNEKKAKLANVVRKMMTNSQ
GNEFKASLTNVVRKMMTNSQ

SEQ ID NO: 187950 - protein, 20 aa, Artificial Sequence
  Description of Artificial Sequence: Synthetic peptide
  Seed: GNEKKAKLANVVRKMMTNSQ
GNEFKASLTNVYRKMMTNSQ

SEQ ID NO: 187951 - protein, 20 aa, Artificial Sequence
  Description of Artificial Sequence: Synthetic peptide
  Seed: GNEKKAKLANVVRKMMTNSQ
GNEFKASLVNVARKMMTNSQ

SEQ ID NO: 187952 - protein, 20 aa, Artificial Sequence
  Description of Artificial Sequence: Synthetic peptide
  Seed: GNEKKAKLANVVRKMMTNSQ
GNEFKASLVNVFRKMMTNSQ

SEQ ID NO: 187953 - protein, 20 aa, Artificial Sequence
  Description of Artificial Sequence: Synthetic peptide
  Seed: GNEKKAKLANVVRKMMTNSQ
GNEFKASLVNVGRKMMTNSQ

SEQ ID NO: 187954 - protein, 20 aa, Artificial Sequence
  Description of Artificial Sequence: Synthetic peptide
  Seed: GNEKKAKLANVVRKMMTNSQ
GNEFKASLVNVHRKMMTNSQ

SEQ ID NO: 187955 - protein, 20 aa, Artificial Sequence
  Description of Artificial Sequence: Synthetic peptide
  Seed: GNEKKAKLANVVRKMMTNSQ
GNEFKASLVNVIRKMMTNSQ

SEQ ID NO: 187956 - protein, 20 aa, Artificial Sequence
  Description of Artificial Sequence: Synthetic peptide
  Seed: GNEKKAKLANVVRKMMTNSQ
GNEFKASLVNVLRKMMTNSQ

SEQ ID NO: 187957 - protein, 20 aa, Artificial Sequence
  Description of Artificial Sequence: Synthetic peptide
  Seed: GNEKKAKLANVVRKMMTNSQ
GNEFKASLVNVMRKMMTNSQ

SEQ ID NO: 187958 - protein, 20 aa, Artificial Sequence
  Description of Artificial Sequence: Synthetic peptide
  Seed: GNEKKAKLANVVRKMMTNSQ
GNEFKASLVNVNRKMMTNSQ

SEQ ID NO: 187959 - protein, 20 aa, Artificial Sequence
  Description of Artificial Sequence: Synthetic peptide
  Seed: GNEKKAKLANVVRKMMTNSQ
GNEFKASLVNVQRKMMTNSQ

SEQ ID NO: 187960 - protein, 20 aa, Artificial Sequence
  Description of Artificial Sequence: Synthetic peptide
  Seed: GNEKKAKLANVVRKMMTNSQ
GNEFKASLVNVSRKMMTNSQ

SEQ ID NO: 187961 - protein, 20 aa, Artificial Sequence
  Description of Artificial Sequence: Synthetic peptide
  Seed: GNEKKAKLANVVRKMMTNSQ
GNEFKASLVNVTRKMMTNSQ

SEQ ID NO: 187962 - protein, 20 aa, Artificial Sequence
  Description of Artificial Sequence: Synthetic peptide
  Seed: GNEKKAKLANVVRKMMTNSQ
GNEFKASLVNVVRKMMTNSQ

SEQ ID NO: 187963 - protein, 20 aa, Artificial Sequence
  Description of Artificial Sequence: Synthetic peptide
  Seed: GNEKKAKLANVVRKMMTNSQ
GNEFKASLWNVARKMMTNSQ

SEQ ID NO: 187964 - protein, 20 aa, Artificial Sequence
  Description of Artificial Sequence: Synthetic peptide
  Seed: GNEKKAKLANVVRKMMTNSQ
GNEFKASLWNVFRKMMTNSQ

SEQ ID NO: 187965 - protein, 20 aa, Artificial Sequence
  Description of Artificial Sequence: Synthetic peptide
  Seed: GNEKKAKLANVVRKMMTNSQ
GNEFKASLWNVIRKMMTNSQ

SEQ ID NO: 187966 - protein, 20 aa, Artificial Sequence
  Description of Artificial Sequence: Synthetic peptide
  Seed: GNEKKAKLANVVRKMMTNSQ
GNEFKASLWNVLRKMMTNSQ

SEQ ID NO: 187967 - protein, 20 aa, Artificial Sequence
  Description of Artificial Sequence: Synthetic peptide
  Seed: GNEKKAKLANVVRKMMTNSQ
GNEFKASLWNVMRKMMTNSQ

SEQ ID NO: 187968 - protein, 20 aa, Artificial Sequence
  Description of Artificial Sequence: Synthetic peptide
  Seed: GNEKKAKLANVVRKMMTNSQ
GNEFKASLWNVNRKMMTNSQ

SEQ ID NO: 187969 - protein, 20 aa, Artificial Sequence
  Description of Artificial Sequence: Synthetic peptide
  Seed: GNEKKAKLANVVRKMMTNSQ
GNEFKASLWNVSRKMMTNSQ

SEQ ID NO: 187970 - protein, 20 aa, Artificial Sequence
  Description of Artificial Sequence: Synthetic peptide
  Seed: GNEKKAKLANVVRKMMTNSQ
GNEFKASLWNVTRKMMTNSQ

SEQ ID NO: 187971 - protein, 20 aa, Artificial Sequence
  Description of Artificial Sequence: Synthetic peptide
  Seed: GNEKKAKLANVVRKMMTNSQ
GNEFKASLWNVVRKMMTNSQ

SEQ ID NO: 187972 - protein, 20 aa, Artificial Sequence
  Description of Artificial Sequence: Synthetic peptide
  Seed: GNEKKAKLANVVRKMMTNSQ
GNEFKASLWNVYRKMMTNSQ

SEQ ID NO: 187973 - protein, 20 aa, Artificial Sequence
  Description of Artificial Sequence: Synthetic peptide
  Seed: GNEKKAKLANVVRKMMTNSQ
GNEFKASLYNVARKMMTNSQ

SEQ ID NO: 187974 - protein, 20 aa, Artificial Sequence
  Description of Artificial Sequence: Synthetic peptide
  Seed: GNEKKAKLANVVRKMMTNSQ
GNEFKASLYNVDRKMMTNSQ

SEQ ID NO: 187975 - protein, 20 aa, Artificial Sequence
  Description of Artificial Sequence: Synthetic peptide
  Seed: GNEKKAKLANVVRKMMTNSQ
GNEFKASLYNVERKMMTNSQ

SEQ ID NO: 187976 - protein, 20 aa, Artificial Sequence
  Description of Artificial Sequence: Synthetic peptide
  Seed: GNEKKAKLANVVRKMMTNSQ
GNEFKASLYNVFRKMMTNSQ

SEQ ID NO: 187977 - protein, 20 aa, Artificial Sequence
  Description of Artificial Sequence: Synthetic peptide
  Seed: GNEKKAKLANVVRKMMTNSQ
GNEFKASLYNVIRKMMTNSQ

SEQ ID NO: 187978 - protein, 20 aa, Artificial Sequence
  Description of Artificial Sequence: Synthetic peptide
  Seed: GNEKKAKLANVVRKMMTNSQ
GNEFKASLYNVLRKMMTNSQ

SEQ ID NO: 187979 - protein, 20 aa, Artificial Sequence
  Description of Artificial Sequence: Synthetic peptide
  Seed: GNEKKAKLANVVRKMMTNSQ
GNEFKASLYNVMRKMMTNSQ

SEQ ID NO: 187980 - protein, 20 aa, Artificial Sequence
  Description of Artificial Sequence: Synthetic peptide
  Seed: GNEKKAKLANVVRKMMTNSQ
GNEFKASLYNVNRKMMTNSQ

SEQ ID NO: 187981 - protein, 20 aa, Artificial Sequence
  Description of Artificial Sequence: Synthetic peptide
  Seed: GNEKKAKLANVVRKMMTNSQ
GNEFKASLYNVSRKMMTNSQ

SEQ ID NO: 187982 - protein, 20 aa, Artificial Sequence
  Description of Artificial Sequence: Synthetic peptide
  Seed: GNEKKAKLANVVRKMMTNSQ
GNEFKASLYNVTRKMMTNSQ

SEQ ID NO: 187983 - protein, 20 aa, Artificial Sequence
  Description of Artificial Sequence: Synthetic peptide
  Seed: GNEKKAKLANVVRKMMTNSQ
GNEFKASLYNVVRKMMTNSQ

SEQ ID NO: 187984 - protein, 20 aa, Artificial Sequence
  Description of Artificial Sequence: Synthetic peptide
  Seed: GNEKKAKLANVVRKMMTNSQ
GNEFKASLYNVYRKMMTNSQ

SEQ ID NO: 187985 - protein, 20 aa, Artificial Sequence
  Description of Artificial Sequence: Synthetic peptide
  Seed: GNEKKAKLANVVRKMMTNSQ
GNEFKATLANVARKMMTNSQ

SEQ ID NO: 187986 - protein, 20 aa, Artificial Sequence
  Description of Artificial Sequence: Synthetic peptide
  Seed: GNEKKAKLANVVRKMMTNSQ
GNEFKATLANVCRKMMTNSQ

SEQ ID NO: 187987 - protein, 20 aa, Artificial Sequence
  Description of Artificial Sequence: Synthetic peptide
  Seed: GNEKKAKLANVVRKMMTNSQ
GNEFKATLANVDRKMMTNSQ

SEQ ID NO: 187988 - protein, 20 aa, Artificial Sequence
  Description of Artificial Sequence: Synthetic peptide
  Seed: GNEKKAKLANVVRKMMTNSQ
GNEFKATLANVERKMMTNSQ

SEQ ID NO: 187989 - protein, 20 aa, Artificial Sequence
  Description of Artificial Sequence: Synthetic peptide
  Seed: GNEKKAKLANVVRKMMTNSQ
GNEFKATLANVFRKMMTNSQ

SEQ ID NO: 187990 - protein, 20 aa, Artificial Sequence
  Description of Artificial Sequence: Synthetic peptide
  Seed: GNEKKAKLANVVRKMMTNSQ
GNEFKATLANVGRKMMTNSQ

SEQ ID NO: 187991 - protein, 20 aa, Artificial Sequence
  Description of Artificial Sequence: Synthetic peptide
  Seed: GNEKKAKLANVVRKMMTNSQ
GNEFKATLANVHRKMMTNSQ

SEQ ID NO: 187992 - protein, 20 aa, Artificial Sequence
  Description of Artificial Sequence: Synthetic peptide
  Seed: GNEKKAKLANVVRKMMTNSQ
GNEFKATLANVIRKMMTNSQ

SEQ ID NO: 187993 - protein, 20 aa, Artificial Sequence
  Description of Artificial Sequence: Synthetic peptide
  Seed: GNEKKAKLANVVRKMMTNSQ
GNEFKATLANVLRKMMTNSQ

SEQ ID NO: 187994 - protein, 20 aa, Artificial Sequence
  Description of Artificial Sequence: Synthetic peptide
  Seed: GNEKKAKLANVVRKMMTNSQ
GNEFKATLANVMRKMMTNSQ

SEQ ID NO: 187995 - protein, 20 aa, Artificial Sequence
  Description of Artificial Sequence: Synthetic peptide
  Seed: GNEKKAKLANVVRKMMTNSQ
GNEFKATLANVNRKMMTNSQ

SEQ ID NO: 187996 - protein, 20 aa, Artificial Sequence
  Description of Artificial Sequence: Synthetic peptide
  Seed: GNEKKAKLANVVRKMMTNSQ
GNEFKATLANVPRKMMTNSQ

SEQ ID NO: 187997 - protein, 20 aa, Artificial Sequence
  Description of Artificial Sequence: Synthetic peptide
  Seed: GNEKKAKLANVVRKMMTNSQ
GNEFKATLANVQRKMMTNSQ

SEQ ID NO: 187998 - protein, 20 aa, Artificial Sequence
  Description of Artificial Sequence: Synthetic peptide
  Seed: GNEKKAKLANVVRKMMTNSQ
GNEFKATLANVSRKMMTNSQ

SEQ ID NO: 187999 - protein, 20 aa, Artificial Sequence
  Description of Artificial Sequence: Synthetic peptide
  Seed: GNEKKAKLANVVRKMMTNSQ
GNEFKATLANVTRKMMTNSQ

SEQ ID NO: 188000 - protein, 20 aa, Artificial Sequence
  Description of Artificial Sequence: Synthetic peptide
  Seed: GNEKKAKLANVVRKMMTNSQ
GNEFKATLANVVRKMMTNSQ

SEQ ID NO: 188001 - protein, 20 aa, Artificial Sequence
  Description of Artificial Sequence: Synthetic peptide
  Seed: GNEKKAKLANVVRKMMTNSQ
GNEFKATLANVYRKMMTNSQ

SEQ ID NO: 188002 - protein, 20 aa, Artificial Sequence
  Description of Artificial Sequence: Synthetic peptide
  Seed: GNEKKAKLANVVRKMMTNSQ
GNEFKATLFNVARKMMTNSQ

SEQ ID NO: 188003 - protein, 20 aa, Artificial Sequence
  Description of Artificial Sequence: Synthetic peptide
  Seed: GNEKKAKLANVVRKMMTNSQ
GNEFKATLFNVCRKMMTNSQ

SEQ ID NO: 188004 - protein, 20 aa, Artificial Sequence
  Description of Artificial Sequence: Synthetic peptide
  Seed: GNEKKAKLANVVRKMMTNSQ
GNEFKATLFNVDRKMMTNSQ

SEQ ID NO: 188005 - protein, 20 aa, Artificial Sequence
  Description of Artificial Sequence: Synthetic peptide
  Seed: GNEKKAKLANVVRKMMTNSQ
GNEFKATLFNVERKMMTNSQ

SEQ ID NO: 188006 - protein, 20 aa, Artificial Sequence
  Description of Artificial Sequence: Synthetic peptide
  Seed: GNEKKAKLANVVRKMMTNSQ
GNEFKATLFNVFRKMMTNSQ

SEQ ID NO: 188007 - protein, 20 aa, Artificial Sequence
  Description of Artificial Sequence: Synthetic peptide
  Seed: GNEKKAKLANVVRKMMTNSQ
GNEFKATLFNVGRKMMTNSQ

SEQ ID NO: 188008 - protein, 20 aa, Artificial Sequence
  Description of Artificial Sequence: Synthetic peptide
  Seed: GNEKKAKLANVVRKMMTNSQ
GNEFKATLFNVHRKMMTNSQ

SEQ ID NO: 188009 - protein, 20 aa, Artificial Sequence
  Description of Artificial Sequence: Synthetic peptide
  Seed: GNEKKAKLANVVRKMMTNSQ
GNEFKATLFNVIRKMMTNSQ

SEQ ID NO: 188010 - protein, 20 aa, Artificial Sequence
  Description of Artificial Sequence: Synthetic peptide
  Seed: GNEKKAKLANVVRKMMTNSQ
GNEFKATLFNVKRKMMTNSQ

SEQ ID NO: 188011 - protein, 20 aa, Artificial Sequence
  Description of Artificial Sequence: Synthetic peptide
  Seed: GNEKKAKLANVVRKMMTNSQ
GNEFKATLFNVMRKMMTNSQ

SEQ ID NO: 188012 - protein, 20 aa, Artificial Sequence
  Description of Artificial Sequence: Synthetic peptide
  Seed: GNEKKAKLANVVRKMMTNSQ
GNEFKATLFNVNRKMMTNSQ

SEQ ID NO: 188013 - protein, 20 aa, Artificial Sequence
  Description of Artificial Sequence: Synthetic peptide
  Seed: GNEKKAKLANVVRKMMTNSQ
GNEFKATLFNVPRKMMTNSQ

SEQ ID NO: 188014 - protein, 20 aa, Artificial Sequence
  Description of Artificial Sequence: Synthetic peptide
  Seed: GNEKKAKLANVVRKMMTNSQ
GNEFKATLFNVQRKMMTNSQ

SEQ ID NO: 188015 - protein, 20 aa, Artificial Sequence
  Description of Artificial Sequence: Synthetic peptide
  Seed: GNEKKAKLANVVRKMMTNSQ
GNEFKATLFNVRRKMMTNSQ

SEQ ID NO: 188016 - protein, 20 aa, Artificial Sequence
  Description of Artificial Sequence: Synthetic peptide
  Seed: GNEKKAKLANVVRKMMTNSQ
GNEFKATLFNVSRKMMTNSQ

SEQ ID NO: 188017 - protein, 20 aa, Artificial Sequence
  Description of Artificial Sequence: Synthetic peptide
  Seed: GNEKKAKLANVVRKMMTNSQ
GNEFKATLFNVTRKMMTNSQ

SEQ ID NO: 188018 - protein, 20 aa, Artificial Sequence
  Description of Artificial Sequence: Synthetic peptide
  Seed: GNEKKAKLANVVRKMMTNSQ
GNEFKATLFNVWRKMMTNSQ

SEQ ID NO: 188019 - protein, 20 aa, Artificial Sequence
  Description of Artificial Sequence: Synthetic peptide
  Seed: GNEKKAKLANVVRKMMTNSQ
GNEFKATLFNVYRKMMTNSQ

SEQ ID NO: 188020 - protein, 20 aa, Artificial Sequence
  Description of Artificial Sequence: Synthetic peptide
  Seed: GNEKKAKLANVVRKMMTNSQ
GNEFKATLGNVARKMMTNSQ

SEQ ID NO: 188021 - protein, 20 aa, Artificial Sequence
  Description of Artificial Sequence: Synthetic peptide
  Seed: GNEKKAKLANVVRKMMTNSQ
GNEFKATLGNVFRKMMTNSQ

SEQ ID NO: 188022 - protein, 20 aa, Artificial Sequence
  Description of Artificial Sequence: Synthetic peptide
  Seed: GNEKKAKLANVVRKMMTNSQ
GNEFKATLGNVGRKMMTNSQ

SEQ ID NO: 188023 - protein, 20 aa, Artificial Sequence
  Description of Artificial Sequence: Synthetic peptide
  Seed: GNEKKAKLANVVRKMMTNSQ
GNEFKATLGNVIRKMMTNSQ

SEQ ID NO: 188024 - protein, 20 aa, Artificial Sequence
  Description of Artificial Sequence: Synthetic peptide
  Seed: GNEKKAKLANVVRKMMTNSQ
GNEFKATLGNVLRKMMTNSQ

SEQ ID NO: 188025 - protein, 20 aa, Artificial Sequence
  Description of Artificial Sequence: Synthetic peptide
  Seed: GNEKKAKLANVVRKMMTNSQ
GNEFKATLGNVMRKMMTNSQ

SEQ ID NO: 188026 - protein, 20 aa, Artificial Sequence
  Description of Artificial Sequence: Synthetic peptide
  Seed: GNEKKAKLANVVRKMMTNSQ
GNEFKATLGNVNRKMMTNSQ

SEQ ID NO: 188027 - protein, 20 aa, Artificial Sequence
  Description of Artificial Sequence: Synthetic peptide
  Seed: GNEKKAKLANVVRKMMTNSQ
GNEFKATLGNVSRKMMTNSQ

SEQ ID NO: 188028 - protein, 20 aa, Artificial Sequence
  Description of Artificial Sequence: Synthetic peptide
  Seed: GNEKKAKLANVVRKMMTNSQ
GNEFKATLGNVTRKMMTNSQ

SEQ ID NO: 188029 - protein, 20 aa, Artificial Sequence
  Description of Artificial Sequence: Synthetic peptide
  Seed: GNEKKAKLANVVRKMMTNSQ
GNEFKATLGNVVRKMMTNSQ

SEQ ID NO: 188030 - protein, 20 aa, Artificial Sequence
  Description of Artificial Sequence: Synthetic peptide
  Seed: GNEKKAKLANVVRKMMTNSQ
GNEFKATLINVARKMMTNSQ

SEQ ID NO: 188031 - protein, 20 aa, Artificial Sequence
  Description of Artificial Sequence: Synthetic peptide
  Seed: GNEKKAKLANVVRKMMTNSQ
GNEFKATLINVFRKMMTNSQ

SEQ ID NO: 188032 - protein, 20 aa, Artificial Sequence
  Description of Artificial Sequence: Synthetic peptide
  Seed: GNEKKAKLANVVRKMMTNSQ
GNEFKATLINVGRKMMTNSQ

SEQ ID NO: 188033 - protein, 20 aa, Artificial Sequence
  Description of Artificial Sequence: Synthetic peptide
  Seed: GNEKKAKLANVVRKMMTNSQ
GNEFKATLINVIRKMMTNSQ

SEQ ID NO: 188034 - protein, 20 aa, Artificial Sequence
  Description of Artificial Sequence: Synthetic peptide
  Seed: GNEKKAKLANVVRKMMTNSQ
GNEFKATLINVLRKMMTNSQ

SEQ ID NO: 188035 - protein, 20 aa, Artificial Sequence
  Description of Artificial Sequence: Synthetic peptide
  Seed: GNEKKAKLANVVRKMMTNSQ
GNEFKATLINVMRKMMTNSQ

SEQ ID NO: 188036 - protein, 20 aa, Artificial Sequence
  Description of Artificial Sequence: Synthetic peptide
  Seed: GNEKKAKLANVVRKMMTNSQ
GNEFKATLINVNRKMMTNSQ

SEQ ID NO: 188037 - protein, 20 aa, Artificial Sequence
  Description of Artificial Sequence: Synthetic peptide
  Seed: GNEKKAKLANVVRKMMTNSQ
GNEFKATLINVSRKMMTNSQ

SEQ ID NO: 188038 - protein, 20 aa, Artificial Sequence
  Description of Artificial Sequence: Synthetic peptide
  Seed: GNEKKAKLANVVRKMMTNSQ
GNEFKATLINVTRKMMTNSQ

SEQ ID NO: 188039 - protein, 20 aa, Artificial Sequence
  Description of Artificial Sequence: Synthetic peptide
  Seed: GNEKKAKLANVVRKMMTNSQ
GNEFKATLINVVRKMMTNSQ

SEQ ID NO: 188040 - protein, 20 aa, Artificial Sequence
  Description of Artificial Sequence: Synthetic peptide
  Seed: GNEKKAKLANVVRKMMTNSQ
GNEFKATLINVYRKMMTNSQ

SEQ ID NO: 188041 - protein, 20 aa, Artificial Sequence
  Description of Artificial Sequence: Synthetic peptide
  Seed: GNEKKAKLANVVRKMMTNSQ
GNEFKATLLNVARKMMTNSQ

SEQ ID NO: 188042 - protein, 20 aa, Artificial Sequence
  Description of Artificial Sequence: Synthetic peptide
  Seed: GNEKKAKLANVVRKMMTNSQ
GNEFKATLLNVERKMMTNSQ

SEQ ID NO: 188043 - protein, 20 aa, Artificial Sequence
  Description of Artificial Sequence: Synthetic peptide
  Seed: GNEKKAKLANVVRKMMTNSQ
GNEFKATLLNVFRKMMTNSQ

SEQ ID NO: 188044 - protein, 20 aa, Artificial Sequence
  Description of Artificial Sequence: Synthetic peptide
  Seed: GNEKKAKLANVVRKMMTNSQ
GNEFKATLLNVIRKMMTNSQ

SEQ ID NO: 188045 - protein, 20 aa, Artificial Sequence
  Description of Artificial Sequence: Synthetic peptide
  Seed: GNEKKAKLANVVRKMMTNSQ
GNEFKATLLNVLRKMMTNSQ

SEQ ID NO: 188046 - protein, 20 aa, Artificial Sequence
  Description of Artificial Sequence: Synthetic peptide
  Seed: GNEKKAKLANVVRKMMTNSQ
GNEFKATLLNVMRKMMTNSQ

SEQ ID NO: 188047 - protein, 20 aa, Artificial Sequence
  Description of Artificial Sequence: Synthetic peptide
  Seed: GNEKKAKLANVVRKMMTNSQ
GNEFKATLLNVNRKMMTNSQ

SEQ ID NO: 188048 - protein, 20 aa, Artificial Sequence
  Description of Artificial Sequence: Synthetic peptide
  Seed: GNEKKAKLANVVRKMMTNSQ
GNEFKATLLNVSRKMMTNSQ

SEQ ID NO: 188049 - protein, 20 aa, Artificial Sequence
  Description of Artificial Sequence: Synthetic peptide
  Seed: GNEKKAKLANVVRKMMTNSQ
GNEFKATLLNVTRKMMTNSQ

SEQ ID NO: 188050 - protein, 20 aa, Artificial Sequence
  Description of Artificial Sequence: Synthetic peptide
  Seed: GNEKKAKLANVVRKMMTNSQ
GNEFKATLLNVVRKMMTNSQ

SEQ ID NO: 188051 - protein, 20 aa, Artificial Sequence
  Description of Artificial Sequence: Synthetic peptide
  Seed: GNEKKAKLANVVRKMMTNSQ
GNEFKATLLNVYRKMMTNSQ

SEQ ID NO: 188052 - protein, 20 aa, Artificial Sequence
  Description of Artificial Sequence: Synthetic peptide
  Seed: GNEKKAKLANVVRKMMTNSQ
GNEFKATLMNVARKMMTNSQ

SEQ ID NO: 188053 - protein, 20 aa, Artificial Sequence
  Description of Artificial Sequence: Synthetic peptide
  Seed: GNEKKAKLANVVRKMMTNSQ
GNEFKATLMNVFRKMMTNSQ

SEQ ID NO: 188054 - protein, 20 aa, Artificial Sequence
  Description of Artificial Sequence: Synthetic peptide
  Seed: GNEKKAKLANVVRKMMTNSQ
GNEFKATLMNVIRKMMTNSQ

SEQ ID NO: 188055 - protein, 20 aa, Artificial Sequence
  Description of Artificial Sequence: Synthetic peptide
  Seed: GNEKKAKLANVVRKMMTNSQ
GNEFKATLMNVLRKMMTNSQ

SEQ ID NO: 188056 - protein, 20 aa, Artificial Sequence
  Description of Artificial Sequence: Synthetic peptide
  Seed: GNEKKAKLANVVRKMMTNSQ
GNEFKATLMNVMRKMMTNSQ

SEQ ID NO: 188057 - protein, 20 aa, Artificial Sequence
  Description of Artificial Sequence: Synthetic peptide
  Seed: GNEKKAKLANVVRKMMTNSQ
GNEFKATLMNVNRKMMTNSQ

SEQ ID NO: 188058 - protein, 20 aa, Artificial Sequence
  Description of Artificial Sequence: Synthetic peptide
  Seed: GNEKKAKLANVVRKMMTNSQ
GNEFKATLMNVSRKMMTNSQ

SEQ ID NO: 188059 - protein, 20 aa, Artificial Sequence
  Description of Artificial Sequence: Synthetic peptide
  Seed: GNEKKAKLANVVRKMMTNSQ
GNEFKATLMNVTRKMMTNSQ

SEQ ID NO: 188060 - protein, 20 aa, Artificial Sequence
  Description of Artificial Sequence: Synthetic peptide
  Seed: GNEKKAKLANVVRKMMTNSQ
GNEFKATLMNVVRKMMTNSQ

SEQ ID NO: 188061 - protein, 20 aa, Artificial Sequence
  Description of Artificial Sequence: Synthetic peptide
  Seed: GNEKKAKLANVVRKMMTNSQ
GNEFKATLMNVYRKMMTNSQ

SEQ ID NO: 188062 - protein, 20 aa, Artificial Sequence
  Description of Artificial Sequence: Synthetic peptide
  Seed: GNEKKAKLANVVRKMMTNSQ
GNEFKATLNNVARKMMTNSQ

SEQ ID NO: 188063 - protein, 20 aa, Artificial Sequence
  Description of Artificial Sequence: Synthetic peptide
  Seed: GNEKKAKLANVVRKMMTNSQ
GNEFKATLNNVIRKMMTNSQ

SEQ ID NO: 188064 - protein, 20 aa, Artificial Sequence
  Description of Artificial Sequence: Synthetic peptide
  Seed: GNEKKAKLANVVRKMMTNSQ
GNEFKATLNNVLRKMMTNSQ

SEQ ID NO: 188065 - protein, 20 aa, Artificial Sequence
  Description of Artificial Sequence: Synthetic peptide
  Seed: GNEKKAKLANVVRKMMTNSQ
GNEFKATLNNVNRKMMTNSQ

SEQ ID NO: 188066 - protein, 20 aa, Artificial Sequence
  Description of Artificial Sequence: Synthetic peptide
  Seed: GNEKKAKLANVVRKMMTNSQ
GNEFKATLNNVSRKMMTNSQ

SEQ ID NO: 188067 - protein, 20 aa, Artificial Sequence
  Description of Artificial Sequence: Synthetic peptide
  Seed: GNEKKAKLANVVRKMMTNSQ
GNEFKATLNNVTRKMMTNSQ

SEQ ID NO: 188068 - protein, 20 aa, Artificial Sequence
  Description of Artificial Sequence: Synthetic peptide
  Seed: GNEKKAKLANVVRKMMTNSQ
GNEFKATLNNVVRKMMTNSQ

SEQ ID NO: 188069 - protein, 20 aa, Artificial Sequence
  Description of Artificial Sequence: Synthetic peptide
  Seed: GNEKKAKLANVVRKMMTNSQ
GNEFKATLPNVARKMMTNSQ

SEQ ID NO: 188070 - protein, 20 aa, Artificial Sequence
  Description of Artificial Sequence: Synthetic peptide
  Seed: GNEKKAKLANVVRKMMTNSQ
GNEFKATLPNVFRKMMTNSQ

SEQ ID NO: 188071 - protein, 20 aa, Artificial Sequence
  Description of Artificial Sequence: Synthetic peptide
  Seed: GNEKKAKLANVVRKMMTNSQ
GNEFKATLPNVGRKMMTNSQ

SEQ ID NO: 188072 - protein, 20 aa, Artificial Sequence
  Description of Artificial Sequence: Synthetic peptide
  Seed: GNEKKAKLANVVRKMMTNSQ
GNEFKATLPNVHRKMMTNSQ

SEQ ID NO: 188073 - protein, 20 aa, Artificial Sequence
  Description of Artificial Sequence: Synthetic peptide
  Seed: GNEKKAKLANVVRKMMTNSQ
GNEFKATLPNVIRKMMTNSQ

SEQ ID NO: 188074 - protein, 20 aa, Artificial Sequence
  Description of Artificial Sequence: Synthetic peptide
  Seed: GNEKKAKLANVVRKMMTNSQ
GNEFKATLPNVLRKMMTNSQ

SEQ ID NO: 188075 - protein, 20 aa, Artificial Sequence
  Description of Artificial Sequence: Synthetic peptide
  Seed: GNEKKAKLANVVRKMMTNSQ
GNEFKATLPNVMRKMMTNSQ

SEQ ID NO: 188076 - protein, 20 aa, Artificial Sequence
  Description of Artificial Sequence: Synthetic peptide
  Seed: GNEKKAKLANVVRKMMTNSQ
GNEFKATLPNVNRKMMTNSQ

SEQ ID NO: 188077 - protein, 20 aa, Artificial Sequence
  Description of Artificial Sequence: Synthetic peptide
  Seed: GNEKKAKLANVVRKMMTNSQ
GNEFKATLPNVQRKMMTNSQ

SEQ ID NO: 188078 - protein, 20 aa, Artificial Sequence
  Description of Artificial Sequence: Synthetic peptide
  Seed: GNEKKAKLANVVRKMMTNSQ
GNEFKATLPNVSRKMMTNSQ

SEQ ID NO: 188079 - protein, 20 aa, Artificial Sequence
  Description of Artificial Sequence: Synthetic peptide
  Seed: GNEKKAKLANVVRKMMTNSQ
GNEFKATLPNVTRKMMTNSQ

SEQ ID NO: 188080 - protein, 20 aa, Artificial Sequence
  Description of Artificial Sequence: Synthetic peptide
  Seed: GNEKKAKLANVVRKMMTNSQ
GNEFKATLPNVVRKMMTNSQ

SEQ ID NO: 188081 - protein, 20 aa, Artificial Sequence
  Description of Artificial Sequence: Synthetic peptide
  Seed: GNEKKAKLANVVRKMMTNSQ
GNEFKATLSNVARKMMTNSQ

SEQ ID NO: 188082 - protein, 20 aa, Artificial Sequence
  Description of Artificial Sequence: Synthetic peptide
  Seed: GNEKKAKLANVVRKMMTNSQ
GNEFKATLSNVFRKMMTNSQ

SEQ ID NO: 188083 - protein, 20 aa, Artificial Sequence
  Description of Artificial Sequence: Synthetic peptide
  Seed: GNEKKAKLANVVRKMMTNSQ
GNEFKATLSNVGRKMMTNSQ

SEQ ID NO: 188084 - protein, 20 aa, Artificial Sequence
  Description of Artificial Sequence: Synthetic peptide
  Seed: GNEKKAKLANVVRKMMTNSQ
GNEFKATLSNVHRKMMTNSQ

SEQ ID NO: 188085 - protein, 20 aa, Artificial Sequence
  Description of Artificial Sequence: Synthetic peptide
  Seed: GNEKKAKLANVVRKMMTNSQ
GNEFKATLSNVIRKMMTNSQ

SEQ ID NO: 188086 - protein, 20 aa, Artificial Sequence
  Description of Artificial Sequence: Synthetic peptide
  Seed: GNEKKAKLANVVRKMMTNSQ
GNEFKATLSNVLRKMMTNSQ

SEQ ID NO: 188087 - protein, 20 aa, Artificial Sequence
  Description of Artificial Sequence: Synthetic peptide
  Seed: GNEKKAKLANVVRKMMTNSQ
GNEFKATLSNVMRKMMTNSQ

SEQ ID NO: 188088 - protein, 20 aa, Artificial Sequence
  Description of Artificial Sequence: Synthetic peptide
  Seed: GNEKKAKLANVVRKMMTNSQ
GNEFKATLSNVNRKMMTNSQ

SEQ ID NO: 188089 - protein, 20 aa, Artificial Sequence
  Description of Artificial Sequence: Synthetic peptide
  Seed: GNEKKAKLANVVRKMMTNSQ
GNEFKATLSNVQRKMMTNSQ

SEQ ID NO: 188090 - protein, 20 aa, Artificial Sequence
  Description of Artificial Sequence: Synthetic peptide
  Seed: GNEKKAKLANVVRKMMTNSQ
GNEFKATLSNVSRKMMTNSQ

SEQ ID NO: 188091 - protein, 20 aa, Artificial Sequence
  Description of Artificial Sequence: Synthetic peptide
  Seed: GNEKKAKLANVVRKMMTNSQ
GNEFKATLSNVTRKMMTNSQ

SEQ ID NO: 188092 - protein, 20 aa, Artificial Sequence
  Description of Artificial Sequence: Synthetic peptide
  Seed: GNEKKAKLANVVRKMMTNSQ
GNEFKATLSNVVRKMMTNSQ

SEQ ID NO: 188093 - protein, 20 aa, Artificial Sequence
  Description of Artificial Sequence: Synthetic peptide
  Seed: GNEKKAKLANVVRKMMTNSQ
GNEFKATLTNVARKMMTNSQ

SEQ ID NO: 188094 - protein, 20 aa, Artificial Sequence
  Description of Artificial Sequence: Synthetic peptide
  Seed: GNEKKAKLANVVRKMMTNSQ
GNEFKATLTNVFRKMMTNSQ

SEQ ID NO: 188095 - protein, 20 aa, Artificial Sequence
  Description of Artificial Sequence: Synthetic peptide
  Seed: GNEKKAKLANVVRKMMTNSQ
GNEFKATLTNVGRKMMTNSQ

SEQ ID NO: 188096 - protein, 20 aa, Artificial Sequence
  Description of Artificial Sequence: Synthetic peptide
  Seed: GNEKKAKLANVVRKMMTNSQ
GNEFKATLTNVHRKMMTNSQ

SEQ ID NO: 188097 - protein, 20 aa, Artificial Sequence
  Description of Artificial Sequence: Synthetic peptide
  Seed: GNEKKAKLANVVRKMMTNSQ
GNEFKATLTNVIRKMMTNSQ

SEQ ID NO: 188098 - protein, 20 aa, Artificial Sequence
  Description of Artificial Sequence: Synthetic peptide
  Seed: GNEKKAKLANVVRKMMTNSQ
GNEFKATLTNVLRKMMTNSQ

SEQ ID NO: 188099 - protein, 20 aa, Artificial Sequence
  Description of Artificial Sequence: Synthetic peptide
  Seed: GNEKKAKLANVVRKMMTNSQ
GNEFKATLTNVMRKMMTNSQ

SEQ ID NO: 188100 - protein, 20 aa, Artificial Sequence
  Description of Artificial Sequence: Synthetic peptide
  Seed: GNEKKAKLANVVRKMMTNSQ
GNEFKATLTNVNRKMMTNSQ

SEQ ID NO: 188101 - protein, 20 aa, Artificial Sequence
  Description of Artificial Sequence: Synthetic peptide
  Seed: GNEKKAKLANVVRKMMTNSQ
GNEFKATLTNVSRKMMTNSQ

SEQ ID NO: 188102 - protein, 20 aa, Artificial Sequence
  Description of Artificial Sequence: Synthetic peptide
  Seed: GNEKKAKLANVVRKMMTNSQ
GNEFKATLTNVTRKMMTNSQ

SEQ ID NO: 188103 - protein, 20 aa, Artificial Sequence
  Description of Artificial Sequence: Synthetic peptide
  Seed: GNEKKAKLANVVRKMMTNSQ
GNEFKATLTNVVRKMMTNSQ

SEQ ID NO: 188104 - protein, 20 aa, Artificial Sequence
  Description of Artificial Sequence: Synthetic peptide
  Seed: GNEKKAKLANVVRKMMTNSQ
GNEFKATLVNVARKMMTNSQ

SEQ ID NO: 188105 - protein, 20 aa, Artificial Sequence
  Description of Artificial Sequence: Synthetic peptide
  Seed: GNEKKAKLANVVRKMMTNSQ
GNEFKATLVNVFRKMMTNSQ

SEQ ID NO: 188106 - protein, 20 aa, Artificial Sequence
  Description of Artificial Sequence: Synthetic peptide
  Seed: GNEKKAKLANVVRKMMTNSQ
GNEFKATLVNVGRKMMTNSQ

SEQ ID NO: 188107 - protein, 20 aa, Artificial Sequence
  Description of Artificial Sequence: Synthetic peptide
  Seed: GNEKKAKLANVVRKMMTNSQ
GNEFKATLVNVHRKMMTNSQ

SEQ ID NO: 188108 - protein, 20 aa, Artificial Sequence
  Description of Artificial Sequence: Synthetic peptide
  Seed: GNEKKAKLANVVRKMMTNSQ
GNEFKATLVNVIRKMMTNSQ

SEQ ID NO: 188109 - protein, 20 aa, Artificial Sequence
  Description of Artificial Sequence: Synthetic peptide
  Seed: GNEKKAKLANVVRKMMTNSQ
GNEFKATLVNVLRKMMTNSQ

SEQ ID NO: 188110 - protein, 20 aa, Artificial Sequence
  Description of Artificial Sequence: Synthetic peptide
  Seed: GNEKKAKLANVVRKMMTNSQ
GNEFKATLVNVMRKMMTNSQ

SEQ ID NO: 188111 - protein, 20 aa, Artificial Sequence
  Description of Artificial Sequence: Synthetic peptide
  Seed: GNEKKAKLANVVRKMMTNSQ
GNEFKATLVNVNRKMMTNSQ

SEQ ID NO: 188112 - protein, 20 aa, Artificial Sequence
  Description of Artificial Sequence: Synthetic peptide
  Seed: GNEKKAKLANVVRKMMTNSQ
GNEFKATLVNVSRKMMTNSQ

SEQ ID NO: 188113 - protein, 20 aa, Artificial Sequence
  Description of Artificial Sequence: Synthetic peptide
  Seed: GNEKKAKLANVVRKMMTNSQ
GNEFKATLVNVTRKMMTNSQ

SEQ ID NO: 188114 - protein, 20 aa, Artificial Sequence
  Description of Artificial Sequence: Synthetic peptide
  Seed: GNEKKAKLANVVRKMMTNSQ
GNEFKATLVNVVRKMMTNSQ

SEQ ID NO: 188115 - protein, 20 aa, Artificial Sequence
  Description of Artificial Sequence: Synthetic peptide
  Seed: GNEKKAKLANVVRKMMTNSQ
GNEFKATLWNVARKMMTNSQ

SEQ ID NO: 188116 - protein, 20 aa, Artificial Sequence
  Description of Artificial Sequence: Synthetic peptide
  Seed: GNEKKAKLANVVRKMMTNSQ
GNEFKATLWNVFRKMMTNSQ

SEQ ID NO: 188117 - protein, 20 aa, Artificial Sequence
  Description of Artificial Sequence: Synthetic peptide
  Seed: GNEKKAKLANVVRKMMTNSQ
GNEFKATLWNVIRKMMTNSQ

SEQ ID NO: 188118 - protein, 20 aa, Artificial Sequence
  Description of Artificial Sequence: Synthetic peptide
  Seed: GNEKKAKLANVVRKMMTNSQ
GNEFKATLWNVLRKMMTNSQ

SEQ ID NO: 188119 - protein, 20 aa, Artificial Sequence
  Description of Artificial Sequence: Synthetic peptide
  Seed: GNEKKAKLANVVRKMMTNSQ
GNEFKATLWNVMRKMMTNSQ

SEQ ID NO: 188120 - protein, 20 aa, Artificial Sequence
  Description of Artificial Sequence: Synthetic peptide
  Seed: GNEKKAKLANVVRKMMTNSQ
GNEFKATLWNVNRKMMTNSQ

SEQ ID NO: 188121 - protein, 20 aa, Artificial Sequence
  Description of Artificial Sequence: Synthetic peptide
  Seed: GNEKKAKLANVVRKMMTNSQ
GNEFKATLWNVSRKMMTNSQ

SEQ ID NO: 188122 - protein, 20 aa, Artificial Sequence
  Description of Artificial Sequence: Synthetic peptide
  Seed: GNEKKAKLANVVRKMMTNSQ
GNEFKATLWNVTRKMMTNSQ

SEQ ID NO: 188123 - protein, 20 aa, Artificial Sequence
  Description of Artificial Sequence: Synthetic peptide
  Seed: GNEKKAKLANVVRKMMTNSQ
GNEFKATLWNVVRKMMTNSQ

SEQ ID NO: 188124 - protein, 20 aa, Artificial Sequence
  Description of Artificial Sequence: Synthetic peptide
  Seed: GNEKKAKLANVVRKMMTNSQ
GNEFKATLWNVYRKMMTNSQ

SEQ ID NO: 188125 - protein, 20 aa, Artificial Sequence
  Description of Artificial Sequence: Synthetic peptide
  Seed: GNEKKAKLANVVRKMMTNSQ
GNEFKATLYNVARKMMTNSQ

SEQ ID NO: 188126 - protein, 20 aa, Artificial Sequence
  Description of Artificial Sequence: Synthetic peptide
  Seed: GNEKKAKLANVVRKMMTNSQ
GNEFKATLYNVDRKMMTNSQ

SEQ ID NO: 188127 - protein, 20 aa, Artificial Sequence
  Description of Artificial Sequence: Synthetic peptide
  Seed: GNEKKAKLANVVRKMMTNSQ
GNEFKATLYNVERKMMTNSQ

SEQ ID NO: 188128 - protein, 20 aa, Artificial Sequence
  Description of Artificial Sequence: Synthetic peptide
  Seed: GNEKKAKLANVVRKMMTNSQ
GNEFKATLYNVFRKMMTNSQ

SEQ ID NO: 188129 - protein, 20 aa, Artificial Sequence
  Description of Artificial Sequence: Synthetic peptide
  Seed: GNEKKAKLANVVRKMMTNSQ
GNEFKATLYNVIRKMMTNSQ

SEQ ID NO: 188130 - protein, 20 aa, Artificial Sequence
  Description of Artificial Sequence: Synthetic peptide
  Seed: GNEKKAKLANVVRKMMTNSQ
GNEFKATLYNVLRKMMTNSQ

SEQ ID NO: 188131 - protein, 20 aa, Artificial Sequence
  Description of Artificial Sequence: Synthetic peptide
  Seed: GNEKKAKLANVVRKMMTNSQ
GNEFKATLYNVMRKMMTNSQ

SEQ ID NO: 188132 - protein, 20 aa, Artificial Sequence
  Description of Artificial Sequence: Synthetic peptide
  Seed: GNEKKAKLANVVRKMMTNSQ
GNEFKATLYNVNRKMMTNSQ

SEQ ID NO: 188133 - protein, 20 aa, Artificial Sequence
  Description of Artificial Sequence: Synthetic peptide
  Seed: GNEKKAKLANVVRKMMTNSQ
GNEFKATLYNVPRKMMTNSQ

SEQ ID NO: 188134 - protein, 20 aa, Artificial Sequence
  Description of Artificial Sequence: Synthetic peptide
  Seed: GNEKKAKLANVVRKMMTNSQ
GNEFKATLYNVSRKMMTNSQ

SEQ ID NO: 188135 - protein, 20 aa, Artificial Sequence
  Description of Artificial Sequence: Synthetic peptide
  Seed: GNEKKAKLANVVRKMMTNSQ
GNEFKATLYNVTRKMMTNSQ

SEQ ID NO: 188136 - protein, 20 aa, Artificial Sequence
  Description of Artificial Sequence: Synthetic peptide
  Seed: GNEKKAKLANVVRKMMTNSQ
GNEFKATLYNVVRKMMTNSQ

SEQ ID NO: 188137 - protein, 20 aa, Artificial Sequence
  Description of Artificial Sequence: Synthetic peptide
  Seed: GNEKKAKLANVVRKMMTNSQ
GNEFKATLYNVYRKMMTNSQ

SEQ ID NO: 188138 - protein, 20 aa, Artificial Sequence
  Description of Artificial Sequence: Synthetic peptide
  Seed: GNEKKAKLANVVRKMMTNSQ
GNEFKAVLANVARKMMTNSQ

SEQ ID NO: 188139 - protein, 20 aa, Artificial Sequence
  Description of Artificial Sequence: Synthetic peptide
  Seed: GNEKKAKLANVVRKMMTNSQ
GNEFKAVLANVCRKMMTNSQ

SEQ ID NO: 188140 - protein, 20 aa, Artificial Sequence
  Description of Artificial Sequence: Synthetic peptide
  Seed: GNEKKAKLANVVRKMMTNSQ
GNEFKAVLANVDRKMMTNSQ

SEQ ID NO: 188141 - protein, 20 aa, Artificial Sequence
  Description of Artificial Sequence: Synthetic peptide
  Seed: GNEKKAKLANVVRKMMTNSQ
GNEFKAVLANVERKMMTNSQ

SEQ ID NO: 188142 - protein, 20 aa, Artificial Sequence
  Description of Artificial Sequence: Synthetic peptide
  Seed: GNEKKAKLANVVRKMMTNSQ
GNEFKAVLANVFRKMMTNSQ

SEQ ID NO: 188143 - protein, 20 aa, Artificial Sequence
  Description of Artificial Sequence: Synthetic peptide
  Seed: GNEKKAKLANVVRKMMTNSQ
GNEFKAVLANVGRKMMTNSQ

SEQ ID NO: 188144 - protein, 20 aa, Artificial Sequence
  Description of Artificial Sequence: Synthetic peptide
  Seed: GNEKKAKLANVVRKMMTNSQ
GNEFKAVLANVHRKMMTNSQ

SEQ ID NO: 188145 - protein, 20 aa, Artificial Sequence
  Description of Artificial Sequence: Synthetic peptide
  Seed: GNEKKAKLANVVRKMMTNSQ
GNEFKAVLANVIRKMMTNSQ

SEQ ID NO: 188146 - protein, 20 aa, Artificial Sequence
  Description of Artificial Sequence: Synthetic peptide
  Seed: GNEKKAKLANVVRKMMTNSQ
GNEFKAVLANVKRKMMTNSQ

SEQ ID NO: 188147 - protein, 20 aa, Artificial Sequence
  Description of Artificial Sequence: Synthetic peptide
  Seed: GNEKKAKLANVVRKMMTNSQ
GNEFKAVLANVLRKMMTNSQ

SEQ ID NO: 188148 - protein, 20 aa, Artificial Sequence
  Description of Artificial Sequence: Synthetic peptide
  Seed: GNEKKAKLANVVRKMMTNSQ
GNEFKAVLANVMRKMMTNSQ

SEQ ID NO: 188149 - protein, 20 aa, Artificial Sequence
  Description of Artificial Sequence: Synthetic peptide
  Seed: GNEKKAKLANVVRKMMTNSQ
GNEFKAVLANVNRKMMTNSQ

SEQ ID NO: 188150 - protein, 20 aa, Artificial Sequence
  Description of Artificial Sequence: Synthetic peptide
  Seed: GNEKKAKLANVVRKMMTNSQ
GNEFKAVLANVPRKMMTNSQ

SEQ ID NO: 188151 - protein, 20 aa, Artificial Sequence
  Description of Artificial Sequence: Synthetic peptide
  Seed: GNEKKAKLANVVRKMMTNSQ
GNEFKAVLANVQRKMMTNSQ

SEQ ID NO: 188152 - protein, 20 aa, Artificial Sequence
  Description of Artificial Sequence: Synthetic peptide
  Seed: GNEKKAKLANVVRKMMTNSQ
GNEFKAVLANVRRKMMTNSQ

SEQ ID NO: 188153 - protein, 20 aa, Artificial Sequence
  Description of Artificial Sequence: Synthetic peptide
  Seed: GNEKKAKLANVVRKMMTNSQ
GNEFKAVLANVSRKMMTNSQ

SEQ ID NO: 188154 - protein, 20 aa, Artificial Sequence
  Description of Artificial Sequence: Synthetic peptide
  Seed: GNEKKAKLANVVRKMMTNSQ
GNEFKAVLANVTRKMMTNSQ

SEQ ID NO: 188155 - protein, 20 aa, Artificial Sequence
  Description of Artificial Sequence: Synthetic peptide
  Seed: GNEKKAKLANVVRKMMTNSQ
GNEFKAVLANVVRKMMTNSQ

SEQ ID NO: 188156 - protein, 20 aa, Artificial Sequence
  Description of Artificial Sequence: Synthetic peptide
  Seed: GNEKKAKLANVVRKMMTNSQ
GNEFKAVLANVYRKMMTNSQ

SEQ ID NO: 188157 - protein, 20 aa, Artificial Sequence
  Description of Artificial Sequence: Synthetic peptide
  Seed: GNEKKAKLANVVRKMMTNSQ
GNEFKAVLENVARKMMTNSQ

SEQ ID NO: 188158 - protein, 20 aa, Artificial Sequence
  Description of Artificial Sequence: Synthetic peptide
  Seed: GNEKKAKLANVVRKMMTNSQ
GNEFKAVLFNVARKMMTNSQ

SEQ ID NO: 188159 - protein, 20 aa, Artificial Sequence
  Description of Artificial Sequence: Synthetic peptide
  Seed: GNEKKAKLANVVRKMMTNSQ
GNEFKAVLFNVDRKMMTNSQ

SEQ ID NO: 188160 - protein, 20 aa, Artificial Sequence
  Description of Artificial Sequence: Synthetic peptide
  Seed: GNEKKAKLANVVRKMMTNSQ
GNEFKAVLFNVERKMMTNSQ

SEQ ID NO: 188161 - protein, 20 aa, Artificial Sequence
  Description of Artificial Sequence: Synthetic peptide
  Seed: GNEKKAKLANVVRKMMTNSQ
GNEFKAVLFNVFRKMMTNSQ

SEQ ID NO: 188162 - protein, 20 aa, Artificial Sequence
  Description of Artificial Sequence: Synthetic peptide
  Seed: GNEKKAKLANVVRKMMTNSQ
GNEFKAVLFNVGRKMMTNSQ

SEQ ID NO: 188163 - protein, 20 aa, Artificial Sequence
  Description of Artificial Sequence: Synthetic peptide
  Seed: GNEKKAKLANVVRKMMTNSQ
GNEFKAVLFNVHRKMMTNSQ

SEQ ID NO: 188164 - protein, 20 aa, Artificial Sequence
  Description of Artificial Sequence: Synthetic peptide
  Seed: GNEKKAKLANVVRKMMTNSQ
GNEFKAVLFNVIRKMMTNSQ

SEQ ID NO: 188165 - protein, 20 aa, Artificial Sequence
  Description of Artificial Sequence: Synthetic peptide
  Seed: GNEKKAKLANVVRKMMTNSQ
GNEFKAVLFNVKRKMMTNSQ

SEQ ID NO: 188166 - protein, 20 aa, Artificial Sequence
  Description of Artificial Sequence: Synthetic peptide
  Seed: GNEKKAKLANVVRKMMTNSQ
GNEFKAVLFNVLRKMMTNSQ

SEQ ID NO: 188167 - protein, 20 aa, Artificial Sequence
  Description of Artificial Sequence: Synthetic peptide
  Seed: GNEKKAKLANVVRKMMTNSQ
GNEFKAVLFNVMRKMMTNSQ

SEQ ID NO: 188168 - protein, 20 aa, Artificial Sequence
  Description of Artificial Sequence: Synthetic peptide
  Seed: GNEKKAKLANVVRKMMTNSQ
GNEFKAVLFNVNRKMMTNSQ

SEQ ID NO: 188169 - protein, 20 aa, Artificial Sequence
  Description of Artificial Sequence: Synthetic peptide
  Seed: GNEKKAKLANVVRKMMTNSQ
GNEFKAVLFNVPRKMMTNSQ

SEQ ID NO: 188170 - protein, 20 aa, Artificial Sequence
  Description of Artificial Sequence: Synthetic peptide
  Seed: GNEKKAKLANVVRKMMTNSQ
GNEFKAVLFNVQRKMMTNSQ

SEQ ID NO: 188171 - protein, 20 aa, Artificial Sequence
  Description of Artificial Sequence: Synthetic peptide
  Seed: GNEKKAKLANVVRKMMTNSQ
GNEFKAVLFNVRRKMMTNSQ

SEQ ID NO: 188172 - protein, 20 aa, Artificial Sequence
  Description of Artificial Sequence: Synthetic peptide
  Seed: GNEKKAKLANVVRKMMTNSQ
GNEFKAVLFNVSRKMMTNSQ

SEQ ID NO: 188173 - protein, 20 aa, Artificial Sequence
  Description of Artificial Sequence: Synthetic peptide
  Seed: GNEKKAKLANVVRKMMTNSQ
GNEFKAVLFNVTRKMMTNSQ

SEQ ID NO: 188174 - protein, 20 aa, Artificial Sequence
  Description of Artificial Sequence: Synthetic peptide
  Seed: GNEKKAKLANVVRKMMTNSQ
GNEFKAVLFNVVRKMMTNSQ

SEQ ID NO: 188175 - protein, 20 aa, Artificial Sequence
  Description of Artificial Sequence: Synthetic peptide
  Seed: GNEKKAKLANVVRKMMTNSQ
GNEFKAVLFNVYRKMMTNSQ

SEQ ID NO: 188176 - protein, 20 aa, Artificial Sequence
  Description of Artificial Sequence: Synthetic peptide
  Seed: GNEKKAKLANVVRKMMTNSQ
GNEFKAVLGNVARKMMTNSQ

SEQ ID NO: 188177 - protein, 20 aa, Artificial Sequence
  Description of Artificial Sequence: Synthetic peptide
  Seed: GNEKKAKLANVVRKMMTNSQ
GNEFKAVLGNVCRKMMTNSQ

SEQ ID NO: 188178 - protein, 20 aa, Artificial Sequence
  Description of Artificial Sequence: Synthetic peptide
  Seed: GNEKKAKLANVVRKMMTNSQ
GNEFKAVLGNVDRKMMTNSQ

SEQ ID NO: 188179 - protein, 20 aa, Artificial Sequence
  Description of Artificial Sequence: Synthetic peptide
  Seed: GNEKKAKLANVVRKMMTNSQ
GNEFKAVLGNVERKMMTNSQ

SEQ ID NO: 188180 - protein, 20 aa, Artificial Sequence
  Description of Artificial Sequence: Synthetic peptide
  Seed: GNEKKAKLANVVRKMMTNSQ
GNEFKAVLGNVFRKMMTNSQ

SEQ ID NO: 188181 - protein, 20 aa, Artificial Sequence
  Description of Artificial Sequence: Synthetic peptide
  Seed: GNEKKAKLANVVRKMMTNSQ
GNEFKAVLGNVGRKMMTNSQ

SEQ ID NO: 188182 - protein, 20 aa, Artificial Sequence
  Description of Artificial Sequence: Synthetic peptide
  Seed: GNEKKAKLANVVRKMMTNSQ
GNEFKAVLGNVHRKMMTNSQ

SEQ ID NO: 188183 - protein, 20 aa, Artificial Sequence
  Description of Artificial Sequence: Synthetic peptide
  Seed: GNEKKAKLANVVRKMMTNSQ
GNEFKAVLGNVIRKMMTNSQ

SEQ ID NO: 188184 - protein, 20 aa, Artificial Sequence
  Description of Artificial Sequence: Synthetic peptide
  Seed: GNEKKAKLANVVRKMMTNSQ
GNEFKAVLGNVLRKMMTNSQ

SEQ ID NO: 188185 - protein, 20 aa, Artificial Sequence
  Description of Artificial Sequence: Synthetic peptide
  Seed: GNEKKAKLANVVRKMMTNSQ
GNEFKAVLGNVMRKMMTNSQ

SEQ ID NO: 188186 - protein, 20 aa, Artificial Sequence
  Description of Artificial Sequence: Synthetic peptide
  Seed: GNEKKAKLANVVRKMMTNSQ
GNEFKAVLGNVNRKMMTNSQ

SEQ ID NO: 188187 - protein, 20 aa, Artificial Sequence
  Description of Artificial Sequence: Synthetic peptide
  Seed: GNEKKAKLANVVRKMMTNSQ
GNEFKAVLGNVPRKMMTNSQ

SEQ ID NO: 188188 - protein, 20 aa, Artificial Sequence
  Description of Artificial Sequence: Synthetic peptide
  Seed: GNEKKAKLANVVRKMMTNSQ
GNEFKAVLGNVQRKMMTNSQ

SEQ ID NO: 188189 - protein, 20 aa, Artificial Sequence
  Description of Artificial Sequence: Synthetic peptide
  Seed: GNEKKAKLANVVRKMMTNSQ
GNEFKAVLGNVSRKMMTNSQ

SEQ ID NO: 188190 - protein, 20 aa, Artificial Sequence
  Description of Artificial Sequence: Synthetic peptide
  Seed: GNEKKAKLANVVRKMMTNSQ
GNEFKAVLGNVTRKMMTNSQ

SEQ ID NO: 188191 - protein, 20 aa, Artificial Sequence
  Description of Artificial Sequence: Synthetic peptide
  Seed: GNEKKAKLANVVRKMMTNSQ
GNEFKAVLGNVVRKMMTNSQ

SEQ ID NO: 188192 - protein, 20 aa, Artificial Sequence
  Description of Artificial Sequence: Synthetic peptide
  Seed: GNEKKAKLANVVRKMMTNSQ
GNEFKAVLGNVYRKMMTNSQ

SEQ ID NO: 188193 - protein, 20 aa, Artificial Sequence
  Description of Artificial Sequence: Synthetic peptide
  Seed: GNEKKAKLANVVRKMMTNSQ
GNEFKAVLHNVARKMMTNSQ

SEQ ID NO: 188194 - protein, 20 aa, Artificial Sequence
  Description of Artificial Sequence: Synthetic peptide
  Seed: GNEKKAKLANVVRKMMTNSQ
GNEFKAVLINVARKMMTNSQ

SEQ ID NO: 188195 - protein, 20 aa, Artificial Sequence
  Description of Artificial Sequence: Synthetic peptide
  Seed: GNEKKAKLANVVRKMMTNSQ
GNEFKAVLINVDRKMMTNSQ

SEQ ID NO: 188196 - protein, 20 aa, Artificial Sequence
  Description of Artificial Sequence: Synthetic peptide
  Seed: GNEKKAKLANVVRKMMTNSQ
GNEFKAVLINVGRKMMTNSQ

SEQ ID NO: 188197 - protein, 20 aa, Artificial Sequence
  Description of Artificial Sequence: Synthetic peptide
  Seed: GNEKKAKLANVVRKMMTNSQ
GNEFKAVLINVHRKMMTNSQ

SEQ ID NO: 188198 - protein, 20 aa, Artificial Sequence
  Description of Artificial Sequence: Synthetic peptide
  Seed: GNEKKAKLANVVRKMMTNSQ
GNEFKAVLINVIRKMMTNSQ

SEQ ID NO: 188199 - protein, 20 aa, Artificial Sequence
  Description of Artificial Sequence: Synthetic peptide
  Seed: GNEKKAKLANVVRKMMTNSQ
GNEFKAVLINVLRKMMTNSQ

SEQ ID NO: 188200 - protein, 20 aa, Artificial Sequence
  Description of Artificial Sequence: Synthetic peptide
  Seed: GNEKKAKLANVVRKMMTNSQ
GNEFKAVLINVMRKMMTNSQ

SEQ ID NO: 188201 - protein, 20 aa, Artificial Sequence
  Description of Artificial Sequence: Synthetic peptide
  Seed: GNEKKAKLANVVRKMMTNSQ
GNEFKAVLINVNRKMMTNSQ

SEQ ID NO: 188202 - protein, 20 aa, Artificial Sequence
  Description of Artificial Sequence: Synthetic peptide
  Seed: GNEKKAKLANVVRKMMTNSQ
GNEFKAVLINVPRKMMTNSQ

SEQ ID NO: 188203 - protein, 20 aa, Artificial Sequence
  Description of Artificial Sequence: Synthetic peptide
  Seed: GNEKKAKLANVVRKMMTNSQ
GNEFKAVLINVQRKMMTNSQ

SEQ ID NO: 188204 - protein, 20 aa, Artificial Sequence
  Description of Artificial Sequence: Synthetic peptide
  Seed: GNEKKAKLANVVRKMMTNSQ
GNEFKAVLINVSRKMMTNSQ

SEQ ID NO: 188205 - protein, 20 aa, Artificial Sequence
  Description of Artificial Sequence: Synthetic peptide
  Seed: GNEKKAKLANVVRKMMTNSQ
GNEFKAVLINVTRKMMTNSQ

SEQ ID NO: 188206 - protein, 20 aa, Artificial Sequence
  Description of Artificial Sequence: Synthetic peptide
  Seed: GNEKKAKLANVVRKMMTNSQ
GNEFKAVLINVVRKMMTNSQ

SEQ ID NO: 188207 - protein, 20 aa, Artificial Sequence
  Description of Artificial Sequence: Synthetic peptide
  Seed: GNEKKAKLANVVRKMMTNSQ
GNEFKAVLINVYRKMMTNSQ

SEQ ID NO: 188208 - protein, 20 aa, Artificial Sequence
  Description of Artificial Sequence: Synthetic peptide
  Seed: GNEKKAKLANVVRKMMTNSQ
GNEFKAVLLNVARKMMTNSQ

SEQ ID NO: 188209 - protein, 20 aa, Artificial Sequence
  Description of Artificial Sequence: Synthetic peptide
  Seed: GNEKKAKLANVVRKMMTNSQ
GNEFKAVLLNVERKMMTNSQ

SEQ ID NO: 188210 - protein, 20 aa, Artificial Sequence
  Description of Artificial Sequence: Synthetic peptide
  Seed: GNEKKAKLANVVRKMMTNSQ
GNEFKAVLLNVFRKMMTNSQ

SEQ ID NO: 188211 - protein, 20 aa, Artificial Sequence
  Description of Artificial Sequence: Synthetic peptide
  Seed: GNEKKAKLANVVRKMMTNSQ
GNEFKAVLLNVIRKMMTNSQ

SEQ ID NO: 188212 - protein, 20 aa, Artificial Sequence
  Description of Artificial Sequence: Synthetic peptide
  Seed: GNEKKAKLANVVRKMMTNSQ
GNEFKAVLLNVLRKMMTNSQ

SEQ ID NO: 188213 - protein, 20 aa, Artificial Sequence
  Description of Artificial Sequence: Synthetic peptide
  Seed: GNEKKAKLANVVRKMMTNSQ
GNEFKAVLLNVMRKMMTNSQ

SEQ ID NO: 188214 - protein, 20 aa, Artificial Sequence
  Description of Artificial Sequence: Synthetic peptide
  Seed: GNEKKAKLANVVRKMMTNSQ
GNEFKAVLLNVNRKMMTNSQ

SEQ ID NO: 188215 - protein, 20 aa, Artificial Sequence
  Description of Artificial Sequence: Synthetic peptide
  Seed: GNEKKAKLANVVRKMMTNSQ
GNEFKAVLLNVSRKMMTNSQ

SEQ ID NO: 188216 - protein, 20 aa, Artificial Sequence
  Description of Artificial Sequence: Synthetic peptide
  Seed: GNEKKAKLANVVRKMMTNSQ
GNEFKAVLLNVTRKMMTNSQ

SEQ ID NO: 188217 - protein, 20 aa, Artificial Sequence
  Description of Artificial Sequence: Synthetic peptide
  Seed: GNEKKAKLANVVRKMMTNSQ
GNEFKAVLLNVVRKMMTNSQ

SEQ ID NO: 188218 - protein, 20 aa, Artificial Sequence
  Description of Artificial Sequence: Synthetic peptide
  Seed: GNEKKAKLANVVRKMMTNSQ
GNEFKAVLLNVYRKMMTNSQ

SEQ ID NO: 188219 - protein, 20 aa, Artificial Sequence
  Description of Artificial Sequence: Synthetic peptide
  Seed: GNEKKAKLANVVRKMMTNSQ
GNEFKAVLMNVARKMMTNSQ

SEQ ID NO: 188220 - protein, 20 aa, Artificial Sequence
  Description of Artificial Sequence: Synthetic peptide
  Seed: GNEKKAKLANVVRKMMTNSQ
GNEFKAVLMNVIRKMMTNSQ

SEQ ID NO: 188221 - protein, 20 aa, Artificial Sequence
  Description of Artificial Sequence: Synthetic peptide
  Seed: GNEKKAKLANVVRKMMTNSQ
GNEFKAVLMNVLRKMMTNSQ

SEQ ID NO: 188222 - protein, 20 aa, Artificial Sequence
  Description of Artificial Sequence: Synthetic peptide
  Seed: GNEKKAKLANVVRKMMTNSQ
GNEFKAVLMNVMRKMMTNSQ

SEQ ID NO: 188223 - protein, 20 aa, Artificial Sequence
  Description of Artificial Sequence: Synthetic peptide
  Seed: GNEKKAKLANVVRKMMTNSQ
GNEFKAVLMNVNRKMMTNSQ

SEQ ID NO: 188224 - protein, 20 aa, Artificial Sequence
  Description of Artificial Sequence: Synthetic peptide
  Seed: GNEKKAKLANVVRKMMTNSQ
GNEFKAVLMNVSRKMMTNSQ

SEQ ID NO: 188225 - protein, 20 aa, Artificial Sequence
  Description of Artificial Sequence: Synthetic peptide
  Seed: GNEKKAKLANVVRKMMTNSQ
GNEFKAVLMNVTRKMMTNSQ

SEQ ID NO: 188226 - protein, 20 aa, Artificial Sequence
  Description of Artificial Sequence: Synthetic peptide
  Seed: GNEKKAKLANVVRKMMTNSQ
GNEFKAVLMNVVRKMMTNSQ

SEQ ID NO: 188227 - protein, 20 aa, Artificial Sequence
  Description of Artificial Sequence: Synthetic peptide
  Seed: GNEKKAKLANVVRKMMTNSQ
GNEFKAVLMNVYRKMMTNSQ

SEQ ID NO: 188228 - protein, 20 aa, Artificial Sequence
  Description of Artificial Sequence: Synthetic peptide
  Seed: GNEKKAKLANVVRKMMTNSQ
GNEFKAVLNNVARKMMTNSQ

SEQ ID NO: 188229 - protein, 20 aa, Artificial Sequence
  Description of Artificial Sequence: Synthetic peptide
  Seed: GNEKKAKLANVVRKMMTNSQ
GNEFKAVLNNVFRKMMTNSQ

SEQ ID NO: 188230 - protein, 20 aa, Artificial Sequence
  Description of Artificial Sequence: Synthetic peptide
  Seed: GNEKKAKLANVVRKMMTNSQ
GNEFKAVLNNVGRKMMTNSQ

SEQ ID NO: 188231 - protein, 20 aa, Artificial Sequence
  Description of Artificial Sequence: Synthetic peptide
  Seed: GNEKKAKLANVVRKMMTNSQ
GNEFKAVLNNVHRKMMTNSQ

SEQ ID NO: 188232 - protein, 20 aa, Artificial Sequence
  Description of Artificial Sequence: Synthetic peptide
  Seed: GNEKKAKLANVVRKMMTNSQ
GNEFKAVLNNVIRKMMTNSQ

SEQ ID NO: 188233 - protein, 20 aa, Artificial Sequence
  Description of Artificial Sequence: Synthetic peptide
  Seed: GNEKKAKLANVVRKMMTNSQ
GNEFKAVLNNVLRKMMTNSQ

SEQ ID NO: 188234 - protein, 20 aa, Artificial Sequence
  Description of Artificial Sequence: Synthetic peptide
  Seed: GNEKKAKLANVVRKMMTNSQ
GNEFKAVLNNVMRKMMTNSQ

SEQ ID NO: 188235 - protein, 20 aa, Artificial Sequence
  Description of Artificial Sequence: Synthetic peptide
  Seed: GNEKKAKLANVVRKMMTNSQ
GNEFKAVLNNVNRKMMTNSQ

SEQ ID NO: 188236 - protein, 20 aa, Artificial Sequence
  Description of Artificial Sequence: Synthetic peptide
  Seed: GNEKKAKLANVVRKMMTNSQ
GNEFKAVLNNVPRKMMTNSQ

SEQ ID NO: 188237 - protein, 20 aa, Artificial Sequence
  Description of Artificial Sequence: Synthetic peptide
  Seed: GNEKKAKLANVVRKMMTNSQ
GNEFKAVLNNVQRKMMTNSQ

SEQ ID NO: 188238 - protein, 20 aa, Artificial Sequence
  Description of Artificial Sequence: Synthetic peptide
  Seed: GNEKKAKLANVVRKMMTNSQ
GNEFKAVLNNVSRKMMTNSQ

SEQ ID NO: 188239 - protein, 20 aa, Artificial Sequence
  Description of Artificial Sequence: Synthetic peptide
  Seed: GNEKKAKLANVVRKMMTNSQ
GNEFKAVLNNVTRKMMTNSQ

SEQ ID NO: 188240 - protein, 20 aa, Artificial Sequence
  Description of Artificial Sequence: Synthetic peptide
  Seed: GNEKKAKLANVVRKMMTNSQ
GNEFKAVLNNVVRKMMTNSQ

SEQ ID NO: 188241 - protein, 20 aa, Artificial Sequence
  Description of Artificial Sequence: Synthetic peptide
  Seed: GNEKKAKLANVVRKMMTNSQ
GNEFKAVLPNVARKMMTNSQ

SEQ ID NO: 188242 - protein, 20 aa, Artificial Sequence
  Description of Artificial Sequence: Synthetic peptide
  Seed: GNEKKAKLANVVRKMMTNSQ
GNEFKAVLPNVCRKMMTNSQ

SEQ ID NO: 188243 - protein, 20 aa, Artificial Sequence
  Description of Artificial Sequence: Synthetic peptide
  Seed: GNEKKAKLANVVRKMMTNSQ
GNEFKAVLPNVDRKMMTNSQ

SEQ ID NO: 188244 - protein, 20 aa, Artificial Sequence
  Description of Artificial Sequence: Synthetic peptide
  Seed: GNEKKAKLANVVRKMMTNSQ
GNEFKAVLPNVERKMMTNSQ

SEQ ID NO: 188245 - protein, 20 aa, Artificial Sequence
  Description of Artificial Sequence: Synthetic peptide
  Seed: GNEKKAKLANVVRKMMTNSQ
GNEFKAVLPNVFRKMMTNSQ

SEQ ID NO: 188246 - protein, 20 aa, Artificial Sequence
  Description of Artificial Sequence: Synthetic peptide
  Seed: GNEKKAKLANVVRKMMTNSQ
GNEFKAVLPNVGRKMMTNSQ

SEQ ID NO: 188247 - protein, 20 aa, Artificial Sequence
  Description of Artificial Sequence: Synthetic peptide
  Seed: GNEKKAKLANVVRKMMTNSQ
GNEFKAVLPNVHRKMMTNSQ

SEQ ID NO: 188248 - protein, 20 aa, Artificial Sequence
  Description of Artificial Sequence: Synthetic peptide
  Seed: GNEKKAKLANVVRKMMTNSQ
GNEFKAVLPNVIRKMMTNSQ

SEQ ID NO: 188249 - protein, 20 aa, Artificial Sequence
  Description of Artificial Sequence: Synthetic peptide
  Seed: GNEKKAKLANVVRKMMTNSQ
GNEFKAVLPNVLRKMMTNSQ

SEQ ID NO: 188250 - protein, 20 aa, Artificial Sequence
  Description of Artificial Sequence: Synthetic peptide
  Seed: GNEKKAKLANVVRKMMTNSQ
GNEFKAVLPNVMRKMMTNSQ

SEQ ID NO: 188251 - protein, 20 aa, Artificial Sequence
  Description of Artificial Sequence: Synthetic peptide
  Seed: GNEKKAKLANVVRKMMTNSQ
GNEFKAVLPNVNRKMMTNSQ

SEQ ID NO: 188252 - protein, 20 aa, Artificial Sequence
  Description of Artificial Sequence: Synthetic peptide
  Seed: GNEKKAKLANVVRKMMTNSQ
GNEFKAVLPNVPRKMMTNSQ

SEQ ID NO: 188253 - protein, 20 aa, Artificial Sequence
  Description of Artificial Sequence: Synthetic peptide
  Seed: GNEKKAKLANVVRKMMTNSQ
GNEFKAVLPNVQRKMMTNSQ

SEQ ID NO: 188254 - protein, 20 aa, Artificial Sequence
  Description of Artificial Sequence: Synthetic peptide
  Seed: GNEKKAKLANVVRKMMTNSQ
GNEFKAVLPNVSRKMMTNSQ

SEQ ID NO: 188255 - protein, 20 aa, Artificial Sequence
  Description of Artificial Sequence: Synthetic peptide
  Seed: GNEKKAKLANVVRKMMTNSQ
GNEFKAVLPNVTRKMMTNSQ

SEQ ID NO: 188256 - protein, 20 aa, Artificial Sequence
  Description of Artificial Sequence: Synthetic peptide
  Seed: GNEKKAKLANVVRKMMTNSQ
GNEFKAVLPNVVRKMMTNSQ

SEQ ID NO: 188257 - protein, 20 aa, Artificial Sequence
  Description of Artificial Sequence: Synthetic peptide
  Seed: GNEKKAKLANVVRKMMTNSQ
GNEFKAVLPNVWRKMMTNSQ

SEQ ID NO: 188258 - protein, 20 aa, Artificial Sequence
  Description of Artificial Sequence: Synthetic peptide
  Seed: GNEKKAKLANVVRKMMTNSQ
GNEFKAVLPNVYRKMMTNSQ

SEQ ID NO: 188259 - protein, 20 aa, Artificial Sequence
  Description of Artificial Sequence: Synthetic peptide
  Seed: GNEKKAKLANVVRKMMTNSQ
GNEFKAVLQNVARKMMTNSQ

SEQ ID NO: 188260 - protein, 20 aa, Artificial Sequence
  Description of Artificial Sequence: Synthetic peptide
  Seed: GNEKKAKLANVVRKMMTNSQ
GNEFKAVLQNVNRKMMTNSQ

SEQ ID NO: 188261 - protein, 20 aa, Artificial Sequence
  Description of Artificial Sequence: Synthetic peptide
  Seed: GNEKKAKLANVVRKMMTNSQ
GNEFKAVLQNVSRKMMTNSQ

SEQ ID NO: 188262 - protein, 20 aa, Artificial Sequence
  Description of Artificial Sequence: Synthetic peptide
  Seed: GNEKKAKLANVVRKMMTNSQ
GNEFKAVLSNVARKMMTNSQ

SEQ ID NO: 188263 - protein, 20 aa, Artificial Sequence
  Description of Artificial Sequence: Synthetic peptide
  Seed: GNEKKAKLANVVRKMMTNSQ
GNEFKAVLSNVCRKMMTNSQ

SEQ ID NO: 188264 - protein, 20 aa, Artificial Sequence
  Description of Artificial Sequence: Synthetic peptide
  Seed: GNEKKAKLANVVRKMMTNSQ
GNEFKAVLSNVDRKMMTNSQ

SEQ ID NO: 188265 - protein, 20 aa, Artificial Sequence
  Description of Artificial Sequence: Synthetic peptide
  Seed: GNEKKAKLANVVRKMMTNSQ
GNEFKAVLSNVERKMMTNSQ

SEQ ID NO: 188266 - protein, 20 aa, Artificial Sequence
  Description of Artificial Sequence: Synthetic peptide
  Seed: GNEKKAKLANVVRKMMTNSQ
GNEFKAVLSNVFRKMMTNSQ

SEQ ID NO: 188267 - protein, 20 aa, Artificial Sequence
  Description of Artificial Sequence: Synthetic peptide
  Seed: GNEKKAKLANVVRKMMTNSQ
GNEFKAVLSNVGRKMMTNSQ

SEQ ID NO: 188268 - protein, 20 aa, Artificial Sequence
  Description of Artificial Sequence: Synthetic peptide
  Seed: GNEKKAKLANVVRKMMTNSQ
GNEFKAVLSNVHRKMMTNSQ

SEQ ID NO: 188269 - protein, 20 aa, Artificial Sequence
  Description of Artificial Sequence: Synthetic peptide
  Seed: GNEKKAKLANVVRKMMTNSQ
GNEFKAVLSNVIRKMMTNSQ

SEQ ID NO: 188270 - protein, 20 aa, Artificial Sequence
  Description of Artificial Sequence: Synthetic peptide
  Seed: GNEKKAKLANVVRKMMTNSQ
GNEFKAVLSNVLRKMMTNSQ

SEQ ID NO: 188271 - protein, 20 aa, Artificial Sequence
  Description of Artificial Sequence: Synthetic peptide
  Seed: GNEKKAKLANVVRKMMTNSQ
GNEFKAVLSNVMRKMMTNSQ

SEQ ID NO: 188272 - protein, 20 aa, Artificial Sequence
  Description of Artificial Sequence: Synthetic peptide
  Seed: GNEKKAKLANVVRKMMTNSQ
GNEFKAVLSNVNRKMMTNSQ

SEQ ID NO: 188273 - protein, 20 aa, Artificial Sequence
  Description of Artificial Sequence: Synthetic peptide
  Seed: GNEKKAKLANVVRKMMTNSQ
GNEFKAVLSNVPRKMMTNSQ

SEQ ID NO: 188274 - protein, 20 aa, Artificial Sequence
  Description of Artificial Sequence: Synthetic peptide
  Seed: GNEKKAKLANVVRKMMTNSQ
GNEFKAVLSNVQRKMMTNSQ

SEQ ID NO: 188275 - protein, 20 aa, Artificial Sequence
  Description of Artificial Sequence: Synthetic peptide
  Seed: GNEKKAKLANVVRKMMTNSQ
GNEFKAVLSNVSRKMMTNSQ

SEQ ID NO: 188276 - protein, 20 aa, Artificial Sequence
  Description of Artificial Sequence: Synthetic peptide
  Seed: GNEKKAKLANVVRKMMTNSQ
GNEFKAVLSNVTRKMMTNSQ

SEQ ID NO: 188277 - protein, 20 aa, Artificial Sequence
  Description of Artificial Sequence: Synthetic peptide
  Seed: GNEKKAKLANVVRKMMTNSQ
GNEFKAVLSNVVRKMMTNSQ

SEQ ID NO: 188278 - protein, 20 aa, Artificial Sequence
  Description of Artificial Sequence: Synthetic peptide
  Seed: GNEKKAKLANVVRKMMTNSQ
GNEFKAVLSNVYRKMMTNSQ

SEQ ID NO: 188279 - protein, 20 aa, Artificial Sequence
  Description of Artificial Sequence: Synthetic peptide
  Seed: GNEKKAKLANVVRKMMTNSQ
GNEFKAVLTNVARKMMTNSQ

SEQ ID NO: 188280 - protein, 20 aa, Artificial Sequence
  Description of Artificial Sequence: Synthetic peptide
  Seed: GNEKKAKLANVVRKMMTNSQ
GNEFKAVLTNVCRKMMTNSQ

SEQ ID NO: 188281 - protein, 20 aa, Artificial Sequence
  Description of Artificial Sequence: Synthetic peptide
  Seed: GNEKKAKLANVVRKMMTNSQ
GNEFKAVLTNVDRKMMTNSQ

SEQ ID NO: 188282 - protein, 20 aa, Artificial Sequence
  Description of Artificial Sequence: Synthetic peptide
  Seed: GNEKKAKLANVVRKMMTNSQ
GNEFKAVLTNVERKMMTNSQ

SEQ ID NO: 188283 - protein, 20 aa, Artificial Sequence
  Description of Artificial Sequence: Synthetic peptide
  Seed: GNEKKAKLANVVRKMMTNSQ
GNEFKAVLTNVFRKMMTNSQ

SEQ ID NO: 188284 - protein, 20 aa, Artificial Sequence
  Description of Artificial Sequence: Synthetic peptide
  Seed: GNEKKAKLANVVRKMMTNSQ
GNEFKAVLTNVGRKMMTNSQ

SEQ ID NO: 188285 - protein, 20 aa, Artificial Sequence
  Description of Artificial Sequence: Synthetic peptide
  Seed: GNEKKAKLANVVRKMMTNSQ
GNEFKAVLTNVHRKMMTNSQ

SEQ ID NO: 188286 - protein, 20 aa, Artificial Sequence
  Description of Artificial Sequence: Synthetic peptide
  Seed: GNEKKAKLANVVRKMMTNSQ
GNEFKAVLTNVIRKMMTNSQ

SEQ ID NO: 188287 - protein, 20 aa, Artificial Sequence
  Description of Artificial Sequence: Synthetic peptide
  Seed: GNEKKAKLANVVRKMMTNSQ
GNEFKAVLTNVLRKMMTNSQ

SEQ ID NO: 188288 - protein, 20 aa, Artificial Sequence
  Description of Artificial Sequence: Synthetic peptide
  Seed: GNEKKAKLANVVRKMMTNSQ
GNEFKAVLTNVMRKMMTNSQ

SEQ ID NO: 188289 - protein, 20 aa, Artificial Sequence
  Description of Artificial Sequence: Synthetic peptide
  Seed: GNEKKAKLANVVRKMMTNSQ
GNEFKAVLTNVNRKMMTNSQ

SEQ ID NO: 188290 - protein, 20 aa, Artificial Sequence
  Description of Artificial Sequence: Synthetic peptide
  Seed: GNEKKAKLANVVRKMMTNSQ
GNEFKAVLTNVPRKMMTNSQ

SEQ ID NO: 188291 - protein, 20 aa, Artificial Sequence
  Description of Artificial Sequence: Synthetic peptide
  Seed: GNEKKAKLANVVRKMMTNSQ
GNEFKAVLTNVQRKMMTNSQ

SEQ ID NO: 188292 - protein, 20 aa, Artificial Sequence
  Description of Artificial Sequence: Synthetic peptide
  Seed: GNEKKAKLANVVRKMMTNSQ
GNEFKAVLTNVSRKMMTNSQ

SEQ ID NO: 188293 - protein, 20 aa, Artificial Sequence
  Description of Artificial Sequence: Synthetic peptide
  Seed: GNEKKAKLANVVRKMMTNSQ
GNEFKAVLTNVTRKMMTNSQ

SEQ ID NO: 188294 - protein, 20 aa, Artificial Sequence
  Description of Artificial Sequence: Synthetic peptide
  Seed: GNEKKAKLANVVRKMMTNSQ
GNEFKAVLTNVVRKMMTNSQ

SEQ ID NO: 188295 - protein, 20 aa, Artificial Sequence
  Description of Artificial Sequence: Synthetic peptide
  Seed: GNEKKAKLANVVRKMMTNSQ
GNEFKAVLTNVYRKMMTNSQ

SEQ ID NO: 188296 - protein, 20 aa, Artificial Sequence
  Description of Artificial Sequence: Synthetic peptide
  Seed: GNEKKAKLANVVRKMMTNSQ
GNEFKAVLVNVARKMMTNSQ

SEQ ID NO: 188297 - protein, 20 aa, Artificial Sequence
  Description of Artificial Sequence: Synthetic peptide
  Seed: GNEKKAKLANVVRKMMTNSQ
GNEFKAVLVNVDRKMMTNSQ

SEQ ID NO: 188298 - protein, 20 aa, Artificial Sequence
  Description of Artificial Sequence: Synthetic peptide
  Seed: GNEKKAKLANVVRKMMTNSQ
GNEFKAVLVNVERKMMTNSQ

SEQ ID NO: 188299 - protein, 20 aa, Artificial Sequence
  Description of Artificial Sequence: Synthetic peptide
  Seed: GNEKKAKLANVVRKMMTNSQ
GNEFKAVLVNVGRKMMTNSQ

SEQ ID NO: 188300 - protein, 20 aa, Artificial Sequence
  Description of Artificial Sequence: Synthetic peptide
  Seed: GNEKKAKLANVVRKMMTNSQ
GNEFKAVLVNVHRKMMTNSQ

SEQ ID NO: 188301 - protein, 20 aa, Artificial Sequence
  Description of Artificial Sequence: Synthetic peptide
  Seed: GNEKKAKLANVVRKMMTNSQ
GNEFKAVLVNVIRKMMTNSQ

SEQ ID NO: 188302 - protein, 20 aa, Artificial Sequence
  Description of Artificial Sequence: Synthetic peptide
  Seed: GNEKKAKLANVVRKMMTNSQ
GNEFKAVLVNVLRKMMTNSQ

SEQ ID NO: 188303 - protein, 20 aa, Artificial Sequence
  Description of Artificial Sequence: Synthetic peptide
  Seed: GNEKKAKLANVVRKMMTNSQ
GNEFKAVLVNVMRKMMTNSQ

SEQ ID NO: 188304 - protein, 20 aa, Artificial Sequence
  Description of Artificial Sequence: Synthetic peptide
  Seed: GNEKKAKLANVVRKMMTNSQ
GNEFKAVLVNVNRKMMTNSQ

SEQ ID NO: 188305 - protein, 20 aa, Artificial Sequence
  Description of Artificial Sequence: Synthetic peptide
  Seed: GNEKKAKLANVVRKMMTNSQ
GNEFKAVLVNVPRKMMTNSQ

SEQ ID NO: 188306 - protein, 20 aa, Artificial Sequence
  Description of Artificial Sequence: Synthetic peptide
  Seed: GNEKKAKLANVVRKMMTNSQ
GNEFKAVLVNVQRKMMTNSQ

SEQ ID NO: 188307 - protein, 20 aa, Artificial Sequence
  Description of Artificial Sequence: Synthetic peptide
  Seed: GNEKKAKLANVVRKMMTNSQ
GNEFKAVLVNVSRKMMTNSQ

SEQ ID NO: 188308 - protein, 20 aa, Artificial Sequence
  Description of Artificial Sequence: Synthetic peptide
  Seed: GNEKKAKLANVVRKMMTNSQ
GNEFKAVLVNVTRKMMTNSQ

SEQ ID NO: 188309 - protein, 20 aa, Artificial Sequence
  Description of Artificial Sequence: Synthetic peptide
  Seed: GNEKKAKLANVVRKMMTNSQ
GNEFKAVLVNVVRKMMTNSQ

SEQ ID NO: 188310 - protein, 20 aa, Artificial Sequence
  Description of Artificial Sequence: Synthetic peptide
  Seed: GNEKKAKLANVVRKMMTNSQ
GNEFKAVLVNVYRKMMTNSQ

SEQ ID NO: 188311 - protein, 20 aa, Artificial Sequence
  Description of Artificial Sequence: Synthetic peptide
  Seed: GNEKKAKLANVVRKMMTNSQ
GNEFKAVLWNVARKMMTNSQ

SEQ ID NO: 188312 - protein, 20 aa, Artificial Sequence
  Description of Artificial Sequence: Synthetic peptide
  Seed: GNEKKAKLANVVRKMMTNSQ
GNEFKAVLWNVDRKMMTNSQ

SEQ ID NO: 188313 - protein, 20 aa, Artificial Sequence
  Description of Artificial Sequence: Synthetic peptide
  Seed: GNEKKAKLANVVRKMMTNSQ
GNEFKAVLWNVERKMMTNSQ

SEQ ID NO: 188314 - protein, 20 aa, Artificial Sequence
  Description of Artificial Sequence: Synthetic peptide
  Seed: GNEKKAKLANVVRKMMTNSQ
GNEFKAVLWNVIRKMMTNSQ

SEQ ID NO: 188315 - protein, 20 aa, Artificial Sequence
  Description of Artificial Sequence: Synthetic peptide
  Seed: GNEKKAKLANVVRKMMTNSQ
GNEFKAVLWNVLRKMMTNSQ

SEQ ID NO: 188316 - protein, 20 aa, Artificial Sequence
  Description of Artificial Sequence: Synthetic peptide
  Seed: GNEKKAKLANVVRKMMTNSQ
GNEFKAVLWNVMRKMMTNSQ

SEQ ID NO: 188317 - protein, 20 aa, Artificial Sequence
  Description of Artificial Sequence: Synthetic peptide
  Seed: GNEKKAKLANVVRKMMTNSQ
GNEFKAVLWNVNRKMMTNSQ

SEQ ID NO: 188318 - protein, 20 aa, Artificial Sequence
  Description of Artificial Sequence: Synthetic peptide
  Seed: GNEKKAKLANVVRKMMTNSQ
GNEFKAVLWNVTRKMMTNSQ

SEQ ID NO: 188319 - protein, 20 aa, Artificial Sequence
  Description of Artificial Sequence: Synthetic peptide
  Seed: GNEKKAKLANVVRKMMTNSQ
GNEFKAVLWNVVRKMMTNSQ

SEQ ID NO: 188320 - protein, 20 aa, Artificial Sequence
  Description of Artificial Sequence: Synthetic peptide
  Seed: GNEKKAKLANVVRKMMTNSQ
GNEFKAVLWNVYRKMMTNSQ

SEQ ID NO: 188321 - protein, 20 aa, Artificial Sequence
  Description of Artificial Sequence: Synthetic peptide
  Seed: GNEKKAKLANVVRKMMTNSQ
GNEFKAVLYNVARKMMTNSQ

SEQ ID NO: 188322 - protein, 20 aa, Artificial Sequence
  Description of Artificial Sequence: Synthetic peptide
  Seed: GNEKKAKLANVVRKMMTNSQ
GNEFKAVLYNVDRKMMTNSQ

SEQ ID NO: 188323 - protein, 20 aa, Artificial Sequence
  Description of Artificial Sequence: Synthetic peptide
  Seed: GNEKKAKLANVVRKMMTNSQ
GNEFKAVLYNVERKMMTNSQ

SEQ ID NO: 188324 - protein, 20 aa, Artificial Sequence
  Description of Artificial Sequence: Synthetic peptide
  Seed: GNEKKAKLANVVRKMMTNSQ
GNEFKAVLYNVFRKMMTNSQ

SEQ ID NO: 188325 - protein, 20 aa, Artificial Sequence
  Description of Artificial Sequence: Synthetic peptide
  Seed: GNEKKAKLANVVRKMMTNSQ
GNEFKAVLYNVIRKMMTNSQ

SEQ ID NO: 188326 - protein, 20 aa, Artificial Sequence
  Description of Artificial Sequence: Synthetic peptide
  Seed: GNEKKAKLANVVRKMMTNSQ
GNEFKAVLYNVLRKMMTNSQ

SEQ ID NO: 188327 - protein, 20 aa, Artificial Sequence
  Description of Artificial Sequence: Synthetic peptide
  Seed: GNEKKAKLANVVRKMMTNSQ
GNEFKAVLYNVMRKMMTNSQ

SEQ ID NO: 188328 - protein, 20 aa, Artificial Sequence
  Description of Artificial Sequence: Synthetic peptide
  Seed: GNEKKAKLANVVRKMMTNSQ
GNEFKAVLYNVNRKMMTNSQ

SEQ ID NO: 188329 - protein, 20 aa, Artificial Sequence
  Description of Artificial Sequence: Synthetic peptide
  Seed: GNEKKAKLANVVRKMMTNSQ
GNEFKAVLYNVPRKMMTNSQ

SEQ ID NO: 188330 - protein, 20 aa, Artificial Sequence
  Description of Artificial Sequence: Synthetic peptide
  Seed: GNEKKAKLANVVRKMMTNSQ
GNEFKAVLYNVSRKMMTNSQ

SEQ ID NO: 188331 - protein, 20 aa, Artificial Sequence
  Description of Artificial Sequence: Synthetic peptide
  Seed: GNEKKAKLANVVRKMMTNSQ
GNEFKAVLYNVTRKMMTNSQ

SEQ ID NO: 188332 - protein, 20 aa, Artificial Sequence
  Description of Artificial Sequence: Synthetic peptide
  Seed: GNEKKAKLANVVRKMMTNSQ
GNEFKAVLYNVVRKMMTNSQ

SEQ ID NO: 188333 - protein, 20 aa, Artificial Sequence
  Description of Artificial Sequence: Synthetic peptide
  Seed: GNEKKAKLANVVRKMMTNSQ
GNEFKAVLYNVYRKMMTNSQ

SEQ ID NO: 188334 - protein, 20 aa, Artificial Sequence
  Description of Artificial Sequence: Synthetic peptide
  Seed: GNEKKAKLANVVRKMMTNSQ
GNEFKAWLANVARKMMTNSQ

SEQ ID NO: 188335 - protein, 20 aa, Artificial Sequence
  Description of Artificial Sequence: Synthetic peptide
  Seed: GNEKKAKLANVVRKMMTNSQ
GNEFKAWLANVFRKMMTNSQ

SEQ ID NO: 188336 - protein, 20 aa, Artificial Sequence
  Description of Artificial Sequence: Synthetic peptide
  Seed: GNEKKAKLANVVRKMMTNSQ
GNEFKAWLANVGRKMMTNSQ

SEQ ID NO: 188337 - protein, 20 aa, Artificial Sequence
  Description of Artificial Sequence: Synthetic peptide
  Seed: GNEKKAKLANVVRKMMTNSQ
GNEFKAWLANVHRKMMTNSQ

SEQ ID NO: 188338 - protein, 20 aa, Artificial Sequence
  Description of Artificial Sequence: Synthetic peptide
  Seed: GNEKKAKLANVVRKMMTNSQ
GNEFKAWLANVIRKMMTNSQ

SEQ ID NO: 188339 - protein, 20 aa, Artificial Sequence
  Description of Artificial Sequence: Synthetic peptide
  Seed: GNEKKAKLANVVRKMMTNSQ
GNEFKAWLANVLRKMMTNSQ

SEQ ID NO: 188340 - protein, 20 aa, Artificial Sequence
  Description of Artificial Sequence: Synthetic peptide
  Seed: GNEKKAKLANVVRKMMTNSQ
GNEFKAWLANVMRKMMTNSQ

SEQ ID NO: 188341 - protein, 20 aa, Artificial Sequence
  Description of Artificial Sequence: Synthetic peptide
  Seed: GNEKKAKLANVVRKMMTNSQ
GNEFKAWLANVNRKMMTNSQ

SEQ ID NO: 188342 - protein, 20 aa, Artificial Sequence
  Description of Artificial Sequence: Synthetic peptide
  Seed: GNEKKAKLANVVRKMMTNSQ
GNEFKAWLANVSRKMMTNSQ

SEQ ID NO: 188343 - protein, 20 aa, Artificial Sequence
  Description of Artificial Sequence: Synthetic peptide
  Seed: GNEKKAKLANVVRKMMTNSQ
GNEFKAWLANVTRKMMTNSQ

SEQ ID NO: 188344 - protein, 20 aa, Artificial Sequence
  Description of Artificial Sequence: Synthetic peptide
  Seed: GNEKKAKLANVVRKMMTNSQ
GNEFKAWLANVVRKMMTNSQ

SEQ ID NO: 188345 - protein, 20 aa, Artificial Sequence
  Description of Artificial Sequence: Synthetic peptide
  Seed: GNEKKAKLANVVRKMMTNSQ
GNEFKAWLFNVARKMMTNSQ

SEQ ID NO: 188346 - protein, 20 aa, Artificial Sequence
  Description of Artificial Sequence: Synthetic peptide
  Seed: GNEKKAKLANVVRKMMTNSQ
GNEFKAWLFNVDRKMMTNSQ

SEQ ID NO: 188347 - protein, 20 aa, Artificial Sequence
  Description of Artificial Sequence: Synthetic peptide
  Seed: GNEKKAKLANVVRKMMTNSQ
GNEFKAWLFNVERKMMTNSQ

SEQ ID NO: 188348 - protein, 20 aa, Artificial Sequence
  Description of Artificial Sequence: Synthetic peptide
  Seed: GNEKKAKLANVVRKMMTNSQ
GNEFKAWLFNVIRKMMTNSQ

SEQ ID NO: 188349 - protein, 20 aa, Artificial Sequence
  Description of Artificial Sequence: Synthetic peptide
  Seed: GNEKKAKLANVVRKMMTNSQ
GNEFKAWLFNVLRKMMTNSQ

SEQ ID NO: 188350 - protein, 20 aa, Artificial Sequence
  Description of Artificial Sequence: Synthetic peptide
  Seed: GNEKKAKLANVVRKMMTNSQ
GNEFKAWLFNVMRKMMTNSQ

SEQ ID NO: 188351 - protein, 20 aa, Artificial Sequence
  Description of Artificial Sequence: Synthetic peptide
  Seed: GNEKKAKLANVVRKMMTNSQ
GNEFKAWLFNVNRKMMTNSQ

SEQ ID NO: 188352 - protein, 20 aa, Artificial Sequence
  Description of Artificial Sequence: Synthetic peptide
  Seed: GNEKKAKLANVVRKMMTNSQ
GNEFKAWLFNVSRKMMTNSQ

SEQ ID NO: 188353 - protein, 20 aa, Artificial Sequence
  Description of Artificial Sequence: Synthetic peptide
  Seed: GNEKKAKLANVVRKMMTNSQ
GNEFKAWLFNVTRKMMTNSQ

SEQ ID NO: 188354 - protein, 20 aa, Artificial Sequence
  Description of Artificial Sequence: Synthetic peptide
  Seed: GNEKKAKLANVVRKMMTNSQ
GNEFKAWLFNVVRKMMTNSQ

SEQ ID NO: 188355 - protein, 20 aa, Artificial Sequence
  Description of Artificial Sequence: Synthetic peptide
  Seed: GNEKKAKLANVVRKMMTNSQ
GNEFKAWLFNVYRKMMTNSQ

SEQ ID NO: 188356 - protein, 20 aa, Artificial Sequence
  Description of Artificial Sequence: Synthetic peptide
  Seed: GNEKKAKLANVVRKMMTNSQ
GNEFKAWLGNVARKMMTNSQ

SEQ ID NO: 188357 - protein, 20 aa, Artificial Sequence
  Description of Artificial Sequence: Synthetic peptide
  Seed: GNEKKAKLANVVRKMMTNSQ
GNEFKAWLGNVIRKMMTNSQ

SEQ ID NO: 188358 - protein, 20 aa, Artificial Sequence
  Description of Artificial Sequence: Synthetic peptide
  Seed: GNEKKAKLANVVRKMMTNSQ
GNEFKAWLGNVLRKMMTNSQ

SEQ ID NO: 188359 - protein, 20 aa, Artificial Sequence
  Description of Artificial Sequence: Synthetic peptide
  Seed: GNEKKAKLANVVRKMMTNSQ
GNEFKAWLGNVVRKMMTNSQ

SEQ ID NO: 188360 - protein, 20 aa, Artificial Sequence
  Description of Artificial Sequence: Synthetic peptide
  Seed: GNEKKAKLANVVRKMMTNSQ
GNEFKAWLINVARKMMTNSQ

SEQ ID NO: 188361 - protein, 20 aa, Artificial Sequence
  Description of Artificial Sequence: Synthetic peptide
  Seed: GNEKKAKLANVVRKMMTNSQ
GNEFKAWLINVIRKMMTNSQ

SEQ ID NO: 188362 - protein, 20 aa, Artificial Sequence
  Description of Artificial Sequence: Synthetic peptide
  Seed: GNEKKAKLANVVRKMMTNSQ
GNEFKAWLINVLRKMMTNSQ

SEQ ID NO: 188363 - protein, 20 aa, Artificial Sequence
  Description of Artificial Sequence: Synthetic peptide
  Seed: GNEKKAKLANVVRKMMTNSQ
GNEFKAWLINVMRKMMTNSQ

SEQ ID NO: 188364 - protein, 20 aa, Artificial Sequence
  Description of Artificial Sequence: Synthetic peptide
  Seed: GNEKKAKLANVVRKMMTNSQ
GNEFKAWLINVNRKMMTNSQ

SEQ ID NO: 188365 - protein, 20 aa, Artificial Sequence
  Description of Artificial Sequence: Synthetic peptide
  Seed: GNEKKAKLANVVRKMMTNSQ
GNEFKAWLINVSRKMMTNSQ

SEQ ID NO: 188366 - protein, 20 aa, Artificial Sequence
  Description of Artificial Sequence: Synthetic peptide
  Seed: GNEKKAKLANVVRKMMTNSQ
GNEFKAWLINVVRKMMTNSQ

SEQ ID NO: 188367 - protein, 20 aa, Artificial Sequence
  Description of Artificial Sequence: Synthetic peptide
  Seed: GNEKKAKLANVVRKMMTNSQ
GNEFKAWLINVYRKMMTNSQ

SEQ ID NO: 188368 - protein, 20 aa, Artificial Sequence
  Description of Artificial Sequence: Synthetic peptide
  Seed: GNEKKAKLANVVRKMMTNSQ
GNEFKAWLLNVIRKMMTNSQ

SEQ ID NO: 188369 - protein, 20 aa, Artificial Sequence
  Description of Artificial Sequence: Synthetic peptide
  Seed: GNEKKAKLANVVRKMMTNSQ
GNEFKAWLLNVLRKMMTNSQ

SEQ ID NO: 188370 - protein, 20 aa, Artificial Sequence
  Description of Artificial Sequence: Synthetic peptide
  Seed: GNEKKAKLANVVRKMMTNSQ
GNEFKAWLLNVMRKMMTNSQ

SEQ ID NO: 188371 - protein, 20 aa, Artificial Sequence
  Description of Artificial Sequence: Synthetic peptide
  Seed: GNEKKAKLANVVRKMMTNSQ
GNEFKAWLLNVVRKMMTNSQ

SEQ ID NO: 188372 - protein, 20 aa, Artificial Sequence
  Description of Artificial Sequence: Synthetic peptide
  Seed: GNEKKAKLANVVRKMMTNSQ
GNEFKAWLLNVYRKMMTNSQ

SEQ ID NO: 188373 - protein, 20 aa, Artificial Sequence
  Description of Artificial Sequence: Synthetic peptide
  Seed: GNEKKAKLANVVRKMMTNSQ
GNEFKAWLMNVIRKMMTNSQ

SEQ ID NO: 188374 - protein, 20 aa, Artificial Sequence
  Description of Artificial Sequence: Synthetic peptide
  Seed: GNEKKAKLANVVRKMMTNSQ
GNEFKAWLMNVLRKMMTNSQ

SEQ ID NO: 188375 - protein, 20 aa, Artificial Sequence
  Description of Artificial Sequence: Synthetic peptide
  Seed: GNEKKAKLANVVRKMMTNSQ
GNEFKAWLMNVMRKMMTNSQ

SEQ ID NO: 188376 - protein, 20 aa, Artificial Sequence
  Description of Artificial Sequence: Synthetic peptide
  Seed: GNEKKAKLANVVRKMMTNSQ
GNEFKAWLMNVVRKMMTNSQ

SEQ ID NO: 188377 - protein, 20 aa, Artificial Sequence
  Description of Artificial Sequence: Synthetic peptide
  Seed: GNEKKAKLANVVRKMMTNSQ
GNEFKAWLMNVYRKMMTNSQ

SEQ ID NO: 188378 - protein, 20 aa, Artificial Sequence
  Description of Artificial Sequence: Synthetic peptide
  Seed: GNEKKAKLANVVRKMMTNSQ
GNEFKAWLNNVARKMMTNSQ

SEQ ID NO: 188379 - protein, 20 aa, Artificial Sequence
  Description of Artificial Sequence: Synthetic peptide
  Seed: GNEKKAKLANVVRKMMTNSQ
GNEFKAWLPNVARKMMTNSQ

SEQ ID NO: 188380 - protein, 20 aa, Artificial Sequence
  Description of Artificial Sequence: Synthetic peptide
  Seed: GNEKKAKLANVVRKMMTNSQ
GNEFKAWLPNVIRKMMTNSQ

SEQ ID NO: 188381 - protein, 20 aa, Artificial Sequence
  Description of Artificial Sequence: Synthetic peptide
  Seed: GNEKKAKLANVVRKMMTNSQ
GNEFKAWLPNVLRKMMTNSQ

SEQ ID NO: 188382 - protein, 20 aa, Artificial Sequence
  Description of Artificial Sequence: Synthetic peptide
  Seed: GNEKKAKLANVVRKMMTNSQ
GNEFKAWLPNVMRKMMTNSQ

SEQ ID NO: 188383 - protein, 20 aa, Artificial Sequence
  Description of Artificial Sequence: Synthetic peptide
  Seed: GNEKKAKLANVVRKMMTNSQ
GNEFKAWLPNVNRKMMTNSQ

SEQ ID NO: 188384 - protein, 20 aa, Artificial Sequence
  Description of Artificial Sequence: Synthetic peptide
  Seed: GNEKKAKLANVVRKMMTNSQ
GNEFKAWLPNVSRKMMTNSQ

SEQ ID NO: 188385 - protein, 20 aa, Artificial Sequence
  Description of Artificial Sequence: Synthetic peptide
  Seed: GNEKKAKLANVVRKMMTNSQ
GNEFKAWLPNVTRKMMTNSQ

SEQ ID NO: 188386 - protein, 20 aa, Artificial Sequence
  Description of Artificial Sequence: Synthetic peptide
  Seed: GNEKKAKLANVVRKMMTNSQ
GNEFKAWLPNVVRKMMTNSQ

SEQ ID NO: 188387 - protein, 20 aa, Artificial Sequence
  Description of Artificial Sequence: Synthetic peptide
  Seed: GNEKKAKLANVVRKMMTNSQ
GNEFKAWLSNVARKMMTNSQ

SEQ ID NO: 188388 - protein, 20 aa, Artificial Sequence
  Description of Artificial Sequence: Synthetic peptide
  Seed: GNEKKAKLANVVRKMMTNSQ
GNEFKAWLSNVIRKMMTNSQ

SEQ ID NO: 188389 - protein, 20 aa, Artificial Sequence
  Description of Artificial Sequence: Synthetic peptide
  Seed: GNEKKAKLANVVRKMMTNSQ
GNEFKAWLSNVLRKMMTNSQ

SEQ ID NO: 188390 - protein, 20 aa, Artificial Sequence
  Description of Artificial Sequence: Synthetic peptide
  Seed: GNEKKAKLANVVRKMMTNSQ
GNEFKAWLSNVNRKMMTNSQ

SEQ ID NO: 188391 - protein, 20 aa, Artificial Sequence
  Description of Artificial Sequence: Synthetic peptide
  Seed: GNEKKAKLANVVRKMMTNSQ
GNEFKAWLSNVSRKMMTNSQ

SEQ ID NO: 188392 - protein, 20 aa, Artificial Sequence
  Description of Artificial Sequence: Synthetic peptide
  Seed: GNEKKAKLANVVRKMMTNSQ
GNEFKAWLSNVVRKMMTNSQ

SEQ ID NO: 188393 - protein, 20 aa, Artificial Sequence
  Description of Artificial Sequence: Synthetic peptide
  Seed: GNEKKAKLANVVRKMMTNSQ
GNEFKAWLTNVARKMMTNSQ

SEQ ID NO: 188394 - protein, 20 aa, Artificial Sequence
  Description of Artificial Sequence: Synthetic peptide
  Seed: GNEKKAKLANVVRKMMTNSQ
GNEFKAWLTNVIRKMMTNSQ

SEQ ID NO: 188395 - protein, 20 aa, Artificial Sequence
  Description of Artificial Sequence: Synthetic peptide
  Seed: GNEKKAKLANVVRKMMTNSQ
GNEFKAWLTNVMRKMMTNSQ

SEQ ID NO: 188396 - protein, 20 aa, Artificial Sequence
  Description of Artificial Sequence: Synthetic peptide
  Seed: GNEKKAKLANVVRKMMTNSQ
GNEFKAWLTNVNRKMMTNSQ

SEQ ID NO: 188397 - protein, 20 aa, Artificial Sequence
  Description of Artificial Sequence: Synthetic peptide
  Seed: GNEKKAKLANVVRKMMTNSQ
GNEFKAWLTNVSRKMMTNSQ

SEQ ID NO: 188398 - protein, 20 aa, Artificial Sequence
  Description of Artificial Sequence: Synthetic peptide
  Seed: GNEKKAKLANVVRKMMTNSQ
GNEFKAWLTNVTRKMMTNSQ

SEQ ID NO: 188399 - protein, 20 aa, Artificial Sequence
  Description of Artificial Sequence: Synthetic peptide
  Seed: GNEKKAKLANVVRKMMTNSQ
GNEFKAWLTNVVRKMMTNSQ

SEQ ID NO: 188400 - protein, 20 aa, Artificial Sequence
  Description of Artificial Sequence: Synthetic peptide
  Seed: GNEKKAKLANVVRKMMTNSQ
GNEFKAWLVNVARKMMTNSQ

SEQ ID NO: 188401 - protein, 20 aa, Artificial Sequence
  Description of Artificial Sequence: Synthetic peptide
  Seed: GNEKKAKLANVVRKMMTNSQ
GNEFKAWLVNVIRKMMTNSQ

SEQ ID NO: 188402 - protein, 20 aa, Artificial Sequence
  Description of Artificial Sequence: Synthetic peptide
  Seed: GNEKKAKLANVVRKMMTNSQ
GNEFKAWLVNVLRKMMTNSQ

SEQ ID NO: 188403 - protein, 20 aa, Artificial Sequence
  Description of Artificial Sequence: Synthetic peptide
  Seed: GNEKKAKLANVVRKMMTNSQ
GNEFKAWLVNVNRKMMTNSQ

SEQ ID NO: 188404 - protein, 20 aa, Artificial Sequence
  Description of Artificial Sequence: Synthetic peptide
  Seed: GNEKKAKLANVVRKMMTNSQ
GNEFKAWLVNVSRKMMTNSQ

SEQ ID NO: 188405 - protein, 20 aa, Artificial Sequence
  Description of Artificial Sequence: Synthetic peptide
  Seed: GNEKKAKLANVVRKMMTNSQ
GNEFKAWLVNVTRKMMTNSQ

SEQ ID NO: 188406 - protein, 20 aa, Artificial Sequence
  Description of Artificial Sequence: Synthetic peptide
  Seed: GNEKKAKLANVVRKMMTNSQ
GNEFKAWLVNVVRKMMTNSQ

SEQ ID NO: 188407 - protein, 20 aa, Artificial Sequence
  Description of Artificial Sequence: Synthetic peptide
  Seed: GNEKKAKLANVVRKMMTNSQ
GNEFKAWLWNVIRKMMTNSQ

SEQ ID NO: 188408 - protein, 20 aa, Artificial Sequence
  Description of Artificial Sequence: Synthetic peptide
  Seed: GNEKKAKLANVVRKMMTNSQ
GNEFKAWLWNVLRKMMTNSQ

SEQ ID NO: 188409 - protein, 20 aa, Artificial Sequence
  Description of Artificial Sequence: Synthetic peptide
  Seed: GNEKKAKLANVVRKMMTNSQ
GNEFKAWLWNVMRKMMTNSQ

SEQ ID NO: 188410 - protein, 20 aa, Artificial Sequence
  Description of Artificial Sequence: Synthetic peptide
  Seed: GNEKKAKLANVVRKMMTNSQ
GNEFKAWLWNVVRKMMTNSQ

SEQ ID NO: 188411 - protein, 20 aa, Artificial Sequence
  Description of Artificial Sequence: Synthetic peptide
  Seed: GNEKKAKLANVVRKMMTNSQ
GNEFKAWLYNVARKMMTNSQ

SEQ ID NO: 188412 - protein, 20 aa, Artificial Sequence
  Description of Artificial Sequence: Synthetic peptide
  Seed: GNEKKAKLANVVRKMMTNSQ
GNEFKAWLYNVIRKMMTNSQ

SEQ ID NO: 188413 - protein, 20 aa, Artificial Sequence
  Description of Artificial Sequence: Synthetic peptide
  Seed: GNEKKAKLANVVRKMMTNSQ
GNEFKAWLYNVLRKMMTNSQ

SEQ ID NO: 188414 - protein, 20 aa, Artificial Sequence
  Description of Artificial Sequence: Synthetic peptide
  Seed: GNEKKAKLANVVRKMMTNSQ
GNEFKAWLYNVMRKMMTNSQ

SEQ ID NO: 188415 - protein, 20 aa, Artificial Sequence
  Description of Artificial Sequence: Synthetic peptide
  Seed: GNEKKAKLANVVRKMMTNSQ
GNEFKAWLYNVVRKMMTNSQ

SEQ ID NO: 188416 - protein, 20 aa, Artificial Sequence
  Description of Artificial Sequence: Synthetic peptide
  Seed: GNEKKAKLANVVRKMMTNSQ
GNEFKAYLANVARKMMTNSQ

SEQ ID NO: 188417 - protein, 20 aa, Artificial Sequence
  Description of Artificial Sequence: Synthetic peptide
  Seed: GNEKKAKLANVVRKMMTNSQ
GNEFKAYLANVGRKMMTNSQ

SEQ ID NO: 188418 - protein, 20 aa, Artificial Sequence
  Description of Artificial Sequence: Synthetic peptide
  Seed: GNEKKAKLANVVRKMMTNSQ
GNEFKAYLANVIRKMMTNSQ

SEQ ID NO: 188419 - protein, 20 aa, Artificial Sequence
  Description of Artificial Sequence: Synthetic peptide
  Seed: GNEKKAKLANVVRKMMTNSQ
GNEFKAYLANVLRKMMTNSQ

SEQ ID NO: 188420 - protein, 20 aa, Artificial Sequence
  Description of Artificial Sequence: Synthetic peptide
  Seed: GNEKKAKLANVVRKMMTNSQ
GNEFKAYLANVMRKMMTNSQ

SEQ ID NO: 188421 - protein, 20 aa, Artificial Sequence
  Description of Artificial Sequence: Synthetic peptide
  Seed: GNEKKAKLANVVRKMMTNSQ
GNEFKAYLANVNRKMMTNSQ

SEQ ID NO: 188422 - protein, 20 aa, Artificial Sequence
  Description of Artificial Sequence: Synthetic peptide
  Seed: GNEKKAKLANVVRKMMTNSQ
GNEFKAYLANVSRKMMTNSQ

SEQ ID NO: 188423 - protein, 20 aa, Artificial Sequence
  Description of Artificial Sequence: Synthetic peptide
  Seed: GNEKKAKLANVVRKMMTNSQ
GNEFKAYLANVVRKMMTNSQ

SEQ ID NO: 188424 - protein, 20 aa, Artificial Sequence
  Description of Artificial Sequence: Synthetic peptide
  Seed: GNEKKAKLANVVRKMMTNSQ
GNEFKAYLFNVARKMMTNSQ

SEQ ID NO: 188425 - protein, 20 aa, Artificial Sequence
  Description of Artificial Sequence: Synthetic peptide
  Seed: GNEKKAKLANVVRKMMTNSQ
GNEFKAYLFNVDRKMMTNSQ

SEQ ID NO: 188426 - protein, 20 aa, Artificial Sequence
  Description of Artificial Sequence: Synthetic peptide
  Seed: GNEKKAKLANVVRKMMTNSQ
GNEFKAYLFNVERKMMTNSQ

SEQ ID NO: 188427 - protein, 20 aa, Artificial Sequence
  Description of Artificial Sequence: Synthetic peptide
  Seed: GNEKKAKLANVVRKMMTNSQ
GNEFKAYLFNVHRKMMTNSQ

SEQ ID NO: 188428 - protein, 20 aa, Artificial Sequence
  Description of Artificial Sequence: Synthetic peptide
  Seed: GNEKKAKLANVVRKMMTNSQ
GNEFKAYLFNVIRKMMTNSQ

SEQ ID NO: 188429 - protein, 20 aa, Artificial Sequence
  Description of Artificial Sequence: Synthetic peptide
  Seed: GNEKKAKLANVVRKMMTNSQ
GNEFKAYLFNVLRKMMTNSQ

SEQ ID NO: 188430 - protein, 20 aa, Artificial Sequence
  Description of Artificial Sequence: Synthetic peptide
  Seed: GNEKKAKLANVVRKMMTNSQ
GNEFKAYLFNVMRKMMTNSQ

SEQ ID NO: 188431 - protein, 20 aa, Artificial Sequence
  Description of Artificial Sequence: Synthetic peptide
  Seed: GNEKKAKLANVVRKMMTNSQ
GNEFKAYLFNVNRKMMTNSQ

SEQ ID NO: 188432 - protein, 20 aa, Artificial Sequence
  Description of Artificial Sequence: Synthetic peptide
  Seed: GNEKKAKLANVVRKMMTNSQ
GNEFKAYLFNVPRKMMTNSQ

SEQ ID NO: 188433 - protein, 20 aa, Artificial Sequence
  Description of Artificial Sequence: Synthetic peptide
  Seed: GNEKKAKLANVVRKMMTNSQ
GNEFKAYLFNVSRKMMTNSQ

SEQ ID NO: 188434 - protein, 20 aa, Artificial Sequence
  Description of Artificial Sequence: Synthetic peptide
  Seed: GNEKKAKLANVVRKMMTNSQ
GNEFKAYLFNVTRKMMTNSQ

SEQ ID NO: 188435 - protein, 20 aa, Artificial Sequence
  Description of Artificial Sequence: Synthetic peptide
  Seed: GNEKKAKLANVVRKMMTNSQ
GNEFKAYLFNVVRKMMTNSQ

SEQ ID NO: 188436 - protein, 20 aa, Artificial Sequence
  Description of Artificial Sequence: Synthetic peptide
  Seed: GNEKKAKLANVVRKMMTNSQ
GNEFKAYLFNVYRKMMTNSQ

SEQ ID NO: 188437 - protein, 20 aa, Artificial Sequence
  Description of Artificial Sequence: Synthetic peptide
  Seed: GNEKKAKLANVVRKMMTNSQ
GNEFKAYLGNVARKMMTNSQ

SEQ ID NO: 188438 - protein, 20 aa, Artificial Sequence
  Description of Artificial Sequence: Synthetic peptide
  Seed: GNEKKAKLANVVRKMMTNSQ
GNEFKAYLGNVIRKMMTNSQ

SEQ ID NO: 188439 - protein, 20 aa, Artificial Sequence
  Description of Artificial Sequence: Synthetic peptide
  Seed: GNEKKAKLANVVRKMMTNSQ
GNEFKAYLGNVSRKMMTNSQ

SEQ ID NO: 188440 - protein, 20 aa, Artificial Sequence
  Description of Artificial Sequence: Synthetic peptide
  Seed: GNEKKAKLANVVRKMMTNSQ
GNEFKAYLGNVVRKMMTNSQ

SEQ ID NO: 188441 - protein, 20 aa, Artificial Sequence
  Description of Artificial Sequence: Synthetic peptide
  Seed: GNEKKAKLANVVRKMMTNSQ
GNEFKAYLINVIRKMMTNSQ

SEQ ID NO: 188442 - protein, 20 aa, Artificial Sequence
  Description of Artificial Sequence: Synthetic peptide
  Seed: GNEKKAKLANVVRKMMTNSQ
GNEFKAYLINVLRKMMTNSQ

SEQ ID NO: 188443 - protein, 20 aa, Artificial Sequence
  Description of Artificial Sequence: Synthetic peptide
  Seed: GNEKKAKLANVVRKMMTNSQ
GNEFKAYLINVMRKMMTNSQ

SEQ ID NO: 188444 - protein, 20 aa, Artificial Sequence
  Description of Artificial Sequence: Synthetic peptide
  Seed: GNEKKAKLANVVRKMMTNSQ
GNEFKAYLINVVRKMMTNSQ

SEQ ID NO: 188445 - protein, 20 aa, Artificial Sequence
  Description of Artificial Sequence: Synthetic peptide
  Seed: GNEKKAKLANVVRKMMTNSQ
GNEFKAYLLNVARKMMTNSQ

SEQ ID NO: 188446 - protein, 20 aa, Artificial Sequence
  Description of Artificial Sequence: Synthetic peptide
  Seed: GNEKKAKLANVVRKMMTNSQ
GNEFKAYLLNVIRKMMTNSQ

SEQ ID NO: 188447 - protein, 20 aa, Artificial Sequence
  Description of Artificial Sequence: Synthetic peptide
  Seed: GNEKKAKLANVVRKMMTNSQ
GNEFKAYLLNVLRKMMTNSQ

SEQ ID NO: 188448 - protein, 20 aa, Artificial Sequence
  Description of Artificial Sequence: Synthetic peptide
  Seed: GNEKKAKLANVVRKMMTNSQ
GNEFKAYLLNVMRKMMTNSQ

SEQ ID NO: 188449 - protein, 20 aa, Artificial Sequence
  Description of Artificial Sequence: Synthetic peptide
  Seed: GNEKKAKLANVVRKMMTNSQ
GNEFKAYLLNVVRKMMTNSQ

SEQ ID NO: 188450 - protein, 20 aa, Artificial Sequence
  Description of Artificial Sequence: Synthetic peptide
  Seed: GNEKKAKLANVVRKMMTNSQ
GNEFKAYLLNVYRKMMTNSQ

SEQ ID NO: 188451 - protein, 20 aa, Artificial Sequence
  Description of Artificial Sequence: Synthetic peptide
  Seed: GNEKKAKLANVVRKMMTNSQ
GNEFKAYLMNVIRKMMTNSQ

SEQ ID NO: 188452 - protein, 20 aa, Artificial Sequence
  Description of Artificial Sequence: Synthetic peptide
  Seed: GNEKKAKLANVVRKMMTNSQ
GNEFKAYLMNVLRKMMTNSQ

SEQ ID NO: 188453 - protein, 20 aa, Artificial Sequence
  Description of Artificial Sequence: Synthetic peptide
  Seed: GNEKKAKLANVVRKMMTNSQ
GNEFKAYLMNVMRKMMTNSQ

SEQ ID NO: 188454 - protein, 20 aa, Artificial Sequence
  Description of Artificial Sequence: Synthetic peptide
  Seed: GNEKKAKLANVVRKMMTNSQ
GNEFKAYLMNVVRKMMTNSQ

SEQ ID NO: 188455 - protein, 20 aa, Artificial Sequence
  Description of Artificial Sequence: Synthetic peptide
  Seed: GNEKKAKLANVVRKMMTNSQ
GNEFKAYLPNVARKMMTNSQ

SEQ ID NO: 188456 - protein, 20 aa, Artificial Sequence
  Description of Artificial Sequence: Synthetic peptide
  Seed: GNEKKAKLANVVRKMMTNSQ
GNEFKAYLPNVNRKMMTNSQ

SEQ ID NO: 188457 - protein, 20 aa, Artificial Sequence
  Description of Artificial Sequence: Synthetic peptide
  Seed: GNEKKAKLANVVRKMMTNSQ
GNEFKAYLPNVSRKMMTNSQ

SEQ ID NO: 188458 - protein, 20 aa, Artificial Sequence
  Description of Artificial Sequence: Synthetic peptide
  Seed: GNEKKAKLANVVRKMMTNSQ
GNEFKAYLPNVVRKMMTNSQ

SEQ ID NO: 188459 - protein, 20 aa, Artificial Sequence
  Description of Artificial Sequence: Synthetic peptide
  Seed: GNEKKAKLANVVRKMMTNSQ
GNEFKAYLSNVARKMMTNSQ

SEQ ID NO: 188460 - protein, 20 aa, Artificial Sequence
  Description of Artificial Sequence: Synthetic peptide
  Seed: GNEKKAKLANVVRKMMTNSQ
GNEFKAYLSNVIRKMMTNSQ

SEQ ID NO: 188461 - protein, 20 aa, Artificial Sequence
  Description of Artificial Sequence: Synthetic peptide
  Seed: GNEKKAKLANVVRKMMTNSQ
GNEFKAYLSNVLRKMMTNSQ

SEQ ID NO: 188462 - protein, 20 aa, Artificial Sequence
  Description of Artificial Sequence: Synthetic peptide
  Seed: GNEKKAKLANVVRKMMTNSQ
GNEFKAYLSNVSRKMMTNSQ

SEQ ID NO: 188463 - protein, 20 aa, Artificial Sequence
  Description of Artificial Sequence: Synthetic peptide
  Seed: GNEKKAKLANVVRKMMTNSQ
GNEFKAYLSNVVRKMMTNSQ

SEQ ID NO: 188464 - protein, 20 aa, Artificial Sequence
  Description of Artificial Sequence: Synthetic peptide
  Seed: GNEKKAKLANVVRKMMTNSQ
GNEFKAYLTNVARKMMTNSQ

SEQ ID NO: 188465 - protein, 20 aa, Artificial Sequence
  Description of Artificial Sequence: Synthetic peptide
  Seed: GNEKKAKLANVVRKMMTNSQ
GNEFKAYLTNVNRKMMTNSQ

SEQ ID NO: 188466 - protein, 20 aa, Artificial Sequence
  Description of Artificial Sequence: Synthetic peptide
  Seed: GNEKKAKLANVVRKMMTNSQ
GNEFKAYLTNVSRKMMTNSQ

SEQ ID NO: 188467 - protein, 20 aa, Artificial Sequence
  Description of Artificial Sequence: Synthetic peptide
  Seed: GNEKKAKLANVVRKMMTNSQ
GNEFKAYLTNVVRKMMTNSQ

SEQ ID NO: 188468 - protein, 20 aa, Artificial Sequence
  Description of Artificial Sequence: Synthetic peptide
  Seed: GNEKKAKLANVVRKMMTNSQ
GNEFKAYLVNVIRKMMTNSQ

SEQ ID NO: 188469 - protein, 20 aa, Artificial Sequence
  Description of Artificial Sequence: Synthetic peptide
  Seed: GNEKKAKLANVVRKMMTNSQ
GNEFKAYLVNVLRKMMTNSQ

SEQ ID NO: 188470 - protein, 20 aa, Artificial Sequence
  Description of Artificial Sequence: Synthetic peptide
  Seed: GNEKKAKLANVVRKMMTNSQ
GNEFKAYLVNVNRKMMTNSQ

SEQ ID NO: 188471 - protein, 20 aa, Artificial Sequence
  Description of Artificial Sequence: Synthetic peptide
  Seed: GNEKKAKLANVVRKMMTNSQ
GNEFKAYLVNVSRKMMTNSQ

SEQ ID NO: 188472 - protein, 20 aa, Artificial Sequence
  Description of Artificial Sequence: Synthetic peptide
  Seed: GNEKKAKLANVVRKMMTNSQ
GNEFKAYLVNVVRKMMTNSQ

SEQ ID NO: 188473 - protein, 20 aa, Artificial Sequence
  Description of Artificial Sequence: Synthetic peptide
  Seed: GNEKKAKLANVVRKMMTNSQ
GNEFKAYLWNVIRKMMTNSQ

SEQ ID NO: 188474 - protein, 20 aa, Artificial Sequence
  Description of Artificial Sequence: Synthetic peptide
  Seed: GNEKKAKLANVVRKMMTNSQ
GNEFKAYLWNVLRKMMTNSQ

SEQ ID NO: 188475 - protein, 20 aa, Artificial Sequence
  Description of Artificial Sequence: Synthetic peptide
  Seed: GNEKKAKLANVVRKMMTNSQ
GNEFKAYLWNVMRKMMTNSQ

SEQ ID NO: 188476 - protein, 20 aa, Artificial Sequence
  Description of Artificial Sequence: Synthetic peptide
  Seed: GNEKKAKLANVVRKMMTNSQ
GNEFKAYLWNVVRKMMTNSQ

SEQ ID NO: 188477 - protein, 20 aa, Artificial Sequence
  Description of Artificial Sequence: Synthetic peptide
  Seed: GNEKKAKLANVVRKMMTNSQ
GNEFKAYLYNVARKMMTNSQ

SEQ ID NO: 188478 - protein, 20 aa, Artificial Sequence
  Description of Artificial Sequence: Synthetic peptide
  Seed: GNEKKAKLANVVRKMMTNSQ
GNEFKAYLYNVIRKMMTNSQ

SEQ ID NO: 188479 - protein, 20 aa, Artificial Sequence
  Description of Artificial Sequence: Synthetic peptide
  Seed: GNEKKAKLANVVRKMMTNSQ
GNEFKAYLYNVLRKMMTNSQ

SEQ ID NO: 188480 - protein, 20 aa, Artificial Sequence
  Description of Artificial Sequence: Synthetic peptide
  Seed: GNEKKAKLANVVRKMMTNSQ
GNEFKAYLYNVMRKMMTNSQ

SEQ ID NO: 188481 - protein, 20 aa, Artificial Sequence
  Description of Artificial Sequence: Synthetic peptide
  Seed: GNEKKAKLANVVRKMMTNSQ
GNEFKAYLYNVTRKMMTNSQ

SEQ ID NO: 188482 - protein, 20 aa, Artificial Sequence
  Description of Artificial Sequence: Synthetic peptide
  Seed: GNEKKAKLANVVRKMMTNSQ
GNEFKAYLYNVVRKMMTNSQ

SEQ ID NO: 188483 - protein, 20 aa, Artificial Sequence
  Description of Artificial Sequence: Synthetic peptide
  Seed: GNEKKAKLANVVRKMMTNSQ
GNEHKAILFNVIRKMMTNSQ

SEQ ID NO: 188484 - protein, 20 aa, Artificial Sequence
  Description of Artificial Sequence: Synthetic peptide
  Seed: GNEKKAKLANVVRKMMTNSQ
GNEHKAILFNVVRKMMTNSQ

SEQ ID NO: 188485 - protein, 20 aa, Artificial Sequence
  Description of Artificial Sequence: Synthetic peptide
  Seed: GNEKKAKLANVVRKMMTNSQ
GNEHKALLANVARKMMTNSQ

SEQ ID NO: 188486 - protein, 20 aa, Artificial Sequence
  Description of Artificial Sequence: Synthetic peptide
  Seed: GNEKKAKLANVVRKMMTNSQ
GNEHKALLANVIRKMMTNSQ

SEQ ID NO: 188487 - protein, 20 aa, Artificial Sequence
  Description of Artificial Sequence: Synthetic peptide
  Seed: GNEKKAKLANVVRKMMTNSQ
GNEHKALLANVVRKMMTNSQ

SEQ ID NO: 188488 - protein, 20 aa, Artificial Sequence
  Description of Artificial Sequence: Synthetic peptide
  Seed: GNEKKAKLANVVRKMMTNSQ
GNEHKALLFNVVRKMMTNSQ

SEQ ID NO: 188489 - protein, 20 aa, Artificial Sequence
  Description of Artificial Sequence: Synthetic peptide
  Seed: GNEKKAKLANVVRKMMTNSQ
GNEHKAMLFNVIRKMMTNSQ

SEQ ID NO: 188490 - protein, 20 aa, Artificial Sequence
  Description of Artificial Sequence: Synthetic peptide
  Seed: GNEKKAKLANVVRKMMTNSQ
GNEHKAVLFNVIRKMMTNSQ

SEQ ID NO: 188491 - protein, 20 aa, Artificial Sequence
  Description of Artificial Sequence: Synthetic peptide
  Seed: GNEKKAKLANVVRKMMTNSQ
GNEHKAVLFNVLRKMMTNSQ

SEQ ID NO: 188492 - protein, 20 aa, Artificial Sequence
  Description of Artificial Sequence: Synthetic peptide
  Seed: GNEKKAKLANVVRKMMTNSQ
GNEIKAALANVARKMMTNSQ

SEQ ID NO: 188493 - protein, 20 aa, Artificial Sequence
  Description of Artificial Sequence: Synthetic peptide
  Seed: GNEKKAKLANVVRKMMTNSQ
GNEIKAALANVCRKMMTNSQ

SEQ ID NO: 188494 - protein, 20 aa, Artificial Sequence
  Description of Artificial Sequence: Synthetic peptide
  Seed: GNEKKAKLANVVRKMMTNSQ
GNEIKAALANVFRKMMTNSQ

SEQ ID NO: 188495 - protein, 20 aa, Artificial Sequence
  Description of Artificial Sequence: Synthetic peptide
  Seed: GNEKKAKLANVVRKMMTNSQ
GNEIKAALANVGRKMMTNSQ

SEQ ID NO: 188496 - protein, 20 aa, Artificial Sequence
  Description of Artificial Sequence: Synthetic peptide
  Seed: GNEKKAKLANVVRKMMTNSQ
GNEIKAALANVHRKMMTNSQ

SEQ ID NO: 188497 - protein, 20 aa, Artificial Sequence
  Description of Artificial Sequence: Synthetic peptide
  Seed: GNEKKAKLANVVRKMMTNSQ
GNEIKAALANVIRKMMTNSQ

SEQ ID NO: 188498 - protein, 20 aa, Artificial Sequence
  Description of Artificial Sequence: Synthetic peptide
  Seed: GNEKKAKLANVVRKMMTNSQ
GNEIKAALANVLRKMMTNSQ

SEQ ID NO: 188499 - protein, 20 aa, Artificial Sequence
  Description of Artificial Sequence: Synthetic peptide
  Seed: GNEKKAKLANVVRKMMTNSQ
GNEIKAALANVMRKMMTNSQ

SEQ ID NO: 188500 - protein, 20 aa, Artificial Sequence
  Description of Artificial Sequence: Synthetic peptide
  Seed: GNEKKAKLANVVRKMMTNSQ
GNEIKAALANVNRKMMTNSQ

SEQ ID NO: 188501 - protein, 20 aa, Artificial Sequence
  Description of Artificial Sequence: Synthetic peptide
  Seed: GNEKKAKLANVVRKMMTNSQ
GNEIKAALANVSRKMMTNSQ

SEQ ID NO: 188502 - protein, 20 aa, Artificial Sequence
  Description of Artificial Sequence: Synthetic peptide
  Seed: GNEKKAKLANVVRKMMTNSQ
GNEIKAALANVTRKMMTNSQ

SEQ ID NO: 188503 - protein, 20 aa, Artificial Sequence
  Description of Artificial Sequence: Synthetic peptide
  Seed: GNEKKAKLANVVRKMMTNSQ
GNEIKAALANVVRKMMTNSQ

SEQ ID NO: 188504 - protein, 20 aa, Artificial Sequence
  Description of Artificial Sequence: Synthetic peptide
  Seed: GNEKKAKLANVVRKMMTNSQ
GNEIKAALFNVARKMMTNSQ

SEQ ID NO: 188505 - protein, 20 aa, Artificial Sequence
  Description of Artificial Sequence: Synthetic peptide
  Seed: GNEKKAKLANVVRKMMTNSQ
GNEIKAALFNVDRKMMTNSQ

SEQ ID NO: 188506 - protein, 20 aa, Artificial Sequence
  Description of Artificial Sequence: Synthetic peptide
  Seed: GNEKKAKLANVVRKMMTNSQ
GNEIKAALFNVERKMMTNSQ

SEQ ID NO: 188507 - protein, 20 aa, Artificial Sequence
  Description of Artificial Sequence: Synthetic peptide
  Seed: GNEKKAKLANVVRKMMTNSQ
GNEIKAALFNVFRKMMTNSQ

SEQ ID NO: 188508 - protein, 20 aa, Artificial Sequence
  Description of Artificial Sequence: Synthetic peptide
  Seed: GNEKKAKLANVVRKMMTNSQ
GNEIKAALFNVIRKMMTNSQ

SEQ ID NO: 188509 - protein, 20 aa, Artificial Sequence
  Description of Artificial Sequence: Synthetic peptide
  Seed: GNEKKAKLANVVRKMMTNSQ
GNEIKAALFNVLRKMMTNSQ

SEQ ID NO: 188510 - protein, 20 aa, Artificial Sequence
  Description of Artificial Sequence: Synthetic peptide
  Seed: GNEKKAKLANVVRKMMTNSQ
GNEIKAALFNVMRKMMTNSQ

SEQ ID NO: 188511 - protein, 20 aa, Artificial Sequence
  Description of Artificial Sequence: Synthetic peptide
  Seed: GNEKKAKLANVVRKMMTNSQ
GNEIKAALFNVNRKMMTNSQ

SEQ ID NO: 188512 - protein, 20 aa, Artificial Sequence
  Description of Artificial Sequence: Synthetic peptide
  Seed: GNEKKAKLANVVRKMMTNSQ
GNEIKAALFNVSRKMMTNSQ

SEQ ID NO: 188513 - protein, 20 aa, Artificial Sequence
  Description of Artificial Sequence: Synthetic peptide
  Seed: GNEKKAKLANVVRKMMTNSQ
GNEIKAALFNVTRKMMTNSQ

SEQ ID NO: 188514 - protein, 20 aa, Artificial Sequence
  Description of Artificial Sequence: Synthetic peptide
  Seed: GNEKKAKLANVVRKMMTNSQ
GNEIKAALFNVVRKMMTNSQ

SEQ ID NO: 188515 - protein, 20 aa, Artificial Sequence
  Description of Artificial Sequence: Synthetic peptide
  Seed: GNEKKAKLANVVRKMMTNSQ
GNEIKAALFNVYRKMMTNSQ

SEQ ID NO: 188516 - protein, 20 aa, Artificial Sequence
  Description of Artificial Sequence: Synthetic peptide
  Seed: GNEKKAKLANVVRKMMTNSQ
GNEIKAALGNVARKMMTNSQ

SEQ ID NO: 188517 - protein, 20 aa, Artificial Sequence
  Description of Artificial Sequence: Synthetic peptide
  Seed: GNEKKAKLANVVRKMMTNSQ
GNEIKAALGNVIRKMMTNSQ

SEQ ID NO: 188518 - protein, 20 aa, Artificial Sequence
  Description of Artificial Sequence: Synthetic peptide
  Seed: GNEKKAKLANVVRKMMTNSQ
GNEIKAALGNVLRKMMTNSQ

SEQ ID NO: 188519 - protein, 20 aa, Artificial Sequence
  Description of Artificial Sequence: Synthetic peptide
  Seed: GNEKKAKLANVVRKMMTNSQ
GNEIKAALGNVMRKMMTNSQ

SEQ ID NO: 188520 - protein, 20 aa, Artificial Sequence
  Description of Artificial Sequence: Synthetic peptide
  Seed: GNEKKAKLANVVRKMMTNSQ
GNEIKAALGNVNRKMMTNSQ

SEQ ID NO: 188521 - protein, 20 aa, Artificial Sequence
  Description of Artificial Sequence: Synthetic peptide
  Seed: GNEKKAKLANVVRKMMTNSQ
GNEIKAALGNVSRKMMTNSQ

SEQ ID NO: 188522 - protein, 20 aa, Artificial Sequence
  Description of Artificial Sequence: Synthetic peptide
  Seed: GNEKKAKLANVVRKMMTNSQ
GNEIKAALGNVTRKMMTNSQ

SEQ ID NO: 188523 - protein, 20 aa, Artificial Sequence
  Description of Artificial Sequence: Synthetic peptide
  Seed: GNEKKAKLANVVRKMMTNSQ
GNEIKAALGNVVRKMMTNSQ

SEQ ID NO: 188524 - protein, 20 aa, Artificial Sequence
  Description of Artificial Sequence: Synthetic peptide
  Seed: GNEKKAKLANVVRKMMTNSQ
GNEIKAALINVARKMMTNSQ

SEQ ID NO: 188525 - protein, 20 aa, Artificial Sequence
  Description of Artificial Sequence: Synthetic peptide
  Seed: GNEKKAKLANVVRKMMTNSQ
GNEIKAALINVNRKMMTNSQ

SEQ ID NO: 188526 - protein, 20 aa, Artificial Sequence
  Description of Artificial Sequence: Synthetic peptide
  Seed: GNEKKAKLANVVRKMMTNSQ
GNEIKAALINVSRKMMTNSQ

SEQ ID NO: 188527 - protein, 20 aa, Artificial Sequence
  Description of Artificial Sequence: Synthetic peptide
  Seed: GNEKKAKLANVVRKMMTNSQ
GNEIKAALNNVARKMMTNSQ

SEQ ID NO: 188528 - protein, 20 aa, Artificial Sequence
  Description of Artificial Sequence: Synthetic peptide
  Seed: GNEKKAKLANVVRKMMTNSQ
GNEIKAALNNVIRKMMTNSQ

SEQ ID NO: 188529 - protein, 20 aa, Artificial Sequence
  Description of Artificial Sequence: Synthetic peptide
  Seed: GNEKKAKLANVVRKMMTNSQ
GNEIKAALNNVLRKMMTNSQ

SEQ ID NO: 188530 - protein, 20 aa, Artificial Sequence
  Description of Artificial Sequence: Synthetic peptide
  Seed: GNEKKAKLANVVRKMMTNSQ
GNEIKAALNNVVRKMMTNSQ

SEQ ID NO: 188531 - protein, 20 aa, Artificial Sequence
  Description of Artificial Sequence: Synthetic peptide
  Seed: GNEKKAKLANVVRKMMTNSQ
GNEIKAALPNVARKMMTNSQ

SEQ ID NO: 188532 - protein, 20 aa, Artificial Sequence
  Description of Artificial Sequence: Synthetic peptide
  Seed: GNEKKAKLANVVRKMMTNSQ
GNEIKAALPNVIRKMMTNSQ

SEQ ID NO: 188533 - protein, 20 aa, Artificial Sequence
  Description of Artificial Sequence: Synthetic peptide
  Seed: GNEKKAKLANVVRKMMTNSQ
GNEIKAALPNVLRKMMTNSQ

SEQ ID NO: 188534 - protein, 20 aa, Artificial Sequence
  Description of Artificial Sequence: Synthetic peptide
  Seed: GNEKKAKLANVVRKMMTNSQ
GNEIKAALPNVMRKMMTNSQ

SEQ ID NO: 188535 - protein, 20 aa, Artificial Sequence
  Description of Artificial Sequence: Synthetic peptide
  Seed: GNEKKAKLANVVRKMMTNSQ
GNEIKAALPNVNRKMMTNSQ

SEQ ID NO: 188536 - protein, 20 aa, Artificial Sequence
  Description of Artificial Sequence: Synthetic peptide
  Seed: GNEKKAKLANVVRKMMTNSQ
GNEIKAALPNVSRKMMTNSQ

SEQ ID NO: 188537 - protein, 20 aa, Artificial Sequence
  Description of Artificial Sequence: Synthetic peptide
  Seed: GNEKKAKLANVVRKMMTNSQ
GNEIKAALPNVTRKMMTNSQ

SEQ ID NO: 188538 - protein, 20 aa, Artificial Sequence
  Description of Artificial Sequence: Synthetic peptide
  Seed: GNEKKAKLANVVRKMMTNSQ
GNEIKAALPNVVRKMMTNSQ

SEQ ID NO: 188539 - protein, 20 aa, Artificial Sequence
  Description of Artificial Sequence: Synthetic peptide
  Seed: GNEKKAKLANVVRKMMTNSQ
GNEIKAALSNVARKMMTNSQ

SEQ ID NO: 188540 - protein, 20 aa, Artificial Sequence
  Description of Artificial Sequence: Synthetic peptide
  Seed: GNEKKAKLANVVRKMMTNSQ
GNEIKAALSNVIRKMMTNSQ

SEQ ID NO: 188541 - protein, 20 aa, Artificial Sequence
  Description of Artificial Sequence: Synthetic peptide
  Seed: GNEKKAKLANVVRKMMTNSQ
GNEIKAALSNVLRKMMTNSQ

SEQ ID NO: 188542 - protein, 20 aa, Artificial Sequence
  Description of Artificial Sequence: Synthetic peptide
  Seed: GNEKKAKLANVVRKMMTNSQ
GNEIKAALSNVMRKMMTNSQ

SEQ ID NO: 188543 - protein, 20 aa, Artificial Sequence
  Description of Artificial Sequence: Synthetic peptide
  Seed: GNEKKAKLANVVRKMMTNSQ
GNEIKAALSNVNRKMMTNSQ

SEQ ID NO: 188544 - protein, 20 aa, Artificial Sequence
  Description of Artificial Sequence: Synthetic peptide
  Seed: GNEKKAKLANVVRKMMTNSQ
GNEIKAALSNVSRKMMTNSQ

SEQ ID NO: 188545 - protein, 20 aa, Artificial Sequence
  Description of Artificial Sequence: Synthetic peptide
  Seed: GNEKKAKLANVVRKMMTNSQ
GNEIKAALSNVTRKMMTNSQ

SEQ ID NO: 188546 - protein, 20 aa, Artificial Sequence
  Description of Artificial Sequence: Synthetic peptide
  Seed: GNEKKAKLANVVRKMMTNSQ
GNEIKAALSNVVRKMMTNSQ

SEQ ID NO: 188547 - protein, 20 aa, Artificial Sequence
  Description of Artificial Sequence: Synthetic peptide
  Seed: GNEKKAKLANVVRKMMTNSQ
GNEIKAALTNVARKMMTNSQ

SEQ ID NO: 188548 - protein, 20 aa, Artificial Sequence
  Description of Artificial Sequence: Synthetic peptide
  Seed: GNEKKAKLANVVRKMMTNSQ
GNEIKAALTNVIRKMMTNSQ

SEQ ID NO: 188549 - protein, 20 aa, Artificial Sequence
  Description of Artificial Sequence: Synthetic peptide
  Seed: GNEKKAKLANVVRKMMTNSQ
GNEIKAALTNVLRKMMTNSQ

SEQ ID NO: 188550 - protein, 20 aa, Artificial Sequence
  Description of Artificial Sequence: Synthetic peptide
  Seed: GNEKKAKLANVVRKMMTNSQ
GNEIKAALTNVNRKMMTNSQ

SEQ ID NO: 188551 - protein, 20 aa, Artificial Sequence
  Description of Artificial Sequence: Synthetic peptide
  Seed: GNEKKAKLANVVRKMMTNSQ
GNEIKAALTNVSRKMMTNSQ

SEQ ID NO: 188552 - protein, 20 aa, Artificial Sequence
  Description of Artificial Sequence: Synthetic peptide
  Seed: GNEKKAKLANVVRKMMTNSQ
GNEIKAALTNVVRKMMTNSQ

SEQ ID NO: 188553 - protein, 20 aa, Artificial Sequence
  Description of Artificial Sequence: Synthetic peptide
  Seed: GNEKKAKLANVVRKMMTNSQ
GNEIKAALVNVARKMMTNSQ

SEQ ID NO: 188554 - protein, 20 aa, Artificial Sequence
  Description of Artificial Sequence: Synthetic peptide
  Seed: GNEKKAKLANVVRKMMTNSQ
GNEIKAALVNVNRKMMTNSQ

SEQ ID NO: 188555 - protein, 20 aa, Artificial Sequence
  Description of Artificial Sequence: Synthetic peptide
  Seed: GNEKKAKLANVVRKMMTNSQ
GNEIKAALVNVSRKMMTNSQ

SEQ ID NO: 188556 - protein, 20 aa, Artificial Sequence
  Description of Artificial Sequence: Synthetic peptide
  Seed: GNEKKAKLANVVRKMMTNSQ
GNEIKAALWNVFRKMMTNSQ

SEQ ID NO: 188557 - protein, 20 aa, Artificial Sequence
  Description of Artificial Sequence: Synthetic peptide
  Seed: GNEKKAKLANVVRKMMTNSQ
GNEIKAALWNVIRKMMTNSQ

SEQ ID NO: 188558 - protein, 20 aa, Artificial Sequence
  Description of Artificial Sequence: Synthetic peptide
  Seed: GNEKKAKLANVVRKMMTNSQ
GNEIKAALWNVLRKMMTNSQ

SEQ ID NO: 188559 - protein, 20 aa, Artificial Sequence
  Description of Artificial Sequence: Synthetic peptide
  Seed: GNEKKAKLANVVRKMMTNSQ
GNEIKAALWNVVRKMMTNSQ

SEQ ID NO: 188560 - protein, 20 aa, Artificial Sequence
  Description of Artificial Sequence: Synthetic peptide
  Seed: GNEKKAKLANVVRKMMTNSQ
GNEIKAALYNVFRKMMTNSQ

SEQ ID NO: 188561 - protein, 20 aa, Artificial Sequence
  Description of Artificial Sequence: Synthetic peptide
  Seed: GNEKKAKLANVVRKMMTNSQ
GNEIKAALYNVIRKMMTNSQ

SEQ ID NO: 188562 - protein, 20 aa, Artificial Sequence
  Description of Artificial Sequence: Synthetic peptide
  Seed: GNEKKAKLANVVRKMMTNSQ
GNEIKAALYNVLRKMMTNSQ

SEQ ID NO: 188563 - protein, 20 aa, Artificial Sequence
  Description of Artificial Sequence: Synthetic peptide
  Seed: GNEKKAKLANVVRKMMTNSQ
GNEIKAALYNVMRKMMTNSQ

SEQ ID NO: 188564 - protein, 20 aa, Artificial Sequence
  Description of Artificial Sequence: Synthetic peptide
  Seed: GNEKKAKLANVVRKMMTNSQ
GNEIKAALYNVVRKMMTNSQ

SEQ ID NO: 188565 - protein, 20 aa, Artificial Sequence
  Description of Artificial Sequence: Synthetic peptide
  Seed: GNEKKAKLANVVRKMMTNSQ
GNEIKACLANVVRKMMTNSQ

SEQ ID NO: 188566 - protein, 20 aa, Artificial Sequence
  Description of Artificial Sequence: Synthetic peptide
  Seed: GNEKKAKLANVVRKMMTNSQ
GNEIKACLFNVFRKMMTNSQ

SEQ ID NO: 188567 - protein, 20 aa, Artificial Sequence
  Description of Artificial Sequence: Synthetic peptide
  Seed: GNEKKAKLANVVRKMMTNSQ
GNEIKACLFNVIRKMMTNSQ

SEQ ID NO: 188568 - protein, 20 aa, Artificial Sequence
  Description of Artificial Sequence: Synthetic peptide
  Seed: GNEKKAKLANVVRKMMTNSQ
GNEIKACLFNVLRKMMTNSQ

SEQ ID NO: 188569 - protein, 20 aa, Artificial Sequence
  Description of Artificial Sequence: Synthetic peptide
  Seed: GNEKKAKLANVVRKMMTNSQ
GNEIKACLFNVVRKMMTNSQ

SEQ ID NO: 188570 - protein, 20 aa, Artificial Sequence
  Description of Artificial Sequence: Synthetic peptide
  Seed: GNEKKAKLANVVRKMMTNSQ
GNEIKACLYNVFRKMMTNSQ

SEQ ID NO: 188571 - protein, 20 aa, Artificial Sequence
  Description of Artificial Sequence: Synthetic peptide
  Seed: GNEKKAKLANVVRKMMTNSQ
GNEIKADLFNVFRKMMTNSQ

SEQ ID NO: 188572 - protein, 20 aa, Artificial Sequence
  Description of Artificial Sequence: Synthetic peptide
  Seed: GNEKKAKLANVVRKMMTNSQ
GNEIKADLFNVIRKMMTNSQ

SEQ ID NO: 188573 - protein, 20 aa, Artificial Sequence
  Description of Artificial Sequence: Synthetic peptide
  Seed: GNEKKAKLANVVRKMMTNSQ
GNEIKADLFNVLRKMMTNSQ

SEQ ID NO: 188574 - protein, 20 aa, Artificial Sequence
  Description of Artificial Sequence: Synthetic peptide
  Seed: GNEKKAKLANVVRKMMTNSQ
GNEIKADLFNVVRKMMTNSQ

SEQ ID NO: 188575 - protein, 20 aa, Artificial Sequence
  Description of Artificial Sequence: Synthetic peptide
  Seed: GNEKKAKLANVVRKMMTNSQ
GNEIKAELANVARKMMTNSQ

SEQ ID NO: 188576 - protein, 20 aa, Artificial Sequence
  Description of Artificial Sequence: Synthetic peptide
  Seed: GNEKKAKLANVVRKMMTNSQ
GNEIKAELANVIRKMMTNSQ

SEQ ID NO: 188577 - protein, 20 aa, Artificial Sequence
  Description of Artificial Sequence: Synthetic peptide
  Seed: GNEKKAKLANVVRKMMTNSQ
GNEIKAELANVLRKMMTNSQ

SEQ ID NO: 188578 - protein, 20 aa, Artificial Sequence
  Description of Artificial Sequence: Synthetic peptide
  Seed: GNEKKAKLANVVRKMMTNSQ
GNEIKAELANVMRKMMTNSQ

SEQ ID NO: 188579 - protein, 20 aa, Artificial Sequence
  Description of Artificial Sequence: Synthetic peptide
  Seed: GNEKKAKLANVVRKMMTNSQ
GNEIKAELANVTRKMMTNSQ

SEQ ID NO: 188580 - protein, 20 aa, Artificial Sequence
  Description of Artificial Sequence: Synthetic peptide
  Seed: GNEKKAKLANVVRKMMTNSQ
GNEIKAELANVVRKMMTNSQ

SEQ ID NO: 188581 - protein, 20 aa, Artificial Sequence
  Description of Artificial Sequence: Synthetic peptide
  Seed: GNEKKAKLANVVRKMMTNSQ
GNEIKAELFNVARKMMTNSQ

SEQ ID NO: 188582 - protein, 20 aa, Artificial Sequence
  Description of Artificial Sequence: Synthetic peptide
  Seed: GNEKKAKLANVVRKMMTNSQ
GNEIKAELFNVDRKMMTNSQ

SEQ ID NO: 188583 - protein, 20 aa, Artificial Sequence
  Description of Artificial Sequence: Synthetic peptide
  Seed: GNEKKAKLANVVRKMMTNSQ
GNEIKAELFNVERKMMTNSQ

SEQ ID NO: 188584 - protein, 20 aa, Artificial Sequence
  Description of Artificial Sequence: Synthetic peptide
  Seed: GNEKKAKLANVVRKMMTNSQ
GNEIKAELFNVFRKMMTNSQ

SEQ ID NO: 188585 - protein, 20 aa, Artificial Sequence
  Description of Artificial Sequence: Synthetic peptide
  Seed: GNEKKAKLANVVRKMMTNSQ
GNEIKAELFNVIRKMMTNSQ

SEQ ID NO: 188586 - protein, 20 aa, Artificial Sequence
  Description of Artificial Sequence: Synthetic peptide
  Seed: GNEKKAKLANVVRKMMTNSQ
GNEIKAELFNVLRKMMTNSQ

SEQ ID NO: 188587 - protein, 20 aa, Artificial Sequence
  Description of Artificial Sequence: Synthetic peptide
  Seed: GNEKKAKLANVVRKMMTNSQ
GNEIKAELFNVMRKMMTNSQ

SEQ ID NO: 188588 - protein, 20 aa, Artificial Sequence
  Description of Artificial Sequence: Synthetic peptide
  Seed: GNEKKAKLANVVRKMMTNSQ
GNEIKAELFNVNRKMMTNSQ

SEQ ID NO: 188589 - protein, 20 aa, Artificial Sequence
  Description of Artificial Sequence: Synthetic peptide
  Seed: GNEKKAKLANVVRKMMTNSQ
GNEIKAELFNVSRKMMTNSQ

SEQ ID NO: 188590 - protein, 20 aa, Artificial Sequence
  Description of Artificial Sequence: Synthetic peptide
  Seed: GNEKKAKLANVVRKMMTNSQ
GNEIKAELFNVTRKMMTNSQ

SEQ ID NO: 188591 - protein, 20 aa, Artificial Sequence
  Description of Artificial Sequence: Synthetic peptide
  Seed: GNEKKAKLANVVRKMMTNSQ
GNEIKAELFNVVRKMMTNSQ

SEQ ID NO: 188592 - protein, 20 aa, Artificial Sequence
  Description of Artificial Sequence: Synthetic peptide
  Seed: GNEKKAKLANVVRKMMTNSQ
GNEIKAELFNVYRKMMTNSQ

SEQ ID NO: 188593 - protein, 20 aa, Artificial Sequence
  Description of Artificial Sequence: Synthetic peptide
  Seed: GNEKKAKLANVVRKMMTNSQ
GNEIKAELGNVARKMMTNSQ

SEQ ID NO: 188594 - protein, 20 aa, Artificial Sequence
  Description of Artificial Sequence: Synthetic peptide
  Seed: GNEKKAKLANVVRKMMTNSQ
GNEIKAELGNVIRKMMTNSQ

SEQ ID NO: 188595 - protein, 20 aa, Artificial Sequence
  Description of Artificial Sequence: Synthetic peptide
  Seed: GNEKKAKLANVVRKMMTNSQ
GNEIKAELGNVLRKMMTNSQ

SEQ ID NO: 188596 - protein, 20 aa, Artificial Sequence
  Description of Artificial Sequence: Synthetic peptide
  Seed: GNEKKAKLANVVRKMMTNSQ
GNEIKAELGNVVRKMMTNSQ

SEQ ID NO: 188597 - protein, 20 aa, Artificial Sequence
  Description of Artificial Sequence: Synthetic peptide
  Seed: GNEKKAKLANVVRKMMTNSQ
GNEIKAELLNVIRKMMTNSQ

SEQ ID NO: 188598 - protein, 20 aa, Artificial Sequence
  Description of Artificial Sequence: Synthetic peptide
  Seed: GNEKKAKLANVVRKMMTNSQ
GNEIKAELLNVVRKMMTNSQ

SEQ ID NO: 188599 - protein, 20 aa, Artificial Sequence
  Description of Artificial Sequence: Synthetic peptide
  Seed: GNEKKAKLANVVRKMMTNSQ
GNEIKAELSNVARKMMTNSQ

SEQ ID NO: 188600 - protein, 20 aa, Artificial Sequence
  Description of Artificial Sequence: Synthetic peptide
  Seed: GNEKKAKLANVVRKMMTNSQ
GNEIKAELSNVIRKMMTNSQ

SEQ ID NO: 188601 - protein, 20 aa, Artificial Sequence
  Description of Artificial Sequence: Synthetic peptide
  Seed: GNEKKAKLANVVRKMMTNSQ
GNEIKAELSNVLRKMMTNSQ

SEQ ID NO: 188602 - protein, 20 aa, Artificial Sequence
  Description of Artificial Sequence: Synthetic peptide
  Seed: GNEKKAKLANVVRKMMTNSQ
GNEIKAELSNVVRKMMTNSQ

SEQ ID NO: 188603 - protein, 20 aa, Artificial Sequence
  Description of Artificial Sequence: Synthetic peptide
  Seed: GNEKKAKLANVVRKMMTNSQ
GNEIKAELWNVFRKMMTNSQ

SEQ ID NO: 188604 - protein, 20 aa, Artificial Sequence
  Description of Artificial Sequence: Synthetic peptide
  Seed: GNEKKAKLANVVRKMMTNSQ
GNEIKAELWNVIRKMMTNSQ

SEQ ID NO: 188605 - protein, 20 aa, Artificial Sequence
  Description of Artificial Sequence: Synthetic peptide
  Seed: GNEKKAKLANVVRKMMTNSQ
GNEIKAELWNVLRKMMTNSQ

SEQ ID NO: 188606 - protein, 20 aa, Artificial Sequence
  Description of Artificial Sequence: Synthetic peptide
  Seed: GNEKKAKLANVVRKMMTNSQ
GNEIKAELWNVVRKMMTNSQ

SEQ ID NO: 188607 - protein, 20 aa, Artificial Sequence
  Description of Artificial Sequence: Synthetic peptide
  Seed: GNEKKAKLANVVRKMMTNSQ
GNEIKAELYNVFRKMMTNSQ

SEQ ID NO: 188608 - protein, 20 aa, Artificial Sequence
  Description of Artificial Sequence: Synthetic peptide
  Seed: GNEKKAKLANVVRKMMTNSQ
GNEIKAELYNVIRKMMTNSQ

SEQ ID NO: 188609 - protein, 20 aa, Artificial Sequence
  Description of Artificial Sequence: Synthetic peptide
  Seed: GNEKKAKLANVVRKMMTNSQ
GNEIKAELYNVLRKMMTNSQ

SEQ ID NO: 188610 - protein, 20 aa, Artificial Sequence
  Description of Artificial Sequence: Synthetic peptide
  Seed: GNEKKAKLANVVRKMMTNSQ
GNEIKAELYNVMRKMMTNSQ

SEQ ID NO: 188611 - protein, 20 aa, Artificial Sequence
  Description of Artificial Sequence: Synthetic peptide
  Seed: GNEKKAKLANVVRKMMTNSQ
GNEIKAELYNVVRKMMTNSQ

SEQ ID NO: 188612 - protein, 20 aa, Artificial Sequence
  Description of Artificial Sequence: Synthetic peptide
  Seed: GNEKKAKLANVVRKMMTNSQ
GNEIKAFLANVARKMMTNSQ

SEQ ID NO: 188613 - protein, 20 aa, Artificial Sequence
  Description of Artificial Sequence: Synthetic peptide
  Seed: GNEKKAKLANVVRKMMTNSQ
GNEIKAFLANVIRKMMTNSQ

SEQ ID NO: 188614 - protein, 20 aa, Artificial Sequence
  Description of Artificial Sequence: Synthetic peptide
  Seed: GNEKKAKLANVVRKMMTNSQ
GNEIKAFLANVLRKMMTNSQ

SEQ ID NO: 188615 - protein, 20 aa, Artificial Sequence
  Description of Artificial Sequence: Synthetic peptide
  Seed: GNEKKAKLANVVRKMMTNSQ
GNEIKAFLANVMRKMMTNSQ

SEQ ID NO: 188616 - protein, 20 aa, Artificial Sequence
  Description of Artificial Sequence: Synthetic peptide
  Seed: GNEKKAKLANVVRKMMTNSQ
GNEIKAFLANVNRKMMTNSQ

SEQ ID NO: 188617 - protein, 20 aa, Artificial Sequence
  Description of Artificial Sequence: Synthetic peptide
  Seed: GNEKKAKLANVVRKMMTNSQ
GNEIKAFLANVSRKMMTNSQ

SEQ ID NO: 188618 - protein, 20 aa, Artificial Sequence
  Description of Artificial Sequence: Synthetic peptide
  Seed: GNEKKAKLANVVRKMMTNSQ
GNEIKAFLANVTRKMMTNSQ

SEQ ID NO: 188619 - protein, 20 aa, Artificial Sequence
  Description of Artificial Sequence: Synthetic peptide
  Seed: GNEKKAKLANVVRKMMTNSQ
GNEIKAFLANVVRKMMTNSQ

SEQ ID NO: 188620 - protein, 20 aa, Artificial Sequence
  Description of Artificial Sequence: Synthetic peptide
  Seed: GNEKKAKLANVVRKMMTNSQ
GNEIKAFLDNVARKMMTNSQ

SEQ ID NO: 188621 - protein, 20 aa, Artificial Sequence
  Description of Artificial Sequence: Synthetic peptide
  Seed: GNEKKAKLANVVRKMMTNSQ
GNEIKAFLDNVFRKMMTNSQ

SEQ ID NO: 188622 - protein, 20 aa, Artificial Sequence
  Description of Artificial Sequence: Synthetic peptide
  Seed: GNEKKAKLANVVRKMMTNSQ
GNEIKAFLDNVIRKMMTNSQ

SEQ ID NO: 188623 - protein, 20 aa, Artificial Sequence
  Description of Artificial Sequence: Synthetic peptide
  Seed: GNEKKAKLANVVRKMMTNSQ
GNEIKAFLDNVLRKMMTNSQ

SEQ ID NO: 188624 - protein, 20 aa, Artificial Sequence
  Description of Artificial Sequence: Synthetic peptide
  Seed: GNEKKAKLANVVRKMMTNSQ
GNEIKAFLDNVMRKMMTNSQ

SEQ ID NO: 188625 - protein, 20 aa, Artificial Sequence
  Description of Artificial Sequence: Synthetic peptide
  Seed: GNEKKAKLANVVRKMMTNSQ
GNEIKAFLDNVVRKMMTNSQ

SEQ ID NO: 188626 - protein, 20 aa, Artificial Sequence
  Description of Artificial Sequence: Synthetic peptide
  Seed: GNEKKAKLANVVRKMMTNSQ
GNEIKAFLFNVARKMMTNSQ

SEQ ID NO: 188627 - protein, 20 aa, Artificial Sequence
  Description of Artificial Sequence: Synthetic peptide
  Seed: GNEKKAKLANVVRKMMTNSQ
GNEIKAFLFNVDRKMMTNSQ

SEQ ID NO: 188628 - protein, 20 aa, Artificial Sequence
  Description of Artificial Sequence: Synthetic peptide
  Seed: GNEKKAKLANVVRKMMTNSQ
GNEIKAFLFNVERKMMTNSQ

SEQ ID NO: 188629 - protein, 20 aa, Artificial Sequence
  Description of Artificial Sequence: Synthetic peptide
  Seed: GNEKKAKLANVVRKMMTNSQ
GNEIKAFLFNVHRKMMTNSQ

SEQ ID NO: 188630 - protein, 20 aa, Artificial Sequence
  Description of Artificial Sequence: Synthetic peptide
  Seed: GNEKKAKLANVVRKMMTNSQ
GNEIKAFLFNVIRKMMTNSQ

SEQ ID NO: 188631 - protein, 20 aa, Artificial Sequence
  Description of Artificial Sequence: Synthetic peptide
  Seed: GNEKKAKLANVVRKMMTNSQ
GNEIKAFLFNVLRKMMTNSQ

SEQ ID NO: 188632 - protein, 20 aa, Artificial Sequence
  Description of Artificial Sequence: Synthetic peptide
  Seed: GNEKKAKLANVVRKMMTNSQ
GNEIKAFLFNVMRKMMTNSQ

SEQ ID NO: 188633 - protein, 20 aa, Artificial Sequence
  Description of Artificial Sequence: Synthetic peptide
  Seed: GNEKKAKLANVVRKMMTNSQ
GNEIKAFLFNVNRKMMTNSQ

SEQ ID NO: 188634 - protein, 20 aa, Artificial Sequence
  Description of Artificial Sequence: Synthetic peptide
  Seed: GNEKKAKLANVVRKMMTNSQ
GNEIKAFLFNVSRKMMTNSQ

SEQ ID NO: 188635 - protein, 20 aa, Artificial Sequence
  Description of Artificial Sequence: Synthetic peptide
  Seed: GNEKKAKLANVVRKMMTNSQ
GNEIKAFLFNVTRKMMTNSQ

SEQ ID NO: 188636 - protein, 20 aa, Artificial Sequence
  Description of Artificial Sequence: Synthetic peptide
  Seed: GNEKKAKLANVVRKMMTNSQ
GNEIKAFLFNVVRKMMTNSQ

SEQ ID NO: 188637 - protein, 20 aa, Artificial Sequence
  Description of Artificial Sequence: Synthetic peptide
  Seed: GNEKKAKLANVVRKMMTNSQ
GNEIKAFLGNVARKMMTNSQ

SEQ ID NO: 188638 - protein, 20 aa, Artificial Sequence
  Description of Artificial Sequence: Synthetic peptide
  Seed: GNEKKAKLANVVRKMMTNSQ
GNEIKAFLGNVSRKMMTNSQ

SEQ ID NO: 188639 - protein, 20 aa, Artificial Sequence
  Description of Artificial Sequence: Synthetic peptide
  Seed: GNEKKAKLANVVRKMMTNSQ
GNEIKAFLGNVVRKMMTNSQ

SEQ ID NO: 188640 - protein, 20 aa, Artificial Sequence
  Description of Artificial Sequence: Synthetic peptide
  Seed: GNEKKAKLANVVRKMMTNSQ
GNEIKAFLINVARKMMTNSQ

SEQ ID NO: 188641 - protein, 20 aa, Artificial Sequence
  Description of Artificial Sequence: Synthetic peptide
  Seed: GNEKKAKLANVVRKMMTNSQ
GNEIKAFLLNVIRKMMTNSQ

SEQ ID NO: 188642 - protein, 20 aa, Artificial Sequence
  Description of Artificial Sequence: Synthetic peptide
  Seed: GNEKKAKLANVVRKMMTNSQ
GNEIKAFLLNVVRKMMTNSQ

SEQ ID NO: 188643 - protein, 20 aa, Artificial Sequence
  Description of Artificial Sequence: Synthetic peptide
  Seed: GNEKKAKLANVVRKMMTNSQ
GNEIKAFLPNVARKMMTNSQ

SEQ ID NO: 188644 - protein, 20 aa, Artificial Sequence
  Description of Artificial Sequence: Synthetic peptide
  Seed: GNEKKAKLANVVRKMMTNSQ
GNEIKAFLPNVSRKMMTNSQ

SEQ ID NO: 188645 - protein, 20 aa, Artificial Sequence
  Description of Artificial Sequence: Synthetic peptide
  Seed: GNEKKAKLANVVRKMMTNSQ
GNEIKAFLPNVVRKMMTNSQ

SEQ ID NO: 188646 - protein, 20 aa, Artificial Sequence
  Description of Artificial Sequence: Synthetic peptide
  Seed: GNEKKAKLANVVRKMMTNSQ
GNEIKAFLSNVARKMMTNSQ

SEQ ID NO: 188647 - protein, 20 aa, Artificial Sequence
  Description of Artificial Sequence: Synthetic peptide
  Seed: GNEKKAKLANVVRKMMTNSQ
GNEIKAFLSNVIRKMMTNSQ

SEQ ID NO: 188648 - protein, 20 aa, Artificial Sequence
  Description of Artificial Sequence: Synthetic peptide
  Seed: GNEKKAKLANVVRKMMTNSQ
GNEIKAFLSNVVRKMMTNSQ

SEQ ID NO: 188649 - protein, 20 aa, Artificial Sequence
  Description of Artificial Sequence: Synthetic peptide
  Seed: GNEKKAKLANVVRKMMTNSQ
GNEIKAFLTNVARKMMTNSQ

SEQ ID NO: 188650 - protein, 20 aa, Artificial Sequence
  Description of Artificial Sequence: Synthetic peptide
  Seed: GNEKKAKLANVVRKMMTNSQ
GNEIKAFLVNVARKMMTNSQ

SEQ ID NO: 188651 - protein, 20 aa, Artificial Sequence
  Description of Artificial Sequence: Synthetic peptide
  Seed: GNEKKAKLANVVRKMMTNSQ
GNEIKAFLWNVVRKMMTNSQ

SEQ ID NO: 188652 - protein, 20 aa, Artificial Sequence
  Description of Artificial Sequence: Synthetic peptide
  Seed: GNEKKAKLANVVRKMMTNSQ
GNEIKAFLYNVARKMMTNSQ

SEQ ID NO: 188653 - protein, 20 aa, Artificial Sequence
  Description of Artificial Sequence: Synthetic peptide
  Seed: GNEKKAKLANVVRKMMTNSQ
GNEIKAFLYNVTRKMMTNSQ

SEQ ID NO: 188654 - protein, 20 aa, Artificial Sequence
  Description of Artificial Sequence: Synthetic peptide
  Seed: GNEKKAKLANVVRKMMTNSQ
GNEIKAFLYNVVRKMMTNSQ

SEQ ID NO: 188655 - protein, 20 aa, Artificial Sequence
  Description of Artificial Sequence: Synthetic peptide
  Seed: GNEKKAKLANVVRKMMTNSQ
GNEIKAGLANVARKMMTNSQ

SEQ ID NO: 188656 - protein, 20 aa, Artificial Sequence
  Description of Artificial Sequence: Synthetic peptide
  Seed: GNEKKAKLANVVRKMMTNSQ
GNEIKAGLANVIRKMMTNSQ

SEQ ID NO: 188657 - protein, 20 aa, Artificial Sequence
  Description of Artificial Sequence: Synthetic peptide
  Seed: GNEKKAKLANVVRKMMTNSQ
GNEIKAGLANVLRKMMTNSQ

SEQ ID NO: 188658 - protein, 20 aa, Artificial Sequence
  Description of Artificial Sequence: Synthetic peptide
  Seed: GNEKKAKLANVVRKMMTNSQ
GNEIKAGLANVMRKMMTNSQ

SEQ ID NO: 188659 - protein, 20 aa, Artificial Sequence
  Description of Artificial Sequence: Synthetic peptide
  Seed: GNEKKAKLANVVRKMMTNSQ
GNEIKAGLANVVRKMMTNSQ

SEQ ID NO: 188660 - protein, 20 aa, Artificial Sequence
  Description of Artificial Sequence: Synthetic peptide
  Seed: GNEKKAKLANVVRKMMTNSQ
GNEIKAGLFNVFRKMMTNSQ

SEQ ID NO: 188661 - protein, 20 aa, Artificial Sequence
  Description of Artificial Sequence: Synthetic peptide
  Seed: GNEKKAKLANVVRKMMTNSQ
GNEIKAGLFNVIRKMMTNSQ

SEQ ID NO: 188662 - protein, 20 aa, Artificial Sequence
  Description of Artificial Sequence: Synthetic peptide
  Seed: GNEKKAKLANVVRKMMTNSQ
GNEIKAGLFNVLRKMMTNSQ

SEQ ID NO: 188663 - protein, 20 aa, Artificial Sequence
  Description of Artificial Sequence: Synthetic peptide
  Seed: GNEKKAKLANVVRKMMTNSQ
GNEIKAGLFNVVRKMMTNSQ

SEQ ID NO: 188664 - protein, 20 aa, Artificial Sequence
  Description of Artificial Sequence: Synthetic peptide
  Seed: GNEKKAKLANVVRKMMTNSQ
GNEIKAGLGNVIRKMMTNSQ

SEQ ID NO: 188665 - protein, 20 aa, Artificial Sequence
  Description of Artificial Sequence: Synthetic peptide
  Seed: GNEKKAKLANVVRKMMTNSQ
GNEIKAGLGNVLRKMMTNSQ

SEQ ID NO: 188666 - protein, 20 aa, Artificial Sequence
  Description of Artificial Sequence: Synthetic peptide
  Seed: GNEKKAKLANVVRKMMTNSQ
GNEIKAGLGNVVRKMMTNSQ

SEQ ID NO: 188667 - protein, 20 aa, Artificial Sequence
  Description of Artificial Sequence: Synthetic peptide
  Seed: GNEKKAKLANVVRKMMTNSQ
GNEIKAGLSNVIRKMMTNSQ

SEQ ID NO: 188668 - protein, 20 aa, Artificial Sequence
  Description of Artificial Sequence: Synthetic peptide
  Seed: GNEKKAKLANVVRKMMTNSQ
GNEIKAGLSNVLRKMMTNSQ

SEQ ID NO: 188669 - protein, 20 aa, Artificial Sequence
  Description of Artificial Sequence: Synthetic peptide
  Seed: GNEKKAKLANVVRKMMTNSQ
GNEIKAGLSNVVRKMMTNSQ

SEQ ID NO: 188670 - protein, 20 aa, Artificial Sequence
  Description of Artificial Sequence: Synthetic peptide
  Seed: GNEKKAKLANVVRKMMTNSQ
GNEIKAHLFNVARKMMTNSQ

SEQ ID NO: 188671 - protein, 20 aa, Artificial Sequence
  Description of Artificial Sequence: Synthetic peptide
  Seed: GNEKKAKLANVVRKMMTNSQ
GNEIKAHLFNVDRKMMTNSQ

SEQ ID NO: 188672 - protein, 20 aa, Artificial Sequence
  Description of Artificial Sequence: Synthetic peptide
  Seed: GNEKKAKLANVVRKMMTNSQ
GNEIKAHLFNVERKMMTNSQ

SEQ ID NO: 188673 - protein, 20 aa, Artificial Sequence
  Description of Artificial Sequence: Synthetic peptide
  Seed: GNEKKAKLANVVRKMMTNSQ
GNEIKAHLFNVFRKMMTNSQ

SEQ ID NO: 188674 - protein, 20 aa, Artificial Sequence
  Description of Artificial Sequence: Synthetic peptide
  Seed: GNEKKAKLANVVRKMMTNSQ
GNEIKAHLFNVIRKMMTNSQ

SEQ ID NO: 188675 - protein, 20 aa, Artificial Sequence
  Description of Artificial Sequence: Synthetic peptide
  Seed: GNEKKAKLANVVRKMMTNSQ
GNEIKAHLFNVLRKMMTNSQ

SEQ ID NO: 188676 - protein, 20 aa, Artificial Sequence
  Description of Artificial Sequence: Synthetic peptide
  Seed: GNEKKAKLANVVRKMMTNSQ
GNEIKAHLFNVMRKMMTNSQ

SEQ ID NO: 188677 - protein, 20 aa, Artificial Sequence
  Description of Artificial Sequence: Synthetic peptide
  Seed: GNEKKAKLANVVRKMMTNSQ
GNEIKAHLFNVNRKMMTNSQ

SEQ ID NO: 188678 - protein, 20 aa, Artificial Sequence
  Description of Artificial Sequence: Synthetic peptide
  Seed: GNEKKAKLANVVRKMMTNSQ
GNEIKAHLFNVSRKMMTNSQ

SEQ ID NO: 188679 - protein, 20 aa, Artificial Sequence
  Description of Artificial Sequence: Synthetic peptide
  Seed: GNEKKAKLANVVRKMMTNSQ
GNEIKAHLFNVTRKMMTNSQ

SEQ ID NO: 188680 - protein, 20 aa, Artificial Sequence
  Description of Artificial Sequence: Synthetic peptide
  Seed: GNEKKAKLANVVRKMMTNSQ
GNEIKAHLFNVVRKMMTNSQ

SEQ ID NO: 188681 - protein, 20 aa, Artificial Sequence
  Description of Artificial Sequence: Synthetic peptide
  Seed: GNEKKAKLANVVRKMMTNSQ
GNEIKAHLFNVWRKMMTNSQ

SEQ ID NO: 188682 - protein, 20 aa, Artificial Sequence
  Description of Artificial Sequence: Synthetic peptide
  Seed: GNEKKAKLANVVRKMMTNSQ
GNEIKAHLFNVYRKMMTNSQ

SEQ ID NO: 188683 - protein, 20 aa, Artificial Sequence
  Description of Artificial Sequence: Synthetic peptide
  Seed: GNEKKAKLANVVRKMMTNSQ
GNEIKAHLINVFRKMMTNSQ

SEQ ID NO: 188684 - protein, 20 aa, Artificial Sequence
  Description of Artificial Sequence: Synthetic peptide
  Seed: GNEKKAKLANVVRKMMTNSQ
GNEIKAHLINVIRKMMTNSQ

SEQ ID NO: 188685 - protein, 20 aa, Artificial Sequence
  Description of Artificial Sequence: Synthetic peptide
  Seed: GNEKKAKLANVVRKMMTNSQ
GNEIKAHLINVLRKMMTNSQ

SEQ ID NO: 188686 - protein, 20 aa, Artificial Sequence
  Description of Artificial Sequence: Synthetic peptide
  Seed: GNEKKAKLANVVRKMMTNSQ
GNEIKAHLINVVRKMMTNSQ

SEQ ID NO: 188687 - protein, 20 aa, Artificial Sequence
  Description of Artificial Sequence: Synthetic peptide
  Seed: GNEKKAKLANVVRKMMTNSQ
GNEIKAHLLNVFRKMMTNSQ

SEQ ID NO: 188688 - protein, 20 aa, Artificial Sequence
  Description of Artificial Sequence: Synthetic peptide
  Seed: GNEKKAKLANVVRKMMTNSQ
GNEIKAHLLNVIRKMMTNSQ

SEQ ID NO: 188689 - protein, 20 aa, Artificial Sequence
  Description of Artificial Sequence: Synthetic peptide
  Seed: GNEKKAKLANVVRKMMTNSQ
GNEIKAHLLNVLRKMMTNSQ

SEQ ID NO: 188690 - protein, 20 aa, Artificial Sequence
  Description of Artificial Sequence: Synthetic peptide
  Seed: GNEKKAKLANVVRKMMTNSQ
GNEIKAHLLNVVRKMMTNSQ

SEQ ID NO: 188691 - protein, 20 aa, Artificial Sequence
  Description of Artificial Sequence: Synthetic peptide
  Seed: GNEKKAKLANVVRKMMTNSQ
GNEIKAHLMNVFRKMMTNSQ

SEQ ID NO: 188692 - protein, 20 aa, Artificial Sequence
  Description of Artificial Sequence: Synthetic peptide
  Seed: GNEKKAKLANVVRKMMTNSQ
GNEIKAHLMNVIRKMMTNSQ

SEQ ID NO: 188693 - protein, 20 aa, Artificial Sequence
  Description of Artificial Sequence: Synthetic peptide
  Seed: GNEKKAKLANVVRKMMTNSQ
GNEIKAHLMNVLRKMMTNSQ

SEQ ID NO: 188694 - protein, 20 aa, Artificial Sequence
  Description of Artificial Sequence: Synthetic peptide
  Seed: GNEKKAKLANVVRKMMTNSQ
GNEIKAHLWNVFRKMMTNSQ

SEQ ID NO: 188695 - protein, 20 aa, Artificial Sequence
  Description of Artificial Sequence: Synthetic peptide
  Seed: GNEKKAKLANVVRKMMTNSQ
GNEIKAHLWNVIRKMMTNSQ

SEQ ID NO: 188696 - protein, 20 aa, Artificial Sequence
  Description of Artificial Sequence: Synthetic peptide
  Seed: GNEKKAKLANVVRKMMTNSQ
GNEIKAHLWNVLRKMMTNSQ

SEQ ID NO: 188697 - protein, 20 aa, Artificial Sequence
  Description of Artificial Sequence: Synthetic peptide
  Seed: GNEKKAKLANVVRKMMTNSQ
GNEIKAHLWNVVRKMMTNSQ

SEQ ID NO: 188698 - protein, 20 aa, Artificial Sequence
  Description of Artificial Sequence: Synthetic peptide
  Seed: GNEKKAKLANVVRKMMTNSQ
GNEIKAHLYNVFRKMMTNSQ

SEQ ID NO: 188699 - protein, 20 aa, Artificial Sequence
  Description of Artificial Sequence: Synthetic peptide
  Seed: GNEKKAKLANVVRKMMTNSQ
GNEIKAHLYNVIRKMMTNSQ

SEQ ID NO: 188700 - protein, 20 aa, Artificial Sequence
  Description of Artificial Sequence: Synthetic peptide
  Seed: GNEKKAKLANVVRKMMTNSQ
GNEIKAHLYNVLRKMMTNSQ

SEQ ID NO: 188701 - protein, 20 aa, Artificial Sequence
  Description of Artificial Sequence: Synthetic peptide
  Seed: GNEKKAKLANVVRKMMTNSQ
GNEIKAHLYNVMRKMMTNSQ

SEQ ID NO: 188702 - protein, 20 aa, Artificial Sequence
  Description of Artificial Sequence: Synthetic peptide
  Seed: GNEKKAKLANVVRKMMTNSQ
GNEIKAHLYNVVRKMMTNSQ

SEQ ID NO: 188703 - protein, 20 aa, Artificial Sequence
  Description of Artificial Sequence: Synthetic peptide
  Seed: GNEKKAKLANVVRKMMTNSQ
GNEIKAILANVARKMMTNSQ

SEQ ID NO: 188704 - protein, 20 aa, Artificial Sequence
  Description of Artificial Sequence: Synthetic peptide
  Seed: GNEKKAKLANVVRKMMTNSQ
GNEIKAILANVGRKMMTNSQ

SEQ ID NO: 188705 - protein, 20 aa, Artificial Sequence
  Description of Artificial Sequence: Synthetic peptide
  Seed: GNEKKAKLANVVRKMMTNSQ
GNEIKAILANVHRKMMTNSQ

SEQ ID NO: 188706 - protein, 20 aa, Artificial Sequence
  Description of Artificial Sequence: Synthetic peptide
  Seed: GNEKKAKLANVVRKMMTNSQ
GNEIKAILANVIRKMMTNSQ

SEQ ID NO: 188707 - protein, 20 aa, Artificial Sequence
  Description of Artificial Sequence: Synthetic peptide
  Seed: GNEKKAKLANVVRKMMTNSQ
GNEIKAILANVLRKMMTNSQ

SEQ ID NO: 188708 - protein, 20 aa, Artificial Sequence
  Description of Artificial Sequence: Synthetic peptide
  Seed: GNEKKAKLANVVRKMMTNSQ
GNEIKAILANVMRKMMTNSQ

SEQ ID NO: 188709 - protein, 20 aa, Artificial Sequence
  Description of Artificial Sequence: Synthetic peptide
  Seed: GNEKKAKLANVVRKMMTNSQ
GNEIKAILANVNRKMMTNSQ

SEQ ID NO: 188710 - protein, 20 aa, Artificial Sequence
  Description of Artificial Sequence: Synthetic peptide
  Seed: GNEKKAKLANVVRKMMTNSQ
GNEIKAILANVSRKMMTNSQ

SEQ ID NO: 188711 - protein, 20 aa, Artificial Sequence
  Description of Artificial Sequence: Synthetic peptide
  Seed: GNEKKAKLANVVRKMMTNSQ
GNEIKAILANVTRKMMTNSQ

SEQ ID NO: 188712 - protein, 20 aa, Artificial Sequence
  Description of Artificial Sequence: Synthetic peptide
  Seed: GNEKKAKLANVVRKMMTNSQ
GNEIKAILANVVRKMMTNSQ

SEQ ID NO: 188713 - protein, 20 aa, Artificial Sequence
  Description of Artificial Sequence: Synthetic peptide
  Seed: GNEKKAKLANVVRKMMTNSQ
GNEIKAILFNVARKMMTNSQ

SEQ ID NO: 188714 - protein, 20 aa, Artificial Sequence
  Description of Artificial Sequence: Synthetic peptide
  Seed: GNEKKAKLANVVRKMMTNSQ
GNEIKAILFNVDRKMMTNSQ

SEQ ID NO: 188715 - protein, 20 aa, Artificial Sequence
  Description of Artificial Sequence: Synthetic peptide
  Seed: GNEKKAKLANVVRKMMTNSQ
GNEIKAILFNVERKMMTNSQ

SEQ ID NO: 188716 - protein, 20 aa, Artificial Sequence
  Description of Artificial Sequence: Synthetic peptide
  Seed: GNEKKAKLANVVRKMMTNSQ
GNEIKAILFNVIRKMMTNSQ

SEQ ID NO: 188717 - protein, 20 aa, Artificial Sequence
  Description of Artificial Sequence: Synthetic peptide
  Seed: GNEKKAKLANVVRKMMTNSQ
GNEIKAILFNVLRKMMTNSQ

SEQ ID NO: 188718 - protein, 20 aa, Artificial Sequence
  Description of Artificial Sequence: Synthetic peptide
  Seed: GNEKKAKLANVVRKMMTNSQ
GNEIKAILFNVMRKMMTNSQ

SEQ ID NO: 188719 - protein, 20 aa, Artificial Sequence
  Description of Artificial Sequence: Synthetic peptide
  Seed: GNEKKAKLANVVRKMMTNSQ
GNEIKAILFNVNRKMMTNSQ

SEQ ID NO: 188720 - protein, 20 aa, Artificial Sequence
  Description of Artificial Sequence: Synthetic peptide
  Seed: GNEKKAKLANVVRKMMTNSQ
GNEIKAILFNVPRKMMTNSQ

SEQ ID NO: 188721 - protein, 20 aa, Artificial Sequence
  Description of Artificial Sequence: Synthetic peptide
  Seed: GNEKKAKLANVVRKMMTNSQ
GNEIKAILFNVSRKMMTNSQ

SEQ ID NO: 188722 - protein, 20 aa, Artificial Sequence
  Description of Artificial Sequence: Synthetic peptide
  Seed: GNEKKAKLANVVRKMMTNSQ
GNEIKAILFNVTRKMMTNSQ

SEQ ID NO: 188723 - protein, 20 aa, Artificial Sequence
  Description of Artificial Sequence: Synthetic peptide
  Seed: GNEKKAKLANVVRKMMTNSQ
GNEIKAILFNVVRKMMTNSQ

SEQ ID NO: 188724 - protein, 20 aa, Artificial Sequence
  Description of Artificial Sequence: Synthetic peptide
  Seed: GNEKKAKLANVVRKMMTNSQ
GNEIKAILFNVYRKMMTNSQ

SEQ ID NO: 188725 - protein, 20 aa, Artificial Sequence
  Description of Artificial Sequence: Synthetic peptide
  Seed: GNEKKAKLANVVRKMMTNSQ
GNEIKAILGNVARKMMTNSQ

SEQ ID NO: 188726 - protein, 20 aa, Artificial Sequence
  Description of Artificial Sequence: Synthetic peptide
  Seed: GNEKKAKLANVVRKMMTNSQ
GNEIKAILGNVGRKMMTNSQ

SEQ ID NO: 188727 - protein, 20 aa, Artificial Sequence
  Description of Artificial Sequence: Synthetic peptide
  Seed: GNEKKAKLANVVRKMMTNSQ
GNEIKAILGNVIRKMMTNSQ

SEQ ID NO: 188728 - protein, 20 aa, Artificial Sequence
  Description of Artificial Sequence: Synthetic peptide
  Seed: GNEKKAKLANVVRKMMTNSQ
GNEIKAILGNVLRKMMTNSQ

SEQ ID NO: 188729 - protein, 20 aa, Artificial Sequence
  Description of Artificial Sequence: Synthetic peptide
  Seed: GNEKKAKLANVVRKMMTNSQ
GNEIKAILGNVMRKMMTNSQ

SEQ ID NO: 188730 - protein, 20 aa, Artificial Sequence
  Description of Artificial Sequence: Synthetic peptide
  Seed: GNEKKAKLANVVRKMMTNSQ
GNEIKAILGNVNRKMMTNSQ

SEQ ID NO: 188731 - protein, 20 aa, Artificial Sequence
  Description of Artificial Sequence: Synthetic peptide
  Seed: GNEKKAKLANVVRKMMTNSQ
GNEIKAILGNVSRKMMTNSQ

SEQ ID NO: 188732 - protein, 20 aa, Artificial Sequence
  Description of Artificial Sequence: Synthetic peptide
  Seed: GNEKKAKLANVVRKMMTNSQ
GNEIKAILGNVTRKMMTNSQ

SEQ ID NO: 188733 - protein, 20 aa, Artificial Sequence
  Description of Artificial Sequence: Synthetic peptide
  Seed: GNEKKAKLANVVRKMMTNSQ
GNEIKAILGNVVRKMMTNSQ

SEQ ID NO: 188734 - protein, 20 aa, Artificial Sequence
  Description of Artificial Sequence: Synthetic peptide
  Seed: GNEKKAKLANVVRKMMTNSQ
GNEIKAILINVNRKMMTNSQ

SEQ ID NO: 188735 - protein, 20 aa, Artificial Sequence
  Description of Artificial Sequence: Synthetic peptide
  Seed: GNEKKAKLANVVRKMMTNSQ
GNEIKAILLNVIRKMMTNSQ

SEQ ID NO: 188736 - protein, 20 aa, Artificial Sequence
  Description of Artificial Sequence: Synthetic peptide
  Seed: GNEKKAKLANVVRKMMTNSQ
GNEIKAILLNVLRKMMTNSQ

SEQ ID NO: 188737 - protein, 20 aa, Artificial Sequence
  Description of Artificial Sequence: Synthetic peptide
  Seed: GNEKKAKLANVVRKMMTNSQ
GNEIKAILNNVARKMMTNSQ

SEQ ID NO: 188738 - protein, 20 aa, Artificial Sequence
  Description of Artificial Sequence: Synthetic peptide
  Seed: GNEKKAKLANVVRKMMTNSQ
GNEIKAILNNVIRKMMTNSQ

SEQ ID NO: 188739 - protein, 20 aa, Artificial Sequence
  Description of Artificial Sequence: Synthetic peptide
  Seed: GNEKKAKLANVVRKMMTNSQ
GNEIKAILNNVLRKMMTNSQ

SEQ ID NO: 188740 - protein, 20 aa, Artificial Sequence
  Description of Artificial Sequence: Synthetic peptide
  Seed: GNEKKAKLANVVRKMMTNSQ
GNEIKAILNNVVRKMMTNSQ

SEQ ID NO: 188741 - protein, 20 aa, Artificial Sequence
  Description of Artificial Sequence: Synthetic peptide
  Seed: GNEKKAKLANVVRKMMTNSQ
GNEIKAILPNVARKMMTNSQ

SEQ ID NO: 188742 - protein, 20 aa, Artificial Sequence
  Description of Artificial Sequence: Synthetic peptide
  Seed: GNEKKAKLANVVRKMMTNSQ
GNEIKAILPNVIRKMMTNSQ

SEQ ID NO: 188743 - protein, 20 aa, Artificial Sequence
  Description of Artificial Sequence: Synthetic peptide
  Seed: GNEKKAKLANVVRKMMTNSQ
GNEIKAILPNVLRKMMTNSQ

SEQ ID NO: 188744 - protein, 20 aa, Artificial Sequence
  Description of Artificial Sequence: Synthetic peptide
  Seed: GNEKKAKLANVVRKMMTNSQ
GNEIKAILPNVMRKMMTNSQ

SEQ ID NO: 188745 - protein, 20 aa, Artificial Sequence
  Description of Artificial Sequence: Synthetic peptide
  Seed: GNEKKAKLANVVRKMMTNSQ
GNEIKAILPNVNRKMMTNSQ

SEQ ID NO: 188746 - protein, 20 aa, Artificial Sequence
  Description of Artificial Sequence: Synthetic peptide
  Seed: GNEKKAKLANVVRKMMTNSQ
GNEIKAILPNVSRKMMTNSQ

SEQ ID NO: 188747 - protein, 20 aa, Artificial Sequence
  Description of Artificial Sequence: Synthetic peptide
  Seed: GNEKKAKLANVVRKMMTNSQ
GNEIKAILPNVTRKMMTNSQ

SEQ ID NO: 188748 - protein, 20 aa, Artificial Sequence
  Description of Artificial Sequence: Synthetic peptide
  Seed: GNEKKAKLANVVRKMMTNSQ
GNEIKAILPNVVRKMMTNSQ

SEQ ID NO: 188749 - protein, 20 aa, Artificial Sequence
  Description of Artificial Sequence: Synthetic peptide
  Seed: GNEKKAKLANVVRKMMTNSQ
GNEIKAILSNVARKMMTNSQ

SEQ ID NO: 188750 - protein, 20 aa, Artificial Sequence
  Description of Artificial Sequence: Synthetic peptide
  Seed: GNEKKAKLANVVRKMMTNSQ
GNEIKAILSNVGRKMMTNSQ

SEQ ID NO: 188751 - protein, 20 aa, Artificial Sequence
  Description of Artificial Sequence: Synthetic peptide
  Seed: GNEKKAKLANVVRKMMTNSQ
GNEIKAILSNVIRKMMTNSQ

SEQ ID NO: 188752 - protein, 20 aa, Artificial Sequence
  Description of Artificial Sequence: Synthetic peptide
  Seed: GNEKKAKLANVVRKMMTNSQ
GNEIKAILSNVLRKMMTNSQ

SEQ ID NO: 188753 - protein, 20 aa, Artificial Sequence
  Description of Artificial Sequence: Synthetic peptide
  Seed: GNEKKAKLANVVRKMMTNSQ
GNEIKAILSNVMRKMMTNSQ

SEQ ID NO: 188754 - protein, 20 aa, Artificial Sequence
  Description of Artificial Sequence: Synthetic peptide
  Seed: GNEKKAKLANVVRKMMTNSQ
GNEIKAILSNVNRKMMTNSQ

SEQ ID NO: 188755 - protein, 20 aa, Artificial Sequence
  Description of Artificial Sequence: Synthetic peptide
  Seed: GNEKKAKLANVVRKMMTNSQ
GNEIKAILSNVSRKMMTNSQ

SEQ ID NO: 188756 - protein, 20 aa, Artificial Sequence
  Description of Artificial Sequence: Synthetic peptide
  Seed: GNEKKAKLANVVRKMMTNSQ
GNEIKAILSNVTRKMMTNSQ

SEQ ID NO: 188757 - protein, 20 aa, Artificial Sequence
  Description of Artificial Sequence: Synthetic peptide
  Seed: GNEKKAKLANVVRKMMTNSQ
GNEIKAILSNVVRKMMTNSQ

SEQ ID NO: 188758 - protein, 20 aa, Artificial Sequence
  Description of Artificial Sequence: Synthetic peptide
  Seed: GNEKKAKLANVVRKMMTNSQ
GNEIKAILTNVARKMMTNSQ

SEQ ID NO: 188759 - protein, 20 aa, Artificial Sequence
  Description of Artificial Sequence: Synthetic peptide
  Seed: GNEKKAKLANVVRKMMTNSQ
GNEIKAILTNVIRKMMTNSQ

SEQ ID NO: 188760 - protein, 20 aa, Artificial Sequence
  Description of Artificial Sequence: Synthetic peptide
  Seed: GNEKKAKLANVVRKMMTNSQ
GNEIKAILTNVLRKMMTNSQ

SEQ ID NO: 188761 - protein, 20 aa, Artificial Sequence
  Description of Artificial Sequence: Synthetic peptide
  Seed: GNEKKAKLANVVRKMMTNSQ
GNEIKAILTNVNRKMMTNSQ

SEQ ID NO: 188762 - protein, 20 aa, Artificial Sequence
  Description of Artificial Sequence: Synthetic peptide
  Seed: GNEKKAKLANVVRKMMTNSQ
GNEIKAILTNVSRKMMTNSQ

SEQ ID NO: 188763 - protein, 20 aa, Artificial Sequence
  Description of Artificial Sequence: Synthetic peptide
  Seed: GNEKKAKLANVVRKMMTNSQ
GNEIKAILTNVTRKMMTNSQ

SEQ ID NO: 188764 - protein, 20 aa, Artificial Sequence
  Description of Artificial Sequence: Synthetic peptide
  Seed: GNEKKAKLANVVRKMMTNSQ
GNEIKAILTNVVRKMMTNSQ

SEQ ID NO: 188765 - protein, 20 aa, Artificial Sequence
  Description of Artificial Sequence: Synthetic peptide
  Seed: GNEKKAKLANVVRKMMTNSQ
GNEIKAILVNVARKMMTNSQ

SEQ ID NO: 188766 - protein, 20 aa, Artificial Sequence
  Description of Artificial Sequence: Synthetic peptide
  Seed: GNEKKAKLANVVRKMMTNSQ
GNEIKAILVNVNRKMMTNSQ

SEQ ID NO: 188767 - protein, 20 aa, Artificial Sequence
  Description of Artificial Sequence: Synthetic peptide
  Seed: GNEKKAKLANVVRKMMTNSQ
GNEIKAILVNVSRKMMTNSQ

SEQ ID NO: 188768 - protein, 20 aa, Artificial Sequence
  Description of Artificial Sequence: Synthetic peptide
  Seed: GNEKKAKLANVVRKMMTNSQ
GNEIKAILWNVIRKMMTNSQ

SEQ ID NO: 188769 - protein, 20 aa, Artificial Sequence
  Description of Artificial Sequence: Synthetic peptide
  Seed: GNEKKAKLANVVRKMMTNSQ
GNEIKAILWNVLRKMMTNSQ

SEQ ID NO: 188770 - protein, 20 aa, Artificial Sequence
  Description of Artificial Sequence: Synthetic peptide
  Seed: GNEKKAKLANVVRKMMTNSQ
GNEIKAILWNVMRKMMTNSQ

SEQ ID NO: 188771 - protein, 20 aa, Artificial Sequence
  Description of Artificial Sequence: Synthetic peptide
  Seed: GNEKKAKLANVVRKMMTNSQ
GNEIKAILWNVVRKMMTNSQ

SEQ ID NO: 188772 - protein, 20 aa, Artificial Sequence
  Description of Artificial Sequence: Synthetic peptide
  Seed: GNEKKAKLANVVRKMMTNSQ
GNEIKAILYNVIRKMMTNSQ

SEQ ID NO: 188773 - protein, 20 aa, Artificial Sequence
  Description of Artificial Sequence: Synthetic peptide
  Seed: GNEKKAKLANVVRKMMTNSQ
GNEIKAILYNVLRKMMTNSQ

SEQ ID NO: 188774 - protein, 20 aa, Artificial Sequence
  Description of Artificial Sequence: Synthetic peptide
  Seed: GNEKKAKLANVVRKMMTNSQ
GNEIKAILYNVMRKMMTNSQ

SEQ ID NO: 188775 - protein, 20 aa, Artificial Sequence
  Description of Artificial Sequence: Synthetic peptide
  Seed: GNEKKAKLANVVRKMMTNSQ
GNEIKAILYNVVRKMMTNSQ

SEQ ID NO: 188776 - protein, 20 aa, Artificial Sequence
  Description of Artificial Sequence: Synthetic peptide
  Seed: GNEKKAKLANVVRKMMTNSQ
GNEIKAKLFNVARKMMTNSQ

SEQ ID NO: 188777 - protein, 20 aa, Artificial Sequence
  Description of Artificial Sequence: Synthetic peptide
  Seed: GNEKKAKLANVVRKMMTNSQ
GNEIKAKLFNVFRKMMTNSQ

SEQ ID NO: 188778 - protein, 20 aa, Artificial Sequence
  Description of Artificial Sequence: Synthetic peptide
  Seed: GNEKKAKLANVVRKMMTNSQ
GNEIKAKLFNVIRKMMTNSQ

SEQ ID NO: 188779 - protein, 20 aa, Artificial Sequence
  Description of Artificial Sequence: Synthetic peptide
  Seed: GNEKKAKLANVVRKMMTNSQ
GNEIKAKLFNVLRKMMTNSQ

SEQ ID NO: 188780 - protein, 20 aa, Artificial Sequence
  Description of Artificial Sequence: Synthetic peptide
  Seed: GNEKKAKLANVVRKMMTNSQ
GNEIKAKLFNVMRKMMTNSQ

SEQ ID NO: 188781 - protein, 20 aa, Artificial Sequence
  Description of Artificial Sequence: Synthetic peptide
  Seed: GNEKKAKLANVVRKMMTNSQ
GNEIKAKLFNVTRKMMTNSQ

SEQ ID NO: 188782 - protein, 20 aa, Artificial Sequence
  Description of Artificial Sequence: Synthetic peptide
  Seed: GNEKKAKLANVVRKMMTNSQ
GNEIKAKLFNVVRKMMTNSQ

SEQ ID NO: 188783 - protein, 20 aa, Artificial Sequence
  Description of Artificial Sequence: Synthetic peptide
  Seed: GNEKKAKLANVVRKMMTNSQ
GNEIKALLANVARKMMTNSQ

SEQ ID NO: 188784 - protein, 20 aa, Artificial Sequence
  Description of Artificial Sequence: Synthetic peptide
  Seed: GNEKKAKLANVVRKMMTNSQ
GNEIKALLANVCRKMMTNSQ

SEQ ID NO: 188785 - protein, 20 aa, Artificial Sequence
  Description of Artificial Sequence: Synthetic peptide
  Seed: GNEKKAKLANVVRKMMTNSQ
GNEIKALLANVDRKMMTNSQ

SEQ ID NO: 188786 - protein, 20 aa, Artificial Sequence
  Description of Artificial Sequence: Synthetic peptide
  Seed: GNEKKAKLANVVRKMMTNSQ
GNEIKALLANVFRKMMTNSQ

SEQ ID NO: 188787 - protein, 20 aa, Artificial Sequence
  Description of Artificial Sequence: Synthetic peptide
  Seed: GNEKKAKLANVVRKMMTNSQ
GNEIKALLANVGRKMMTNSQ

SEQ ID NO: 188788 - protein, 20 aa, Artificial Sequence
  Description of Artificial Sequence: Synthetic peptide
  Seed: GNEKKAKLANVVRKMMTNSQ
GNEIKALLANVHRKMMTNSQ

SEQ ID NO: 188789 - protein, 20 aa, Artificial Sequence
  Description of Artificial Sequence: Synthetic peptide
  Seed: GNEKKAKLANVVRKMMTNSQ
GNEIKALLANVIRKMMTNSQ

SEQ ID NO: 188790 - protein, 20 aa, Artificial Sequence
  Description of Artificial Sequence: Synthetic peptide
  Seed: GNEKKAKLANVVRKMMTNSQ
GNEIKALLANVLRKMMTNSQ

SEQ ID NO: 188791 - protein, 20 aa, Artificial Sequence
  Description of Artificial Sequence: Synthetic peptide
  Seed: GNEKKAKLANVVRKMMTNSQ
GNEIKALLANVMRKMMTNSQ

SEQ ID NO: 188792 - protein, 20 aa, Artificial Sequence
  Description of Artificial Sequence: Synthetic peptide
  Seed: GNEKKAKLANVVRKMMTNSQ
GNEIKALLANVNRKMMTNSQ

SEQ ID NO: 188793 - protein, 20 aa, Artificial Sequence
  Description of Artificial Sequence: Synthetic peptide
  Seed: GNEKKAKLANVVRKMMTNSQ
GNEIKALLANVPRKMMTNSQ

SEQ ID NO: 188794 - protein, 20 aa, Artificial Sequence
  Description of Artificial Sequence: Synthetic peptide
  Seed: GNEKKAKLANVVRKMMTNSQ
GNEIKALLANVQRKMMTNSQ

SEQ ID NO: 188795 - protein, 20 aa, Artificial Sequence
  Description of Artificial Sequence: Synthetic peptide
  Seed: GNEKKAKLANVVRKMMTNSQ
GNEIKALLANVSRKMMTNSQ

SEQ ID NO: 188796 - protein, 20 aa, Artificial Sequence
  Description of Artificial Sequence: Synthetic peptide
  Seed: GNEKKAKLANVVRKMMTNSQ
GNEIKALLANVTRKMMTNSQ

SEQ ID NO: 188797 - protein, 20 aa, Artificial Sequence
  Description of Artificial Sequence: Synthetic peptide
  Seed: GNEKKAKLANVVRKMMTNSQ
GNEIKALLANVVRKMMTNSQ

SEQ ID NO: 188798 - protein, 20 aa, Artificial Sequence
  Description of Artificial Sequence: Synthetic peptide
  Seed: GNEKKAKLANVVRKMMTNSQ
GNEIKALLANVYRKMMTNSQ

SEQ ID NO: 188799 - protein, 20 aa, Artificial Sequence
  Description of Artificial Sequence: Synthetic peptide
  Seed: GNEKKAKLANVVRKMMTNSQ
GNEIKALLFNVARKMMTNSQ

SEQ ID NO: 188800 - protein, 20 aa, Artificial Sequence
  Description of Artificial Sequence: Synthetic peptide
  Seed: GNEKKAKLANVVRKMMTNSQ
GNEIKALLFNVDRKMMTNSQ

SEQ ID NO: 188801 - protein, 20 aa, Artificial Sequence
  Description of Artificial Sequence: Synthetic peptide
  Seed: GNEKKAKLANVVRKMMTNSQ
GNEIKALLFNVERKMMTNSQ

SEQ ID NO: 188802 - protein, 20 aa, Artificial Sequence
  Description of Artificial Sequence: Synthetic peptide
  Seed: GNEKKAKLANVVRKMMTNSQ
GNEIKALLFNVIRKMMTNSQ

SEQ ID NO: 188803 - protein, 20 aa, Artificial Sequence
  Description of Artificial Sequence: Synthetic peptide
  Seed: GNEKKAKLANVVRKMMTNSQ
GNEIKALLFNVLRKMMTNSQ

SEQ ID NO: 188804 - protein, 20 aa, Artificial Sequence
  Description of Artificial Sequence: Synthetic peptide
  Seed: GNEKKAKLANVVRKMMTNSQ
GNEIKALLFNVMRKMMTNSQ

SEQ ID NO: 188805 - protein, 20 aa, Artificial Sequence
  Description of Artificial Sequence: Synthetic peptide
  Seed: GNEKKAKLANVVRKMMTNSQ
GNEIKALLFNVNRKMMTNSQ

SEQ ID NO: 188806 - protein, 20 aa, Artificial Sequence
  Description of Artificial Sequence: Synthetic peptide
  Seed: GNEKKAKLANVVRKMMTNSQ
GNEIKALLFNVTRKMMTNSQ

SEQ ID NO: 188807 - protein, 20 aa, Artificial Sequence
  Description of Artificial Sequence: Synthetic peptide
  Seed: GNEKKAKLANVVRKMMTNSQ
GNEIKALLFNVVRKMMTNSQ

SEQ ID NO: 188808 - protein, 20 aa, Artificial Sequence
  Description of Artificial Sequence: Synthetic peptide
  Seed: GNEKKAKLANVVRKMMTNSQ
GNEIKALLFNVYRKMMTNSQ

SEQ ID NO: 188809 - protein, 20 aa, Artificial Sequence
  Description of Artificial Sequence: Synthetic peptide
  Seed: GNEKKAKLANVVRKMMTNSQ
GNEIKALLGNVARKMMTNSQ

SEQ ID NO: 188810 - protein, 20 aa, Artificial Sequence
  Description of Artificial Sequence: Synthetic peptide
  Seed: GNEKKAKLANVVRKMMTNSQ
GNEIKALLGNVCRKMMTNSQ

SEQ ID NO: 188811 - protein, 20 aa, Artificial Sequence
  Description of Artificial Sequence: Synthetic peptide
  Seed: GNEKKAKLANVVRKMMTNSQ
GNEIKALLGNVFRKMMTNSQ

SEQ ID NO: 188812 - protein, 20 aa, Artificial Sequence
  Description of Artificial Sequence: Synthetic peptide
  Seed: GNEKKAKLANVVRKMMTNSQ
GNEIKALLGNVGRKMMTNSQ

SEQ ID NO: 188813 - protein, 20 aa, Artificial Sequence
  Description of Artificial Sequence: Synthetic peptide
  Seed: GNEKKAKLANVVRKMMTNSQ
GNEIKALLGNVIRKMMTNSQ

SEQ ID NO: 188814 - protein, 20 aa, Artificial Sequence
  Description of Artificial Sequence: Synthetic peptide
  Seed: GNEKKAKLANVVRKMMTNSQ
GNEIKALLGNVLRKMMTNSQ

SEQ ID NO: 188815 - protein, 20 aa, Artificial Sequence
  Description of Artificial Sequence: Synthetic peptide
  Seed: GNEKKAKLANVVRKMMTNSQ
GNEIKALLGNVMRKMMTNSQ

SEQ ID NO: 188816 - protein, 20 aa, Artificial Sequence
  Description of Artificial Sequence: Synthetic peptide
  Seed: GNEKKAKLANVVRKMMTNSQ
GNEIKALLGNVNRKMMTNSQ

SEQ ID NO: 188817 - protein, 20 aa, Artificial Sequence
  Description of Artificial Sequence: Synthetic peptide
  Seed: GNEKKAKLANVVRKMMTNSQ
GNEIKALLGNVSRKMMTNSQ

SEQ ID NO: 188818 - protein, 20 aa, Artificial Sequence
  Description of Artificial Sequence: Synthetic peptide
  Seed: GNEKKAKLANVVRKMMTNSQ
GNEIKALLGNVTRKMMTNSQ

SEQ ID NO: 188819 - protein, 20 aa, Artificial Sequence
  Description of Artificial Sequence: Synthetic peptide
  Seed: GNEKKAKLANVVRKMMTNSQ
GNEIKALLGNVVRKMMTNSQ

SEQ ID NO: 188820 - protein, 20 aa, Artificial Sequence
  Description of Artificial Sequence: Synthetic peptide
  Seed: GNEKKAKLANVVRKMMTNSQ
GNEIKALLINVARKMMTNSQ

SEQ ID NO: 188821 - protein, 20 aa, Artificial Sequence
  Description of Artificial Sequence: Synthetic peptide
  Seed: GNEKKAKLANVVRKMMTNSQ
GNEIKALLINVNRKMMTNSQ

SEQ ID NO: 188822 - protein, 20 aa, Artificial Sequence
  Description of Artificial Sequence: Synthetic peptide
  Seed: GNEKKAKLANVVRKMMTNSQ
GNEIKALLINVSRKMMTNSQ

SEQ ID NO: 188823 - protein, 20 aa, Artificial Sequence
  Description of Artificial Sequence: Synthetic peptide
  Seed: GNEKKAKLANVVRKMMTNSQ
GNEIKALLNNVARKMMTNSQ

SEQ ID NO: 188824 - protein, 20 aa, Artificial Sequence
  Description of Artificial Sequence: Synthetic peptide
  Seed: GNEKKAKLANVVRKMMTNSQ
GNEIKALLNNVIRKMMTNSQ

SEQ ID NO: 188825 - protein, 20 aa, Artificial Sequence
  Description of Artificial Sequence: Synthetic peptide
  Seed: GNEKKAKLANVVRKMMTNSQ
GNEIKALLNNVLRKMMTNSQ

SEQ ID NO: 188826 - protein, 20 aa, Artificial Sequence
  Description of Artificial Sequence: Synthetic peptide
  Seed: GNEKKAKLANVVRKMMTNSQ
GNEIKALLNNVMRKMMTNSQ

SEQ ID NO: 188827 - protein, 20 aa, Artificial Sequence
  Description of Artificial Sequence: Synthetic peptide
  Seed: GNEKKAKLANVVRKMMTNSQ
GNEIKALLNNVNRKMMTNSQ

SEQ ID NO: 188828 - protein, 20 aa, Artificial Sequence
  Description of Artificial Sequence: Synthetic peptide
  Seed: GNEKKAKLANVVRKMMTNSQ
GNEIKALLNNVSRKMMTNSQ

SEQ ID NO: 188829 - protein, 20 aa, Artificial Sequence
  Description of Artificial Sequence: Synthetic peptide
  Seed: GNEKKAKLANVVRKMMTNSQ
GNEIKALLNNVTRKMMTNSQ

SEQ ID NO: 188830 - protein, 20 aa, Artificial Sequence
  Description of Artificial Sequence: Synthetic peptide
  Seed: GNEKKAKLANVVRKMMTNSQ
GNEIKALLNNVVRKMMTNSQ

SEQ ID NO: 188831 - protein, 20 aa, Artificial Sequence
  Description of Artificial Sequence: Synthetic peptide
  Seed: GNEKKAKLANVVRKMMTNSQ
GNEIKALLPNVARKMMTNSQ

SEQ ID NO: 188832 - protein, 20 aa, Artificial Sequence
  Description of Artificial Sequence: Synthetic peptide
  Seed: GNEKKAKLANVVRKMMTNSQ
GNEIKALLPNVCRKMMTNSQ

SEQ ID NO: 188833 - protein, 20 aa, Artificial Sequence
  Description of Artificial Sequence: Synthetic peptide
  Seed: GNEKKAKLANVVRKMMTNSQ
GNEIKALLPNVFRKMMTNSQ

SEQ ID NO: 188834 - protein, 20 aa, Artificial Sequence
  Description of Artificial Sequence: Synthetic peptide
  Seed: GNEKKAKLANVVRKMMTNSQ
GNEIKALLPNVGRKMMTNSQ

SEQ ID NO: 188835 - protein, 20 aa, Artificial Sequence
  Description of Artificial Sequence: Synthetic peptide
  Seed: GNEKKAKLANVVRKMMTNSQ
GNEIKALLPNVHRKMMTNSQ

SEQ ID NO: 188836 - protein, 20 aa, Artificial Sequence
  Description of Artificial Sequence: Synthetic peptide
  Seed: GNEKKAKLANVVRKMMTNSQ
GNEIKALLPNVIRKMMTNSQ

SEQ ID NO: 188837 - protein, 20 aa, Artificial Sequence
  Description of Artificial Sequence: Synthetic peptide
  Seed: GNEKKAKLANVVRKMMTNSQ
GNEIKALLPNVLRKMMTNSQ

SEQ ID NO: 188838 - protein, 20 aa, Artificial Sequence
  Description of Artificial Sequence: Synthetic peptide
  Seed: GNEKKAKLANVVRKMMTNSQ
GNEIKALLPNVMRKMMTNSQ

SEQ ID NO: 188839 - protein, 20 aa, Artificial Sequence
  Description of Artificial Sequence: Synthetic peptide
  Seed: GNEKKAKLANVVRKMMTNSQ
GNEIKALLPNVNRKMMTNSQ

SEQ ID NO: 188840 - protein, 20 aa, Artificial Sequence
  Description of Artificial Sequence: Synthetic peptide
  Seed: GNEKKAKLANVVRKMMTNSQ
GNEIKALLPNVQRKMMTNSQ

SEQ ID NO: 188841 - protein, 20 aa, Artificial Sequence
  Description of Artificial Sequence: Synthetic peptide
  Seed: GNEKKAKLANVVRKMMTNSQ
GNEIKALLPNVSRKMMTNSQ

SEQ ID NO: 188842 - protein, 20 aa, Artificial Sequence
  Description of Artificial Sequence: Synthetic peptide
  Seed: GNEKKAKLANVVRKMMTNSQ
GNEIKALLPNVTRKMMTNSQ

SEQ ID NO: 188843 - protein, 20 aa, Artificial Sequence
  Description of Artificial Sequence: Synthetic peptide
  Seed: GNEKKAKLANVVRKMMTNSQ
GNEIKALLPNVVRKMMTNSQ

SEQ ID NO: 188844 - protein, 20 aa, Artificial Sequence
  Description of Artificial Sequence: Synthetic peptide
  Seed: GNEKKAKLANVVRKMMTNSQ
GNEIKALLSNVARKMMTNSQ

SEQ ID NO: 188845 - protein, 20 aa, Artificial Sequence
  Description of Artificial Sequence: Synthetic peptide
  Seed: GNEKKAKLANVVRKMMTNSQ
GNEIKALLSNVCRKMMTNSQ

SEQ ID NO: 188846 - protein, 20 aa, Artificial Sequence
  Description of Artificial Sequence: Synthetic peptide
  Seed: GNEKKAKLANVVRKMMTNSQ
GNEIKALLSNVGRKMMTNSQ

SEQ ID NO: 188847 - protein, 20 aa, Artificial Sequence
  Description of Artificial Sequence: Synthetic peptide
  Seed: GNEKKAKLANVVRKMMTNSQ
GNEIKALLSNVHRKMMTNSQ

SEQ ID NO: 188848 - protein, 20 aa, Artificial Sequence
  Description of Artificial Sequence: Synthetic peptide
  Seed: GNEKKAKLANVVRKMMTNSQ
GNEIKALLSNVIRKMMTNSQ

SEQ ID NO: 188849 - protein, 20 aa, Artificial Sequence
  Description of Artificial Sequence: Synthetic peptide
  Seed: GNEKKAKLANVVRKMMTNSQ
GNEIKALLSNVLRKMMTNSQ

SEQ ID NO: 188850 - protein, 20 aa, Artificial Sequence
  Description of Artificial Sequence: Synthetic peptide
  Seed: GNEKKAKLANVVRKMMTNSQ
GNEIKALLSNVMRKMMTNSQ

SEQ ID NO: 188851 - protein, 20 aa, Artificial Sequence
  Description of Artificial Sequence: Synthetic peptide
  Seed: GNEKKAKLANVVRKMMTNSQ
GNEIKALLSNVNRKMMTNSQ

SEQ ID NO: 188852 - protein, 20 aa, Artificial Sequence
  Description of Artificial Sequence: Synthetic peptide
  Seed: GNEKKAKLANVVRKMMTNSQ
GNEIKALLSNVSRKMMTNSQ

SEQ ID NO: 188853 - protein, 20 aa, Artificial Sequence
  Description of Artificial Sequence: Synthetic peptide
  Seed: GNEKKAKLANVVRKMMTNSQ
GNEIKALLSNVTRKMMTNSQ

SEQ ID NO: 188854 - protein, 20 aa, Artificial Sequence
  Description of Artificial Sequence: Synthetic peptide
  Seed: GNEKKAKLANVVRKMMTNSQ
GNEIKALLSNVVRKMMTNSQ

SEQ ID NO: 188855 - protein, 20 aa, Artificial Sequence
  Description of Artificial Sequence: Synthetic peptide
  Seed: GNEKKAKLANVVRKMMTNSQ
GNEIKALLTNVARKMMTNSQ

SEQ ID NO: 188856 - protein, 20 aa, Artificial Sequence
  Description of Artificial Sequence: Synthetic peptide
  Seed: GNEKKAKLANVVRKMMTNSQ
GNEIKALLTNVGRKMMTNSQ

SEQ ID NO: 188857 - protein, 20 aa, Artificial Sequence
  Description of Artificial Sequence: Synthetic peptide
  Seed: GNEKKAKLANVVRKMMTNSQ
GNEIKALLTNVHRKMMTNSQ

SEQ ID NO: 188858 - protein, 20 aa, Artificial Sequence
  Description of Artificial Sequence: Synthetic peptide
  Seed: GNEKKAKLANVVRKMMTNSQ
GNEIKALLTNVIRKMMTNSQ

SEQ ID NO: 188859 - protein, 20 aa, Artificial Sequence
  Description of Artificial Sequence: Synthetic peptide
  Seed: GNEKKAKLANVVRKMMTNSQ
GNEIKALLTNVLRKMMTNSQ

SEQ ID NO: 188860 - protein, 20 aa, Artificial Sequence
  Description of Artificial Sequence: Synthetic peptide
  Seed: GNEKKAKLANVVRKMMTNSQ
GNEIKALLTNVMRKMMTNSQ

SEQ ID NO: 188861 - protein, 20 aa, Artificial Sequence
  Description of Artificial Sequence: Synthetic peptide
  Seed: GNEKKAKLANVVRKMMTNSQ
GNEIKALLTNVNRKMMTNSQ

SEQ ID NO: 188862 - protein, 20 aa, Artificial Sequence
  Description of Artificial Sequence: Synthetic peptide
  Seed: GNEKKAKLANVVRKMMTNSQ
GNEIKALLTNVSRKMMTNSQ

SEQ ID NO: 188863 - protein, 20 aa, Artificial Sequence
  Description of Artificial Sequence: Synthetic peptide
  Seed: GNEKKAKLANVVRKMMTNSQ
GNEIKALLTNVTRKMMTNSQ

SEQ ID NO: 188864 - protein, 20 aa, Artificial Sequence
  Description of Artificial Sequence: Synthetic peptide
  Seed: GNEKKAKLANVVRKMMTNSQ
GNEIKALLTNVVRKMMTNSQ

SEQ ID NO: 188865 - protein, 20 aa, Artificial Sequence
  Description of Artificial Sequence: Synthetic peptide
  Seed: GNEKKAKLANVVRKMMTNSQ
GNEIKALLVNVARKMMTNSQ

SEQ ID NO: 188866 - protein, 20 aa, Artificial Sequence
  Description of Artificial Sequence: Synthetic peptide
  Seed: GNEKKAKLANVVRKMMTNSQ
GNEIKALLVNVHRKMMTNSQ

SEQ ID NO: 188867 - protein, 20 aa, Artificial Sequence
  Description of Artificial Sequence: Synthetic peptide
  Seed: GNEKKAKLANVVRKMMTNSQ
GNEIKALLVNVNRKMMTNSQ

SEQ ID NO: 188868 - protein, 20 aa, Artificial Sequence
  Description of Artificial Sequence: Synthetic peptide
  Seed: GNEKKAKLANVVRKMMTNSQ
GNEIKALLVNVSRKMMTNSQ

SEQ ID NO: 188869 - protein, 20 aa, Artificial Sequence
  Description of Artificial Sequence: Synthetic peptide
  Seed: GNEKKAKLANVVRKMMTNSQ
GNEIKALLVNVTRKMMTNSQ

SEQ ID NO: 188870 - protein, 20 aa, Artificial Sequence
  Description of Artificial Sequence: Synthetic peptide
  Seed: GNEKKAKLANVVRKMMTNSQ
GNEIKALLVNVVRKMMTNSQ

SEQ ID NO: 188871 - protein, 20 aa, Artificial Sequence
  Description of Artificial Sequence: Synthetic peptide
  Seed: GNEKKAKLANVVRKMMTNSQ
GNEIKALLWNVIRKMMTNSQ

SEQ ID NO: 188872 - protein, 20 aa, Artificial Sequence
  Description of Artificial Sequence: Synthetic peptide
  Seed: GNEKKAKLANVVRKMMTNSQ
GNEIKALLWNVMRKMMTNSQ

SEQ ID NO: 188873 - protein, 20 aa, Artificial Sequence
  Description of Artificial Sequence: Synthetic peptide
  Seed: GNEKKAKLANVVRKMMTNSQ
GNEIKALLWNVVRKMMTNSQ

SEQ ID NO: 188874 - protein, 20 aa, Artificial Sequence
  Description of Artificial Sequence: Synthetic peptide
  Seed: GNEKKAKLANVVRKMMTNSQ
GNEIKALLYNVIRKMMTNSQ

SEQ ID NO: 188875 - protein, 20 aa, Artificial Sequence
  Description of Artificial Sequence: Synthetic peptide
  Seed: GNEKKAKLANVVRKMMTNSQ
GNEIKALLYNVLRKMMTNSQ

SEQ ID NO: 188876 - protein, 20 aa, Artificial Sequence
  Description of Artificial Sequence: Synthetic peptide
  Seed: GNEKKAKLANVVRKMMTNSQ
GNEIKALLYNVMRKMMTNSQ

SEQ ID NO: 188877 - protein, 20 aa, Artificial Sequence
  Description of Artificial Sequence: Synthetic peptide
  Seed: GNEKKAKLANVVRKMMTNSQ
GNEIKALLYNVVRKMMTNSQ

SEQ ID NO: 188878 - protein, 20 aa, Artificial Sequence
  Description of Artificial Sequence: Synthetic peptide
  Seed: GNEKKAKLANVVRKMMTNSQ
GNEIKAMLANVARKMMTNSQ

SEQ ID NO: 188879 - protein, 20 aa, Artificial Sequence
  Description of Artificial Sequence: Synthetic peptide
  Seed: GNEKKAKLANVVRKMMTNSQ
GNEIKAMLANVCRKMMTNSQ

SEQ ID NO: 188880 - protein, 20 aa, Artificial Sequence
  Description of Artificial Sequence: Synthetic peptide
  Seed: GNEKKAKLANVVRKMMTNSQ
GNEIKAMLANVDRKMMTNSQ

SEQ ID NO: 188881 - protein, 20 aa, Artificial Sequence
  Description of Artificial Sequence: Synthetic peptide
  Seed: GNEKKAKLANVVRKMMTNSQ
GNEIKAMLANVERKMMTNSQ

SEQ ID NO: 188882 - protein, 20 aa, Artificial Sequence
  Description of Artificial Sequence: Synthetic peptide
  Seed: GNEKKAKLANVVRKMMTNSQ
GNEIKAMLANVFRKMMTNSQ

SEQ ID NO: 188883 - protein, 20 aa, Artificial Sequence
  Description of Artificial Sequence: Synthetic peptide
  Seed: GNEKKAKLANVVRKMMTNSQ
GNEIKAMLANVGRKMMTNSQ

SEQ ID NO: 188884 - protein, 20 aa, Artificial Sequence
  Description of Artificial Sequence: Synthetic peptide
  Seed: GNEKKAKLANVVRKMMTNSQ
GNEIKAMLANVHRKMMTNSQ

SEQ ID NO: 188885 - protein, 20 aa, Artificial Sequence
  Description of Artificial Sequence: Synthetic peptide
  Seed: GNEKKAKLANVVRKMMTNSQ
GNEIKAMLANVIRKMMTNSQ

SEQ ID NO: 188886 - protein, 20 aa, Artificial Sequence
  Description of Artificial Sequence: Synthetic peptide
  Seed: GNEKKAKLANVVRKMMTNSQ
GNEIKAMLANVLRKMMTNSQ

SEQ ID NO: 188887 - protein, 20 aa, Artificial Sequence
  Description of Artificial Sequence: Synthetic peptide
  Seed: GNEKKAKLANVVRKMMTNSQ
GNEIKAMLANVMRKMMTNSQ

SEQ ID NO: 188888 - protein, 20 aa, Artificial Sequence
  Description of Artificial Sequence: Synthetic peptide
  Seed: GNEKKAKLANVVRKMMTNSQ
GNEIKAMLANVNRKMMTNSQ

SEQ ID NO: 188889 - protein, 20 aa, Artificial Sequence
  Description of Artificial Sequence: Synthetic peptide
  Seed: GNEKKAKLANVVRKMMTNSQ
GNEIKAMLANVPRKMMTNSQ

SEQ ID NO: 188890 - protein, 20 aa, Artificial Sequence
  Description of Artificial Sequence: Synthetic peptide
  Seed: GNEKKAKLANVVRKMMTNSQ
GNEIKAMLANVQRKMMTNSQ

SEQ ID NO: 188891 - protein, 20 aa, Artificial Sequence
  Description of Artificial Sequence: Synthetic peptide
  Seed: GNEKKAKLANVVRKMMTNSQ
GNEIKAMLANVSRKMMTNSQ

SEQ ID NO: 188892 - protein, 20 aa, Artificial Sequence
  Description of Artificial Sequence: Synthetic peptide
  Seed: GNEKKAKLANVVRKMMTNSQ
GNEIKAMLANVTRKMMTNSQ

SEQ ID NO: 188893 - protein, 20 aa, Artificial Sequence
  Description of Artificial Sequence: Synthetic peptide
  Seed: GNEKKAKLANVVRKMMTNSQ
GNEIKAMLANVVRKMMTNSQ

SEQ ID NO: 188894 - protein, 20 aa, Artificial Sequence
  Description of Artificial Sequence: Synthetic peptide
  Seed: GNEKKAKLANVVRKMMTNSQ
GNEIKAMLANVYRKMMTNSQ

SEQ ID NO: 188895 - protein, 20 aa, Artificial Sequence
  Description of Artificial Sequence: Synthetic peptide
  Seed: GNEKKAKLANVVRKMMTNSQ
GNEIKAMLDNVIRKMMTNSQ

SEQ ID NO: 188896 - protein, 20 aa, Artificial Sequence
  Description of Artificial Sequence: Synthetic peptide
  Seed: GNEKKAKLANVVRKMMTNSQ
GNEIKAMLDNVVRKMMTNSQ

SEQ ID NO: 188897 - protein, 20 aa, Artificial Sequence
  Description of Artificial Sequence: Synthetic peptide
  Seed: GNEKKAKLANVVRKMMTNSQ
GNEIKAMLFNVERKMMTNSQ

SEQ ID NO: 188898 - protein, 20 aa, Artificial Sequence
  Description of Artificial Sequence: Synthetic peptide
  Seed: GNEKKAKLANVVRKMMTNSQ
GNEIKAMLFNVIRKMMTNSQ

SEQ ID NO: 188899 - protein, 20 aa, Artificial Sequence
  Description of Artificial Sequence: Synthetic peptide
  Seed: GNEKKAKLANVVRKMMTNSQ
GNEIKAMLFNVLRKMMTNSQ

SEQ ID NO: 188900 - protein, 20 aa, Artificial Sequence
  Description of Artificial Sequence: Synthetic peptide
  Seed: GNEKKAKLANVVRKMMTNSQ
GNEIKAMLFNVMRKMMTNSQ

SEQ ID NO: 188901 - protein, 20 aa, Artificial Sequence
  Description of Artificial Sequence: Synthetic peptide
  Seed: GNEKKAKLANVVRKMMTNSQ
GNEIKAMLFNVNRKMMTNSQ

SEQ ID NO: 188902 - protein, 20 aa, Artificial Sequence
  Description of Artificial Sequence: Synthetic peptide
  Seed: GNEKKAKLANVVRKMMTNSQ
GNEIKAMLFNVTRKMMTNSQ

SEQ ID NO: 188903 - protein, 20 aa, Artificial Sequence
  Description of Artificial Sequence: Synthetic peptide
  Seed: GNEKKAKLANVVRKMMTNSQ
GNEIKAMLFNVVRKMMTNSQ

SEQ ID NO: 188904 - protein, 20 aa, Artificial Sequence
  Description of Artificial Sequence: Synthetic peptide
  Seed: GNEKKAKLANVVRKMMTNSQ
GNEIKAMLFNVYRKMMTNSQ

SEQ ID NO: 188905 - protein, 20 aa, Artificial Sequence
  Description of Artificial Sequence: Synthetic peptide
  Seed: GNEKKAKLANVVRKMMTNSQ
GNEIKAMLGNVARKMMTNSQ

SEQ ID NO: 188906 - protein, 20 aa, Artificial Sequence
  Description of Artificial Sequence: Synthetic peptide
  Seed: GNEKKAKLANVVRKMMTNSQ
GNEIKAMLGNVCRKMMTNSQ

SEQ ID NO: 188907 - protein, 20 aa, Artificial Sequence
  Description of Artificial Sequence: Synthetic peptide
  Seed: GNEKKAKLANVVRKMMTNSQ
GNEIKAMLGNVFRKMMTNSQ

SEQ ID NO: 188908 - protein, 20 aa, Artificial Sequence
  Description of Artificial Sequence: Synthetic peptide
  Seed: GNEKKAKLANVVRKMMTNSQ
GNEIKAMLGNVGRKMMTNSQ

SEQ ID NO: 188909 - protein, 20 aa, Artificial Sequence
  Description of Artificial Sequence: Synthetic peptide
  Seed: GNEKKAKLANVVRKMMTNSQ
GNEIKAMLGNVIRKMMTNSQ

SEQ ID NO: 188910 - protein, 20 aa, Artificial Sequence
  Description of Artificial Sequence: Synthetic peptide
  Seed: GNEKKAKLANVVRKMMTNSQ
GNEIKAMLGNVLRKMMTNSQ

SEQ ID NO: 188911 - protein, 20 aa, Artificial Sequence
  Description of Artificial Sequence: Synthetic peptide
  Seed: GNEKKAKLANVVRKMMTNSQ
GNEIKAMLGNVMRKMMTNSQ

SEQ ID NO: 188912 - protein, 20 aa, Artificial Sequence
  Description of Artificial Sequence: Synthetic peptide
  Seed: GNEKKAKLANVVRKMMTNSQ
GNEIKAMLGNVNRKMMTNSQ

SEQ ID NO: 188913 - protein, 20 aa, Artificial Sequence
  Description of Artificial Sequence: Synthetic peptide
  Seed: GNEKKAKLANVVRKMMTNSQ
GNEIKAMLGNVSRKMMTNSQ

SEQ ID NO: 188914 - protein, 20 aa, Artificial Sequence
  Description of Artificial Sequence: Synthetic peptide
  Seed: GNEKKAKLANVVRKMMTNSQ
GNEIKAMLGNVTRKMMTNSQ

SEQ ID NO: 188915 - protein, 20 aa, Artificial Sequence
  Description of Artificial Sequence: Synthetic peptide
  Seed: GNEKKAKLANVVRKMMTNSQ
GNEIKAMLGNVVRKMMTNSQ

SEQ ID NO: 188916 - protein, 20 aa, Artificial Sequence
  Description of Artificial Sequence: Synthetic peptide
  Seed: GNEKKAKLANVVRKMMTNSQ
GNEIKAMLGNVYRKMMTNSQ

SEQ ID NO: 188917 - protein, 20 aa, Artificial Sequence
  Description of Artificial Sequence: Synthetic peptide
  Seed: GNEKKAKLANVVRKMMTNSQ
GNEIKAMLINVARKMMTNSQ

SEQ ID NO: 188918 - protein, 20 aa, Artificial Sequence
  Description of Artificial Sequence: Synthetic peptide
  Seed: GNEKKAKLANVVRKMMTNSQ
GNEIKAMLINVHRKMMTNSQ

SEQ ID NO: 188919 - protein, 20 aa, Artificial Sequence
  Description of Artificial Sequence: Synthetic peptide
  Seed: GNEKKAKLANVVRKMMTNSQ
GNEIKAMLINVNRKMMTNSQ

SEQ ID NO: 188920 - protein, 20 aa, Artificial Sequence
  Description of Artificial Sequence: Synthetic peptide
  Seed: GNEKKAKLANVVRKMMTNSQ
GNEIKAMLINVSRKMMTNSQ

SEQ ID NO: 188921 - protein, 20 aa, Artificial Sequence
  Description of Artificial Sequence: Synthetic peptide
  Seed: GNEKKAKLANVVRKMMTNSQ
GNEIKAMLINVTRKMMTNSQ

SEQ ID NO: 188922 - protein, 20 aa, Artificial Sequence
  Description of Artificial Sequence: Synthetic peptide
  Seed: GNEKKAKLANVVRKMMTNSQ
GNEIKAMLNNVARKMMTNSQ

SEQ ID NO: 188923 - protein, 20 aa, Artificial Sequence
  Description of Artificial Sequence: Synthetic peptide
  Seed: GNEKKAKLANVVRKMMTNSQ
GNEIKAMLNNVIRKMMTNSQ

SEQ ID NO: 188924 - protein, 20 aa, Artificial Sequence
  Description of Artificial Sequence: Synthetic peptide
  Seed: GNEKKAKLANVVRKMMTNSQ
GNEIKAMLNNVLRKMMTNSQ

SEQ ID NO: 188925 - protein, 20 aa, Artificial Sequence
  Description of Artificial Sequence: Synthetic peptide
  Seed: GNEKKAKLANVVRKMMTNSQ
GNEIKAMLNNVMRKMMTNSQ

SEQ ID NO: 188926 - protein, 20 aa, Artificial Sequence
  Description of Artificial Sequence: Synthetic peptide
  Seed: GNEKKAKLANVVRKMMTNSQ
GNEIKAMLNNVNRKMMTNSQ

SEQ ID NO: 188927 - protein, 20 aa, Artificial Sequence
  Description of Artificial Sequence: Synthetic peptide
  Seed: GNEKKAKLANVVRKMMTNSQ
GNEIKAMLNNVSRKMMTNSQ

SEQ ID NO: 188928 - protein, 20 aa, Artificial Sequence
  Description of Artificial Sequence: Synthetic peptide
  Seed: GNEKKAKLANVVRKMMTNSQ
GNEIKAMLNNVTRKMMTNSQ

SEQ ID NO: 188929 - protein, 20 aa, Artificial Sequence
  Description of Artificial Sequence: Synthetic peptide
  Seed: GNEKKAKLANVVRKMMTNSQ
GNEIKAMLNNVVRKMMTNSQ

SEQ ID NO: 188930 - protein, 20 aa, Artificial Sequence
  Description of Artificial Sequence: Synthetic peptide
  Seed: GNEKKAKLANVVRKMMTNSQ
GNEIKAMLPNVARKMMTNSQ

SEQ ID NO: 188931 - protein, 20 aa, Artificial Sequence
  Description of Artificial Sequence: Synthetic peptide
  Seed: GNEKKAKLANVVRKMMTNSQ
GNEIKAMLPNVCRKMMTNSQ

SEQ ID NO: 188932 - protein, 20 aa, Artificial Sequence
  Description of Artificial Sequence: Synthetic peptide
  Seed: GNEKKAKLANVVRKMMTNSQ
GNEIKAMLPNVGRKMMTNSQ

SEQ ID NO: 188933 - protein, 20 aa, Artificial Sequence
  Description of Artificial Sequence: Synthetic peptide
  Seed: GNEKKAKLANVVRKMMTNSQ
GNEIKAMLPNVHRKMMTNSQ

SEQ ID NO: 188934 - protein, 20 aa, Artificial Sequence
  Description of Artificial Sequence: Synthetic peptide
  Seed: GNEKKAKLANVVRKMMTNSQ
GNEIKAMLPNVIRKMMTNSQ

SEQ ID NO: 188935 - protein, 20 aa, Artificial Sequence
  Description of Artificial Sequence: Synthetic peptide
  Seed: GNEKKAKLANVVRKMMTNSQ
GNEIKAMLPNVLRKMMTNSQ

SEQ ID NO: 188936 - protein, 20 aa, Artificial Sequence
  Description of Artificial Sequence: Synthetic peptide
  Seed: GNEKKAKLANVVRKMMTNSQ
GNEIKAMLPNVMRKMMTNSQ

SEQ ID NO: 188937 - protein, 20 aa, Artificial Sequence
  Description of Artificial Sequence: Synthetic peptide
  Seed: GNEKKAKLANVVRKMMTNSQ
GNEIKAMLPNVNRKMMTNSQ

SEQ ID NO: 188938 - protein, 20 aa, Artificial Sequence
  Description of Artificial Sequence: Synthetic peptide
  Seed: GNEKKAKLANVVRKMMTNSQ
GNEIKAMLPNVQRKMMTNSQ

SEQ ID NO: 188939 - protein, 20 aa, Artificial Sequence
  Description of Artificial Sequence: Synthetic peptide
  Seed: GNEKKAKLANVVRKMMTNSQ
GNEIKAMLPNVSRKMMTNSQ

SEQ ID NO: 188940 - protein, 20 aa, Artificial Sequence
  Description of Artificial Sequence: Synthetic peptide
  Seed: GNEKKAKLANVVRKMMTNSQ
GNEIKAMLPNVTRKMMTNSQ

SEQ ID NO: 188941 - protein, 20 aa, Artificial Sequence
  Description of Artificial Sequence: Synthetic peptide
  Seed: GNEKKAKLANVVRKMMTNSQ
GNEIKAMLPNVVRKMMTNSQ

SEQ ID NO: 188942 - protein, 20 aa, Artificial Sequence
  Description of Artificial Sequence: Synthetic peptide
  Seed: GNEKKAKLANVVRKMMTNSQ
GNEIKAMLSNVARKMMTNSQ

SEQ ID NO: 188943 - protein, 20 aa, Artificial Sequence
  Description of Artificial Sequence: Synthetic peptide
  Seed: GNEKKAKLANVVRKMMTNSQ
GNEIKAMLSNVCRKMMTNSQ

SEQ ID NO: 188944 - protein, 20 aa, Artificial Sequence
  Description of Artificial Sequence: Synthetic peptide
  Seed: GNEKKAKLANVVRKMMTNSQ
GNEIKAMLSNVGRKMMTNSQ

SEQ ID NO: 188945 - protein, 20 aa, Artificial Sequence
  Description of Artificial Sequence: Synthetic peptide
  Seed: GNEKKAKLANVVRKMMTNSQ
GNEIKAMLSNVHRKMMTNSQ

SEQ ID NO: 188946 - protein, 20 aa, Artificial Sequence
  Description of Artificial Sequence: Synthetic peptide
  Seed: GNEKKAKLANVVRKMMTNSQ
GNEIKAMLSNVIRKMMTNSQ

SEQ ID NO: 188947 - protein, 20 aa, Artificial Sequence
  Description of Artificial Sequence: Synthetic peptide
  Seed: GNEKKAKLANVVRKMMTNSQ
GNEIKAMLSNVLRKMMTNSQ

SEQ ID NO: 188948 - protein, 20 aa, Artificial Sequence
  Description of Artificial Sequence: Synthetic peptide
  Seed: GNEKKAKLANVVRKMMTNSQ
GNEIKAMLSNVMRKMMTNSQ

SEQ ID NO: 188949 - protein, 20 aa, Artificial Sequence
  Description of Artificial Sequence: Synthetic peptide
  Seed: GNEKKAKLANVVRKMMTNSQ
GNEIKAMLSNVNRKMMTNSQ

SEQ ID NO: 188950 - protein, 20 aa, Artificial Sequence
  Description of Artificial Sequence: Synthetic peptide
  Seed: GNEKKAKLANVVRKMMTNSQ
GNEIKAMLSNVSRKMMTNSQ

SEQ ID NO: 188951 - protein, 20 aa, Artificial Sequence
  Description of Artificial Sequence: Synthetic peptide
  Seed: GNEKKAKLANVVRKMMTNSQ
GNEIKAMLSNVTRKMMTNSQ

SEQ ID NO: 188952 - protein, 20 aa, Artificial Sequence
  Description of Artificial Sequence: Synthetic peptide
  Seed: GNEKKAKLANVVRKMMTNSQ
GNEIKAMLSNVVRKMMTNSQ

SEQ ID NO: 188953 - protein, 20 aa, Artificial Sequence
  Description of Artificial Sequence: Synthetic peptide
  Seed: GNEKKAKLANVVRKMMTNSQ
GNEIKAMLTNVARKMMTNSQ

SEQ ID NO: 188954 - protein, 20 aa, Artificial Sequence
  Description of Artificial Sequence: Synthetic peptide
  Seed: GNEKKAKLANVVRKMMTNSQ
GNEIKAMLTNVGRKMMTNSQ

SEQ ID NO: 188955 - protein, 20 aa, Artificial Sequence
  Description of Artificial Sequence: Synthetic peptide
  Seed: GNEKKAKLANVVRKMMTNSQ
GNEIKAMLTNVHRKMMTNSQ

SEQ ID NO: 188956 - protein, 20 aa, Artificial Sequence
  Description of Artificial Sequence: Synthetic peptide
  Seed: GNEKKAKLANVVRKMMTNSQ
GNEIKAMLTNVIRKMMTNSQ

SEQ ID NO: 188957 - protein, 20 aa, Artificial Sequence
  Description of Artificial Sequence: Synthetic peptide
  Seed: GNEKKAKLANVVRKMMTNSQ
GNEIKAMLTNVLRKMMTNSQ

SEQ ID NO: 188958 - protein, 20 aa, Artificial Sequence
  Description of Artificial Sequence: Synthetic peptide
  Seed: GNEKKAKLANVVRKMMTNSQ
GNEIKAMLTNVMRKMMTNSQ

SEQ ID NO: 188959 - protein, 20 aa, Artificial Sequence
  Description of Artificial Sequence: Synthetic peptide
  Seed: GNEKKAKLANVVRKMMTNSQ
GNEIKAMLTNVNRKMMTNSQ

SEQ ID NO: 188960 - protein, 20 aa, Artificial Sequence
  Description of Artificial Sequence: Synthetic peptide
  Seed: GNEKKAKLANVVRKMMTNSQ
GNEIKAMLTNVSRKMMTNSQ

SEQ ID NO: 188961 - protein, 20 aa, Artificial Sequence
  Description of Artificial Sequence: Synthetic peptide
  Seed: GNEKKAKLANVVRKMMTNSQ
GNEIKAMLTNVTRKMMTNSQ

SEQ ID NO: 188962 - protein, 20 aa, Artificial Sequence
  Description of Artificial Sequence: Synthetic peptide
  Seed: GNEKKAKLANVVRKMMTNSQ
GNEIKAMLTNVVRKMMTNSQ

SEQ ID NO: 188963 - protein, 20 aa, Artificial Sequence
  Description of Artificial Sequence: Synthetic peptide
  Seed: GNEKKAKLANVVRKMMTNSQ
GNEIKAMLVNVARKMMTNSQ

SEQ ID NO: 188964 - protein, 20 aa, Artificial Sequence
  Description of Artificial Sequence: Synthetic peptide
  Seed: GNEKKAKLANVVRKMMTNSQ
GNEIKAMLVNVGRKMMTNSQ

SEQ ID NO: 188965 - protein, 20 aa, Artificial Sequence
  Description of Artificial Sequence: Synthetic peptide
  Seed: GNEKKAKLANVVRKMMTNSQ
GNEIKAMLVNVHRKMMTNSQ

SEQ ID NO: 188966 - protein, 20 aa, Artificial Sequence
  Description of Artificial Sequence: Synthetic peptide
  Seed: GNEKKAKLANVVRKMMTNSQ
GNEIKAMLVNVMRKMMTNSQ

SEQ ID NO: 188967 - protein, 20 aa, Artificial Sequence
  Description of Artificial Sequence: Synthetic peptide
  Seed: GNEKKAKLANVVRKMMTNSQ
GNEIKAMLVNVNRKMMTNSQ

SEQ ID NO: 188968 - protein, 20 aa, Artificial Sequence
  Description of Artificial Sequence: Synthetic peptide
  Seed: GNEKKAKLANVVRKMMTNSQ
GNEIKAMLVNVSRKMMTNSQ

SEQ ID NO: 188969 - protein, 20 aa, Artificial Sequence
  Description of Artificial Sequence: Synthetic peptide
  Seed: GNEKKAKLANVVRKMMTNSQ
GNEIKAMLVNVTRKMMTNSQ

SEQ ID NO: 188970 - protein, 20 aa, Artificial Sequence
  Description of Artificial Sequence: Synthetic peptide
  Seed: GNEKKAKLANVVRKMMTNSQ
GNEIKAMLVNVVRKMMTNSQ

SEQ ID NO: 188971 - protein, 20 aa, Artificial Sequence
  Description of Artificial Sequence: Synthetic peptide
  Seed: GNEKKAKLANVVRKMMTNSQ
GNEIKAMLWNVIRKMMTNSQ

SEQ ID NO: 188972 - protein, 20 aa, Artificial Sequence
  Description of Artificial Sequence: Synthetic peptide
  Seed: GNEKKAKLANVVRKMMTNSQ
GNEIKAMLWNVLRKMMTNSQ

SEQ ID NO: 188973 - protein, 20 aa, Artificial Sequence
  Description of Artificial Sequence: Synthetic peptide
  Seed: GNEKKAKLANVVRKMMTNSQ
GNEIKAMLYNVIRKMMTNSQ

SEQ ID NO: 188974 - protein, 20 aa, Artificial Sequence
  Description of Artificial Sequence: Synthetic peptide
  Seed: GNEKKAKLANVVRKMMTNSQ
GNEIKAMLYNVLRKMMTNSQ

SEQ ID NO: 188975 - protein, 20 aa, Artificial Sequence
  Description of Artificial Sequence: Synthetic peptide
  Seed: GNEKKAKLANVVRKMMTNSQ
GNEIKAMLYNVMRKMMTNSQ

SEQ ID NO: 188976 - protein, 20 aa, Artificial Sequence
  Description of Artificial Sequence: Synthetic peptide
  Seed: GNEKKAKLANVVRKMMTNSQ
GNEIKAMLYNVVRKMMTNSQ

SEQ ID NO: 188977 - protein, 20 aa, Artificial Sequence
  Description of Artificial Sequence: Synthetic peptide
  Seed: GNEKKAKLANVVRKMMTNSQ
GNEIKANLANVIRKMMTNSQ

SEQ ID NO: 188978 - protein, 20 aa, Artificial Sequence
  Description of Artificial Sequence: Synthetic peptide
  Seed: GNEKKAKLANVVRKMMTNSQ
GNEIKANLANVLRKMMTNSQ

SEQ ID NO: 188979 - protein, 20 aa, Artificial Sequence
  Description of Artificial Sequence: Synthetic peptide
  Seed: GNEKKAKLANVVRKMMTNSQ
GNEIKANLANVVRKMMTNSQ

SEQ ID NO: 188980 - protein, 20 aa, Artificial Sequence
  Description of Artificial Sequence: Synthetic peptide
  Seed: GNEKKAKLANVVRKMMTNSQ
GNEIKANLFNVARKMMTNSQ

SEQ ID NO: 188981 - protein, 20 aa, Artificial Sequence
  Description of Artificial Sequence: Synthetic peptide
  Seed: GNEKKAKLANVVRKMMTNSQ
GNEIKANLFNVFRKMMTNSQ

SEQ ID NO: 188982 - protein, 20 aa, Artificial Sequence
  Description of Artificial Sequence: Synthetic peptide
  Seed: GNEKKAKLANVVRKMMTNSQ
GNEIKANLFNVIRKMMTNSQ

SEQ ID NO: 188983 - protein, 20 aa, Artificial Sequence
  Description of Artificial Sequence: Synthetic peptide
  Seed: GNEKKAKLANVVRKMMTNSQ
GNEIKANLFNVLRKMMTNSQ

SEQ ID NO: 188984 - protein, 20 aa, Artificial Sequence
  Description of Artificial Sequence: Synthetic peptide
  Seed: GNEKKAKLANVVRKMMTNSQ
GNEIKANLFNVMRKMMTNSQ

SEQ ID NO: 188985 - protein, 20 aa, Artificial Sequence
  Description of Artificial Sequence: Synthetic peptide
  Seed: GNEKKAKLANVVRKMMTNSQ
GNEIKANLFNVNRKMMTNSQ

SEQ ID NO: 188986 - protein, 20 aa, Artificial Sequence
  Description of Artificial Sequence: Synthetic peptide
  Seed: GNEKKAKLANVVRKMMTNSQ
GNEIKANLFNVSRKMMTNSQ

SEQ ID NO: 188987 - protein, 20 aa, Artificial Sequence
  Description of Artificial Sequence: Synthetic peptide
  Seed: GNEKKAKLANVVRKMMTNSQ
GNEIKANLFNVTRKMMTNSQ

SEQ ID NO: 188988 - protein, 20 aa, Artificial Sequence
  Description of Artificial Sequence: Synthetic peptide
  Seed: GNEKKAKLANVVRKMMTNSQ
GNEIKANLFNVVRKMMTNSQ

SEQ ID NO: 188989 - protein, 20 aa, Artificial Sequence
  Description of Artificial Sequence: Synthetic peptide
  Seed: GNEKKAKLANVVRKMMTNSQ
GNEIKANLFNVYRKMMTNSQ

SEQ ID NO: 188990 - protein, 20 aa, Artificial Sequence
  Description of Artificial Sequence: Synthetic peptide
  Seed: GNEKKAKLANVVRKMMTNSQ
GNEIKANLLNVIRKMMTNSQ

SEQ ID NO: 188991 - protein, 20 aa, Artificial Sequence
  Description of Artificial Sequence: Synthetic peptide
  Seed: GNEKKAKLANVVRKMMTNSQ
GNEIKANLWNVIRKMMTNSQ

SEQ ID NO: 188992 - protein, 20 aa, Artificial Sequence
  Description of Artificial Sequence: Synthetic peptide
  Seed: GNEKKAKLANVVRKMMTNSQ
GNEIKANLYNVFRKMMTNSQ

SEQ ID NO: 188993 - protein, 20 aa, Artificial Sequence
  Description of Artificial Sequence: Synthetic peptide
  Seed: GNEKKAKLANVVRKMMTNSQ
GNEIKANLYNVIRKMMTNSQ

SEQ ID NO: 188994 - protein, 20 aa, Artificial Sequence
  Description of Artificial Sequence: Synthetic peptide
  Seed: GNEKKAKLANVVRKMMTNSQ
GNEIKANLYNVLRKMMTNSQ

SEQ ID NO: 188995 - protein, 20 aa, Artificial Sequence
  Description of Artificial Sequence: Synthetic peptide
  Seed: GNEKKAKLANVVRKMMTNSQ
GNEIKANLYNVVRKMMTNSQ

SEQ ID NO: 188996 - protein, 20 aa, Artificial Sequence
  Description of Artificial Sequence: Synthetic peptide
  Seed: GNEKKAKLANVVRKMMTNSQ
GNEIKAQLANVARKMMTNSQ

SEQ ID NO: 188997 - protein, 20 aa, Artificial Sequence
  Description of Artificial Sequence: Synthetic peptide
  Seed: GNEKKAKLANVVRKMMTNSQ
GNEIKAQLANVIRKMMTNSQ

SEQ ID NO: 188998 - protein, 20 aa, Artificial Sequence
  Description of Artificial Sequence: Synthetic peptide
  Seed: GNEKKAKLANVVRKMMTNSQ
GNEIKAQLANVLRKMMTNSQ

SEQ ID NO: 188999 - protein, 20 aa, Artificial Sequence
  Description of Artificial Sequence: Synthetic peptide
  Seed: GNEKKAKLANVVRKMMTNSQ
GNEIKAQLANVMRKMMTNSQ

SEQ ID NO: 189000 - protein, 20 aa, Artificial Sequence
  Description of Artificial Sequence: Synthetic peptide
  Seed: GNEKKAKLANVVRKMMTNSQ
GNEIKAQLANVNRKMMTNSQ

SEQ ID NO: 189001 - protein, 20 aa, Artificial Sequence
  Description of Artificial Sequence: Synthetic peptide
  Seed: GNEKKAKLANVVRKMMTNSQ
GNEIKAQLANVSRKMMTNSQ

SEQ ID NO: 189002 - protein, 20 aa, Artificial Sequence
  Description of Artificial Sequence: Synthetic peptide
  Seed: GNEKKAKLANVVRKMMTNSQ
GNEIKAQLANVTRKMMTNSQ

SEQ ID NO: 189003 - protein, 20 aa, Artificial Sequence
  Description of Artificial Sequence: Synthetic peptide
  Seed: GNEKKAKLANVVRKMMTNSQ
GNEIKAQLANVVRKMMTNSQ

SEQ ID NO: 189004 - protein, 20 aa, Artificial Sequence
  Description of Artificial Sequence: Synthetic peptide
  Seed: GNEKKAKLANVVRKMMTNSQ
GNEIKAQLFNVARKMMTNSQ

SEQ ID NO: 189005 - protein, 20 aa, Artificial Sequence
  Description of Artificial Sequence: Synthetic peptide
  Seed: GNEKKAKLANVVRKMMTNSQ
GNEIKAQLFNVFRKMMTNSQ

SEQ ID NO: 189006 - protein, 20 aa, Artificial Sequence
  Description of Artificial Sequence: Synthetic peptide
  Seed: GNEKKAKLANVVRKMMTNSQ
GNEIKAQLFNVIRKMMTNSQ

SEQ ID NO: 189007 - protein, 20 aa, Artificial Sequence
  Description of Artificial Sequence: Synthetic peptide
  Seed: GNEKKAKLANVVRKMMTNSQ
GNEIKAQLFNVLRKMMTNSQ

SEQ ID NO: 189008 - protein, 20 aa, Artificial Sequence
  Description of Artificial Sequence: Synthetic peptide
  Seed: GNEKKAKLANVVRKMMTNSQ
GNEIKAQLFNVMRKMMTNSQ

SEQ ID NO: 189009 - protein, 20 aa, Artificial Sequence
  Description of Artificial Sequence: Synthetic peptide
  Seed: GNEKKAKLANVVRKMMTNSQ
GNEIKAQLFNVNRKMMTNSQ

SEQ ID NO: 189010 - protein, 20 aa, Artificial Sequence
  Description of Artificial Sequence: Synthetic peptide
  Seed: GNEKKAKLANVVRKMMTNSQ
GNEIKAQLFNVSRKMMTNSQ

SEQ ID NO: 189011 - protein, 20 aa, Artificial Sequence
  Description of Artificial Sequence: Synthetic peptide
  Seed: GNEKKAKLANVVRKMMTNSQ
GNEIKAQLFNVTRKMMTNSQ

SEQ ID NO: 189012 - protein, 20 aa, Artificial Sequence
  Description of Artificial Sequence: Synthetic peptide
  Seed: GNEKKAKLANVVRKMMTNSQ
GNEIKAQLFNVVRKMMTNSQ

SEQ ID NO: 189013 - protein, 20 aa, Artificial Sequence
  Description of Artificial Sequence: Synthetic peptide
  Seed: GNEKKAKLANVVRKMMTNSQ
GNEIKAQLFNVYRKMMTNSQ

SEQ ID NO: 189014 - protein, 20 aa, Artificial Sequence
  Description of Artificial Sequence: Synthetic peptide
  Seed: GNEKKAKLANVVRKMMTNSQ
GNEIKAQLGNVARKMMTNSQ

SEQ ID NO: 189015 - protein, 20 aa, Artificial Sequence
  Description of Artificial Sequence: Synthetic peptide
  Seed: GNEKKAKLANVVRKMMTNSQ
GNEIKAQLGNVIRKMMTNSQ

SEQ ID NO: 189016 - protein, 20 aa, Artificial Sequence
  Description of Artificial Sequence: Synthetic peptide
  Seed: GNEKKAKLANVVRKMMTNSQ
GNEIKAQLGNVLRKMMTNSQ

SEQ ID NO: 189017 - protein, 20 aa, Artificial Sequence
  Description of Artificial Sequence: Synthetic peptide
  Seed: GNEKKAKLANVVRKMMTNSQ
GNEIKAQLGNVMRKMMTNSQ

SEQ ID NO: 189018 - protein, 20 aa, Artificial Sequence
  Description of Artificial Sequence: Synthetic peptide
  Seed: GNEKKAKLANVVRKMMTNSQ
GNEIKAQLGNVTRKMMTNSQ

SEQ ID NO: 189019 - protein, 20 aa, Artificial Sequence
  Description of Artificial Sequence: Synthetic peptide
  Seed: GNEKKAKLANVVRKMMTNSQ
GNEIKAQLGNVVRKMMTNSQ

SEQ ID NO: 189020 - protein, 20 aa, Artificial Sequence
  Description of Artificial Sequence: Synthetic peptide
  Seed: GNEKKAKLANVVRKMMTNSQ
GNEIKAQLNNVVRKMMTNSQ

SEQ ID NO: 189021 - protein, 20 aa, Artificial Sequence
  Description of Artificial Sequence: Synthetic peptide
  Seed: GNEKKAKLANVVRKMMTNSQ
GNEIKAQLPNVARKMMTNSQ

SEQ ID NO: 189022 - protein, 20 aa, Artificial Sequence
  Description of Artificial Sequence: Synthetic peptide
  Seed: GNEKKAKLANVVRKMMTNSQ
GNEIKAQLPNVIRKMMTNSQ

SEQ ID NO: 189023 - protein, 20 aa, Artificial Sequence
  Description of Artificial Sequence: Synthetic peptide
  Seed: GNEKKAKLANVVRKMMTNSQ
GNEIKAQLPNVLRKMMTNSQ

SEQ ID NO: 189024 - protein, 20 aa, Artificial Sequence
  Description of Artificial Sequence: Synthetic peptide
  Seed: GNEKKAKLANVVRKMMTNSQ
GNEIKAQLPNVVRKMMTNSQ

SEQ ID NO: 189025 - protein, 20 aa, Artificial Sequence
  Description of Artificial Sequence: Synthetic peptide
  Seed: GNEKKAKLANVVRKMMTNSQ
GNEIKAQLSNVARKMMTNSQ

SEQ ID NO: 189026 - protein, 20 aa, Artificial Sequence
  Description of Artificial Sequence: Synthetic peptide
  Seed: GNEKKAKLANVVRKMMTNSQ
GNEIKAQLSNVIRKMMTNSQ

SEQ ID NO: 189027 - protein, 20 aa, Artificial Sequence
  Description of Artificial Sequence: Synthetic peptide
  Seed: GNEKKAKLANVVRKMMTNSQ
GNEIKAQLSNVLRKMMTNSQ

SEQ ID NO: 189028 - protein, 20 aa, Artificial Sequence
  Description of Artificial Sequence: Synthetic peptide
  Seed: GNEKKAKLANVVRKMMTNSQ
GNEIKAQLSNVMRKMMTNSQ

SEQ ID NO: 189029 - protein, 20 aa, Artificial Sequence
  Description of Artificial Sequence: Synthetic peptide
  Seed: GNEKKAKLANVVRKMMTNSQ
GNEIKAQLSNVTRKMMTNSQ

SEQ ID NO: 189030 - protein, 20 aa, Artificial Sequence
  Description of Artificial Sequence: Synthetic peptide
  Seed: GNEKKAKLANVVRKMMTNSQ
GNEIKAQLSNVVRKMMTNSQ

SEQ ID NO: 189031 - protein, 20 aa, Artificial Sequence
  Description of Artificial Sequence: Synthetic peptide
  Seed: GNEKKAKLANVVRKMMTNSQ
GNEIKAQLTNVARKMMTNSQ

SEQ ID NO: 189032 - protein, 20 aa, Artificial Sequence
  Description of Artificial Sequence: Synthetic peptide
  Seed: GNEKKAKLANVVRKMMTNSQ
GNEIKAQLTNVVRKMMTNSQ

SEQ ID NO: 189033 - protein, 20 aa, Artificial Sequence
  Description of Artificial Sequence: Synthetic peptide
  Seed: GNEKKAKLANVVRKMMTNSQ
GNEIKAQLVNVARKMMTNSQ

SEQ ID NO: 189034 - protein, 20 aa, Artificial Sequence
  Description of Artificial Sequence: Synthetic peptide
  Seed: GNEKKAKLANVVRKMMTNSQ
GNEIKAQLWNVIRKMMTNSQ

SEQ ID NO: 189035 - protein, 20 aa, Artificial Sequence
  Description of Artificial Sequence: Synthetic peptide
  Seed: GNEKKAKLANVVRKMMTNSQ
GNEIKAQLYNVFRKMMTNSQ

SEQ ID NO: 189036 - protein, 20 aa, Artificial Sequence
  Description of Artificial Sequence: Synthetic peptide
  Seed: GNEKKAKLANVVRKMMTNSQ
GNEIKAQLYNVIRKMMTNSQ

SEQ ID NO: 189037 - protein, 20 aa, Artificial Sequence
  Description of Artificial Sequence: Synthetic peptide
  Seed: GNEKKAKLANVVRKMMTNSQ
GNEIKAQLYNVLRKMMTNSQ

SEQ ID NO: 189038 - protein, 20 aa, Artificial Sequence
  Description of Artificial Sequence: Synthetic peptide
  Seed: GNEKKAKLANVVRKMMTNSQ
GNEIKAQLYNVVRKMMTNSQ

SEQ ID NO: 189039 - protein, 20 aa, Artificial Sequence
  Description of Artificial Sequence: Synthetic peptide
  Seed: GNEKKAKLANVVRKMMTNSQ
GNEIKARLFNVFRKMMTNSQ

SEQ ID NO: 189040 - protein, 20 aa, Artificial Sequence
  Description of Artificial Sequence: Synthetic peptide
  Seed: GNEKKAKLANVVRKMMTNSQ
GNEIKARLFNVIRKMMTNSQ

SEQ ID NO: 189041 - protein, 20 aa, Artificial Sequence
  Description of Artificial Sequence: Synthetic peptide
  Seed: GNEKKAKLANVVRKMMTNSQ
GNEIKARLFNVLRKMMTNSQ

SEQ ID NO: 189042 - protein, 20 aa, Artificial Sequence
  Description of Artificial Sequence: Synthetic peptide
  Seed: GNEKKAKLANVVRKMMTNSQ
GNEIKARLFNVVRKMMTNSQ

SEQ ID NO: 189043 - protein, 20 aa, Artificial Sequence
  Description of Artificial Sequence: Synthetic peptide
  Seed: GNEKKAKLANVVRKMMTNSQ
GNEIKASLANVARKMMTNSQ

SEQ ID NO: 189044 - protein, 20 aa, Artificial Sequence
  Description of Artificial Sequence: Synthetic peptide
  Seed: GNEKKAKLANVVRKMMTNSQ
GNEIKASLANVIRKMMTNSQ

SEQ ID NO: 189045 - protein, 20 aa, Artificial Sequence
  Description of Artificial Sequence: Synthetic peptide
  Seed: GNEKKAKLANVVRKMMTNSQ
GNEIKASLANVLRKMMTNSQ

SEQ ID NO: 189046 - protein, 20 aa, Artificial Sequence
  Description of Artificial Sequence: Synthetic peptide
  Seed: GNEKKAKLANVVRKMMTNSQ
GNEIKASLANVMRKMMTNSQ

SEQ ID NO: 189047 - protein, 20 aa, Artificial Sequence
  Description of Artificial Sequence: Synthetic peptide
  Seed: GNEKKAKLANVVRKMMTNSQ
GNEIKASLANVNRKMMTNSQ

SEQ ID NO: 189048 - protein, 20 aa, Artificial Sequence
  Description of Artificial Sequence: Synthetic peptide
  Seed: GNEKKAKLANVVRKMMTNSQ
GNEIKASLANVSRKMMTNSQ

SEQ ID NO: 189049 - protein, 20 aa, Artificial Sequence
  Description of Artificial Sequence: Synthetic peptide
  Seed: GNEKKAKLANVVRKMMTNSQ
GNEIKASLANVTRKMMTNSQ

SEQ ID NO: 189050 - protein, 20 aa, Artificial Sequence
  Description of Artificial Sequence: Synthetic peptide
  Seed: GNEKKAKLANVVRKMMTNSQ
GNEIKASLANVVRKMMTNSQ

SEQ ID NO: 189051 - protein, 20 aa, Artificial Sequence
  Description of Artificial Sequence: Synthetic peptide
  Seed: GNEKKAKLANVVRKMMTNSQ
GNEIKASLFNVARKMMTNSQ

SEQ ID NO: 189052 - protein, 20 aa, Artificial Sequence
  Description of Artificial Sequence: Synthetic peptide
  Seed: GNEKKAKLANVVRKMMTNSQ
GNEIKASLFNVDRKMMTNSQ

SEQ ID NO: 189053 - protein, 20 aa, Artificial Sequence
  Description of Artificial Sequence: Synthetic peptide
  Seed: GNEKKAKLANVVRKMMTNSQ
GNEIKASLFNVERKMMTNSQ

SEQ ID NO: 189054 - protein, 20 aa, Artificial Sequence
  Description of Artificial Sequence: Synthetic peptide
  Seed: GNEKKAKLANVVRKMMTNSQ
GNEIKASLFNVFRKMMTNSQ

SEQ ID NO: 189055 - protein, 20 aa, Artificial Sequence
  Description of Artificial Sequence: Synthetic peptide
  Seed: GNEKKAKLANVVRKMMTNSQ
GNEIKASLFNVIRKMMTNSQ

SEQ ID NO: 189056 - protein, 20 aa, Artificial Sequence
  Description of Artificial Sequence: Synthetic peptide
  Seed: GNEKKAKLANVVRKMMTNSQ
GNEIKASLFNVLRKMMTNSQ

SEQ ID NO: 189057 - protein, 20 aa, Artificial Sequence
  Description of Artificial Sequence: Synthetic peptide
  Seed: GNEKKAKLANVVRKMMTNSQ
GNEIKASLFNVMRKMMTNSQ

SEQ ID NO: 189058 - protein, 20 aa, Artificial Sequence
  Description of Artificial Sequence: Synthetic peptide
  Seed: GNEKKAKLANVVRKMMTNSQ
GNEIKASLFNVNRKMMTNSQ

SEQ ID NO: 189059 - protein, 20 aa, Artificial Sequence
  Description of Artificial Sequence: Synthetic peptide
  Seed: GNEKKAKLANVVRKMMTNSQ
GNEIKASLFNVPRKMMTNSQ

SEQ ID NO: 189060 - protein, 20 aa, Artificial Sequence
  Description of Artificial Sequence: Synthetic peptide
  Seed: GNEKKAKLANVVRKMMTNSQ
GNEIKASLFNVQRKMMTNSQ

SEQ ID NO: 189061 - protein, 20 aa, Artificial Sequence
  Description of Artificial Sequence: Synthetic peptide
  Seed: GNEKKAKLANVVRKMMTNSQ
GNEIKASLFNVSRKMMTNSQ

SEQ ID NO: 189062 - protein, 20 aa, Artificial Sequence
  Description of Artificial Sequence: Synthetic peptide
  Seed: GNEKKAKLANVVRKMMTNSQ
GNEIKASLFNVTRKMMTNSQ

SEQ ID NO: 189063 - protein, 20 aa, Artificial Sequence
  Description of Artificial Sequence: Synthetic peptide
  Seed: GNEKKAKLANVVRKMMTNSQ
GNEIKASLFNVVRKMMTNSQ

SEQ ID NO: 189064 - protein, 20 aa, Artificial Sequence
  Description of Artificial Sequence: Synthetic peptide
  Seed: GNEKKAKLANVVRKMMTNSQ
GNEIKASLFNVYRKMMTNSQ

SEQ ID NO: 189065 - protein, 20 aa, Artificial Sequence
  Description of Artificial Sequence: Synthetic peptide
  Seed: GNEKKAKLANVVRKMMTNSQ
GNEIKASLGNVARKMMTNSQ

SEQ ID NO: 189066 - protein, 20 aa, Artificial Sequence
  Description of Artificial Sequence: Synthetic peptide
  Seed: GNEKKAKLANVVRKMMTNSQ
GNEIKASLGNVIRKMMTNSQ

SEQ ID NO: 189067 - protein, 20 aa, Artificial Sequence
  Description of Artificial Sequence: Synthetic peptide
  Seed: GNEKKAKLANVVRKMMTNSQ
GNEIKASLGNVLRKMMTNSQ

SEQ ID NO: 189068 - protein, 20 aa, Artificial Sequence
  Description of Artificial Sequence: Synthetic peptide
  Seed: GNEKKAKLANVVRKMMTNSQ
GNEIKASLGNVVRKMMTNSQ

SEQ ID NO: 189069 - protein, 20 aa, Artificial Sequence
  Description of Artificial Sequence: Synthetic peptide
  Seed: GNEKKAKLANVVRKMMTNSQ
GNEIKASLINVIRKMMTNSQ

SEQ ID NO: 189070 - protein, 20 aa, Artificial Sequence
  Description of Artificial Sequence: Synthetic peptide
  Seed: GNEKKAKLANVVRKMMTNSQ
GNEIKASLLNVIRKMMTNSQ

SEQ ID NO: 189071 - protein, 20 aa, Artificial Sequence
  Description of Artificial Sequence: Synthetic peptide
  Seed: GNEKKAKLANVVRKMMTNSQ
GNEIKASLLNVLRKMMTNSQ

SEQ ID NO: 189072 - protein, 20 aa, Artificial Sequence
  Description of Artificial Sequence: Synthetic peptide
  Seed: GNEKKAKLANVVRKMMTNSQ
GNEIKASLLNVVRKMMTNSQ

SEQ ID NO: 189073 - protein, 20 aa, Artificial Sequence
  Description of Artificial Sequence: Synthetic peptide
  Seed: GNEKKAKLANVVRKMMTNSQ
GNEIKASLPNVIRKMMTNSQ

SEQ ID NO: 189074 - protein, 20 aa, Artificial Sequence
  Description of Artificial Sequence: Synthetic peptide
  Seed: GNEKKAKLANVVRKMMTNSQ
GNEIKASLPNVLRKMMTNSQ

SEQ ID NO: 189075 - protein, 20 aa, Artificial Sequence
  Description of Artificial Sequence: Synthetic peptide
  Seed: GNEKKAKLANVVRKMMTNSQ
GNEIKASLPNVVRKMMTNSQ

SEQ ID NO: 189076 - protein, 20 aa, Artificial Sequence
  Description of Artificial Sequence: Synthetic peptide
  Seed: GNEKKAKLANVVRKMMTNSQ
GNEIKASLSNVARKMMTNSQ

SEQ ID NO: 189077 - protein, 20 aa, Artificial Sequence
  Description of Artificial Sequence: Synthetic peptide
  Seed: GNEKKAKLANVVRKMMTNSQ
GNEIKASLSNVIRKMMTNSQ

SEQ ID NO: 189078 - protein, 20 aa, Artificial Sequence
  Description of Artificial Sequence: Synthetic peptide
  Seed: GNEKKAKLANVVRKMMTNSQ
GNEIKASLSNVLRKMMTNSQ

SEQ ID NO: 189079 - protein, 20 aa, Artificial Sequence
  Description of Artificial Sequence: Synthetic peptide
  Seed: GNEKKAKLANVVRKMMTNSQ
GNEIKASLSNVVRKMMTNSQ

SEQ ID NO: 189080 - protein, 20 aa, Artificial Sequence
  Description of Artificial Sequence: Synthetic peptide
  Seed: GNEKKAKLANVVRKMMTNSQ
GNEIKASLWNVFRKMMTNSQ

SEQ ID NO: 189081 - protein, 20 aa, Artificial Sequence
  Description of Artificial Sequence: Synthetic peptide
  Seed: GNEKKAKLANVVRKMMTNSQ
GNEIKASLWNVIRKMMTNSQ

SEQ ID NO: 189082 - protein, 20 aa, Artificial Sequence
  Description of Artificial Sequence: Synthetic peptide
  Seed: GNEKKAKLANVVRKMMTNSQ
GNEIKASLWNVLRKMMTNSQ

SEQ ID NO: 189083 - protein, 20 aa, Artificial Sequence
  Description of Artificial Sequence: Synthetic peptide
  Seed: GNEKKAKLANVVRKMMTNSQ
GNEIKASLWNVVRKMMTNSQ

SEQ ID NO: 189084 - protein, 20 aa, Artificial Sequence
  Description of Artificial Sequence: Synthetic peptide
  Seed: GNEKKAKLANVVRKMMTNSQ
GNEIKASLYNVFRKMMTNSQ

SEQ ID NO: 189085 - protein, 20 aa, Artificial Sequence
  Description of Artificial Sequence: Synthetic peptide
  Seed: GNEKKAKLANVVRKMMTNSQ
GNEIKASLYNVIRKMMTNSQ

SEQ ID NO: 189086 - protein, 20 aa, Artificial Sequence
  Description of Artificial Sequence: Synthetic peptide
  Seed: GNEKKAKLANVVRKMMTNSQ
GNEIKASLYNVLRKMMTNSQ

SEQ ID NO: 189087 - protein, 20 aa, Artificial Sequence
  Description of Artificial Sequence: Synthetic peptide
  Seed: GNEKKAKLANVVRKMMTNSQ
GNEIKASLYNVMRKMMTNSQ

SEQ ID NO: 189088 - protein, 20 aa, Artificial Sequence
  Description of Artificial Sequence: Synthetic peptide
  Seed: GNEKKAKLANVVRKMMTNSQ
GNEIKASLYNVVRKMMTNSQ

SEQ ID NO: 189089 - protein, 20 aa, Artificial Sequence
  Description of Artificial Sequence: Synthetic peptide
  Seed: GNEKKAKLANVVRKMMTNSQ
GNEIKATLANVARKMMTNSQ

SEQ ID NO: 189090 - protein, 20 aa, Artificial Sequence
  Description of Artificial Sequence: Synthetic peptide
  Seed: GNEKKAKLANVVRKMMTNSQ
GNEIKATLANVIRKMMTNSQ

SEQ ID NO: 189091 - protein, 20 aa, Artificial Sequence
  Description of Artificial Sequence: Synthetic peptide
  Seed: GNEKKAKLANVVRKMMTNSQ
GNEIKATLANVLRKMMTNSQ

SEQ ID NO: 189092 - protein, 20 aa, Artificial Sequence
  Description of Artificial Sequence: Synthetic peptide
  Seed: GNEKKAKLANVVRKMMTNSQ
GNEIKATLANVNRKMMTNSQ

SEQ ID NO: 189093 - protein, 20 aa, Artificial Sequence
  Description of Artificial Sequence: Synthetic peptide
  Seed: GNEKKAKLANVVRKMMTNSQ
GNEIKATLANVVRKMMTNSQ

SEQ ID NO: 189094 - protein, 20 aa, Artificial Sequence
  Description of Artificial Sequence: Synthetic peptide
  Seed: GNEKKAKLANVVRKMMTNSQ
GNEIKATLFNVARKMMTNSQ

SEQ ID NO: 189095 - protein, 20 aa, Artificial Sequence
  Description of Artificial Sequence: Synthetic peptide
  Seed: GNEKKAKLANVVRKMMTNSQ
GNEIKATLFNVDRKMMTNSQ

SEQ ID NO: 189096 - protein, 20 aa, Artificial Sequence
  Description of Artificial Sequence: Synthetic peptide
  Seed: GNEKKAKLANVVRKMMTNSQ
GNEIKATLFNVERKMMTNSQ

SEQ ID NO: 189097 - protein, 20 aa, Artificial Sequence
  Description of Artificial Sequence: Synthetic peptide
  Seed: GNEKKAKLANVVRKMMTNSQ
GNEIKATLFNVFRKMMTNSQ

SEQ ID NO: 189098 - protein, 20 aa, Artificial Sequence
  Description of Artificial Sequence: Synthetic peptide
  Seed: GNEKKAKLANVVRKMMTNSQ
GNEIKATLFNVHRKMMTNSQ

SEQ ID NO: 189099 - protein, 20 aa, Artificial Sequence
  Description of Artificial Sequence: Synthetic peptide
  Seed: GNEKKAKLANVVRKMMTNSQ
GNEIKATLFNVIRKMMTNSQ

SEQ ID NO: 189100 - protein, 20 aa, Artificial Sequence
  Description of Artificial Sequence: Synthetic peptide
  Seed: GNEKKAKLANVVRKMMTNSQ
GNEIKATLFNVLRKMMTNSQ

SEQ ID NO: 189101 - protein, 20 aa, Artificial Sequence
  Description of Artificial Sequence: Synthetic peptide
  Seed: GNEKKAKLANVVRKMMTNSQ
GNEIKATLFNVMRKMMTNSQ

SEQ ID NO: 189102 - protein, 20 aa, Artificial Sequence
  Description of Artificial Sequence: Synthetic peptide
  Seed: GNEKKAKLANVVRKMMTNSQ
GNEIKATLFNVNRKMMTNSQ

SEQ ID NO: 189103 - protein, 20 aa, Artificial Sequence
  Description of Artificial Sequence: Synthetic peptide
  Seed: GNEKKAKLANVVRKMMTNSQ
GNEIKATLFNVPRKMMTNSQ

SEQ ID NO: 189104 - protein, 20 aa, Artificial Sequence
  Description of Artificial Sequence: Synthetic peptide
  Seed: GNEKKAKLANVVRKMMTNSQ
GNEIKATLFNVQRKMMTNSQ

SEQ ID NO: 189105 - protein, 20 aa, Artificial Sequence
  Description of Artificial Sequence: Synthetic peptide
  Seed: GNEKKAKLANVVRKMMTNSQ
GNEIKATLFNVSRKMMTNSQ

SEQ ID NO: 189106 - protein, 20 aa, Artificial Sequence
  Description of Artificial Sequence: Synthetic peptide
  Seed: GNEKKAKLANVVRKMMTNSQ
GNEIKATLFNVTRKMMTNSQ

SEQ ID NO: 189107 - protein, 20 aa, Artificial Sequence
  Description of Artificial Sequence: Synthetic peptide
  Seed: GNEKKAKLANVVRKMMTNSQ
GNEIKATLFNVVRKMMTNSQ

SEQ ID NO: 189108 - protein, 20 aa, Artificial Sequence
  Description of Artificial Sequence: Synthetic peptide
  Seed: GNEKKAKLANVVRKMMTNSQ
GNEIKATLFNVYRKMMTNSQ

SEQ ID NO: 189109 - protein, 20 aa, Artificial Sequence
  Description of Artificial Sequence: Synthetic peptide
  Seed: GNEKKAKLANVVRKMMTNSQ
GNEIKATLGNVARKMMTNSQ

SEQ ID NO: 189110 - protein, 20 aa, Artificial Sequence
  Description of Artificial Sequence: Synthetic peptide
  Seed: GNEKKAKLANVVRKMMTNSQ
GNEIKATLGNVIRKMMTNSQ

SEQ ID NO: 189111 - protein, 20 aa, Artificial Sequence
  Description of Artificial Sequence: Synthetic peptide
  Seed: GNEKKAKLANVVRKMMTNSQ
GNEIKATLGNVLRKMMTNSQ

SEQ ID NO: 189112 - protein, 20 aa, Artificial Sequence
  Description of Artificial Sequence: Synthetic peptide
  Seed: GNEKKAKLANVVRKMMTNSQ
GNEIKATLGNVVRKMMTNSQ

SEQ ID NO: 189113 - protein, 20 aa, Artificial Sequence
  Description of Artificial Sequence: Synthetic peptide
  Seed: GNEKKAKLANVVRKMMTNSQ
GNEIKATLINVIRKMMTNSQ

SEQ ID NO: 189114 - protein, 20 aa, Artificial Sequence
  Description of Artificial Sequence: Synthetic peptide
  Seed: GNEKKAKLANVVRKMMTNSQ
GNEIKATLINVLRKMMTNSQ

SEQ ID NO: 189115 - protein, 20 aa, Artificial Sequence
  Description of Artificial Sequence: Synthetic peptide
  Seed: GNEKKAKLANVVRKMMTNSQ
GNEIKATLINVVRKMMTNSQ

SEQ ID NO: 189116 - protein, 20 aa, Artificial Sequence
  Description of Artificial Sequence: Synthetic peptide
  Seed: GNEKKAKLANVVRKMMTNSQ
GNEIKATLLNVIRKMMTNSQ

SEQ ID NO: 189117 - protein, 20 aa, Artificial Sequence
  Description of Artificial Sequence: Synthetic peptide
  Seed: GNEKKAKLANVVRKMMTNSQ
GNEIKATLLNVLRKMMTNSQ

SEQ ID NO: 189118 - protein, 20 aa, Artificial Sequence
  Description of Artificial Sequence: Synthetic peptide
  Seed: GNEKKAKLANVVRKMMTNSQ
GNEIKATLLNVVRKMMTNSQ

SEQ ID NO: 189119 - protein, 20 aa, Artificial Sequence
  Description of Artificial Sequence: Synthetic peptide
  Seed: GNEKKAKLANVVRKMMTNSQ
GNEIKATLSNVIRKMMTNSQ

SEQ ID NO: 189120 - protein, 20 aa, Artificial Sequence
  Description of Artificial Sequence: Synthetic peptide
  Seed: GNEKKAKLANVVRKMMTNSQ
GNEIKATLSNVVRKMMTNSQ

SEQ ID NO: 189121 - protein, 20 aa, Artificial Sequence
  Description of Artificial Sequence: Synthetic peptide
  Seed: GNEKKAKLANVVRKMMTNSQ
GNEIKATLWNVFRKMMTNSQ

SEQ ID NO: 189122 - protein, 20 aa, Artificial Sequence
  Description of Artificial Sequence: Synthetic peptide
  Seed: GNEKKAKLANVVRKMMTNSQ
GNEIKATLWNVIRKMMTNSQ

SEQ ID NO: 189123 - protein, 20 aa, Artificial Sequence
  Description of Artificial Sequence: Synthetic peptide
  Seed: GNEKKAKLANVVRKMMTNSQ
GNEIKATLWNVLRKMMTNSQ

SEQ ID NO: 189124 - protein, 20 aa, Artificial Sequence
  Description of Artificial Sequence: Synthetic peptide
  Seed: GNEKKAKLANVVRKMMTNSQ
GNEIKATLWNVMRKMMTNSQ

SEQ ID NO: 189125 - protein, 20 aa, Artificial Sequence
  Description of Artificial Sequence: Synthetic peptide
  Seed: GNEKKAKLANVVRKMMTNSQ
GNEIKATLWNVVRKMMTNSQ

SEQ ID NO: 189126 - protein, 20 aa, Artificial Sequence
  Description of Artificial Sequence: Synthetic peptide
  Seed: GNEKKAKLANVVRKMMTNSQ
GNEIKATLYNVARKMMTNSQ

SEQ ID NO: 189127 - protein, 20 aa, Artificial Sequence
  Description of Artificial Sequence: Synthetic peptide
  Seed: GNEKKAKLANVVRKMMTNSQ
GNEIKATLYNVFRKMMTNSQ

SEQ ID NO: 189128 - protein, 20 aa, Artificial Sequence
  Description of Artificial Sequence: Synthetic peptide
  Seed: GNEKKAKLANVVRKMMTNSQ
GNEIKATLYNVIRKMMTNSQ

SEQ ID NO: 189129 - protein, 20 aa, Artificial Sequence
  Description of Artificial Sequence: Synthetic peptide
  Seed: GNEKKAKLANVVRKMMTNSQ
GNEIKATLYNVLRKMMTNSQ

SEQ ID NO: 189130 - protein, 20 aa, Artificial Sequence
  Description of Artificial Sequence: Synthetic peptide
  Seed: GNEKKAKLANVVRKMMTNSQ
GNEIKATLYNVMRKMMTNSQ

SEQ ID NO: 189131 - protein, 20 aa, Artificial Sequence
  Description of Artificial Sequence: Synthetic peptide
  Seed: GNEKKAKLANVVRKMMTNSQ
GNEIKATLYNVTRKMMTNSQ

SEQ ID NO: 189132 - protein, 20 aa, Artificial Sequence
  Description of Artificial Sequence: Synthetic peptide
  Seed: GNEKKAKLANVVRKMMTNSQ
GNEIKATLYNVVRKMMTNSQ

SEQ ID NO: 189133 - protein, 20 aa, Artificial Sequence
  Description of Artificial Sequence: Synthetic peptide
  Seed: GNEKKAKLANVVRKMMTNSQ
GNEIKATLYNVYRKMMTNSQ

SEQ ID NO: 189134 - protein, 20 aa, Artificial Sequence
  Description of Artificial Sequence: Synthetic peptide
  Seed: GNEKKAKLANVVRKMMTNSQ
GNEIKAVLANVARKMMTNSQ

SEQ ID NO: 189135 - protein, 20 aa, Artificial Sequence
  Description of Artificial Sequence: Synthetic peptide
  Seed: GNEKKAKLANVVRKMMTNSQ
GNEIKAVLANVIRKMMTNSQ

SEQ ID NO: 189136 - protein, 20 aa, Artificial Sequence
  Description of Artificial Sequence: Synthetic peptide
  Seed: GNEKKAKLANVVRKMMTNSQ
GNEIKAVLANVLRKMMTNSQ

SEQ ID NO: 189137 - protein, 20 aa, Artificial Sequence
  Description of Artificial Sequence: Synthetic peptide
  Seed: GNEKKAKLANVVRKMMTNSQ
GNEIKAVLANVMRKMMTNSQ

SEQ ID NO: 189138 - protein, 20 aa, Artificial Sequence
  Description of Artificial Sequence: Synthetic peptide
  Seed: GNEKKAKLANVVRKMMTNSQ
GNEIKAVLANVNRKMMTNSQ

SEQ ID NO: 189139 - protein, 20 aa, Artificial Sequence
  Description of Artificial Sequence: Synthetic peptide
  Seed: GNEKKAKLANVVRKMMTNSQ
GNEIKAVLANVSRKMMTNSQ

SEQ ID NO: 189140 - protein, 20 aa, Artificial Sequence
  Description of Artificial Sequence: Synthetic peptide
  Seed: GNEKKAKLANVVRKMMTNSQ
GNEIKAVLANVTRKMMTNSQ

SEQ ID NO: 189141 - protein, 20 aa, Artificial Sequence
  Description of Artificial Sequence: Synthetic peptide
  Seed: GNEKKAKLANVVRKMMTNSQ
GNEIKAVLANVVRKMMTNSQ

SEQ ID NO: 189142 - protein, 20 aa, Artificial Sequence
  Description of Artificial Sequence: Synthetic peptide
  Seed: GNEKKAKLANVVRKMMTNSQ
GNEIKAVLFNVARKMMTNSQ

SEQ ID NO: 189143 - protein, 20 aa, Artificial Sequence
  Description of Artificial Sequence: Synthetic peptide
  Seed: GNEKKAKLANVVRKMMTNSQ
GNEIKAVLFNVDRKMMTNSQ

SEQ ID NO: 189144 - protein, 20 aa, Artificial Sequence
  Description of Artificial Sequence: Synthetic peptide
  Seed: GNEKKAKLANVVRKMMTNSQ
GNEIKAVLFNVERKMMTNSQ

SEQ ID NO: 189145 - protein, 20 aa, Artificial Sequence
  Description of Artificial Sequence: Synthetic peptide
  Seed: GNEKKAKLANVVRKMMTNSQ
GNEIKAVLFNVFRKMMTNSQ

SEQ ID NO: 189146 - protein, 20 aa, Artificial Sequence
  Description of Artificial Sequence: Synthetic peptide
  Seed: GNEKKAKLANVVRKMMTNSQ
GNEIKAVLFNVIRKMMTNSQ

SEQ ID NO: 189147 - protein, 20 aa, Artificial Sequence
  Description of Artificial Sequence: Synthetic peptide
  Seed: GNEKKAKLANVVRKMMTNSQ
GNEIKAVLFNVLRKMMTNSQ

SEQ ID NO: 189148 - protein, 20 aa, Artificial Sequence
  Description of Artificial Sequence: Synthetic peptide
  Seed: GNEKKAKLANVVRKMMTNSQ
GNEIKAVLFNVMRKMMTNSQ

SEQ ID NO: 189149 - protein, 20 aa, Artificial Sequence
  Description of Artificial Sequence: Synthetic peptide
  Seed: GNEKKAKLANVVRKMMTNSQ
GNEIKAVLFNVNRKMMTNSQ

SEQ ID NO: 189150 - protein, 20 aa, Artificial Sequence
  Description of Artificial Sequence: Synthetic peptide
  Seed: GNEKKAKLANVVRKMMTNSQ
GNEIKAVLFNVPRKMMTNSQ

SEQ ID NO: 189151 - protein, 20 aa, Artificial Sequence
  Description of Artificial Sequence: Synthetic peptide
  Seed: GNEKKAKLANVVRKMMTNSQ
GNEIKAVLFNVSRKMMTNSQ

SEQ ID NO: 189152 - protein, 20 aa, Artificial Sequence
  Description of Artificial Sequence: Synthetic peptide
  Seed: GNEKKAKLANVVRKMMTNSQ
GNEIKAVLFNVTRKMMTNSQ

SEQ ID NO: 189153 - protein, 20 aa, Artificial Sequence
  Description of Artificial Sequence: Synthetic peptide
  Seed: GNEKKAKLANVVRKMMTNSQ
GNEIKAVLFNVVRKMMTNSQ

SEQ ID NO: 189154 - protein, 20 aa, Artificial Sequence
  Description of Artificial Sequence: Synthetic peptide
  Seed: GNEKKAKLANVVRKMMTNSQ
GNEIKAVLFNVYRKMMTNSQ

SEQ ID NO: 189155 - protein, 20 aa, Artificial Sequence
  Description of Artificial Sequence: Synthetic peptide
  Seed: GNEKKAKLANVVRKMMTNSQ
GNEIKAVLGNVARKMMTNSQ

SEQ ID NO: 189156 - protein, 20 aa, Artificial Sequence
  Description of Artificial Sequence: Synthetic peptide
  Seed: GNEKKAKLANVVRKMMTNSQ
GNEIKAVLGNVIRKMMTNSQ

SEQ ID NO: 189157 - protein, 20 aa, Artificial Sequence
  Description of Artificial Sequence: Synthetic peptide
  Seed: GNEKKAKLANVVRKMMTNSQ
GNEIKAVLGNVLRKMMTNSQ

SEQ ID NO: 189158 - protein, 20 aa, Artificial Sequence
  Description of Artificial Sequence: Synthetic peptide
  Seed: GNEKKAKLANVVRKMMTNSQ
GNEIKAVLGNVMRKMMTNSQ

SEQ ID NO: 189159 - protein, 20 aa, Artificial Sequence
  Description of Artificial Sequence: Synthetic peptide
  Seed: GNEKKAKLANVVRKMMTNSQ
GNEIKAVLGNVTRKMMTNSQ

SEQ ID NO: 189160 - protein, 20 aa, Artificial Sequence
  Description of Artificial Sequence: Synthetic peptide
  Seed: GNEKKAKLANVVRKMMTNSQ
GNEIKAVLGNVVRKMMTNSQ

SEQ ID NO: 189161 - protein, 20 aa, Artificial Sequence
  Description of Artificial Sequence: Synthetic peptide
  Seed: GNEKKAKLANVVRKMMTNSQ
GNEIKAVLPNVARKMMTNSQ

SEQ ID NO: 189162 - protein, 20 aa, Artificial Sequence
  Description of Artificial Sequence: Synthetic peptide
  Seed: GNEKKAKLANVVRKMMTNSQ
GNEIKAVLPNVIRKMMTNSQ

SEQ ID NO: 189163 - protein, 20 aa, Artificial Sequence
  Description of Artificial Sequence: Synthetic peptide
  Seed: GNEKKAKLANVVRKMMTNSQ
GNEIKAVLPNVLRKMMTNSQ

SEQ ID NO: 189164 - protein, 20 aa, Artificial Sequence
  Description of Artificial Sequence: Synthetic peptide
  Seed: GNEKKAKLANVVRKMMTNSQ
GNEIKAVLPNVNRKMMTNSQ

SEQ ID NO: 189165 - protein, 20 aa, Artificial Sequence
  Description of Artificial Sequence: Synthetic peptide
  Seed: GNEKKAKLANVVRKMMTNSQ
GNEIKAVLPNVSRKMMTNSQ

SEQ ID NO: 189166 - protein, 20 aa, Artificial Sequence
  Description of Artificial Sequence: Synthetic peptide
  Seed: GNEKKAKLANVVRKMMTNSQ
GNEIKAVLPNVVRKMMTNSQ

SEQ ID NO: 189167 - protein, 20 aa, Artificial Sequence
  Description of Artificial Sequence: Synthetic peptide
  Seed: GNEKKAKLANVVRKMMTNSQ
GNEIKAVLSNVARKMMTNSQ

SEQ ID NO: 189168 - protein, 20 aa, Artificial Sequence
  Description of Artificial Sequence: Synthetic peptide
  Seed: GNEKKAKLANVVRKMMTNSQ
GNEIKAVLSNVIRKMMTNSQ

SEQ ID NO: 189169 - protein, 20 aa, Artificial Sequence
  Description of Artificial Sequence: Synthetic peptide
  Seed: GNEKKAKLANVVRKMMTNSQ
GNEIKAVLSNVLRKMMTNSQ

SEQ ID NO: 189170 - protein, 20 aa, Artificial Sequence
  Description of Artificial Sequence: Synthetic peptide
  Seed: GNEKKAKLANVVRKMMTNSQ
GNEIKAVLSNVNRKMMTNSQ

SEQ ID NO: 189171 - protein, 20 aa, Artificial Sequence
  Description of Artificial Sequence: Synthetic peptide
  Seed: GNEKKAKLANVVRKMMTNSQ
GNEIKAVLSNVSRKMMTNSQ

SEQ ID NO: 189172 - protein, 20 aa, Artificial Sequence
  Description of Artificial Sequence: Synthetic peptide
  Seed: GNEKKAKLANVVRKMMTNSQ
GNEIKAVLSNVVRKMMTNSQ

SEQ ID NO: 189173 - protein, 20 aa, Artificial Sequence
  Description of Artificial Sequence: Synthetic peptide
  Seed: GNEKKAKLANVVRKMMTNSQ
GNEIKAVLTNVARKMMTNSQ

SEQ ID NO: 189174 - protein, 20 aa, Artificial Sequence
  Description of Artificial Sequence: Synthetic peptide
  Seed: GNEKKAKLANVVRKMMTNSQ
GNEIKAVLTNVNRKMMTNSQ

SEQ ID NO: 189175 - protein, 20 aa, Artificial Sequence
  Description of Artificial Sequence: Synthetic peptide
  Seed: GNEKKAKLANVVRKMMTNSQ
GNEIKAVLTNVSRKMMTNSQ

SEQ ID NO: 189176 - protein, 20 aa, Artificial Sequence
  Description of Artificial Sequence: Synthetic peptide
  Seed: GNEKKAKLANVVRKMMTNSQ
GNEIKAVLVNVNRKMMTNSQ

SEQ ID NO: 189177 - protein, 20 aa, Artificial Sequence
  Description of Artificial Sequence: Synthetic peptide
  Seed: GNEKKAKLANVVRKMMTNSQ
GNEIKAVLWNVIRKMMTNSQ

SEQ ID NO: 189178 - protein, 20 aa, Artificial Sequence
  Description of Artificial Sequence: Synthetic peptide
  Seed: GNEKKAKLANVVRKMMTNSQ
GNEIKAVLWNVLRKMMTNSQ

SEQ ID NO: 189179 - protein, 20 aa, Artificial Sequence
  Description of Artificial Sequence: Synthetic peptide
  Seed: GNEKKAKLANVVRKMMTNSQ
GNEIKAVLWNVMRKMMTNSQ

SEQ ID NO: 189180 - protein, 20 aa, Artificial Sequence
  Description of Artificial Sequence: Synthetic peptide
  Seed: GNEKKAKLANVVRKMMTNSQ
GNEIKAVLWNVVRKMMTNSQ

SEQ ID NO: 189181 - protein, 20 aa, Artificial Sequence
  Description of Artificial Sequence: Synthetic peptide
  Seed: GNEKKAKLANVVRKMMTNSQ
GNEIKAVLYNVIRKMMTNSQ

SEQ ID NO: 189182 - protein, 20 aa, Artificial Sequence
  Description of Artificial Sequence: Synthetic peptide
  Seed: GNEKKAKLANVVRKMMTNSQ
GNEIKAVLYNVLRKMMTNSQ

SEQ ID NO: 189183 - protein, 20 aa, Artificial Sequence
  Description of Artificial Sequence: Synthetic peptide
  Seed: GNEKKAKLANVVRKMMTNSQ
GNEIKAVLYNVMRKMMTNSQ

SEQ ID NO: 189184 - protein, 20 aa, Artificial Sequence
  Description of Artificial Sequence: Synthetic peptide
  Seed: GNEKKAKLANVVRKMMTNSQ
GNEIKAVLYNVVRKMMTNSQ

SEQ ID NO: 189185 - protein, 20 aa, Artificial Sequence
  Description of Artificial Sequence: Synthetic peptide
  Seed: GNEKKAKLANVVRKMMTNSQ
GNEIKAWLANVARKMMTNSQ

SEQ ID NO: 189186 - protein, 20 aa, Artificial Sequence
  Description of Artificial Sequence: Synthetic peptide
  Seed: GNEKKAKLANVVRKMMTNSQ
GNEIKAWLANVIRKMMTNSQ

SEQ ID NO: 189187 - protein, 20 aa, Artificial Sequence
  Description of Artificial Sequence: Synthetic peptide
  Seed: GNEKKAKLANVVRKMMTNSQ
GNEIKAWLANVLRKMMTNSQ

SEQ ID NO: 189188 - protein, 20 aa, Artificial Sequence
  Description of Artificial Sequence: Synthetic peptide
  Seed: GNEKKAKLANVVRKMMTNSQ
GNEIKAWLANVMRKMMTNSQ

SEQ ID NO: 189189 - protein, 20 aa, Artificial Sequence
  Description of Artificial Sequence: Synthetic peptide
  Seed: GNEKKAKLANVVRKMMTNSQ
GNEIKAWLANVVRKMMTNSQ

SEQ ID NO: 189190 - protein, 20 aa, Artificial Sequence
  Description of Artificial Sequence: Synthetic peptide
  Seed: GNEKKAKLANVVRKMMTNSQ
GNEIKAWLDNVIRKMMTNSQ

SEQ ID NO: 189191 - protein, 20 aa, Artificial Sequence
  Description of Artificial Sequence: Synthetic peptide
  Seed: GNEKKAKLANVVRKMMTNSQ
GNEIKAWLDNVLRKMMTNSQ

SEQ ID NO: 189192 - protein, 20 aa, Artificial Sequence
  Description of Artificial Sequence: Synthetic peptide
  Seed: GNEKKAKLANVVRKMMTNSQ
GNEIKAWLDNVVRKMMTNSQ

SEQ ID NO: 189193 - protein, 20 aa, Artificial Sequence
  Description of Artificial Sequence: Synthetic peptide
  Seed: GNEKKAKLANVVRKMMTNSQ
GNEIKAWLFNVARKMMTNSQ

SEQ ID NO: 189194 - protein, 20 aa, Artificial Sequence
  Description of Artificial Sequence: Synthetic peptide
  Seed: GNEKKAKLANVVRKMMTNSQ
GNEIKAWLFNVIRKMMTNSQ

SEQ ID NO: 189195 - protein, 20 aa, Artificial Sequence
  Description of Artificial Sequence: Synthetic peptide
  Seed: GNEKKAKLANVVRKMMTNSQ
GNEIKAWLFNVLRKMMTNSQ

SEQ ID NO: 189196 - protein, 20 aa, Artificial Sequence
  Description of Artificial Sequence: Synthetic peptide
  Seed: GNEKKAKLANVVRKMMTNSQ
GNEIKAWLFNVMRKMMTNSQ

SEQ ID NO: 189197 - protein, 20 aa, Artificial Sequence
  Description of Artificial Sequence: Synthetic peptide
  Seed: GNEKKAKLANVVRKMMTNSQ
GNEIKAWLFNVVRKMMTNSQ

SEQ ID NO: 189198 - protein, 20 aa, Artificial Sequence
  Description of Artificial Sequence: Synthetic peptide
  Seed: GNEKKAKLANVVRKMMTNSQ
GNEIKAWLINVARKMMTNSQ

SEQ ID NO: 189199 - protein, 20 aa, Artificial Sequence
  Description of Artificial Sequence: Synthetic peptide
  Seed: GNEKKAKLANVVRKMMTNSQ
GNEIKAWLINVIRKMMTNSQ

SEQ ID NO: 189200 - protein, 20 aa, Artificial Sequence
  Description of Artificial Sequence: Synthetic peptide
  Seed: GNEKKAKLANVVRKMMTNSQ
GNEIKAWLINVVRKMMTNSQ

SEQ ID NO: 189201 - protein, 20 aa, Artificial Sequence
  Description of Artificial Sequence: Synthetic peptide
  Seed: GNEKKAKLANVVRKMMTNSQ
GNEIKAWLLNVIRKMMTNSQ

SEQ ID NO: 189202 - protein, 20 aa, Artificial Sequence
  Description of Artificial Sequence: Synthetic peptide
  Seed: GNEKKAKLANVVRKMMTNSQ
GNEIKAWLLNVLRKMMTNSQ

SEQ ID NO: 189203 - protein, 20 aa, Artificial Sequence
  Description of Artificial Sequence: Synthetic peptide
  Seed: GNEKKAKLANVVRKMMTNSQ
GNEIKAWLLNVVRKMMTNSQ

SEQ ID NO: 189204 - protein, 20 aa, Artificial Sequence
  Description of Artificial Sequence: Synthetic peptide
  Seed: GNEKKAKLANVVRKMMTNSQ
GNEIKAWLMNVIRKMMTNSQ

SEQ ID NO: 189205 - protein, 20 aa, Artificial Sequence
  Description of Artificial Sequence: Synthetic peptide
  Seed: GNEKKAKLANVVRKMMTNSQ
GNEIKAWLMNVLRKMMTNSQ

SEQ ID NO: 189206 - protein, 20 aa, Artificial Sequence
  Description of Artificial Sequence: Synthetic peptide
  Seed: GNEKKAKLANVVRKMMTNSQ
GNEIKAWLWNVIRKMMTNSQ

SEQ ID NO: 189207 - protein, 20 aa, Artificial Sequence
  Description of Artificial Sequence: Synthetic peptide
  Seed: GNEKKAKLANVVRKMMTNSQ
GNEIKAWLYNVIRKMMTNSQ

SEQ ID NO: 189208 - protein, 20 aa, Artificial Sequence
  Description of Artificial Sequence: Synthetic peptide
  Seed: GNEKKAKLANVVRKMMTNSQ
GNEIKAWLYNVLRKMMTNSQ

SEQ ID NO: 189209 - protein, 20 aa, Artificial Sequence
  Description of Artificial Sequence: Synthetic peptide
  Seed: GNEKKAKLANVVRKMMTNSQ
GNEIKAWLYNVMRKMMTNSQ

SEQ ID NO: 189210 - protein, 20 aa, Artificial Sequence
  Description of Artificial Sequence: Synthetic peptide
  Seed: GNEKKAKLANVVRKMMTNSQ
GNEIKAWLYNVVRKMMTNSQ

SEQ ID NO: 189211 - protein, 20 aa, Artificial Sequence
  Description of Artificial Sequence: Synthetic peptide
  Seed: GNEKKAKLANVVRKMMTNSQ
GNEIKAYLANVARKMMTNSQ

SEQ ID NO: 189212 - protein, 20 aa, Artificial Sequence
  Description of Artificial Sequence: Synthetic peptide
  Seed: GNEKKAKLANVVRKMMTNSQ
GNEIKAYLANVIRKMMTNSQ

SEQ ID NO: 189213 - protein, 20 aa, Artificial Sequence
  Description of Artificial Sequence: Synthetic peptide
  Seed: GNEKKAKLANVVRKMMTNSQ
GNEIKAYLANVLRKMMTNSQ

SEQ ID NO: 189214 - protein, 20 aa, Artificial Sequence
  Description of Artificial Sequence: Synthetic peptide
  Seed: GNEKKAKLANVVRKMMTNSQ
GNEIKAYLANVVRKMMTNSQ

SEQ ID NO: 189215 - protein, 20 aa, Artificial Sequence
  Description of Artificial Sequence: Synthetic peptide
  Seed: GNEKKAKLANVVRKMMTNSQ
GNEIKAYLDNVARKMMTNSQ

SEQ ID NO: 189216 - protein, 20 aa, Artificial Sequence
  Description of Artificial Sequence: Synthetic peptide
  Seed: GNEKKAKLANVVRKMMTNSQ
GNEIKAYLDNVIRKMMTNSQ

SEQ ID NO: 189217 - protein, 20 aa, Artificial Sequence
  Description of Artificial Sequence: Synthetic peptide
  Seed: GNEKKAKLANVVRKMMTNSQ
GNEIKAYLDNVLRKMMTNSQ

SEQ ID NO: 189218 - protein, 20 aa, Artificial Sequence
  Description of Artificial Sequence: Synthetic peptide
  Seed: GNEKKAKLANVVRKMMTNSQ
GNEIKAYLDNVMRKMMTNSQ

SEQ ID NO: 189219 - protein, 20 aa, Artificial Sequence
  Description of Artificial Sequence: Synthetic peptide
  Seed: GNEKKAKLANVVRKMMTNSQ
GNEIKAYLDNVVRKMMTNSQ

SEQ ID NO: 189220 - protein, 20 aa, Artificial Sequence
  Description of Artificial Sequence: Synthetic peptide
  Seed: GNEKKAKLANVVRKMMTNSQ
GNEIKAYLFNVARKMMTNSQ

SEQ ID NO: 189221 - protein, 20 aa, Artificial Sequence
  Description of Artificial Sequence: Synthetic peptide
  Seed: GNEKKAKLANVVRKMMTNSQ
GNEIKAYLFNVIRKMMTNSQ

SEQ ID NO: 189222 - protein, 20 aa, Artificial Sequence
  Description of Artificial Sequence: Synthetic peptide
  Seed: GNEKKAKLANVVRKMMTNSQ
GNEIKAYLFNVLRKMMTNSQ

SEQ ID NO: 189223 - protein, 20 aa, Artificial Sequence
  Description of Artificial Sequence: Synthetic peptide
  Seed: GNEKKAKLANVVRKMMTNSQ
GNEIKAYLFNVMRKMMTNSQ

SEQ ID NO: 189224 - protein, 20 aa, Artificial Sequence
  Description of Artificial Sequence: Synthetic peptide
  Seed: GNEKKAKLANVVRKMMTNSQ
GNEIKAYLFNVTRKMMTNSQ

SEQ ID NO: 189225 - protein, 20 aa, Artificial Sequence
  Description of Artificial Sequence: Synthetic peptide
  Seed: GNEKKAKLANVVRKMMTNSQ
GNEIKAYLFNVVRKMMTNSQ

SEQ ID NO: 189226 - protein, 20 aa, Artificial Sequence
  Description of Artificial Sequence: Synthetic peptide
  Seed: GNEKKAKLANVVRKMMTNSQ
GNEIKAYLINVARKMMTNSQ

SEQ ID NO: 189227 - protein, 20 aa, Artificial Sequence
  Description of Artificial Sequence: Synthetic peptide
  Seed: GNEKKAKLANVVRKMMTNSQ
GNEIKAYLLNVIRKMMTNSQ

SEQ ID NO: 189228 - protein, 20 aa, Artificial Sequence
  Description of Artificial Sequence: Synthetic peptide
  Seed: GNEKKAKLANVVRKMMTNSQ
GNEIKAYLLNVVRKMMTNSQ

SEQ ID NO: 189229 - protein, 20 aa, Artificial Sequence
  Description of Artificial Sequence: Synthetic peptide
  Seed: GNEKKAKLANVVRKMMTNSQ
GNEIKAYLYNVIRKMMTNSQ

SEQ ID NO: 189230 - protein, 20 aa, Artificial Sequence
  Description of Artificial Sequence: Synthetic peptide
  Seed: GNEKKAKLANVVRKMMTNSQ
GNEIKAYLYNVVRKMMTNSQ

SEQ ID NO: 189231 - protein, 20 aa, Artificial Sequence
  Description of Artificial Sequence: Synthetic peptide
  Seed: GNEKKAKLANVVRKMMTNSQ
GNELKAALANVARKMMTNSQ

SEQ ID NO: 189232 - protein, 20 aa, Artificial Sequence
  Description of Artificial Sequence: Synthetic peptide
  Seed: GNEKKAKLANVVRKMMTNSQ
GNELKAALANVGRKMMTNSQ

SEQ ID NO: 189233 - protein, 20 aa, Artificial Sequence
  Description of Artificial Sequence: Synthetic peptide
  Seed: GNEKKAKLANVVRKMMTNSQ
GNELKAALANVIRKMMTNSQ

SEQ ID NO: 189234 - protein, 20 aa, Artificial Sequence
  Description of Artificial Sequence: Synthetic peptide
  Seed: GNEKKAKLANVVRKMMTNSQ
GNELKAALANVLRKMMTNSQ

SEQ ID NO: 189235 - protein, 20 aa, Artificial Sequence
  Description of Artificial Sequence: Synthetic peptide
  Seed: GNEKKAKLANVVRKMMTNSQ
GNELKAALANVMRKMMTNSQ

SEQ ID NO: 189236 - protein, 20 aa, Artificial Sequence
  Description of Artificial Sequence: Synthetic peptide
  Seed: GNEKKAKLANVVRKMMTNSQ
GNELKAALANVNRKMMTNSQ

SEQ ID NO: 189237 - protein, 20 aa, Artificial Sequence
  Description of Artificial Sequence: Synthetic peptide
  Seed: GNEKKAKLANVVRKMMTNSQ
GNELKAALANVSRKMMTNSQ

SEQ ID NO: 189238 - protein, 20 aa, Artificial Sequence
  Description of Artificial Sequence: Synthetic peptide
  Seed: GNEKKAKLANVVRKMMTNSQ
GNELKAALANVTRKMMTNSQ

SEQ ID NO: 189239 - protein, 20 aa, Artificial Sequence
  Description of Artificial Sequence: Synthetic peptide
  Seed: GNEKKAKLANVVRKMMTNSQ
GNELKAALANVVRKMMTNSQ

SEQ ID NO: 189240 - protein, 20 aa, Artificial Sequence
  Description of Artificial Sequence: Synthetic peptide
  Seed: GNEKKAKLANVVRKMMTNSQ
GNELKAALFNVARKMMTNSQ

SEQ ID NO: 189241 - protein, 20 aa, Artificial Sequence
  Description of Artificial Sequence: Synthetic peptide
  Seed: GNEKKAKLANVVRKMMTNSQ
GNELKAALFNVDRKMMTNSQ

SEQ ID NO: 189242 - protein, 20 aa, Artificial Sequence
  Description of Artificial Sequence: Synthetic peptide
  Seed: GNEKKAKLANVVRKMMTNSQ
GNELKAALFNVERKMMTNSQ

SEQ ID NO: 189243 - protein, 20 aa, Artificial Sequence
  Description of Artificial Sequence: Synthetic peptide
  Seed: GNEKKAKLANVVRKMMTNSQ
GNELKAALFNVFRKMMTNSQ

SEQ ID NO: 189244 - protein, 20 aa, Artificial Sequence
  Description of Artificial Sequence: Synthetic peptide
  Seed: GNEKKAKLANVVRKMMTNSQ
GNELKAALFNVIRKMMTNSQ

SEQ ID NO: 189245 - protein, 20 aa, Artificial Sequence
  Description of Artificial Sequence: Synthetic peptide
  Seed: GNEKKAKLANVVRKMMTNSQ
GNELKAALFNVLRKMMTNSQ

SEQ ID NO: 189246 - protein, 20 aa, Artificial Sequence
  Description of Artificial Sequence: Synthetic peptide
  Seed: GNEKKAKLANVVRKMMTNSQ
GNELKAALFNVMRKMMTNSQ

SEQ ID NO: 189247 - protein, 20 aa, Artificial Sequence
  Description of Artificial Sequence: Synthetic peptide
  Seed: GNEKKAKLANVVRKMMTNSQ
GNELKAALFNVNRKMMTNSQ

SEQ ID NO: 189248 - protein, 20 aa, Artificial Sequence
  Description of Artificial Sequence: Synthetic peptide
  Seed: GNEKKAKLANVVRKMMTNSQ
GNELKAALFNVSRKMMTNSQ

SEQ ID NO: 189249 - protein, 20 aa, Artificial Sequence
  Description of Artificial Sequence: Synthetic peptide
  Seed: GNEKKAKLANVVRKMMTNSQ
GNELKAALFNVTRKMMTNSQ

SEQ ID NO: 189250 - protein, 20 aa, Artificial Sequence
  Description of Artificial Sequence: Synthetic peptide
  Seed: GNEKKAKLANVVRKMMTNSQ
GNELKAALFNVVRKMMTNSQ

SEQ ID NO: 189251 - protein, 20 aa, Artificial Sequence
  Description of Artificial Sequence: Synthetic peptide
  Seed: GNEKKAKLANVVRKMMTNSQ
GNELKAALFNVYRKMMTNSQ

SEQ ID NO: 189252 - protein, 20 aa, Artificial Sequence
  Description of Artificial Sequence: Synthetic peptide
  Seed: GNEKKAKLANVVRKMMTNSQ
GNELKAALGNVARKMMTNSQ

SEQ ID NO: 189253 - protein, 20 aa, Artificial Sequence
  Description of Artificial Sequence: Synthetic peptide
  Seed: GNEKKAKLANVVRKMMTNSQ
GNELKAALGNVIRKMMTNSQ

SEQ ID NO: 189254 - protein, 20 aa, Artificial Sequence
  Description of Artificial Sequence: Synthetic peptide
  Seed: GNEKKAKLANVVRKMMTNSQ
GNELKAALGNVLRKMMTNSQ

SEQ ID NO: 189255 - protein, 20 aa, Artificial Sequence
  Description of Artificial Sequence: Synthetic peptide
  Seed: GNEKKAKLANVVRKMMTNSQ
GNELKAALGNVMRKMMTNSQ

SEQ ID NO: 189256 - protein, 20 aa, Artificial Sequence
  Description of Artificial Sequence: Synthetic peptide
  Seed: GNEKKAKLANVVRKMMTNSQ
GNELKAALGNVSRKMMTNSQ

SEQ ID NO: 189257 - protein, 20 aa, Artificial Sequence
  Description of Artificial Sequence: Synthetic peptide
  Seed: GNEKKAKLANVVRKMMTNSQ
GNELKAALGNVTRKMMTNSQ

SEQ ID NO: 189258 - protein, 20 aa, Artificial Sequence
  Description of Artificial Sequence: Synthetic peptide
  Seed: GNEKKAKLANVVRKMMTNSQ
GNELKAALGNVVRKMMTNSQ

SEQ ID NO: 189259 - protein, 20 aa, Artificial Sequence
  Description of Artificial Sequence: Synthetic peptide
  Seed: GNEKKAKLANVVRKMMTNSQ
GNELKAALINVARKMMTNSQ

SEQ ID NO: 189260 - protein, 20 aa, Artificial Sequence
  Description of Artificial Sequence: Synthetic peptide
  Seed: GNEKKAKLANVVRKMMTNSQ
GNELKAALINVNRKMMTNSQ

SEQ ID NO: 189261 - protein, 20 aa, Artificial Sequence
  Description of Artificial Sequence: Synthetic peptide
  Seed: GNEKKAKLANVVRKMMTNSQ
GNELKAALINVSRKMMTNSQ

SEQ ID NO: 189262 - protein, 20 aa, Artificial Sequence
  Description of Artificial Sequence: Synthetic peptide
  Seed: GNEKKAKLANVVRKMMTNSQ
GNELKAALLNVIRKMMTNSQ

SEQ ID NO: 189263 - protein, 20 aa, Artificial Sequence
  Description of Artificial Sequence: Synthetic peptide
  Seed: GNEKKAKLANVVRKMMTNSQ
GNELKAALLNVVRKMMTNSQ

SEQ ID NO: 189264 - protein, 20 aa, Artificial Sequence
  Description of Artificial Sequence: Synthetic peptide
  Seed: GNEKKAKLANVVRKMMTNSQ
GNELKAALNNVARKMMTNSQ

SEQ ID NO: 189265 - protein, 20 aa, Artificial Sequence
  Description of Artificial Sequence: Synthetic peptide
  Seed: GNEKKAKLANVVRKMMTNSQ
GNELKAALNNVIRKMMTNSQ

SEQ ID NO: 189266 - protein, 20 aa, Artificial Sequence
  Description of Artificial Sequence: Synthetic peptide
  Seed: GNEKKAKLANVVRKMMTNSQ
GNELKAALNNVVRKMMTNSQ

SEQ ID NO: 189267 - protein, 20 aa, Artificial Sequence
  Description of Artificial Sequence: Synthetic peptide
  Seed: GNEKKAKLANVVRKMMTNSQ
GNELKAALPNVARKMMTNSQ

SEQ ID NO: 189268 - protein, 20 aa, Artificial Sequence
  Description of Artificial Sequence: Synthetic peptide
  Seed: GNEKKAKLANVVRKMMTNSQ
GNELKAALPNVIRKMMTNSQ

SEQ ID NO: 189269 - protein, 20 aa, Artificial Sequence
  Description of Artificial Sequence: Synthetic peptide
  Seed: GNEKKAKLANVVRKMMTNSQ
GNELKAALPNVLRKMMTNSQ

SEQ ID NO: 189270 - protein, 20 aa, Artificial Sequence
  Description of Artificial Sequence: Synthetic peptide
  Seed: GNEKKAKLANVVRKMMTNSQ
GNELKAALPNVMRKMMTNSQ

SEQ ID NO: 189271 - protein, 20 aa, Artificial Sequence
  Description of Artificial Sequence: Synthetic peptide
  Seed: GNEKKAKLANVVRKMMTNSQ
GNELKAALPNVNRKMMTNSQ

SEQ ID NO: 189272 - protein, 20 aa, Artificial Sequence
  Description of Artificial Sequence: Synthetic peptide
  Seed: GNEKKAKLANVVRKMMTNSQ
GNELKAALPNVSRKMMTNSQ

SEQ ID NO: 189273 - protein, 20 aa, Artificial Sequence
  Description of Artificial Sequence: Synthetic peptide
  Seed: GNEKKAKLANVVRKMMTNSQ
GNELKAALPNVVRKMMTNSQ

SEQ ID NO: 189274 - protein, 20 aa, Artificial Sequence
  Description of Artificial Sequence: Synthetic peptide
  Seed: GNEKKAKLANVVRKMMTNSQ
GNELKAALSNVARKMMTNSQ

SEQ ID NO: 189275 - protein, 20 aa, Artificial Sequence
  Description of Artificial Sequence: Synthetic peptide
  Seed: GNEKKAKLANVVRKMMTNSQ
GNELKAALSNVIRKMMTNSQ

SEQ ID NO: 189276 - protein, 20 aa, Artificial Sequence
  Description of Artificial Sequence: Synthetic peptide
  Seed: GNEKKAKLANVVRKMMTNSQ
GNELKAALSNVLRKMMTNSQ

SEQ ID NO: 189277 - protein, 20 aa, Artificial Sequence
  Description of Artificial Sequence: Synthetic peptide
  Seed: GNEKKAKLANVVRKMMTNSQ
GNELKAALSNVMRKMMTNSQ

SEQ ID NO: 189278 - protein, 20 aa, Artificial Sequence
  Description of Artificial Sequence: Synthetic peptide
  Seed: GNEKKAKLANVVRKMMTNSQ
GNELKAALSNVNRKMMTNSQ

SEQ ID NO: 189279 - protein, 20 aa, Artificial Sequence
  Description of Artificial Sequence: Synthetic peptide
  Seed: GNEKKAKLANVVRKMMTNSQ
GNELKAALSNVSRKMMTNSQ

SEQ ID NO: 189280 - protein, 20 aa, Artificial Sequence
  Description of Artificial Sequence: Synthetic peptide
  Seed: GNEKKAKLANVVRKMMTNSQ
GNELKAALSNVTRKMMTNSQ

SEQ ID NO: 189281 - protein, 20 aa, Artificial Sequence
  Description of Artificial Sequence: Synthetic peptide
  Seed: GNEKKAKLANVVRKMMTNSQ
GNELKAALSNVVRKMMTNSQ

SEQ ID NO: 189282 - protein, 20 aa, Artificial Sequence
  Description of Artificial Sequence: Synthetic peptide
  Seed: GNEKKAKLANVVRKMMTNSQ
GNELKAALTNVARKMMTNSQ

SEQ ID NO: 189283 - protein, 20 aa, Artificial Sequence
  Description of Artificial Sequence: Synthetic peptide
  Seed: GNEKKAKLANVVRKMMTNSQ
GNELKAALTNVIRKMMTNSQ

SEQ ID NO: 189284 - protein, 20 aa, Artificial Sequence
  Description of Artificial Sequence: Synthetic peptide
  Seed: GNEKKAKLANVVRKMMTNSQ
GNELKAALTNVLRKMMTNSQ

SEQ ID NO: 189285 - protein, 20 aa, Artificial Sequence
  Description of Artificial Sequence: Synthetic peptide
  Seed: GNEKKAKLANVVRKMMTNSQ
GNELKAALTNVNRKMMTNSQ

SEQ ID NO: 189286 - protein, 20 aa, Artificial Sequence
  Description of Artificial Sequence: Synthetic peptide
  Seed: GNEKKAKLANVVRKMMTNSQ
GNELKAALTNVSRKMMTNSQ

SEQ ID NO: 189287 - protein, 20 aa, Artificial Sequence
  Description of Artificial Sequence: Synthetic peptide
  Seed: GNEKKAKLANVVRKMMTNSQ
GNELKAALTNVVRKMMTNSQ

SEQ ID NO: 189288 - protein, 20 aa, Artificial Sequence
  Description of Artificial Sequence: Synthetic peptide
  Seed: GNEKKAKLANVVRKMMTNSQ
GNELKAALVNVARKMMTNSQ

SEQ ID NO: 189289 - protein, 20 aa, Artificial Sequence
  Description of Artificial Sequence: Synthetic peptide
  Seed: GNEKKAKLANVVRKMMTNSQ
GNELKAALVNVNRKMMTNSQ

SEQ ID NO: 189290 - protein, 20 aa, Artificial Sequence
  Description of Artificial Sequence: Synthetic peptide
  Seed: GNEKKAKLANVVRKMMTNSQ
GNELKAALVNVSRKMMTNSQ

SEQ ID NO: 189291 - protein, 20 aa, Artificial Sequence
  Description of Artificial Sequence: Synthetic peptide
  Seed: GNEKKAKLANVVRKMMTNSQ
GNELKAALWNVFRKMMTNSQ

SEQ ID NO: 189292 - protein, 20 aa, Artificial Sequence
  Description of Artificial Sequence: Synthetic peptide
  Seed: GNEKKAKLANVVRKMMTNSQ
GNELKAALWNVIRKMMTNSQ

SEQ ID NO: 189293 - protein, 20 aa, Artificial Sequence
  Description of Artificial Sequence: Synthetic peptide
  Seed: GNEKKAKLANVVRKMMTNSQ
GNELKAALWNVLRKMMTNSQ

SEQ ID NO: 189294 - protein, 20 aa, Artificial Sequence
  Description of Artificial Sequence: Synthetic peptide
  Seed: GNEKKAKLANVVRKMMTNSQ
GNELKAALWNVVRKMMTNSQ

SEQ ID NO: 189295 - protein, 20 aa, Artificial Sequence
  Description of Artificial Sequence: Synthetic peptide
  Seed: GNEKKAKLANVVRKMMTNSQ
GNELKAALYNVFRKMMTNSQ

SEQ ID NO: 189296 - protein, 20 aa, Artificial Sequence
  Description of Artificial Sequence: Synthetic peptide
  Seed: GNEKKAKLANVVRKMMTNSQ
GNELKAALYNVIRKMMTNSQ

SEQ ID NO: 189297 - protein, 20 aa, Artificial Sequence
  Description of Artificial Sequence: Synthetic peptide
  Seed: GNEKKAKLANVVRKMMTNSQ
GNELKAALYNVLRKMMTNSQ

SEQ ID NO: 189298 - protein, 20 aa, Artificial Sequence
  Description of Artificial Sequence: Synthetic peptide
  Seed: GNEKKAKLANVVRKMMTNSQ
GNELKAALYNVMRKMMTNSQ

SEQ ID NO: 189299 - protein, 20 aa, Artificial Sequence
  Description of Artificial Sequence: Synthetic peptide
  Seed: GNEKKAKLANVVRKMMTNSQ
GNELKAALYNVVRKMMTNSQ

SEQ ID NO: 189300 - protein, 20 aa, Artificial Sequence
  Description of Artificial Sequence: Synthetic peptide
  Seed: GNEKKAKLANVVRKMMTNSQ
GNELKACLFNVFRKMMTNSQ

SEQ ID NO: 189301 - protein, 20 aa, Artificial Sequence
  Description of Artificial Sequence: Synthetic peptide
  Seed: GNEKKAKLANVVRKMMTNSQ
GNELKACLFNVIRKMMTNSQ

SEQ ID NO: 189302 - protein, 20 aa, Artificial Sequence
  Description of Artificial Sequence: Synthetic peptide
  Seed: GNEKKAKLANVVRKMMTNSQ
GNELKACLFNVLRKMMTNSQ

SEQ ID NO: 189303 - protein, 20 aa, Artificial Sequence
  Description of Artificial Sequence: Synthetic peptide
  Seed: GNEKKAKLANVVRKMMTNSQ
GNELKACLFNVVRKMMTNSQ

SEQ ID NO: 189304 - protein, 20 aa, Artificial Sequence
  Description of Artificial Sequence: Synthetic peptide
  Seed: GNEKKAKLANVVRKMMTNSQ
GNELKACLYNVFRKMMTNSQ

SEQ ID NO: 189305 - protein, 20 aa, Artificial Sequence
  Description of Artificial Sequence: Synthetic peptide
  Seed: GNEKKAKLANVVRKMMTNSQ
GNELKADLFNVFRKMMTNSQ

SEQ ID NO: 189306 - protein, 20 aa, Artificial Sequence
  Description of Artificial Sequence: Synthetic peptide
  Seed: GNEKKAKLANVVRKMMTNSQ
GNELKADLFNVIRKMMTNSQ

SEQ ID NO: 189307 - protein, 20 aa, Artificial Sequence
  Description of Artificial Sequence: Synthetic peptide
  Seed: GNEKKAKLANVVRKMMTNSQ
GNELKADLFNVLRKMMTNSQ

SEQ ID NO: 189308 - protein, 20 aa, Artificial Sequence
  Description of Artificial Sequence: Synthetic peptide
  Seed: GNEKKAKLANVVRKMMTNSQ
GNELKADLFNVVRKMMTNSQ

SEQ ID NO: 189309 - protein, 20 aa, Artificial Sequence
  Description of Artificial Sequence: Synthetic peptide
  Seed: GNEKKAKLANVVRKMMTNSQ
GNELKAELANVARKMMTNSQ

SEQ ID NO: 189310 - protein, 20 aa, Artificial Sequence
  Description of Artificial Sequence: Synthetic peptide
  Seed: GNEKKAKLANVVRKMMTNSQ
GNELKAELANVIRKMMTNSQ

SEQ ID NO: 189311 - protein, 20 aa, Artificial Sequence
  Description of Artificial Sequence: Synthetic peptide
  Seed: GNEKKAKLANVVRKMMTNSQ
GNELKAELANVLRKMMTNSQ

SEQ ID NO: 189312 - protein, 20 aa, Artificial Sequence
  Description of Artificial Sequence: Synthetic peptide
  Seed: GNEKKAKLANVVRKMMTNSQ
GNELKAELANVVRKMMTNSQ

SEQ ID NO: 189313 - protein, 20 aa, Artificial Sequence
  Description of Artificial Sequence: Synthetic peptide
  Seed: GNEKKAKLANVVRKMMTNSQ
GNELKAELFNVARKMMTNSQ

SEQ ID NO: 189314 - protein, 20 aa, Artificial Sequence
  Description of Artificial Sequence: Synthetic peptide
  Seed: GNEKKAKLANVVRKMMTNSQ
GNELKAELFNVDRKMMTNSQ

SEQ ID NO: 189315 - protein, 20 aa, Artificial Sequence
  Description of Artificial Sequence: Synthetic peptide
  Seed: GNEKKAKLANVVRKMMTNSQ
GNELKAELFNVERKMMTNSQ

SEQ ID NO: 189316 - protein, 20 aa, Artificial Sequence
  Description of Artificial Sequence: Synthetic peptide
  Seed: GNEKKAKLANVVRKMMTNSQ
GNELKAELFNVFRKMMTNSQ

SEQ ID NO: 189317 - protein, 20 aa, Artificial Sequence
  Description of Artificial Sequence: Synthetic peptide
  Seed: GNEKKAKLANVVRKMMTNSQ
GNELKAELFNVIRKMMTNSQ

SEQ ID NO: 189318 - protein, 20 aa, Artificial Sequence
  Description of Artificial Sequence: Synthetic peptide
  Seed: GNEKKAKLANVVRKMMTNSQ
GNELKAELFNVLRKMMTNSQ

SEQ ID NO: 189319 - protein, 20 aa, Artificial Sequence
  Description of Artificial Sequence: Synthetic peptide
  Seed: GNEKKAKLANVVRKMMTNSQ
GNELKAELFNVMRKMMTNSQ

SEQ ID NO: 189320 - protein, 20 aa, Artificial Sequence
  Description of Artificial Sequence: Synthetic peptide
  Seed: GNEKKAKLANVVRKMMTNSQ
GNELKAELFNVNRKMMTNSQ

SEQ ID NO: 189321 - protein, 20 aa, Artificial Sequence
  Description of Artificial Sequence: Synthetic peptide
  Seed: GNEKKAKLANVVRKMMTNSQ
GNELKAELFNVSRKMMTNSQ

SEQ ID NO: 189322 - protein, 20 aa, Artificial Sequence
  Description of Artificial Sequence: Synthetic peptide
  Seed: GNEKKAKLANVVRKMMTNSQ
GNELKAELFNVTRKMMTNSQ

SEQ ID NO: 189323 - protein, 20 aa, Artificial Sequence
  Description of Artificial Sequence: Synthetic peptide
  Seed: GNEKKAKLANVVRKMMTNSQ
GNELKAELFNVVRKMMTNSQ

SEQ ID NO: 189324 - protein, 20 aa, Artificial Sequence
  Description of Artificial Sequence: Synthetic peptide
  Seed: GNEKKAKLANVVRKMMTNSQ
GNELKAELFNVYRKMMTNSQ

SEQ ID NO: 189325 - protein, 20 aa, Artificial Sequence
  Description of Artificial Sequence: Synthetic peptide
  Seed: GNEKKAKLANVVRKMMTNSQ
GNELKAELGNVARKMMTNSQ

SEQ ID NO: 189326 - protein, 20 aa, Artificial Sequence
  Description of Artificial Sequence: Synthetic peptide
  Seed: GNEKKAKLANVVRKMMTNSQ
GNELKAELGNVIRKMMTNSQ

SEQ ID NO: 189327 - protein, 20 aa, Artificial Sequence
  Description of Artificial Sequence: Synthetic peptide
  Seed: GNEKKAKLANVVRKMMTNSQ
GNELKAELGNVLRKMMTNSQ

SEQ ID NO: 189328 - protein, 20 aa, Artificial Sequence
  Description of Artificial Sequence: Synthetic peptide
  Seed: GNEKKAKLANVVRKMMTNSQ
GNELKAELGNVVRKMMTNSQ

SEQ ID NO: 189329 - protein, 20 aa, Artificial Sequence
  Description of Artificial Sequence: Synthetic peptide
  Seed: GNEKKAKLANVVRKMMTNSQ
GNELKAELLNVIRKMMTNSQ

SEQ ID NO: 189330 - protein, 20 aa, Artificial Sequence
  Description of Artificial Sequence: Synthetic peptide
  Seed: GNEKKAKLANVVRKMMTNSQ
GNELKAELLNVLRKMMTNSQ

SEQ ID NO: 189331 - protein, 20 aa, Artificial Sequence
  Description of Artificial Sequence: Synthetic peptide
  Seed: GNEKKAKLANVVRKMMTNSQ
GNELKAELLNVVRKMMTNSQ

SEQ ID NO: 189332 - protein, 20 aa, Artificial Sequence
  Description of Artificial Sequence: Synthetic peptide
  Seed: GNEKKAKLANVVRKMMTNSQ
GNELKAELWNVIRKMMTNSQ

SEQ ID NO: 189333 - protein, 20 aa, Artificial Sequence
  Description of Artificial Sequence: Synthetic peptide
  Seed: GNEKKAKLANVVRKMMTNSQ
GNELKAELWNVLRKMMTNSQ

SEQ ID NO: 189334 - protein, 20 aa, Artificial Sequence
  Description of Artificial Sequence: Synthetic peptide
  Seed: GNEKKAKLANVVRKMMTNSQ
GNELKAELWNVVRKMMTNSQ

SEQ ID NO: 189335 - protein, 20 aa, Artificial Sequence
  Description of Artificial Sequence: Synthetic peptide
  Seed: GNEKKAKLANVVRKMMTNSQ
GNELKAELYNVFRKMMTNSQ

SEQ ID NO: 189336 - protein, 20 aa, Artificial Sequence
  Description of Artificial Sequence: Synthetic peptide
  Seed: GNEKKAKLANVVRKMMTNSQ
GNELKAELYNVIRKMMTNSQ

SEQ ID NO: 189337 - protein, 20 aa, Artificial Sequence
  Description of Artificial Sequence: Synthetic peptide
  Seed: GNEKKAKLANVVRKMMTNSQ
GNELKAELYNVLRKMMTNSQ

SEQ ID NO: 189338 - protein, 20 aa, Artificial Sequence
  Description of Artificial Sequence: Synthetic peptide
  Seed: GNEKKAKLANVVRKMMTNSQ
GNELKAELYNVMRKMMTNSQ

SEQ ID NO: 189339 - protein, 20 aa, Artificial Sequence
  Description of Artificial Sequence: Synthetic peptide
  Seed: GNEKKAKLANVVRKMMTNSQ
GNELKAELYNVVRKMMTNSQ

SEQ ID NO: 189340 - protein, 20 aa, Artificial Sequence
  Description of Artificial Sequence: Synthetic peptide
  Seed: GNEKKAKLANVVRKMMTNSQ
GNELKAFLANVARKMMTNSQ

SEQ ID NO: 189341 - protein, 20 aa, Artificial Sequence
  Description of Artificial Sequence: Synthetic peptide
  Seed: GNEKKAKLANVVRKMMTNSQ
GNELKAFLANVIRKMMTNSQ

SEQ ID NO: 189342 - protein, 20 aa, Artificial Sequence
  Description of Artificial Sequence: Synthetic peptide
  Seed: GNEKKAKLANVVRKMMTNSQ
GNELKAFLANVLRKMMTNSQ

SEQ ID NO: 189343 - protein, 20 aa, Artificial Sequence
  Description of Artificial Sequence: Synthetic peptide
  Seed: GNEKKAKLANVVRKMMTNSQ
GNELKAFLANVNRKMMTNSQ

SEQ ID NO: 189344 - protein, 20 aa, Artificial Sequence
  Description of Artificial Sequence: Synthetic peptide
  Seed: GNEKKAKLANVVRKMMTNSQ
GNELKAFLANVSRKMMTNSQ

SEQ ID NO: 189345 - protein, 20 aa, Artificial Sequence
  Description of Artificial Sequence: Synthetic peptide
  Seed: GNEKKAKLANVVRKMMTNSQ
GNELKAFLANVVRKMMTNSQ

SEQ ID NO: 189346 - protein, 20 aa, Artificial Sequence
  Description of Artificial Sequence: Synthetic peptide
  Seed: GNEKKAKLANVVRKMMTNSQ
GNELKAFLDNVARKMMTNSQ

SEQ ID NO: 189347 - protein, 20 aa, Artificial Sequence
  Description of Artificial Sequence: Synthetic peptide
  Seed: GNEKKAKLANVVRKMMTNSQ
GNELKAFLDNVIRKMMTNSQ

SEQ ID NO: 189348 - protein, 20 aa, Artificial Sequence
  Description of Artificial Sequence: Synthetic peptide
  Seed: GNEKKAKLANVVRKMMTNSQ
GNELKAFLDNVLRKMMTNSQ

SEQ ID NO: 189349 - protein, 20 aa, Artificial Sequence
  Description of Artificial Sequence: Synthetic peptide
  Seed: GNEKKAKLANVVRKMMTNSQ
GNELKAFLDNVVRKMMTNSQ

SEQ ID NO: 189350 - protein, 20 aa, Artificial Sequence
  Description of Artificial Sequence: Synthetic peptide
  Seed: GNEKKAKLANVVRKMMTNSQ
GNELKAFLFNVARKMMTNSQ

SEQ ID NO: 189351 - protein, 20 aa, Artificial Sequence
  Description of Artificial Sequence: Synthetic peptide
  Seed: GNEKKAKLANVVRKMMTNSQ
GNELKAFLFNVDRKMMTNSQ

SEQ ID NO: 189352 - protein, 20 aa, Artificial Sequence
  Description of Artificial Sequence: Synthetic peptide
  Seed: GNEKKAKLANVVRKMMTNSQ
GNELKAFLFNVERKMMTNSQ

SEQ ID NO: 189353 - protein, 20 aa, Artificial Sequence
  Description of Artificial Sequence: Synthetic peptide
  Seed: GNEKKAKLANVVRKMMTNSQ
GNELKAFLFNVHRKMMTNSQ

SEQ ID NO: 189354 - protein, 20 aa, Artificial Sequence
  Description of Artificial Sequence: Synthetic peptide
  Seed: GNEKKAKLANVVRKMMTNSQ
GNELKAFLFNVIRKMMTNSQ

SEQ ID NO: 189355 - protein, 20 aa, Artificial Sequence
  Description of Artificial Sequence: Synthetic peptide
  Seed: GNEKKAKLANVVRKMMTNSQ
GNELKAFLFNVLRKMMTNSQ

SEQ ID NO: 189356 - protein, 20 aa, Artificial Sequence
  Description of Artificial Sequence: Synthetic peptide
  Seed: GNEKKAKLANVVRKMMTNSQ
GNELKAFLFNVMRKMMTNSQ

SEQ ID NO: 189357 - protein, 20 aa, Artificial Sequence
  Description of Artificial Sequence: Synthetic peptide
  Seed: GNEKKAKLANVVRKMMTNSQ
GNELKAFLFNVNRKMMTNSQ

SEQ ID NO: 189358 - protein, 20 aa, Artificial Sequence
  Description of Artificial Sequence: Synthetic peptide
  Seed: GNEKKAKLANVVRKMMTNSQ
GNELKAFLFNVSRKMMTNSQ

SEQ ID NO: 189359 - protein, 20 aa, Artificial Sequence
  Description of Artificial Sequence: Synthetic peptide
  Seed: GNEKKAKLANVVRKMMTNSQ
GNELKAFLFNVTRKMMTNSQ

SEQ ID NO: 189360 - protein, 20 aa, Artificial Sequence
  Description of Artificial Sequence: Synthetic peptide
  Seed: GNEKKAKLANVVRKMMTNSQ
GNELKAFLFNVVRKMMTNSQ

SEQ ID NO: 189361 - protein, 20 aa, Artificial Sequence
  Description of Artificial Sequence: Synthetic peptide
  Seed: GNEKKAKLANVVRKMMTNSQ
GNELKAFLGNVARKMMTNSQ

SEQ ID NO: 189362 - protein, 20 aa, Artificial Sequence
  Description of Artificial Sequence: Synthetic peptide
  Seed: GNEKKAKLANVVRKMMTNSQ
GNELKAFLGNVVRKMMTNSQ

SEQ ID NO: 189363 - protein, 20 aa, Artificial Sequence
  Description of Artificial Sequence: Synthetic peptide
  Seed: GNEKKAKLANVVRKMMTNSQ
GNELKAFLINVARKMMTNSQ

SEQ ID NO: 189364 - protein, 20 aa, Artificial Sequence
  Description of Artificial Sequence: Synthetic peptide
  Seed: GNEKKAKLANVVRKMMTNSQ
GNELKAFLINVVRKMMTNSQ

SEQ ID NO: 189365 - protein, 20 aa, Artificial Sequence
  Description of Artificial Sequence: Synthetic peptide
  Seed: GNEKKAKLANVVRKMMTNSQ
GNELKAFLLNVIRKMMTNSQ

SEQ ID NO: 189366 - protein, 20 aa, Artificial Sequence
  Description of Artificial Sequence: Synthetic peptide
  Seed: GNEKKAKLANVVRKMMTNSQ
GNELKAFLLNVMRKMMTNSQ

SEQ ID NO: 189367 - protein, 20 aa, Artificial Sequence
  Description of Artificial Sequence: Synthetic peptide
  Seed: GNEKKAKLANVVRKMMTNSQ
GNELKAFLLNVVRKMMTNSQ

SEQ ID NO: 189368 - protein, 20 aa, Artificial Sequence
  Description of Artificial Sequence: Synthetic peptide
  Seed: GNEKKAKLANVVRKMMTNSQ
GNELKAFLMNVVRKMMTNSQ

SEQ ID NO: 189369 - protein, 20 aa, Artificial Sequence
  Description of Artificial Sequence: Synthetic peptide
  Seed: GNEKKAKLANVVRKMMTNSQ
GNELKAFLPNVARKMMTNSQ

SEQ ID NO: 189370 - protein, 20 aa, Artificial Sequence
  Description of Artificial Sequence: Synthetic peptide
  Seed: GNEKKAKLANVVRKMMTNSQ
GNELKAFLSNVVRKMMTNSQ

SEQ ID NO: 189371 - protein, 20 aa, Artificial Sequence
  Description of Artificial Sequence: Synthetic peptide
  Seed: GNEKKAKLANVVRKMMTNSQ
GNELKAFLTNVARKMMTNSQ

SEQ ID NO: 189372 - protein, 20 aa, Artificial Sequence
  Description of Artificial Sequence: Synthetic peptide
  Seed: GNEKKAKLANVVRKMMTNSQ
GNELKAFLWNVARKMMTNSQ

SEQ ID NO: 189373 - protein, 20 aa, Artificial Sequence
  Description of Artificial Sequence: Synthetic peptide
  Seed: GNEKKAKLANVVRKMMTNSQ
GNELKAFLWNVVRKMMTNSQ

SEQ ID NO: 189374 - protein, 20 aa, Artificial Sequence
  Description of Artificial Sequence: Synthetic peptide
  Seed: GNEKKAKLANVVRKMMTNSQ
GNELKAFLYNVARKMMTNSQ

SEQ ID NO: 189375 - protein, 20 aa, Artificial Sequence
  Description of Artificial Sequence: Synthetic peptide
  Seed: GNEKKAKLANVVRKMMTNSQ
GNELKAFLYNVTRKMMTNSQ

SEQ ID NO: 189376 - protein, 20 aa, Artificial Sequence
  Description of Artificial Sequence: Synthetic peptide
  Seed: GNEKKAKLANVVRKMMTNSQ
GNELKAFLYNVVRKMMTNSQ

SEQ ID NO: 189377 - protein, 20 aa, Artificial Sequence
  Description of Artificial Sequence: Synthetic peptide
  Seed: GNEKKAKLANVVRKMMTNSQ
GNELKAGLANVARKMMTNSQ

SEQ ID NO: 189378 - protein, 20 aa, Artificial Sequence
  Description of Artificial Sequence: Synthetic peptide
  Seed: GNEKKAKLANVVRKMMTNSQ
GNELKAGLANVIRKMMTNSQ

SEQ ID NO: 189379 - protein, 20 aa, Artificial Sequence
  Description of Artificial Sequence: Synthetic peptide
  Seed: GNEKKAKLANVVRKMMTNSQ
GNELKAGLANVLRKMMTNSQ

SEQ ID NO: 189380 - protein, 20 aa, Artificial Sequence
  Description of Artificial Sequence: Synthetic peptide
  Seed: GNEKKAKLANVVRKMMTNSQ
GNELKAGLANVMRKMMTNSQ

SEQ ID NO: 189381 - protein, 20 aa, Artificial Sequence
  Description of Artificial Sequence: Synthetic peptide
  Seed: GNEKKAKLANVVRKMMTNSQ
GNELKAGLANVVRKMMTNSQ

SEQ ID NO: 189382 - protein, 20 aa, Artificial Sequence
  Description of Artificial Sequence: Synthetic peptide
  Seed: GNEKKAKLANVVRKMMTNSQ
GNELKAGLFNVFRKMMTNSQ

SEQ ID NO: 189383 - protein, 20 aa, Artificial Sequence
  Description of Artificial Sequence: Synthetic peptide
  Seed: GNEKKAKLANVVRKMMTNSQ
GNELKAGLFNVIRKMMTNSQ

SEQ ID NO: 189384 - protein, 20 aa, Artificial Sequence
  Description of Artificial Sequence: Synthetic peptide
  Seed: GNEKKAKLANVVRKMMTNSQ
GNELKAGLFNVLRKMMTNSQ

SEQ ID NO: 189385 - protein, 20 aa, Artificial Sequence
  Description of Artificial Sequence: Synthetic peptide
  Seed: GNEKKAKLANVVRKMMTNSQ
GNELKAGLFNVVRKMMTNSQ

SEQ ID NO: 189386 - protein, 20 aa, Artificial Sequence
  Description of Artificial Sequence: Synthetic peptide
  Seed: GNEKKAKLANVVRKMMTNSQ
GNELKAGLSNVVRKMMTNSQ

SEQ ID NO: 189387 - protein, 20 aa, Artificial Sequence
  Description of Artificial Sequence: Synthetic peptide
  Seed: GNEKKAKLANVVRKMMTNSQ
GNELKAHLFNVARKMMTNSQ

SEQ ID NO: 189388 - protein, 20 aa, Artificial Sequence
  Description of Artificial Sequence: Synthetic peptide
  Seed: GNEKKAKLANVVRKMMTNSQ
GNELKAHLFNVDRKMMTNSQ

SEQ ID NO: 189389 - protein, 20 aa, Artificial Sequence
  Description of Artificial Sequence: Synthetic peptide
  Seed: GNEKKAKLANVVRKMMTNSQ
GNELKAHLFNVERKMMTNSQ

SEQ ID NO: 189390 - protein, 20 aa, Artificial Sequence
  Description of Artificial Sequence: Synthetic peptide
  Seed: GNEKKAKLANVVRKMMTNSQ
GNELKAHLFNVFRKMMTNSQ

SEQ ID NO: 189391 - protein, 20 aa, Artificial Sequence
  Description of Artificial Sequence: Synthetic peptide
  Seed: GNEKKAKLANVVRKMMTNSQ
GNELKAHLFNVIRKMMTNSQ

SEQ ID NO: 189392 - protein, 20 aa, Artificial Sequence
  Description of Artificial Sequence: Synthetic peptide
  Seed: GNEKKAKLANVVRKMMTNSQ
GNELKAHLFNVLRKMMTNSQ

SEQ ID NO: 189393 - protein, 20 aa, Artificial Sequence
  Description of Artificial Sequence: Synthetic peptide
  Seed: GNEKKAKLANVVRKMMTNSQ
GNELKAHLFNVMRKMMTNSQ

SEQ ID NO: 189394 - protein, 20 aa, Artificial Sequence
  Description of Artificial Sequence: Synthetic peptide
  Seed: GNEKKAKLANVVRKMMTNSQ
GNELKAHLFNVNRKMMTNSQ

SEQ ID NO: 189395 - protein, 20 aa, Artificial Sequence
  Description of Artificial Sequence: Synthetic peptide
  Seed: GNEKKAKLANVVRKMMTNSQ
GNELKAHLFNVQRKMMTNSQ

SEQ ID NO: 189396 - protein, 20 aa, Artificial Sequence
  Description of Artificial Sequence: Synthetic peptide
  Seed: GNEKKAKLANVVRKMMTNSQ
GNELKAHLFNVSRKMMTNSQ

SEQ ID NO: 189397 - protein, 20 aa, Artificial Sequence
  Description of Artificial Sequence: Synthetic peptide
  Seed: GNEKKAKLANVVRKMMTNSQ
GNELKAHLFNVTRKMMTNSQ

SEQ ID NO: 189398 - protein, 20 aa, Artificial Sequence
  Description of Artificial Sequence: Synthetic peptide
  Seed: GNEKKAKLANVVRKMMTNSQ
GNELKAHLFNVVRKMMTNSQ

SEQ ID NO: 189399 - protein, 20 aa, Artificial Sequence
  Description of Artificial Sequence: Synthetic peptide
  Seed: GNEKKAKLANVVRKMMTNSQ
GNELKAHLFNVWRKMMTNSQ

SEQ ID NO: 189400 - protein, 20 aa, Artificial Sequence
  Description of Artificial Sequence: Synthetic peptide
  Seed: GNEKKAKLANVVRKMMTNSQ
GNELKAHLFNVYRKMMTNSQ

SEQ ID NO: 189401 - protein, 20 aa, Artificial Sequence
  Description of Artificial Sequence: Synthetic peptide
  Seed: GNEKKAKLANVVRKMMTNSQ
GNELKAHLINVFRKMMTNSQ

SEQ ID NO: 189402 - protein, 20 aa, Artificial Sequence
  Description of Artificial Sequence: Synthetic peptide
  Seed: GNEKKAKLANVVRKMMTNSQ
GNELKAHLINVIRKMMTNSQ

SEQ ID NO: 189403 - protein, 20 aa, Artificial Sequence
  Description of Artificial Sequence: Synthetic peptide
  Seed: GNEKKAKLANVVRKMMTNSQ
GNELKAHLINVLRKMMTNSQ

SEQ ID NO: 189404 - protein, 20 aa, Artificial Sequence
  Description of Artificial Sequence: Synthetic peptide
  Seed: GNEKKAKLANVVRKMMTNSQ
GNELKAHLINVVRKMMTNSQ

SEQ ID NO: 189405 - protein, 20 aa, Artificial Sequence
  Description of Artificial Sequence: Synthetic peptide
  Seed: GNEKKAKLANVVRKMMTNSQ
GNELKAHLLNVFRKMMTNSQ

SEQ ID NO: 189406 - protein, 20 aa, Artificial Sequence
  Description of Artificial Sequence: Synthetic peptide
  Seed: GNEKKAKLANVVRKMMTNSQ
GNELKAHLLNVIRKMMTNSQ

SEQ ID NO: 189407 - protein, 20 aa, Artificial Sequence
  Description of Artificial Sequence: Synthetic peptide
  Seed: GNEKKAKLANVVRKMMTNSQ
GNELKAHLLNVLRKMMTNSQ

SEQ ID NO: 189408 - protein, 20 aa, Artificial Sequence
  Description of Artificial Sequence: Synthetic peptide
  Seed: GNEKKAKLANVVRKMMTNSQ
GNELKAHLLNVMRKMMTNSQ

SEQ ID NO: 189409 - protein, 20 aa, Artificial Sequence
  Description of Artificial Sequence: Synthetic peptide
  Seed: GNEKKAKLANVVRKMMTNSQ
GNELKAHLLNVVRKMMTNSQ

SEQ ID NO: 189410 - protein, 20 aa, Artificial Sequence
  Description of Artificial Sequence: Synthetic peptide
  Seed: GNEKKAKLANVVRKMMTNSQ
GNELKAHLMNVFRKMMTNSQ

SEQ ID NO: 189411 - protein, 20 aa, Artificial Sequence
  Description of Artificial Sequence: Synthetic peptide
  Seed: GNEKKAKLANVVRKMMTNSQ
GNELKAHLMNVIRKMMTNSQ

SEQ ID NO: 189412 - protein, 20 aa, Artificial Sequence
  Description of Artificial Sequence: Synthetic peptide
  Seed: GNEKKAKLANVVRKMMTNSQ
GNELKAHLMNVLRKMMTNSQ

SEQ ID NO: 189413 - protein, 20 aa, Artificial Sequence
  Description of Artificial Sequence: Synthetic peptide
  Seed: GNEKKAKLANVVRKMMTNSQ
GNELKAHLWNVFRKMMTNSQ

SEQ ID NO: 189414 - protein, 20 aa, Artificial Sequence
  Description of Artificial Sequence: Synthetic peptide
  Seed: GNEKKAKLANVVRKMMTNSQ
GNELKAHLWNVIRKMMTNSQ

SEQ ID NO: 189415 - protein, 20 aa, Artificial Sequence
  Description of Artificial Sequence: Synthetic peptide
  Seed: GNEKKAKLANVVRKMMTNSQ
GNELKAHLWNVLRKMMTNSQ

SEQ ID NO: 189416 - protein, 20 aa, Artificial Sequence
  Description of Artificial Sequence: Synthetic peptide
  Seed: GNEKKAKLANVVRKMMTNSQ
GNELKAHLWNVVRKMMTNSQ

SEQ ID NO: 189417 - protein, 20 aa, Artificial Sequence
  Description of Artificial Sequence: Synthetic peptide
  Seed: GNEKKAKLANVVRKMMTNSQ
GNELKAHLYNVFRKMMTNSQ

SEQ ID NO: 189418 - protein, 20 aa, Artificial Sequence
  Description of Artificial Sequence: Synthetic peptide
  Seed: GNEKKAKLANVVRKMMTNSQ
GNELKAHLYNVIRKMMTNSQ

SEQ ID NO: 189419 - protein, 20 aa, Artificial Sequence
  Description of Artificial Sequence: Synthetic peptide
  Seed: GNEKKAKLANVVRKMMTNSQ
GNELKAHLYNVLRKMMTNSQ

SEQ ID NO: 189420 - protein, 20 aa, Artificial Sequence
  Description of Artificial Sequence: Synthetic peptide
  Seed: GNEKKAKLANVVRKMMTNSQ
GNELKAHLYNVMRKMMTNSQ

SEQ ID NO: 189421 - protein, 20 aa, Artificial Sequence
  Description of Artificial Sequence: Synthetic peptide
  Seed: GNEKKAKLANVVRKMMTNSQ
GNELKAHLYNVVRKMMTNSQ

SEQ ID NO: 189422 - protein, 20 aa, Artificial Sequence
  Description of Artificial Sequence: Synthetic peptide
  Seed: GNEKKAKLANVVRKMMTNSQ
GNELKAILANVARKMMTNSQ

SEQ ID NO: 189423 - protein, 20 aa, Artificial Sequence
  Description of Artificial Sequence: Synthetic peptide
  Seed: GNEKKAKLANVVRKMMTNSQ
GNELKAILANVGRKMMTNSQ

SEQ ID NO: 189424 - protein, 20 aa, Artificial Sequence
  Description of Artificial Sequence: Synthetic peptide
  Seed: GNEKKAKLANVVRKMMTNSQ
GNELKAILANVIRKMMTNSQ

SEQ ID NO: 189425 - protein, 20 aa, Artificial Sequence
  Description of Artificial Sequence: Synthetic peptide
  Seed: GNEKKAKLANVVRKMMTNSQ
GNELKAILANVLRKMMTNSQ

SEQ ID NO: 189426 - protein, 20 aa, Artificial Sequence
  Description of Artificial Sequence: Synthetic peptide
  Seed: GNEKKAKLANVVRKMMTNSQ
GNELKAILANVMRKMMTNSQ

SEQ ID NO: 189427 - protein, 20 aa, Artificial Sequence
  Description of Artificial Sequence: Synthetic peptide
  Seed: GNEKKAKLANVVRKMMTNSQ
GNELKAILANVNRKMMTNSQ

SEQ ID NO: 189428 - protein, 20 aa, Artificial Sequence
  Description of Artificial Sequence: Synthetic peptide
  Seed: GNEKKAKLANVVRKMMTNSQ
GNELKAILANVSRKMMTNSQ

SEQ ID NO: 189429 - protein, 20 aa, Artificial Sequence
  Description of Artificial Sequence: Synthetic peptide
  Seed: GNEKKAKLANVVRKMMTNSQ
GNELKAILANVTRKMMTNSQ

SEQ ID NO: 189430 - protein, 20 aa, Artificial Sequence
  Description of Artificial Sequence: Synthetic peptide
  Seed: GNEKKAKLANVVRKMMTNSQ
GNELKAILANVVRKMMTNSQ

SEQ ID NO: 189431 - protein, 20 aa, Artificial Sequence
  Description of Artificial Sequence: Synthetic peptide
  Seed: GNEKKAKLANVVRKMMTNSQ
GNELKAILFNVARKMMTNSQ

SEQ ID NO: 189432 - protein, 20 aa, Artificial Sequence
  Description of Artificial Sequence: Synthetic peptide
  Seed: GNEKKAKLANVVRKMMTNSQ
GNELKAILFNVDRKMMTNSQ

SEQ ID NO: 189433 - protein, 20 aa, Artificial Sequence
  Description of Artificial Sequence: Synthetic peptide
  Seed: GNEKKAKLANVVRKMMTNSQ
GNELKAILFNVERKMMTNSQ

SEQ ID NO: 189434 - protein, 20 aa, Artificial Sequence
  Description of Artificial Sequence: Synthetic peptide
  Seed: GNEKKAKLANVVRKMMTNSQ
GNELKAILFNVHRKMMTNSQ

SEQ ID NO: 189435 - protein, 20 aa, Artificial Sequence
  Description of Artificial Sequence: Synthetic peptide
  Seed: GNEKKAKLANVVRKMMTNSQ
GNELKAILFNVIRKMMTNSQ

SEQ ID NO: 189436 - protein, 20 aa, Artificial Sequence
  Description of Artificial Sequence: Synthetic peptide
  Seed: GNEKKAKLANVVRKMMTNSQ
GNELKAILFNVLRKMMTNSQ

SEQ ID NO: 189437 - protein, 20 aa, Artificial Sequence
  Description of Artificial Sequence: Synthetic peptide
  Seed: GNEKKAKLANVVRKMMTNSQ
GNELKAILFNVMRKMMTNSQ

SEQ ID NO: 189438 - protein, 20 aa, Artificial Sequence
  Description of Artificial Sequence: Synthetic peptide
  Seed: GNEKKAKLANVVRKMMTNSQ
GNELKAILFNVNRKMMTNSQ

SEQ ID NO: 189439 - protein, 20 aa, Artificial Sequence
  Description of Artificial Sequence: Synthetic peptide
  Seed: GNEKKAKLANVVRKMMTNSQ
GNELKAILFNVPRKMMTNSQ

SEQ ID NO: 189440 - protein, 20 aa, Artificial Sequence
  Description of Artificial Sequence: Synthetic peptide
  Seed: GNEKKAKLANVVRKMMTNSQ
GNELKAILFNVSRKMMTNSQ

SEQ ID NO: 189441 - protein, 20 aa, Artificial Sequence
  Description of Artificial Sequence: Synthetic peptide
  Seed: GNEKKAKLANVVRKMMTNSQ
GNELKAILFNVTRKMMTNSQ

SEQ ID NO: 189442 - protein, 20 aa, Artificial Sequence
  Description of Artificial Sequence: Synthetic peptide
  Seed: GNEKKAKLANVVRKMMTNSQ
GNELKAILFNVVRKMMTNSQ

SEQ ID NO: 189443 - protein, 20 aa, Artificial Sequence
  Description of Artificial Sequence: Synthetic peptide
  Seed: GNEKKAKLANVVRKMMTNSQ
GNELKAILFNVYRKMMTNSQ

SEQ ID NO: 189444 - protein, 20 aa, Artificial Sequence
  Description of Artificial Sequence: Synthetic peptide
  Seed: GNEKKAKLANVVRKMMTNSQ
GNELKAILGNVARKMMTNSQ

SEQ ID NO: 189445 - protein, 20 aa, Artificial Sequence
  Description of Artificial Sequence: Synthetic peptide
  Seed: GNEKKAKLANVVRKMMTNSQ
GNELKAILGNVIRKMMTNSQ

SEQ ID NO: 189446 - protein, 20 aa, Artificial Sequence
  Description of Artificial Sequence: Synthetic peptide
  Seed: GNEKKAKLANVVRKMMTNSQ
GNELKAILGNVLRKMMTNSQ

SEQ ID NO: 189447 - protein, 20 aa, Artificial Sequence
  Description of Artificial Sequence: Synthetic peptide
  Seed: GNEKKAKLANVVRKMMTNSQ
GNELKAILGNVMRKMMTNSQ

SEQ ID NO: 189448 - protein, 20 aa, Artificial Sequence
  Description of Artificial Sequence: Synthetic peptide
  Seed: GNEKKAKLANVVRKMMTNSQ
GNELKAILGNVNRKMMTNSQ

SEQ ID NO: 189449 - protein, 20 aa, Artificial Sequence
  Description of Artificial Sequence: Synthetic peptide
  Seed: GNEKKAKLANVVRKMMTNSQ
GNELKAILGNVSRKMMTNSQ

SEQ ID NO: 189450 - protein, 20 aa, Artificial Sequence
  Description of Artificial Sequence: Synthetic peptide
  Seed: GNEKKAKLANVVRKMMTNSQ
GNELKAILGNVTRKMMTNSQ

SEQ ID NO: 189451 - protein, 20 aa, Artificial Sequence
  Description of Artificial Sequence: Synthetic peptide
  Seed: GNEKKAKLANVVRKMMTNSQ
GNELKAILGNVVRKMMTNSQ

SEQ ID NO: 189452 - protein, 20 aa, Artificial Sequence
  Description of Artificial Sequence: Synthetic peptide
  Seed: GNEKKAKLANVVRKMMTNSQ
GNELKAILINVARKMMTNSQ

SEQ ID NO: 189453 - protein, 20 aa, Artificial Sequence
  Description of Artificial Sequence: Synthetic peptide
  Seed: GNEKKAKLANVVRKMMTNSQ
GNELKAILINVNRKMMTNSQ

SEQ ID NO: 189454 - protein, 20 aa, Artificial Sequence
  Description of Artificial Sequence: Synthetic peptide
  Seed: GNEKKAKLANVVRKMMTNSQ
GNELKAILLNVIRKMMTNSQ

SEQ ID NO: 189455 - protein, 20 aa, Artificial Sequence
  Description of Artificial Sequence: Synthetic peptide
  Seed: GNEKKAKLANVVRKMMTNSQ
GNELKAILLNVLRKMMTNSQ

SEQ ID NO: 189456 - protein, 20 aa, Artificial Sequence
  Description of Artificial Sequence: Synthetic peptide
  Seed: GNEKKAKLANVVRKMMTNSQ
GNELKAILLNVVRKMMTNSQ

SEQ ID NO: 189457 - protein, 20 aa, Artificial Sequence
  Description of Artificial Sequence: Synthetic peptide
  Seed: GNEKKAKLANVVRKMMTNSQ
GNELKAILMNVIRKMMTNSQ

SEQ ID NO: 189458 - protein, 20 aa, Artificial Sequence
  Description of Artificial Sequence: Synthetic peptide
  Seed: GNEKKAKLANVVRKMMTNSQ
GNELKAILNNVVRKMMTNSQ

SEQ ID NO: 189459 - protein, 20 aa, Artificial Sequence
  Description of Artificial Sequence: Synthetic peptide
  Seed: GNEKKAKLANVVRKMMTNSQ
GNELKAILPNVARKMMTNSQ

SEQ ID NO: 189460 - protein, 20 aa, Artificial Sequence
  Description of Artificial Sequence: Synthetic peptide
  Seed: GNEKKAKLANVVRKMMTNSQ
GNELKAILPNVIRKMMTNSQ

SEQ ID NO: 189461 - protein, 20 aa, Artificial Sequence
  Description of Artificial Sequence: Synthetic peptide
  Seed: GNEKKAKLANVVRKMMTNSQ
GNELKAILPNVLRKMMTNSQ

SEQ ID NO: 189462 - protein, 20 aa, Artificial Sequence
  Description of Artificial Sequence: Synthetic peptide
  Seed: GNEKKAKLANVVRKMMTNSQ
GNELKAILPNVNRKMMTNSQ

SEQ ID NO: 189463 - protein, 20 aa, Artificial Sequence
  Description of Artificial Sequence: Synthetic peptide
  Seed: GNEKKAKLANVVRKMMTNSQ
GNELKAILPNVSRKMMTNSQ

SEQ ID NO: 189464 - protein, 20 aa, Artificial Sequence
  Description of Artificial Sequence: Synthetic peptide
  Seed: GNEKKAKLANVVRKMMTNSQ
GNELKAILPNVTRKMMTNSQ

SEQ ID NO: 189465 - protein, 20 aa, Artificial Sequence
  Description of Artificial Sequence: Synthetic peptide
  Seed: GNEKKAKLANVVRKMMTNSQ
GNELKAILPNVVRKMMTNSQ

SEQ ID NO: 189466 - protein, 20 aa, Artificial Sequence
  Description of Artificial Sequence: Synthetic peptide
  Seed: GNEKKAKLANVVRKMMTNSQ
GNELKAILSNVARKMMTNSQ

SEQ ID NO: 189467 - protein, 20 aa, Artificial Sequence
  Description of Artificial Sequence: Synthetic peptide
  Seed: GNEKKAKLANVVRKMMTNSQ
GNELKAILSNVIRKMMTNSQ

SEQ ID NO: 189468 - protein, 20 aa, Artificial Sequence
  Description of Artificial Sequence: Synthetic peptide
  Seed: GNEKKAKLANVVRKMMTNSQ
GNELKAILSNVLRKMMTNSQ

SEQ ID NO: 189469 - protein, 20 aa, Artificial Sequence
  Description of Artificial Sequence: Synthetic peptide
  Seed: GNEKKAKLANVVRKMMTNSQ
GNELKAILSNVNRKMMTNSQ

SEQ ID NO: 189470 - protein, 20 aa, Artificial Sequence
  Description of Artificial Sequence: Synthetic peptide
  Seed: GNEKKAKLANVVRKMMTNSQ
GNELKAILSNVSRKMMTNSQ

SEQ ID NO: 189471 - protein, 20 aa, Artificial Sequence
  Description of Artificial Sequence: Synthetic peptide
  Seed: GNEKKAKLANVVRKMMTNSQ
GNELKAILSNVTRKMMTNSQ

SEQ ID NO: 189472 - protein, 20 aa, Artificial Sequence
  Description of Artificial Sequence: Synthetic peptide
  Seed: GNEKKAKLANVVRKMMTNSQ
GNELKAILSNVVRKMMTNSQ

SEQ ID NO: 189473 - protein, 20 aa, Artificial Sequence
  Description of Artificial Sequence: Synthetic peptide
  Seed: GNEKKAKLANVVRKMMTNSQ
GNELKAILTNVARKMMTNSQ

SEQ ID NO: 189474 - protein, 20 aa, Artificial Sequence
  Description of Artificial Sequence: Synthetic peptide
  Seed: GNEKKAKLANVVRKMMTNSQ
GNELKAILTNVNRKMMTNSQ

SEQ ID NO: 189475 - protein, 20 aa, Artificial Sequence
  Description of Artificial Sequence: Synthetic peptide
  Seed: GNEKKAKLANVVRKMMTNSQ
GNELKAILTNVSRKMMTNSQ

SEQ ID NO: 189476 - protein, 20 aa, Artificial Sequence
  Description of Artificial Sequence: Synthetic peptide
  Seed: GNEKKAKLANVVRKMMTNSQ
GNELKAILTNVTRKMMTNSQ

SEQ ID NO: 189477 - protein, 20 aa, Artificial Sequence
  Description of Artificial Sequence: Synthetic peptide
  Seed: GNEKKAKLANVVRKMMTNSQ
GNELKAILTNVVRKMMTNSQ

SEQ ID NO: 189478 - protein, 20 aa, Artificial Sequence
  Description of Artificial Sequence: Synthetic peptide
  Seed: GNEKKAKLANVVRKMMTNSQ
GNELKAILVNVARKMMTNSQ

SEQ ID NO: 189479 - protein, 20 aa, Artificial Sequence
  Description of Artificial Sequence: Synthetic peptide
  Seed: GNEKKAKLANVVRKMMTNSQ
GNELKAILVNVNRKMMTNSQ

SEQ ID NO: 189480 - protein, 20 aa, Artificial Sequence
  Description of Artificial Sequence: Synthetic peptide
  Seed: GNEKKAKLANVVRKMMTNSQ
GNELKAILVNVSRKMMTNSQ

SEQ ID NO: 189481 - protein, 20 aa, Artificial Sequence
  Description of Artificial Sequence: Synthetic peptide
  Seed: GNEKKAKLANVVRKMMTNSQ
GNELKAILWNVIRKMMTNSQ

SEQ ID NO: 189482 - protein, 20 aa, Artificial Sequence
  Description of Artificial Sequence: Synthetic peptide
  Seed: GNEKKAKLANVVRKMMTNSQ
GNELKAILWNVLRKMMTNSQ

SEQ ID NO: 189483 - protein, 20 aa, Artificial Sequence
  Description of Artificial Sequence: Synthetic peptide
  Seed: GNEKKAKLANVVRKMMTNSQ
GNELKAILWNVMRKMMTNSQ

SEQ ID NO: 189484 - protein, 20 aa, Artificial Sequence
  Description of Artificial Sequence: Synthetic peptide
  Seed: GNEKKAKLANVVRKMMTNSQ
GNELKAILWNVVRKMMTNSQ

SEQ ID NO: 189485 - protein, 20 aa, Artificial Sequence
  Description of Artificial Sequence: Synthetic peptide
  Seed: GNEKKAKLANVVRKMMTNSQ
GNELKAILYNVARKMMTNSQ

SEQ ID NO: 189486 - protein, 20 aa, Artificial Sequence
  Description of Artificial Sequence: Synthetic peptide
  Seed: GNEKKAKLANVVRKMMTNSQ
GNELKAILYNVIRKMMTNSQ

SEQ ID NO: 189487 - protein, 20 aa, Artificial Sequence
  Description of Artificial Sequence: Synthetic peptide
  Seed: GNEKKAKLANVVRKMMTNSQ
GNELKAILYNVLRKMMTNSQ

SEQ ID NO: 189488 - protein, 20 aa, Artificial Sequence
  Description of Artificial Sequence: Synthetic peptide
  Seed: GNEKKAKLANVVRKMMTNSQ
GNELKAILYNVMRKMMTNSQ

SEQ ID NO: 189489 - protein, 20 aa, Artificial Sequence
  Description of Artificial Sequence: Synthetic peptide
  Seed: GNEKKAKLANVVRKMMTNSQ
GNELKAILYNVTRKMMTNSQ

SEQ ID NO: 189490 - protein, 20 aa, Artificial Sequence
  Description of Artificial Sequence: Synthetic peptide
  Seed: GNEKKAKLANVVRKMMTNSQ
GNELKAILYNVVRKMMTNSQ

SEQ ID NO: 189491 - protein, 20 aa, Artificial Sequence
  Description of Artificial Sequence: Synthetic peptide
  Seed: GNEKKAKLANVVRKMMTNSQ
GNELKAKLFNVARKMMTNSQ

SEQ ID NO: 189492 - protein, 20 aa, Artificial Sequence
  Description of Artificial Sequence: Synthetic peptide
  Seed: GNEKKAKLANVVRKMMTNSQ
GNELKAKLFNVFRKMMTNSQ

SEQ ID NO: 189493 - protein, 20 aa, Artificial Sequence
  Description of Artificial Sequence: Synthetic peptide
  Seed: GNEKKAKLANVVRKMMTNSQ
GNELKAKLFNVIRKMMTNSQ

SEQ ID NO: 189494 - protein, 20 aa, Artificial Sequence
  Description of Artificial Sequence: Synthetic peptide
  Seed: GNEKKAKLANVVRKMMTNSQ
GNELKAKLFNVLRKMMTNSQ

SEQ ID NO: 189495 - protein, 20 aa, Artificial Sequence
  Description of Artificial Sequence: Synthetic peptide
  Seed: GNEKKAKLANVVRKMMTNSQ
GNELKAKLFNVMRKMMTNSQ

SEQ ID NO: 189496 - protein, 20 aa, Artificial Sequence
  Description of Artificial Sequence: Synthetic peptide
  Seed: GNEKKAKLANVVRKMMTNSQ
GNELKAKLFNVTRKMMTNSQ

SEQ ID NO: 189497 - protein, 20 aa, Artificial Sequence
  Description of Artificial Sequence: Synthetic peptide
  Seed: GNEKKAKLANVVRKMMTNSQ
GNELKAKLFNVVRKMMTNSQ

SEQ ID NO: 189498 - protein, 20 aa, Artificial Sequence
  Description of Artificial Sequence: Synthetic peptide
  Seed: GNEKKAKLANVVRKMMTNSQ
GNELKAKLYNVLRKMMTNSQ

SEQ ID NO: 189499 - protein, 20 aa, Artificial Sequence
  Description of Artificial Sequence: Synthetic peptide
  Seed: GNEKKAKLANVVRKMMTNSQ
GNELKALLANVARKMMTNSQ

SEQ ID NO: 189500 - protein, 20 aa, Artificial Sequence
  Description of Artificial Sequence: Synthetic peptide
  Seed: GNEKKAKLANVVRKMMTNSQ
GNELKALLANVCRKMMTNSQ

SEQ ID NO: 189501 - protein, 20 aa, Artificial Sequence
  Description of Artificial Sequence: Synthetic peptide
  Seed: GNEKKAKLANVVRKMMTNSQ
GNELKALLANVDRKMMTNSQ

SEQ ID NO: 189502 - protein, 20 aa, Artificial Sequence
  Description of Artificial Sequence: Synthetic peptide
  Seed: GNEKKAKLANVVRKMMTNSQ
GNELKALLANVFRKMMTNSQ

SEQ ID NO: 189503 - protein, 20 aa, Artificial Sequence
  Description of Artificial Sequence: Synthetic peptide
  Seed: GNEKKAKLANVVRKMMTNSQ
GNELKALLANVGRKMMTNSQ

SEQ ID NO: 189504 - protein, 20 aa, Artificial Sequence
  Description of Artificial Sequence: Synthetic peptide
  Seed: GNEKKAKLANVVRKMMTNSQ
GNELKALLANVHRKMMTNSQ

SEQ ID NO: 189505 - protein, 20 aa, Artificial Sequence
  Description of Artificial Sequence: Synthetic peptide
  Seed: GNEKKAKLANVVRKMMTNSQ
GNELKALLANVIRKMMTNSQ

SEQ ID NO: 189506 - protein, 20 aa, Artificial Sequence
  Description of Artificial Sequence: Synthetic peptide
  Seed: GNEKKAKLANVVRKMMTNSQ
GNELKALLANVLRKMMTNSQ

SEQ ID NO: 189507 - protein, 20 aa, Artificial Sequence
  Description of Artificial Sequence: Synthetic peptide
  Seed: GNEKKAKLANVVRKMMTNSQ
GNELKALLANVMRKMMTNSQ

SEQ ID NO: 189508 - protein, 20 aa, Artificial Sequence
  Description of Artificial Sequence: Synthetic peptide
  Seed: GNEKKAKLANVVRKMMTNSQ
GNELKALLANVNRKMMTNSQ

SEQ ID NO: 189509 - protein, 20 aa, Artificial Sequence
  Description of Artificial Sequence: Synthetic peptide
  Seed: GNEKKAKLANVVRKMMTNSQ
GNELKALLANVPRKMMTNSQ

SEQ ID NO: 189510 - protein, 20 aa, Artificial Sequence
  Description of Artificial Sequence: Synthetic peptide
  Seed: GNEKKAKLANVVRKMMTNSQ
GNELKALLANVQRKMMTNSQ

SEQ ID NO: 189511 - protein, 20 aa, Artificial Sequence
  Description of Artificial Sequence: Synthetic peptide
  Seed: GNEKKAKLANVVRKMMTNSQ
GNELKALLANVSRKMMTNSQ

SEQ ID NO: 189512 - protein, 20 aa, Artificial Sequence
  Description of Artificial Sequence: Synthetic peptide
  Seed: GNEKKAKLANVVRKMMTNSQ
GNELKALLANVTRKMMTNSQ

SEQ ID NO: 189513 - protein, 20 aa, Artificial Sequence
  Description of Artificial Sequence: Synthetic peptide
  Seed: GNEKKAKLANVVRKMMTNSQ
GNELKALLANVVRKMMTNSQ

SEQ ID NO: 189514 - protein, 20 aa, Artificial Sequence
  Description of Artificial Sequence: Synthetic peptide
  Seed: GNEKKAKLANVVRKMMTNSQ
GNELKALLFNVARKMMTNSQ

SEQ ID NO: 189515 - protein, 20 aa, Artificial Sequence
  Description of Artificial Sequence: Synthetic peptide
  Seed: GNEKKAKLANVVRKMMTNSQ
GNELKALLFNVDRKMMTNSQ

SEQ ID NO: 189516 - protein, 20 aa, Artificial Sequence
  Description of Artificial Sequence: Synthetic peptide
  Seed: GNEKKAKLANVVRKMMTNSQ
GNELKALLFNVERKMMTNSQ

SEQ ID NO: 189517 - protein, 20 aa, Artificial Sequence
  Description of Artificial Sequence: Synthetic peptide
  Seed: GNEKKAKLANVVRKMMTNSQ
GNELKALLFNVIRKMMTNSQ

SEQ ID NO: 189518 - protein, 20 aa, Artificial Sequence
  Description of Artificial Sequence: Synthetic peptide
  Seed: GNEKKAKLANVVRKMMTNSQ
GNELKALLFNVLRKMMTNSQ

SEQ ID NO: 189519 - protein, 20 aa, Artificial Sequence
  Description of Artificial Sequence: Synthetic peptide
  Seed: GNEKKAKLANVVRKMMTNSQ
GNELKALLFNVMRKMMTNSQ

SEQ ID NO: 189520 - protein, 20 aa, Artificial Sequence
  Description of Artificial Sequence: Synthetic peptide
  Seed: GNEKKAKLANVVRKMMTNSQ
GNELKALLFNVNRKMMTNSQ

SEQ ID NO: 189521 - protein, 20 aa, Artificial Sequence
  Description of Artificial Sequence: Synthetic peptide
  Seed: GNEKKAKLANVVRKMMTNSQ
GNELKALLFNVSRKMMTNSQ

SEQ ID NO: 189522 - protein, 20 aa, Artificial Sequence
  Description of Artificial Sequence: Synthetic peptide
  Seed: GNEKKAKLANVVRKMMTNSQ
GNELKALLFNVTRKMMTNSQ

SEQ ID NO: 189523 - protein, 20 aa, Artificial Sequence
  Description of Artificial Sequence: Synthetic peptide
  Seed: GNEKKAKLANVVRKMMTNSQ
GNELKALLFNVVRKMMTNSQ

SEQ ID NO: 189524 - protein, 20 aa, Artificial Sequence
  Description of Artificial Sequence: Synthetic peptide
  Seed: GNEKKAKLANVVRKMMTNSQ
GNELKALLFNVYRKMMTNSQ

SEQ ID NO: 189525 - protein, 20 aa, Artificial Sequence
  Description of Artificial Sequence: Synthetic peptide
  Seed: GNEKKAKLANVVRKMMTNSQ
GNELKALLGNVARKMMTNSQ

SEQ ID NO: 189526 - protein, 20 aa, Artificial Sequence
  Description of Artificial Sequence: Synthetic peptide
  Seed: GNEKKAKLANVVRKMMTNSQ
GNELKALLGNVCRKMMTNSQ

SEQ ID NO: 189527 - protein, 20 aa, Artificial Sequence
  Description of Artificial Sequence: Synthetic peptide
  Seed: GNEKKAKLANVVRKMMTNSQ
GNELKALLGNVFRKMMTNSQ

SEQ ID NO: 189528 - protein, 20 aa, Artificial Sequence
  Description of Artificial Sequence: Synthetic peptide
  Seed: GNEKKAKLANVVRKMMTNSQ
GNELKALLGNVGRKMMTNSQ

SEQ ID NO: 189529 - protein, 20 aa, Artificial Sequence
  Description of Artificial Sequence: Synthetic peptide
  Seed: GNEKKAKLANVVRKMMTNSQ
GNELKALLGNVIRKMMTNSQ

SEQ ID NO: 189530 - protein, 20 aa, Artificial Sequence
  Description of Artificial Sequence: Synthetic peptide
  Seed: GNEKKAKLANVVRKMMTNSQ
GNELKALLGNVLRKMMTNSQ

SEQ ID NO: 189531 - protein, 20 aa, Artificial Sequence
  Description of Artificial Sequence: Synthetic peptide
  Seed: GNEKKAKLANVVRKMMTNSQ
GNELKALLGNVMRKMMTNSQ

SEQ ID NO: 189532 - protein, 20 aa, Artificial Sequence
  Description of Artificial Sequence: Synthetic peptide
  Seed: GNEKKAKLANVVRKMMTNSQ
GNELKALLGNVNRKMMTNSQ

SEQ ID NO: 189533 - protein, 20 aa, Artificial Sequence
  Description of Artificial Sequence: Synthetic peptide
  Seed: GNEKKAKLANVVRKMMTNSQ
GNELKALLGNVSRKMMTNSQ

SEQ ID NO: 189534 - protein, 20 aa, Artificial Sequence
  Description of Artificial Sequence: Synthetic peptide
  Seed: GNEKKAKLANVVRKMMTNSQ
GNELKALLGNVTRKMMTNSQ

SEQ ID NO: 189535 - protein, 20 aa, Artificial Sequence
  Description of Artificial Sequence: Synthetic peptide
  Seed: GNEKKAKLANVVRKMMTNSQ
GNELKALLGNVVRKMMTNSQ

SEQ ID NO: 189536 - protein, 20 aa, Artificial Sequence
  Description of Artificial Sequence: Synthetic peptide
  Seed: GNEKKAKLANVVRKMMTNSQ
GNELKALLINVARKMMTNSQ

SEQ ID NO: 189537 - protein, 20 aa, Artificial Sequence
  Description of Artificial Sequence: Synthetic peptide
  Seed: GNEKKAKLANVVRKMMTNSQ
GNELKALLINVNRKMMTNSQ

SEQ ID NO: 189538 - protein, 20 aa, Artificial Sequence
  Description of Artificial Sequence: Synthetic peptide
  Seed: GNEKKAKLANVVRKMMTNSQ
GNELKALLINVSRKMMTNSQ

SEQ ID NO: 189539 - protein, 20 aa, Artificial Sequence
  Description of Artificial Sequence: Synthetic peptide
  Seed: GNEKKAKLANVVRKMMTNSQ
GNELKALLLNVIRKMMTNSQ

SEQ ID NO: 189540 - protein, 20 aa, Artificial Sequence
  Description of Artificial Sequence: Synthetic peptide
  Seed: GNEKKAKLANVVRKMMTNSQ
GNELKALLNNVARKMMTNSQ

SEQ ID NO: 189541 - protein, 20 aa, Artificial Sequence
  Description of Artificial Sequence: Synthetic peptide
  Seed: GNEKKAKLANVVRKMMTNSQ
GNELKALLNNVIRKMMTNSQ

SEQ ID NO: 189542 - protein, 20 aa, Artificial Sequence
  Description of Artificial Sequence: Synthetic peptide
  Seed: GNEKKAKLANVVRKMMTNSQ
GNELKALLNNVLRKMMTNSQ

SEQ ID NO: 189543 - protein, 20 aa, Artificial Sequence
  Description of Artificial Sequence: Synthetic peptide
  Seed: GNEKKAKLANVVRKMMTNSQ
GNELKALLNNVMRKMMTNSQ

SEQ ID NO: 189544 - protein, 20 aa, Artificial Sequence
  Description of Artificial Sequence: Synthetic peptide
  Seed: GNEKKAKLANVVRKMMTNSQ
GNELKALLNNVNRKMMTNSQ

SEQ ID NO: 189545 - protein, 20 aa, Artificial Sequence
  Description of Artificial Sequence: Synthetic peptide
  Seed: GNEKKAKLANVVRKMMTNSQ
GNELKALLNNVSRKMMTNSQ

SEQ ID NO: 189546 - protein, 20 aa, Artificial Sequence
  Description of Artificial Sequence: Synthetic peptide
  Seed: GNEKKAKLANVVRKMMTNSQ
GNELKALLNNVTRKMMTNSQ

SEQ ID NO: 189547 - protein, 20 aa, Artificial Sequence
  Description of Artificial Sequence: Synthetic peptide
  Seed: GNEKKAKLANVVRKMMTNSQ
GNELKALLNNVVRKMMTNSQ

SEQ ID NO: 189548 - protein, 20 aa, Artificial Sequence
  Description of Artificial Sequence: Synthetic peptide
  Seed: GNEKKAKLANVVRKMMTNSQ
GNELKALLPNVARKMMTNSQ

SEQ ID NO: 189549 - protein, 20 aa, Artificial Sequence
  Description of Artificial Sequence: Synthetic peptide
  Seed: GNEKKAKLANVVRKMMTNSQ
GNELKALLPNVGRKMMTNSQ

SEQ ID NO: 189550 - protein, 20 aa, Artificial Sequence
  Description of Artificial Sequence: Synthetic peptide
  Seed: GNEKKAKLANVVRKMMTNSQ
GNELKALLPNVHRKMMTNSQ

SEQ ID NO: 189551 - protein, 20 aa, Artificial Sequence
  Description of Artificial Sequence: Synthetic peptide
  Seed: GNEKKAKLANVVRKMMTNSQ
GNELKALLPNVIRKMMTNSQ

SEQ ID NO: 189552 - protein, 20 aa, Artificial Sequence
  Description of Artificial Sequence: Synthetic peptide
  Seed: GNEKKAKLANVVRKMMTNSQ
GNELKALLPNVLRKMMTNSQ

SEQ ID NO: 189553 - protein, 20 aa, Artificial Sequence
  Description of Artificial Sequence: Synthetic peptide
  Seed: GNEKKAKLANVVRKMMTNSQ
GNELKALLPNVMRKMMTNSQ

SEQ ID NO: 189554 - protein, 20 aa, Artificial Sequence
  Description of Artificial Sequence: Synthetic peptide
  Seed: GNEKKAKLANVVRKMMTNSQ
GNELKALLPNVNRKMMTNSQ

SEQ ID NO: 189555 - protein, 20 aa, Artificial Sequence
  Description of Artificial Sequence: Synthetic peptide
  Seed: GNEKKAKLANVVRKMMTNSQ
GNELKALLPNVQRKMMTNSQ

SEQ ID NO: 189556 - protein, 20 aa, Artificial Sequence
  Description of Artificial Sequence: Synthetic peptide
  Seed: GNEKKAKLANVVRKMMTNSQ
GNELKALLPNVSRKMMTNSQ

SEQ ID NO: 189557 - protein, 20 aa, Artificial Sequence
  Description of Artificial Sequence: Synthetic peptide
  Seed: GNEKKAKLANVVRKMMTNSQ
GNELKALLPNVTRKMMTNSQ

SEQ ID NO: 189558 - protein, 20 aa, Artificial Sequence
  Description of Artificial Sequence: Synthetic peptide
  Seed: GNEKKAKLANVVRKMMTNSQ
GNELKALLPNVVRKMMTNSQ

SEQ ID NO: 189559 - protein, 20 aa, Artificial Sequence
  Description of Artificial Sequence: Synthetic peptide
  Seed: GNEKKAKLANVVRKMMTNSQ
GNELKALLSNVARKMMTNSQ

SEQ ID NO: 189560 - protein, 20 aa, Artificial Sequence
  Description of Artificial Sequence: Synthetic peptide
  Seed: GNEKKAKLANVVRKMMTNSQ
GNELKALLSNVCRKMMTNSQ

SEQ ID NO: 189561 - protein, 20 aa, Artificial Sequence
  Description of Artificial Sequence: Synthetic peptide
  Seed: GNEKKAKLANVVRKMMTNSQ
GNELKALLSNVGRKMMTNSQ

SEQ ID NO: 189562 - protein, 20 aa, Artificial Sequence
  Description of Artificial Sequence: Synthetic peptide
  Seed: GNEKKAKLANVVRKMMTNSQ
GNELKALLSNVHRKMMTNSQ

SEQ ID NO: 189563 - protein, 20 aa, Artificial Sequence
  Description of Artificial Sequence: Synthetic peptide
  Seed: GNEKKAKLANVVRKMMTNSQ
GNELKALLSNVIRKMMTNSQ

SEQ ID NO: 189564 - protein, 20 aa, Artificial Sequence
  Description of Artificial Sequence: Synthetic peptide
  Seed: GNEKKAKLANVVRKMMTNSQ
GNELKALLSNVLRKMMTNSQ

SEQ ID NO: 189565 - protein, 20 aa, Artificial Sequence
  Description of Artificial Sequence: Synthetic peptide
  Seed: GNEKKAKLANVVRKMMTNSQ
GNELKALLSNVMRKMMTNSQ

SEQ ID NO: 189566 - protein, 20 aa, Artificial Sequence
  Description of Artificial Sequence: Synthetic peptide
  Seed: GNEKKAKLANVVRKMMTNSQ
GNELKALLSNVNRKMMTNSQ

SEQ ID NO: 189567 - protein, 20 aa, Artificial Sequence
  Description of Artificial Sequence: Synthetic peptide
  Seed: GNEKKAKLANVVRKMMTNSQ
GNELKALLSNVSRKMMTNSQ

SEQ ID NO: 189568 - protein, 20 aa, Artificial Sequence
  Description of Artificial Sequence: Synthetic peptide
  Seed: GNEKKAKLANVVRKMMTNSQ
GNELKALLSNVTRKMMTNSQ

SEQ ID NO: 189569 - protein, 20 aa, Artificial Sequence
  Description of Artificial Sequence: Synthetic peptide
  Seed: GNEKKAKLANVVRKMMTNSQ
GNELKALLSNVVRKMMTNSQ

SEQ ID NO: 189570 - protein, 20 aa, Artificial Sequence
  Description of Artificial Sequence: Synthetic peptide
  Seed: GNEKKAKLANVVRKMMTNSQ
GNELKALLTNVARKMMTNSQ

SEQ ID NO: 189571 - protein, 20 aa, Artificial Sequence
  Description of Artificial Sequence: Synthetic peptide
  Seed: GNEKKAKLANVVRKMMTNSQ
GNELKALLTNVGRKMMTNSQ

SEQ ID NO: 189572 - protein, 20 aa, Artificial Sequence
  Description of Artificial Sequence: Synthetic peptide
  Seed: GNEKKAKLANVVRKMMTNSQ
GNELKALLTNVHRKMMTNSQ

SEQ ID NO: 189573 - protein, 20 aa, Artificial Sequence
  Description of Artificial Sequence: Synthetic peptide
  Seed: GNEKKAKLANVVRKMMTNSQ
GNELKALLTNVIRKMMTNSQ

SEQ ID NO: 189574 - protein, 20 aa, Artificial Sequence
  Description of Artificial Sequence: Synthetic peptide
  Seed: GNEKKAKLANVVRKMMTNSQ
GNELKALLTNVLRKMMTNSQ

SEQ ID NO: 189575 - protein, 20 aa, Artificial Sequence
  Description of Artificial Sequence: Synthetic peptide
  Seed: GNEKKAKLANVVRKMMTNSQ
GNELKALLTNVMRKMMTNSQ

SEQ ID NO: 189576 - protein, 20 aa, Artificial Sequence
  Description of Artificial Sequence: Synthetic peptide
  Seed: GNEKKAKLANVVRKMMTNSQ
GNELKALLTNVNRKMMTNSQ

SEQ ID NO: 189577 - protein, 20 aa, Artificial Sequence
  Description of Artificial Sequence: Synthetic peptide
  Seed: GNEKKAKLANVVRKMMTNSQ
GNELKALLTNVSRKMMTNSQ

SEQ ID NO: 189578 - protein, 20 aa, Artificial Sequence
  Description of Artificial Sequence: Synthetic peptide
  Seed: GNEKKAKLANVVRKMMTNSQ
GNELKALLTNVTRKMMTNSQ

SEQ ID NO: 189579 - protein, 20 aa, Artificial Sequence
  Description of Artificial Sequence: Synthetic peptide
  Seed: GNEKKAKLANVVRKMMTNSQ
GNELKALLTNVVRKMMTNSQ

SEQ ID NO: 189580 - protein, 20 aa, Artificial Sequence
  Description of Artificial Sequence: Synthetic peptide
  Seed: GNEKKAKLANVVRKMMTNSQ
GNELKALLVNVARKMMTNSQ

SEQ ID NO: 189581 - protein, 20 aa, Artificial Sequence
  Description of Artificial Sequence: Synthetic peptide
  Seed: GNEKKAKLANVVRKMMTNSQ
GNELKALLVNVGRKMMTNSQ

SEQ ID NO: 189582 - protein, 20 aa, Artificial Sequence
  Description of Artificial Sequence: Synthetic peptide
  Seed: GNEKKAKLANVVRKMMTNSQ
GNELKALLVNVHRKMMTNSQ

SEQ ID NO: 189583 - protein, 20 aa, Artificial Sequence
  Description of Artificial Sequence: Synthetic peptide
  Seed: GNEKKAKLANVVRKMMTNSQ
GNELKALLVNVNRKMMTNSQ

SEQ ID NO: 189584 - protein, 20 aa, Artificial Sequence
  Description of Artificial Sequence: Synthetic peptide
  Seed: GNEKKAKLANVVRKMMTNSQ
GNELKALLVNVSRKMMTNSQ

SEQ ID NO: 189585 - protein, 20 aa, Artificial Sequence
  Description of Artificial Sequence: Synthetic peptide
  Seed: GNEKKAKLANVVRKMMTNSQ
GNELKALLVNVTRKMMTNSQ

SEQ ID NO: 189586 - protein, 20 aa, Artificial Sequence
  Description of Artificial Sequence: Synthetic peptide
  Seed: GNEKKAKLANVVRKMMTNSQ
GNELKALLVNVVRKMMTNSQ

SEQ ID NO: 189587 - protein, 20 aa, Artificial Sequence
  Description of Artificial Sequence: Synthetic peptide
  Seed: GNEKKAKLANVVRKMMTNSQ
GNELKALLWNVIRKMMTNSQ

SEQ ID NO: 189588 - protein, 20 aa, Artificial Sequence
  Description of Artificial Sequence: Synthetic peptide
  Seed: GNEKKAKLANVVRKMMTNSQ
GNELKALLWNVMRKMMTNSQ

SEQ ID NO: 189589 - protein, 20 aa, Artificial Sequence
  Description of Artificial Sequence: Synthetic peptide
  Seed: GNEKKAKLANVVRKMMTNSQ
GNELKALLWNVVRKMMTNSQ

SEQ ID NO: 189590 - protein, 20 aa, Artificial Sequence
  Description of Artificial Sequence: Synthetic peptide
  Seed: GNEKKAKLANVVRKMMTNSQ
GNELKALLYNVIRKMMTNSQ

SEQ ID NO: 189591 - protein, 20 aa, Artificial Sequence
  Description of Artificial Sequence: Synthetic peptide
  Seed: GNEKKAKLANVVRKMMTNSQ
GNELKALLYNVLRKMMTNSQ

SEQ ID NO: 189592 - protein, 20 aa, Artificial Sequence
  Description of Artificial Sequence: Synthetic peptide
  Seed: GNEKKAKLANVVRKMMTNSQ
GNELKALLYNVMRKMMTNSQ

SEQ ID NO: 189593 - protein, 20 aa, Artificial Sequence
  Description of Artificial Sequence: Synthetic peptide
  Seed: GNEKKAKLANVVRKMMTNSQ
GNELKALLYNVVRKMMTNSQ

SEQ ID NO: 189594 - protein, 20 aa, Artificial Sequence
  Description of Artificial Sequence: Synthetic peptide
  Seed: GNEKKAKLANVVRKMMTNSQ
GNELKAMLANVARKMMTNSQ

SEQ ID NO: 189595 - protein, 20 aa, Artificial Sequence
  Description of Artificial Sequence: Synthetic peptide
  Seed: GNEKKAKLANVVRKMMTNSQ
GNELKAMLANVCRKMMTNSQ

SEQ ID NO: 189596 - protein, 20 aa, Artificial Sequence
  Description of Artificial Sequence: Synthetic peptide
  Seed: GNEKKAKLANVVRKMMTNSQ
GNELKAMLANVDRKMMTNSQ

SEQ ID NO: 189597 - protein, 20 aa, Artificial Sequence
  Description of Artificial Sequence: Synthetic peptide
  Seed: GNEKKAKLANVVRKMMTNSQ
GNELKAMLANVERKMMTNSQ

SEQ ID NO: 189598 - protein, 20 aa, Artificial Sequence
  Description of Artificial Sequence: Synthetic peptide
  Seed: GNEKKAKLANVVRKMMTNSQ
GNELKAMLANVFRKMMTNSQ

SEQ ID NO: 189599 - protein, 20 aa, Artificial Sequence
  Description of Artificial Sequence: Synthetic peptide
  Seed: GNEKKAKLANVVRKMMTNSQ
GNELKAMLANVGRKMMTNSQ

SEQ ID NO: 189600 - protein, 20 aa, Artificial Sequence
  Description of Artificial Sequence: Synthetic peptide
  Seed: GNEKKAKLANVVRKMMTNSQ
GNELKAMLANVHRKMMTNSQ

SEQ ID NO: 189601 - protein, 20 aa, Artificial Sequence
  Description of Artificial Sequence: Synthetic peptide
  Seed: GNEKKAKLANVVRKMMTNSQ
GNELKAMLANVIRKMMTNSQ

SEQ ID NO: 189602 - protein, 20 aa, Artificial Sequence
  Description of Artificial Sequence: Synthetic peptide
  Seed: GNEKKAKLANVVRKMMTNSQ
GNELKAMLANVLRKMMTNSQ

SEQ ID NO: 189603 - protein, 20 aa, Artificial Sequence
  Description of Artificial Sequence: Synthetic peptide
  Seed: GNEKKAKLANVVRKMMTNSQ
GNELKAMLANVMRKMMTNSQ

SEQ ID NO: 189604 - protein, 20 aa, Artificial Sequence
  Description of Artificial Sequence: Synthetic peptide
  Seed: GNEKKAKLANVVRKMMTNSQ
GNELKAMLANVNRKMMTNSQ

SEQ ID NO: 189605 - protein, 20 aa, Artificial Sequence
  Description of Artificial Sequence: Synthetic peptide
  Seed: GNEKKAKLANVVRKMMTNSQ
GNELKAMLANVPRKMMTNSQ

SEQ ID NO: 189606 - protein, 20 aa, Artificial Sequence
  Description of Artificial Sequence: Synthetic peptide
  Seed: GNEKKAKLANVVRKMMTNSQ
GNELKAMLANVQRKMMTNSQ

SEQ ID NO: 189607 - protein, 20 aa, Artificial Sequence
  Description of Artificial Sequence: Synthetic peptide
  Seed: GNEKKAKLANVVRKMMTNSQ
GNELKAMLANVSRKMMTNSQ

SEQ ID NO: 189608 - protein, 20 aa, Artificial Sequence
  Description of Artificial Sequence: Synthetic peptide
  Seed: GNEKKAKLANVVRKMMTNSQ
GNELKAMLANVTRKMMTNSQ

SEQ ID NO: 189609 - protein, 20 aa, Artificial Sequence
  Description of Artificial Sequence: Synthetic peptide
  Seed: GNEKKAKLANVVRKMMTNSQ
GNELKAMLANVVRKMMTNSQ

SEQ ID NO: 189610 - protein, 20 aa, Artificial Sequence
  Description of Artificial Sequence: Synthetic peptide
  Seed: GNEKKAKLANVVRKMMTNSQ
GNELKAMLFNVARKMMTNSQ

SEQ ID NO: 189611 - protein, 20 aa, Artificial Sequence
  Description of Artificial Sequence: Synthetic peptide
  Seed: GNEKKAKLANVVRKMMTNSQ
GNELKAMLFNVERKMMTNSQ

SEQ ID NO: 189612 - protein, 20 aa, Artificial Sequence
  Description of Artificial Sequence: Synthetic peptide
  Seed: GNEKKAKLANVVRKMMTNSQ
GNELKAMLFNVIRKMMTNSQ

SEQ ID NO: 189613 - protein, 20 aa, Artificial Sequence
  Description of Artificial Sequence: Synthetic peptide
  Seed: GNEKKAKLANVVRKMMTNSQ
GNELKAMLFNVLRKMMTNSQ

SEQ ID NO: 189614 - protein, 20 aa, Artificial Sequence
  Description of Artificial Sequence: Synthetic peptide
  Seed: GNEKKAKLANVVRKMMTNSQ
GNELKAMLFNVMRKMMTNSQ

SEQ ID NO: 189615 - protein, 20 aa, Artificial Sequence
  Description of Artificial Sequence: Synthetic peptide
  Seed: GNEKKAKLANVVRKMMTNSQ
GNELKAMLFNVNRKMMTNSQ

SEQ ID NO: 189616 - protein, 20 aa, Artificial Sequence
  Description of Artificial Sequence: Synthetic peptide
  Seed: GNEKKAKLANVVRKMMTNSQ
GNELKAMLFNVTRKMMTNSQ

SEQ ID NO: 189617 - protein, 20 aa, Artificial Sequence
  Description of Artificial Sequence: Synthetic peptide
  Seed: GNEKKAKLANVVRKMMTNSQ
GNELKAMLFNVVRKMMTNSQ

SEQ ID NO: 189618 - protein, 20 aa, Artificial Sequence
  Description of Artificial Sequence: Synthetic peptide
  Seed: GNEKKAKLANVVRKMMTNSQ
GNELKAMLFNVYRKMMTNSQ

SEQ ID NO: 189619 - protein, 20 aa, Artificial Sequence
  Description of Artificial Sequence: Synthetic peptide
  Seed: GNEKKAKLANVVRKMMTNSQ
GNELKAMLGNVARKMMTNSQ

SEQ ID NO: 189620 - protein, 20 aa, Artificial Sequence
  Description of Artificial Sequence: Synthetic peptide
  Seed: GNEKKAKLANVVRKMMTNSQ
GNELKAMLGNVCRKMMTNSQ

SEQ ID NO: 189621 - protein, 20 aa, Artificial Sequence
  Description of Artificial Sequence: Synthetic peptide
  Seed: GNEKKAKLANVVRKMMTNSQ
GNELKAMLGNVFRKMMTNSQ

SEQ ID NO: 189622 - protein, 20 aa, Artificial Sequence
  Description of Artificial Sequence: Synthetic peptide
  Seed: GNEKKAKLANVVRKMMTNSQ
GNELKAMLGNVGRKMMTNSQ

SEQ ID NO: 189623 - protein, 20 aa, Artificial Sequence
  Description of Artificial Sequence: Synthetic peptide
  Seed: GNEKKAKLANVVRKMMTNSQ
GNELKAMLGNVIRKMMTNSQ

SEQ ID NO: 189624 - protein, 20 aa, Artificial Sequence
  Description of Artificial Sequence: Synthetic peptide
  Seed: GNEKKAKLANVVRKMMTNSQ
GNELKAMLGNVLRKMMTNSQ

SEQ ID NO: 189625 - protein, 20 aa, Artificial Sequence
  Description of Artificial Sequence: Synthetic peptide
  Seed: GNEKKAKLANVVRKMMTNSQ
GNELKAMLGNVMRKMMTNSQ

SEQ ID NO: 189626 - protein, 20 aa, Artificial Sequence
  Description of Artificial Sequence: Synthetic peptide
  Seed: GNEKKAKLANVVRKMMTNSQ
GNELKAMLGNVNRKMMTNSQ

SEQ ID NO: 189627 - protein, 20 aa, Artificial Sequence
  Description of Artificial Sequence: Synthetic peptide
  Seed: GNEKKAKLANVVRKMMTNSQ
GNELKAMLGNVSRKMMTNSQ

SEQ ID NO: 189628 - protein, 20 aa, Artificial Sequence
  Description of Artificial Sequence: Synthetic peptide
  Seed: GNEKKAKLANVVRKMMTNSQ
GNELKAMLGNVTRKMMTNSQ

SEQ ID NO: 189629 - protein, 20 aa, Artificial Sequence
  Description of Artificial Sequence: Synthetic peptide
  Seed: GNEKKAKLANVVRKMMTNSQ
GNELKAMLGNVVRKMMTNSQ

SEQ ID NO: 189630 - protein, 20 aa, Artificial Sequence
  Description of Artificial Sequence: Synthetic peptide
  Seed: GNEKKAKLANVVRKMMTNSQ
GNELKAMLINVARKMMTNSQ

SEQ ID NO: 189631 - protein, 20 aa, Artificial Sequence
  Description of Artificial Sequence: Synthetic peptide
  Seed: GNEKKAKLANVVRKMMTNSQ
GNELKAMLINVNRKMMTNSQ

SEQ ID NO: 189632 - protein, 20 aa, Artificial Sequence
  Description of Artificial Sequence: Synthetic peptide
  Seed: GNEKKAKLANVVRKMMTNSQ
GNELKAMLINVSRKMMTNSQ

SEQ ID NO: 189633 - protein, 20 aa, Artificial Sequence
  Description of Artificial Sequence: Synthetic peptide
  Seed: GNEKKAKLANVVRKMMTNSQ
GNELKAMLINVTRKMMTNSQ

SEQ ID NO: 189634 - protein, 20 aa, Artificial Sequence
  Description of Artificial Sequence: Synthetic peptide
  Seed: GNEKKAKLANVVRKMMTNSQ
GNELKAMLNNVARKMMTNSQ

SEQ ID NO: 189635 - protein, 20 aa, Artificial Sequence
  Description of Artificial Sequence: Synthetic peptide
  Seed: GNEKKAKLANVVRKMMTNSQ
GNELKAMLNNVIRKMMTNSQ

SEQ ID NO: 189636 - protein, 20 aa, Artificial Sequence
  Description of Artificial Sequence: Synthetic peptide
  Seed: GNEKKAKLANVVRKMMTNSQ
GNELKAMLNNVLRKMMTNSQ

SEQ ID NO: 189637 - protein, 20 aa, Artificial Sequence
  Description of Artificial Sequence: Synthetic peptide
  Seed: GNEKKAKLANVVRKMMTNSQ
GNELKAMLNNVNRKMMTNSQ

SEQ ID NO: 189638 - protein, 20 aa, Artificial Sequence
  Description of Artificial Sequence: Synthetic peptide
  Seed: GNEKKAKLANVVRKMMTNSQ
GNELKAMLNNVSRKMMTNSQ

SEQ ID NO: 189639 - protein, 20 aa, Artificial Sequence
  Description of Artificial Sequence: Synthetic peptide
  Seed: GNEKKAKLANVVRKMMTNSQ
GNELKAMLNNVTRKMMTNSQ

SEQ ID NO: 189640 - protein, 20 aa, Artificial Sequence
  Description of Artificial Sequence: Synthetic peptide
  Seed: GNEKKAKLANVVRKMMTNSQ
GNELKAMLNNVVRKMMTNSQ

SEQ ID NO: 189641 - protein, 20 aa, Artificial Sequence
  Description of Artificial Sequence: Synthetic peptide
  Seed: GNEKKAKLANVVRKMMTNSQ
GNELKAMLPNVARKMMTNSQ

SEQ ID NO: 189642 - protein, 20 aa, Artificial Sequence
  Description of Artificial Sequence: Synthetic peptide
  Seed: GNEKKAKLANVVRKMMTNSQ
GNELKAMLPNVGRKMMTNSQ

SEQ ID NO: 189643 - protein, 20 aa, Artificial Sequence
  Description of Artificial Sequence: Synthetic peptide
  Seed: GNEKKAKLANVVRKMMTNSQ
GNELKAMLPNVHRKMMTNSQ

SEQ ID NO: 189644 - protein, 20 aa, Artificial Sequence
  Description of Artificial Sequence: Synthetic peptide
  Seed: GNEKKAKLANVVRKMMTNSQ
GNELKAMLPNVIRKMMTNSQ

SEQ ID NO: 189645 - protein, 20 aa, Artificial Sequence
  Description of Artificial Sequence: Synthetic peptide
  Seed: GNEKKAKLANVVRKMMTNSQ
GNELKAMLPNVLRKMMTNSQ

SEQ ID NO: 189646 - protein, 20 aa, Artificial Sequence
  Description of Artificial Sequence: Synthetic peptide
  Seed: GNEKKAKLANVVRKMMTNSQ
GNELKAMLPNVMRKMMTNSQ

SEQ ID NO: 189647 - protein, 20 aa, Artificial Sequence
  Description of Artificial Sequence: Synthetic peptide
  Seed: GNEKKAKLANVVRKMMTNSQ
GNELKAMLPNVNRKMMTNSQ

SEQ ID NO: 189648 - protein, 20 aa, Artificial Sequence
  Description of Artificial Sequence: Synthetic peptide
  Seed: GNEKKAKLANVVRKMMTNSQ
GNELKAMLPNVQRKMMTNSQ

SEQ ID NO: 189649 - protein, 20 aa, Artificial Sequence
  Description of Artificial Sequence: Synthetic peptide
  Seed: GNEKKAKLANVVRKMMTNSQ
GNELKAMLPNVSRKMMTNSQ

SEQ ID NO: 189650 - protein, 20 aa, Artificial Sequence
  Description of Artificial Sequence: Synthetic peptide
  Seed: GNEKKAKLANVVRKMMTNSQ
GNELKAMLPNVTRKMMTNSQ

SEQ ID NO: 189651 - protein, 20 aa, Artificial Sequence
  Description of Artificial Sequence: Synthetic peptide
  Seed: GNEKKAKLANVVRKMMTNSQ
GNELKAMLPNVVRKMMTNSQ

SEQ ID NO: 189652 - protein, 20 aa, Artificial Sequence
  Description of Artificial Sequence: Synthetic peptide
  Seed: GNEKKAKLANVVRKMMTNSQ
GNELKAMLSNVARKMMTNSQ

SEQ ID NO: 189653 - protein, 20 aa, Artificial Sequence
  Description of Artificial Sequence: Synthetic peptide
  Seed: GNEKKAKLANVVRKMMTNSQ
GNELKAMLSNVGRKMMTNSQ

SEQ ID NO: 189654 - protein, 20 aa, Artificial Sequence
  Description of Artificial Sequence: Synthetic peptide
  Seed: GNEKKAKLANVVRKMMTNSQ
GNELKAMLSNVHRKMMTNSQ

SEQ ID NO: 189655 - protein, 20 aa, Artificial Sequence
  Description of Artificial Sequence: Synthetic peptide
  Seed: GNEKKAKLANVVRKMMTNSQ
GNELKAMLSNVIRKMMTNSQ

SEQ ID NO: 189656 - protein, 20 aa, Artificial Sequence
  Description of Artificial Sequence: Synthetic peptide
  Seed: GNEKKAKLANVVRKMMTNSQ
GNELKAMLSNVLRKMMTNSQ

SEQ ID NO: 189657 - protein, 20 aa, Artificial Sequence
  Description of Artificial Sequence: Synthetic peptide
  Seed: GNEKKAKLANVVRKMMTNSQ
GNELKAMLSNVMRKMMTNSQ

SEQ ID NO: 189658 - protein, 20 aa, Artificial Sequence
  Description of Artificial Sequence: Synthetic peptide
  Seed: GNEKKAKLANVVRKMMTNSQ
GNELKAMLSNVNRKMMTNSQ

SEQ ID NO: 189659 - protein, 20 aa, Artificial Sequence
  Description of Artificial Sequence: Synthetic peptide
  Seed: GNEKKAKLANVVRKMMTNSQ
GNELKAMLSNVSRKMMTNSQ

SEQ ID NO: 189660 - protein, 20 aa, Artificial Sequence
  Description of Artificial Sequence: Synthetic peptide
  Seed: GNEKKAKLANVVRKMMTNSQ
GNELKAMLSNVTRKMMTNSQ

SEQ ID NO: 189661 - protein, 20 aa, Artificial Sequence
  Description of Artificial Sequence: Synthetic peptide
  Seed: GNEKKAKLANVVRKMMTNSQ
GNELKAMLSNVVRKMMTNSQ

SEQ ID NO: 189662 - protein, 20 aa, Artificial Sequence
  Description of Artificial Sequence: Synthetic peptide
  Seed: GNEKKAKLANVVRKMMTNSQ
GNELKAMLTNVARKMMTNSQ

SEQ ID NO: 189663 - protein, 20 aa, Artificial Sequence
  Description of Artificial Sequence: Synthetic peptide
  Seed: GNEKKAKLANVVRKMMTNSQ
GNELKAMLTNVGRKMMTNSQ

SEQ ID NO: 189664 - protein, 20 aa, Artificial Sequence
  Description of Artificial Sequence: Synthetic peptide
  Seed: GNEKKAKLANVVRKMMTNSQ
GNELKAMLTNVHRKMMTNSQ

SEQ ID NO: 189665 - protein, 20 aa, Artificial Sequence
  Description of Artificial Sequence: Synthetic peptide
  Seed: GNEKKAKLANVVRKMMTNSQ
GNELKAMLTNVIRKMMTNSQ

SEQ ID NO: 189666 - protein, 20 aa, Artificial Sequence
  Description of Artificial Sequence: Synthetic peptide
  Seed: GNEKKAKLANVVRKMMTNSQ
GNELKAMLTNVLRKMMTNSQ

SEQ ID NO: 189667 - protein, 20 aa, Artificial Sequence
  Description of Artificial Sequence: Synthetic peptide
  Seed: GNEKKAKLANVVRKMMTNSQ
GNELKAMLTNVMRKMMTNSQ

SEQ ID NO: 189668 - protein, 20 aa, Artificial Sequence
  Description of Artificial Sequence: Synthetic peptide
  Seed: GNEKKAKLANVVRKMMTNSQ
GNELKAMLTNVNRKMMTNSQ

SEQ ID NO: 189669 - protein, 20 aa, Artificial Sequence
  Description of Artificial Sequence: Synthetic peptide
  Seed: GNEKKAKLANVVRKMMTNSQ
GNELKAMLTNVSRKMMTNSQ

SEQ ID NO: 189670 - protein, 20 aa, Artificial Sequence
  Description of Artificial Sequence: Synthetic peptide
  Seed: GNEKKAKLANVVRKMMTNSQ
GNELKAMLTNVTRKMMTNSQ

SEQ ID NO: 189671 - protein, 20 aa, Artificial Sequence
  Description of Artificial Sequence: Synthetic peptide
  Seed: GNEKKAKLANVVRKMMTNSQ
GNELKAMLTNVVRKMMTNSQ

SEQ ID NO: 189672 - protein, 20 aa, Artificial Sequence
  Description of Artificial Sequence: Synthetic peptide
  Seed: GNEKKAKLANVVRKMMTNSQ
GNELKAMLVNVARKMMTNSQ

SEQ ID NO: 189673 - protein, 20 aa, Artificial Sequence
  Description of Artificial Sequence: Synthetic peptide
  Seed: GNEKKAKLANVVRKMMTNSQ
GNELKAMLVNVGRKMMTNSQ

SEQ ID NO: 189674 - protein, 20 aa, Artificial Sequence
  Description of Artificial Sequence: Synthetic peptide
  Seed: GNEKKAKLANVVRKMMTNSQ
GNELKAMLVNVHRKMMTNSQ

SEQ ID NO: 189675 - protein, 20 aa, Artificial Sequence
  Description of Artificial Sequence: Synthetic peptide
  Seed: GNEKKAKLANVVRKMMTNSQ
GNELKAMLVNVIRKMMTNSQ

SEQ ID NO: 189676 - protein, 20 aa, Artificial Sequence
  Description of Artificial Sequence: Synthetic peptide
  Seed: GNEKKAKLANVVRKMMTNSQ
GNELKAMLVNVMRKMMTNSQ

SEQ ID NO: 189677 - protein, 20 aa, Artificial Sequence
  Description of Artificial Sequence: Synthetic peptide
  Seed: GNEKKAKLANVVRKMMTNSQ
GNELKAMLVNVNRKMMTNSQ

SEQ ID NO: 189678 - protein, 20 aa, Artificial Sequence
  Description of Artificial Sequence: Synthetic peptide
  Seed: GNEKKAKLANVVRKMMTNSQ
GNELKAMLVNVSRKMMTNSQ

SEQ ID NO: 189679 - protein, 20 aa, Artificial Sequence
  Description of Artificial Sequence: Synthetic peptide
  Seed: GNEKKAKLANVVRKMMTNSQ
GNELKAMLVNVTRKMMTNSQ

SEQ ID NO: 189680 - protein, 20 aa, Artificial Sequence
  Description of Artificial Sequence: Synthetic peptide
  Seed: GNEKKAKLANVVRKMMTNSQ
GNELKAMLVNVVRKMMTNSQ

SEQ ID NO: 189681 - protein, 20 aa, Artificial Sequence
  Description of Artificial Sequence: Synthetic peptide
  Seed: GNEKKAKLANVVRKMMTNSQ
GNELKAMLWNVIRKMMTNSQ

SEQ ID NO: 189682 - protein, 20 aa, Artificial Sequence
  Description of Artificial Sequence: Synthetic peptide
  Seed: GNEKKAKLANVVRKMMTNSQ
GNELKAMLWNVLRKMMTNSQ

SEQ ID NO: 189683 - protein, 20 aa, Artificial Sequence
  Description of Artificial Sequence: Synthetic peptide
  Seed: GNEKKAKLANVVRKMMTNSQ
GNELKAMLYNVIRKMMTNSQ

SEQ ID NO: 189684 - protein, 20 aa, Artificial Sequence
  Description of Artificial Sequence: Synthetic peptide
  Seed: GNEKKAKLANVVRKMMTNSQ
GNELKAMLYNVLRKMMTNSQ

SEQ ID NO: 189685 - protein, 20 aa, Artificial Sequence
  Description of Artificial Sequence: Synthetic peptide
  Seed: GNEKKAKLANVVRKMMTNSQ
GNELKAMLYNVMRKMMTNSQ

SEQ ID NO: 189686 - protein, 20 aa, Artificial Sequence
  Description of Artificial Sequence: Synthetic peptide
  Seed: GNEKKAKLANVVRKMMTNSQ
GNELKAMLYNVVRKMMTNSQ

SEQ ID NO: 189687 - protein, 20 aa, Artificial Sequence
  Description of Artificial Sequence: Synthetic peptide
  Seed: GNEKKAKLANVVRKMMTNSQ
GNELKANLANVIRKMMTNSQ

SEQ ID NO: 189688 - protein, 20 aa, Artificial Sequence
  Description of Artificial Sequence: Synthetic peptide
  Seed: GNEKKAKLANVVRKMMTNSQ
GNELKANLANVVRKMMTNSQ

SEQ ID NO: 189689 - protein, 20 aa, Artificial Sequence
  Description of Artificial Sequence: Synthetic peptide
  Seed: GNEKKAKLANVVRKMMTNSQ
GNELKANLFNVARKMMTNSQ

SEQ ID NO: 189690 - protein, 20 aa, Artificial Sequence
  Description of Artificial Sequence: Synthetic peptide
  Seed: GNEKKAKLANVVRKMMTNSQ
GNELKANLFNVFRKMMTNSQ

SEQ ID NO: 189691 - protein, 20 aa, Artificial Sequence
  Description of Artificial Sequence: Synthetic peptide
  Seed: GNEKKAKLANVVRKMMTNSQ
GNELKANLFNVIRKMMTNSQ

SEQ ID NO: 189692 - protein, 20 aa, Artificial Sequence
  Description of Artificial Sequence: Synthetic peptide
  Seed: GNEKKAKLANVVRKMMTNSQ
GNELKANLFNVLRKMMTNSQ

SEQ ID NO: 189693 - protein, 20 aa, Artificial Sequence
  Description of Artificial Sequence: Synthetic peptide
  Seed: GNEKKAKLANVVRKMMTNSQ
GNELKANLFNVMRKMMTNSQ

SEQ ID NO: 189694 - protein, 20 aa, Artificial Sequence
  Description of Artificial Sequence: Synthetic peptide
  Seed: GNEKKAKLANVVRKMMTNSQ
GNELKANLFNVNRKMMTNSQ

SEQ ID NO: 189695 - protein, 20 aa, Artificial Sequence
  Description of Artificial Sequence: Synthetic peptide
  Seed: GNEKKAKLANVVRKMMTNSQ
GNELKANLFNVSRKMMTNSQ

SEQ ID NO: 189696 - protein, 20 aa, Artificial Sequence
  Description of Artificial Sequence: Synthetic peptide
  Seed: GNEKKAKLANVVRKMMTNSQ
GNELKANLFNVTRKMMTNSQ

SEQ ID NO: 189697 - protein, 20 aa, Artificial Sequence
  Description of Artificial Sequence: Synthetic peptide
  Seed: GNEKKAKLANVVRKMMTNSQ
GNELKANLFNVVRKMMTNSQ

SEQ ID NO: 189698 - protein, 20 aa, Artificial Sequence
  Description of Artificial Sequence: Synthetic peptide
  Seed: GNEKKAKLANVVRKMMTNSQ
GNELKANLFNVYRKMMTNSQ

SEQ ID NO: 189699 - protein, 20 aa, Artificial Sequence
  Description of Artificial Sequence: Synthetic peptide
  Seed: GNEKKAKLANVVRKMMTNSQ
GNELKANLLNVIRKMMTNSQ

SEQ ID NO: 189700 - protein, 20 aa, Artificial Sequence
  Description of Artificial Sequence: Synthetic peptide
  Seed: GNEKKAKLANVVRKMMTNSQ
GNELKANLYNVFRKMMTNSQ

SEQ ID NO: 189701 - protein, 20 aa, Artificial Sequence
  Description of Artificial Sequence: Synthetic peptide
  Seed: GNEKKAKLANVVRKMMTNSQ
GNELKANLYNVIRKMMTNSQ

SEQ ID NO: 189702 - protein, 20 aa, Artificial Sequence
  Description of Artificial Sequence: Synthetic peptide
  Seed: GNEKKAKLANVVRKMMTNSQ
GNELKANLYNVLRKMMTNSQ

SEQ ID NO: 189703 - protein, 20 aa, Artificial Sequence
  Description of Artificial Sequence: Synthetic peptide
  Seed: GNEKKAKLANVVRKMMTNSQ
GNELKANLYNVVRKMMTNSQ

SEQ ID NO: 189704 - protein, 20 aa, Artificial Sequence
  Description of Artificial Sequence: Synthetic peptide
  Seed: GNEKKAKLANVVRKMMTNSQ
GNELKAQLANVARKMMTNSQ

SEQ ID NO: 189705 - protein, 20 aa, Artificial Sequence
  Description of Artificial Sequence: Synthetic peptide
  Seed: GNEKKAKLANVVRKMMTNSQ
GNELKAQLANVIRKMMTNSQ

SEQ ID NO: 189706 - protein, 20 aa, Artificial Sequence
  Description of Artificial Sequence: Synthetic peptide
  Seed: GNEKKAKLANVVRKMMTNSQ
GNELKAQLANVLRKMMTNSQ

SEQ ID NO: 189707 - protein, 20 aa, Artificial Sequence
  Description of Artificial Sequence: Synthetic peptide
  Seed: GNEKKAKLANVVRKMMTNSQ
GNELKAQLANVMRKMMTNSQ

SEQ ID NO: 189708 - protein, 20 aa, Artificial Sequence
  Description of Artificial Sequence: Synthetic peptide
  Seed: GNEKKAKLANVVRKMMTNSQ
GNELKAQLANVNRKMMTNSQ

SEQ ID NO: 189709 - protein, 20 aa, Artificial Sequence
  Description of Artificial Sequence: Synthetic peptide
  Seed: GNEKKAKLANVVRKMMTNSQ
GNELKAQLANVSRKMMTNSQ

SEQ ID NO: 189710 - protein, 20 aa, Artificial Sequence
  Description of Artificial Sequence: Synthetic peptide
  Seed: GNEKKAKLANVVRKMMTNSQ
GNELKAQLANVTRKMMTNSQ

SEQ ID NO: 189711 - protein, 20 aa, Artificial Sequence
  Description of Artificial Sequence: Synthetic peptide
  Seed: GNEKKAKLANVVRKMMTNSQ
GNELKAQLANVVRKMMTNSQ

SEQ ID NO: 189712 - protein, 20 aa, Artificial Sequence
  Description of Artificial Sequence: Synthetic peptide
  Seed: GNEKKAKLANVVRKMMTNSQ
GNELKAQLFNVARKMMTNSQ

SEQ ID NO: 189713 - protein, 20 aa, Artificial Sequence
  Description of Artificial Sequence: Synthetic peptide
  Seed: GNEKKAKLANVVRKMMTNSQ
GNELKAQLFNVFRKMMTNSQ

SEQ ID NO: 189714 - protein, 20 aa, Artificial Sequence
  Description of Artificial Sequence: Synthetic peptide
  Seed: GNEKKAKLANVVRKMMTNSQ
GNELKAQLFNVIRKMMTNSQ

SEQ ID NO: 189715 - protein, 20 aa, Artificial Sequence
  Description of Artificial Sequence: Synthetic peptide
  Seed: GNEKKAKLANVVRKMMTNSQ
GNELKAQLFNVLRKMMTNSQ

SEQ ID NO: 189716 - protein, 20 aa, Artificial Sequence
  Description of Artificial Sequence: Synthetic peptide
  Seed: GNEKKAKLANVVRKMMTNSQ
GNELKAQLFNVMRKMMTNSQ

SEQ ID NO: 189717 - protein, 20 aa, Artificial Sequence
  Description of Artificial Sequence: Synthetic peptide
  Seed: GNEKKAKLANVVRKMMTNSQ
GNELKAQLFNVNRKMMTNSQ

SEQ ID NO: 189718 - protein, 20 aa, Artificial Sequence
  Description of Artificial Sequence: Synthetic peptide
  Seed: GNEKKAKLANVVRKMMTNSQ
GNELKAQLFNVSRKMMTNSQ

SEQ ID NO: 189719 - protein, 20 aa, Artificial Sequence
  Description of Artificial Sequence: Synthetic peptide
  Seed: GNEKKAKLANVVRKMMTNSQ
GNELKAQLFNVTRKMMTNSQ

SEQ ID NO: 189720 - protein, 20 aa, Artificial Sequence
  Description of Artificial Sequence: Synthetic peptide
  Seed: GNEKKAKLANVVRKMMTNSQ
GNELKAQLFNVVRKMMTNSQ

SEQ ID NO: 189721 - protein, 20 aa, Artificial Sequence
  Description of Artificial Sequence: Synthetic peptide
  Seed: GNEKKAKLANVVRKMMTNSQ
GNELKAQLFNVYRKMMTNSQ

SEQ ID NO: 189722 - protein, 20 aa, Artificial Sequence
  Description of Artificial Sequence: Synthetic peptide
  Seed: GNEKKAKLANVVRKMMTNSQ
GNELKAQLGNVARKMMTNSQ

SEQ ID NO: 189723 - protein, 20 aa, Artificial Sequence
  Description of Artificial Sequence: Synthetic peptide
  Seed: GNEKKAKLANVVRKMMTNSQ
GNELKAQLGNVIRKMMTNSQ

SEQ ID NO: 189724 - protein, 20 aa, Artificial Sequence
  Description of Artificial Sequence: Synthetic peptide
  Seed: GNEKKAKLANVVRKMMTNSQ
GNELKAQLGNVLRKMMTNSQ

SEQ ID NO: 189725 - protein, 20 aa, Artificial Sequence
  Description of Artificial Sequence: Synthetic peptide
  Seed: GNEKKAKLANVVRKMMTNSQ
GNELKAQLGNVMRKMMTNSQ

SEQ ID NO: 189726 - protein, 20 aa, Artificial Sequence
  Description of Artificial Sequence: Synthetic peptide
  Seed: GNEKKAKLANVVRKMMTNSQ
GNELKAQLGNVVRKMMTNSQ

SEQ ID NO: 189727 - protein, 20 aa, Artificial Sequence
  Description of Artificial Sequence: Synthetic peptide
  Seed: GNEKKAKLANVVRKMMTNSQ
GNELKAQLLNVIRKMMTNSQ

SEQ ID NO: 189728 - protein, 20 aa, Artificial Sequence
  Description of Artificial Sequence: Synthetic peptide
  Seed: GNEKKAKLANVVRKMMTNSQ
GNELKAQLPNVIRKMMTNSQ

SEQ ID NO: 189729 - protein, 20 aa, Artificial Sequence
  Description of Artificial Sequence: Synthetic peptide
  Seed: GNEKKAKLANVVRKMMTNSQ
GNELKAQLPNVLRKMMTNSQ

SEQ ID NO: 189730 - protein, 20 aa, Artificial Sequence
  Description of Artificial Sequence: Synthetic peptide
  Seed: GNEKKAKLANVVRKMMTNSQ
GNELKAQLPNVVRKMMTNSQ

SEQ ID NO: 189731 - protein, 20 aa, Artificial Sequence
  Description of Artificial Sequence: Synthetic peptide
  Seed: GNEKKAKLANVVRKMMTNSQ
GNELKAQLSNVARKMMTNSQ

SEQ ID NO: 189732 - protein, 20 aa, Artificial Sequence
  Description of Artificial Sequence: Synthetic peptide
  Seed: GNEKKAKLANVVRKMMTNSQ
GNELKAQLSNVIRKMMTNSQ

SEQ ID NO: 189733 - protein, 20 aa, Artificial Sequence
  Description of Artificial Sequence: Synthetic peptide
  Seed: GNEKKAKLANVVRKMMTNSQ
GNELKAQLSNVLRKMMTNSQ

SEQ ID NO: 189734 - protein, 20 aa, Artificial Sequence
  Description of Artificial Sequence: Synthetic peptide
  Seed: GNEKKAKLANVVRKMMTNSQ
GNELKAQLSNVVRKMMTNSQ

SEQ ID NO: 189735 - protein, 20 aa, Artificial Sequence
  Description of Artificial Sequence: Synthetic peptide
  Seed: GNEKKAKLANVVRKMMTNSQ
GNELKAQLTNVARKMMTNSQ

SEQ ID NO: 189736 - protein, 20 aa, Artificial Sequence
  Description of Artificial Sequence: Synthetic peptide
  Seed: GNEKKAKLANVVRKMMTNSQ
GNELKAQLVNVARKMMTNSQ

SEQ ID NO: 189737 - protein, 20 aa, Artificial Sequence
  Description of Artificial Sequence: Synthetic peptide
  Seed: GNEKKAKLANVVRKMMTNSQ
GNELKAQLWNVIRKMMTNSQ

SEQ ID NO: 189738 - protein, 20 aa, Artificial Sequence
  Description of Artificial Sequence: Synthetic peptide
  Seed: GNEKKAKLANVVRKMMTNSQ
GNELKAQLYNVFRKMMTNSQ

SEQ ID NO: 189739 - protein, 20 aa, Artificial Sequence
  Description of Artificial Sequence: Synthetic peptide
  Seed: GNEKKAKLANVVRKMMTNSQ
GNELKAQLYNVIRKMMTNSQ

SEQ ID NO: 189740 - protein, 20 aa, Artificial Sequence
  Description of Artificial Sequence: Synthetic peptide
  Seed: GNEKKAKLANVVRKMMTNSQ
GNELKAQLYNVLRKMMTNSQ

SEQ ID NO: 189741 - protein, 20 aa, Artificial Sequence
  Description of Artificial Sequence: Synthetic peptide
  Seed: GNEKKAKLANVVRKMMTNSQ
GNELKAQLYNVVRKMMTNSQ

SEQ ID NO: 189742 - protein, 20 aa, Artificial Sequence
  Description of Artificial Sequence: Synthetic peptide
  Seed: GNEKKAKLANVVRKMMTNSQ
GNELKARLFNVFRKMMTNSQ

SEQ ID NO: 189743 - protein, 20 aa, Artificial Sequence
  Description of Artificial Sequence: Synthetic peptide
  Seed: GNEKKAKLANVVRKMMTNSQ
GNELKARLFNVIRKMMTNSQ

SEQ ID NO: 189744 - protein, 20 aa, Artificial Sequence
  Description of Artificial Sequence: Synthetic peptide
  Seed: GNEKKAKLANVVRKMMTNSQ
GNELKARLFNVLRKMMTNSQ

SEQ ID NO: 189745 - protein, 20 aa, Artificial Sequence
  Description of Artificial Sequence: Synthetic peptide
  Seed: GNEKKAKLANVVRKMMTNSQ
GNELKARLFNVVRKMMTNSQ

SEQ ID NO: 189746 - protein, 20 aa, Artificial Sequence
  Description of Artificial Sequence: Synthetic peptide
  Seed: GNEKKAKLANVVRKMMTNSQ
GNELKASLANVARKMMTNSQ

SEQ ID NO: 189747 - protein, 20 aa, Artificial Sequence
  Description of Artificial Sequence: Synthetic peptide
  Seed: GNEKKAKLANVVRKMMTNSQ
GNELKASLANVIRKMMTNSQ

SEQ ID NO: 189748 - protein, 20 aa, Artificial Sequence
  Description of Artificial Sequence: Synthetic peptide
  Seed: GNEKKAKLANVVRKMMTNSQ
GNELKASLANVLRKMMTNSQ

SEQ ID NO: 189749 - protein, 20 aa, Artificial Sequence
  Description of Artificial Sequence: Synthetic peptide
  Seed: GNEKKAKLANVVRKMMTNSQ
GNELKASLANVMRKMMTNSQ

SEQ ID NO: 189750 - protein, 20 aa, Artificial Sequence
  Description of Artificial Sequence: Synthetic peptide
  Seed: GNEKKAKLANVVRKMMTNSQ
GNELKASLANVNRKMMTNSQ

SEQ ID NO: 189751 - protein, 20 aa, Artificial Sequence
  Description of Artificial Sequence: Synthetic peptide
  Seed: GNEKKAKLANVVRKMMTNSQ
GNELKASLANVSRKMMTNSQ

SEQ ID NO: 189752 - protein, 20 aa, Artificial Sequence
  Description of Artificial Sequence: Synthetic peptide
  Seed: GNEKKAKLANVVRKMMTNSQ
GNELKASLANVVRKMMTNSQ

SEQ ID NO: 189753 - protein, 20 aa, Artificial Sequence
  Description of Artificial Sequence: Synthetic peptide
  Seed: GNEKKAKLANVVRKMMTNSQ
GNELKASLFNVARKMMTNSQ

SEQ ID NO: 189754 - protein, 20 aa, Artificial Sequence
  Description of Artificial Sequence: Synthetic peptide
  Seed: GNEKKAKLANVVRKMMTNSQ
GNELKASLFNVDRKMMTNSQ

SEQ ID NO: 189755 - protein, 20 aa, Artificial Sequence
  Description of Artificial Sequence: Synthetic peptide
  Seed: GNEKKAKLANVVRKMMTNSQ
GNELKASLFNVERKMMTNSQ

SEQ ID NO: 189756 - protein, 20 aa, Artificial Sequence
  Description of Artificial Sequence: Synthetic peptide
  Seed: GNEKKAKLANVVRKMMTNSQ
GNELKASLFNVFRKMMTNSQ

SEQ ID NO: 189757 - protein, 20 aa, Artificial Sequence
  Description of Artificial Sequence: Synthetic peptide
  Seed: GNEKKAKLANVVRKMMTNSQ
GNELKASLFNVIRKMMTNSQ

SEQ ID NO: 189758 - protein, 20 aa, Artificial Sequence
  Description of Artificial Sequence: Synthetic peptide
  Seed: GNEKKAKLANVVRKMMTNSQ
GNELKASLFNVLRKMMTNSQ

SEQ ID NO: 189759 - protein, 20 aa, Artificial Sequence
  Description of Artificial Sequence: Synthetic peptide
  Seed: GNEKKAKLANVVRKMMTNSQ
GNELKASLFNVMRKMMTNSQ

SEQ ID NO: 189760 - protein, 20 aa, Artificial Sequence
  Description of Artificial Sequence: Synthetic peptide
  Seed: GNEKKAKLANVVRKMMTNSQ
GNELKASLFNVNRKMMTNSQ

SEQ ID NO: 189761 - protein, 20 aa, Artificial Sequence
  Description of Artificial Sequence: Synthetic peptide
  Seed: GNEKKAKLANVVRKMMTNSQ
GNELKASLFNVPRKMMTNSQ

SEQ ID NO: 189762 - protein, 20 aa, Artificial Sequence
  Description of Artificial Sequence: Synthetic peptide
  Seed: GNEKKAKLANVVRKMMTNSQ
GNELKASLFNVQRKMMTNSQ

SEQ ID NO: 189763 - protein, 20 aa, Artificial Sequence
  Description of Artificial Sequence: Synthetic peptide
  Seed: GNEKKAKLANVVRKMMTNSQ
GNELKASLFNVSRKMMTNSQ

SEQ ID NO: 189764 - protein, 20 aa, Artificial Sequence
  Description of Artificial Sequence: Synthetic peptide
  Seed: GNEKKAKLANVVRKMMTNSQ
GNELKASLFNVTRKMMTNSQ

SEQ ID NO: 189765 - protein, 20 aa, Artificial Sequence
  Description of Artificial Sequence: Synthetic peptide
  Seed: GNEKKAKLANVVRKMMTNSQ
GNELKASLFNVVRKMMTNSQ

SEQ ID NO: 189766 - protein, 20 aa, Artificial Sequence
  Description of Artificial Sequence: Synthetic peptide
  Seed: GNEKKAKLANVVRKMMTNSQ
GNELKASLFNVYRKMMTNSQ

SEQ ID NO: 189767 - protein, 20 aa, Artificial Sequence
  Description of Artificial Sequence: Synthetic peptide
  Seed: GNEKKAKLANVVRKMMTNSQ
GNELKASLGNVARKMMTNSQ

SEQ ID NO: 189768 - protein, 20 aa, Artificial Sequence
  Description of Artificial Sequence: Synthetic peptide
  Seed: GNEKKAKLANVVRKMMTNSQ
GNELKASLGNVIRKMMTNSQ

SEQ ID NO: 189769 - protein, 20 aa, Artificial Sequence
  Description of Artificial Sequence: Synthetic peptide
  Seed: GNEKKAKLANVVRKMMTNSQ
GNELKASLGNVLRKMMTNSQ

SEQ ID NO: 189770 - protein, 20 aa, Artificial Sequence
  Description of Artificial Sequence: Synthetic peptide
  Seed: GNEKKAKLANVVRKMMTNSQ
GNELKASLGNVVRKMMTNSQ

SEQ ID NO: 189771 - protein, 20 aa, Artificial Sequence
  Description of Artificial Sequence: Synthetic peptide
  Seed: GNEKKAKLANVVRKMMTNSQ
GNELKASLINVIRKMMTNSQ

SEQ ID NO: 189772 - protein, 20 aa, Artificial Sequence
  Description of Artificial Sequence: Synthetic peptide
  Seed: GNEKKAKLANVVRKMMTNSQ
GNELKASLLNVIRKMMTNSQ

SEQ ID NO: 189773 - protein, 20 aa, Artificial Sequence
  Description of Artificial Sequence: Synthetic peptide
  Seed: GNEKKAKLANVVRKMMTNSQ
GNELKASLLNVLRKMMTNSQ

SEQ ID NO: 189774 - protein, 20 aa, Artificial Sequence
  Description of Artificial Sequence: Synthetic peptide
  Seed: GNEKKAKLANVVRKMMTNSQ
GNELKASLLNVVRKMMTNSQ

SEQ ID NO: 189775 - protein, 20 aa, Artificial Sequence
  Description of Artificial Sequence: Synthetic peptide
  Seed: GNEKKAKLANVVRKMMTNSQ
GNELKASLMNVIRKMMTNSQ

SEQ ID NO: 189776 - protein, 20 aa, Artificial Sequence
  Description of Artificial Sequence: Synthetic peptide
  Seed: GNEKKAKLANVVRKMMTNSQ
GNELKASLPNVVRKMMTNSQ

SEQ ID NO: 189777 - protein, 20 aa, Artificial Sequence
  Description of Artificial Sequence: Synthetic peptide
  Seed: GNEKKAKLANVVRKMMTNSQ
GNELKASLSNVARKMMTNSQ

SEQ ID NO: 189778 - protein, 20 aa, Artificial Sequence
  Description of Artificial Sequence: Synthetic peptide
  Seed: GNEKKAKLANVVRKMMTNSQ
GNELKASLSNVIRKMMTNSQ

SEQ ID NO: 189779 - protein, 20 aa, Artificial Sequence
  Description of Artificial Sequence: Synthetic peptide
  Seed: GNEKKAKLANVVRKMMTNSQ
GNELKASLSNVLRKMMTNSQ

SEQ ID NO: 189780 - protein, 20 aa, Artificial Sequence
  Description of Artificial Sequence: Synthetic peptide
  Seed: GNEKKAKLANVVRKMMTNSQ
GNELKASLSNVVRKMMTNSQ

SEQ ID NO: 189781 - protein, 20 aa, Artificial Sequence
  Description of Artificial Sequence: Synthetic peptide
  Seed: GNEKKAKLANVVRKMMTNSQ
GNELKASLWNVFRKMMTNSQ

SEQ ID NO: 189782 - protein, 20 aa, Artificial Sequence
  Description of Artificial Sequence: Synthetic peptide
  Seed: GNEKKAKLANVVRKMMTNSQ
GNELKASLWNVIRKMMTNSQ

SEQ ID NO: 189783 - protein, 20 aa, Artificial Sequence
  Description of Artificial Sequence: Synthetic peptide
  Seed: GNEKKAKLANVVRKMMTNSQ
GNELKASLWNVLRKMMTNSQ

SEQ ID NO: 189784 - protein, 20 aa, Artificial Sequence
  Description of Artificial Sequence: Synthetic peptide
  Seed: GNEKKAKLANVVRKMMTNSQ
GNELKASLWNVVRKMMTNSQ

SEQ ID NO: 189785 - protein, 20 aa, Artificial Sequence
  Description of Artificial Sequence: Synthetic peptide
  Seed: GNEKKAKLANVVRKMMTNSQ
GNELKASLYNVFRKMMTNSQ

SEQ ID NO: 189786 - protein, 20 aa, Artificial Sequence
  Description of Artificial Sequence: Synthetic peptide
  Seed: GNEKKAKLANVVRKMMTNSQ
GNELKASLYNVIRKMMTNSQ

SEQ ID NO: 189787 - protein, 20 aa, Artificial Sequence
  Description of Artificial Sequence: Synthetic peptide
  Seed: GNEKKAKLANVVRKMMTNSQ
GNELKASLYNVLRKMMTNSQ

SEQ ID NO: 189788 - protein, 20 aa, Artificial Sequence
  Description of Artificial Sequence: Synthetic peptide
  Seed: GNEKKAKLANVVRKMMTNSQ
GNELKASLYNVMRKMMTNSQ

SEQ ID NO: 189789 - protein, 20 aa, Artificial Sequence
  Description of Artificial Sequence: Synthetic peptide
  Seed: GNEKKAKLANVVRKMMTNSQ
GNELKASLYNVTRKMMTNSQ

SEQ ID NO: 189790 - protein, 20 aa, Artificial Sequence
  Description of Artificial Sequence: Synthetic peptide
  Seed: GNEKKAKLANVVRKMMTNSQ
GNELKASLYNVVRKMMTNSQ

SEQ ID NO: 189791 - protein, 20 aa, Artificial Sequence
  Description of Artificial Sequence: Synthetic peptide
  Seed: GNEKKAKLANVVRKMMTNSQ
GNELKATLANVARKMMTNSQ

SEQ ID NO: 189792 - protein, 20 aa, Artificial Sequence
  Description of Artificial Sequence: Synthetic peptide
  Seed: GNEKKAKLANVVRKMMTNSQ
GNELKATLANVIRKMMTNSQ

SEQ ID NO: 189793 - protein, 20 aa, Artificial Sequence
  Description of Artificial Sequence: Synthetic peptide
  Seed: GNEKKAKLANVVRKMMTNSQ
GNELKATLANVLRKMMTNSQ

SEQ ID NO: 189794 - protein, 20 aa, Artificial Sequence
  Description of Artificial Sequence: Synthetic peptide
  Seed: GNEKKAKLANVVRKMMTNSQ
GNELKATLANVVRKMMTNSQ

SEQ ID NO: 189795 - protein, 20 aa, Artificial Sequence
  Description of Artificial Sequence: Synthetic peptide
  Seed: GNEKKAKLANVVRKMMTNSQ
GNELKATLFNVARKMMTNSQ

SEQ ID NO: 189796 - protein, 20 aa, Artificial Sequence
  Description of Artificial Sequence: Synthetic peptide
  Seed: GNEKKAKLANVVRKMMTNSQ
GNELKATLFNVDRKMMTNSQ

SEQ ID NO: 189797 - protein, 20 aa, Artificial Sequence
  Description of Artificial Sequence: Synthetic peptide
  Seed: GNEKKAKLANVVRKMMTNSQ
GNELKATLFNVERKMMTNSQ

SEQ ID NO: 189798 - protein, 20 aa, Artificial Sequence
  Description of Artificial Sequence: Synthetic peptide
  Seed: GNEKKAKLANVVRKMMTNSQ
GNELKATLFNVFRKMMTNSQ

SEQ ID NO: 189799 - protein, 20 aa, Artificial Sequence
  Description of Artificial Sequence: Synthetic peptide
  Seed: GNEKKAKLANVVRKMMTNSQ
GNELKATLFNVHRKMMTNSQ

SEQ ID NO: 189800 - protein, 20 aa, Artificial Sequence
  Description of Artificial Sequence: Synthetic peptide
  Seed: GNEKKAKLANVVRKMMTNSQ
GNELKATLFNVIRKMMTNSQ

SEQ ID NO: 189801 - protein, 20 aa, Artificial Sequence
  Description of Artificial Sequence: Synthetic peptide
  Seed: GNEKKAKLANVVRKMMTNSQ
GNELKATLFNVLRKMMTNSQ

SEQ ID NO: 189802 - protein, 20 aa, Artificial Sequence
  Description of Artificial Sequence: Synthetic peptide
  Seed: GNEKKAKLANVVRKMMTNSQ
GNELKATLFNVMRKMMTNSQ

SEQ ID NO: 189803 - protein, 20 aa, Artificial Sequence
  Description of Artificial Sequence: Synthetic peptide
  Seed: GNEKKAKLANVVRKMMTNSQ
GNELKATLFNVNRKMMTNSQ

SEQ ID NO: 189804 - protein, 20 aa, Artificial Sequence
  Description of Artificial Sequence: Synthetic peptide
  Seed: GNEKKAKLANVVRKMMTNSQ
GNELKATLFNVPRKMMTNSQ

SEQ ID NO: 189805 - protein, 20 aa, Artificial Sequence
  Description of Artificial Sequence: Synthetic peptide
  Seed: GNEKKAKLANVVRKMMTNSQ
GNELKATLFNVQRKMMTNSQ

SEQ ID NO: 189806 - protein, 20 aa, Artificial Sequence
  Description of Artificial Sequence: Synthetic peptide
  Seed: GNEKKAKLANVVRKMMTNSQ
GNELKATLFNVSRKMMTNSQ

SEQ ID NO: 189807 - protein, 20 aa, Artificial Sequence
  Description of Artificial Sequence: Synthetic peptide
  Seed: GNEKKAKLANVVRKMMTNSQ
GNELKATLFNVTRKMMTNSQ

SEQ ID NO: 189808 - protein, 20 aa, Artificial Sequence
  Description of Artificial Sequence: Synthetic peptide
  Seed: GNEKKAKLANVVRKMMTNSQ
GNELKATLFNVVRKMMTNSQ

SEQ ID NO: 189809 - protein, 20 aa, Artificial Sequence
  Description of Artificial Sequence: Synthetic peptide
  Seed: GNEKKAKLANVVRKMMTNSQ
GNELKATLFNVYRKMMTNSQ

SEQ ID NO: 189810 - protein, 20 aa, Artificial Sequence
  Description of Artificial Sequence: Synthetic peptide
  Seed: GNEKKAKLANVVRKMMTNSQ
GNELKATLGNVVRKMMTNSQ

SEQ ID NO: 189811 - protein, 20 aa, Artificial Sequence
  Description of Artificial Sequence: Synthetic peptide
  Seed: GNEKKAKLANVVRKMMTNSQ
GNELKATLINVIRKMMTNSQ

SEQ ID NO: 189812 - protein, 20 aa, Artificial Sequence
  Description of Artificial Sequence: Synthetic peptide
  Seed: GNEKKAKLANVVRKMMTNSQ
GNELKATLINVLRKMMTNSQ

SEQ ID NO: 189813 - protein, 20 aa, Artificial Sequence
  Description of Artificial Sequence: Synthetic peptide
  Seed: GNEKKAKLANVVRKMMTNSQ
GNELKATLINVVRKMMTNSQ

SEQ ID NO: 189814 - protein, 20 aa, Artificial Sequence
  Description of Artificial Sequence: Synthetic peptide
  Seed: GNEKKAKLANVVRKMMTNSQ
GNELKATLLNVFRKMMTNSQ

SEQ ID NO: 189815 - protein, 20 aa, Artificial Sequence
  Description of Artificial Sequence: Synthetic peptide
  Seed: GNEKKAKLANVVRKMMTNSQ
GNELKATLLNVIRKMMTNSQ

SEQ ID NO: 189816 - protein, 20 aa, Artificial Sequence
  Description of Artificial Sequence: Synthetic peptide
  Seed: GNEKKAKLANVVRKMMTNSQ
GNELKATLLNVLRKMMTNSQ

SEQ ID NO: 189817 - protein, 20 aa, Artificial Sequence
  Description of Artificial Sequence: Synthetic peptide
  Seed: GNEKKAKLANVVRKMMTNSQ
GNELKATLLNVVRKMMTNSQ

SEQ ID NO: 189818 - protein, 20 aa, Artificial Sequence
  Description of Artificial Sequence: Synthetic peptide
  Seed: GNEKKAKLANVVRKMMTNSQ
GNELKATLMNVIRKMMTNSQ

SEQ ID NO: 189819 - protein, 20 aa, Artificial Sequence
  Description of Artificial Sequence: Synthetic peptide
  Seed: GNEKKAKLANVVRKMMTNSQ
GNELKATLMNVLRKMMTNSQ

SEQ ID NO: 189820 - protein, 20 aa, Artificial Sequence
  Description of Artificial Sequence: Synthetic peptide
  Seed: GNEKKAKLANVVRKMMTNSQ
GNELKATLMNVVRKMMTNSQ

SEQ ID NO: 189821 - protein, 20 aa, Artificial Sequence
  Description of Artificial Sequence: Synthetic peptide
  Seed: GNEKKAKLANVVRKMMTNSQ
GNELKATLWNVFRKMMTNSQ

SEQ ID NO: 189822 - protein, 20 aa, Artificial Sequence
  Description of Artificial Sequence: Synthetic peptide
  Seed: GNEKKAKLANVVRKMMTNSQ
GNELKATLWNVIRKMMTNSQ

SEQ ID NO: 189823 - protein, 20 aa, Artificial Sequence
  Description of Artificial Sequence: Synthetic peptide
  Seed: GNEKKAKLANVVRKMMTNSQ
GNELKATLWNVLRKMMTNSQ

SEQ ID NO: 189824 - protein, 20 aa, Artificial Sequence
  Description of Artificial Sequence: Synthetic peptide
  Seed: GNEKKAKLANVVRKMMTNSQ
GNELKATLWNVMRKMMTNSQ

SEQ ID NO: 189825 - protein, 20 aa, Artificial Sequence
  Description of Artificial Sequence: Synthetic peptide
  Seed: GNEKKAKLANVVRKMMTNSQ
GNELKATLWNVVRKMMTNSQ

SEQ ID NO: 189826 - protein, 20 aa, Artificial Sequence
  Description of Artificial Sequence: Synthetic peptide
  Seed: GNEKKAKLANVVRKMMTNSQ
GNELKATLYNVARKMMTNSQ

SEQ ID NO: 189827 - protein, 20 aa, Artificial Sequence
  Description of Artificial Sequence: Synthetic peptide
  Seed: GNEKKAKLANVVRKMMTNSQ
GNELKATLYNVFRKMMTNSQ

SEQ ID NO: 189828 - protein, 20 aa, Artificial Sequence
  Description of Artificial Sequence: Synthetic peptide
  Seed: GNEKKAKLANVVRKMMTNSQ
GNELKATLYNVIRKMMTNSQ

SEQ ID NO: 189829 - protein, 20 aa, Artificial Sequence
  Description of Artificial Sequence: Synthetic peptide
  Seed: GNEKKAKLANVVRKMMTNSQ
GNELKATLYNVLRKMMTNSQ

SEQ ID NO: 189830 - protein, 20 aa, Artificial Sequence
  Description of Artificial Sequence: Synthetic peptide
  Seed: GNEKKAKLANVVRKMMTNSQ
GNELKATLYNVMRKMMTNSQ

SEQ ID NO: 189831 - protein, 20 aa, Artificial Sequence
  Description of Artificial Sequence: Synthetic peptide
  Seed: GNEKKAKLANVVRKMMTNSQ
GNELKATLYNVTRKMMTNSQ

SEQ ID NO: 189832 - protein, 20 aa, Artificial Sequence
  Description of Artificial Sequence: Synthetic peptide
  Seed: GNEKKAKLANVVRKMMTNSQ
GNELKATLYNVVRKMMTNSQ

SEQ ID NO: 189833 - protein, 20 aa, Artificial Sequence
  Description of Artificial Sequence: Synthetic peptide
  Seed: GNEKKAKLANVVRKMMTNSQ
GNELKATLYNVYRKMMTNSQ

SEQ ID NO: 189834 - protein, 20 aa, Artificial Sequence
  Description of Artificial Sequence: Synthetic peptide
  Seed: GNEKKAKLANVVRKMMTNSQ
GNELKAVLANVARKMMTNSQ

SEQ ID NO: 189835 - protein, 20 aa, Artificial Sequence
  Description of Artificial Sequence: Synthetic peptide
  Seed: GNEKKAKLANVVRKMMTNSQ
GNELKAVLANVIRKMMTNSQ

SEQ ID NO: 189836 - protein, 20 aa, Artificial Sequence
  Description of Artificial Sequence: Synthetic peptide
  Seed: GNEKKAKLANVVRKMMTNSQ
GNELKAVLANVLRKMMTNSQ

SEQ ID NO: 189837 - protein, 20 aa, Artificial Sequence
  Description of Artificial Sequence: Synthetic peptide
  Seed: GNEKKAKLANVVRKMMTNSQ
GNELKAVLANVNRKMMTNSQ

SEQ ID NO: 189838 - protein, 20 aa, Artificial Sequence
  Description of Artificial Sequence: Synthetic peptide
  Seed: GNEKKAKLANVVRKMMTNSQ
GNELKAVLANVSRKMMTNSQ

SEQ ID NO: 189839 - protein, 20 aa, Artificial Sequence
  Description of Artificial Sequence: Synthetic peptide
  Seed: GNEKKAKLANVVRKMMTNSQ
GNELKAVLANVTRKMMTNSQ

SEQ ID NO: 189840 - protein, 20 aa, Artificial Sequence
  Description of Artificial Sequence: Synthetic peptide
  Seed: GNEKKAKLANVVRKMMTNSQ
GNELKAVLANVVRKMMTNSQ

SEQ ID NO: 189841 - protein, 20 aa, Artificial Sequence
  Description of Artificial Sequence: Synthetic peptide
  Seed: GNEKKAKLANVVRKMMTNSQ
GNELKAVLFNVARKMMTNSQ

SEQ ID NO: 189842 - protein, 20 aa, Artificial Sequence
  Description of Artificial Sequence: Synthetic peptide
  Seed: GNEKKAKLANVVRKMMTNSQ
GNELKAVLFNVDRKMMTNSQ

SEQ ID NO: 189843 - protein, 20 aa, Artificial Sequence
  Description of Artificial Sequence: Synthetic peptide
  Seed: GNEKKAKLANVVRKMMTNSQ
GNELKAVLFNVERKMMTNSQ

SEQ ID NO: 189844 - protein, 20 aa, Artificial Sequence
  Description of Artificial Sequence: Synthetic peptide
  Seed: GNEKKAKLANVVRKMMTNSQ
GNELKAVLFNVFRKMMTNSQ

SEQ ID NO: 189845 - protein, 20 aa, Artificial Sequence
  Description of Artificial Sequence: Synthetic peptide
  Seed: GNEKKAKLANVVRKMMTNSQ
GNELKAVLFNVHRKMMTNSQ

SEQ ID NO: 189846 - protein, 20 aa, Artificial Sequence
  Description of Artificial Sequence: Synthetic peptide
  Seed: GNEKKAKLANVVRKMMTNSQ
GNELKAVLFNVIRKMMTNSQ

SEQ ID NO: 189847 - protein, 20 aa, Artificial Sequence
  Description of Artificial Sequence: Synthetic peptide
  Seed: GNEKKAKLANVVRKMMTNSQ
GNELKAVLFNVLRKMMTNSQ

SEQ ID NO: 189848 - protein, 20 aa, Artificial Sequence
  Description of Artificial Sequence: Synthetic peptide
  Seed: GNEKKAKLANVVRKMMTNSQ
GNELKAVLFNVMRKMMTNSQ

SEQ ID NO: 189849 - protein, 20 aa, Artificial Sequence
  Description of Artificial Sequence: Synthetic peptide
  Seed: GNEKKAKLANVVRKMMTNSQ
GNELKAVLFNVNRKMMTNSQ

SEQ ID NO: 189850 - protein, 20 aa, Artificial Sequence
  Description of Artificial Sequence: Synthetic peptide
  Seed: GNEKKAKLANVVRKMMTNSQ
GNELKAVLFNVPRKMMTNSQ

SEQ ID NO: 189851 - protein, 20 aa, Artificial Sequence
  Description of Artificial Sequence: Synthetic peptide
  Seed: GNEKKAKLANVVRKMMTNSQ
GNELKAVLFNVSRKMMTNSQ

SEQ ID NO: 189852 - protein, 20 aa, Artificial Sequence
  Description of Artificial Sequence: Synthetic peptide
  Seed: GNEKKAKLANVVRKMMTNSQ
GNELKAVLFNVTRKMMTNSQ

SEQ ID NO: 189853 - protein, 20 aa, Artificial Sequence
  Description of Artificial Sequence: Synthetic peptide
  Seed: GNEKKAKLANVVRKMMTNSQ
GNELKAVLFNVVRKMMTNSQ

SEQ ID NO: 189854 - protein, 20 aa, Artificial Sequence
  Description of Artificial Sequence: Synthetic peptide
  Seed: GNEKKAKLANVVRKMMTNSQ
GNELKAVLFNVYRKMMTNSQ

SEQ ID NO: 189855 - protein, 20 aa, Artificial Sequence
  Description of Artificial Sequence: Synthetic peptide
  Seed: GNEKKAKLANVVRKMMTNSQ
GNELKAVLGNVARKMMTNSQ

SEQ ID NO: 189856 - protein, 20 aa, Artificial Sequence
  Description of Artificial Sequence: Synthetic peptide
  Seed: GNEKKAKLANVVRKMMTNSQ
GNELKAVLGNVIRKMMTNSQ

SEQ ID NO: 189857 - protein, 20 aa, Artificial Sequence
  Description of Artificial Sequence: Synthetic peptide
  Seed: GNEKKAKLANVVRKMMTNSQ
GNELKAVLGNVLRKMMTNSQ

SEQ ID NO: 189858 - protein, 20 aa, Artificial Sequence
  Description of Artificial Sequence: Synthetic peptide
  Seed: GNEKKAKLANVVRKMMTNSQ
GNELKAVLGNVVRKMMTNSQ

SEQ ID NO: 189859 - protein, 20 aa, Artificial Sequence
  Description of Artificial Sequence: Synthetic peptide
  Seed: GNEKKAKLANVVRKMMTNSQ
GNELKAVLPNVARKMMTNSQ

SEQ ID NO: 189860 - protein, 20 aa, Artificial Sequence
  Description of Artificial Sequence: Synthetic peptide
  Seed: GNEKKAKLANVVRKMMTNSQ
GNELKAVLPNVIRKMMTNSQ

SEQ ID NO: 189861 - protein, 20 aa, Artificial Sequence
  Description of Artificial Sequence: Synthetic peptide
  Seed: GNEKKAKLANVVRKMMTNSQ
GNELKAVLPNVNRKMMTNSQ

SEQ ID NO: 189862 - protein, 20 aa, Artificial Sequence
  Description of Artificial Sequence: Synthetic peptide
  Seed: GNEKKAKLANVVRKMMTNSQ
GNELKAVLPNVSRKMMTNSQ

SEQ ID NO: 189863 - protein, 20 aa, Artificial Sequence
  Description of Artificial Sequence: Synthetic peptide
  Seed: GNEKKAKLANVVRKMMTNSQ
GNELKAVLPNVVRKMMTNSQ

SEQ ID NO: 189864 - protein, 20 aa, Artificial Sequence
  Description of Artificial Sequence: Synthetic peptide
  Seed: GNEKKAKLANVVRKMMTNSQ
GNELKAVLSNVARKMMTNSQ

SEQ ID NO: 189865 - protein, 20 aa, Artificial Sequence
  Description of Artificial Sequence: Synthetic peptide
  Seed: GNEKKAKLANVVRKMMTNSQ
GNELKAVLSNVIRKMMTNSQ

SEQ ID NO: 189866 - protein, 20 aa, Artificial Sequence
  Description of Artificial Sequence: Synthetic peptide
  Seed: GNEKKAKLANVVRKMMTNSQ
GNELKAVLSNVLRKMMTNSQ

SEQ ID NO: 189867 - protein, 20 aa, Artificial Sequence
  Description of Artificial Sequence: Synthetic peptide
  Seed: GNEKKAKLANVVRKMMTNSQ
GNELKAVLSNVNRKMMTNSQ

SEQ ID NO: 189868 - protein, 20 aa, Artificial Sequence
  Description of Artificial Sequence: Synthetic peptide
  Seed: GNEKKAKLANVVRKMMTNSQ
GNELKAVLSNVSRKMMTNSQ

SEQ ID NO: 189869 - protein, 20 aa, Artificial Sequence
  Description of Artificial Sequence: Synthetic peptide
  Seed: GNEKKAKLANVVRKMMTNSQ
GNELKAVLSNVVRKMMTNSQ

SEQ ID NO: 189870 - protein, 20 aa, Artificial Sequence
  Description of Artificial Sequence: Synthetic peptide
  Seed: GNEKKAKLANVVRKMMTNSQ
GNELKAVLTNVARKMMTNSQ

SEQ ID NO: 189871 - protein, 20 aa, Artificial Sequence
  Description of Artificial Sequence: Synthetic peptide
  Seed: GNEKKAKLANVVRKMMTNSQ
GNELKAVLTNVNRKMMTNSQ

SEQ ID NO: 189872 - protein, 20 aa, Artificial Sequence
  Description of Artificial Sequence: Synthetic peptide
  Seed: GNEKKAKLANVVRKMMTNSQ
GNELKAVLTNVSRKMMTNSQ

SEQ ID NO: 189873 - protein, 20 aa, Artificial Sequence
  Description of Artificial Sequence: Synthetic peptide
  Seed: GNEKKAKLANVVRKMMTNSQ
GNELKAVLVNVNRKMMTNSQ

SEQ ID NO: 189874 - protein, 20 aa, Artificial Sequence
  Description of Artificial Sequence: Synthetic peptide
  Seed: GNEKKAKLANVVRKMMTNSQ
GNELKAVLWNVIRKMMTNSQ

SEQ ID NO: 189875 - protein, 20 aa, Artificial Sequence
  Description of Artificial Sequence: Synthetic peptide
  Seed: GNEKKAKLANVVRKMMTNSQ
GNELKAVLWNVLRKMMTNSQ

SEQ ID NO: 189876 - protein, 20 aa, Artificial Sequence
  Description of Artificial Sequence: Synthetic peptide
  Seed: GNEKKAKLANVVRKMMTNSQ
GNELKAVLWNVMRKMMTNSQ

SEQ ID NO: 189877 - protein, 20 aa, Artificial Sequence
  Description of Artificial Sequence: Synthetic peptide
  Seed: GNEKKAKLANVVRKMMTNSQ
GNELKAVLWNVVRKMMTNSQ

SEQ ID NO: 189878 - protein, 20 aa, Artificial Sequence
  Description of Artificial Sequence: Synthetic peptide
  Seed: GNEKKAKLANVVRKMMTNSQ
GNELKAVLYNVIRKMMTNSQ

SEQ ID NO: 189879 - protein, 20 aa, Artificial Sequence
  Description of Artificial Sequence: Synthetic peptide
  Seed: GNEKKAKLANVVRKMMTNSQ
GNELKAVLYNVLRKMMTNSQ

SEQ ID NO: 189880 - protein, 20 aa, Artificial Sequence
  Description of Artificial Sequence: Synthetic peptide
  Seed: GNEKKAKLANVVRKMMTNSQ
GNELKAVLYNVMRKMMTNSQ

SEQ ID NO: 189881 - protein, 20 aa, Artificial Sequence
  Description of Artificial Sequence: Synthetic peptide
  Seed: GNEKKAKLANVVRKMMTNSQ
GNELKAVLYNVTRKMMTNSQ

SEQ ID NO: 189882 - protein, 20 aa, Artificial Sequence
  Description of Artificial Sequence: Synthetic peptide
  Seed: GNEKKAKLANVVRKMMTNSQ
GNELKAVLYNVVRKMMTNSQ

SEQ ID NO: 189883 - protein, 20 aa, Artificial Sequence
  Description of Artificial Sequence: Synthetic peptide
  Seed: GNEKKAKLANVVRKMMTNSQ
GNELKAWLANVIRKMMTNSQ

SEQ ID NO: 189884 - protein, 20 aa, Artificial Sequence
  Description of Artificial Sequence: Synthetic peptide
  Seed: GNEKKAKLANVVRKMMTNSQ
GNELKAWLANVVRKMMTNSQ

SEQ ID NO: 189885 - protein, 20 aa, Artificial Sequence
  Description of Artificial Sequence: Synthetic peptide
  Seed: GNEKKAKLANVVRKMMTNSQ
GNELKAWLDNVIRKMMTNSQ

SEQ ID NO: 189886 - protein, 20 aa, Artificial Sequence
  Description of Artificial Sequence: Synthetic peptide
  Seed: GNEKKAKLANVVRKMMTNSQ
GNELKAWLFNVARKMMTNSQ

SEQ ID NO: 189887 - protein, 20 aa, Artificial Sequence
  Description of Artificial Sequence: Synthetic peptide
  Seed: GNEKKAKLANVVRKMMTNSQ
GNELKAWLFNVIRKMMTNSQ

SEQ ID NO: 189888 - protein, 20 aa, Artificial Sequence
  Description of Artificial Sequence: Synthetic peptide
  Seed: GNEKKAKLANVVRKMMTNSQ
GNELKAWLFNVLRKMMTNSQ

SEQ ID NO: 189889 - protein, 20 aa, Artificial Sequence
  Description of Artificial Sequence: Synthetic peptide
  Seed: GNEKKAKLANVVRKMMTNSQ
GNELKAWLFNVMRKMMTNSQ

SEQ ID NO: 189890 - protein, 20 aa, Artificial Sequence
  Description of Artificial Sequence: Synthetic peptide
  Seed: GNEKKAKLANVVRKMMTNSQ
GNELKAWLFNVVRKMMTNSQ

SEQ ID NO: 189891 - protein, 20 aa, Artificial Sequence
  Description of Artificial Sequence: Synthetic peptide
  Seed: GNEKKAKLANVVRKMMTNSQ
GNELKAWLLNVIRKMMTNSQ

SEQ ID NO: 189892 - protein, 20 aa, Artificial Sequence
  Description of Artificial Sequence: Synthetic peptide
  Seed: GNEKKAKLANVVRKMMTNSQ
GNELKAWLLNVLRKMMTNSQ

SEQ ID NO: 189893 - protein, 20 aa, Artificial Sequence
  Description of Artificial Sequence: Synthetic peptide
  Seed: GNEKKAKLANVVRKMMTNSQ
GNELKAWLLNVVRKMMTNSQ

SEQ ID NO: 189894 - protein, 20 aa, Artificial Sequence
  Description of Artificial Sequence: Synthetic peptide
  Seed: GNEKKAKLANVVRKMMTNSQ
GNELKAWLMNVIRKMMTNSQ

SEQ ID NO: 189895 - protein, 20 aa, Artificial Sequence
  Description of Artificial Sequence: Synthetic peptide
  Seed: GNEKKAKLANVVRKMMTNSQ
GNELKAWLMNVLRKMMTNSQ

SEQ ID NO: 189896 - protein, 20 aa, Artificial Sequence
  Description of Artificial Sequence: Synthetic peptide
  Seed: GNEKKAKLANVVRKMMTNSQ
GNELKAWLWNVIRKMMTNSQ

SEQ ID NO: 189897 - protein, 20 aa, Artificial Sequence
  Description of Artificial Sequence: Synthetic peptide
  Seed: GNEKKAKLANVVRKMMTNSQ
GNELKAWLYNVIRKMMTNSQ

SEQ ID NO: 189898 - protein, 20 aa, Artificial Sequence
  Description of Artificial Sequence: Synthetic peptide
  Seed: GNEKKAKLANVVRKMMTNSQ
GNELKAWLYNVLRKMMTNSQ

SEQ ID NO: 189899 - protein, 20 aa, Artificial Sequence
  Description of Artificial Sequence: Synthetic peptide
  Seed: GNEKKAKLANVVRKMMTNSQ
GNELKAWLYNVMRKMMTNSQ

SEQ ID NO: 189900 - protein, 20 aa, Artificial Sequence
  Description of Artificial Sequence: Synthetic peptide
  Seed: GNEKKAKLANVVRKMMTNSQ
GNELKAWLYNVVRKMMTNSQ

SEQ ID NO: 189901 - protein, 20 aa, Artificial Sequence
  Description of Artificial Sequence: Synthetic peptide
  Seed: GNEKKAKLANVVRKMMTNSQ
GNELKAYLANVARKMMTNSQ

SEQ ID NO: 189902 - protein, 20 aa, Artificial Sequence
  Description of Artificial Sequence: Synthetic peptide
  Seed: GNEKKAKLANVVRKMMTNSQ
GNELKAYLANVIRKMMTNSQ

SEQ ID NO: 189903 - protein, 20 aa, Artificial Sequence
  Description of Artificial Sequence: Synthetic peptide
  Seed: GNEKKAKLANVVRKMMTNSQ
GNELKAYLANVVRKMMTNSQ

SEQ ID NO: 189904 - protein, 20 aa, Artificial Sequence
  Description of Artificial Sequence: Synthetic peptide
  Seed: GNEKKAKLANVVRKMMTNSQ
GNELKAYLDNVIRKMMTNSQ

SEQ ID NO: 189905 - protein, 20 aa, Artificial Sequence
  Description of Artificial Sequence: Synthetic peptide
  Seed: GNEKKAKLANVVRKMMTNSQ
GNELKAYLDNVVRKMMTNSQ

SEQ ID NO: 189906 - protein, 20 aa, Artificial Sequence
  Description of Artificial Sequence: Synthetic peptide
  Seed: GNEKKAKLANVVRKMMTNSQ
GNELKAYLFNVARKMMTNSQ

SEQ ID NO: 189907 - protein, 20 aa, Artificial Sequence
  Description of Artificial Sequence: Synthetic peptide
  Seed: GNEKKAKLANVVRKMMTNSQ
GNELKAYLFNVIRKMMTNSQ

SEQ ID NO: 189908 - protein, 20 aa, Artificial Sequence
  Description of Artificial Sequence: Synthetic peptide
  Seed: GNEKKAKLANVVRKMMTNSQ
GNELKAYLFNVLRKMMTNSQ

SEQ ID NO: 189909 - protein, 20 aa, Artificial Sequence
  Description of Artificial Sequence: Synthetic peptide
  Seed: GNEKKAKLANVVRKMMTNSQ
GNELKAYLFNVMRKMMTNSQ

SEQ ID NO: 189910 - protein, 20 aa, Artificial Sequence
  Description of Artificial Sequence: Synthetic peptide
  Seed: GNEKKAKLANVVRKMMTNSQ
GNELKAYLFNVTRKMMTNSQ

SEQ ID NO: 189911 - protein, 20 aa, Artificial Sequence
  Description of Artificial Sequence: Synthetic peptide
  Seed: GNEKKAKLANVVRKMMTNSQ
GNELKAYLFNVVRKMMTNSQ

SEQ ID NO: 189912 - protein, 20 aa, Artificial Sequence
  Description of Artificial Sequence: Synthetic peptide
  Seed: GNEKKAKLANVVRKMMTNSQ
GNELKAYLINVARKMMTNSQ

SEQ ID NO: 189913 - protein, 20 aa, Artificial Sequence
  Description of Artificial Sequence: Synthetic peptide
  Seed: GNEKKAKLANVVRKMMTNSQ
GNELKAYLLNVIRKMMTNSQ

SEQ ID NO: 189914 - protein, 20 aa, Artificial Sequence
  Description of Artificial Sequence: Synthetic peptide
  Seed: GNEKKAKLANVVRKMMTNSQ
GNELKAYLLNVLRKMMTNSQ

SEQ ID NO: 189915 - protein, 20 aa, Artificial Sequence
  Description of Artificial Sequence: Synthetic peptide
  Seed: GNEKKAKLANVVRKMMTNSQ
GNELKAYLLNVMRKMMTNSQ

SEQ ID NO: 189916 - protein, 20 aa, Artificial Sequence
  Description of Artificial Sequence: Synthetic peptide
  Seed: GNEKKAKLANVVRKMMTNSQ
GNELKAYLLNVVRKMMTNSQ

SEQ ID NO: 189917 - protein, 20 aa, Artificial Sequence
  Description of Artificial Sequence: Synthetic peptide
  Seed: GNEKKAKLANVVRKMMTNSQ
GNELKAYLWNVVRKMMTNSQ

SEQ ID NO: 189918 - protein, 20 aa, Artificial Sequence
  Description of Artificial Sequence: Synthetic peptide
  Seed: GNEKKAKLANVVRKMMTNSQ
GNELKAYLYNVVRKMMTNSQ

SEQ ID NO: 189919 - protein, 20 aa, Artificial Sequence
  Description of Artificial Sequence: Synthetic peptide
  Seed: GNEKKAKLANVVRKMMTNSQ
GNEMKAALANVARKMMTNSQ

SEQ ID NO: 189920 - protein, 20 aa, Artificial Sequence
  Description of Artificial Sequence: Synthetic peptide
  Seed: GNEKKAKLANVVRKMMTNSQ
GNEMKAALANVIRKMMTNSQ

SEQ ID NO: 189921 - protein, 20 aa, Artificial Sequence
  Description of Artificial Sequence: Synthetic peptide
  Seed: GNEKKAKLANVVRKMMTNSQ
GNEMKAALANVLRKMMTNSQ

SEQ ID NO: 189922 - protein, 20 aa, Artificial Sequence
  Description of Artificial Sequence: Synthetic peptide
  Seed: GNEKKAKLANVVRKMMTNSQ
GNEMKAALANVMRKMMTNSQ

SEQ ID NO: 189923 - protein, 20 aa, Artificial Sequence
  Description of Artificial Sequence: Synthetic peptide
  Seed: GNEKKAKLANVVRKMMTNSQ
GNEMKAALANVNRKMMTNSQ

SEQ ID NO: 189924 - protein, 20 aa, Artificial Sequence
  Description of Artificial Sequence: Synthetic peptide
  Seed: GNEKKAKLANVVRKMMTNSQ
GNEMKAALANVSRKMMTNSQ

SEQ ID NO: 189925 - protein, 20 aa, Artificial Sequence
  Description of Artificial Sequence: Synthetic peptide
  Seed: GNEKKAKLANVVRKMMTNSQ
GNEMKAALANVTRKMMTNSQ

SEQ ID NO: 189926 - protein, 20 aa, Artificial Sequence
  Description of Artificial Sequence: Synthetic peptide
  Seed: GNEKKAKLANVVRKMMTNSQ
GNEMKAALANVVRKMMTNSQ

SEQ ID NO: 189927 - protein, 20 aa, Artificial Sequence
  Description of Artificial Sequence: Synthetic peptide
  Seed: GNEKKAKLANVVRKMMTNSQ
GNEMKAALFNVARKMMTNSQ

SEQ ID NO: 189928 - protein, 20 aa, Artificial Sequence
  Description of Artificial Sequence: Synthetic peptide
  Seed: GNEKKAKLANVVRKMMTNSQ
GNEMKAALFNVFRKMMTNSQ

SEQ ID NO: 189929 - protein, 20 aa, Artificial Sequence
  Description of Artificial Sequence: Synthetic peptide
  Seed: GNEKKAKLANVVRKMMTNSQ
GNEMKAALFNVIRKMMTNSQ

SEQ ID NO: 189930 - protein, 20 aa, Artificial Sequence
  Description of Artificial Sequence: Synthetic peptide
  Seed: GNEKKAKLANVVRKMMTNSQ
GNEMKAALFNVLRKMMTNSQ

SEQ ID NO: 189931 - protein, 20 aa, Artificial Sequence
  Description of Artificial Sequence: Synthetic peptide
  Seed: GNEKKAKLANVVRKMMTNSQ
GNEMKAALFNVMRKMMTNSQ

SEQ ID NO: 189932 - protein, 20 aa, Artificial Sequence
  Description of Artificial Sequence: Synthetic peptide
  Seed: GNEKKAKLANVVRKMMTNSQ
GNEMKAALFNVTRKMMTNSQ

SEQ ID NO: 189933 - protein, 20 aa, Artificial Sequence
  Description of Artificial Sequence: Synthetic peptide
  Seed: GNEKKAKLANVVRKMMTNSQ
GNEMKAALFNVVRKMMTNSQ

SEQ ID NO: 189934 - protein, 20 aa, Artificial Sequence
  Description of Artificial Sequence: Synthetic peptide
  Seed: GNEKKAKLANVVRKMMTNSQ
GNEMKAALFNVYRKMMTNSQ

SEQ ID NO: 189935 - protein, 20 aa, Artificial Sequence
  Description of Artificial Sequence: Synthetic peptide
  Seed: GNEKKAKLANVVRKMMTNSQ
GNEMKAALGNVARKMMTNSQ

SEQ ID NO: 189936 - protein, 20 aa, Artificial Sequence
  Description of Artificial Sequence: Synthetic peptide
  Seed: GNEKKAKLANVVRKMMTNSQ
GNEMKAALGNVIRKMMTNSQ

SEQ ID NO: 189937 - protein, 20 aa, Artificial Sequence
  Description of Artificial Sequence: Synthetic peptide
  Seed: GNEKKAKLANVVRKMMTNSQ
GNEMKAALGNVLRKMMTNSQ

SEQ ID NO: 189938 - protein, 20 aa, Artificial Sequence
  Description of Artificial Sequence: Synthetic peptide
  Seed: GNEKKAKLANVVRKMMTNSQ
GNEMKAALGNVVRKMMTNSQ

SEQ ID NO: 189939 - protein, 20 aa, Artificial Sequence
  Description of Artificial Sequence: Synthetic peptide
  Seed: GNEKKAKLANVVRKMMTNSQ
GNEMKAALINVARKMMTNSQ

SEQ ID NO: 189940 - protein, 20 aa, Artificial Sequence
  Description of Artificial Sequence: Synthetic peptide
  Seed: GNEKKAKLANVVRKMMTNSQ
GNEMKAALPNVARKMMTNSQ

SEQ ID NO: 189941 - protein, 20 aa, Artificial Sequence
  Description of Artificial Sequence: Synthetic peptide
  Seed: GNEKKAKLANVVRKMMTNSQ
GNEMKAALPNVIRKMMTNSQ

SEQ ID NO: 189942 - protein, 20 aa, Artificial Sequence
  Description of Artificial Sequence: Synthetic peptide
  Seed: GNEKKAKLANVVRKMMTNSQ
GNEMKAALPNVLRKMMTNSQ

SEQ ID NO: 189943 - protein, 20 aa, Artificial Sequence
  Description of Artificial Sequence: Synthetic peptide
  Seed: GNEKKAKLANVVRKMMTNSQ
GNEMKAALPNVSRKMMTNSQ

SEQ ID NO: 189944 - protein, 20 aa, Artificial Sequence
  Description of Artificial Sequence: Synthetic peptide
  Seed: GNEKKAKLANVVRKMMTNSQ
GNEMKAALPNVVRKMMTNSQ

SEQ ID NO: 189945 - protein, 20 aa, Artificial Sequence
  Description of Artificial Sequence: Synthetic peptide
  Seed: GNEKKAKLANVVRKMMTNSQ
GNEMKAALSNVARKMMTNSQ

SEQ ID NO: 189946 - protein, 20 aa, Artificial Sequence
  Description of Artificial Sequence: Synthetic peptide
  Seed: GNEKKAKLANVVRKMMTNSQ
GNEMKAALSNVIRKMMTNSQ

SEQ ID NO: 189947 - protein, 20 aa, Artificial Sequence
  Description of Artificial Sequence: Synthetic peptide
  Seed: GNEKKAKLANVVRKMMTNSQ
GNEMKAALSNVLRKMMTNSQ

SEQ ID NO: 189948 - protein, 20 aa, Artificial Sequence
  Description of Artificial Sequence: Synthetic peptide
  Seed: GNEKKAKLANVVRKMMTNSQ
GNEMKAALSNVNRKMMTNSQ

SEQ ID NO: 189949 - protein, 20 aa, Artificial Sequence
  Description of Artificial Sequence: Synthetic peptide
  Seed: GNEKKAKLANVVRKMMTNSQ
GNEMKAALSNVSRKMMTNSQ

SEQ ID NO: 189950 - protein, 20 aa, Artificial Sequence
  Description of Artificial Sequence: Synthetic peptide
  Seed: GNEKKAKLANVVRKMMTNSQ
GNEMKAALSNVVRKMMTNSQ

SEQ ID NO: 189951 - protein, 20 aa, Artificial Sequence
  Description of Artificial Sequence: Synthetic peptide
  Seed: GNEKKAKLANVVRKMMTNSQ
GNEMKAALTNVARKMMTNSQ

SEQ ID NO: 189952 - protein, 20 aa, Artificial Sequence
  Description of Artificial Sequence: Synthetic peptide
  Seed: GNEKKAKLANVVRKMMTNSQ
GNEMKAALTNVNRKMMTNSQ

SEQ ID NO: 189953 - protein, 20 aa, Artificial Sequence
  Description of Artificial Sequence: Synthetic peptide
  Seed: GNEKKAKLANVVRKMMTNSQ
GNEMKAALTNVSRKMMTNSQ

SEQ ID NO: 189954 - protein, 20 aa, Artificial Sequence
  Description of Artificial Sequence: Synthetic peptide
  Seed: GNEKKAKLANVVRKMMTNSQ
GNEMKAALVNVARKMMTNSQ

SEQ ID NO: 189955 - protein, 20 aa, Artificial Sequence
  Description of Artificial Sequence: Synthetic peptide
  Seed: GNEKKAKLANVVRKMMTNSQ
GNEMKAALVNVNRKMMTNSQ

SEQ ID NO: 189956 - protein, 20 aa, Artificial Sequence
  Description of Artificial Sequence: Synthetic peptide
  Seed: GNEKKAKLANVVRKMMTNSQ
GNEMKAALVNVSRKMMTNSQ

SEQ ID NO: 189957 - protein, 20 aa, Artificial Sequence
  Description of Artificial Sequence: Synthetic peptide
  Seed: GNEKKAKLANVVRKMMTNSQ
GNEMKAALYNVFRKMMTNSQ

SEQ ID NO: 189958 - protein, 20 aa, Artificial Sequence
  Description of Artificial Sequence: Synthetic peptide
  Seed: GNEKKAKLANVVRKMMTNSQ
GNEMKAALYNVIRKMMTNSQ

SEQ ID NO: 189959 - protein, 20 aa, Artificial Sequence
  Description of Artificial Sequence: Synthetic peptide
  Seed: GNEKKAKLANVVRKMMTNSQ
GNEMKAALYNVLRKMMTNSQ

SEQ ID NO: 189960 - protein, 20 aa, Artificial Sequence
  Description of Artificial Sequence: Synthetic peptide
  Seed: GNEKKAKLANVVRKMMTNSQ
GNEMKAALYNVVRKMMTNSQ

SEQ ID NO: 189961 - protein, 20 aa, Artificial Sequence
  Description of Artificial Sequence: Synthetic peptide
  Seed: GNEKKAKLANVVRKMMTNSQ
GNEMKAELANVIRKMMTNSQ

SEQ ID NO: 189962 - protein, 20 aa, Artificial Sequence
  Description of Artificial Sequence: Synthetic peptide
  Seed: GNEKKAKLANVVRKMMTNSQ
GNEMKAELANVLRKMMTNSQ

SEQ ID NO: 189963 - protein, 20 aa, Artificial Sequence
  Description of Artificial Sequence: Synthetic peptide
  Seed: GNEKKAKLANVVRKMMTNSQ
GNEMKAELANVVRKMMTNSQ

SEQ ID NO: 189964 - protein, 20 aa, Artificial Sequence
  Description of Artificial Sequence: Synthetic peptide
  Seed: GNEKKAKLANVVRKMMTNSQ
GNEMKAELFNVARKMMTNSQ

SEQ ID NO: 189965 - protein, 20 aa, Artificial Sequence
  Description of Artificial Sequence: Synthetic peptide
  Seed: GNEKKAKLANVVRKMMTNSQ
GNEMKAELFNVFRKMMTNSQ

SEQ ID NO: 189966 - protein, 20 aa, Artificial Sequence
  Description of Artificial Sequence: Synthetic peptide
  Seed: GNEKKAKLANVVRKMMTNSQ
GNEMKAELFNVIRKMMTNSQ

SEQ ID NO: 189967 - protein, 20 aa, Artificial Sequence
  Description of Artificial Sequence: Synthetic peptide
  Seed: GNEKKAKLANVVRKMMTNSQ
GNEMKAELFNVLRKMMTNSQ

SEQ ID NO: 189968 - protein, 20 aa, Artificial Sequence
  Description of Artificial Sequence: Synthetic peptide
  Seed: GNEKKAKLANVVRKMMTNSQ
GNEMKAELFNVMRKMMTNSQ

SEQ ID NO: 189969 - protein, 20 aa, Artificial Sequence
  Description of Artificial Sequence: Synthetic peptide
  Seed: GNEKKAKLANVVRKMMTNSQ
GNEMKAELFNVTRKMMTNSQ

SEQ ID NO: 189970 - protein, 20 aa, Artificial Sequence
  Description of Artificial Sequence: Synthetic peptide
  Seed: GNEKKAKLANVVRKMMTNSQ
GNEMKAELFNVVRKMMTNSQ

SEQ ID NO: 189971 - protein, 20 aa, Artificial Sequence
  Description of Artificial Sequence: Synthetic peptide
  Seed: GNEKKAKLANVVRKMMTNSQ
GNEMKAELYNVIRKMMTNSQ

SEQ ID NO: 189972 - protein, 20 aa, Artificial Sequence
  Description of Artificial Sequence: Synthetic peptide
  Seed: GNEKKAKLANVVRKMMTNSQ
GNEMKAELYNVLRKMMTNSQ

SEQ ID NO: 189973 - protein, 20 aa, Artificial Sequence
  Description of Artificial Sequence: Synthetic peptide
  Seed: GNEKKAKLANVVRKMMTNSQ
GNEMKAELYNVVRKMMTNSQ

SEQ ID NO: 189974 - protein, 20 aa, Artificial Sequence
  Description of Artificial Sequence: Synthetic peptide
  Seed: GNEKKAKLANVVRKMMTNSQ
GNEMKAFLANVARKMMTNSQ

SEQ ID NO: 189975 - protein, 20 aa, Artificial Sequence
  Description of Artificial Sequence: Synthetic peptide
  Seed: GNEKKAKLANVVRKMMTNSQ
GNEMKAFLANVIRKMMTNSQ

SEQ ID NO: 189976 - protein, 20 aa, Artificial Sequence
  Description of Artificial Sequence: Synthetic peptide
  Seed: GNEKKAKLANVVRKMMTNSQ
GNEMKAFLANVNRKMMTNSQ

SEQ ID NO: 189977 - protein, 20 aa, Artificial Sequence
  Description of Artificial Sequence: Synthetic peptide
  Seed: GNEKKAKLANVVRKMMTNSQ
GNEMKAFLANVSRKMMTNSQ

SEQ ID NO: 189978 - protein, 20 aa, Artificial Sequence
  Description of Artificial Sequence: Synthetic peptide
  Seed: GNEKKAKLANVVRKMMTNSQ
GNEMKAFLANVVRKMMTNSQ

SEQ ID NO: 189979 - protein, 20 aa, Artificial Sequence
  Description of Artificial Sequence: Synthetic peptide
  Seed: GNEKKAKLANVVRKMMTNSQ
GNEMKAFLDNVARKMMTNSQ

SEQ ID NO: 189980 - protein, 20 aa, Artificial Sequence
  Description of Artificial Sequence: Synthetic peptide
  Seed: GNEKKAKLANVVRKMMTNSQ
GNEMKAFLDNVIRKMMTNSQ

SEQ ID NO: 189981 - protein, 20 aa, Artificial Sequence
  Description of Artificial Sequence: Synthetic peptide
  Seed: GNEKKAKLANVVRKMMTNSQ
GNEMKAFLDNVLRKMMTNSQ

SEQ ID NO: 189982 - protein, 20 aa, Artificial Sequence
  Description of Artificial Sequence: Synthetic peptide
  Seed: GNEKKAKLANVVRKMMTNSQ
GNEMKAFLDNVVRKMMTNSQ

SEQ ID NO: 189983 - protein, 20 aa, Artificial Sequence
  Description of Artificial Sequence: Synthetic peptide
  Seed: GNEKKAKLANVVRKMMTNSQ
GNEMKAFLFNVARKMMTNSQ

SEQ ID NO: 189984 - protein, 20 aa, Artificial Sequence
  Description of Artificial Sequence: Synthetic peptide
  Seed: GNEKKAKLANVVRKMMTNSQ
GNEMKAFLFNVERKMMTNSQ

SEQ ID NO: 189985 - protein, 20 aa, Artificial Sequence
  Description of Artificial Sequence: Synthetic peptide
  Seed: GNEKKAKLANVVRKMMTNSQ
GNEMKAFLFNVIRKMMTNSQ

SEQ ID NO: 189986 - protein, 20 aa, Artificial Sequence
  Description of Artificial Sequence: Synthetic peptide
  Seed: GNEKKAKLANVVRKMMTNSQ
GNEMKAFLFNVLRKMMTNSQ

SEQ ID NO: 189987 - protein, 20 aa, Artificial Sequence
  Description of Artificial Sequence: Synthetic peptide
  Seed: GNEKKAKLANVVRKMMTNSQ
GNEMKAFLFNVMRKMMTNSQ

SEQ ID NO: 189988 - protein, 20 aa, Artificial Sequence
  Description of Artificial Sequence: Synthetic peptide
  Seed: GNEKKAKLANVVRKMMTNSQ
GNEMKAFLFNVNRKMMTNSQ

SEQ ID NO: 189989 - protein, 20 aa, Artificial Sequence
  Description of Artificial Sequence: Synthetic peptide
  Seed: GNEKKAKLANVVRKMMTNSQ
GNEMKAFLFNVSRKMMTNSQ

SEQ ID NO: 189990 - protein, 20 aa, Artificial Sequence
  Description of Artificial Sequence: Synthetic peptide
  Seed: GNEKKAKLANVVRKMMTNSQ
GNEMKAFLFNVTRKMMTNSQ

SEQ ID NO: 189991 - protein, 20 aa, Artificial Sequence
  Description of Artificial Sequence: Synthetic peptide
  Seed: GNEKKAKLANVVRKMMTNSQ
GNEMKAFLFNVVRKMMTNSQ

SEQ ID NO: 189992 - protein, 20 aa, Artificial Sequence
  Description of Artificial Sequence: Synthetic peptide
  Seed: GNEKKAKLANVVRKMMTNSQ
GNEMKAFLINVARKMMTNSQ

SEQ ID NO: 189993 - protein, 20 aa, Artificial Sequence
  Description of Artificial Sequence: Synthetic peptide
  Seed: GNEKKAKLANVVRKMMTNSQ
GNEMKAFLLNVIRKMMTNSQ

SEQ ID NO: 189994 - protein, 20 aa, Artificial Sequence
  Description of Artificial Sequence: Synthetic peptide
  Seed: GNEKKAKLANVVRKMMTNSQ
GNEMKAFLLNVVRKMMTNSQ

SEQ ID NO: 189995 - protein, 20 aa, Artificial Sequence
  Description of Artificial Sequence: Synthetic peptide
  Seed: GNEKKAKLANVVRKMMTNSQ
GNEMKAFLPNVARKMMTNSQ

SEQ ID NO: 189996 - protein, 20 aa, Artificial Sequence
  Description of Artificial Sequence: Synthetic peptide
  Seed: GNEKKAKLANVVRKMMTNSQ
GNEMKAFLVNVARKMMTNSQ

SEQ ID NO: 189997 - protein, 20 aa, Artificial Sequence
  Description of Artificial Sequence: Synthetic peptide
  Seed: GNEKKAKLANVVRKMMTNSQ
GNEMKAFLWNVVRKMMTNSQ

SEQ ID NO: 189998 - protein, 20 aa, Artificial Sequence
  Description of Artificial Sequence: Synthetic peptide
  Seed: GNEKKAKLANVVRKMMTNSQ
GNEMKAFLYNVVRKMMTNSQ

SEQ ID NO: 189999 - protein, 20 aa, Artificial Sequence
  Description of Artificial Sequence: Synthetic peptide
  Seed: GNEKKAKLANVVRKMMTNSQ
GNEMKAGLANVIRKMMTNSQ

SEQ ID NO: 190000 - protein, 20 aa, Artificial Sequence
  Description of Artificial Sequence: Synthetic peptide
  Seed: GNEKKAKLANVVRKMMTNSQ
GNEMKAGLANVLRKMMTNSQ

SEQ ID NO: 190001 - protein, 20 aa, Artificial Sequence
  Description of Artificial Sequence: Synthetic peptide
  Seed: GNEKKAKLANVVRKMMTNSQ
GNEMKAGLANVVRKMMTNSQ

SEQ ID NO: 190002 - protein, 20 aa, Artificial Sequence
  Description of Artificial Sequence: Synthetic peptide
  Seed: GNEKKAKLANVVRKMMTNSQ
GNEMKAHLFNVARKMMTNSQ

SEQ ID NO: 190003 - protein, 20 aa, Artificial Sequence
  Description of Artificial Sequence: Synthetic peptide
  Seed: GNEKKAKLANVVRKMMTNSQ
GNEMKAHLFNVERKMMTNSQ

SEQ ID NO: 190004 - protein, 20 aa, Artificial Sequence
  Description of Artificial Sequence: Synthetic peptide
  Seed: GNEKKAKLANVVRKMMTNSQ
GNEMKAHLFNVFRKMMTNSQ

SEQ ID NO: 190005 - protein, 20 aa, Artificial Sequence
  Description of Artificial Sequence: Synthetic peptide
  Seed: GNEKKAKLANVVRKMMTNSQ
GNEMKAHLFNVIRKMMTNSQ

SEQ ID NO: 190006 - protein, 20 aa, Artificial Sequence
  Description of Artificial Sequence: Synthetic peptide
  Seed: GNEKKAKLANVVRKMMTNSQ
GNEMKAHLFNVLRKMMTNSQ

SEQ ID NO: 190007 - protein, 20 aa, Artificial Sequence
  Description of Artificial Sequence: Synthetic peptide
  Seed: GNEKKAKLANVVRKMMTNSQ
GNEMKAHLFNVMRKMMTNSQ

SEQ ID NO: 190008 - protein, 20 aa, Artificial Sequence
  Description of Artificial Sequence: Synthetic peptide
  Seed: GNEKKAKLANVVRKMMTNSQ
GNEMKAHLFNVSRKMMTNSQ

SEQ ID NO: 190009 - protein, 20 aa, Artificial Sequence
  Description of Artificial Sequence: Synthetic peptide
  Seed: GNEKKAKLANVVRKMMTNSQ
GNEMKAHLFNVTRKMMTNSQ

SEQ ID NO: 190010 - protein, 20 aa, Artificial Sequence
  Description of Artificial Sequence: Synthetic peptide
  Seed: GNEKKAKLANVVRKMMTNSQ
GNEMKAHLFNVVRKMMTNSQ

SEQ ID NO: 190011 - protein, 20 aa, Artificial Sequence
  Description of Artificial Sequence: Synthetic peptide
  Seed: GNEKKAKLANVVRKMMTNSQ
GNEMKAHLFNVYRKMMTNSQ

SEQ ID NO: 190012 - protein, 20 aa, Artificial Sequence
  Description of Artificial Sequence: Synthetic peptide
  Seed: GNEKKAKLANVVRKMMTNSQ
GNEMKAHLLNVIRKMMTNSQ

SEQ ID NO: 190013 - protein, 20 aa, Artificial Sequence
  Description of Artificial Sequence: Synthetic peptide
  Seed: GNEKKAKLANVVRKMMTNSQ
GNEMKAHLLNVLRKMMTNSQ

SEQ ID NO: 190014 - protein, 20 aa, Artificial Sequence
  Description of Artificial Sequence: Synthetic peptide
  Seed: GNEKKAKLANVVRKMMTNSQ
GNEMKAHLYNVFRKMMTNSQ

SEQ ID NO: 190015 - protein, 20 aa, Artificial Sequence
  Description of Artificial Sequence: Synthetic peptide
  Seed: GNEKKAKLANVVRKMMTNSQ
GNEMKAHLYNVIRKMMTNSQ

SEQ ID NO: 190016 - protein, 20 aa, Artificial Sequence
  Description of Artificial Sequence: Synthetic peptide
  Seed: GNEKKAKLANVVRKMMTNSQ
GNEMKAHLYNVLRKMMTNSQ

SEQ ID NO: 190017 - protein, 20 aa, Artificial Sequence
  Description of Artificial Sequence: Synthetic peptide
  Seed: GNEKKAKLANVVRKMMTNSQ
GNEMKAHLYNVVRKMMTNSQ

SEQ ID NO: 190018 - protein, 20 aa, Artificial Sequence
  Description of Artificial Sequence: Synthetic peptide
  Seed: GNEKKAKLANVVRKMMTNSQ
GNEMKAILANVARKMMTNSQ

SEQ ID NO: 190019 - protein, 20 aa, Artificial Sequence
  Description of Artificial Sequence: Synthetic peptide
  Seed: GNEKKAKLANVVRKMMTNSQ
GNEMKAILANVIRKMMTNSQ

SEQ ID NO: 190020 - protein, 20 aa, Artificial Sequence
  Description of Artificial Sequence: Synthetic peptide
  Seed: GNEKKAKLANVVRKMMTNSQ
GNEMKAILANVLRKMMTNSQ

SEQ ID NO: 190021 - protein, 20 aa, Artificial Sequence
  Description of Artificial Sequence: Synthetic peptide
  Seed: GNEKKAKLANVVRKMMTNSQ
GNEMKAILANVMRKMMTNSQ

SEQ ID NO: 190022 - protein, 20 aa, Artificial Sequence
  Description of Artificial Sequence: Synthetic peptide
  Seed: GNEKKAKLANVVRKMMTNSQ
GNEMKAILANVNRKMMTNSQ

SEQ ID NO: 190023 - protein, 20 aa, Artificial Sequence
  Description of Artificial Sequence: Synthetic peptide
  Seed: GNEKKAKLANVVRKMMTNSQ
GNEMKAILANVSRKMMTNSQ

SEQ ID NO: 190024 - protein, 20 aa, Artificial Sequence
  Description of Artificial Sequence: Synthetic peptide
  Seed: GNEKKAKLANVVRKMMTNSQ
GNEMKAILANVTRKMMTNSQ

SEQ ID NO: 190025 - protein, 20 aa, Artificial Sequence
  Description of Artificial Sequence: Synthetic peptide
  Seed: GNEKKAKLANVVRKMMTNSQ
GNEMKAILANVVRKMMTNSQ

SEQ ID NO: 190026 - protein, 20 aa, Artificial Sequence
  Description of Artificial Sequence: Synthetic peptide
  Seed: GNEKKAKLANVVRKMMTNSQ
GNEMKAILFNVARKMMTNSQ

SEQ ID NO: 190027 - protein, 20 aa, Artificial Sequence
  Description of Artificial Sequence: Synthetic peptide
  Seed: GNEKKAKLANVVRKMMTNSQ
GNEMKAILFNVERKMMTNSQ

SEQ ID NO: 190028 - protein, 20 aa, Artificial Sequence
  Description of Artificial Sequence: Synthetic peptide
  Seed: GNEKKAKLANVVRKMMTNSQ
GNEMKAILFNVIRKMMTNSQ

SEQ ID NO: 190029 - protein, 20 aa, Artificial Sequence
  Description of Artificial Sequence: Synthetic peptide
  Seed: GNEKKAKLANVVRKMMTNSQ
GNEMKAILFNVLRKMMTNSQ

SEQ ID NO: 190030 - protein, 20 aa, Artificial Sequence
  Description of Artificial Sequence: Synthetic peptide
  Seed: GNEKKAKLANVVRKMMTNSQ
GNEMKAILFNVMRKMMTNSQ

SEQ ID NO: 190031 - protein, 20 aa, Artificial Sequence
  Description of Artificial Sequence: Synthetic peptide
  Seed: GNEKKAKLANVVRKMMTNSQ
GNEMKAILFNVNRKMMTNSQ

SEQ ID NO: 190032 - protein, 20 aa, Artificial Sequence
  Description of Artificial Sequence: Synthetic peptide
  Seed: GNEKKAKLANVVRKMMTNSQ
GNEMKAILFNVSRKMMTNSQ

SEQ ID NO: 190033 - protein, 20 aa, Artificial Sequence
  Description of Artificial Sequence: Synthetic peptide
  Seed: GNEKKAKLANVVRKMMTNSQ
GNEMKAILFNVTRKMMTNSQ

SEQ ID NO: 190034 - protein, 20 aa, Artificial Sequence
  Description of Artificial Sequence: Synthetic peptide
  Seed: GNEKKAKLANVVRKMMTNSQ
GNEMKAILFNVVRKMMTNSQ

SEQ ID NO: 190035 - protein, 20 aa, Artificial Sequence
  Description of Artificial Sequence: Synthetic peptide
  Seed: GNEKKAKLANVVRKMMTNSQ
GNEMKAILFNVYRKMMTNSQ

SEQ ID NO: 190036 - protein, 20 aa, Artificial Sequence
  Description of Artificial Sequence: Synthetic peptide
  Seed: GNEKKAKLANVVRKMMTNSQ
GNEMKAILGNVARKMMTNSQ

SEQ ID NO: 190037 - protein, 20 aa, Artificial Sequence
  Description of Artificial Sequence: Synthetic peptide
  Seed: GNEKKAKLANVVRKMMTNSQ
GNEMKAILGNVIRKMMTNSQ

SEQ ID NO: 190038 - protein, 20 aa, Artificial Sequence
  Description of Artificial Sequence: Synthetic peptide
  Seed: GNEKKAKLANVVRKMMTNSQ
GNEMKAILGNVLRKMMTNSQ

SEQ ID NO: 190039 - protein, 20 aa, Artificial Sequence
  Description of Artificial Sequence: Synthetic peptide
  Seed: GNEKKAKLANVVRKMMTNSQ
GNEMKAILGNVNRKMMTNSQ

SEQ ID NO: 190040 - protein, 20 aa, Artificial Sequence
  Description of Artificial Sequence: Synthetic peptide
  Seed: GNEKKAKLANVVRKMMTNSQ
GNEMKAILGNVVRKMMTNSQ

SEQ ID NO: 190041 - protein, 20 aa, Artificial Sequence
  Description of Artificial Sequence: Synthetic peptide
  Seed: GNEKKAKLANVVRKMMTNSQ
GNEMKAILLNVIRKMMTNSQ

SEQ ID NO: 190042 - protein, 20 aa, Artificial Sequence
  Description of Artificial Sequence: Synthetic peptide
  Seed: GNEKKAKLANVVRKMMTNSQ
GNEMKAILLNVLRKMMTNSQ

SEQ ID NO: 190043 - protein, 20 aa, Artificial Sequence
  Description of Artificial Sequence: Synthetic peptide
  Seed: GNEKKAKLANVVRKMMTNSQ
GNEMKAILPNVARKMMTNSQ

SEQ ID NO: 190044 - protein, 20 aa, Artificial Sequence
  Description of Artificial Sequence: Synthetic peptide
  Seed: GNEKKAKLANVVRKMMTNSQ
GNEMKAILPNVIRKMMTNSQ

SEQ ID NO: 190045 - protein, 20 aa, Artificial Sequence
  Description of Artificial Sequence: Synthetic peptide
  Seed: GNEKKAKLANVVRKMMTNSQ
GNEMKAILPNVLRKMMTNSQ

SEQ ID NO: 190046 - protein, 20 aa, Artificial Sequence
  Description of Artificial Sequence: Synthetic peptide
  Seed: GNEKKAKLANVVRKMMTNSQ
GNEMKAILPNVNRKMMTNSQ

SEQ ID NO: 190047 - protein, 20 aa, Artificial Sequence
  Description of Artificial Sequence: Synthetic peptide
  Seed: GNEKKAKLANVVRKMMTNSQ
GNEMKAILPNVSRKMMTNSQ

SEQ ID NO: 190048 - protein, 20 aa, Artificial Sequence
  Description of Artificial Sequence: Synthetic peptide
  Seed: GNEKKAKLANVVRKMMTNSQ
GNEMKAILPNVVRKMMTNSQ

SEQ ID NO: 190049 - protein, 20 aa, Artificial Sequence
  Description of Artificial Sequence: Synthetic peptide
  Seed: GNEKKAKLANVVRKMMTNSQ
GNEMKAILSNVARKMMTNSQ

SEQ ID NO: 190050 - protein, 20 aa, Artificial Sequence
  Description of Artificial Sequence: Synthetic peptide
  Seed: GNEKKAKLANVVRKMMTNSQ
GNEMKAILSNVIRKMMTNSQ

SEQ ID NO: 190051 - protein, 20 aa, Artificial Sequence
  Description of Artificial Sequence: Synthetic peptide
  Seed: GNEKKAKLANVVRKMMTNSQ
GNEMKAILSNVLRKMMTNSQ

SEQ ID NO: 190052 - protein, 20 aa, Artificial Sequence
  Description of Artificial Sequence: Synthetic peptide
  Seed: GNEKKAKLANVVRKMMTNSQ
GNEMKAILSNVNRKMMTNSQ

SEQ ID NO: 190053 - protein, 20 aa, Artificial Sequence
  Description of Artificial Sequence: Synthetic peptide
  Seed: GNEKKAKLANVVRKMMTNSQ
GNEMKAILSNVSRKMMTNSQ

SEQ ID NO: 190054 - protein, 20 aa, Artificial Sequence
  Description of Artificial Sequence: Synthetic peptide
  Seed: GNEKKAKLANVVRKMMTNSQ
GNEMKAILSNVVRKMMTNSQ

SEQ ID NO: 190055 - protein, 20 aa, Artificial Sequence
  Description of Artificial Sequence: Synthetic peptide
  Seed: GNEKKAKLANVVRKMMTNSQ
GNEMKAILTNVARKMMTNSQ

SEQ ID NO: 190056 - protein, 20 aa, Artificial Sequence
  Description of Artificial Sequence: Synthetic peptide
  Seed: GNEKKAKLANVVRKMMTNSQ
GNEMKAILTNVNRKMMTNSQ

SEQ ID NO: 190057 - protein, 20 aa, Artificial Sequence
  Description of Artificial Sequence: Synthetic peptide
  Seed: GNEKKAKLANVVRKMMTNSQ
GNEMKAILTNVSRKMMTNSQ

SEQ ID NO: 190058 - protein, 20 aa, Artificial Sequence
  Description of Artificial Sequence: Synthetic peptide
  Seed: GNEKKAKLANVVRKMMTNSQ
GNEMKAILVNVARKMMTNSQ

SEQ ID NO: 190059 - protein, 20 aa, Artificial Sequence
  Description of Artificial Sequence: Synthetic peptide
  Seed: GNEKKAKLANVVRKMMTNSQ
GNEMKAILVNVNRKMMTNSQ

SEQ ID NO: 190060 - protein, 20 aa, Artificial Sequence
  Description of Artificial Sequence: Synthetic peptide
  Seed: GNEKKAKLANVVRKMMTNSQ
GNEMKAILVNVSRKMMTNSQ

SEQ ID NO: 190061 - protein, 20 aa, Artificial Sequence
  Description of Artificial Sequence: Synthetic peptide
  Seed: GNEKKAKLANVVRKMMTNSQ
GNEMKAILWNVIRKMMTNSQ

SEQ ID NO: 190062 - protein, 20 aa, Artificial Sequence
  Description of Artificial Sequence: Synthetic peptide
  Seed: GNEKKAKLANVVRKMMTNSQ
GNEMKAILWNVLRKMMTNSQ

SEQ ID NO: 190063 - protein, 20 aa, Artificial Sequence
  Description of Artificial Sequence: Synthetic peptide
  Seed: GNEKKAKLANVVRKMMTNSQ
GNEMKAILWNVMRKMMTNSQ

SEQ ID NO: 190064 - protein, 20 aa, Artificial Sequence
  Description of Artificial Sequence: Synthetic peptide
  Seed: GNEKKAKLANVVRKMMTNSQ
GNEMKAILWNVVRKMMTNSQ

SEQ ID NO: 190065 - protein, 20 aa, Artificial Sequence
  Description of Artificial Sequence: Synthetic peptide
  Seed: GNEKKAKLANVVRKMMTNSQ
GNEMKAILYNVIRKMMTNSQ

SEQ ID NO: 190066 - protein, 20 aa, Artificial Sequence
  Description of Artificial Sequence: Synthetic peptide
  Seed: GNEKKAKLANVVRKMMTNSQ
GNEMKAILYNVLRKMMTNSQ

SEQ ID NO: 190067 - protein, 20 aa, Artificial Sequence
  Description of Artificial Sequence: Synthetic peptide
  Seed: GNEKKAKLANVVRKMMTNSQ
GNEMKAILYNVMRKMMTNSQ

SEQ ID NO: 190068 - protein, 20 aa, Artificial Sequence
  Description of Artificial Sequence: Synthetic peptide
  Seed: GNEKKAKLANVVRKMMTNSQ
GNEMKAILYNVVRKMMTNSQ

SEQ ID NO: 190069 - protein, 20 aa, Artificial Sequence
  Description of Artificial Sequence: Synthetic peptide
  Seed: GNEKKAKLANVVRKMMTNSQ
GNEMKAKLFNVFRKMMTNSQ

SEQ ID NO: 190070 - protein, 20 aa, Artificial Sequence
  Description of Artificial Sequence: Synthetic peptide
  Seed: GNEKKAKLANVVRKMMTNSQ
GNEMKAKLFNVIRKMMTNSQ

SEQ ID NO: 190071 - protein, 20 aa, Artificial Sequence
  Description of Artificial Sequence: Synthetic peptide
  Seed: GNEKKAKLANVVRKMMTNSQ
GNEMKAKLFNVLRKMMTNSQ

SEQ ID NO: 190072 - protein, 20 aa, Artificial Sequence
  Description of Artificial Sequence: Synthetic peptide
  Seed: GNEKKAKLANVVRKMMTNSQ
GNEMKAKLFNVVRKMMTNSQ

SEQ ID NO: 190073 - protein, 20 aa, Artificial Sequence
  Description of Artificial Sequence: Synthetic peptide
  Seed: GNEKKAKLANVVRKMMTNSQ
GNEMKALLANVARKMMTNSQ

SEQ ID NO: 190074 - protein, 20 aa, Artificial Sequence
  Description of Artificial Sequence: Synthetic peptide
  Seed: GNEKKAKLANVVRKMMTNSQ
GNEMKALLANVGRKMMTNSQ

SEQ ID NO: 190075 - protein, 20 aa, Artificial Sequence
  Description of Artificial Sequence: Synthetic peptide
  Seed: GNEKKAKLANVVRKMMTNSQ
GNEMKALLANVHRKMMTNSQ

SEQ ID NO: 190076 - protein, 20 aa, Artificial Sequence
  Description of Artificial Sequence: Synthetic peptide
  Seed: GNEKKAKLANVVRKMMTNSQ
GNEMKALLANVIRKMMTNSQ

SEQ ID NO: 190077 - protein, 20 aa, Artificial Sequence
  Description of Artificial Sequence: Synthetic peptide
  Seed: GNEKKAKLANVVRKMMTNSQ
GNEMKALLANVLRKMMTNSQ

SEQ ID NO: 190078 - protein, 20 aa, Artificial Sequence
  Description of Artificial Sequence: Synthetic peptide
  Seed: GNEKKAKLANVVRKMMTNSQ
GNEMKALLANVMRKMMTNSQ

SEQ ID NO: 190079 - protein, 20 aa, Artificial Sequence
  Description of Artificial Sequence: Synthetic peptide
  Seed: GNEKKAKLANVVRKMMTNSQ
GNEMKALLANVNRKMMTNSQ

SEQ ID NO: 190080 - protein, 20 aa, Artificial Sequence
  Description of Artificial Sequence: Synthetic peptide
  Seed: GNEKKAKLANVVRKMMTNSQ
GNEMKALLANVSRKMMTNSQ

SEQ ID NO: 190081 - protein, 20 aa, Artificial Sequence
  Description of Artificial Sequence: Synthetic peptide
  Seed: GNEKKAKLANVVRKMMTNSQ
GNEMKALLANVTRKMMTNSQ

SEQ ID NO: 190082 - protein, 20 aa, Artificial Sequence
  Description of Artificial Sequence: Synthetic peptide
  Seed: GNEKKAKLANVVRKMMTNSQ
GNEMKALLANVVRKMMTNSQ

SEQ ID NO: 190083 - protein, 20 aa, Artificial Sequence
  Description of Artificial Sequence: Synthetic peptide
  Seed: GNEKKAKLANVVRKMMTNSQ
GNEMKALLFNVARKMMTNSQ

SEQ ID NO: 190084 - protein, 20 aa, Artificial Sequence
  Description of Artificial Sequence: Synthetic peptide
  Seed: GNEKKAKLANVVRKMMTNSQ
GNEMKALLFNVIRKMMTNSQ

SEQ ID NO: 190085 - protein, 20 aa, Artificial Sequence
  Description of Artificial Sequence: Synthetic peptide
  Seed: GNEKKAKLANVVRKMMTNSQ
GNEMKALLFNVLRKMMTNSQ

SEQ ID NO: 190086 - protein, 20 aa, Artificial Sequence
  Description of Artificial Sequence: Synthetic peptide
  Seed: GNEKKAKLANVVRKMMTNSQ
GNEMKALLFNVMRKMMTNSQ

SEQ ID NO: 190087 - protein, 20 aa, Artificial Sequence
  Description of Artificial Sequence: Synthetic peptide
  Seed: GNEKKAKLANVVRKMMTNSQ
GNEMKALLFNVTRKMMTNSQ

SEQ ID NO: 190088 - protein, 20 aa, Artificial Sequence
  Description of Artificial Sequence: Synthetic peptide
  Seed: GNEKKAKLANVVRKMMTNSQ
GNEMKALLFNVVRKMMTNSQ

SEQ ID NO: 190089 - protein, 20 aa, Artificial Sequence
  Description of Artificial Sequence: Synthetic peptide
  Seed: GNEKKAKLANVVRKMMTNSQ
GNEMKALLGNVARKMMTNSQ

SEQ ID NO: 190090 - protein, 20 aa, Artificial Sequence
  Description of Artificial Sequence: Synthetic peptide
  Seed: GNEKKAKLANVVRKMMTNSQ
GNEMKALLGNVGRKMMTNSQ

SEQ ID NO: 190091 - protein, 20 aa, Artificial Sequence
  Description of Artificial Sequence: Synthetic peptide
  Seed: GNEKKAKLANVVRKMMTNSQ
GNEMKALLGNVIRKMMTNSQ

SEQ ID NO: 190092 - protein, 20 aa, Artificial Sequence
  Description of Artificial Sequence: Synthetic peptide
  Seed: GNEKKAKLANVVRKMMTNSQ
GNEMKALLGNVLRKMMTNSQ

SEQ ID NO: 190093 - protein, 20 aa, Artificial Sequence
  Description of Artificial Sequence: Synthetic peptide
  Seed: GNEKKAKLANVVRKMMTNSQ
GNEMKALLGNVMRKMMTNSQ

SEQ ID NO: 190094 - protein, 20 aa, Artificial Sequence
  Description of Artificial Sequence: Synthetic peptide
  Seed: GNEKKAKLANVVRKMMTNSQ
GNEMKALLGNVNRKMMTNSQ

SEQ ID NO: 190095 - protein, 20 aa, Artificial Sequence
  Description of Artificial Sequence: Synthetic peptide
  Seed: GNEKKAKLANVVRKMMTNSQ
GNEMKALLGNVSRKMMTNSQ

SEQ ID NO: 190096 - protein, 20 aa, Artificial Sequence
  Description of Artificial Sequence: Synthetic peptide
  Seed: GNEKKAKLANVVRKMMTNSQ
GNEMKALLGNVTRKMMTNSQ

SEQ ID NO: 190097 - protein, 20 aa, Artificial Sequence
  Description of Artificial Sequence: Synthetic peptide
  Seed: GNEKKAKLANVVRKMMTNSQ
GNEMKALLGNVVRKMMTNSQ

SEQ ID NO: 190098 - protein, 20 aa, Artificial Sequence
  Description of Artificial Sequence: Synthetic peptide
  Seed: GNEKKAKLANVVRKMMTNSQ
GNEMKALLINVARKMMTNSQ

SEQ ID NO: 190099 - protein, 20 aa, Artificial Sequence
  Description of Artificial Sequence: Synthetic peptide
  Seed: GNEKKAKLANVVRKMMTNSQ
GNEMKALLINVNRKMMTNSQ

SEQ ID NO: 190100 - protein, 20 aa, Artificial Sequence
  Description of Artificial Sequence: Synthetic peptide
  Seed: GNEKKAKLANVVRKMMTNSQ
GNEMKALLINVSRKMMTNSQ

SEQ ID NO: 190101 - protein, 20 aa, Artificial Sequence
  Description of Artificial Sequence: Synthetic peptide
  Seed: GNEKKAKLANVVRKMMTNSQ
GNEMKALLNNVARKMMTNSQ

SEQ ID NO: 190102 - protein, 20 aa, Artificial Sequence
  Description of Artificial Sequence: Synthetic peptide
  Seed: GNEKKAKLANVVRKMMTNSQ
GNEMKALLNNVIRKMMTNSQ

SEQ ID NO: 190103 - protein, 20 aa, Artificial Sequence
  Description of Artificial Sequence: Synthetic peptide
  Seed: GNEKKAKLANVVRKMMTNSQ
GNEMKALLNNVLRKMMTNSQ

SEQ ID NO: 190104 - protein, 20 aa, Artificial Sequence
  Description of Artificial Sequence: Synthetic peptide
  Seed: GNEKKAKLANVVRKMMTNSQ
GNEMKALLNNVNRKMMTNSQ

SEQ ID NO: 190105 - protein, 20 aa, Artificial Sequence
  Description of Artificial Sequence: Synthetic peptide
  Seed: GNEKKAKLANVVRKMMTNSQ
GNEMKALLNNVSRKMMTNSQ

SEQ ID NO: 190106 - protein, 20 aa, Artificial Sequence
  Description of Artificial Sequence: Synthetic peptide
  Seed: GNEKKAKLANVVRKMMTNSQ
GNEMKALLNNVVRKMMTNSQ

SEQ ID NO: 190107 - protein, 20 aa, Artificial Sequence
  Description of Artificial Sequence: Synthetic peptide
  Seed: GNEKKAKLANVVRKMMTNSQ
GNEMKALLPNVARKMMTNSQ

SEQ ID NO: 190108 - protein, 20 aa, Artificial Sequence
  Description of Artificial Sequence: Synthetic peptide
  Seed: GNEKKAKLANVVRKMMTNSQ
GNEMKALLPNVGRKMMTNSQ

SEQ ID NO: 190109 - protein, 20 aa, Artificial Sequence
  Description of Artificial Sequence: Synthetic peptide
  Seed: GNEKKAKLANVVRKMMTNSQ
GNEMKALLPNVIRKMMTNSQ

SEQ ID NO: 190110 - protein, 20 aa, Artificial Sequence
  Description of Artificial Sequence: Synthetic peptide
  Seed: GNEKKAKLANVVRKMMTNSQ
GNEMKALLPNVLRKMMTNSQ

SEQ ID NO: 190111 - protein, 20 aa, Artificial Sequence
  Description of Artificial Sequence: Synthetic peptide
  Seed: GNEKKAKLANVVRKMMTNSQ
GNEMKALLPNVMRKMMTNSQ

SEQ ID NO: 190112 - protein, 20 aa, Artificial Sequence
  Description of Artificial Sequence: Synthetic peptide
  Seed: GNEKKAKLANVVRKMMTNSQ
GNEMKALLPNVNRKMMTNSQ

SEQ ID NO: 190113 - protein, 20 aa, Artificial Sequence
  Description of Artificial Sequence: Synthetic peptide
  Seed: GNEKKAKLANVVRKMMTNSQ
GNEMKALLPNVSRKMMTNSQ

SEQ ID NO: 190114 - protein, 20 aa, Artificial Sequence
  Description of Artificial Sequence: Synthetic peptide
  Seed: GNEKKAKLANVVRKMMTNSQ
GNEMKALLPNVTRKMMTNSQ

SEQ ID NO: 190115 - protein, 20 aa, Artificial Sequence
  Description of Artificial Sequence: Synthetic peptide
  Seed: GNEKKAKLANVVRKMMTNSQ
GNEMKALLPNVVRKMMTNSQ

SEQ ID NO: 190116 - protein, 20 aa, Artificial Sequence
  Description of Artificial Sequence: Synthetic peptide
  Seed: GNEKKAKLANVVRKMMTNSQ
GNEMKALLSNVARKMMTNSQ

SEQ ID NO: 190117 - protein, 20 aa, Artificial Sequence
  Description of Artificial Sequence: Synthetic peptide
  Seed: GNEKKAKLANVVRKMMTNSQ
GNEMKALLSNVGRKMMTNSQ

SEQ ID NO: 190118 - protein, 20 aa, Artificial Sequence
  Description of Artificial Sequence: Synthetic peptide
  Seed: GNEKKAKLANVVRKMMTNSQ
GNEMKALLSNVIRKMMTNSQ

SEQ ID NO: 190119 - protein, 20 aa, Artificial Sequence
  Description of Artificial Sequence: Synthetic peptide
  Seed: GNEKKAKLANVVRKMMTNSQ
GNEMKALLSNVLRKMMTNSQ

SEQ ID NO: 190120 - protein, 20 aa, Artificial Sequence
  Description of Artificial Sequence: Synthetic peptide
  Seed: GNEKKAKLANVVRKMMTNSQ
GNEMKALLSNVMRKMMTNSQ

SEQ ID NO: 190121 - protein, 20 aa, Artificial Sequence
  Description of Artificial Sequence: Synthetic peptide
  Seed: GNEKKAKLANVVRKMMTNSQ
GNEMKALLSNVNRKMMTNSQ

SEQ ID NO: 190122 - protein, 20 aa, Artificial Sequence
  Description of Artificial Sequence: Synthetic peptide
  Seed: GNEKKAKLANVVRKMMTNSQ
GNEMKALLSNVSRKMMTNSQ

SEQ ID NO: 190123 - protein, 20 aa, Artificial Sequence
  Description of Artificial Sequence: Synthetic peptide
  Seed: GNEKKAKLANVVRKMMTNSQ
GNEMKALLSNVTRKMMTNSQ

SEQ ID NO: 190124 - protein, 20 aa, Artificial Sequence
  Description of Artificial Sequence: Synthetic peptide
  Seed: GNEKKAKLANVVRKMMTNSQ
GNEMKALLSNVVRKMMTNSQ

SEQ ID NO: 190125 - protein, 20 aa, Artificial Sequence
  Description of Artificial Sequence: Synthetic peptide
  Seed: GNEKKAKLANVVRKMMTNSQ
GNEMKALLTNVARKMMTNSQ

SEQ ID NO: 190126 - protein, 20 aa, Artificial Sequence
  Description of Artificial Sequence: Synthetic peptide
  Seed: GNEKKAKLANVVRKMMTNSQ
GNEMKALLTNVIRKMMTNSQ

SEQ ID NO: 190127 - protein, 20 aa, Artificial Sequence
  Description of Artificial Sequence: Synthetic peptide
  Seed: GNEKKAKLANVVRKMMTNSQ
GNEMKALLTNVLRKMMTNSQ

SEQ ID NO: 190128 - protein, 20 aa, Artificial Sequence
  Description of Artificial Sequence: Synthetic peptide
  Seed: GNEKKAKLANVVRKMMTNSQ
GNEMKALLTNVMRKMMTNSQ

SEQ ID NO: 190129 - protein, 20 aa, Artificial Sequence
  Description of Artificial Sequence: Synthetic peptide
  Seed: GNEKKAKLANVVRKMMTNSQ
GNEMKALLTNVNRKMMTNSQ

SEQ ID NO: 190130 - protein, 20 aa, Artificial Sequence
  Description of Artificial Sequence: Synthetic peptide
  Seed: GNEKKAKLANVVRKMMTNSQ
GNEMKALLTNVSRKMMTNSQ

SEQ ID NO: 190131 - protein, 20 aa, Artificial Sequence
  Description of Artificial Sequence: Synthetic peptide
  Seed: GNEKKAKLANVVRKMMTNSQ
GNEMKALLTNVTRKMMTNSQ

SEQ ID NO: 190132 - protein, 20 aa, Artificial Sequence
  Description of Artificial Sequence: Synthetic peptide
  Seed: GNEKKAKLANVVRKMMTNSQ
GNEMKALLTNVVRKMMTNSQ

SEQ ID NO: 190133 - protein, 20 aa, Artificial Sequence
  Description of Artificial Sequence: Synthetic peptide
  Seed: GNEKKAKLANVVRKMMTNSQ
GNEMKALLVNVARKMMTNSQ

SEQ ID NO: 190134 - protein, 20 aa, Artificial Sequence
  Description of Artificial Sequence: Synthetic peptide
  Seed: GNEKKAKLANVVRKMMTNSQ
GNEMKALLVNVNRKMMTNSQ

SEQ ID NO: 190135 - protein, 20 aa, Artificial Sequence
  Description of Artificial Sequence: Synthetic peptide
  Seed: GNEKKAKLANVVRKMMTNSQ
GNEMKALLVNVSRKMMTNSQ

SEQ ID NO: 190136 - protein, 20 aa, Artificial Sequence
  Description of Artificial Sequence: Synthetic peptide
  Seed: GNEKKAKLANVVRKMMTNSQ
GNEMKALLVNVTRKMMTNSQ

SEQ ID NO: 190137 - protein, 20 aa, Artificial Sequence
  Description of Artificial Sequence: Synthetic peptide
  Seed: GNEKKAKLANVVRKMMTNSQ
GNEMKALLVNVVRKMMTNSQ

SEQ ID NO: 190138 - protein, 20 aa, Artificial Sequence
  Description of Artificial Sequence: Synthetic peptide
  Seed: GNEKKAKLANVVRKMMTNSQ
GNEMKALLWNVIRKMMTNSQ

SEQ ID NO: 190139 - protein, 20 aa, Artificial Sequence
  Description of Artificial Sequence: Synthetic peptide
  Seed: GNEKKAKLANVVRKMMTNSQ
GNEMKALLYNVIRKMMTNSQ

SEQ ID NO: 190140 - protein, 20 aa, Artificial Sequence
  Description of Artificial Sequence: Synthetic peptide
  Seed: GNEKKAKLANVVRKMMTNSQ
GNEMKALLYNVVRKMMTNSQ

SEQ ID NO: 190141 - protein, 20 aa, Artificial Sequence
  Description of Artificial Sequence: Synthetic peptide
  Seed: GNEKKAKLANVVRKMMTNSQ
GNEMKAMLANVARKMMTNSQ

SEQ ID NO: 190142 - protein, 20 aa, Artificial Sequence
  Description of Artificial Sequence: Synthetic peptide
  Seed: GNEKKAKLANVVRKMMTNSQ
GNEMKAMLANVGRKMMTNSQ

SEQ ID NO: 190143 - protein, 20 aa, Artificial Sequence
  Description of Artificial Sequence: Synthetic peptide
  Seed: GNEKKAKLANVVRKMMTNSQ
GNEMKAMLANVHRKMMTNSQ

SEQ ID NO: 190144 - protein, 20 aa, Artificial Sequence
  Description of Artificial Sequence: Synthetic peptide
  Seed: GNEKKAKLANVVRKMMTNSQ
GNEMKAMLANVIRKMMTNSQ

SEQ ID NO: 190145 - protein, 20 aa, Artificial Sequence
  Description of Artificial Sequence: Synthetic peptide
  Seed: GNEKKAKLANVVRKMMTNSQ
GNEMKAMLANVLRKMMTNSQ

SEQ ID NO: 190146 - protein, 20 aa, Artificial Sequence
  Description of Artificial Sequence: Synthetic peptide
  Seed: GNEKKAKLANVVRKMMTNSQ
GNEMKAMLANVMRKMMTNSQ

SEQ ID NO: 190147 - protein, 20 aa, Artificial Sequence
  Description of Artificial Sequence: Synthetic peptide
  Seed: GNEKKAKLANVVRKMMTNSQ
GNEMKAMLANVNRKMMTNSQ

SEQ ID NO: 190148 - protein, 20 aa, Artificial Sequence
  Description of Artificial Sequence: Synthetic peptide
  Seed: GNEKKAKLANVVRKMMTNSQ
GNEMKAMLANVQRKMMTNSQ

SEQ ID NO: 190149 - protein, 20 aa, Artificial Sequence
  Description of Artificial Sequence: Synthetic peptide
  Seed: GNEKKAKLANVVRKMMTNSQ
GNEMKAMLANVSRKMMTNSQ

SEQ ID NO: 190150 - protein, 20 aa, Artificial Sequence
  Description of Artificial Sequence: Synthetic peptide
  Seed: GNEKKAKLANVVRKMMTNSQ
GNEMKAMLANVTRKMMTNSQ

SEQ ID NO: 190151 - protein, 20 aa, Artificial Sequence
  Description of Artificial Sequence: Synthetic peptide
  Seed: GNEKKAKLANVVRKMMTNSQ
GNEMKAMLANVVRKMMTNSQ

SEQ ID NO: 190152 - protein, 20 aa, Artificial Sequence
  Description of Artificial Sequence: Synthetic peptide
  Seed: GNEKKAKLANVVRKMMTNSQ
GNEMKAMLFNVIRKMMTNSQ

SEQ ID NO: 190153 - protein, 20 aa, Artificial Sequence
  Description of Artificial Sequence: Synthetic peptide
  Seed: GNEKKAKLANVVRKMMTNSQ
GNEMKAMLFNVLRKMMTNSQ

SEQ ID NO: 190154 - protein, 20 aa, Artificial Sequence
  Description of Artificial Sequence: Synthetic peptide
  Seed: GNEKKAKLANVVRKMMTNSQ
GNEMKAMLFNVMRKMMTNSQ

SEQ ID NO: 190155 - protein, 20 aa, Artificial Sequence
  Description of Artificial Sequence: Synthetic peptide
  Seed: GNEKKAKLANVVRKMMTNSQ
GNEMKAMLFNVVRKMMTNSQ

SEQ ID NO: 190156 - protein, 20 aa, Artificial Sequence
  Description of Artificial Sequence: Synthetic peptide
  Seed: GNEKKAKLANVVRKMMTNSQ
GNEMKAMLFNVYRKMMTNSQ

SEQ ID NO: 190157 - protein, 20 aa, Artificial Sequence
  Description of Artificial Sequence: Synthetic peptide
  Seed: GNEKKAKLANVVRKMMTNSQ
GNEMKAMLGNVARKMMTNSQ

SEQ ID NO: 190158 - protein, 20 aa, Artificial Sequence
  Description of Artificial Sequence: Synthetic peptide
  Seed: GNEKKAKLANVVRKMMTNSQ
GNEMKAMLGNVGRKMMTNSQ

SEQ ID NO: 190159 - protein, 20 aa, Artificial Sequence
  Description of Artificial Sequence: Synthetic peptide
  Seed: GNEKKAKLANVVRKMMTNSQ
GNEMKAMLGNVIRKMMTNSQ

SEQ ID NO: 190160 - protein, 20 aa, Artificial Sequence
  Description of Artificial Sequence: Synthetic peptide
  Seed: GNEKKAKLANVVRKMMTNSQ
GNEMKAMLGNVLRKMMTNSQ

SEQ ID NO: 190161 - protein, 20 aa, Artificial Sequence
  Description of Artificial Sequence: Synthetic peptide
  Seed: GNEKKAKLANVVRKMMTNSQ
GNEMKAMLGNVMRKMMTNSQ

SEQ ID NO: 190162 - protein, 20 aa, Artificial Sequence
  Description of Artificial Sequence: Synthetic peptide
  Seed: GNEKKAKLANVVRKMMTNSQ
GNEMKAMLGNVNRKMMTNSQ

SEQ ID NO: 190163 - protein, 20 aa, Artificial Sequence
  Description of Artificial Sequence: Synthetic peptide
  Seed: GNEKKAKLANVVRKMMTNSQ
GNEMKAMLGNVSRKMMTNSQ

SEQ ID NO: 190164 - protein, 20 aa, Artificial Sequence
  Description of Artificial Sequence: Synthetic peptide
  Seed: GNEKKAKLANVVRKMMTNSQ
GNEMKAMLGNVTRKMMTNSQ

SEQ ID NO: 190165 - protein, 20 aa, Artificial Sequence
  Description of Artificial Sequence: Synthetic peptide
  Seed: GNEKKAKLANVVRKMMTNSQ
GNEMKAMLGNVVRKMMTNSQ

SEQ ID NO: 190166 - protein, 20 aa, Artificial Sequence
  Description of Artificial Sequence: Synthetic peptide
  Seed: GNEKKAKLANVVRKMMTNSQ
GNEMKAMLINVARKMMTNSQ

SEQ ID NO: 190167 - protein, 20 aa, Artificial Sequence
  Description of Artificial Sequence: Synthetic peptide
  Seed: GNEKKAKLANVVRKMMTNSQ
GNEMKAMLINVNRKMMTNSQ

SEQ ID NO: 190168 - protein, 20 aa, Artificial Sequence
  Description of Artificial Sequence: Synthetic peptide
  Seed: GNEKKAKLANVVRKMMTNSQ
GNEMKAMLINVSRKMMTNSQ

SEQ ID NO: 190169 - protein, 20 aa, Artificial Sequence
  Description of Artificial Sequence: Synthetic peptide
  Seed: GNEKKAKLANVVRKMMTNSQ
GNEMKAMLINVTRKMMTNSQ

SEQ ID NO: 190170 - protein, 20 aa, Artificial Sequence
  Description of Artificial Sequence: Synthetic peptide
  Seed: GNEKKAKLANVVRKMMTNSQ
GNEMKAMLMNVARKMMTNSQ

SEQ ID NO: 190171 - protein, 20 aa, Artificial Sequence
  Description of Artificial Sequence: Synthetic peptide
  Seed: GNEKKAKLANVVRKMMTNSQ
GNEMKAMLNNVARKMMTNSQ

SEQ ID NO: 190172 - protein, 20 aa, Artificial Sequence
  Description of Artificial Sequence: Synthetic peptide
  Seed: GNEKKAKLANVVRKMMTNSQ
GNEMKAMLNNVIRKMMTNSQ

SEQ ID NO: 190173 - protein, 20 aa, Artificial Sequence
  Description of Artificial Sequence: Synthetic peptide
  Seed: GNEKKAKLANVVRKMMTNSQ
GNEMKAMLNNVLRKMMTNSQ

SEQ ID NO: 190174 - protein, 20 aa, Artificial Sequence
  Description of Artificial Sequence: Synthetic peptide
  Seed: GNEKKAKLANVVRKMMTNSQ
GNEMKAMLNNVNRKMMTNSQ

SEQ ID NO: 190175 - protein, 20 aa, Artificial Sequence
  Description of Artificial Sequence: Synthetic peptide
  Seed: GNEKKAKLANVVRKMMTNSQ
GNEMKAMLNNVSRKMMTNSQ

SEQ ID NO: 190176 - protein, 20 aa, Artificial Sequence
  Description of Artificial Sequence: Synthetic peptide
  Seed: GNEKKAKLANVVRKMMTNSQ
GNEMKAMLNNVVRKMMTNSQ

SEQ ID NO: 190177 - protein, 20 aa, Artificial Sequence
  Description of Artificial Sequence: Synthetic peptide
  Seed: GNEKKAKLANVVRKMMTNSQ
GNEMKAMLPNVARKMMTNSQ

SEQ ID NO: 190178 - protein, 20 aa, Artificial Sequence
  Description of Artificial Sequence: Synthetic peptide
  Seed: GNEKKAKLANVVRKMMTNSQ
GNEMKAMLPNVIRKMMTNSQ

SEQ ID NO: 190179 - protein, 20 aa, Artificial Sequence
  Description of Artificial Sequence: Synthetic peptide
  Seed: GNEKKAKLANVVRKMMTNSQ
GNEMKAMLPNVLRKMMTNSQ

SEQ ID NO: 190180 - protein, 20 aa, Artificial Sequence
  Description of Artificial Sequence: Synthetic peptide
  Seed: GNEKKAKLANVVRKMMTNSQ
GNEMKAMLPNVMRKMMTNSQ

SEQ ID NO: 190181 - protein, 20 aa, Artificial Sequence
  Description of Artificial Sequence: Synthetic peptide
  Seed: GNEKKAKLANVVRKMMTNSQ
GNEMKAMLPNVNRKMMTNSQ

SEQ ID NO: 190182 - protein, 20 aa, Artificial Sequence
  Description of Artificial Sequence: Synthetic peptide
  Seed: GNEKKAKLANVVRKMMTNSQ
GNEMKAMLPNVSRKMMTNSQ

SEQ ID NO: 190183 - protein, 20 aa, Artificial Sequence
  Description of Artificial Sequence: Synthetic peptide
  Seed: GNEKKAKLANVVRKMMTNSQ
GNEMKAMLPNVTRKMMTNSQ

SEQ ID NO: 190184 - protein, 20 aa, Artificial Sequence
  Description of Artificial Sequence: Synthetic peptide
  Seed: GNEKKAKLANVVRKMMTNSQ
GNEMKAMLPNVVRKMMTNSQ

SEQ ID NO: 190185 - protein, 20 aa, Artificial Sequence
  Description of Artificial Sequence: Synthetic peptide
  Seed: GNEKKAKLANVVRKMMTNSQ
GNEMKAMLSNVARKMMTNSQ

SEQ ID NO: 190186 - protein, 20 aa, Artificial Sequence
  Description of Artificial Sequence: Synthetic peptide
  Seed: GNEKKAKLANVVRKMMTNSQ
GNEMKAMLSNVIRKMMTNSQ

SEQ ID NO: 190187 - protein, 20 aa, Artificial Sequence
  Description of Artificial Sequence: Synthetic peptide
  Seed: GNEKKAKLANVVRKMMTNSQ
GNEMKAMLSNVLRKMMTNSQ

SEQ ID NO: 190188 - protein, 20 aa, Artificial Sequence
  Description of Artificial Sequence: Synthetic peptide
  Seed: GNEKKAKLANVVRKMMTNSQ
GNEMKAMLSNVMRKMMTNSQ

SEQ ID NO: 190189 - protein, 20 aa, Artificial Sequence
  Description of Artificial Sequence: Synthetic peptide
  Seed: GNEKKAKLANVVRKMMTNSQ
GNEMKAMLSNVNRKMMTNSQ

SEQ ID NO: 190190 - protein, 20 aa, Artificial Sequence
  Description of Artificial Sequence: Synthetic peptide
  Seed: GNEKKAKLANVVRKMMTNSQ
GNEMKAMLSNVSRKMMTNSQ

SEQ ID NO: 190191 - protein, 20 aa, Artificial Sequence
  Description of Artificial Sequence: Synthetic peptide
  Seed: GNEKKAKLANVVRKMMTNSQ
GNEMKAMLSNVTRKMMTNSQ

SEQ ID NO: 190192 - protein, 20 aa, Artificial Sequence
  Description of Artificial Sequence: Synthetic peptide
  Seed: GNEKKAKLANVVRKMMTNSQ
GNEMKAMLSNVVRKMMTNSQ

SEQ ID NO: 190193 - protein, 20 aa, Artificial Sequence
  Description of Artificial Sequence: Synthetic peptide
  Seed: GNEKKAKLANVVRKMMTNSQ
GNEMKAMLTNVARKMMTNSQ

SEQ ID NO: 190194 - protein, 20 aa, Artificial Sequence
  Description of Artificial Sequence: Synthetic peptide
  Seed: GNEKKAKLANVVRKMMTNSQ
GNEMKAMLTNVIRKMMTNSQ

SEQ ID NO: 190195 - protein, 20 aa, Artificial Sequence
  Description of Artificial Sequence: Synthetic peptide
  Seed: GNEKKAKLANVVRKMMTNSQ
GNEMKAMLTNVLRKMMTNSQ

SEQ ID NO: 190196 - protein, 20 aa, Artificial Sequence
  Description of Artificial Sequence: Synthetic peptide
  Seed: GNEKKAKLANVVRKMMTNSQ
GNEMKAMLTNVMRKMMTNSQ

SEQ ID NO: 190197 - protein, 20 aa, Artificial Sequence
  Description of Artificial Sequence: Synthetic peptide
  Seed: GNEKKAKLANVVRKMMTNSQ
GNEMKAMLTNVNRKMMTNSQ

SEQ ID NO: 190198 - protein, 20 aa, Artificial Sequence
  Description of Artificial Sequence: Synthetic peptide
  Seed: GNEKKAKLANVVRKMMTNSQ
GNEMKAMLTNVSRKMMTNSQ

SEQ ID NO: 190199 - protein, 20 aa, Artificial Sequence
  Description of Artificial Sequence: Synthetic peptide
  Seed: GNEKKAKLANVVRKMMTNSQ
GNEMKAMLTNVTRKMMTNSQ

SEQ ID NO: 190200 - protein, 20 aa, Artificial Sequence
  Description of Artificial Sequence: Synthetic peptide
  Seed: GNEKKAKLANVVRKMMTNSQ
GNEMKAMLTNVVRKMMTNSQ

SEQ ID NO: 190201 - protein, 20 aa, Artificial Sequence
  Description of Artificial Sequence: Synthetic peptide
  Seed: GNEKKAKLANVVRKMMTNSQ
GNEMKAMLVNVARKMMTNSQ

SEQ ID NO: 190202 - protein, 20 aa, Artificial Sequence
  Description of Artificial Sequence: Synthetic peptide
  Seed: GNEKKAKLANVVRKMMTNSQ
GNEMKAMLVNVIRKMMTNSQ

SEQ ID NO: 190203 - protein, 20 aa, Artificial Sequence
  Description of Artificial Sequence: Synthetic peptide
  Seed: GNEKKAKLANVVRKMMTNSQ
GNEMKAMLVNVMRKMMTNSQ

SEQ ID NO: 190204 - protein, 20 aa, Artificial Sequence
  Description of Artificial Sequence: Synthetic peptide
  Seed: GNEKKAKLANVVRKMMTNSQ
GNEMKAMLVNVNRKMMTNSQ

SEQ ID NO: 190205 - protein, 20 aa, Artificial Sequence
  Description of Artificial Sequence: Synthetic peptide
  Seed: GNEKKAKLANVVRKMMTNSQ
GNEMKAMLVNVSRKMMTNSQ

SEQ ID NO: 190206 - protein, 20 aa, Artificial Sequence
  Description of Artificial Sequence: Synthetic peptide
  Seed: GNEKKAKLANVVRKMMTNSQ
GNEMKAMLVNVTRKMMTNSQ

SEQ ID NO: 190207 - protein, 20 aa, Artificial Sequence
  Description of Artificial Sequence: Synthetic peptide
  Seed: GNEKKAKLANVVRKMMTNSQ
GNEMKAMLVNVVRKMMTNSQ

SEQ ID NO: 190208 - protein, 20 aa, Artificial Sequence
  Description of Artificial Sequence: Synthetic peptide
  Seed: GNEKKAKLANVVRKMMTNSQ
GNEMKAMLYNVIRKMMTNSQ

SEQ ID NO: 190209 - protein, 20 aa, Artificial Sequence
  Description of Artificial Sequence: Synthetic peptide
  Seed: GNEKKAKLANVVRKMMTNSQ
GNEMKAMLYNVLRKMMTNSQ

SEQ ID NO: 190210 - protein, 20 aa, Artificial Sequence
  Description of Artificial Sequence: Synthetic peptide
  Seed: GNEKKAKLANVVRKMMTNSQ
GNEMKAMLYNVVRKMMTNSQ

SEQ ID NO: 190211 - protein, 20 aa, Artificial Sequence
  Description of Artificial Sequence: Synthetic peptide
  Seed: GNEKKAKLANVVRKMMTNSQ
GNEMKANLFNVFRKMMTNSQ

SEQ ID NO: 190212 - protein, 20 aa, Artificial Sequence
  Description of Artificial Sequence: Synthetic peptide
  Seed: GNEKKAKLANVVRKMMTNSQ
GNEMKANLFNVIRKMMTNSQ

SEQ ID NO: 190213 - protein, 20 aa, Artificial Sequence
  Description of Artificial Sequence: Synthetic peptide
  Seed: GNEKKAKLANVVRKMMTNSQ
GNEMKANLFNVLRKMMTNSQ

SEQ ID NO: 190214 - protein, 20 aa, Artificial Sequence
  Description of Artificial Sequence: Synthetic peptide
  Seed: GNEKKAKLANVVRKMMTNSQ
GNEMKANLFNVMRKMMTNSQ

SEQ ID NO: 190215 - protein, 20 aa, Artificial Sequence
  Description of Artificial Sequence: Synthetic peptide
  Seed: GNEKKAKLANVVRKMMTNSQ
GNEMKANLFNVVRKMMTNSQ

SEQ ID NO: 190216 - protein, 20 aa, Artificial Sequence
  Description of Artificial Sequence: Synthetic peptide
  Seed: GNEKKAKLANVVRKMMTNSQ
GNEMKAQLANVARKMMTNSQ

SEQ ID NO: 190217 - protein, 20 aa, Artificial Sequence
  Description of Artificial Sequence: Synthetic peptide
  Seed: GNEKKAKLANVVRKMMTNSQ
GNEMKAQLANVIRKMMTNSQ

SEQ ID NO: 190218 - protein, 20 aa, Artificial Sequence
  Description of Artificial Sequence: Synthetic peptide
  Seed: GNEKKAKLANVVRKMMTNSQ
GNEMKAQLANVLRKMMTNSQ

SEQ ID NO: 190219 - protein, 20 aa, Artificial Sequence
  Description of Artificial Sequence: Synthetic peptide
  Seed: GNEKKAKLANVVRKMMTNSQ
GNEMKAQLANVVRKMMTNSQ

SEQ ID NO: 190220 - protein, 20 aa, Artificial Sequence
  Description of Artificial Sequence: Synthetic peptide
  Seed: GNEKKAKLANVVRKMMTNSQ
GNEMKAQLFNVFRKMMTNSQ

SEQ ID NO: 190221 - protein, 20 aa, Artificial Sequence
  Description of Artificial Sequence: Synthetic peptide
  Seed: GNEKKAKLANVVRKMMTNSQ
GNEMKAQLFNVIRKMMTNSQ

SEQ ID NO: 190222 - protein, 20 aa, Artificial Sequence
  Description of Artificial Sequence: Synthetic peptide
  Seed: GNEKKAKLANVVRKMMTNSQ
GNEMKAQLFNVLRKMMTNSQ

SEQ ID NO: 190223 - protein, 20 aa, Artificial Sequence
  Description of Artificial Sequence: Synthetic peptide
  Seed: GNEKKAKLANVVRKMMTNSQ
GNEMKAQLFNVMRKMMTNSQ

SEQ ID NO: 190224 - protein, 20 aa, Artificial Sequence
  Description of Artificial Sequence: Synthetic peptide
  Seed: GNEKKAKLANVVRKMMTNSQ
GNEMKAQLFNVVRKMMTNSQ

SEQ ID NO: 190225 - protein, 20 aa, Artificial Sequence
  Description of Artificial Sequence: Synthetic peptide
  Seed: GNEKKAKLANVVRKMMTNSQ
GNEMKAQLGNVARKMMTNSQ

SEQ ID NO: 190226 - protein, 20 aa, Artificial Sequence
  Description of Artificial Sequence: Synthetic peptide
  Seed: GNEKKAKLANVVRKMMTNSQ
GNEMKAQLGNVIRKMMTNSQ

SEQ ID NO: 190227 - protein, 20 aa, Artificial Sequence
  Description of Artificial Sequence: Synthetic peptide
  Seed: GNEKKAKLANVVRKMMTNSQ
GNEMKAQLGNVLRKMMTNSQ

SEQ ID NO: 190228 - protein, 20 aa, Artificial Sequence
  Description of Artificial Sequence: Synthetic peptide
  Seed: GNEKKAKLANVVRKMMTNSQ
GNEMKAQLGNVVRKMMTNSQ

SEQ ID NO: 190229 - protein, 20 aa, Artificial Sequence
  Description of Artificial Sequence: Synthetic peptide
  Seed: GNEKKAKLANVVRKMMTNSQ
GNEMKAQLSNVARKMMTNSQ

SEQ ID NO: 190230 - protein, 20 aa, Artificial Sequence
  Description of Artificial Sequence: Synthetic peptide
  Seed: GNEKKAKLANVVRKMMTNSQ
GNEMKAQLSNVIRKMMTNSQ

SEQ ID NO: 190231 - protein, 20 aa, Artificial Sequence
  Description of Artificial Sequence: Synthetic peptide
  Seed: GNEKKAKLANVVRKMMTNSQ
GNEMKAQLSNVLRKMMTNSQ

SEQ ID NO: 190232 - protein, 20 aa, Artificial Sequence
  Description of Artificial Sequence: Synthetic peptide
  Seed: GNEKKAKLANVVRKMMTNSQ
GNEMKAQLSNVVRKMMTNSQ

SEQ ID NO: 190233 - protein, 20 aa, Artificial Sequence
  Description of Artificial Sequence: Synthetic peptide
  Seed: GNEKKAKLANVVRKMMTNSQ
GNEMKARLFNVFRKMMTNSQ

SEQ ID NO: 190234 - protein, 20 aa, Artificial Sequence
  Description of Artificial Sequence: Synthetic peptide
  Seed: GNEKKAKLANVVRKMMTNSQ
GNEMKARLFNVIRKMMTNSQ

SEQ ID NO: 190235 - protein, 20 aa, Artificial Sequence
  Description of Artificial Sequence: Synthetic peptide
  Seed: GNEKKAKLANVVRKMMTNSQ
GNEMKARLFNVLRKMMTNSQ

SEQ ID NO: 190236 - protein, 20 aa, Artificial Sequence
  Description of Artificial Sequence: Synthetic peptide
  Seed: GNEKKAKLANVVRKMMTNSQ
GNEMKASLANVARKMMTNSQ

SEQ ID NO: 190237 - protein, 20 aa, Artificial Sequence
  Description of Artificial Sequence: Synthetic peptide
  Seed: GNEKKAKLANVVRKMMTNSQ
GNEMKASLANVIRKMMTNSQ

SEQ ID NO: 190238 - protein, 20 aa, Artificial Sequence
  Description of Artificial Sequence: Synthetic peptide
  Seed: GNEKKAKLANVVRKMMTNSQ
GNEMKASLANVLRKMMTNSQ

SEQ ID NO: 190239 - protein, 20 aa, Artificial Sequence
  Description of Artificial Sequence: Synthetic peptide
  Seed: GNEKKAKLANVVRKMMTNSQ
GNEMKASLANVVRKMMTNSQ

SEQ ID NO: 190240 - protein, 20 aa, Artificial Sequence
  Description of Artificial Sequence: Synthetic peptide
  Seed: GNEKKAKLANVVRKMMTNSQ
GNEMKASLFNVARKMMTNSQ

SEQ ID NO: 190241 - protein, 20 aa, Artificial Sequence
  Description of Artificial Sequence: Synthetic peptide
  Seed: GNEKKAKLANVVRKMMTNSQ
GNEMKASLFNVFRKMMTNSQ

SEQ ID NO: 190242 - protein, 20 aa, Artificial Sequence
  Description of Artificial Sequence: Synthetic peptide
  Seed: GNEKKAKLANVVRKMMTNSQ
GNEMKASLFNVIRKMMTNSQ

SEQ ID NO: 190243 - protein, 20 aa, Artificial Sequence
  Description of Artificial Sequence: Synthetic peptide
  Seed: GNEKKAKLANVVRKMMTNSQ
GNEMKASLFNVLRKMMTNSQ

SEQ ID NO: 190244 - protein, 20 aa, Artificial Sequence
  Description of Artificial Sequence: Synthetic peptide
  Seed: GNEKKAKLANVVRKMMTNSQ
GNEMKASLFNVMRKMMTNSQ

SEQ ID NO: 190245 - protein, 20 aa, Artificial Sequence
  Description of Artificial Sequence: Synthetic peptide
  Seed: GNEKKAKLANVVRKMMTNSQ
GNEMKASLFNVNRKMMTNSQ

SEQ ID NO: 190246 - protein, 20 aa, Artificial Sequence
  Description of Artificial Sequence: Synthetic peptide
  Seed: GNEKKAKLANVVRKMMTNSQ
GNEMKASLFNVSRKMMTNSQ

SEQ ID NO: 190247 - protein, 20 aa, Artificial Sequence
  Description of Artificial Sequence: Synthetic peptide
  Seed: GNEKKAKLANVVRKMMTNSQ
GNEMKASLFNVTRKMMTNSQ

SEQ ID NO: 190248 - protein, 20 aa, Artificial Sequence
  Description of Artificial Sequence: Synthetic peptide
  Seed: GNEKKAKLANVVRKMMTNSQ
GNEMKASLFNVVRKMMTNSQ

SEQ ID NO: 190249 - protein, 20 aa, Artificial Sequence
  Description of Artificial Sequence: Synthetic peptide
  Seed: GNEKKAKLANVVRKMMTNSQ
GNEMKASLFNVYRKMMTNSQ

SEQ ID NO: 190250 - protein, 20 aa, Artificial Sequence
  Description of Artificial Sequence: Synthetic peptide
  Seed: GNEKKAKLANVVRKMMTNSQ
GNEMKASLWNVIRKMMTNSQ

SEQ ID NO: 190251 - protein, 20 aa, Artificial Sequence
  Description of Artificial Sequence: Synthetic peptide
  Seed: GNEKKAKLANVVRKMMTNSQ
GNEMKASLWNVVRKMMTNSQ

SEQ ID NO: 190252 - protein, 20 aa, Artificial Sequence
  Description of Artificial Sequence: Synthetic peptide
  Seed: GNEKKAKLANVVRKMMTNSQ
GNEMKASLYNVFRKMMTNSQ

SEQ ID NO: 190253 - protein, 20 aa, Artificial Sequence
  Description of Artificial Sequence: Synthetic peptide
  Seed: GNEKKAKLANVVRKMMTNSQ
GNEMKASLYNVIRKMMTNSQ

SEQ ID NO: 190254 - protein, 20 aa, Artificial Sequence
  Description of Artificial Sequence: Synthetic peptide
  Seed: GNEKKAKLANVVRKMMTNSQ
GNEMKASLYNVLRKMMTNSQ

SEQ ID NO: 190255 - protein, 20 aa, Artificial Sequence
  Description of Artificial Sequence: Synthetic peptide
  Seed: GNEKKAKLANVVRKMMTNSQ
GNEMKASLYNVVRKMMTNSQ

SEQ ID NO: 190256 - protein, 20 aa, Artificial Sequence
  Description of Artificial Sequence: Synthetic peptide
  Seed: GNEKKAKLANVVRKMMTNSQ
GNEMKATLANVIRKMMTNSQ

SEQ ID NO: 190257 - protein, 20 aa, Artificial Sequence
  Description of Artificial Sequence: Synthetic peptide
  Seed: GNEKKAKLANVVRKMMTNSQ
GNEMKATLANVVRKMMTNSQ

SEQ ID NO: 190258 - protein, 20 aa, Artificial Sequence
  Description of Artificial Sequence: Synthetic peptide
  Seed: GNEKKAKLANVVRKMMTNSQ
GNEMKATLFNVARKMMTNSQ

SEQ ID NO: 190259 - protein, 20 aa, Artificial Sequence
  Description of Artificial Sequence: Synthetic peptide
  Seed: GNEKKAKLANVVRKMMTNSQ
GNEMKATLFNVFRKMMTNSQ

SEQ ID NO: 190260 - protein, 20 aa, Artificial Sequence
  Description of Artificial Sequence: Synthetic peptide
  Seed: GNEKKAKLANVVRKMMTNSQ
GNEMKATLFNVIRKMMTNSQ

SEQ ID NO: 190261 - protein, 20 aa, Artificial Sequence
  Description of Artificial Sequence: Synthetic peptide
  Seed: GNEKKAKLANVVRKMMTNSQ
GNEMKATLFNVLRKMMTNSQ

SEQ ID NO: 190262 - protein, 20 aa, Artificial Sequence
  Description of Artificial Sequence: Synthetic peptide
  Seed: GNEKKAKLANVVRKMMTNSQ
GNEMKATLFNVMRKMMTNSQ

SEQ ID NO: 190263 - protein, 20 aa, Artificial Sequence
  Description of Artificial Sequence: Synthetic peptide
  Seed: GNEKKAKLANVVRKMMTNSQ
GNEMKATLFNVNRKMMTNSQ

SEQ ID NO: 190264 - protein, 20 aa, Artificial Sequence
  Description of Artificial Sequence: Synthetic peptide
  Seed: GNEKKAKLANVVRKMMTNSQ
GNEMKATLFNVSRKMMTNSQ

SEQ ID NO: 190265 - protein, 20 aa, Artificial Sequence
  Description of Artificial Sequence: Synthetic peptide
  Seed: GNEKKAKLANVVRKMMTNSQ
GNEMKATLFNVTRKMMTNSQ

SEQ ID NO: 190266 - protein, 20 aa, Artificial Sequence
  Description of Artificial Sequence: Synthetic peptide
  Seed: GNEKKAKLANVVRKMMTNSQ
GNEMKATLFNVVRKMMTNSQ

SEQ ID NO: 190267 - protein, 20 aa, Artificial Sequence
  Description of Artificial Sequence: Synthetic peptide
  Seed: GNEKKAKLANVVRKMMTNSQ
GNEMKATLFNVYRKMMTNSQ

SEQ ID NO: 190268 - protein, 20 aa, Artificial Sequence
  Description of Artificial Sequence: Synthetic peptide
  Seed: GNEKKAKLANVVRKMMTNSQ
GNEMKATLLNVIRKMMTNSQ

SEQ ID NO: 190269 - protein, 20 aa, Artificial Sequence
  Description of Artificial Sequence: Synthetic peptide
  Seed: GNEKKAKLANVVRKMMTNSQ
GNEMKATLLNVVRKMMTNSQ

SEQ ID NO: 190270 - protein, 20 aa, Artificial Sequence
  Description of Artificial Sequence: Synthetic peptide
  Seed: GNEKKAKLANVVRKMMTNSQ
GNEMKATLWNVIRKMMTNSQ

SEQ ID NO: 190271 - protein, 20 aa, Artificial Sequence
  Description of Artificial Sequence: Synthetic peptide
  Seed: GNEKKAKLANVVRKMMTNSQ
GNEMKATLWNVLRKMMTNSQ

SEQ ID NO: 190272 - protein, 20 aa, Artificial Sequence
  Description of Artificial Sequence: Synthetic peptide
  Seed: GNEKKAKLANVVRKMMTNSQ
GNEMKATLWNVVRKMMTNSQ

SEQ ID NO: 190273 - protein, 20 aa, Artificial Sequence
  Description of Artificial Sequence: Synthetic peptide
  Seed: GNEKKAKLANVVRKMMTNSQ
GNEMKATLYNVFRKMMTNSQ

SEQ ID NO: 190274 - protein, 20 aa, Artificial Sequence
  Description of Artificial Sequence: Synthetic peptide
  Seed: GNEKKAKLANVVRKMMTNSQ
GNEMKATLYNVIRKMMTNSQ

SEQ ID NO: 190275 - protein, 20 aa, Artificial Sequence
  Description of Artificial Sequence: Synthetic peptide
  Seed: GNEKKAKLANVVRKMMTNSQ
GNEMKATLYNVLRKMMTNSQ

SEQ ID NO: 190276 - protein, 20 aa, Artificial Sequence
  Description of Artificial Sequence: Synthetic peptide
  Seed: GNEKKAKLANVVRKMMTNSQ
GNEMKATLYNVVRKMMTNSQ

SEQ ID NO: 190277 - protein, 20 aa, Artificial Sequence
  Description of Artificial Sequence: Synthetic peptide
  Seed: GNEKKAKLANVVRKMMTNSQ
GNEMKAVLANVARKMMTNSQ

SEQ ID NO: 190278 - protein, 20 aa, Artificial Sequence
  Description of Artificial Sequence: Synthetic peptide
  Seed: GNEKKAKLANVVRKMMTNSQ
GNEMKAVLANVIRKMMTNSQ

SEQ ID NO: 190279 - protein, 20 aa, Artificial Sequence
  Description of Artificial Sequence: Synthetic peptide
  Seed: GNEKKAKLANVVRKMMTNSQ
GNEMKAVLANVLRKMMTNSQ

SEQ ID NO: 190280 - protein, 20 aa, Artificial Sequence
  Description of Artificial Sequence: Synthetic peptide
  Seed: GNEKKAKLANVVRKMMTNSQ
GNEMKAVLANVNRKMMTNSQ

SEQ ID NO: 190281 - protein, 20 aa, Artificial Sequence
  Description of Artificial Sequence: Synthetic peptide
  Seed: GNEKKAKLANVVRKMMTNSQ
GNEMKAVLANVSRKMMTNSQ

SEQ ID NO: 190282 - protein, 20 aa, Artificial Sequence
  Description of Artificial Sequence: Synthetic peptide
  Seed: GNEKKAKLANVVRKMMTNSQ
GNEMKAVLANVVRKMMTNSQ

SEQ ID NO: 190283 - protein, 20 aa, Artificial Sequence
  Description of Artificial Sequence: Synthetic peptide
  Seed: GNEKKAKLANVVRKMMTNSQ
GNEMKAVLFNVARKMMTNSQ

SEQ ID NO: 190284 - protein, 20 aa, Artificial Sequence
  Description of Artificial Sequence: Synthetic peptide
  Seed: GNEKKAKLANVVRKMMTNSQ
GNEMKAVLFNVIRKMMTNSQ

SEQ ID NO: 190285 - protein, 20 aa, Artificial Sequence
  Description of Artificial Sequence: Synthetic peptide
  Seed: GNEKKAKLANVVRKMMTNSQ
GNEMKAVLFNVLRKMMTNSQ

SEQ ID NO: 190286 - protein, 20 aa, Artificial Sequence
  Description of Artificial Sequence: Synthetic peptide
  Seed: GNEKKAKLANVVRKMMTNSQ
GNEMKAVLFNVMRKMMTNSQ

SEQ ID NO: 190287 - protein, 20 aa, Artificial Sequence
  Description of Artificial Sequence: Synthetic peptide
  Seed: GNEKKAKLANVVRKMMTNSQ
GNEMKAVLFNVNRKMMTNSQ

SEQ ID NO: 190288 - protein, 20 aa, Artificial Sequence
  Description of Artificial Sequence: Synthetic peptide
  Seed: GNEKKAKLANVVRKMMTNSQ
GNEMKAVLFNVSRKMMTNSQ

SEQ ID NO: 190289 - protein, 20 aa, Artificial Sequence
  Description of Artificial Sequence: Synthetic peptide
  Seed: GNEKKAKLANVVRKMMTNSQ
GNEMKAVLFNVTRKMMTNSQ

SEQ ID NO: 190290 - protein, 20 aa, Artificial Sequence
  Description of Artificial Sequence: Synthetic peptide
  Seed: GNEKKAKLANVVRKMMTNSQ
GNEMKAVLFNVVRKMMTNSQ

SEQ ID NO: 190291 - protein, 20 aa, Artificial Sequence
  Description of Artificial Sequence: Synthetic peptide
  Seed: GNEKKAKLANVVRKMMTNSQ
GNEMKAVLFNVYRKMMTNSQ

SEQ ID NO: 190292 - protein, 20 aa, Artificial Sequence
  Description of Artificial Sequence: Synthetic peptide
  Seed: GNEKKAKLANVVRKMMTNSQ
GNEMKAVLGNVARKMMTNSQ

SEQ ID NO: 190293 - protein, 20 aa, Artificial Sequence
  Description of Artificial Sequence: Synthetic peptide
  Seed: GNEKKAKLANVVRKMMTNSQ
GNEMKAVLGNVVRKMMTNSQ

SEQ ID NO: 190294 - protein, 20 aa, Artificial Sequence
  Description of Artificial Sequence: Synthetic peptide
  Seed: GNEKKAKLANVVRKMMTNSQ
GNEMKAVLPNVARKMMTNSQ

SEQ ID NO: 190295 - protein, 20 aa, Artificial Sequence
  Description of Artificial Sequence: Synthetic peptide
  Seed: GNEKKAKLANVVRKMMTNSQ
GNEMKAVLSNVARKMMTNSQ

SEQ ID NO: 190296 - protein, 20 aa, Artificial Sequence
  Description of Artificial Sequence: Synthetic peptide
  Seed: GNEKKAKLANVVRKMMTNSQ
GNEMKAVLSNVNRKMMTNSQ

SEQ ID NO: 190297 - protein, 20 aa, Artificial Sequence
  Description of Artificial Sequence: Synthetic peptide
  Seed: GNEKKAKLANVVRKMMTNSQ
GNEMKAVLSNVVRKMMTNSQ

SEQ ID NO: 190298 - protein, 20 aa, Artificial Sequence
  Description of Artificial Sequence: Synthetic peptide
  Seed: GNEKKAKLANVVRKMMTNSQ
GNEMKAVLWNVIRKMMTNSQ

SEQ ID NO: 190299 - protein, 20 aa, Artificial Sequence
  Description of Artificial Sequence: Synthetic peptide
  Seed: GNEKKAKLANVVRKMMTNSQ
GNEMKAVLWNVLRKMMTNSQ

SEQ ID NO: 190300 - protein, 20 aa, Artificial Sequence
  Description of Artificial Sequence: Synthetic peptide
  Seed: GNEKKAKLANVVRKMMTNSQ
GNEMKAVLWNVVRKMMTNSQ

SEQ ID NO: 190301 - protein, 20 aa, Artificial Sequence
  Description of Artificial Sequence: Synthetic peptide
  Seed: GNEKKAKLANVVRKMMTNSQ
GNEMKAVLYNVIRKMMTNSQ

SEQ ID NO: 190302 - protein, 20 aa, Artificial Sequence
  Description of Artificial Sequence: Synthetic peptide
  Seed: GNEKKAKLANVVRKMMTNSQ
GNEMKAVLYNVLRKMMTNSQ

SEQ ID NO: 190303 - protein, 20 aa, Artificial Sequence
  Description of Artificial Sequence: Synthetic peptide
  Seed: GNEKKAKLANVVRKMMTNSQ
GNEMKAVLYNVMRKMMTNSQ

SEQ ID NO: 190304 - protein, 20 aa, Artificial Sequence
  Description of Artificial Sequence: Synthetic peptide
  Seed: GNEKKAKLANVVRKMMTNSQ
GNEMKAVLYNVVRKMMTNSQ

SEQ ID NO: 190305 - protein, 20 aa, Artificial Sequence
  Description of Artificial Sequence: Synthetic peptide
  Seed: GNEKKAKLANVVRKMMTNSQ
GNEMKAWLFNVIRKMMTNSQ

SEQ ID NO: 190306 - protein, 20 aa, Artificial Sequence
  Description of Artificial Sequence: Synthetic peptide
  Seed: GNEKKAKLANVVRKMMTNSQ
GNEMKAWLFNVLRKMMTNSQ

SEQ ID NO: 190307 - protein, 20 aa, Artificial Sequence
  Description of Artificial Sequence: Synthetic peptide
  Seed: GNEKKAKLANVVRKMMTNSQ
GNEMKAWLFNVMRKMMTNSQ

SEQ ID NO: 190308 - protein, 20 aa, Artificial Sequence
  Description of Artificial Sequence: Synthetic peptide
  Seed: GNEKKAKLANVVRKMMTNSQ
GNEMKAWLFNVVRKMMTNSQ

SEQ ID NO: 190309 - protein, 20 aa, Artificial Sequence
  Description of Artificial Sequence: Synthetic peptide
  Seed: GNEKKAKLANVVRKMMTNSQ
GNEMKAWLLNVIRKMMTNSQ

SEQ ID NO: 190310 - protein, 20 aa, Artificial Sequence
  Description of Artificial Sequence: Synthetic peptide
  Seed: GNEKKAKLANVVRKMMTNSQ
GNEMKAWLLNVLRKMMTNSQ

SEQ ID NO: 190311 - protein, 20 aa, Artificial Sequence
  Description of Artificial Sequence: Synthetic peptide
  Seed: GNEKKAKLANVVRKMMTNSQ
GNEMKAWLYNVVRKMMTNSQ

SEQ ID NO: 190312 - protein, 20 aa, Artificial Sequence
  Description of Artificial Sequence: Synthetic peptide
  Seed: GNEKKAKLANVVRKMMTNSQ
GNEMKAYLFNVIRKMMTNSQ

SEQ ID NO: 190313 - protein, 20 aa, Artificial Sequence
  Description of Artificial Sequence: Synthetic peptide
  Seed: GNEKKAKLANVVRKMMTNSQ
GNEMKAYLFNVLRKMMTNSQ

SEQ ID NO: 190314 - protein, 20 aa, Artificial Sequence
  Description of Artificial Sequence: Synthetic peptide
  Seed: GNEKKAKLANVVRKMMTNSQ
GNEMKAYLFNVMRKMMTNSQ

SEQ ID NO: 190315 - protein, 20 aa, Artificial Sequence
  Description of Artificial Sequence: Synthetic peptide
  Seed: GNEKKAKLANVVRKMMTNSQ
GNEMKAYLFNVVRKMMTNSQ

SEQ ID NO: 190316 - protein, 20 aa, Artificial Sequence
  Description of Artificial Sequence: Synthetic peptide
  Seed: GNEKKAKLANVVRKMMTNSQ
GNEMKAYLINVARKMMTNSQ

SEQ ID NO: 190317 - protein, 20 aa, Artificial Sequence
  Description of Artificial Sequence: Synthetic peptide
  Seed: GNEKKAKLANVVRKMMTNSQ
GNEQKAILFNVVRKMMTNSQ

SEQ ID NO: 190318 - protein, 20 aa, Artificial Sequence
  Description of Artificial Sequence: Synthetic peptide
  Seed: GNEKKAKLANVVRKMMTNSQ
GNEQKAVLFNVIRKMMTNSQ

SEQ ID NO: 190319 - protein, 20 aa, Artificial Sequence
  Description of Artificial Sequence: Synthetic peptide
  Seed: GNEKKAKLANVVRKMMTNSQ
GNERKATLFNVIRKMMTNSQ

SEQ ID NO: 190320 - protein, 20 aa, Artificial Sequence
  Description of Artificial Sequence: Synthetic peptide
  Seed: GNEKKAKLANVVRKMMTNSQ
GNERKATLFNVLRKMMTNSQ

SEQ ID NO: 190321 - protein, 20 aa, Artificial Sequence
  Description of Artificial Sequence: Synthetic peptide
  Seed: GNEKKAKLANVVRKMMTNSQ
GNEVKAALANVARKMMTNSQ

SEQ ID NO: 190322 - protein, 20 aa, Artificial Sequence
  Description of Artificial Sequence: Synthetic peptide
  Seed: GNEKKAKLANVVRKMMTNSQ
GNEVKAALANVIRKMMTNSQ

SEQ ID NO: 190323 - protein, 20 aa, Artificial Sequence
  Description of Artificial Sequence: Synthetic peptide
  Seed: GNEKKAKLANVVRKMMTNSQ
GNEVKAALANVLRKMMTNSQ

SEQ ID NO: 190324 - protein, 20 aa, Artificial Sequence
  Description of Artificial Sequence: Synthetic peptide
  Seed: GNEKKAKLANVVRKMMTNSQ
GNEVKAALANVMRKMMTNSQ

SEQ ID NO: 190325 - protein, 20 aa, Artificial Sequence
  Description of Artificial Sequence: Synthetic peptide
  Seed: GNEKKAKLANVVRKMMTNSQ
GNEVKAALANVNRKMMTNSQ

SEQ ID NO: 190326 - protein, 20 aa, Artificial Sequence
  Description of Artificial Sequence: Synthetic peptide
  Seed: GNEKKAKLANVVRKMMTNSQ
GNEVKAALANVSRKMMTNSQ

SEQ ID NO: 190327 - protein, 20 aa, Artificial Sequence
  Description of Artificial Sequence: Synthetic peptide
  Seed: GNEKKAKLANVVRKMMTNSQ
GNEVKAALANVTRKMMTNSQ

SEQ ID NO: 190328 - protein, 20 aa, Artificial Sequence
  Description of Artificial Sequence: Synthetic peptide
  Seed: GNEKKAKLANVVRKMMTNSQ
GNEVKAALANVVRKMMTNSQ

SEQ ID NO: 190329 - protein, 20 aa, Artificial Sequence
  Description of Artificial Sequence: Synthetic peptide
  Seed: GNEKKAKLANVVRKMMTNSQ
GNEVKAALFNVFRKMMTNSQ

SEQ ID NO: 190330 - protein, 20 aa, Artificial Sequence
  Description of Artificial Sequence: Synthetic peptide
  Seed: GNEKKAKLANVVRKMMTNSQ
GNEVKAALFNVIRKMMTNSQ

SEQ ID NO: 190331 - protein, 20 aa, Artificial Sequence
  Description of Artificial Sequence: Synthetic peptide
  Seed: GNEKKAKLANVVRKMMTNSQ
GNEVKAALFNVLRKMMTNSQ

SEQ ID NO: 190332 - protein, 20 aa, Artificial Sequence
  Description of Artificial Sequence: Synthetic peptide
  Seed: GNEKKAKLANVVRKMMTNSQ
GNEVKAALFNVMRKMMTNSQ

SEQ ID NO: 190333 - protein, 20 aa, Artificial Sequence
  Description of Artificial Sequence: Synthetic peptide
  Seed: GNEKKAKLANVVRKMMTNSQ
GNEVKAALFNVTRKMMTNSQ

SEQ ID NO: 190334 - protein, 20 aa, Artificial Sequence
  Description of Artificial Sequence: Synthetic peptide
  Seed: GNEKKAKLANVVRKMMTNSQ
GNEVKAALFNVVRKMMTNSQ

SEQ ID NO: 190335 - protein, 20 aa, Artificial Sequence
  Description of Artificial Sequence: Synthetic peptide
  Seed: GNEKKAKLANVVRKMMTNSQ
GNEVKAALFNVYRKMMTNSQ

SEQ ID NO: 190336 - protein, 20 aa, Artificial Sequence
  Description of Artificial Sequence: Synthetic peptide
  Seed: GNEKKAKLANVVRKMMTNSQ
GNEVKAALGNVARKMMTNSQ

SEQ ID NO: 190337 - protein, 20 aa, Artificial Sequence
  Description of Artificial Sequence: Synthetic peptide
  Seed: GNEKKAKLANVVRKMMTNSQ
GNEVKAALGNVIRKMMTNSQ

SEQ ID NO: 190338 - protein, 20 aa, Artificial Sequence
  Description of Artificial Sequence: Synthetic peptide
  Seed: GNEKKAKLANVVRKMMTNSQ
GNEVKAALGNVLRKMMTNSQ

SEQ ID NO: 190339 - protein, 20 aa, Artificial Sequence
  Description of Artificial Sequence: Synthetic peptide
  Seed: GNEKKAKLANVVRKMMTNSQ
GNEVKAALGNVVRKMMTNSQ

SEQ ID NO: 190340 - protein, 20 aa, Artificial Sequence
  Description of Artificial Sequence: Synthetic peptide
  Seed: GNEKKAKLANVVRKMMTNSQ
GNEVKAALPNVARKMMTNSQ

SEQ ID NO: 190341 - protein, 20 aa, Artificial Sequence
  Description of Artificial Sequence: Synthetic peptide
  Seed: GNEKKAKLANVVRKMMTNSQ
GNEVKAALPNVIRKMMTNSQ

SEQ ID NO: 190342 - protein, 20 aa, Artificial Sequence
  Description of Artificial Sequence: Synthetic peptide
  Seed: GNEKKAKLANVVRKMMTNSQ
GNEVKAALPNVVRKMMTNSQ

SEQ ID NO: 190343 - protein, 20 aa, Artificial Sequence
  Description of Artificial Sequence: Synthetic peptide
  Seed: GNEKKAKLANVVRKMMTNSQ
GNEVKAALSNVARKMMTNSQ

SEQ ID NO: 190344 - protein, 20 aa, Artificial Sequence
  Description of Artificial Sequence: Synthetic peptide
  Seed: GNEKKAKLANVVRKMMTNSQ
GNEVKAALSNVIRKMMTNSQ

SEQ ID NO: 190345 - protein, 20 aa, Artificial Sequence
  Description of Artificial Sequence: Synthetic peptide
  Seed: GNEKKAKLANVVRKMMTNSQ
GNEVKAALSNVLRKMMTNSQ

SEQ ID NO: 190346 - protein, 20 aa, Artificial Sequence
  Description of Artificial Sequence: Synthetic peptide
  Seed: GNEKKAKLANVVRKMMTNSQ
GNEVKAALSNVVRKMMTNSQ

SEQ ID NO: 190347 - protein, 20 aa, Artificial Sequence
  Description of Artificial Sequence: Synthetic peptide
  Seed: GNEKKAKLANVVRKMMTNSQ
GNEVKAALYNVFRKMMTNSQ

SEQ ID NO: 190348 - protein, 20 aa, Artificial Sequence
  Description of Artificial Sequence: Synthetic peptide
  Seed: GNEKKAKLANVVRKMMTNSQ
GNEVKAALYNVIRKMMTNSQ

SEQ ID NO: 190349 - protein, 20 aa, Artificial Sequence
  Description of Artificial Sequence: Synthetic peptide
  Seed: GNEKKAKLANVVRKMMTNSQ
GNEVKAALYNVLRKMMTNSQ

SEQ ID NO: 190350 - protein, 20 aa, Artificial Sequence
  Description of Artificial Sequence: Synthetic peptide
  Seed: GNEKKAKLANVVRKMMTNSQ
GNEVKAALYNVVRKMMTNSQ

SEQ ID NO: 190351 - protein, 20 aa, Artificial Sequence
  Description of Artificial Sequence: Synthetic peptide
  Seed: GNEKKAKLANVVRKMMTNSQ
GNEVKAELANVVRKMMTNSQ

SEQ ID NO: 190352 - protein, 20 aa, Artificial Sequence
  Description of Artificial Sequence: Synthetic peptide
  Seed: GNEKKAKLANVVRKMMTNSQ
GNEVKAELFNVARKMMTNSQ

SEQ ID NO: 190353 - protein, 20 aa, Artificial Sequence
  Description of Artificial Sequence: Synthetic peptide
  Seed: GNEKKAKLANVVRKMMTNSQ
GNEVKAELFNVFRKMMTNSQ

SEQ ID NO: 190354 - protein, 20 aa, Artificial Sequence
  Description of Artificial Sequence: Synthetic peptide
  Seed: GNEKKAKLANVVRKMMTNSQ
GNEVKAELFNVIRKMMTNSQ

SEQ ID NO: 190355 - protein, 20 aa, Artificial Sequence
  Description of Artificial Sequence: Synthetic peptide
  Seed: GNEKKAKLANVVRKMMTNSQ
GNEVKAELFNVLRKMMTNSQ

SEQ ID NO: 190356 - protein, 20 aa, Artificial Sequence
  Description of Artificial Sequence: Synthetic peptide
  Seed: GNEKKAKLANVVRKMMTNSQ
GNEVKAELFNVMRKMMTNSQ

SEQ ID NO: 190357 - protein, 20 aa, Artificial Sequence
  Description of Artificial Sequence: Synthetic peptide
  Seed: GNEKKAKLANVVRKMMTNSQ
GNEVKAELFNVTRKMMTNSQ

SEQ ID NO: 190358 - protein, 20 aa, Artificial Sequence
  Description of Artificial Sequence: Synthetic peptide
  Seed: GNEKKAKLANVVRKMMTNSQ
GNEVKAELFNVVRKMMTNSQ

SEQ ID NO: 190359 - protein, 20 aa, Artificial Sequence
  Description of Artificial Sequence: Synthetic peptide
  Seed: GNEKKAKLANVVRKMMTNSQ
GNEVKAELFNVYRKMMTNSQ

SEQ ID NO: 190360 - protein, 20 aa, Artificial Sequence
  Description of Artificial Sequence: Synthetic peptide
  Seed: GNEKKAKLANVVRKMMTNSQ
GNEVKAELYNVFRKMMTNSQ

SEQ ID NO: 190361 - protein, 20 aa, Artificial Sequence
  Description of Artificial Sequence: Synthetic peptide
  Seed: GNEKKAKLANVVRKMMTNSQ
GNEVKAELYNVIRKMMTNSQ

SEQ ID NO: 190362 - protein, 20 aa, Artificial Sequence
  Description of Artificial Sequence: Synthetic peptide
  Seed: GNEKKAKLANVVRKMMTNSQ
GNEVKAELYNVLRKMMTNSQ

SEQ ID NO: 190363 - protein, 20 aa, Artificial Sequence
  Description of Artificial Sequence: Synthetic peptide
  Seed: GNEKKAKLANVVRKMMTNSQ
GNEVKAELYNVVRKMMTNSQ

SEQ ID NO: 190364 - protein, 20 aa, Artificial Sequence
  Description of Artificial Sequence: Synthetic peptide
  Seed: GNEKKAKLANVVRKMMTNSQ
GNEVKAFLANVIRKMMTNSQ

SEQ ID NO: 190365 - protein, 20 aa, Artificial Sequence
  Description of Artificial Sequence: Synthetic peptide
  Seed: GNEKKAKLANVVRKMMTNSQ
GNEVKAFLANVVRKMMTNSQ

SEQ ID NO: 190366 - protein, 20 aa, Artificial Sequence
  Description of Artificial Sequence: Synthetic peptide
  Seed: GNEKKAKLANVVRKMMTNSQ
GNEVKAFLDNVARKMMTNSQ

SEQ ID NO: 190367 - protein, 20 aa, Artificial Sequence
  Description of Artificial Sequence: Synthetic peptide
  Seed: GNEKKAKLANVVRKMMTNSQ
GNEVKAFLDNVIRKMMTNSQ

SEQ ID NO: 190368 - protein, 20 aa, Artificial Sequence
  Description of Artificial Sequence: Synthetic peptide
  Seed: GNEKKAKLANVVRKMMTNSQ
GNEVKAFLDNVLRKMMTNSQ

SEQ ID NO: 190369 - protein, 20 aa, Artificial Sequence
  Description of Artificial Sequence: Synthetic peptide
  Seed: GNEKKAKLANVVRKMMTNSQ
GNEVKAFLDNVVRKMMTNSQ

SEQ ID NO: 190370 - protein, 20 aa, Artificial Sequence
  Description of Artificial Sequence: Synthetic peptide
  Seed: GNEKKAKLANVVRKMMTNSQ
GNEVKAFLFNVARKMMTNSQ

SEQ ID NO: 190371 - protein, 20 aa, Artificial Sequence
  Description of Artificial Sequence: Synthetic peptide
  Seed: GNEKKAKLANVVRKMMTNSQ
GNEVKAFLFNVERKMMTNSQ

SEQ ID NO: 190372 - protein, 20 aa, Artificial Sequence
  Description of Artificial Sequence: Synthetic peptide
  Seed: GNEKKAKLANVVRKMMTNSQ
GNEVKAFLFNVIRKMMTNSQ

SEQ ID NO: 190373 - protein, 20 aa, Artificial Sequence
  Description of Artificial Sequence: Synthetic peptide
  Seed: GNEKKAKLANVVRKMMTNSQ
GNEVKAFLFNVMRKMMTNSQ

SEQ ID NO: 190374 - protein, 20 aa, Artificial Sequence
  Description of Artificial Sequence: Synthetic peptide
  Seed: GNEKKAKLANVVRKMMTNSQ
GNEVKAFLFNVNRKMMTNSQ

SEQ ID NO: 190375 - protein, 20 aa, Artificial Sequence
  Description of Artificial Sequence: Synthetic peptide
  Seed: GNEKKAKLANVVRKMMTNSQ
GNEVKAFLFNVSRKMMTNSQ

SEQ ID NO: 190376 - protein, 20 aa, Artificial Sequence
  Description of Artificial Sequence: Synthetic peptide
  Seed: GNEKKAKLANVVRKMMTNSQ
GNEVKAFLFNVTRKMMTNSQ

SEQ ID NO: 190377 - protein, 20 aa, Artificial Sequence
  Description of Artificial Sequence: Synthetic peptide
  Seed: GNEKKAKLANVVRKMMTNSQ
GNEVKAFLFNVVRKMMTNSQ

SEQ ID NO: 190378 - protein, 20 aa, Artificial Sequence
  Description of Artificial Sequence: Synthetic peptide
  Seed: GNEKKAKLANVVRKMMTNSQ
GNEVKAHLFNVARKMMTNSQ

SEQ ID NO: 190379 - protein, 20 aa, Artificial Sequence
  Description of Artificial Sequence: Synthetic peptide
  Seed: GNEKKAKLANVVRKMMTNSQ
GNEVKAHLFNVERKMMTNSQ

SEQ ID NO: 190380 - protein, 20 aa, Artificial Sequence
  Description of Artificial Sequence: Synthetic peptide
  Seed: GNEKKAKLANVVRKMMTNSQ
GNEVKAHLFNVFRKMMTNSQ

SEQ ID NO: 190381 - protein, 20 aa, Artificial Sequence
  Description of Artificial Sequence: Synthetic peptide
  Seed: GNEKKAKLANVVRKMMTNSQ
GNEVKAHLFNVIRKMMTNSQ

SEQ ID NO: 190382 - protein, 20 aa, Artificial Sequence
  Description of Artificial Sequence: Synthetic peptide
  Seed: GNEKKAKLANVVRKMMTNSQ
GNEVKAHLFNVLRKMMTNSQ

SEQ ID NO: 190383 - protein, 20 aa, Artificial Sequence
  Description of Artificial Sequence: Synthetic peptide
  Seed: GNEKKAKLANVVRKMMTNSQ
GNEVKAHLFNVMRKMMTNSQ

SEQ ID NO: 190384 - protein, 20 aa, Artificial Sequence
  Description of Artificial Sequence: Synthetic peptide
  Seed: GNEKKAKLANVVRKMMTNSQ
GNEVKAHLFNVSRKMMTNSQ

SEQ ID NO: 190385 - protein, 20 aa, Artificial Sequence
  Description of Artificial Sequence: Synthetic peptide
  Seed: GNEKKAKLANVVRKMMTNSQ
GNEVKAHLFNVTRKMMTNSQ

SEQ ID NO: 190386 - protein, 20 aa, Artificial Sequence
  Description of Artificial Sequence: Synthetic peptide
  Seed: GNEKKAKLANVVRKMMTNSQ
GNEVKAHLFNVVRKMMTNSQ

SEQ ID NO: 190387 - protein, 20 aa, Artificial Sequence
  Description of Artificial Sequence: Synthetic peptide
  Seed: GNEKKAKLANVVRKMMTNSQ
GNEVKAHLFNVYRKMMTNSQ

SEQ ID NO: 190388 - protein, 20 aa, Artificial Sequence
  Description of Artificial Sequence: Synthetic peptide
  Seed: GNEKKAKLANVVRKMMTNSQ
GNEVKAHLLNVIRKMMTNSQ

SEQ ID NO: 190389 - protein, 20 aa, Artificial Sequence
  Description of Artificial Sequence: Synthetic peptide
  Seed: GNEKKAKLANVVRKMMTNSQ
GNEVKAHLLNVLRKMMTNSQ

SEQ ID NO: 190390 - protein, 20 aa, Artificial Sequence
  Description of Artificial Sequence: Synthetic peptide
  Seed: GNEKKAKLANVVRKMMTNSQ
GNEVKAHLYNVFRKMMTNSQ

SEQ ID NO: 190391 - protein, 20 aa, Artificial Sequence
  Description of Artificial Sequence: Synthetic peptide
  Seed: GNEKKAKLANVVRKMMTNSQ
GNEVKAHLYNVIRKMMTNSQ

SEQ ID NO: 190392 - protein, 20 aa, Artificial Sequence
  Description of Artificial Sequence: Synthetic peptide
  Seed: GNEKKAKLANVVRKMMTNSQ
GNEVKAHLYNVLRKMMTNSQ

SEQ ID NO: 190393 - protein, 20 aa, Artificial Sequence
  Description of Artificial Sequence: Synthetic peptide
  Seed: GNEKKAKLANVVRKMMTNSQ
GNEVKAILANVARKMMTNSQ

SEQ ID NO: 190394 - protein, 20 aa, Artificial Sequence
  Description of Artificial Sequence: Synthetic peptide
  Seed: GNEKKAKLANVVRKMMTNSQ
GNEVKAILANVIRKMMTNSQ

SEQ ID NO: 190395 - protein, 20 aa, Artificial Sequence
  Description of Artificial Sequence: Synthetic peptide
  Seed: GNEKKAKLANVVRKMMTNSQ
GNEVKAILANVLRKMMTNSQ

SEQ ID NO: 190396 - protein, 20 aa, Artificial Sequence
  Description of Artificial Sequence: Synthetic peptide
  Seed: GNEKKAKLANVVRKMMTNSQ
GNEVKAILANVNRKMMTNSQ

SEQ ID NO: 190397 - protein, 20 aa, Artificial Sequence
  Description of Artificial Sequence: Synthetic peptide
  Seed: GNEKKAKLANVVRKMMTNSQ
GNEVKAILANVSRKMMTNSQ

SEQ ID NO: 190398 - protein, 20 aa, Artificial Sequence
  Description of Artificial Sequence: Synthetic peptide
  Seed: GNEKKAKLANVVRKMMTNSQ
GNEVKAILANVTRKMMTNSQ

SEQ ID NO: 190399 - protein, 20 aa, Artificial Sequence
  Description of Artificial Sequence: Synthetic peptide
  Seed: GNEKKAKLANVVRKMMTNSQ
GNEVKAILANVVRKMMTNSQ

SEQ ID NO: 190400 - protein, 20 aa, Artificial Sequence
  Description of Artificial Sequence: Synthetic peptide
  Seed: GNEKKAKLANVVRKMMTNSQ
GNEVKAILFNVARKMMTNSQ

SEQ ID NO: 190401 - protein, 20 aa, Artificial Sequence
  Description of Artificial Sequence: Synthetic peptide
  Seed: GNEKKAKLANVVRKMMTNSQ
GNEVKAILFNVERKMMTNSQ

SEQ ID NO: 190402 - protein, 20 aa, Artificial Sequence
  Description of Artificial Sequence: Synthetic peptide
  Seed: GNEKKAKLANVVRKMMTNSQ
GNEVKAILFNVIRKMMTNSQ

SEQ ID NO: 190403 - protein, 20 aa, Artificial Sequence
  Description of Artificial Sequence: Synthetic peptide
  Seed: GNEKKAKLANVVRKMMTNSQ
GNEVKAILFNVLRKMMTNSQ

SEQ ID NO: 190404 - protein, 20 aa, Artificial Sequence
  Description of Artificial Sequence: Synthetic peptide
  Seed: GNEKKAKLANVVRKMMTNSQ
GNEVKAILFNVMRKMMTNSQ

SEQ ID NO: 190405 - protein, 20 aa, Artificial Sequence
  Description of Artificial Sequence: Synthetic peptide
  Seed: GNEKKAKLANVVRKMMTNSQ
GNEVKAILFNVNRKMMTNSQ

SEQ ID NO: 190406 - protein, 20 aa, Artificial Sequence
  Description of Artificial Sequence: Synthetic peptide
  Seed: GNEKKAKLANVVRKMMTNSQ
GNEVKAILFNVTRKMMTNSQ

SEQ ID NO: 190407 - protein, 20 aa, Artificial Sequence
  Description of Artificial Sequence: Synthetic peptide
  Seed: GNEKKAKLANVVRKMMTNSQ
GNEVKAILFNVVRKMMTNSQ

SEQ ID NO: 190408 - protein, 20 aa, Artificial Sequence
  Description of Artificial Sequence: Synthetic peptide
  Seed: GNEKKAKLANVVRKMMTNSQ
GNEVKAILFNVYRKMMTNSQ

SEQ ID NO: 190409 - protein, 20 aa, Artificial Sequence
  Description of Artificial Sequence: Synthetic peptide
  Seed: GNEKKAKLANVVRKMMTNSQ
GNEVKAILGNVARKMMTNSQ

SEQ ID NO: 190410 - protein, 20 aa, Artificial Sequence
  Description of Artificial Sequence: Synthetic peptide
  Seed: GNEKKAKLANVVRKMMTNSQ
GNEVKAILGNVIRKMMTNSQ

SEQ ID NO: 190411 - protein, 20 aa, Artificial Sequence
  Description of Artificial Sequence: Synthetic peptide
  Seed: GNEKKAKLANVVRKMMTNSQ
GNEVKAILGNVLRKMMTNSQ

SEQ ID NO: 190412 - protein, 20 aa, Artificial Sequence
  Description of Artificial Sequence: Synthetic peptide
  Seed: GNEKKAKLANVVRKMMTNSQ
GNEVKAILGNVVRKMMTNSQ

SEQ ID NO: 190413 - protein, 20 aa, Artificial Sequence
  Description of Artificial Sequence: Synthetic peptide
  Seed: GNEKKAKLANVVRKMMTNSQ
GNEVKAILPNVARKMMTNSQ

SEQ ID NO: 190414 - protein, 20 aa, Artificial Sequence
  Description of Artificial Sequence: Synthetic peptide
  Seed: GNEKKAKLANVVRKMMTNSQ
GNEVKAILPNVIRKMMTNSQ

SEQ ID NO: 190415 - protein, 20 aa, Artificial Sequence
  Description of Artificial Sequence: Synthetic peptide
  Seed: GNEKKAKLANVVRKMMTNSQ
GNEVKAILPNVNRKMMTNSQ

SEQ ID NO: 190416 - protein, 20 aa, Artificial Sequence
  Description of Artificial Sequence: Synthetic peptide
  Seed: GNEKKAKLANVVRKMMTNSQ
GNEVKAILPNVSRKMMTNSQ

SEQ ID NO: 190417 - protein, 20 aa, Artificial Sequence
  Description of Artificial Sequence: Synthetic peptide
  Seed: GNEKKAKLANVVRKMMTNSQ
GNEVKAILPNVVRKMMTNSQ

SEQ ID NO: 190418 - protein, 20 aa, Artificial Sequence
  Description of Artificial Sequence: Synthetic peptide
  Seed: GNEKKAKLANVVRKMMTNSQ
GNEVKAILSNVARKMMTNSQ

SEQ ID NO: 190419 - protein, 20 aa, Artificial Sequence
  Description of Artificial Sequence: Synthetic peptide
  Seed: GNEKKAKLANVVRKMMTNSQ
GNEVKAILSNVIRKMMTNSQ

SEQ ID NO: 190420 - protein, 20 aa, Artificial Sequence
  Description of Artificial Sequence: Synthetic peptide
  Seed: GNEKKAKLANVVRKMMTNSQ
GNEVKAILSNVLRKMMTNSQ

SEQ ID NO: 190421 - protein, 20 aa, Artificial Sequence
  Description of Artificial Sequence: Synthetic peptide
  Seed: GNEKKAKLANVVRKMMTNSQ
GNEVKAILSNVNRKMMTNSQ

SEQ ID NO: 190422 - protein, 20 aa, Artificial Sequence
  Description of Artificial Sequence: Synthetic peptide
  Seed: GNEKKAKLANVVRKMMTNSQ
GNEVKAILSNVVRKMMTNSQ

SEQ ID NO: 190423 - protein, 20 aa, Artificial Sequence
  Description of Artificial Sequence: Synthetic peptide
  Seed: GNEKKAKLANVVRKMMTNSQ
GNEVKAILTNVARKMMTNSQ

SEQ ID NO: 190424 - protein, 20 aa, Artificial Sequence
  Description of Artificial Sequence: Synthetic peptide
  Seed: GNEKKAKLANVVRKMMTNSQ
GNEVKAILWNVIRKMMTNSQ

SEQ ID NO: 190425 - protein, 20 aa, Artificial Sequence
  Description of Artificial Sequence: Synthetic peptide
  Seed: GNEKKAKLANVVRKMMTNSQ
GNEVKAILWNVVRKMMTNSQ

SEQ ID NO: 190426 - protein, 20 aa, Artificial Sequence
  Description of Artificial Sequence: Synthetic peptide
  Seed: GNEKKAKLANVVRKMMTNSQ
GNEVKAILYNVIRKMMTNSQ

SEQ ID NO: 190427 - protein, 20 aa, Artificial Sequence
  Description of Artificial Sequence: Synthetic peptide
  Seed: GNEKKAKLANVVRKMMTNSQ
GNEVKAILYNVLRKMMTNSQ

SEQ ID NO: 190428 - protein, 20 aa, Artificial Sequence
  Description of Artificial Sequence: Synthetic peptide
  Seed: GNEKKAKLANVVRKMMTNSQ
GNEVKAILYNVMRKMMTNSQ

SEQ ID NO: 190429 - protein, 20 aa, Artificial Sequence
  Description of Artificial Sequence: Synthetic peptide
  Seed: GNEKKAKLANVVRKMMTNSQ
GNEVKAILYNVVRKMMTNSQ

SEQ ID NO: 190430 - protein, 20 aa, Artificial Sequence
  Description of Artificial Sequence: Synthetic peptide
  Seed: GNEKKAKLANVVRKMMTNSQ
GNEVKAKLFNVFRKMMTNSQ

SEQ ID NO: 190431 - protein, 20 aa, Artificial Sequence
  Description of Artificial Sequence: Synthetic peptide
  Seed: GNEKKAKLANVVRKMMTNSQ
GNEVKAKLFNVIRKMMTNSQ

SEQ ID NO: 190432 - protein, 20 aa, Artificial Sequence
  Description of Artificial Sequence: Synthetic peptide
  Seed: GNEKKAKLANVVRKMMTNSQ
GNEVKAKLFNVLRKMMTNSQ

SEQ ID NO: 190433 - protein, 20 aa, Artificial Sequence
  Description of Artificial Sequence: Synthetic peptide
  Seed: GNEKKAKLANVVRKMMTNSQ
GNEVKAKLFNVVRKMMTNSQ

SEQ ID NO: 190434 - protein, 20 aa, Artificial Sequence
  Description of Artificial Sequence: Synthetic peptide
  Seed: GNEKKAKLANVVRKMMTNSQ
GNEVKALLANVARKMMTNSQ

SEQ ID NO: 190435 - protein, 20 aa, Artificial Sequence
  Description of Artificial Sequence: Synthetic peptide
  Seed: GNEKKAKLANVVRKMMTNSQ
GNEVKALLANVGRKMMTNSQ

SEQ ID NO: 190436 - protein, 20 aa, Artificial Sequence
  Description of Artificial Sequence: Synthetic peptide
  Seed: GNEKKAKLANVVRKMMTNSQ
GNEVKALLANVIRKMMTNSQ

SEQ ID NO: 190437 - protein, 20 aa, Artificial Sequence
  Description of Artificial Sequence: Synthetic peptide
  Seed: GNEKKAKLANVVRKMMTNSQ
GNEVKALLANVLRKMMTNSQ

SEQ ID NO: 190438 - protein, 20 aa, Artificial Sequence
  Description of Artificial Sequence: Synthetic peptide
  Seed: GNEKKAKLANVVRKMMTNSQ
GNEVKALLANVMRKMMTNSQ

SEQ ID NO: 190439 - protein, 20 aa, Artificial Sequence
  Description of Artificial Sequence: Synthetic peptide
  Seed: GNEKKAKLANVVRKMMTNSQ
GNEVKALLANVNRKMMTNSQ

SEQ ID NO: 190440 - protein, 20 aa, Artificial Sequence
  Description of Artificial Sequence: Synthetic peptide
  Seed: GNEKKAKLANVVRKMMTNSQ
GNEVKALLANVSRKMMTNSQ

SEQ ID NO: 190441 - protein, 20 aa, Artificial Sequence
  Description of Artificial Sequence: Synthetic peptide
  Seed: GNEKKAKLANVVRKMMTNSQ
GNEVKALLANVTRKMMTNSQ

SEQ ID NO: 190442 - protein, 20 aa, Artificial Sequence
  Description of Artificial Sequence: Synthetic peptide
  Seed: GNEKKAKLANVVRKMMTNSQ
GNEVKALLANVVRKMMTNSQ

SEQ ID NO: 190443 - protein, 20 aa, Artificial Sequence
  Description of Artificial Sequence: Synthetic peptide
  Seed: GNEKKAKLANVVRKMMTNSQ
GNEVKALLFNVIRKMMTNSQ

SEQ ID NO: 190444 - protein, 20 aa, Artificial Sequence
  Description of Artificial Sequence: Synthetic peptide
  Seed: GNEKKAKLANVVRKMMTNSQ
GNEVKALLFNVLRKMMTNSQ

SEQ ID NO: 190445 - protein, 20 aa, Artificial Sequence
  Description of Artificial Sequence: Synthetic peptide
  Seed: GNEKKAKLANVVRKMMTNSQ
GNEVKALLFNVMRKMMTNSQ

SEQ ID NO: 190446 - protein, 20 aa, Artificial Sequence
  Description of Artificial Sequence: Synthetic peptide
  Seed: GNEKKAKLANVVRKMMTNSQ
GNEVKALLFNVVRKMMTNSQ

SEQ ID NO: 190447 - protein, 20 aa, Artificial Sequence
  Description of Artificial Sequence: Synthetic peptide
  Seed: GNEKKAKLANVVRKMMTNSQ
GNEVKALLGNVARKMMTNSQ

SEQ ID NO: 190448 - protein, 20 aa, Artificial Sequence
  Description of Artificial Sequence: Synthetic peptide
  Seed: GNEKKAKLANVVRKMMTNSQ
GNEVKALLGNVGRKMMTNSQ

SEQ ID NO: 190449 - protein, 20 aa, Artificial Sequence
  Description of Artificial Sequence: Synthetic peptide
  Seed: GNEKKAKLANVVRKMMTNSQ
GNEVKALLGNVIRKMMTNSQ

SEQ ID NO: 190450 - protein, 20 aa, Artificial Sequence
  Description of Artificial Sequence: Synthetic peptide
  Seed: GNEKKAKLANVVRKMMTNSQ
GNEVKALLGNVLRKMMTNSQ

SEQ ID NO: 190451 - protein, 20 aa, Artificial Sequence
  Description of Artificial Sequence: Synthetic peptide
  Seed: GNEKKAKLANVVRKMMTNSQ
GNEVKALLGNVMRKMMTNSQ

SEQ ID NO: 190452 - protein, 20 aa, Artificial Sequence
  Description of Artificial Sequence: Synthetic peptide
  Seed: GNEKKAKLANVVRKMMTNSQ
GNEVKALLGNVNRKMMTNSQ

SEQ ID NO: 190453 - protein, 20 aa, Artificial Sequence
  Description of Artificial Sequence: Synthetic peptide
  Seed: GNEKKAKLANVVRKMMTNSQ
GNEVKALLGNVSRKMMTNSQ

SEQ ID NO: 190454 - protein, 20 aa, Artificial Sequence
  Description of Artificial Sequence: Synthetic peptide
  Seed: GNEKKAKLANVVRKMMTNSQ
GNEVKALLGNVTRKMMTNSQ

SEQ ID NO: 190455 - protein, 20 aa, Artificial Sequence
  Description of Artificial Sequence: Synthetic peptide
  Seed: GNEKKAKLANVVRKMMTNSQ
GNEVKALLGNVVRKMMTNSQ

SEQ ID NO: 190456 - protein, 20 aa, Artificial Sequence
  Description of Artificial Sequence: Synthetic peptide
  Seed: GNEKKAKLANVVRKMMTNSQ
GNEVKALLNNVARKMMTNSQ

SEQ ID NO: 190457 - protein, 20 aa, Artificial Sequence
  Description of Artificial Sequence: Synthetic peptide
  Seed: GNEKKAKLANVVRKMMTNSQ
GNEVKALLNNVIRKMMTNSQ

SEQ ID NO: 190458 - protein, 20 aa, Artificial Sequence
  Description of Artificial Sequence: Synthetic peptide
  Seed: GNEKKAKLANVVRKMMTNSQ
GNEVKALLNNVLRKMMTNSQ

SEQ ID NO: 190459 - protein, 20 aa, Artificial Sequence
  Description of Artificial Sequence: Synthetic peptide
  Seed: GNEKKAKLANVVRKMMTNSQ
GNEVKALLNNVVRKMMTNSQ

SEQ ID NO: 190460 - protein, 20 aa, Artificial Sequence
  Description of Artificial Sequence: Synthetic peptide
  Seed: GNEKKAKLANVVRKMMTNSQ
GNEVKALLPNVARKMMTNSQ

SEQ ID NO: 190461 - protein, 20 aa, Artificial Sequence
  Description of Artificial Sequence: Synthetic peptide
  Seed: GNEKKAKLANVVRKMMTNSQ
GNEVKALLPNVIRKMMTNSQ

SEQ ID NO: 190462 - protein, 20 aa, Artificial Sequence
  Description of Artificial Sequence: Synthetic peptide
  Seed: GNEKKAKLANVVRKMMTNSQ
GNEVKALLPNVLRKMMTNSQ

SEQ ID NO: 190463 - protein, 20 aa, Artificial Sequence
  Description of Artificial Sequence: Synthetic peptide
  Seed: GNEKKAKLANVVRKMMTNSQ
GNEVKALLPNVMRKMMTNSQ

SEQ ID NO: 190464 - protein, 20 aa, Artificial Sequence
  Description of Artificial Sequence: Synthetic peptide
  Seed: GNEKKAKLANVVRKMMTNSQ
GNEVKALLPNVNRKMMTNSQ

SEQ ID NO: 190465 - protein, 20 aa, Artificial Sequence
  Description of Artificial Sequence: Synthetic peptide
  Seed: GNEKKAKLANVVRKMMTNSQ
GNEVKALLPNVSRKMMTNSQ

SEQ ID NO: 190466 - protein, 20 aa, Artificial Sequence
  Description of Artificial Sequence: Synthetic peptide
  Seed: GNEKKAKLANVVRKMMTNSQ
GNEVKALLPNVTRKMMTNSQ

SEQ ID NO: 190467 - protein, 20 aa, Artificial Sequence
  Description of Artificial Sequence: Synthetic peptide
  Seed: GNEKKAKLANVVRKMMTNSQ
GNEVKALLPNVVRKMMTNSQ

SEQ ID NO: 190468 - protein, 20 aa, Artificial Sequence
  Description of Artificial Sequence: Synthetic peptide
  Seed: GNEKKAKLANVVRKMMTNSQ
GNEVKALLSNVARKMMTNSQ

SEQ ID NO: 190469 - protein, 20 aa, Artificial Sequence
  Description of Artificial Sequence: Synthetic peptide
  Seed: GNEKKAKLANVVRKMMTNSQ
GNEVKALLSNVIRKMMTNSQ

SEQ ID NO: 190470 - protein, 20 aa, Artificial Sequence
  Description of Artificial Sequence: Synthetic peptide
  Seed: GNEKKAKLANVVRKMMTNSQ
GNEVKALLSNVLRKMMTNSQ

SEQ ID NO: 190471 - protein, 20 aa, Artificial Sequence
  Description of Artificial Sequence: Synthetic peptide
  Seed: GNEKKAKLANVVRKMMTNSQ
GNEVKALLSNVMRKMMTNSQ

SEQ ID NO: 190472 - protein, 20 aa, Artificial Sequence
  Description of Artificial Sequence: Synthetic peptide
  Seed: GNEKKAKLANVVRKMMTNSQ
GNEVKALLSNVNRKMMTNSQ

SEQ ID NO: 190473 - protein, 20 aa, Artificial Sequence
  Description of Artificial Sequence: Synthetic peptide
  Seed: GNEKKAKLANVVRKMMTNSQ
GNEVKALLSNVSRKMMTNSQ

SEQ ID NO: 190474 - protein, 20 aa, Artificial Sequence
  Description of Artificial Sequence: Synthetic peptide
  Seed: GNEKKAKLANVVRKMMTNSQ
GNEVKALLSNVTRKMMTNSQ

SEQ ID NO: 190475 - protein, 20 aa, Artificial Sequence
  Description of Artificial Sequence: Synthetic peptide
  Seed: GNEKKAKLANVVRKMMTNSQ
GNEVKALLSNVVRKMMTNSQ

SEQ ID NO: 190476 - protein, 20 aa, Artificial Sequence
  Description of Artificial Sequence: Synthetic peptide
  Seed: GNEKKAKLANVVRKMMTNSQ
GNEVKALLTNVARKMMTNSQ

SEQ ID NO: 190477 - protein, 20 aa, Artificial Sequence
  Description of Artificial Sequence: Synthetic peptide
  Seed: GNEKKAKLANVVRKMMTNSQ
GNEVKALLTNVIRKMMTNSQ

SEQ ID NO: 190478 - protein, 20 aa, Artificial Sequence
  Description of Artificial Sequence: Synthetic peptide
  Seed: GNEKKAKLANVVRKMMTNSQ
GNEVKALLTNVLRKMMTNSQ

SEQ ID NO: 190479 - protein, 20 aa, Artificial Sequence
  Description of Artificial Sequence: Synthetic peptide
  Seed: GNEKKAKLANVVRKMMTNSQ
GNEVKALLTNVNRKMMTNSQ

SEQ ID NO: 190480 - protein, 20 aa, Artificial Sequence
  Description of Artificial Sequence: Synthetic peptide
  Seed: GNEKKAKLANVVRKMMTNSQ
GNEVKALLTNVSRKMMTNSQ

SEQ ID NO: 190481 - protein, 20 aa, Artificial Sequence
  Description of Artificial Sequence: Synthetic peptide
  Seed: GNEKKAKLANVVRKMMTNSQ
GNEVKALLTNVTRKMMTNSQ

SEQ ID NO: 190482 - protein, 20 aa, Artificial Sequence
  Description of Artificial Sequence: Synthetic peptide
  Seed: GNEKKAKLANVVRKMMTNSQ
GNEVKALLTNVVRKMMTNSQ

SEQ ID NO: 190483 - protein, 20 aa, Artificial Sequence
  Description of Artificial Sequence: Synthetic peptide
  Seed: GNEKKAKLANVVRKMMTNSQ
GNEVKALLVNVARKMMTNSQ

SEQ ID NO: 190484 - protein, 20 aa, Artificial Sequence
  Description of Artificial Sequence: Synthetic peptide
  Seed: GNEKKAKLANVVRKMMTNSQ
GNEVKALLVNVNRKMMTNSQ

SEQ ID NO: 190485 - protein, 20 aa, Artificial Sequence
  Description of Artificial Sequence: Synthetic peptide
  Seed: GNEKKAKLANVVRKMMTNSQ
GNEVKALLVNVSRKMMTNSQ

SEQ ID NO: 190486 - protein, 20 aa, Artificial Sequence
  Description of Artificial Sequence: Synthetic peptide
  Seed: GNEKKAKLANVVRKMMTNSQ
GNEVKALLYNVIRKMMTNSQ

SEQ ID NO: 190487 - protein, 20 aa, Artificial Sequence
  Description of Artificial Sequence: Synthetic peptide
  Seed: GNEKKAKLANVVRKMMTNSQ
GNEVKALLYNVVRKMMTNSQ

SEQ ID NO: 190488 - protein, 20 aa, Artificial Sequence
  Description of Artificial Sequence: Synthetic peptide
  Seed: GNEKKAKLANVVRKMMTNSQ
GNEVKAMLANVARKMMTNSQ

SEQ ID NO: 190489 - protein, 20 aa, Artificial Sequence
  Description of Artificial Sequence: Synthetic peptide
  Seed: GNEKKAKLANVVRKMMTNSQ
GNEVKAMLANVGRKMMTNSQ

SEQ ID NO: 190490 - protein, 20 aa, Artificial Sequence
  Description of Artificial Sequence: Synthetic peptide
  Seed: GNEKKAKLANVVRKMMTNSQ
GNEVKAMLANVIRKMMTNSQ

SEQ ID NO: 190491 - protein, 20 aa, Artificial Sequence
  Description of Artificial Sequence: Synthetic peptide
  Seed: GNEKKAKLANVVRKMMTNSQ
GNEVKAMLANVLRKMMTNSQ

SEQ ID NO: 190492 - protein, 20 aa, Artificial Sequence
  Description of Artificial Sequence: Synthetic peptide
  Seed: GNEKKAKLANVVRKMMTNSQ
GNEVKAMLANVMRKMMTNSQ

SEQ ID NO: 190493 - protein, 20 aa, Artificial Sequence
  Description of Artificial Sequence: Synthetic peptide
  Seed: GNEKKAKLANVVRKMMTNSQ
GNEVKAMLANVNRKMMTNSQ

SEQ ID NO: 190494 - protein, 20 aa, Artificial Sequence
  Description of Artificial Sequence: Synthetic peptide
  Seed: GNEKKAKLANVVRKMMTNSQ
GNEVKAMLANVSRKMMTNSQ

SEQ ID NO: 190495 - protein, 20 aa, Artificial Sequence
  Description of Artificial Sequence: Synthetic peptide
  Seed: GNEKKAKLANVVRKMMTNSQ
GNEVKAMLANVTRKMMTNSQ

SEQ ID NO: 190496 - protein, 20 aa, Artificial Sequence
  Description of Artificial Sequence: Synthetic peptide
  Seed: GNEKKAKLANVVRKMMTNSQ
GNEVKAMLANVVRKMMTNSQ

SEQ ID NO: 190497 - protein, 20 aa, Artificial Sequence
  Description of Artificial Sequence: Synthetic peptide
  Seed: GNEKKAKLANVVRKMMTNSQ
GNEVKAMLFNVIRKMMTNSQ

SEQ ID NO: 190498 - protein, 20 aa, Artificial Sequence
  Description of Artificial Sequence: Synthetic peptide
  Seed: GNEKKAKLANVVRKMMTNSQ
GNEVKAMLFNVLRKMMTNSQ

SEQ ID NO: 190499 - protein, 20 aa, Artificial Sequence
  Description of Artificial Sequence: Synthetic peptide
  Seed: GNEKKAKLANVVRKMMTNSQ
GNEVKAMLFNVMRKMMTNSQ

SEQ ID NO: 190500 - protein, 20 aa, Artificial Sequence
  Description of Artificial Sequence: Synthetic peptide
  Seed: GNEKKAKLANVVRKMMTNSQ
GNEVKAMLFNVVRKMMTNSQ

SEQ ID NO: 190501 - protein, 20 aa, Artificial Sequence
  Description of Artificial Sequence: Synthetic peptide
  Seed: GNEKKAKLANVVRKMMTNSQ
GNEVKAMLGNVARKMMTNSQ

SEQ ID NO: 190502 - protein, 20 aa, Artificial Sequence
  Description of Artificial Sequence: Synthetic peptide
  Seed: GNEKKAKLANVVRKMMTNSQ
GNEVKAMLGNVIRKMMTNSQ

SEQ ID NO: 190503 - protein, 20 aa, Artificial Sequence
  Description of Artificial Sequence: Synthetic peptide
  Seed: GNEKKAKLANVVRKMMTNSQ
GNEVKAMLGNVLRKMMTNSQ

SEQ ID NO: 190504 - protein, 20 aa, Artificial Sequence
  Description of Artificial Sequence: Synthetic peptide
  Seed: GNEKKAKLANVVRKMMTNSQ
GNEVKAMLGNVMRKMMTNSQ

SEQ ID NO: 190505 - protein, 20 aa, Artificial Sequence
  Description of Artificial Sequence: Synthetic peptide
  Seed: GNEKKAKLANVVRKMMTNSQ
GNEVKAMLGNVSRKMMTNSQ

SEQ ID NO: 190506 - protein, 20 aa, Artificial Sequence
  Description of Artificial Sequence: Synthetic peptide
  Seed: GNEKKAKLANVVRKMMTNSQ
GNEVKAMLGNVTRKMMTNSQ

SEQ ID NO: 190507 - protein, 20 aa, Artificial Sequence
  Description of Artificial Sequence: Synthetic peptide
  Seed: GNEKKAKLANVVRKMMTNSQ
GNEVKAMLGNVVRKMMTNSQ

SEQ ID NO: 190508 - protein, 20 aa, Artificial Sequence
  Description of Artificial Sequence: Synthetic peptide
  Seed: GNEKKAKLANVVRKMMTNSQ
GNEVKAMLINVARKMMTNSQ

SEQ ID NO: 190509 - protein, 20 aa, Artificial Sequence
  Description of Artificial Sequence: Synthetic peptide
  Seed: GNEKKAKLANVVRKMMTNSQ
GNEVKAMLINVNRKMMTNSQ

SEQ ID NO: 190510 - protein, 20 aa, Artificial Sequence
  Description of Artificial Sequence: Synthetic peptide
  Seed: GNEKKAKLANVVRKMMTNSQ
GNEVKAMLINVSRKMMTNSQ

SEQ ID NO: 190511 - protein, 20 aa, Artificial Sequence
  Description of Artificial Sequence: Synthetic peptide
  Seed: GNEKKAKLANVVRKMMTNSQ
GNEVKAMLNNVARKMMTNSQ

SEQ ID NO: 190512 - protein, 20 aa, Artificial Sequence
  Description of Artificial Sequence: Synthetic peptide
  Seed: GNEKKAKLANVVRKMMTNSQ
GNEVKAMLNNVIRKMMTNSQ

SEQ ID NO: 190513 - protein, 20 aa, Artificial Sequence
  Description of Artificial Sequence: Synthetic peptide
  Seed: GNEKKAKLANVVRKMMTNSQ
GNEVKAMLNNVLRKMMTNSQ

SEQ ID NO: 190514 - protein, 20 aa, Artificial Sequence
  Description of Artificial Sequence: Synthetic peptide
  Seed: GNEKKAKLANVVRKMMTNSQ
GNEVKAMLNNVVRKMMTNSQ

SEQ ID NO: 190515 - protein, 20 aa, Artificial Sequence
  Description of Artificial Sequence: Synthetic peptide
  Seed: GNEKKAKLANVVRKMMTNSQ
GNEVKAMLPNVARKMMTNSQ

SEQ ID NO: 190516 - protein, 20 aa, Artificial Sequence
  Description of Artificial Sequence: Synthetic peptide
  Seed: GNEKKAKLANVVRKMMTNSQ
GNEVKAMLPNVIRKMMTNSQ

SEQ ID NO: 190517 - protein, 20 aa, Artificial Sequence
  Description of Artificial Sequence: Synthetic peptide
  Seed: GNEKKAKLANVVRKMMTNSQ
GNEVKAMLPNVLRKMMTNSQ

SEQ ID NO: 190518 - protein, 20 aa, Artificial Sequence
  Description of Artificial Sequence: Synthetic peptide
  Seed: GNEKKAKLANVVRKMMTNSQ
GNEVKAMLPNVMRKMMTNSQ

SEQ ID NO: 190519 - protein, 20 aa, Artificial Sequence
  Description of Artificial Sequence: Synthetic peptide
  Seed: GNEKKAKLANVVRKMMTNSQ
GNEVKAMLPNVNRKMMTNSQ

SEQ ID NO: 190520 - protein, 20 aa, Artificial Sequence
  Description of Artificial Sequence: Synthetic peptide
  Seed: GNEKKAKLANVVRKMMTNSQ
GNEVKAMLPNVSRKMMTNSQ

SEQ ID NO: 190521 - protein, 20 aa, Artificial Sequence
  Description of Artificial Sequence: Synthetic peptide
  Seed: GNEKKAKLANVVRKMMTNSQ
GNEVKAMLPNVTRKMMTNSQ

SEQ ID NO: 190522 - protein, 20 aa, Artificial Sequence
  Description of Artificial Sequence: Synthetic peptide
  Seed: GNEKKAKLANVVRKMMTNSQ
GNEVKAMLPNVVRKMMTNSQ

SEQ ID NO: 190523 - protein, 20 aa, Artificial Sequence
  Description of Artificial Sequence: Synthetic peptide
  Seed: GNEKKAKLANVVRKMMTNSQ
GNEVKAMLSNVARKMMTNSQ

SEQ ID NO: 190524 - protein, 20 aa, Artificial Sequence
  Description of Artificial Sequence: Synthetic peptide
  Seed: GNEKKAKLANVVRKMMTNSQ
GNEVKAMLSNVIRKMMTNSQ

SEQ ID NO: 190525 - protein, 20 aa, Artificial Sequence
  Description of Artificial Sequence: Synthetic peptide
  Seed: GNEKKAKLANVVRKMMTNSQ
GNEVKAMLSNVLRKMMTNSQ

SEQ ID NO: 190526 - protein, 20 aa, Artificial Sequence
  Description of Artificial Sequence: Synthetic peptide
  Seed: GNEKKAKLANVVRKMMTNSQ
GNEVKAMLSNVMRKMMTNSQ

SEQ ID NO: 190527 - protein, 20 aa, Artificial Sequence
  Description of Artificial Sequence: Synthetic peptide
  Seed: GNEKKAKLANVVRKMMTNSQ
GNEVKAMLSNVNRKMMTNSQ

SEQ ID NO: 190528 - protein, 20 aa, Artificial Sequence
  Description of Artificial Sequence: Synthetic peptide
  Seed: GNEKKAKLANVVRKMMTNSQ
GNEVKAMLSNVSRKMMTNSQ

SEQ ID NO: 190529 - protein, 20 aa, Artificial Sequence
  Description of Artificial Sequence: Synthetic peptide
  Seed: GNEKKAKLANVVRKMMTNSQ
GNEVKAMLSNVTRKMMTNSQ

SEQ ID NO: 190530 - protein, 20 aa, Artificial Sequence
  Description of Artificial Sequence: Synthetic peptide
  Seed: GNEKKAKLANVVRKMMTNSQ
GNEVKAMLSNVVRKMMTNSQ

SEQ ID NO: 190531 - protein, 20 aa, Artificial Sequence
  Description of Artificial Sequence: Synthetic peptide
  Seed: GNEKKAKLANVVRKMMTNSQ
GNEVKAMLTNVARKMMTNSQ

SEQ ID NO: 190532 - protein, 20 aa, Artificial Sequence
  Description of Artificial Sequence: Synthetic peptide
  Seed: GNEKKAKLANVVRKMMTNSQ
GNEVKAMLTNVIRKMMTNSQ

SEQ ID NO: 190533 - protein, 20 aa, Artificial Sequence
  Description of Artificial Sequence: Synthetic peptide
  Seed: GNEKKAKLANVVRKMMTNSQ
GNEVKAMLTNVLRKMMTNSQ

SEQ ID NO: 190534 - protein, 20 aa, Artificial Sequence
  Description of Artificial Sequence: Synthetic peptide
  Seed: GNEKKAKLANVVRKMMTNSQ
GNEVKAMLTNVNRKMMTNSQ

SEQ ID NO: 190535 - protein, 20 aa, Artificial Sequence
  Description of Artificial Sequence: Synthetic peptide
  Seed: GNEKKAKLANVVRKMMTNSQ
GNEVKAMLTNVSRKMMTNSQ

SEQ ID NO: 190536 - protein, 20 aa, Artificial Sequence
  Description of Artificial Sequence: Synthetic peptide
  Seed: GNEKKAKLANVVRKMMTNSQ
GNEVKAMLTNVTRKMMTNSQ

SEQ ID NO: 190537 - protein, 20 aa, Artificial Sequence
  Description of Artificial Sequence: Synthetic peptide
  Seed: GNEKKAKLANVVRKMMTNSQ
GNEVKAMLTNVVRKMMTNSQ

SEQ ID NO: 190538 - protein, 20 aa, Artificial Sequence
  Description of Artificial Sequence: Synthetic peptide
  Seed: GNEKKAKLANVVRKMMTNSQ
GNEVKAMLVNVARKMMTNSQ

SEQ ID NO: 190539 - protein, 20 aa, Artificial Sequence
  Description of Artificial Sequence: Synthetic peptide
  Seed: GNEKKAKLANVVRKMMTNSQ
GNEVKAMLVNVNRKMMTNSQ

SEQ ID NO: 190540 - protein, 20 aa, Artificial Sequence
  Description of Artificial Sequence: Synthetic peptide
  Seed: GNEKKAKLANVVRKMMTNSQ
GNEVKAMLVNVSRKMMTNSQ

SEQ ID NO: 190541 - protein, 20 aa, Artificial Sequence
  Description of Artificial Sequence: Synthetic peptide
  Seed: GNEKKAKLANVVRKMMTNSQ
GNEVKAMLYNVIRKMMTNSQ

SEQ ID NO: 190542 - protein, 20 aa, Artificial Sequence
  Description of Artificial Sequence: Synthetic peptide
  Seed: GNEKKAKLANVVRKMMTNSQ
GNEVKAMLYNVVRKMMTNSQ

SEQ ID NO: 190543 - protein, 20 aa, Artificial Sequence
  Description of Artificial Sequence: Synthetic peptide
  Seed: GNEKKAKLANVVRKMMTNSQ
GNEVKANLFNVFRKMMTNSQ

SEQ ID NO: 190544 - protein, 20 aa, Artificial Sequence
  Description of Artificial Sequence: Synthetic peptide
  Seed: GNEKKAKLANVVRKMMTNSQ
GNEVKANLFNVIRKMMTNSQ

SEQ ID NO: 190545 - protein, 20 aa, Artificial Sequence
  Description of Artificial Sequence: Synthetic peptide
  Seed: GNEKKAKLANVVRKMMTNSQ
GNEVKANLFNVLRKMMTNSQ

SEQ ID NO: 190546 - protein, 20 aa, Artificial Sequence
  Description of Artificial Sequence: Synthetic peptide
  Seed: GNEKKAKLANVVRKMMTNSQ
GNEVKANLFNVMRKMMTNSQ

SEQ ID NO: 190547 - protein, 20 aa, Artificial Sequence
  Description of Artificial Sequence: Synthetic peptide
  Seed: GNEKKAKLANVVRKMMTNSQ
GNEVKANLFNVVRKMMTNSQ

SEQ ID NO: 190548 - protein, 20 aa, Artificial Sequence
  Description of Artificial Sequence: Synthetic peptide
  Seed: GNEKKAKLANVVRKMMTNSQ
GNEVKAQLANVARKMMTNSQ

SEQ ID NO: 190549 - protein, 20 aa, Artificial Sequence
  Description of Artificial Sequence: Synthetic peptide
  Seed: GNEKKAKLANVVRKMMTNSQ
GNEVKAQLANVIRKMMTNSQ

SEQ ID NO: 190550 - protein, 20 aa, Artificial Sequence
  Description of Artificial Sequence: Synthetic peptide
  Seed: GNEKKAKLANVVRKMMTNSQ
GNEVKAQLANVLRKMMTNSQ

SEQ ID NO: 190551 - protein, 20 aa, Artificial Sequence
  Description of Artificial Sequence: Synthetic peptide
  Seed: GNEKKAKLANVVRKMMTNSQ
GNEVKAQLANVVRKMMTNSQ

SEQ ID NO: 190552 - protein, 20 aa, Artificial Sequence
  Description of Artificial Sequence: Synthetic peptide
  Seed: GNEKKAKLANVVRKMMTNSQ
GNEVKAQLFNVFRKMMTNSQ

SEQ ID NO: 190553 - protein, 20 aa, Artificial Sequence
  Description of Artificial Sequence: Synthetic peptide
  Seed: GNEKKAKLANVVRKMMTNSQ
GNEVKAQLFNVIRKMMTNSQ

SEQ ID NO: 190554 - protein, 20 aa, Artificial Sequence
  Description of Artificial Sequence: Synthetic peptide
  Seed: GNEKKAKLANVVRKMMTNSQ
GNEVKAQLFNVLRKMMTNSQ

SEQ ID NO: 190555 - protein, 20 aa, Artificial Sequence
  Description of Artificial Sequence: Synthetic peptide
  Seed: GNEKKAKLANVVRKMMTNSQ
GNEVKAQLFNVMRKMMTNSQ

SEQ ID NO: 190556 - protein, 20 aa, Artificial Sequence
  Description of Artificial Sequence: Synthetic peptide
  Seed: GNEKKAKLANVVRKMMTNSQ
GNEVKAQLFNVVRKMMTNSQ

SEQ ID NO: 190557 - protein, 20 aa, Artificial Sequence
  Description of Artificial Sequence: Synthetic peptide
  Seed: GNEKKAKLANVVRKMMTNSQ
GNEVKAQLGNVARKMMTNSQ

SEQ ID NO: 190558 - protein, 20 aa, Artificial Sequence
  Description of Artificial Sequence: Synthetic peptide
  Seed: GNEKKAKLANVVRKMMTNSQ
GNEVKAQLGNVIRKMMTNSQ

SEQ ID NO: 190559 - protein, 20 aa, Artificial Sequence
  Description of Artificial Sequence: Synthetic peptide
  Seed: GNEKKAKLANVVRKMMTNSQ
GNEVKAQLGNVLRKMMTNSQ

SEQ ID NO: 190560 - protein, 20 aa, Artificial Sequence
  Description of Artificial Sequence: Synthetic peptide
  Seed: GNEKKAKLANVVRKMMTNSQ
GNEVKAQLGNVVRKMMTNSQ

SEQ ID NO: 190561 - protein, 20 aa, Artificial Sequence
  Description of Artificial Sequence: Synthetic peptide
  Seed: GNEKKAKLANVVRKMMTNSQ
GNEVKAQLSNVIRKMMTNSQ

SEQ ID NO: 190562 - protein, 20 aa, Artificial Sequence
  Description of Artificial Sequence: Synthetic peptide
  Seed: GNEKKAKLANVVRKMMTNSQ
GNEVKAQLSNVLRKMMTNSQ

SEQ ID NO: 190563 - protein, 20 aa, Artificial Sequence
  Description of Artificial Sequence: Synthetic peptide
  Seed: GNEKKAKLANVVRKMMTNSQ
GNEVKAQLSNVVRKMMTNSQ

SEQ ID NO: 190564 - protein, 20 aa, Artificial Sequence
  Description of Artificial Sequence: Synthetic peptide
  Seed: GNEKKAKLANVVRKMMTNSQ
GNEVKARLFNVFRKMMTNSQ

SEQ ID NO: 190565 - protein, 20 aa, Artificial Sequence
  Description of Artificial Sequence: Synthetic peptide
  Seed: GNEKKAKLANVVRKMMTNSQ
GNEVKARLFNVIRKMMTNSQ

SEQ ID NO: 190566 - protein, 20 aa, Artificial Sequence
  Description of Artificial Sequence: Synthetic peptide
  Seed: GNEKKAKLANVVRKMMTNSQ
GNEVKARLFNVLRKMMTNSQ

SEQ ID NO: 190567 - protein, 20 aa, Artificial Sequence
  Description of Artificial Sequence: Synthetic peptide
  Seed: GNEKKAKLANVVRKMMTNSQ
GNEVKASLANVIRKMMTNSQ

SEQ ID NO: 190568 - protein, 20 aa, Artificial Sequence
  Description of Artificial Sequence: Synthetic peptide
  Seed: GNEKKAKLANVVRKMMTNSQ
GNEVKASLANVLRKMMTNSQ

SEQ ID NO: 190569 - protein, 20 aa, Artificial Sequence
  Description of Artificial Sequence: Synthetic peptide
  Seed: GNEKKAKLANVVRKMMTNSQ
GNEVKASLANVVRKMMTNSQ

SEQ ID NO: 190570 - protein, 20 aa, Artificial Sequence
  Description of Artificial Sequence: Synthetic peptide
  Seed: GNEKKAKLANVVRKMMTNSQ
GNEVKASLFNVARKMMTNSQ

SEQ ID NO: 190571 - protein, 20 aa, Artificial Sequence
  Description of Artificial Sequence: Synthetic peptide
  Seed: GNEKKAKLANVVRKMMTNSQ
GNEVKASLFNVFRKMMTNSQ

SEQ ID NO: 190572 - protein, 20 aa, Artificial Sequence
  Description of Artificial Sequence: Synthetic peptide
  Seed: GNEKKAKLANVVRKMMTNSQ
GNEVKASLFNVIRKMMTNSQ

SEQ ID NO: 190573 - protein, 20 aa, Artificial Sequence
  Description of Artificial Sequence: Synthetic peptide
  Seed: GNEKKAKLANVVRKMMTNSQ
GNEVKASLFNVLRKMMTNSQ

SEQ ID NO: 190574 - protein, 20 aa, Artificial Sequence
  Description of Artificial Sequence: Synthetic peptide
  Seed: GNEKKAKLANVVRKMMTNSQ
GNEVKASLFNVMRKMMTNSQ

SEQ ID NO: 190575 - protein, 20 aa, Artificial Sequence
  Description of Artificial Sequence: Synthetic peptide
  Seed: GNEKKAKLANVVRKMMTNSQ
GNEVKASLFNVNRKMMTNSQ

SEQ ID NO: 190576 - protein, 20 aa, Artificial Sequence
  Description of Artificial Sequence: Synthetic peptide
  Seed: GNEKKAKLANVVRKMMTNSQ
GNEVKASLFNVSRKMMTNSQ

SEQ ID NO: 190577 - protein, 20 aa, Artificial Sequence
  Description of Artificial Sequence: Synthetic peptide
  Seed: GNEKKAKLANVVRKMMTNSQ
GNEVKASLFNVTRKMMTNSQ

SEQ ID NO: 190578 - protein, 20 aa, Artificial Sequence
  Description of Artificial Sequence: Synthetic peptide
  Seed: GNEKKAKLANVVRKMMTNSQ
GNEVKASLFNVVRKMMTNSQ

SEQ ID NO: 190579 - protein, 20 aa, Artificial Sequence
  Description of Artificial Sequence: Synthetic peptide
  Seed: GNEKKAKLANVVRKMMTNSQ
GNEVKASLFNVYRKMMTNSQ

SEQ ID NO: 190580 - protein, 20 aa, Artificial Sequence
  Description of Artificial Sequence: Synthetic peptide
  Seed: GNEKKAKLANVVRKMMTNSQ
GNEVKASLWNVIRKMMTNSQ

SEQ ID NO: 190581 - protein, 20 aa, Artificial Sequence
  Description of Artificial Sequence: Synthetic peptide
  Seed: GNEKKAKLANVVRKMMTNSQ
GNEVKASLWNVLRKMMTNSQ

SEQ ID NO: 190582 - protein, 20 aa, Artificial Sequence
  Description of Artificial Sequence: Synthetic peptide
  Seed: GNEKKAKLANVVRKMMTNSQ
GNEVKASLWNVVRKMMTNSQ

SEQ ID NO: 190583 - protein, 20 aa, Artificial Sequence
  Description of Artificial Sequence: Synthetic peptide
  Seed: GNEKKAKLANVVRKMMTNSQ
GNEVKASLYNVFRKMMTNSQ

SEQ ID NO: 190584 - protein, 20 aa, Artificial Sequence
  Description of Artificial Sequence: Synthetic peptide
  Seed: GNEKKAKLANVVRKMMTNSQ
GNEVKASLYNVIRKMMTNSQ

SEQ ID NO: 190585 - protein, 20 aa, Artificial Sequence
  Description of Artificial Sequence: Synthetic peptide
  Seed: GNEKKAKLANVVRKMMTNSQ
GNEVKASLYNVLRKMMTNSQ

SEQ ID NO: 190586 - protein, 20 aa, Artificial Sequence
  Description of Artificial Sequence: Synthetic peptide
  Seed: GNEKKAKLANVVRKMMTNSQ
GNEVKASLYNVVRKMMTNSQ

SEQ ID NO: 190587 - protein, 20 aa, Artificial Sequence
  Description of Artificial Sequence: Synthetic peptide
  Seed: GNEKKAKLANVVRKMMTNSQ
GNEVKATLFNVARKMMTNSQ

SEQ ID NO: 190588 - protein, 20 aa, Artificial Sequence
  Description of Artificial Sequence: Synthetic peptide
  Seed: GNEKKAKLANVVRKMMTNSQ
GNEVKATLFNVERKMMTNSQ

SEQ ID NO: 190589 - protein, 20 aa, Artificial Sequence
  Description of Artificial Sequence: Synthetic peptide
  Seed: GNEKKAKLANVVRKMMTNSQ
GNEVKATLFNVFRKMMTNSQ

SEQ ID NO: 190590 - protein, 20 aa, Artificial Sequence
  Description of Artificial Sequence: Synthetic peptide
  Seed: GNEKKAKLANVVRKMMTNSQ
GNEVKATLFNVIRKMMTNSQ

SEQ ID NO: 190591 - protein, 20 aa, Artificial Sequence
  Description of Artificial Sequence: Synthetic peptide
  Seed: GNEKKAKLANVVRKMMTNSQ
GNEVKATLFNVLRKMMTNSQ

SEQ ID NO: 190592 - protein, 20 aa, Artificial Sequence
  Description of Artificial Sequence: Synthetic peptide
  Seed: GNEKKAKLANVVRKMMTNSQ
GNEVKATLFNVMRKMMTNSQ

SEQ ID NO: 190593 - protein, 20 aa, Artificial Sequence
  Description of Artificial Sequence: Synthetic peptide
  Seed: GNEKKAKLANVVRKMMTNSQ
GNEVKATLFNVNRKMMTNSQ

SEQ ID NO: 190594 - protein, 20 aa, Artificial Sequence
  Description of Artificial Sequence: Synthetic peptide
  Seed: GNEKKAKLANVVRKMMTNSQ
GNEVKATLFNVSRKMMTNSQ

SEQ ID NO: 190595 - protein, 20 aa, Artificial Sequence
  Description of Artificial Sequence: Synthetic peptide
  Seed: GNEKKAKLANVVRKMMTNSQ
GNEVKATLFNVTRKMMTNSQ

SEQ ID NO: 190596 - protein, 20 aa, Artificial Sequence
  Description of Artificial Sequence: Synthetic peptide
  Seed: GNEKKAKLANVVRKMMTNSQ
GNEVKATLFNVVRKMMTNSQ

SEQ ID NO: 190597 - protein, 20 aa, Artificial Sequence
  Description of Artificial Sequence: Synthetic peptide
  Seed: GNEKKAKLANVVRKMMTNSQ
GNEVKATLFNVYRKMMTNSQ

SEQ ID NO: 190598 - protein, 20 aa, Artificial Sequence
  Description of Artificial Sequence: Synthetic peptide
  Seed: GNEKKAKLANVVRKMMTNSQ
GNEVKATLWNVIRKMMTNSQ

SEQ ID NO: 190599 - protein, 20 aa, Artificial Sequence
  Description of Artificial Sequence: Synthetic peptide
  Seed: GNEKKAKLANVVRKMMTNSQ
GNEVKATLWNVLRKMMTNSQ

SEQ ID NO: 190600 - protein, 20 aa, Artificial Sequence
  Description of Artificial Sequence: Synthetic peptide
  Seed: GNEKKAKLANVVRKMMTNSQ
GNEVKATLWNVVRKMMTNSQ

SEQ ID NO: 190601 - protein, 20 aa, Artificial Sequence
  Description of Artificial Sequence: Synthetic peptide
  Seed: GNEKKAKLANVVRKMMTNSQ
GNEVKATLYNVFRKMMTNSQ

SEQ ID NO: 190602 - protein, 20 aa, Artificial Sequence
  Description of Artificial Sequence: Synthetic peptide
  Seed: GNEKKAKLANVVRKMMTNSQ
GNEVKATLYNVIRKMMTNSQ

SEQ ID NO: 190603 - protein, 20 aa, Artificial Sequence
  Description of Artificial Sequence: Synthetic peptide
  Seed: GNEKKAKLANVVRKMMTNSQ
GNEVKATLYNVLRKMMTNSQ

SEQ ID NO: 190604 - protein, 20 aa, Artificial Sequence
  Description of Artificial Sequence: Synthetic peptide
  Seed: GNEKKAKLANVVRKMMTNSQ
GNEVKATLYNVMRKMMTNSQ

SEQ ID NO: 190605 - protein, 20 aa, Artificial Sequence
  Description of Artificial Sequence: Synthetic peptide
  Seed: GNEKKAKLANVVRKMMTNSQ
GNEVKATLYNVVRKMMTNSQ

SEQ ID NO: 190606 - protein, 20 aa, Artificial Sequence
  Description of Artificial Sequence: Synthetic peptide
  Seed: GNEKKAKLANVVRKMMTNSQ
GNEVKAVLANVARKMMTNSQ

SEQ ID NO: 190607 - protein, 20 aa, Artificial Sequence
  Description of Artificial Sequence: Synthetic peptide
  Seed: GNEKKAKLANVVRKMMTNSQ
GNEVKAVLANVIRKMMTNSQ

SEQ ID NO: 190608 - protein, 20 aa, Artificial Sequence
  Description of Artificial Sequence: Synthetic peptide
  Seed: GNEKKAKLANVVRKMMTNSQ
GNEVKAVLANVLRKMMTNSQ

SEQ ID NO: 190609 - protein, 20 aa, Artificial Sequence
  Description of Artificial Sequence: Synthetic peptide
  Seed: GNEKKAKLANVVRKMMTNSQ
GNEVKAVLANVVRKMMTNSQ

SEQ ID NO: 190610 - protein, 20 aa, Artificial Sequence
  Description of Artificial Sequence: Synthetic peptide
  Seed: GNEKKAKLANVVRKMMTNSQ
GNEVKAVLFNVARKMMTNSQ

SEQ ID NO: 190611 - protein, 20 aa, Artificial Sequence
  Description of Artificial Sequence: Synthetic peptide
  Seed: GNEKKAKLANVVRKMMTNSQ
GNEVKAVLFNVIRKMMTNSQ

SEQ ID NO: 190612 - protein, 20 aa, Artificial Sequence
  Description of Artificial Sequence: Synthetic peptide
  Seed: GNEKKAKLANVVRKMMTNSQ
GNEVKAVLFNVLRKMMTNSQ

SEQ ID NO: 190613 - protein, 20 aa, Artificial Sequence
  Description of Artificial Sequence: Synthetic peptide
  Seed: GNEKKAKLANVVRKMMTNSQ
GNEVKAVLFNVMRKMMTNSQ

SEQ ID NO: 190614 - protein, 20 aa, Artificial Sequence
  Description of Artificial Sequence: Synthetic peptide
  Seed: GNEKKAKLANVVRKMMTNSQ
GNEVKAVLFNVNRKMMTNSQ

SEQ ID NO: 190615 - protein, 20 aa, Artificial Sequence
  Description of Artificial Sequence: Synthetic peptide
  Seed: GNEKKAKLANVVRKMMTNSQ
GNEVKAVLFNVTRKMMTNSQ

SEQ ID NO: 190616 - protein, 20 aa, Artificial Sequence
  Description of Artificial Sequence: Synthetic peptide
  Seed: GNEKKAKLANVVRKMMTNSQ
GNEVKAVLFNVVRKMMTNSQ

SEQ ID NO: 190617 - protein, 20 aa, Artificial Sequence
  Description of Artificial Sequence: Synthetic peptide
  Seed: GNEKKAKLANVVRKMMTNSQ
GNEVKAVLFNVYRKMMTNSQ

SEQ ID NO: 190618 - protein, 20 aa, Artificial Sequence
  Description of Artificial Sequence: Synthetic peptide
  Seed: GNEKKAKLANVVRKMMTNSQ
GNEVKAVLGNVARKMMTNSQ

SEQ ID NO: 190619 - protein, 20 aa, Artificial Sequence
  Description of Artificial Sequence: Synthetic peptide
  Seed: GNEKKAKLANVVRKMMTNSQ
GNEVKAVLGNVIRKMMTNSQ

SEQ ID NO: 190620 - protein, 20 aa, Artificial Sequence
  Description of Artificial Sequence: Synthetic peptide
  Seed: GNEKKAKLANVVRKMMTNSQ
GNEVKAVLGNVVRKMMTNSQ

SEQ ID NO: 190621 - protein, 20 aa, Artificial Sequence
  Description of Artificial Sequence: Synthetic peptide
  Seed: GNEKKAKLANVVRKMMTNSQ
GNEVKAVLWNVIRKMMTNSQ

SEQ ID NO: 190622 - protein, 20 aa, Artificial Sequence
  Description of Artificial Sequence: Synthetic peptide
  Seed: GNEKKAKLANVVRKMMTNSQ
GNEVKAVLWNVLRKMMTNSQ

SEQ ID NO: 190623 - protein, 20 aa, Artificial Sequence
  Description of Artificial Sequence: Synthetic peptide
  Seed: GNEKKAKLANVVRKMMTNSQ
GNEVKAVLYNVIRKMMTNSQ

SEQ ID NO: 190624 - protein, 20 aa, Artificial Sequence
  Description of Artificial Sequence: Synthetic peptide
  Seed: GNEKKAKLANVVRKMMTNSQ
GNEVKAVLYNVLRKMMTNSQ

SEQ ID NO: 190625 - protein, 20 aa, Artificial Sequence
  Description of Artificial Sequence: Synthetic peptide
  Seed: GNEKKAKLANVVRKMMTNSQ
GNEVKAVLYNVMRKMMTNSQ

SEQ ID NO: 190626 - protein, 20 aa, Artificial Sequence
  Description of Artificial Sequence: Synthetic peptide
  Seed: GNEKKAKLANVVRKMMTNSQ
GNEVKAVLYNVVRKMMTNSQ

SEQ ID NO: 190627 - protein, 20 aa, Artificial Sequence
  Description of Artificial Sequence: Synthetic peptide
  Seed: GNEKKAKLANVVRKMMTNSQ
GNEVKAWLFNVIRKMMTNSQ

SEQ ID NO: 190628 - protein, 20 aa, Artificial Sequence
  Description of Artificial Sequence: Synthetic peptide
  Seed: GNEKKAKLANVVRKMMTNSQ
GNEVKAWLFNVLRKMMTNSQ

SEQ ID NO: 190629 - protein, 20 aa, Artificial Sequence
  Description of Artificial Sequence: Synthetic peptide
  Seed: GNEKKAKLANVVRKMMTNSQ
GNEVKAWLFNVMRKMMTNSQ

SEQ ID NO: 190630 - protein, 20 aa, Artificial Sequence
  Description of Artificial Sequence: Synthetic peptide
  Seed: GNEKKAKLANVVRKMMTNSQ
GNEVKAWLFNVVRKMMTNSQ

SEQ ID NO: 190631 - protein, 20 aa, Artificial Sequence
  Description of Artificial Sequence: Synthetic peptide
  Seed: GNEKKAKLANVVRKMMTNSQ
GNEVKAWLYNVVRKMMTNSQ

SEQ ID NO: 190632 - protein, 20 aa, Artificial Sequence
  Description of Artificial Sequence: Synthetic peptide
  Seed: GNEKKAKLANVVRKMMTNSQ
GNEVKAYLFNVIRKMMTNSQ

SEQ ID NO: 190633 - protein, 20 aa, Artificial Sequence
  Description of Artificial Sequence: Synthetic peptide
  Seed: GNEKKAKLANVVRKMMTNSQ
GNEVKAYLFNVVRKMMTNSQ

SEQ ID NO: 190634 - protein, 20 aa, Artificial Sequence
  Description of Artificial Sequence: Synthetic peptide
  Seed: GNEKKAKLANVVRKMMTNSQ
GNEWKAALANVARKMMTNSQ

SEQ ID NO: 190635 - protein, 20 aa, Artificial Sequence
  Description of Artificial Sequence: Synthetic peptide
  Seed: GNEKKAKLANVVRKMMTNSQ
GNEWKAALANVCRKMMTNSQ

SEQ ID NO: 190636 - protein, 20 aa, Artificial Sequence
  Description of Artificial Sequence: Synthetic peptide
  Seed: GNEKKAKLANVVRKMMTNSQ
GNEWKAALANVDRKMMTNSQ

SEQ ID NO: 190637 - protein, 20 aa, Artificial Sequence
  Description of Artificial Sequence: Synthetic peptide
  Seed: GNEKKAKLANVVRKMMTNSQ
GNEWKAALANVERKMMTNSQ

SEQ ID NO: 190638 - protein, 20 aa, Artificial Sequence
  Description of Artificial Sequence: Synthetic peptide
  Seed: GNEKKAKLANVVRKMMTNSQ
GNEWKAALANVFRKMMTNSQ

SEQ ID NO: 190639 - protein, 20 aa, Artificial Sequence
  Description of Artificial Sequence: Synthetic peptide
  Seed: GNEKKAKLANVVRKMMTNSQ
GNEWKAALANVGRKMMTNSQ

SEQ ID NO: 190640 - protein, 20 aa, Artificial Sequence
  Description of Artificial Sequence: Synthetic peptide
  Seed: GNEKKAKLANVVRKMMTNSQ
GNEWKAALANVHRKMMTNSQ

SEQ ID NO: 190641 - protein, 20 aa, Artificial Sequence
  Description of Artificial Sequence: Synthetic peptide
  Seed: GNEKKAKLANVVRKMMTNSQ
GNEWKAALANVIRKMMTNSQ

SEQ ID NO: 190642 - protein, 20 aa, Artificial Sequence
  Description of Artificial Sequence: Synthetic peptide
  Seed: GNEKKAKLANVVRKMMTNSQ
GNEWKAALANVLRKMMTNSQ

SEQ ID NO: 190643 - protein, 20 aa, Artificial Sequence
  Description of Artificial Sequence: Synthetic peptide
  Seed: GNEKKAKLANVVRKMMTNSQ
GNEWKAALANVMRKMMTNSQ

SEQ ID NO: 190644 - protein, 20 aa, Artificial Sequence
  Description of Artificial Sequence: Synthetic peptide
  Seed: GNEKKAKLANVVRKMMTNSQ
GNEWKAALANVNRKMMTNSQ

SEQ ID NO: 190645 - protein, 20 aa, Artificial Sequence
  Description of Artificial Sequence: Synthetic peptide
  Seed: GNEKKAKLANVVRKMMTNSQ
GNEWKAALANVPRKMMTNSQ

SEQ ID NO: 190646 - protein, 20 aa, Artificial Sequence
  Description of Artificial Sequence: Synthetic peptide
  Seed: GNEKKAKLANVVRKMMTNSQ
GNEWKAALANVQRKMMTNSQ

SEQ ID NO: 190647 - protein, 20 aa, Artificial Sequence
  Description of Artificial Sequence: Synthetic peptide
  Seed: GNEKKAKLANVVRKMMTNSQ
GNEWKAALANVSRKMMTNSQ

SEQ ID NO: 190648 - protein, 20 aa, Artificial Sequence
  Description of Artificial Sequence: Synthetic peptide
  Seed: GNEKKAKLANVVRKMMTNSQ
GNEWKAALANVTRKMMTNSQ

SEQ ID NO: 190649 - protein, 20 aa, Artificial Sequence
  Description of Artificial Sequence: Synthetic peptide
  Seed: GNEKKAKLANVVRKMMTNSQ
GNEWKAALANVVRKMMTNSQ

SEQ ID NO: 190650 - protein, 20 aa, Artificial Sequence
  Description of Artificial Sequence: Synthetic peptide
  Seed: GNEKKAKLANVVRKMMTNSQ
GNEWKAALANVYRKMMTNSQ

SEQ ID NO: 190651 - protein, 20 aa, Artificial Sequence
  Description of Artificial Sequence: Synthetic peptide
  Seed: GNEKKAKLANVVRKMMTNSQ
GNEWKAALFNVARKMMTNSQ

SEQ ID NO: 190652 - protein, 20 aa, Artificial Sequence
  Description of Artificial Sequence: Synthetic peptide
  Seed: GNEKKAKLANVVRKMMTNSQ
GNEWKAALFNVFRKMMTNSQ

SEQ ID NO: 190653 - protein, 20 aa, Artificial Sequence
  Description of Artificial Sequence: Synthetic peptide
  Seed: GNEKKAKLANVVRKMMTNSQ
GNEWKAALFNVIRKMMTNSQ

SEQ ID NO: 190654 - protein, 20 aa, Artificial Sequence
  Description of Artificial Sequence: Synthetic peptide
  Seed: GNEKKAKLANVVRKMMTNSQ
GNEWKAALFNVLRKMMTNSQ

SEQ ID NO: 190655 - protein, 20 aa, Artificial Sequence
  Description of Artificial Sequence: Synthetic peptide
  Seed: GNEKKAKLANVVRKMMTNSQ
GNEWKAALFNVMRKMMTNSQ

SEQ ID NO: 190656 - protein, 20 aa, Artificial Sequence
  Description of Artificial Sequence: Synthetic peptide
  Seed: GNEKKAKLANVVRKMMTNSQ
GNEWKAALFNVNRKMMTNSQ

SEQ ID NO: 190657 - protein, 20 aa, Artificial Sequence
  Description of Artificial Sequence: Synthetic peptide
  Seed: GNEKKAKLANVVRKMMTNSQ
GNEWKAALFNVTRKMMTNSQ

SEQ ID NO: 190658 - protein, 20 aa, Artificial Sequence
  Description of Artificial Sequence: Synthetic peptide
  Seed: GNEKKAKLANVVRKMMTNSQ
GNEWKAALFNVVRKMMTNSQ

SEQ ID NO: 190659 - protein, 20 aa, Artificial Sequence
  Description of Artificial Sequence: Synthetic peptide
  Seed: GNEKKAKLANVVRKMMTNSQ
GNEWKAALFNVYRKMMTNSQ

SEQ ID NO: 190660 - protein, 20 aa, Artificial Sequence
  Description of Artificial Sequence: Synthetic peptide
  Seed: GNEKKAKLANVVRKMMTNSQ
GNEWKAALGNVARKMMTNSQ

SEQ ID NO: 190661 - protein, 20 aa, Artificial Sequence
  Description of Artificial Sequence: Synthetic peptide
  Seed: GNEKKAKLANVVRKMMTNSQ
GNEWKAALGNVGRKMMTNSQ

SEQ ID NO: 190662 - protein, 20 aa, Artificial Sequence
  Description of Artificial Sequence: Synthetic peptide
  Seed: GNEKKAKLANVVRKMMTNSQ
GNEWKAALGNVIRKMMTNSQ

SEQ ID NO: 190663 - protein, 20 aa, Artificial Sequence
  Description of Artificial Sequence: Synthetic peptide
  Seed: GNEKKAKLANVVRKMMTNSQ
GNEWKAALGNVLRKMMTNSQ

SEQ ID NO: 190664 - protein, 20 aa, Artificial Sequence
  Description of Artificial Sequence: Synthetic peptide
  Seed: GNEKKAKLANVVRKMMTNSQ
GNEWKAALGNVMRKMMTNSQ

SEQ ID NO: 190665 - protein, 20 aa, Artificial Sequence
  Description of Artificial Sequence: Synthetic peptide
  Seed: GNEKKAKLANVVRKMMTNSQ
GNEWKAALGNVNRKMMTNSQ

SEQ ID NO: 190666 - protein, 20 aa, Artificial Sequence
  Description of Artificial Sequence: Synthetic peptide
  Seed: GNEKKAKLANVVRKMMTNSQ
GNEWKAALGNVSRKMMTNSQ

SEQ ID NO: 190667 - protein, 20 aa, Artificial Sequence
  Description of Artificial Sequence: Synthetic peptide
  Seed: GNEKKAKLANVVRKMMTNSQ
GNEWKAALGNVTRKMMTNSQ

SEQ ID NO: 190668 - protein, 20 aa, Artificial Sequence
  Description of Artificial Sequence: Synthetic peptide
  Seed: GNEKKAKLANVVRKMMTNSQ
GNEWKAALGNVVRKMMTNSQ

SEQ ID NO: 190669 - protein, 20 aa, Artificial Sequence
  Description of Artificial Sequence: Synthetic peptide
  Seed: GNEKKAKLANVVRKMMTNSQ
GNEWKAALINVARKMMTNSQ

SEQ ID NO: 190670 - protein, 20 aa, Artificial Sequence
  Description of Artificial Sequence: Synthetic peptide
  Seed: GNEKKAKLANVVRKMMTNSQ
GNEWKAALINVGRKMMTNSQ

SEQ ID NO: 190671 - protein, 20 aa, Artificial Sequence
  Description of Artificial Sequence: Synthetic peptide
  Seed: GNEKKAKLANVVRKMMTNSQ
GNEWKAALINVIRKMMTNSQ

SEQ ID NO: 190672 - protein, 20 aa, Artificial Sequence
  Description of Artificial Sequence: Synthetic peptide
  Seed: GNEKKAKLANVVRKMMTNSQ
GNEWKAALINVLRKMMTNSQ

SEQ ID NO: 190673 - protein, 20 aa, Artificial Sequence
  Description of Artificial Sequence: Synthetic peptide
  Seed: GNEKKAKLANVVRKMMTNSQ
GNEWKAALINVMRKMMTNSQ

SEQ ID NO: 190674 - protein, 20 aa, Artificial Sequence
  Description of Artificial Sequence: Synthetic peptide
  Seed: GNEKKAKLANVVRKMMTNSQ
GNEWKAALINVNRKMMTNSQ

SEQ ID NO: 190675 - protein, 20 aa, Artificial Sequence
  Description of Artificial Sequence: Synthetic peptide
  Seed: GNEKKAKLANVVRKMMTNSQ
GNEWKAALINVSRKMMTNSQ

SEQ ID NO: 190676 - protein, 20 aa, Artificial Sequence
  Description of Artificial Sequence: Synthetic peptide
  Seed: GNEKKAKLANVVRKMMTNSQ
GNEWKAALINVTRKMMTNSQ

SEQ ID NO: 190677 - protein, 20 aa, Artificial Sequence
  Description of Artificial Sequence: Synthetic peptide
  Seed: GNEKKAKLANVVRKMMTNSQ
GNEWKAALINVVRKMMTNSQ

SEQ ID NO: 190678 - protein, 20 aa, Artificial Sequence
  Description of Artificial Sequence: Synthetic peptide
  Seed: GNEKKAKLANVVRKMMTNSQ
GNEWKAALLNVARKMMTNSQ

SEQ ID NO: 190679 - protein, 20 aa, Artificial Sequence
  Description of Artificial Sequence: Synthetic peptide
  Seed: GNEKKAKLANVVRKMMTNSQ
GNEWKAALMNVARKMMTNSQ

SEQ ID NO: 190680 - protein, 20 aa, Artificial Sequence
  Description of Artificial Sequence: Synthetic peptide
  Seed: GNEKKAKLANVVRKMMTNSQ
GNEWKAALNNVARKMMTNSQ

SEQ ID NO: 190681 - protein, 20 aa, Artificial Sequence
  Description of Artificial Sequence: Synthetic peptide
  Seed: GNEKKAKLANVVRKMMTNSQ
GNEWKAALNNVIRKMMTNSQ

SEQ ID NO: 190682 - protein, 20 aa, Artificial Sequence
  Description of Artificial Sequence: Synthetic peptide
  Seed: GNEKKAKLANVVRKMMTNSQ
GNEWKAALNNVLRKMMTNSQ

SEQ ID NO: 190683 - protein, 20 aa, Artificial Sequence
  Description of Artificial Sequence: Synthetic peptide
  Seed: GNEKKAKLANVVRKMMTNSQ
GNEWKAALNNVMRKMMTNSQ

SEQ ID NO: 190684 - protein, 20 aa, Artificial Sequence
  Description of Artificial Sequence: Synthetic peptide
  Seed: GNEKKAKLANVVRKMMTNSQ
GNEWKAALNNVNRKMMTNSQ

SEQ ID NO: 190685 - protein, 20 aa, Artificial Sequence
  Description of Artificial Sequence: Synthetic peptide
  Seed: GNEKKAKLANVVRKMMTNSQ
GNEWKAALNNVSRKMMTNSQ

SEQ ID NO: 190686 - protein, 20 aa, Artificial Sequence
  Description of Artificial Sequence: Synthetic peptide
  Seed: GNEKKAKLANVVRKMMTNSQ
GNEWKAALNNVTRKMMTNSQ

SEQ ID NO: 190687 - protein, 20 aa, Artificial Sequence
  Description of Artificial Sequence: Synthetic peptide
  Seed: GNEKKAKLANVVRKMMTNSQ
GNEWKAALNNVVRKMMTNSQ

SEQ ID NO: 190688 - protein, 20 aa, Artificial Sequence
  Description of Artificial Sequence: Synthetic peptide
  Seed: GNEKKAKLANVVRKMMTNSQ
GNEWKAALPNVARKMMTNSQ

SEQ ID NO: 190689 - protein, 20 aa, Artificial Sequence
  Description of Artificial Sequence: Synthetic peptide
  Seed: GNEKKAKLANVVRKMMTNSQ
GNEWKAALPNVFRKMMTNSQ

SEQ ID NO: 190690 - protein, 20 aa, Artificial Sequence
  Description of Artificial Sequence: Synthetic peptide
  Seed: GNEKKAKLANVVRKMMTNSQ
GNEWKAALPNVGRKMMTNSQ

SEQ ID NO: 190691 - protein, 20 aa, Artificial Sequence
  Description of Artificial Sequence: Synthetic peptide
  Seed: GNEKKAKLANVVRKMMTNSQ
GNEWKAALPNVHRKMMTNSQ

SEQ ID NO: 190692 - protein, 20 aa, Artificial Sequence
  Description of Artificial Sequence: Synthetic peptide
  Seed: GNEKKAKLANVVRKMMTNSQ
GNEWKAALPNVIRKMMTNSQ

SEQ ID NO: 190693 - protein, 20 aa, Artificial Sequence
  Description of Artificial Sequence: Synthetic peptide
  Seed: GNEKKAKLANVVRKMMTNSQ
GNEWKAALPNVLRKMMTNSQ

SEQ ID NO: 190694 - protein, 20 aa, Artificial Sequence
  Description of Artificial Sequence: Synthetic peptide
  Seed: GNEKKAKLANVVRKMMTNSQ
GNEWKAALPNVMRKMMTNSQ

SEQ ID NO: 190695 - protein, 20 aa, Artificial Sequence
  Description of Artificial Sequence: Synthetic peptide
  Seed: GNEKKAKLANVVRKMMTNSQ
GNEWKAALPNVNRKMMTNSQ

SEQ ID NO: 190696 - protein, 20 aa, Artificial Sequence
  Description of Artificial Sequence: Synthetic peptide
  Seed: GNEKKAKLANVVRKMMTNSQ
GNEWKAALPNVQRKMMTNSQ

SEQ ID NO: 190697 - protein, 20 aa, Artificial Sequence
  Description of Artificial Sequence: Synthetic peptide
  Seed: GNEKKAKLANVVRKMMTNSQ
GNEWKAALPNVSRKMMTNSQ

SEQ ID NO: 190698 - protein, 20 aa, Artificial Sequence
  Description of Artificial Sequence: Synthetic peptide
  Seed: GNEKKAKLANVVRKMMTNSQ
GNEWKAALPNVTRKMMTNSQ

SEQ ID NO: 190699 - protein, 20 aa, Artificial Sequence
  Description of Artificial Sequence: Synthetic peptide
  Seed: GNEKKAKLANVVRKMMTNSQ
GNEWKAALPNVVRKMMTNSQ

SEQ ID NO: 190700 - protein, 20 aa, Artificial Sequence
  Description of Artificial Sequence: Synthetic peptide
  Seed: GNEKKAKLANVVRKMMTNSQ
GNEWKAALSNVARKMMTNSQ

SEQ ID NO: 190701 - protein, 20 aa, Artificial Sequence
  Description of Artificial Sequence: Synthetic peptide
  Seed: GNEKKAKLANVVRKMMTNSQ
GNEWKAALSNVGRKMMTNSQ

SEQ ID NO: 190702 - protein, 20 aa, Artificial Sequence
  Description of Artificial Sequence: Synthetic peptide
  Seed: GNEKKAKLANVVRKMMTNSQ
GNEWKAALSNVHRKMMTNSQ

SEQ ID NO: 190703 - protein, 20 aa, Artificial Sequence
  Description of Artificial Sequence: Synthetic peptide
  Seed: GNEKKAKLANVVRKMMTNSQ
GNEWKAALSNVIRKMMTNSQ

SEQ ID NO: 190704 - protein, 20 aa, Artificial Sequence
  Description of Artificial Sequence: Synthetic peptide
  Seed: GNEKKAKLANVVRKMMTNSQ
GNEWKAALSNVLRKMMTNSQ

SEQ ID NO: 190705 - protein, 20 aa, Artificial Sequence
  Description of Artificial Sequence: Synthetic peptide
  Seed: GNEKKAKLANVVRKMMTNSQ
GNEWKAALSNVMRKMMTNSQ

SEQ ID NO: 190706 - protein, 20 aa, Artificial Sequence
  Description of Artificial Sequence: Synthetic peptide
  Seed: GNEKKAKLANVVRKMMTNSQ
GNEWKAALSNVNRKMMTNSQ

SEQ ID NO: 190707 - protein, 20 aa, Artificial Sequence
  Description of Artificial Sequence: Synthetic peptide
  Seed: GNEKKAKLANVVRKMMTNSQ
GNEWKAALSNVQRKMMTNSQ

SEQ ID NO: 190708 - protein, 20 aa, Artificial Sequence
  Description of Artificial Sequence: Synthetic peptide
  Seed: GNEKKAKLANVVRKMMTNSQ
GNEWKAALSNVSRKMMTNSQ

SEQ ID NO: 190709 - protein, 20 aa, Artificial Sequence
  Description of Artificial Sequence: Synthetic peptide
  Seed: GNEKKAKLANVVRKMMTNSQ
GNEWKAALSNVTRKMMTNSQ

SEQ ID NO: 190710 - protein, 20 aa, Artificial Sequence
  Description of Artificial Sequence: Synthetic peptide
  Seed: GNEKKAKLANVVRKMMTNSQ
GNEWKAALSNVVRKMMTNSQ

SEQ ID NO: 190711 - protein, 20 aa, Artificial Sequence
  Description of Artificial Sequence: Synthetic peptide
  Seed: GNEKKAKLANVVRKMMTNSQ
GNEWKAALTNVARKMMTNSQ

SEQ ID NO: 190712 - protein, 20 aa, Artificial Sequence
  Description of Artificial Sequence: Synthetic peptide
  Seed: GNEKKAKLANVVRKMMTNSQ
GNEWKAALTNVGRKMMTNSQ

SEQ ID NO: 190713 - protein, 20 aa, Artificial Sequence
  Description of Artificial Sequence: Synthetic peptide
  Seed: GNEKKAKLANVVRKMMTNSQ
GNEWKAALTNVHRKMMTNSQ

SEQ ID NO: 190714 - protein, 20 aa, Artificial Sequence
  Description of Artificial Sequence: Synthetic peptide
  Seed: GNEKKAKLANVVRKMMTNSQ
GNEWKAALTNVIRKMMTNSQ

SEQ ID NO: 190715 - protein, 20 aa, Artificial Sequence
  Description of Artificial Sequence: Synthetic peptide
  Seed: GNEKKAKLANVVRKMMTNSQ
GNEWKAALTNVLRKMMTNSQ

SEQ ID NO: 190716 - protein, 20 aa, Artificial Sequence
  Description of Artificial Sequence: Synthetic peptide
  Seed: GNEKKAKLANVVRKMMTNSQ
GNEWKAALTNVMRKMMTNSQ

SEQ ID NO: 190717 - protein, 20 aa, Artificial Sequence
  Description of Artificial Sequence: Synthetic peptide
  Seed: GNEKKAKLANVVRKMMTNSQ
GNEWKAALTNVNRKMMTNSQ

SEQ ID NO: 190718 - protein, 20 aa, Artificial Sequence
  Description of Artificial Sequence: Synthetic peptide
  Seed: GNEKKAKLANVVRKMMTNSQ
GNEWKAALTNVQRKMMTNSQ

SEQ ID NO: 190719 - protein, 20 aa, Artificial Sequence
  Description of Artificial Sequence: Synthetic peptide
  Seed: GNEKKAKLANVVRKMMTNSQ
GNEWKAALTNVSRKMMTNSQ

SEQ ID NO: 190720 - protein, 20 aa, Artificial Sequence
  Description of Artificial Sequence: Synthetic peptide
  Seed: GNEKKAKLANVVRKMMTNSQ
GNEWKAALTNVTRKMMTNSQ

SEQ ID NO: 190721 - protein, 20 aa, Artificial Sequence
  Description of Artificial Sequence: Synthetic peptide
  Seed: GNEKKAKLANVVRKMMTNSQ
GNEWKAALTNVVRKMMTNSQ

SEQ ID NO: 190722 - protein, 20 aa, Artificial Sequence
  Description of Artificial Sequence: Synthetic peptide
  Seed: GNEKKAKLANVVRKMMTNSQ
GNEWKAALVNVARKMMTNSQ

SEQ ID NO: 190723 - protein, 20 aa, Artificial Sequence
  Description of Artificial Sequence: Synthetic peptide
  Seed: GNEKKAKLANVVRKMMTNSQ
GNEWKAALVNVGRKMMTNSQ

SEQ ID NO: 190724 - protein, 20 aa, Artificial Sequence
  Description of Artificial Sequence: Synthetic peptide
  Seed: GNEKKAKLANVVRKMMTNSQ
GNEWKAALVNVHRKMMTNSQ

SEQ ID NO: 190725 - protein, 20 aa, Artificial Sequence
  Description of Artificial Sequence: Synthetic peptide
  Seed: GNEKKAKLANVVRKMMTNSQ
GNEWKAALVNVIRKMMTNSQ

SEQ ID NO: 190726 - protein, 20 aa, Artificial Sequence
  Description of Artificial Sequence: Synthetic peptide
  Seed: GNEKKAKLANVVRKMMTNSQ
GNEWKAALVNVLRKMMTNSQ

SEQ ID NO: 190727 - protein, 20 aa, Artificial Sequence
  Description of Artificial Sequence: Synthetic peptide
  Seed: GNEKKAKLANVVRKMMTNSQ
GNEWKAALVNVMRKMMTNSQ

SEQ ID NO: 190728 - protein, 20 aa, Artificial Sequence
  Description of Artificial Sequence: Synthetic peptide
  Seed: GNEKKAKLANVVRKMMTNSQ
GNEWKAALVNVNRKMMTNSQ

SEQ ID NO: 190729 - protein, 20 aa, Artificial Sequence
  Description of Artificial Sequence: Synthetic peptide
  Seed: GNEKKAKLANVVRKMMTNSQ
GNEWKAALVNVQRKMMTNSQ

SEQ ID NO: 190730 - protein, 20 aa, Artificial Sequence
  Description of Artificial Sequence: Synthetic peptide
  Seed: GNEKKAKLANVVRKMMTNSQ
GNEWKAALVNVSRKMMTNSQ

SEQ ID NO: 190731 - protein, 20 aa, Artificial Sequence
  Description of Artificial Sequence: Synthetic peptide
  Seed: GNEKKAKLANVVRKMMTNSQ
GNEWKAALVNVTRKMMTNSQ

SEQ ID NO: 190732 - protein, 20 aa, Artificial Sequence
  Description of Artificial Sequence: Synthetic peptide
  Seed: GNEKKAKLANVVRKMMTNSQ
GNEWKAALVNVVRKMMTNSQ

SEQ ID NO: 190733 - protein, 20 aa, Artificial Sequence
  Description of Artificial Sequence: Synthetic peptide
  Seed: GNEKKAKLANVVRKMMTNSQ
GNEWKAALYNVFRKMMTNSQ

SEQ ID NO: 190734 - protein, 20 aa, Artificial Sequence
  Description of Artificial Sequence: Synthetic peptide
  Seed: GNEKKAKLANVVRKMMTNSQ
GNEWKAALYNVIRKMMTNSQ

SEQ ID NO: 190735 - protein, 20 aa, Artificial Sequence
  Description of Artificial Sequence: Synthetic peptide
  Seed: GNEKKAKLANVVRKMMTNSQ
GNEWKAALYNVLRKMMTNSQ

SEQ ID NO: 190736 - protein, 20 aa, Artificial Sequence
  Description of Artificial Sequence: Synthetic peptide
  Seed: GNEKKAKLANVVRKMMTNSQ
GNEWKAALYNVVRKMMTNSQ

SEQ ID NO: 190737 - protein, 20 aa, Artificial Sequence
  Description of Artificial Sequence: Synthetic peptide
  Seed: GNEKKAKLANVVRKMMTNSQ
GNEWKACLANVIRKMMTNSQ

SEQ ID NO: 190738 - protein, 20 aa, Artificial Sequence
  Description of Artificial Sequence: Synthetic peptide
  Seed: GNEKKAKLANVVRKMMTNSQ
GNEWKACLANVLRKMMTNSQ

SEQ ID NO: 190739 - protein, 20 aa, Artificial Sequence
  Description of Artificial Sequence: Synthetic peptide
  Seed: GNEKKAKLANVVRKMMTNSQ
GNEWKACLANVVRKMMTNSQ

SEQ ID NO: 190740 - protein, 20 aa, Artificial Sequence
  Description of Artificial Sequence: Synthetic peptide
  Seed: GNEKKAKLANVVRKMMTNSQ
GNEWKACLFNVFRKMMTNSQ

SEQ ID NO: 190741 - protein, 20 aa, Artificial Sequence
  Description of Artificial Sequence: Synthetic peptide
  Seed: GNEKKAKLANVVRKMMTNSQ
GNEWKACLFNVIRKMMTNSQ

SEQ ID NO: 190742 - protein, 20 aa, Artificial Sequence
  Description of Artificial Sequence: Synthetic peptide
  Seed: GNEKKAKLANVVRKMMTNSQ
GNEWKACLFNVLRKMMTNSQ

SEQ ID NO: 190743 - protein, 20 aa, Artificial Sequence
  Description of Artificial Sequence: Synthetic peptide
  Seed: GNEKKAKLANVVRKMMTNSQ
GNEWKACLFNVVRKMMTNSQ

SEQ ID NO: 190744 - protein, 20 aa, Artificial Sequence
  Description of Artificial Sequence: Synthetic peptide
  Seed: GNEKKAKLANVVRKMMTNSQ
GNEWKACLYNVFRKMMTNSQ

SEQ ID NO: 190745 - protein, 20 aa, Artificial Sequence
  Description of Artificial Sequence: Synthetic peptide
  Seed: GNEKKAKLANVVRKMMTNSQ
GNEWKADLFNVIRKMMTNSQ

SEQ ID NO: 190746 - protein, 20 aa, Artificial Sequence
  Description of Artificial Sequence: Synthetic peptide
  Seed: GNEKKAKLANVVRKMMTNSQ
GNEWKADLFNVLRKMMTNSQ

SEQ ID NO: 190747 - protein, 20 aa, Artificial Sequence
  Description of Artificial Sequence: Synthetic peptide
  Seed: GNEKKAKLANVVRKMMTNSQ
GNEWKADLFNVVRKMMTNSQ

SEQ ID NO: 190748 - protein, 20 aa, Artificial Sequence
  Description of Artificial Sequence: Synthetic peptide
  Seed: GNEKKAKLANVVRKMMTNSQ
GNEWKAELANVARKMMTNSQ

SEQ ID NO: 190749 - protein, 20 aa, Artificial Sequence
  Description of Artificial Sequence: Synthetic peptide
  Seed: GNEKKAKLANVVRKMMTNSQ
GNEWKAELANVIRKMMTNSQ

SEQ ID NO: 190750 - protein, 20 aa, Artificial Sequence
  Description of Artificial Sequence: Synthetic peptide
  Seed: GNEKKAKLANVVRKMMTNSQ
GNEWKAELANVLRKMMTNSQ

SEQ ID NO: 190751 - protein, 20 aa, Artificial Sequence
  Description of Artificial Sequence: Synthetic peptide
  Seed: GNEKKAKLANVVRKMMTNSQ
GNEWKAELANVMRKMMTNSQ

SEQ ID NO: 190752 - protein, 20 aa, Artificial Sequence
  Description of Artificial Sequence: Synthetic peptide
  Seed: GNEKKAKLANVVRKMMTNSQ
GNEWKAELANVNRKMMTNSQ

SEQ ID NO: 190753 - protein, 20 aa, Artificial Sequence
  Description of Artificial Sequence: Synthetic peptide
  Seed: GNEKKAKLANVVRKMMTNSQ
GNEWKAELANVSRKMMTNSQ

SEQ ID NO: 190754 - protein, 20 aa, Artificial Sequence
  Description of Artificial Sequence: Synthetic peptide
  Seed: GNEKKAKLANVVRKMMTNSQ
GNEWKAELANVTRKMMTNSQ

SEQ ID NO: 190755 - protein, 20 aa, Artificial Sequence
  Description of Artificial Sequence: Synthetic peptide
  Seed: GNEKKAKLANVVRKMMTNSQ
GNEWKAELANVVRKMMTNSQ

SEQ ID NO: 190756 - protein, 20 aa, Artificial Sequence
  Description of Artificial Sequence: Synthetic peptide
  Seed: GNEKKAKLANVVRKMMTNSQ
GNEWKAELFNVARKMMTNSQ

SEQ ID NO: 190757 - protein, 20 aa, Artificial Sequence
  Description of Artificial Sequence: Synthetic peptide
  Seed: GNEKKAKLANVVRKMMTNSQ
GNEWKAELFNVFRKMMTNSQ

SEQ ID NO: 190758 - protein, 20 aa, Artificial Sequence
  Description of Artificial Sequence: Synthetic peptide
  Seed: GNEKKAKLANVVRKMMTNSQ
GNEWKAELFNVIRKMMTNSQ

SEQ ID NO: 190759 - protein, 20 aa, Artificial Sequence
  Description of Artificial Sequence: Synthetic peptide
  Seed: GNEKKAKLANVVRKMMTNSQ
GNEWKAELFNVLRKMMTNSQ

SEQ ID NO: 190760 - protein, 20 aa, Artificial Sequence
  Description of Artificial Sequence: Synthetic peptide
  Seed: GNEKKAKLANVVRKMMTNSQ
GNEWKAELFNVMRKMMTNSQ

SEQ ID NO: 190761 - protein, 20 aa, Artificial Sequence
  Description of Artificial Sequence: Synthetic peptide
  Seed: GNEKKAKLANVVRKMMTNSQ
GNEWKAELFNVSRKMMTNSQ

SEQ ID NO: 190762 - protein, 20 aa, Artificial Sequence
  Description of Artificial Sequence: Synthetic peptide
  Seed: GNEKKAKLANVVRKMMTNSQ
GNEWKAELFNVTRKMMTNSQ

SEQ ID NO: 190763 - protein, 20 aa, Artificial Sequence
  Description of Artificial Sequence: Synthetic peptide
  Seed: GNEKKAKLANVVRKMMTNSQ
GNEWKAELFNVVRKMMTNSQ

SEQ ID NO: 190764 - protein, 20 aa, Artificial Sequence
  Description of Artificial Sequence: Synthetic peptide
  Seed: GNEKKAKLANVVRKMMTNSQ
GNEWKAELFNVYRKMMTNSQ

SEQ ID NO: 190765 - protein, 20 aa, Artificial Sequence
  Description of Artificial Sequence: Synthetic peptide
  Seed: GNEKKAKLANVVRKMMTNSQ
GNEWKAELGNVARKMMTNSQ

SEQ ID NO: 190766 - protein, 20 aa, Artificial Sequence
  Description of Artificial Sequence: Synthetic peptide
  Seed: GNEKKAKLANVVRKMMTNSQ
GNEWKAELGNVIRKMMTNSQ

SEQ ID NO: 190767 - protein, 20 aa, Artificial Sequence
  Description of Artificial Sequence: Synthetic peptide
  Seed: GNEKKAKLANVVRKMMTNSQ
GNEWKAELGNVLRKMMTNSQ

SEQ ID NO: 190768 - protein, 20 aa, Artificial Sequence
  Description of Artificial Sequence: Synthetic peptide
  Seed: GNEKKAKLANVVRKMMTNSQ
GNEWKAELGNVVRKMMTNSQ

SEQ ID NO: 190769 - protein, 20 aa, Artificial Sequence
  Description of Artificial Sequence: Synthetic peptide
  Seed: GNEKKAKLANVVRKMMTNSQ
GNEWKAELPNVARKMMTNSQ

SEQ ID NO: 190770 - protein, 20 aa, Artificial Sequence
  Description of Artificial Sequence: Synthetic peptide
  Seed: GNEKKAKLANVVRKMMTNSQ
GNEWKAELPNVVRKMMTNSQ

SEQ ID NO: 190771 - protein, 20 aa, Artificial Sequence
  Description of Artificial Sequence: Synthetic peptide
  Seed: GNEKKAKLANVVRKMMTNSQ
GNEWKAELSNVARKMMTNSQ

SEQ ID NO: 190772 - protein, 20 aa, Artificial Sequence
  Description of Artificial Sequence: Synthetic peptide
  Seed: GNEKKAKLANVVRKMMTNSQ
GNEWKAELSNVIRKMMTNSQ

SEQ ID NO: 190773 - protein, 20 aa, Artificial Sequence
  Description of Artificial Sequence: Synthetic peptide
  Seed: GNEKKAKLANVVRKMMTNSQ
GNEWKAELSNVLRKMMTNSQ

SEQ ID NO: 190774 - protein, 20 aa, Artificial Sequence
  Description of Artificial Sequence: Synthetic peptide
  Seed: GNEKKAKLANVVRKMMTNSQ
GNEWKAELSNVVRKMMTNSQ

SEQ ID NO: 190775 - protein, 20 aa, Artificial Sequence
  Description of Artificial Sequence: Synthetic peptide
  Seed: GNEKKAKLANVVRKMMTNSQ
GNEWKAELTNVARKMMTNSQ

SEQ ID NO: 190776 - protein, 20 aa, Artificial Sequence
  Description of Artificial Sequence: Synthetic peptide
  Seed: GNEKKAKLANVVRKMMTNSQ
GNEWKAELVNVARKMMTNSQ

SEQ ID NO: 190777 - protein, 20 aa, Artificial Sequence
  Description of Artificial Sequence: Synthetic peptide
  Seed: GNEKKAKLANVVRKMMTNSQ
GNEWKAELYNVFRKMMTNSQ

SEQ ID NO: 190778 - protein, 20 aa, Artificial Sequence
  Description of Artificial Sequence: Synthetic peptide
  Seed: GNEKKAKLANVVRKMMTNSQ
GNEWKAELYNVIRKMMTNSQ

SEQ ID NO: 190779 - protein, 20 aa, Artificial Sequence
  Description of Artificial Sequence: Synthetic peptide
  Seed: GNEKKAKLANVVRKMMTNSQ
GNEWKAELYNVLRKMMTNSQ

SEQ ID NO: 190780 - protein, 20 aa, Artificial Sequence
  Description of Artificial Sequence: Synthetic peptide
  Seed: GNEKKAKLANVVRKMMTNSQ
GNEWKAELYNVVRKMMTNSQ

SEQ ID NO: 190781 - protein, 20 aa, Artificial Sequence
  Description of Artificial Sequence: Synthetic peptide
  Seed: GNEKKAKLANVVRKMMTNSQ
GNEWKAFLANVARKMMTNSQ

SEQ ID NO: 190782 - protein, 20 aa, Artificial Sequence
  Description of Artificial Sequence: Synthetic peptide
  Seed: GNEKKAKLANVVRKMMTNSQ
GNEWKAFLANVGRKMMTNSQ

SEQ ID NO: 190783 - protein, 20 aa, Artificial Sequence
  Description of Artificial Sequence: Synthetic peptide
  Seed: GNEKKAKLANVVRKMMTNSQ
GNEWKAFLANVIRKMMTNSQ

SEQ ID NO: 190784 - protein, 20 aa, Artificial Sequence
  Description of Artificial Sequence: Synthetic peptide
  Seed: GNEKKAKLANVVRKMMTNSQ
GNEWKAFLANVLRKMMTNSQ

SEQ ID NO: 190785 - protein, 20 aa, Artificial Sequence
  Description of Artificial Sequence: Synthetic peptide
  Seed: GNEKKAKLANVVRKMMTNSQ
GNEWKAFLANVMRKMMTNSQ

SEQ ID NO: 190786 - protein, 20 aa, Artificial Sequence
  Description of Artificial Sequence: Synthetic peptide
  Seed: GNEKKAKLANVVRKMMTNSQ
GNEWKAFLANVNRKMMTNSQ

SEQ ID NO: 190787 - protein, 20 aa, Artificial Sequence
  Description of Artificial Sequence: Synthetic peptide
  Seed: GNEKKAKLANVVRKMMTNSQ
GNEWKAFLANVPRKMMTNSQ

SEQ ID NO: 190788 - protein, 20 aa, Artificial Sequence
  Description of Artificial Sequence: Synthetic peptide
  Seed: GNEKKAKLANVVRKMMTNSQ
GNEWKAFLANVSRKMMTNSQ

SEQ ID NO: 190789 - protein, 20 aa, Artificial Sequence
  Description of Artificial Sequence: Synthetic peptide
  Seed: GNEKKAKLANVVRKMMTNSQ
GNEWKAFLANVTRKMMTNSQ

SEQ ID NO: 190790 - protein, 20 aa, Artificial Sequence
  Description of Artificial Sequence: Synthetic peptide
  Seed: GNEKKAKLANVVRKMMTNSQ
GNEWKAFLANVVRKMMTNSQ

SEQ ID NO: 190791 - protein, 20 aa, Artificial Sequence
  Description of Artificial Sequence: Synthetic peptide
  Seed: GNEKKAKLANVVRKMMTNSQ
GNEWKAFLFNVARKMMTNSQ

SEQ ID NO: 190792 - protein, 20 aa, Artificial Sequence
  Description of Artificial Sequence: Synthetic peptide
  Seed: GNEKKAKLANVVRKMMTNSQ
GNEWKAFLFNVERKMMTNSQ

SEQ ID NO: 190793 - protein, 20 aa, Artificial Sequence
  Description of Artificial Sequence: Synthetic peptide
  Seed: GNEKKAKLANVVRKMMTNSQ
GNEWKAFLFNVIRKMMTNSQ

SEQ ID NO: 190794 - protein, 20 aa, Artificial Sequence
  Description of Artificial Sequence: Synthetic peptide
  Seed: GNEKKAKLANVVRKMMTNSQ
GNEWKAFLFNVLRKMMTNSQ

SEQ ID NO: 190795 - protein, 20 aa, Artificial Sequence
  Description of Artificial Sequence: Synthetic peptide
  Seed: GNEKKAKLANVVRKMMTNSQ
GNEWKAFLFNVMRKMMTNSQ

SEQ ID NO: 190796 - protein, 20 aa, Artificial Sequence
  Description of Artificial Sequence: Synthetic peptide
  Seed: GNEKKAKLANVVRKMMTNSQ
GNEWKAFLFNVNRKMMTNSQ

SEQ ID NO: 190797 - protein, 20 aa, Artificial Sequence
  Description of Artificial Sequence: Synthetic peptide
  Seed: GNEKKAKLANVVRKMMTNSQ
GNEWKAFLFNVSRKMMTNSQ

SEQ ID NO: 190798 - protein, 20 aa, Artificial Sequence
  Description of Artificial Sequence: Synthetic peptide
  Seed: GNEKKAKLANVVRKMMTNSQ
GNEWKAFLFNVTRKMMTNSQ

SEQ ID NO: 190799 - protein, 20 aa, Artificial Sequence
  Description of Artificial Sequence: Synthetic peptide
  Seed: GNEKKAKLANVVRKMMTNSQ
GNEWKAFLFNVVRKMMTNSQ

SEQ ID NO: 190800 - protein, 20 aa, Artificial Sequence
  Description of Artificial Sequence: Synthetic peptide
  Seed: GNEKKAKLANVVRKMMTNSQ
GNEWKAFLGNVARKMMTNSQ

SEQ ID NO: 190801 - protein, 20 aa, Artificial Sequence
  Description of Artificial Sequence: Synthetic peptide
  Seed: GNEKKAKLANVVRKMMTNSQ
GNEWKAFLGNVIRKMMTNSQ

SEQ ID NO: 190802 - protein, 20 aa, Artificial Sequence
  Description of Artificial Sequence: Synthetic peptide
  Seed: GNEKKAKLANVVRKMMTNSQ
GNEWKAFLGNVLRKMMTNSQ

SEQ ID NO: 190803 - protein, 20 aa, Artificial Sequence
  Description of Artificial Sequence: Synthetic peptide
  Seed: GNEKKAKLANVVRKMMTNSQ
GNEWKAFLGNVVRKMMTNSQ

SEQ ID NO: 190804 - protein, 20 aa, Artificial Sequence
  Description of Artificial Sequence: Synthetic peptide
  Seed: GNEKKAKLANVVRKMMTNSQ
GNEWKAFLINVARKMMTNSQ

SEQ ID NO: 190805 - protein, 20 aa, Artificial Sequence
  Description of Artificial Sequence: Synthetic peptide
  Seed: GNEKKAKLANVVRKMMTNSQ
GNEWKAFLLNVIRKMMTNSQ

SEQ ID NO: 190806 - protein, 20 aa, Artificial Sequence
  Description of Artificial Sequence: Synthetic peptide
  Seed: GNEKKAKLANVVRKMMTNSQ
GNEWKAFLLNVVRKMMTNSQ

SEQ ID NO: 190807 - protein, 20 aa, Artificial Sequence
  Description of Artificial Sequence: Synthetic peptide
  Seed: GNEKKAKLANVVRKMMTNSQ
GNEWKAFLNNVARKMMTNSQ

SEQ ID NO: 190808 - protein, 20 aa, Artificial Sequence
  Description of Artificial Sequence: Synthetic peptide
  Seed: GNEKKAKLANVVRKMMTNSQ
GNEWKAFLPNVARKMMTNSQ

SEQ ID NO: 190809 - protein, 20 aa, Artificial Sequence
  Description of Artificial Sequence: Synthetic peptide
  Seed: GNEKKAKLANVVRKMMTNSQ
GNEWKAFLPNVIRKMMTNSQ

SEQ ID NO: 190810 - protein, 20 aa, Artificial Sequence
  Description of Artificial Sequence: Synthetic peptide
  Seed: GNEKKAKLANVVRKMMTNSQ
GNEWKAFLPNVNRKMMTNSQ

SEQ ID NO: 190811 - protein, 20 aa, Artificial Sequence
  Description of Artificial Sequence: Synthetic peptide
  Seed: GNEKKAKLANVVRKMMTNSQ
GNEWKAFLPNVSRKMMTNSQ

SEQ ID NO: 190812 - protein, 20 aa, Artificial Sequence
  Description of Artificial Sequence: Synthetic peptide
  Seed: GNEKKAKLANVVRKMMTNSQ
GNEWKAFLPNVTRKMMTNSQ

SEQ ID NO: 190813 - protein, 20 aa, Artificial Sequence
  Description of Artificial Sequence: Synthetic peptide
  Seed: GNEKKAKLANVVRKMMTNSQ
GNEWKAFLPNVVRKMMTNSQ

SEQ ID NO: 190814 - protein, 20 aa, Artificial Sequence
  Description of Artificial Sequence: Synthetic peptide
  Seed: GNEKKAKLANVVRKMMTNSQ
GNEWKAFLSNVARKMMTNSQ

SEQ ID NO: 190815 - protein, 20 aa, Artificial Sequence
  Description of Artificial Sequence: Synthetic peptide
  Seed: GNEKKAKLANVVRKMMTNSQ
GNEWKAFLSNVIRKMMTNSQ

SEQ ID NO: 190816 - protein, 20 aa, Artificial Sequence
  Description of Artificial Sequence: Synthetic peptide
  Seed: GNEKKAKLANVVRKMMTNSQ
GNEWKAFLSNVLRKMMTNSQ

SEQ ID NO: 190817 - protein, 20 aa, Artificial Sequence
  Description of Artificial Sequence: Synthetic peptide
  Seed: GNEKKAKLANVVRKMMTNSQ
GNEWKAFLSNVNRKMMTNSQ

SEQ ID NO: 190818 - protein, 20 aa, Artificial Sequence
  Description of Artificial Sequence: Synthetic peptide
  Seed: GNEKKAKLANVVRKMMTNSQ
GNEWKAFLSNVSRKMMTNSQ

SEQ ID NO: 190819 - protein, 20 aa, Artificial Sequence
  Description of Artificial Sequence: Synthetic peptide
  Seed: GNEKKAKLANVVRKMMTNSQ
GNEWKAFLSNVTRKMMTNSQ

SEQ ID NO: 190820 - protein, 20 aa, Artificial Sequence
  Description of Artificial Sequence: Synthetic peptide
  Seed: GNEKKAKLANVVRKMMTNSQ
GNEWKAFLSNVVRKMMTNSQ

SEQ ID NO: 190821 - protein, 20 aa, Artificial Sequence
  Description of Artificial Sequence: Synthetic peptide
  Seed: GNEKKAKLANVVRKMMTNSQ
GNEWKAFLTNVARKMMTNSQ

SEQ ID NO: 190822 - protein, 20 aa, Artificial Sequence
  Description of Artificial Sequence: Synthetic peptide
  Seed: GNEKKAKLANVVRKMMTNSQ
GNEWKAFLTNVNRKMMTNSQ

SEQ ID NO: 190823 - protein, 20 aa, Artificial Sequence
  Description of Artificial Sequence: Synthetic peptide
  Seed: GNEKKAKLANVVRKMMTNSQ
GNEWKAFLTNVSRKMMTNSQ

SEQ ID NO: 190824 - protein, 20 aa, Artificial Sequence
  Description of Artificial Sequence: Synthetic peptide
  Seed: GNEKKAKLANVVRKMMTNSQ
GNEWKAFLTNVVRKMMTNSQ

SEQ ID NO: 190825 - protein, 20 aa, Artificial Sequence
  Description of Artificial Sequence: Synthetic peptide
  Seed: GNEKKAKLANVVRKMMTNSQ
GNEWKAFLVNVARKMMTNSQ

SEQ ID NO: 190826 - protein, 20 aa, Artificial Sequence
  Description of Artificial Sequence: Synthetic peptide
  Seed: GNEKKAKLANVVRKMMTNSQ
GNEWKAFLVNVNRKMMTNSQ

SEQ ID NO: 190827 - protein, 20 aa, Artificial Sequence
  Description of Artificial Sequence: Synthetic peptide
  Seed: GNEKKAKLANVVRKMMTNSQ
GNEWKAFLVNVSRKMMTNSQ

SEQ ID NO: 190828 - protein, 20 aa, Artificial Sequence
  Description of Artificial Sequence: Synthetic peptide
  Seed: GNEKKAKLANVVRKMMTNSQ
GNEWKAFLWNVVRKMMTNSQ

SEQ ID NO: 190829 - protein, 20 aa, Artificial Sequence
  Description of Artificial Sequence: Synthetic peptide
  Seed: GNEKKAKLANVVRKMMTNSQ
GNEWKAFLYNVIRKMMTNSQ

SEQ ID NO: 190830 - protein, 20 aa, Artificial Sequence
  Description of Artificial Sequence: Synthetic peptide
  Seed: GNEKKAKLANVVRKMMTNSQ
GNEWKAFLYNVVRKMMTNSQ

SEQ ID NO: 190831 - protein, 20 aa, Artificial Sequence
  Description of Artificial Sequence: Synthetic peptide
  Seed: GNEKKAKLANVVRKMMTNSQ
GNEWKAGLANVARKMMTNSQ

SEQ ID NO: 190832 - protein, 20 aa, Artificial Sequence
  Description of Artificial Sequence: Synthetic peptide
  Seed: GNEKKAKLANVVRKMMTNSQ
GNEWKAGLANVIRKMMTNSQ

SEQ ID NO: 190833 - protein, 20 aa, Artificial Sequence
  Description of Artificial Sequence: Synthetic peptide
  Seed: GNEKKAKLANVVRKMMTNSQ
GNEWKAGLANVLRKMMTNSQ

SEQ ID NO: 190834 - protein, 20 aa, Artificial Sequence
  Description of Artificial Sequence: Synthetic peptide
  Seed: GNEKKAKLANVVRKMMTNSQ
GNEWKAGLANVMRKMMTNSQ

SEQ ID NO: 190835 - protein, 20 aa, Artificial Sequence
  Description of Artificial Sequence: Synthetic peptide
  Seed: GNEKKAKLANVVRKMMTNSQ
GNEWKAGLANVVRKMMTNSQ

SEQ ID NO: 190836 - protein, 20 aa, Artificial Sequence
  Description of Artificial Sequence: Synthetic peptide
  Seed: GNEKKAKLANVVRKMMTNSQ
GNEWKAGLFNVIRKMMTNSQ

SEQ ID NO: 190837 - protein, 20 aa, Artificial Sequence
  Description of Artificial Sequence: Synthetic peptide
  Seed: GNEKKAKLANVVRKMMTNSQ
GNEWKAGLFNVLRKMMTNSQ

SEQ ID NO: 190838 - protein, 20 aa, Artificial Sequence
  Description of Artificial Sequence: Synthetic peptide
  Seed: GNEKKAKLANVVRKMMTNSQ
GNEWKAGLFNVVRKMMTNSQ

SEQ ID NO: 190839 - protein, 20 aa, Artificial Sequence
  Description of Artificial Sequence: Synthetic peptide
  Seed: GNEKKAKLANVVRKMMTNSQ
GNEWKAGLGNVIRKMMTNSQ

SEQ ID NO: 190840 - protein, 20 aa, Artificial Sequence
  Description of Artificial Sequence: Synthetic peptide
  Seed: GNEKKAKLANVVRKMMTNSQ
GNEWKAGLGNVLRKMMTNSQ

SEQ ID NO: 190841 - protein, 20 aa, Artificial Sequence
  Description of Artificial Sequence: Synthetic peptide
  Seed: GNEKKAKLANVVRKMMTNSQ
GNEWKAGLGNVVRKMMTNSQ

SEQ ID NO: 190842 - protein, 20 aa, Artificial Sequence
  Description of Artificial Sequence: Synthetic peptide
  Seed: GNEKKAKLANVVRKMMTNSQ
GNEWKAGLPNVIRKMMTNSQ

SEQ ID NO: 190843 - protein, 20 aa, Artificial Sequence
  Description of Artificial Sequence: Synthetic peptide
  Seed: GNEKKAKLANVVRKMMTNSQ
GNEWKAGLPNVLRKMMTNSQ

SEQ ID NO: 190844 - protein, 20 aa, Artificial Sequence
  Description of Artificial Sequence: Synthetic peptide
  Seed: GNEKKAKLANVVRKMMTNSQ
GNEWKAGLPNVVRKMMTNSQ

SEQ ID NO: 190845 - protein, 20 aa, Artificial Sequence
  Description of Artificial Sequence: Synthetic peptide
  Seed: GNEKKAKLANVVRKMMTNSQ
GNEWKAGLSNVARKMMTNSQ

SEQ ID NO: 190846 - protein, 20 aa, Artificial Sequence
  Description of Artificial Sequence: Synthetic peptide
  Seed: GNEKKAKLANVVRKMMTNSQ
GNEWKAGLSNVIRKMMTNSQ

SEQ ID NO: 190847 - protein, 20 aa, Artificial Sequence
  Description of Artificial Sequence: Synthetic peptide
  Seed: GNEKKAKLANVVRKMMTNSQ
GNEWKAGLSNVLRKMMTNSQ

SEQ ID NO: 190848 - protein, 20 aa, Artificial Sequence
  Description of Artificial Sequence: Synthetic peptide
  Seed: GNEKKAKLANVVRKMMTNSQ
GNEWKAGLSNVVRKMMTNSQ

SEQ ID NO: 190849 - protein, 20 aa, Artificial Sequence
  Description of Artificial Sequence: Synthetic peptide
  Seed: GNEKKAKLANVVRKMMTNSQ
GNEWKAHLANVIRKMMTNSQ

SEQ ID NO: 190850 - protein, 20 aa, Artificial Sequence
  Description of Artificial Sequence: Synthetic peptide
  Seed: GNEKKAKLANVVRKMMTNSQ
GNEWKAHLANVLRKMMTNSQ

SEQ ID NO: 190851 - protein, 20 aa, Artificial Sequence
  Description of Artificial Sequence: Synthetic peptide
  Seed: GNEKKAKLANVVRKMMTNSQ
GNEWKAHLANVVRKMMTNSQ

SEQ ID NO: 190852 - protein, 20 aa, Artificial Sequence
  Description of Artificial Sequence: Synthetic peptide
  Seed: GNEKKAKLANVVRKMMTNSQ
GNEWKAHLFNVARKMMTNSQ

SEQ ID NO: 190853 - protein, 20 aa, Artificial Sequence
  Description of Artificial Sequence: Synthetic peptide
  Seed: GNEKKAKLANVVRKMMTNSQ
GNEWKAHLFNVERKMMTNSQ

SEQ ID NO: 190854 - protein, 20 aa, Artificial Sequence
  Description of Artificial Sequence: Synthetic peptide
  Seed: GNEKKAKLANVVRKMMTNSQ
GNEWKAHLFNVFRKMMTNSQ

SEQ ID NO: 190855 - protein, 20 aa, Artificial Sequence
  Description of Artificial Sequence: Synthetic peptide
  Seed: GNEKKAKLANVVRKMMTNSQ
GNEWKAHLFNVIRKMMTNSQ

SEQ ID NO: 190856 - protein, 20 aa, Artificial Sequence
  Description of Artificial Sequence: Synthetic peptide
  Seed: GNEKKAKLANVVRKMMTNSQ
GNEWKAHLFNVLRKMMTNSQ

SEQ ID NO: 190857 - protein, 20 aa, Artificial Sequence
  Description of Artificial Sequence: Synthetic peptide
  Seed: GNEKKAKLANVVRKMMTNSQ
GNEWKAHLFNVMRKMMTNSQ

SEQ ID NO: 190858 - protein, 20 aa, Artificial Sequence
  Description of Artificial Sequence: Synthetic peptide
  Seed: GNEKKAKLANVVRKMMTNSQ
GNEWKAHLFNVNRKMMTNSQ

SEQ ID NO: 190859 - protein, 20 aa, Artificial Sequence
  Description of Artificial Sequence: Synthetic peptide
  Seed: GNEKKAKLANVVRKMMTNSQ
GNEWKAHLFNVSRKMMTNSQ

SEQ ID NO: 190860 - protein, 20 aa, Artificial Sequence
  Description of Artificial Sequence: Synthetic peptide
  Seed: GNEKKAKLANVVRKMMTNSQ
GNEWKAHLFNVTRKMMTNSQ

SEQ ID NO: 190861 - protein, 20 aa, Artificial Sequence
  Description of Artificial Sequence: Synthetic peptide
  Seed: GNEKKAKLANVVRKMMTNSQ
GNEWKAHLFNVVRKMMTNSQ

SEQ ID NO: 190862 - protein, 20 aa, Artificial Sequence
  Description of Artificial Sequence: Synthetic peptide
  Seed: GNEKKAKLANVVRKMMTNSQ
GNEWKAHLFNVYRKMMTNSQ

SEQ ID NO: 190863 - protein, 20 aa, Artificial Sequence
  Description of Artificial Sequence: Synthetic peptide
  Seed: GNEKKAKLANVVRKMMTNSQ
GNEWKAHLINVLRKMMTNSQ

SEQ ID NO: 190864 - protein, 20 aa, Artificial Sequence
  Description of Artificial Sequence: Synthetic peptide
  Seed: GNEKKAKLANVVRKMMTNSQ
GNEWKAHLLNVFRKMMTNSQ

SEQ ID NO: 190865 - protein, 20 aa, Artificial Sequence
  Description of Artificial Sequence: Synthetic peptide
  Seed: GNEKKAKLANVVRKMMTNSQ
GNEWKAHLLNVIRKMMTNSQ

SEQ ID NO: 190866 - protein, 20 aa, Artificial Sequence
  Description of Artificial Sequence: Synthetic peptide
  Seed: GNEKKAKLANVVRKMMTNSQ
GNEWKAHLLNVLRKMMTNSQ

SEQ ID NO: 190867 - protein, 20 aa, Artificial Sequence
  Description of Artificial Sequence: Synthetic peptide
  Seed: GNEKKAKLANVVRKMMTNSQ
GNEWKAHLLNVVRKMMTNSQ

SEQ ID NO: 190868 - protein, 20 aa, Artificial Sequence
  Description of Artificial Sequence: Synthetic peptide
  Seed: GNEKKAKLANVVRKMMTNSQ
GNEWKAHLMNVLRKMMTNSQ

SEQ ID NO: 190869 - protein, 20 aa, Artificial Sequence
  Description of Artificial Sequence: Synthetic peptide
  Seed: GNEKKAKLANVVRKMMTNSQ
GNEWKAHLWNVFRKMMTNSQ

SEQ ID NO: 190870 - protein, 20 aa, Artificial Sequence
  Description of Artificial Sequence: Synthetic peptide
  Seed: GNEKKAKLANVVRKMMTNSQ
GNEWKAHLWNVIRKMMTNSQ

SEQ ID NO: 190871 - protein, 20 aa, Artificial Sequence
  Description of Artificial Sequence: Synthetic peptide
  Seed: GNEKKAKLANVVRKMMTNSQ
GNEWKAHLWNVLRKMMTNSQ

SEQ ID NO: 190872 - protein, 20 aa, Artificial Sequence
  Description of Artificial Sequence: Synthetic peptide
  Seed: GNEKKAKLANVVRKMMTNSQ
GNEWKAHLWNVVRKMMTNSQ

SEQ ID NO: 190873 - protein, 20 aa, Artificial Sequence
  Description of Artificial Sequence: Synthetic peptide
  Seed: GNEKKAKLANVVRKMMTNSQ
GNEWKAHLYNVFRKMMTNSQ

SEQ ID NO: 190874 - protein, 20 aa, Artificial Sequence
  Description of Artificial Sequence: Synthetic peptide
  Seed: GNEKKAKLANVVRKMMTNSQ
GNEWKAHLYNVIRKMMTNSQ

SEQ ID NO: 190875 - protein, 20 aa, Artificial Sequence
  Description of Artificial Sequence: Synthetic peptide
  Seed: GNEKKAKLANVVRKMMTNSQ
GNEWKAHLYNVLRKMMTNSQ

SEQ ID NO: 190876 - protein, 20 aa, Artificial Sequence
  Description of Artificial Sequence: Synthetic peptide
  Seed: GNEKKAKLANVVRKMMTNSQ
GNEWKAHLYNVVRKMMTNSQ

SEQ ID NO: 190877 - protein, 20 aa, Artificial Sequence
  Description of Artificial Sequence: Synthetic peptide
  Seed: GNEKKAKLANVVRKMMTNSQ
GNEWKAILANVARKMMTNSQ

SEQ ID NO: 190878 - protein, 20 aa, Artificial Sequence
  Description of Artificial Sequence: Synthetic peptide
  Seed: GNEKKAKLANVVRKMMTNSQ
GNEWKAILANVDRKMMTNSQ

SEQ ID NO: 190879 - protein, 20 aa, Artificial Sequence
  Description of Artificial Sequence: Synthetic peptide
  Seed: GNEKKAKLANVVRKMMTNSQ
GNEWKAILANVERKMMTNSQ

SEQ ID NO: 190880 - protein, 20 aa, Artificial Sequence
  Description of Artificial Sequence: Synthetic peptide
  Seed: GNEKKAKLANVVRKMMTNSQ
GNEWKAILANVFRKMMTNSQ

SEQ ID NO: 190881 - protein, 20 aa, Artificial Sequence
  Description of Artificial Sequence: Synthetic peptide
  Seed: GNEKKAKLANVVRKMMTNSQ
GNEWKAILANVGRKMMTNSQ

SEQ ID NO: 190882 - protein, 20 aa, Artificial Sequence
  Description of Artificial Sequence: Synthetic peptide
  Seed: GNEKKAKLANVVRKMMTNSQ
GNEWKAILANVHRKMMTNSQ

SEQ ID NO: 190883 - protein, 20 aa, Artificial Sequence
  Description of Artificial Sequence: Synthetic peptide
  Seed: GNEKKAKLANVVRKMMTNSQ
GNEWKAILANVIRKMMTNSQ

SEQ ID NO: 190884 - protein, 20 aa, Artificial Sequence
  Description of Artificial Sequence: Synthetic peptide
  Seed: GNEKKAKLANVVRKMMTNSQ
GNEWKAILANVLRKMMTNSQ

SEQ ID NO: 190885 - protein, 20 aa, Artificial Sequence
  Description of Artificial Sequence: Synthetic peptide
  Seed: GNEKKAKLANVVRKMMTNSQ
GNEWKAILANVMRKMMTNSQ

SEQ ID NO: 190886 - protein, 20 aa, Artificial Sequence
  Description of Artificial Sequence: Synthetic peptide
  Seed: GNEKKAKLANVVRKMMTNSQ
GNEWKAILANVNRKMMTNSQ

SEQ ID NO: 190887 - protein, 20 aa, Artificial Sequence
  Description of Artificial Sequence: Synthetic peptide
  Seed: GNEKKAKLANVVRKMMTNSQ
GNEWKAILANVPRKMMTNSQ

SEQ ID NO: 190888 - protein, 20 aa, Artificial Sequence
  Description of Artificial Sequence: Synthetic peptide
  Seed: GNEKKAKLANVVRKMMTNSQ
GNEWKAILANVQRKMMTNSQ

SEQ ID NO: 190889 - protein, 20 aa, Artificial Sequence
  Description of Artificial Sequence: Synthetic peptide
  Seed: GNEKKAKLANVVRKMMTNSQ
GNEWKAILANVSRKMMTNSQ

SEQ ID NO: 190890 - protein, 20 aa, Artificial Sequence
  Description of Artificial Sequence: Synthetic peptide
  Seed: GNEKKAKLANVVRKMMTNSQ
GNEWKAILANVTRKMMTNSQ

SEQ ID NO: 190891 - protein, 20 aa, Artificial Sequence
  Description of Artificial Sequence: Synthetic peptide
  Seed: GNEKKAKLANVVRKMMTNSQ
GNEWKAILANVVRKMMTNSQ

SEQ ID NO: 190892 - protein, 20 aa, Artificial Sequence
  Description of Artificial Sequence: Synthetic peptide
  Seed: GNEKKAKLANVVRKMMTNSQ
GNEWKAILFNVARKMMTNSQ

SEQ ID NO: 190893 - protein, 20 aa, Artificial Sequence
  Description of Artificial Sequence: Synthetic peptide
  Seed: GNEKKAKLANVVRKMMTNSQ
GNEWKAILFNVDRKMMTNSQ

SEQ ID NO: 190894 - protein, 20 aa, Artificial Sequence
  Description of Artificial Sequence: Synthetic peptide
  Seed: GNEKKAKLANVVRKMMTNSQ
GNEWKAILFNVERKMMTNSQ

SEQ ID NO: 190895 - protein, 20 aa, Artificial Sequence
  Description of Artificial Sequence: Synthetic peptide
  Seed: GNEKKAKLANVVRKMMTNSQ
GNEWKAILFNVIRKMMTNSQ

SEQ ID NO: 190896 - protein, 20 aa, Artificial Sequence
  Description of Artificial Sequence: Synthetic peptide
  Seed: GNEKKAKLANVVRKMMTNSQ
GNEWKAILFNVLRKMMTNSQ

SEQ ID NO: 190897 - protein, 20 aa, Artificial Sequence
  Description of Artificial Sequence: Synthetic peptide
  Seed: GNEKKAKLANVVRKMMTNSQ
GNEWKAILFNVMRKMMTNSQ

SEQ ID NO: 190898 - protein, 20 aa, Artificial Sequence
  Description of Artificial Sequence: Synthetic peptide
  Seed: GNEKKAKLANVVRKMMTNSQ
GNEWKAILFNVNRKMMTNSQ

SEQ ID NO: 190899 - protein, 20 aa, Artificial Sequence
  Description of Artificial Sequence: Synthetic peptide
  Seed: GNEKKAKLANVVRKMMTNSQ
GNEWKAILFNVSRKMMTNSQ

SEQ ID NO: 190900 - protein, 20 aa, Artificial Sequence
  Description of Artificial Sequence: Synthetic peptide
  Seed: GNEKKAKLANVVRKMMTNSQ
GNEWKAILFNVTRKMMTNSQ

SEQ ID NO: 190901 - protein, 20 aa, Artificial Sequence
  Description of Artificial Sequence: Synthetic peptide
  Seed: GNEKKAKLANVVRKMMTNSQ
GNEWKAILFNVVRKMMTNSQ

SEQ ID NO: 190902 - protein, 20 aa, Artificial Sequence
  Description of Artificial Sequence: Synthetic peptide
  Seed: GNEKKAKLANVVRKMMTNSQ
GNEWKAILFNVYRKMMTNSQ

SEQ ID NO: 190903 - protein, 20 aa, Artificial Sequence
  Description of Artificial Sequence: Synthetic peptide
  Seed: GNEKKAKLANVVRKMMTNSQ
GNEWKAILGNVARKMMTNSQ

SEQ ID NO: 190904 - protein, 20 aa, Artificial Sequence
  Description of Artificial Sequence: Synthetic peptide
  Seed: GNEKKAKLANVVRKMMTNSQ
GNEWKAILGNVGRKMMTNSQ

SEQ ID NO: 190905 - protein, 20 aa, Artificial Sequence
  Description of Artificial Sequence: Synthetic peptide
  Seed: GNEKKAKLANVVRKMMTNSQ
GNEWKAILGNVIRKMMTNSQ

SEQ ID NO: 190906 - protein, 20 aa, Artificial Sequence
  Description of Artificial Sequence: Synthetic peptide
  Seed: GNEKKAKLANVVRKMMTNSQ
GNEWKAILGNVLRKMMTNSQ

SEQ ID NO: 190907 - protein, 20 aa, Artificial Sequence
  Description of Artificial Sequence: Synthetic peptide
  Seed: GNEKKAKLANVVRKMMTNSQ
GNEWKAILGNVMRKMMTNSQ

SEQ ID NO: 190908 - protein, 20 aa, Artificial Sequence
  Description of Artificial Sequence: Synthetic peptide
  Seed: GNEKKAKLANVVRKMMTNSQ
GNEWKAILGNVNRKMMTNSQ

SEQ ID NO: 190909 - protein, 20 aa, Artificial Sequence
  Description of Artificial Sequence: Synthetic peptide
  Seed: GNEKKAKLANVVRKMMTNSQ
GNEWKAILGNVSRKMMTNSQ

SEQ ID NO: 190910 - protein, 20 aa, Artificial Sequence
  Description of Artificial Sequence: Synthetic peptide
  Seed: GNEKKAKLANVVRKMMTNSQ
GNEWKAILGNVTRKMMTNSQ

SEQ ID NO: 190911 - protein, 20 aa, Artificial Sequence
  Description of Artificial Sequence: Synthetic peptide
  Seed: GNEKKAKLANVVRKMMTNSQ
GNEWKAILGNVVRKMMTNSQ

SEQ ID NO: 190912 - protein, 20 aa, Artificial Sequence
  Description of Artificial Sequence: Synthetic peptide
  Seed: GNEKKAKLANVVRKMMTNSQ
GNEWKAILINVARKMMTNSQ

SEQ ID NO: 190913 - protein, 20 aa, Artificial Sequence
  Description of Artificial Sequence: Synthetic peptide
  Seed: GNEKKAKLANVVRKMMTNSQ
GNEWKAILINVNRKMMTNSQ

SEQ ID NO: 190914 - protein, 20 aa, Artificial Sequence
  Description of Artificial Sequence: Synthetic peptide
  Seed: GNEKKAKLANVVRKMMTNSQ
GNEWKAILINVSRKMMTNSQ

SEQ ID NO: 190915 - protein, 20 aa, Artificial Sequence
  Description of Artificial Sequence: Synthetic peptide
  Seed: GNEKKAKLANVVRKMMTNSQ
GNEWKAILINVTRKMMTNSQ

SEQ ID NO: 190916 - protein, 20 aa, Artificial Sequence
  Description of Artificial Sequence: Synthetic peptide
  Seed: GNEKKAKLANVVRKMMTNSQ
GNEWKAILMNVNRKMMTNSQ

SEQ ID NO: 190917 - protein, 20 aa, Artificial Sequence
  Description of Artificial Sequence: Synthetic peptide
  Seed: GNEKKAKLANVVRKMMTNSQ
GNEWKAILNNVARKMMTNSQ

SEQ ID NO: 190918 - protein, 20 aa, Artificial Sequence
  Description of Artificial Sequence: Synthetic peptide
  Seed: GNEKKAKLANVVRKMMTNSQ
GNEWKAILNNVGRKMMTNSQ

SEQ ID NO: 190919 - protein, 20 aa, Artificial Sequence
  Description of Artificial Sequence: Synthetic peptide
  Seed: GNEKKAKLANVVRKMMTNSQ
GNEWKAILNNVIRKMMTNSQ

SEQ ID NO: 190920 - protein, 20 aa, Artificial Sequence
  Description of Artificial Sequence: Synthetic peptide
  Seed: GNEKKAKLANVVRKMMTNSQ
GNEWKAILNNVLRKMMTNSQ

SEQ ID NO: 190921 - protein, 20 aa, Artificial Sequence
  Description of Artificial Sequence: Synthetic peptide
  Seed: GNEKKAKLANVVRKMMTNSQ
GNEWKAILNNVNRKMMTNSQ

SEQ ID NO: 190922 - protein, 20 aa, Artificial Sequence
  Description of Artificial Sequence: Synthetic peptide
  Seed: GNEKKAKLANVVRKMMTNSQ
GNEWKAILNNVSRKMMTNSQ

SEQ ID NO: 190923 - protein, 20 aa, Artificial Sequence
  Description of Artificial Sequence: Synthetic peptide
  Seed: GNEKKAKLANVVRKMMTNSQ
GNEWKAILNNVTRKMMTNSQ

SEQ ID NO: 190924 - protein, 20 aa, Artificial Sequence
  Description of Artificial Sequence: Synthetic peptide
  Seed: GNEKKAKLANVVRKMMTNSQ
GNEWKAILNNVVRKMMTNSQ

SEQ ID NO: 190925 - protein, 20 aa, Artificial Sequence
  Description of Artificial Sequence: Synthetic peptide
  Seed: GNEKKAKLANVVRKMMTNSQ
GNEWKAILPNVARKMMTNSQ

SEQ ID NO: 190926 - protein, 20 aa, Artificial Sequence
  Description of Artificial Sequence: Synthetic peptide
  Seed: GNEKKAKLANVVRKMMTNSQ
GNEWKAILPNVGRKMMTNSQ

SEQ ID NO: 190927 - protein, 20 aa, Artificial Sequence
  Description of Artificial Sequence: Synthetic peptide
  Seed: GNEKKAKLANVVRKMMTNSQ
GNEWKAILPNVHRKMMTNSQ

SEQ ID NO: 190928 - protein, 20 aa, Artificial Sequence
  Description of Artificial Sequence: Synthetic peptide
  Seed: GNEKKAKLANVVRKMMTNSQ
GNEWKAILPNVIRKMMTNSQ

SEQ ID NO: 190929 - protein, 20 aa, Artificial Sequence
  Description of Artificial Sequence: Synthetic peptide
  Seed: GNEKKAKLANVVRKMMTNSQ
GNEWKAILPNVLRKMMTNSQ

SEQ ID NO: 190930 - protein, 20 aa, Artificial Sequence
  Description of Artificial Sequence: Synthetic peptide
  Seed: GNEKKAKLANVVRKMMTNSQ
GNEWKAILPNVMRKMMTNSQ

SEQ ID NO: 190931 - protein, 20 aa, Artificial Sequence
  Description of Artificial Sequence: Synthetic peptide
  Seed: GNEKKAKLANVVRKMMTNSQ
GNEWKAILPNVNRKMMTNSQ

SEQ ID NO: 190932 - protein, 20 aa, Artificial Sequence
  Description of Artificial Sequence: Synthetic peptide
  Seed: GNEKKAKLANVVRKMMTNSQ
GNEWKAILPNVQRKMMTNSQ

SEQ ID NO: 190933 - protein, 20 aa, Artificial Sequence
  Description of Artificial Sequence: Synthetic peptide
  Seed: GNEKKAKLANVVRKMMTNSQ
GNEWKAILPNVSRKMMTNSQ

SEQ ID NO: 190934 - protein, 20 aa, Artificial Sequence
  Description of Artificial Sequence: Synthetic peptide
  Seed: GNEKKAKLANVVRKMMTNSQ
GNEWKAILPNVTRKMMTNSQ

SEQ ID NO: 190935 - protein, 20 aa, Artificial Sequence
  Description of Artificial Sequence: Synthetic peptide
  Seed: GNEKKAKLANVVRKMMTNSQ
GNEWKAILPNVVRKMMTNSQ

SEQ ID NO: 190936 - protein, 20 aa, Artificial Sequence
  Description of Artificial Sequence: Synthetic peptide
  Seed: GNEKKAKLANVVRKMMTNSQ
GNEWKAILSNVARKMMTNSQ

SEQ ID NO: 190937 - protein, 20 aa, Artificial Sequence
  Description of Artificial Sequence: Synthetic peptide
  Seed: GNEKKAKLANVVRKMMTNSQ
GNEWKAILSNVGRKMMTNSQ

SEQ ID NO: 190938 - protein, 20 aa, Artificial Sequence
  Description of Artificial Sequence: Synthetic peptide
  Seed: GNEKKAKLANVVRKMMTNSQ
GNEWKAILSNVHRKMMTNSQ

SEQ ID NO: 190939 - protein, 20 aa, Artificial Sequence
  Description of Artificial Sequence: Synthetic peptide
  Seed: GNEKKAKLANVVRKMMTNSQ
GNEWKAILSNVIRKMMTNSQ

SEQ ID NO: 190940 - protein, 20 aa, Artificial Sequence
  Description of Artificial Sequence: Synthetic peptide
  Seed: GNEKKAKLANVVRKMMTNSQ
GNEWKAILSNVLRKMMTNSQ

SEQ ID NO: 190941 - protein, 20 aa, Artificial Sequence
  Description of Artificial Sequence: Synthetic peptide
  Seed: GNEKKAKLANVVRKMMTNSQ
GNEWKAILSNVMRKMMTNSQ

SEQ ID NO: 190942 - protein, 20 aa, Artificial Sequence
  Description of Artificial Sequence: Synthetic peptide
  Seed: GNEKKAKLANVVRKMMTNSQ
GNEWKAILSNVNRKMMTNSQ

SEQ ID NO: 190943 - protein, 20 aa, Artificial Sequence
  Description of Artificial Sequence: Synthetic peptide
  Seed: GNEKKAKLANVVRKMMTNSQ
GNEWKAILSNVQRKMMTNSQ

SEQ ID NO: 190944 - protein, 20 aa, Artificial Sequence
  Description of Artificial Sequence: Synthetic peptide
  Seed: GNEKKAKLANVVRKMMTNSQ
GNEWKAILSNVSRKMMTNSQ

SEQ ID NO: 190945 - protein, 20 aa, Artificial Sequence
  Description of Artificial Sequence: Synthetic peptide
  Seed: GNEKKAKLANVVRKMMTNSQ
GNEWKAILSNVTRKMMTNSQ

SEQ ID NO: 190946 - protein, 20 aa, Artificial Sequence
  Description of Artificial Sequence: Synthetic peptide
  Seed: GNEKKAKLANVVRKMMTNSQ
GNEWKAILSNVVRKMMTNSQ

SEQ ID NO: 190947 - protein, 20 aa, Artificial Sequence
  Description of Artificial Sequence: Synthetic peptide
  Seed: GNEKKAKLANVVRKMMTNSQ
GNEWKAILTNVARKMMTNSQ

SEQ ID NO: 190948 - protein, 20 aa, Artificial Sequence
  Description of Artificial Sequence: Synthetic peptide
  Seed: GNEKKAKLANVVRKMMTNSQ
GNEWKAILTNVGRKMMTNSQ

SEQ ID NO: 190949 - protein, 20 aa, Artificial Sequence
  Description of Artificial Sequence: Synthetic peptide
  Seed: GNEKKAKLANVVRKMMTNSQ
GNEWKAILTNVHRKMMTNSQ

SEQ ID NO: 190950 - protein, 20 aa, Artificial Sequence
  Description of Artificial Sequence: Synthetic peptide
  Seed: GNEKKAKLANVVRKMMTNSQ
GNEWKAILTNVIRKMMTNSQ

SEQ ID NO: 190951 - protein, 20 aa, Artificial Sequence
  Description of Artificial Sequence: Synthetic peptide
  Seed: GNEKKAKLANVVRKMMTNSQ
GNEWKAILTNVLRKMMTNSQ

SEQ ID NO: 190952 - protein, 20 aa, Artificial Sequence
  Description of Artificial Sequence: Synthetic peptide
  Seed: GNEKKAKLANVVRKMMTNSQ
GNEWKAILTNVMRKMMTNSQ

SEQ ID NO: 190953 - protein, 20 aa, Artificial Sequence
  Description of Artificial Sequence: Synthetic peptide
  Seed: GNEKKAKLANVVRKMMTNSQ
GNEWKAILTNVNRKMMTNSQ

SEQ ID NO: 190954 - protein, 20 aa, Artificial Sequence
  Description of Artificial Sequence: Synthetic peptide
  Seed: GNEKKAKLANVVRKMMTNSQ
GNEWKAILTNVQRKMMTNSQ

SEQ ID NO: 190955 - protein, 20 aa, Artificial Sequence
  Description of Artificial Sequence: Synthetic peptide
  Seed: GNEKKAKLANVVRKMMTNSQ
GNEWKAILTNVSRKMMTNSQ

SEQ ID NO: 190956 - protein, 20 aa, Artificial Sequence
  Description of Artificial Sequence: Synthetic peptide
  Seed: GNEKKAKLANVVRKMMTNSQ
GNEWKAILTNVTRKMMTNSQ

SEQ ID NO: 190957 - protein, 20 aa, Artificial Sequence
  Description of Artificial Sequence: Synthetic peptide
  Seed: GNEKKAKLANVVRKMMTNSQ
GNEWKAILTNVVRKMMTNSQ

SEQ ID NO: 190958 - protein, 20 aa, Artificial Sequence
  Description of Artificial Sequence: Synthetic peptide
  Seed: GNEKKAKLANVVRKMMTNSQ
GNEWKAILVNVARKMMTNSQ

SEQ ID NO: 190959 - protein, 20 aa, Artificial Sequence
  Description of Artificial Sequence: Synthetic peptide
  Seed: GNEKKAKLANVVRKMMTNSQ
GNEWKAILVNVGRKMMTNSQ

SEQ ID NO: 190960 - protein, 20 aa, Artificial Sequence
  Description of Artificial Sequence: Synthetic peptide
  Seed: GNEKKAKLANVVRKMMTNSQ
GNEWKAILVNVHRKMMTNSQ

SEQ ID NO: 190961 - protein, 20 aa, Artificial Sequence
  Description of Artificial Sequence: Synthetic peptide
  Seed: GNEKKAKLANVVRKMMTNSQ
GNEWKAILVNVIRKMMTNSQ

SEQ ID NO: 190962 - protein, 20 aa, Artificial Sequence
  Description of Artificial Sequence: Synthetic peptide
  Seed: GNEKKAKLANVVRKMMTNSQ
GNEWKAILVNVMRKMMTNSQ

SEQ ID NO: 190963 - protein, 20 aa, Artificial Sequence
  Description of Artificial Sequence: Synthetic peptide
  Seed: GNEKKAKLANVVRKMMTNSQ
GNEWKAILVNVNRKMMTNSQ

SEQ ID NO: 190964 - protein, 20 aa, Artificial Sequence
  Description of Artificial Sequence: Synthetic peptide
  Seed: GNEKKAKLANVVRKMMTNSQ
GNEWKAILVNVSRKMMTNSQ

SEQ ID NO: 190965 - protein, 20 aa, Artificial Sequence
  Description of Artificial Sequence: Synthetic peptide
  Seed: GNEKKAKLANVVRKMMTNSQ
GNEWKAILVNVTRKMMTNSQ

SEQ ID NO: 190966 - protein, 20 aa, Artificial Sequence
  Description of Artificial Sequence: Synthetic peptide
  Seed: GNEKKAKLANVVRKMMTNSQ
GNEWKAILVNVVRKMMTNSQ

SEQ ID NO: 190967 - protein, 20 aa, Artificial Sequence
  Description of Artificial Sequence: Synthetic peptide
  Seed: GNEKKAKLANVVRKMMTNSQ
GNEWKAILWNVIRKMMTNSQ

SEQ ID NO: 190968 - protein, 20 aa, Artificial Sequence
  Description of Artificial Sequence: Synthetic peptide
  Seed: GNEKKAKLANVVRKMMTNSQ
GNEWKAILWNVLRKMMTNSQ

SEQ ID NO: 190969 - protein, 20 aa, Artificial Sequence
  Description of Artificial Sequence: Synthetic peptide
  Seed: GNEKKAKLANVVRKMMTNSQ
GNEWKAILWNVMRKMMTNSQ

SEQ ID NO: 190970 - protein, 20 aa, Artificial Sequence
  Description of Artificial Sequence: Synthetic peptide
  Seed: GNEKKAKLANVVRKMMTNSQ
GNEWKAILWNVVRKMMTNSQ

SEQ ID NO: 190971 - protein, 20 aa, Artificial Sequence
  Description of Artificial Sequence: Synthetic peptide
  Seed: GNEKKAKLANVVRKMMTNSQ
GNEWKAILYNVIRKMMTNSQ

SEQ ID NO: 190972 - protein, 20 aa, Artificial Sequence
  Description of Artificial Sequence: Synthetic peptide
  Seed: GNEKKAKLANVVRKMMTNSQ
GNEWKAILYNVLRKMMTNSQ

SEQ ID NO: 190973 - protein, 20 aa, Artificial Sequence
  Description of Artificial Sequence: Synthetic peptide
  Seed: GNEKKAKLANVVRKMMTNSQ
GNEWKAILYNVMRKMMTNSQ

SEQ ID NO: 190974 - protein, 20 aa, Artificial Sequence
  Description of Artificial Sequence: Synthetic peptide
  Seed: GNEKKAKLANVVRKMMTNSQ
GNEWKAILYNVVRKMMTNSQ

SEQ ID NO: 190975 - protein, 20 aa, Artificial Sequence
  Description of Artificial Sequence: Synthetic peptide
  Seed: GNEKKAKLANVVRKMMTNSQ
GNEWKAKLFNVFRKMMTNSQ

SEQ ID NO: 190976 - protein, 20 aa, Artificial Sequence
  Description of Artificial Sequence: Synthetic peptide
  Seed: GNEKKAKLANVVRKMMTNSQ
GNEWKAKLFNVIRKMMTNSQ

SEQ ID NO: 190977 - protein, 20 aa, Artificial Sequence
  Description of Artificial Sequence: Synthetic peptide
  Seed: GNEKKAKLANVVRKMMTNSQ
GNEWKAKLFNVLRKMMTNSQ

SEQ ID NO: 190978 - protein, 20 aa, Artificial Sequence
  Description of Artificial Sequence: Synthetic peptide
  Seed: GNEKKAKLANVVRKMMTNSQ
GNEWKAKLFNVMRKMMTNSQ

SEQ ID NO: 190979 - protein, 20 aa, Artificial Sequence
  Description of Artificial Sequence: Synthetic peptide
  Seed: GNEKKAKLANVVRKMMTNSQ
GNEWKAKLFNVVRKMMTNSQ

SEQ ID NO: 190980 - protein, 20 aa, Artificial Sequence
  Description of Artificial Sequence: Synthetic peptide
  Seed: GNEKKAKLANVVRKMMTNSQ
GNEWKALLANVARKMMTNSQ

SEQ ID NO: 190981 - protein, 20 aa, Artificial Sequence
  Description of Artificial Sequence: Synthetic peptide
  Seed: GNEKKAKLANVVRKMMTNSQ
GNEWKALLANVCRKMMTNSQ

SEQ ID NO: 190982 - protein, 20 aa, Artificial Sequence
  Description of Artificial Sequence: Synthetic peptide
  Seed: GNEKKAKLANVVRKMMTNSQ
GNEWKALLANVDRKMMTNSQ

SEQ ID NO: 190983 - protein, 20 aa, Artificial Sequence
  Description of Artificial Sequence: Synthetic peptide
  Seed: GNEKKAKLANVVRKMMTNSQ
GNEWKALLANVERKMMTNSQ

SEQ ID NO: 190984 - protein, 20 aa, Artificial Sequence
  Description of Artificial Sequence: Synthetic peptide
  Seed: GNEKKAKLANVVRKMMTNSQ
GNEWKALLANVFRKMMTNSQ

SEQ ID NO: 190985 - protein, 20 aa, Artificial Sequence
  Description of Artificial Sequence: Synthetic peptide
  Seed: GNEKKAKLANVVRKMMTNSQ
GNEWKALLANVGRKMMTNSQ

SEQ ID NO: 190986 - protein, 20 aa, Artificial Sequence
  Description of Artificial Sequence: Synthetic peptide
  Seed: GNEKKAKLANVVRKMMTNSQ
GNEWKALLANVHRKMMTNSQ

SEQ ID NO: 190987 - protein, 20 aa, Artificial Sequence
  Description of Artificial Sequence: Synthetic peptide
  Seed: GNEKKAKLANVVRKMMTNSQ
GNEWKALLANVIRKMMTNSQ

SEQ ID NO: 190988 - protein, 20 aa, Artificial Sequence
  Description of Artificial Sequence: Synthetic peptide
  Seed: GNEKKAKLANVVRKMMTNSQ
GNEWKALLANVKRKMMTNSQ

SEQ ID NO: 190989 - protein, 20 aa, Artificial Sequence
  Description of Artificial Sequence: Synthetic peptide
  Seed: GNEKKAKLANVVRKMMTNSQ
GNEWKALLANVLRKMMTNSQ

SEQ ID NO: 190990 - protein, 20 aa, Artificial Sequence
  Description of Artificial Sequence: Synthetic peptide
  Seed: GNEKKAKLANVVRKMMTNSQ
GNEWKALLANVMRKMMTNSQ

SEQ ID NO: 190991 - protein, 20 aa, Artificial Sequence
  Description of Artificial Sequence: Synthetic peptide
  Seed: GNEKKAKLANVVRKMMTNSQ
GNEWKALLANVNRKMMTNSQ

SEQ ID NO: 190992 - protein, 20 aa, Artificial Sequence
  Description of Artificial Sequence: Synthetic peptide
  Seed: GNEKKAKLANVVRKMMTNSQ
GNEWKALLANVPRKMMTNSQ

SEQ ID NO: 190993 - protein, 20 aa, Artificial Sequence
  Description of Artificial Sequence: Synthetic peptide
  Seed: GNEKKAKLANVVRKMMTNSQ
GNEWKALLANVQRKMMTNSQ

SEQ ID NO: 190994 - protein, 20 aa, Artificial Sequence
  Description of Artificial Sequence: Synthetic peptide
  Seed: GNEKKAKLANVVRKMMTNSQ
GNEWKALLANVRRKMMTNSQ

SEQ ID NO: 190995 - protein, 20 aa, Artificial Sequence
  Description of Artificial Sequence: Synthetic peptide
  Seed: GNEKKAKLANVVRKMMTNSQ
GNEWKALLANVSRKMMTNSQ

SEQ ID NO: 190996 - protein, 20 aa, Artificial Sequence
  Description of Artificial Sequence: Synthetic peptide
  Seed: GNEKKAKLANVVRKMMTNSQ
GNEWKALLANVTRKMMTNSQ

SEQ ID NO: 190997 - protein, 20 aa, Artificial Sequence
  Description of Artificial Sequence: Synthetic peptide
  Seed: GNEKKAKLANVVRKMMTNSQ
GNEWKALLANVVRKMMTNSQ

SEQ ID NO: 190998 - protein, 20 aa, Artificial Sequence
  Description of Artificial Sequence: Synthetic peptide
  Seed: GNEKKAKLANVVRKMMTNSQ
GNEWKALLANVYRKMMTNSQ

SEQ ID NO: 190999 - protein, 20 aa, Artificial Sequence
  Description of Artificial Sequence: Synthetic peptide
  Seed: GNEKKAKLANVVRKMMTNSQ
GNEWKALLFNVARKMMTNSQ

SEQ ID NO: 191000 - protein, 20 aa, Artificial Sequence
  Description of Artificial Sequence: Synthetic peptide
  Seed: GNEKKAKLANVVRKMMTNSQ
GNEWKALLFNVIRKMMTNSQ

SEQ ID NO: 191001 - protein, 20 aa, Artificial Sequence
  Description of Artificial Sequence: Synthetic peptide
  Seed: GNEKKAKLANVVRKMMTNSQ
GNEWKALLFNVLRKMMTNSQ

SEQ ID NO: 191002 - protein, 20 aa, Artificial Sequence
  Description of Artificial Sequence: Synthetic peptide
  Seed: GNEKKAKLANVVRKMMTNSQ
GNEWKALLFNVMRKMMTNSQ

SEQ ID NO: 191003 - protein, 20 aa, Artificial Sequence
  Description of Artificial Sequence: Synthetic peptide
  Seed: GNEKKAKLANVVRKMMTNSQ
GNEWKALLFNVTRKMMTNSQ

SEQ ID NO: 191004 - protein, 20 aa, Artificial Sequence
  Description of Artificial Sequence: Synthetic peptide
  Seed: GNEKKAKLANVVRKMMTNSQ
GNEWKALLFNVVRKMMTNSQ

SEQ ID NO: 191005 - protein, 20 aa, Artificial Sequence
  Description of Artificial Sequence: Synthetic peptide
  Seed: GNEKKAKLANVVRKMMTNSQ
GNEWKALLFNVYRKMMTNSQ

SEQ ID NO: 191006 - protein, 20 aa, Artificial Sequence
  Description of Artificial Sequence: Synthetic peptide
  Seed: GNEKKAKLANVVRKMMTNSQ
GNEWKALLGNVARKMMTNSQ

SEQ ID NO: 191007 - protein, 20 aa, Artificial Sequence
  Description of Artificial Sequence: Synthetic peptide
  Seed: GNEKKAKLANVVRKMMTNSQ
GNEWKALLGNVCRKMMTNSQ

SEQ ID NO: 191008 - protein, 20 aa, Artificial Sequence
  Description of Artificial Sequence: Synthetic peptide
  Seed: GNEKKAKLANVVRKMMTNSQ
GNEWKALLGNVDRKMMTNSQ

SEQ ID NO: 191009 - protein, 20 aa, Artificial Sequence
  Description of Artificial Sequence: Synthetic peptide
  Seed: GNEKKAKLANVVRKMMTNSQ
GNEWKALLGNVFRKMMTNSQ

SEQ ID NO: 191010 - protein, 20 aa, Artificial Sequence
  Description of Artificial Sequence: Synthetic peptide
  Seed: GNEKKAKLANVVRKMMTNSQ
GNEWKALLGNVGRKMMTNSQ

SEQ ID NO: 191011 - protein, 20 aa, Artificial Sequence
  Description of Artificial Sequence: Synthetic peptide
  Seed: GNEKKAKLANVVRKMMTNSQ
GNEWKALLGNVHRKMMTNSQ

SEQ ID NO: 191012 - protein, 20 aa, Artificial Sequence
  Description of Artificial Sequence: Synthetic peptide
  Seed: GNEKKAKLANVVRKMMTNSQ
GNEWKALLGNVIRKMMTNSQ

SEQ ID NO: 191013 - protein, 20 aa, Artificial Sequence
  Description of Artificial Sequence: Synthetic peptide
  Seed: GNEKKAKLANVVRKMMTNSQ
GNEWKALLGNVLRKMMTNSQ

SEQ ID NO: 191014 - protein, 20 aa, Artificial Sequence
  Description of Artificial Sequence: Synthetic peptide
  Seed: GNEKKAKLANVVRKMMTNSQ
GNEWKALLGNVMRKMMTNSQ

SEQ ID NO: 191015 - protein, 20 aa, Artificial Sequence
  Description of Artificial Sequence: Synthetic peptide
  Seed: GNEKKAKLANVVRKMMTNSQ
GNEWKALLGNVNRKMMTNSQ

SEQ ID NO: 191016 - protein, 20 aa, Artificial Sequence
  Description of Artificial Sequence: Synthetic peptide
  Seed: GNEKKAKLANVVRKMMTNSQ
GNEWKALLGNVPRKMMTNSQ

SEQ ID NO: 191017 - protein, 20 aa, Artificial Sequence
  Description of Artificial Sequence: Synthetic peptide
  Seed: GNEKKAKLANVVRKMMTNSQ
GNEWKALLGNVQRKMMTNSQ

SEQ ID NO: 191018 - protein, 20 aa, Artificial Sequence
  Description of Artificial Sequence: Synthetic peptide
  Seed: GNEKKAKLANVVRKMMTNSQ
GNEWKALLGNVSRKMMTNSQ

SEQ ID NO: 191019 - protein, 20 aa, Artificial Sequence
  Description of Artificial Sequence: Synthetic peptide
  Seed: GNEKKAKLANVVRKMMTNSQ
GNEWKALLGNVTRKMMTNSQ

SEQ ID NO: 191020 - protein, 20 aa, Artificial Sequence
  Description of Artificial Sequence: Synthetic peptide
  Seed: GNEKKAKLANVVRKMMTNSQ
GNEWKALLGNVVRKMMTNSQ

SEQ ID NO: 191021 - protein, 20 aa, Artificial Sequence
  Description of Artificial Sequence: Synthetic peptide
  Seed: GNEKKAKLANVVRKMMTNSQ
GNEWKALLGNVYRKMMTNSQ

SEQ ID NO: 191022 - protein, 20 aa, Artificial Sequence
  Description of Artificial Sequence: Synthetic peptide
  Seed: GNEKKAKLANVVRKMMTNSQ
GNEWKALLINVARKMMTNSQ

SEQ ID NO: 191023 - protein, 20 aa, Artificial Sequence
  Description of Artificial Sequence: Synthetic peptide
  Seed: GNEKKAKLANVVRKMMTNSQ
GNEWKALLINVGRKMMTNSQ

SEQ ID NO: 191024 - protein, 20 aa, Artificial Sequence
  Description of Artificial Sequence: Synthetic peptide
  Seed: GNEKKAKLANVVRKMMTNSQ
GNEWKALLINVHRKMMTNSQ

SEQ ID NO: 191025 - protein, 20 aa, Artificial Sequence
  Description of Artificial Sequence: Synthetic peptide
  Seed: GNEKKAKLANVVRKMMTNSQ
GNEWKALLINVIRKMMTNSQ

SEQ ID NO: 191026 - protein, 20 aa, Artificial Sequence
  Description of Artificial Sequence: Synthetic peptide
  Seed: GNEKKAKLANVVRKMMTNSQ
GNEWKALLINVMRKMMTNSQ

SEQ ID NO: 191027 - protein, 20 aa, Artificial Sequence
  Description of Artificial Sequence: Synthetic peptide
  Seed: GNEKKAKLANVVRKMMTNSQ
GNEWKALLINVNRKMMTNSQ

SEQ ID NO: 191028 - protein, 20 aa, Artificial Sequence
  Description of Artificial Sequence: Synthetic peptide
  Seed: GNEKKAKLANVVRKMMTNSQ
GNEWKALLINVSRKMMTNSQ

SEQ ID NO: 191029 - protein, 20 aa, Artificial Sequence
  Description of Artificial Sequence: Synthetic peptide
  Seed: GNEKKAKLANVVRKMMTNSQ
GNEWKALLINVTRKMMTNSQ

SEQ ID NO: 191030 - protein, 20 aa, Artificial Sequence
  Description of Artificial Sequence: Synthetic peptide
  Seed: GNEKKAKLANVVRKMMTNSQ
GNEWKALLINVVRKMMTNSQ

SEQ ID NO: 191031 - protein, 20 aa, Artificial Sequence
  Description of Artificial Sequence: Synthetic peptide
  Seed: GNEKKAKLANVVRKMMTNSQ
GNEWKALLLNVNRKMMTNSQ

SEQ ID NO: 191032 - protein, 20 aa, Artificial Sequence
  Description of Artificial Sequence: Synthetic peptide
  Seed: GNEKKAKLANVVRKMMTNSQ
GNEWKALLMNVARKMMTNSQ

SEQ ID NO: 191033 - protein, 20 aa, Artificial Sequence
  Description of Artificial Sequence: Synthetic peptide
  Seed: GNEKKAKLANVVRKMMTNSQ
GNEWKALLMNVNRKMMTNSQ

SEQ ID NO: 191034 - protein, 20 aa, Artificial Sequence
  Description of Artificial Sequence: Synthetic peptide
  Seed: GNEKKAKLANVVRKMMTNSQ
GNEWKALLMNVSRKMMTNSQ

SEQ ID NO: 191035 - protein, 20 aa, Artificial Sequence
  Description of Artificial Sequence: Synthetic peptide
  Seed: GNEKKAKLANVVRKMMTNSQ
GNEWKALLNNVARKMMTNSQ

SEQ ID NO: 191036 - protein, 20 aa, Artificial Sequence
  Description of Artificial Sequence: Synthetic peptide
  Seed: GNEKKAKLANVVRKMMTNSQ
GNEWKALLNNVGRKMMTNSQ

SEQ ID NO: 191037 - protein, 20 aa, Artificial Sequence
  Description of Artificial Sequence: Synthetic peptide
  Seed: GNEKKAKLANVVRKMMTNSQ
GNEWKALLNNVHRKMMTNSQ

SEQ ID NO: 191038 - protein, 20 aa, Artificial Sequence
  Description of Artificial Sequence: Synthetic peptide
  Seed: GNEKKAKLANVVRKMMTNSQ
GNEWKALLNNVIRKMMTNSQ

SEQ ID NO: 191039 - protein, 20 aa, Artificial Sequence
  Description of Artificial Sequence: Synthetic peptide
  Seed: GNEKKAKLANVVRKMMTNSQ
GNEWKALLNNVLRKMMTNSQ

SEQ ID NO: 191040 - protein, 20 aa, Artificial Sequence
  Description of Artificial Sequence: Synthetic peptide
  Seed: GNEKKAKLANVVRKMMTNSQ
GNEWKALLNNVMRKMMTNSQ

SEQ ID NO: 191041 - protein, 20 aa, Artificial Sequence
  Description of Artificial Sequence: Synthetic peptide
  Seed: GNEKKAKLANVVRKMMTNSQ
GNEWKALLNNVNRKMMTNSQ

SEQ ID NO: 191042 - protein, 20 aa, Artificial Sequence
  Description of Artificial Sequence: Synthetic peptide
  Seed: GNEKKAKLANVVRKMMTNSQ
GNEWKALLNNVSRKMMTNSQ

SEQ ID NO: 191043 - protein, 20 aa, Artificial Sequence
  Description of Artificial Sequence: Synthetic peptide
  Seed: GNEKKAKLANVVRKMMTNSQ
GNEWKALLNNVTRKMMTNSQ

SEQ ID NO: 191044 - protein, 20 aa, Artificial Sequence
  Description of Artificial Sequence: Synthetic peptide
  Seed: GNEKKAKLANVVRKMMTNSQ
GNEWKALLNNVVRKMMTNSQ

SEQ ID NO: 191045 - protein, 20 aa, Artificial Sequence
  Description of Artificial Sequence: Synthetic peptide
  Seed: GNEKKAKLANVVRKMMTNSQ
GNEWKALLPNVARKMMTNSQ

SEQ ID NO: 191046 - protein, 20 aa, Artificial Sequence
  Description of Artificial Sequence: Synthetic peptide
  Seed: GNEKKAKLANVVRKMMTNSQ
GNEWKALLPNVCRKMMTNSQ

SEQ ID NO: 191047 - protein, 20 aa, Artificial Sequence
  Description of Artificial Sequence: Synthetic peptide
  Seed: GNEKKAKLANVVRKMMTNSQ
GNEWKALLPNVDRKMMTNSQ

SEQ ID NO: 191048 - protein, 20 aa, Artificial Sequence
  Description of Artificial Sequence: Synthetic peptide
  Seed: GNEKKAKLANVVRKMMTNSQ
GNEWKALLPNVERKMMTNSQ

SEQ ID NO: 191049 - protein, 20 aa, Artificial Sequence
  Description of Artificial Sequence: Synthetic peptide
  Seed: GNEKKAKLANVVRKMMTNSQ
GNEWKALLPNVFRKMMTNSQ

SEQ ID NO: 191050 - protein, 20 aa, Artificial Sequence
  Description of Artificial Sequence: Synthetic peptide
  Seed: GNEKKAKLANVVRKMMTNSQ
GNEWKALLPNVGRKMMTNSQ

SEQ ID NO: 191051 - protein, 20 aa, Artificial Sequence
  Description of Artificial Sequence: Synthetic peptide
  Seed: GNEKKAKLANVVRKMMTNSQ
GNEWKALLPNVHRKMMTNSQ

SEQ ID NO: 191052 - protein, 20 aa, Artificial Sequence
  Description of Artificial Sequence: Synthetic peptide
  Seed: GNEKKAKLANVVRKMMTNSQ
GNEWKALLPNVIRKMMTNSQ

SEQ ID NO: 191053 - protein, 20 aa, Artificial Sequence
  Description of Artificial Sequence: Synthetic peptide
  Seed: GNEKKAKLANVVRKMMTNSQ
GNEWKALLPNVLRKMMTNSQ

SEQ ID NO: 191054 - protein, 20 aa, Artificial Sequence
  Description of Artificial Sequence: Synthetic peptide
  Seed: GNEKKAKLANVVRKMMTNSQ
GNEWKALLPNVMRKMMTNSQ

SEQ ID NO: 191055 - protein, 20 aa, Artificial Sequence
  Description of Artificial Sequence: Synthetic peptide
  Seed: GNEKKAKLANVVRKMMTNSQ
GNEWKALLPNVNRKMMTNSQ

SEQ ID NO: 191056 - protein, 20 aa, Artificial Sequence
  Description of Artificial Sequence: Synthetic peptide
  Seed: GNEKKAKLANVVRKMMTNSQ
GNEWKALLPNVPRKMMTNSQ

SEQ ID NO: 191057 - protein, 20 aa, Artificial Sequence
  Description of Artificial Sequence: Synthetic peptide
  Seed: GNEKKAKLANVVRKMMTNSQ
GNEWKALLPNVQRKMMTNSQ

SEQ ID NO: 191058 - protein, 20 aa, Artificial Sequence
  Description of Artificial Sequence: Synthetic peptide
  Seed: GNEKKAKLANVVRKMMTNSQ
GNEWKALLPNVSRKMMTNSQ

SEQ ID NO: 191059 - protein, 20 aa, Artificial Sequence
  Description of Artificial Sequence: Synthetic peptide
  Seed: GNEKKAKLANVVRKMMTNSQ
GNEWKALLPNVTRKMMTNSQ

SEQ ID NO: 191060 - protein, 20 aa, Artificial Sequence
  Description of Artificial Sequence: Synthetic peptide
  Seed: GNEKKAKLANVVRKMMTNSQ
GNEWKALLPNVVRKMMTNSQ

SEQ ID NO: 191061 - protein, 20 aa, Artificial Sequence
  Description of Artificial Sequence: Synthetic peptide
  Seed: GNEKKAKLANVVRKMMTNSQ
GNEWKALLPNVYRKMMTNSQ

SEQ ID NO: 191062 - protein, 20 aa, Artificial Sequence
  Description of Artificial Sequence: Synthetic peptide
  Seed: GNEKKAKLANVVRKMMTNSQ
GNEWKALLSNVARKMMTNSQ

SEQ ID NO: 191063 - protein, 20 aa, Artificial Sequence
  Description of Artificial Sequence: Synthetic peptide
  Seed: GNEKKAKLANVVRKMMTNSQ
GNEWKALLSNVCRKMMTNSQ

SEQ ID NO: 191064 - protein, 20 aa, Artificial Sequence
  Description of Artificial Sequence: Synthetic peptide
  Seed: GNEKKAKLANVVRKMMTNSQ
GNEWKALLSNVDRKMMTNSQ

SEQ ID NO: 191065 - protein, 20 aa, Artificial Sequence
  Description of Artificial Sequence: Synthetic peptide
  Seed: GNEKKAKLANVVRKMMTNSQ
GNEWKALLSNVERKMMTNSQ

SEQ ID NO: 191066 - protein, 20 aa, Artificial Sequence
  Description of Artificial Sequence: Synthetic peptide
  Seed: GNEKKAKLANVVRKMMTNSQ
GNEWKALLSNVFRKMMTNSQ

SEQ ID NO: 191067 - protein, 20 aa, Artificial Sequence
  Description of Artificial Sequence: Synthetic peptide
  Seed: GNEKKAKLANVVRKMMTNSQ
GNEWKALLSNVGRKMMTNSQ

SEQ ID NO: 191068 - protein, 20 aa, Artificial Sequence
  Description of Artificial Sequence: Synthetic peptide
  Seed: GNEKKAKLANVVRKMMTNSQ
GNEWKALLSNVHRKMMTNSQ

SEQ ID NO: 191069 - protein, 20 aa, Artificial Sequence
  Description of Artificial Sequence: Synthetic peptide
  Seed: GNEKKAKLANVVRKMMTNSQ
GNEWKALLSNVIRKMMTNSQ

SEQ ID NO: 191070 - protein, 20 aa, Artificial Sequence
  Description of Artificial Sequence: Synthetic peptide
  Seed: GNEKKAKLANVVRKMMTNSQ
GNEWKALLSNVLRKMMTNSQ

SEQ ID NO: 191071 - protein, 20 aa, Artificial Sequence
  Description of Artificial Sequence: Synthetic peptide
  Seed: GNEKKAKLANVVRKMMTNSQ
GNEWKALLSNVMRKMMTNSQ

SEQ ID NO: 191072 - protein, 20 aa, Artificial Sequence
  Description of Artificial Sequence: Synthetic peptide
  Seed: GNEKKAKLANVVRKMMTNSQ
GNEWKALLSNVNRKMMTNSQ

SEQ ID NO: 191073 - protein, 20 aa, Artificial Sequence
  Description of Artificial Sequence: Synthetic peptide
  Seed: GNEKKAKLANVVRKMMTNSQ
GNEWKALLSNVPRKMMTNSQ

SEQ ID NO: 191074 - protein, 20 aa, Artificial Sequence
  Description of Artificial Sequence: Synthetic peptide
  Seed: GNEKKAKLANVVRKMMTNSQ
GNEWKALLSNVQRKMMTNSQ

SEQ ID NO: 191075 - protein, 20 aa, Artificial Sequence
  Description of Artificial Sequence: Synthetic peptide
  Seed: GNEKKAKLANVVRKMMTNSQ
GNEWKALLSNVSRKMMTNSQ

SEQ ID NO: 191076 - protein, 20 aa, Artificial Sequence
  Description of Artificial Sequence: Synthetic peptide
  Seed: GNEKKAKLANVVRKMMTNSQ
GNEWKALLSNVTRKMMTNSQ

SEQ ID NO: 191077 - protein, 20 aa, Artificial Sequence
  Description of Artificial Sequence: Synthetic peptide
  Seed: GNEKKAKLANVVRKMMTNSQ
GNEWKALLSNVVRKMMTNSQ

SEQ ID NO: 191078 - protein, 20 aa, Artificial Sequence
  Description of Artificial Sequence: Synthetic peptide
  Seed: GNEKKAKLANVVRKMMTNSQ
GNEWKALLSNVYRKMMTNSQ

SEQ ID NO: 191079 - protein, 20 aa, Artificial Sequence
  Description of Artificial Sequence: Synthetic peptide
  Seed: GNEKKAKLANVVRKMMTNSQ
GNEWKALLTNVARKMMTNSQ

SEQ ID NO: 191080 - protein, 20 aa, Artificial Sequence
  Description of Artificial Sequence: Synthetic peptide
  Seed: GNEKKAKLANVVRKMMTNSQ
GNEWKALLTNVDRKMMTNSQ

SEQ ID NO: 191081 - protein, 20 aa, Artificial Sequence
  Description of Artificial Sequence: Synthetic peptide
  Seed: GNEKKAKLANVVRKMMTNSQ
GNEWKALLTNVERKMMTNSQ

SEQ ID NO: 191082 - protein, 20 aa, Artificial Sequence
  Description of Artificial Sequence: Synthetic peptide
  Seed: GNEKKAKLANVVRKMMTNSQ
GNEWKALLTNVFRKMMTNSQ

SEQ ID NO: 191083 - protein, 20 aa, Artificial Sequence
  Description of Artificial Sequence: Synthetic peptide
  Seed: GNEKKAKLANVVRKMMTNSQ
GNEWKALLTNVGRKMMTNSQ

SEQ ID NO: 191084 - protein, 20 aa, Artificial Sequence
  Description of Artificial Sequence: Synthetic peptide
  Seed: GNEKKAKLANVVRKMMTNSQ
GNEWKALLTNVHRKMMTNSQ

SEQ ID NO: 191085 - protein, 20 aa, Artificial Sequence
  Description of Artificial Sequence: Synthetic peptide
  Seed: GNEKKAKLANVVRKMMTNSQ
GNEWKALLTNVIRKMMTNSQ

SEQ ID NO: 191086 - protein, 20 aa, Artificial Sequence
  Description of Artificial Sequence: Synthetic peptide
  Seed: GNEKKAKLANVVRKMMTNSQ
GNEWKALLTNVLRKMMTNSQ

SEQ ID NO: 191087 - protein, 20 aa, Artificial Sequence
  Description of Artificial Sequence: Synthetic peptide
  Seed: GNEKKAKLANVVRKMMTNSQ
GNEWKALLTNVMRKMMTNSQ

SEQ ID NO: 191088 - protein, 20 aa, Artificial Sequence
  Description of Artificial Sequence: Synthetic peptide
  Seed: GNEKKAKLANVVRKMMTNSQ
GNEWKALLTNVNRKMMTNSQ

SEQ ID NO: 191089 - protein, 20 aa, Artificial Sequence
  Description of Artificial Sequence: Synthetic peptide
  Seed: GNEKKAKLANVVRKMMTNSQ
GNEWKALLTNVPRKMMTNSQ

SEQ ID NO: 191090 - protein, 20 aa, Artificial Sequence
  Description of Artificial Sequence: Synthetic peptide
  Seed: GNEKKAKLANVVRKMMTNSQ
GNEWKALLTNVQRKMMTNSQ

SEQ ID NO: 191091 - protein, 20 aa, Artificial Sequence
  Description of Artificial Sequence: Synthetic peptide
  Seed: GNEKKAKLANVVRKMMTNSQ
GNEWKALLTNVSRKMMTNSQ

SEQ ID NO: 191092 - protein, 20 aa, Artificial Sequence
  Description of Artificial Sequence: Synthetic peptide
  Seed: GNEKKAKLANVVRKMMTNSQ
GNEWKALLTNVTRKMMTNSQ

SEQ ID NO: 191093 - protein, 20 aa, Artificial Sequence
  Description of Artificial Sequence: Synthetic peptide
  Seed: GNEKKAKLANVVRKMMTNSQ
GNEWKALLTNVVRKMMTNSQ

SEQ ID NO: 191094 - protein, 20 aa, Artificial Sequence
  Description of Artificial Sequence: Synthetic peptide
  Seed: GNEKKAKLANVVRKMMTNSQ
GNEWKALLVNVARKMMTNSQ

SEQ ID NO: 191095 - protein, 20 aa, Artificial Sequence
  Description of Artificial Sequence: Synthetic peptide
  Seed: GNEKKAKLANVVRKMMTNSQ
GNEWKALLVNVDRKMMTNSQ

SEQ ID NO: 191096 - protein, 20 aa, Artificial Sequence
  Description of Artificial Sequence: Synthetic peptide
  Seed: GNEKKAKLANVVRKMMTNSQ
GNEWKALLVNVERKMMTNSQ

SEQ ID NO: 191097 - protein, 20 aa, Artificial Sequence
  Description of Artificial Sequence: Synthetic peptide
  Seed: GNEKKAKLANVVRKMMTNSQ
GNEWKALLVNVGRKMMTNSQ

SEQ ID NO: 191098 - protein, 20 aa, Artificial Sequence
  Description of Artificial Sequence: Synthetic peptide
  Seed: GNEKKAKLANVVRKMMTNSQ
GNEWKALLVNVHRKMMTNSQ

SEQ ID NO: 191099 - protein, 20 aa, Artificial Sequence
  Description of Artificial Sequence: Synthetic peptide
  Seed: GNEKKAKLANVVRKMMTNSQ
GNEWKALLVNVIRKMMTNSQ

SEQ ID NO: 191100 - protein, 20 aa, Artificial Sequence
  Description of Artificial Sequence: Synthetic peptide
  Seed: GNEKKAKLANVVRKMMTNSQ
GNEWKALLVNVLRKMMTNSQ

SEQ ID NO: 191101 - protein, 20 aa, Artificial Sequence
  Description of Artificial Sequence: Synthetic peptide
  Seed: GNEKKAKLANVVRKMMTNSQ
GNEWKALLVNVMRKMMTNSQ

SEQ ID NO: 191102 - protein, 20 aa, Artificial Sequence
  Description of Artificial Sequence: Synthetic peptide
  Seed: GNEKKAKLANVVRKMMTNSQ
GNEWKALLVNVNRKMMTNSQ

SEQ ID NO: 191103 - protein, 20 aa, Artificial Sequence
  Description of Artificial Sequence: Synthetic peptide
  Seed: GNEKKAKLANVVRKMMTNSQ
GNEWKALLVNVPRKMMTNSQ

SEQ ID NO: 191104 - protein, 20 aa, Artificial Sequence
  Description of Artificial Sequence: Synthetic peptide
  Seed: GNEKKAKLANVVRKMMTNSQ
GNEWKALLVNVQRKMMTNSQ

SEQ ID NO: 191105 - protein, 20 aa, Artificial Sequence
  Description of Artificial Sequence: Synthetic peptide
  Seed: GNEKKAKLANVVRKMMTNSQ
GNEWKALLVNVSRKMMTNSQ

SEQ ID NO: 191106 - protein, 20 aa, Artificial Sequence
  Description of Artificial Sequence: Synthetic peptide
  Seed: GNEKKAKLANVVRKMMTNSQ
GNEWKALLVNVTRKMMTNSQ

SEQ ID NO: 191107 - protein, 20 aa, Artificial Sequence
  Description of Artificial Sequence: Synthetic peptide
  Seed: GNEKKAKLANVVRKMMTNSQ
GNEWKALLVNVVRKMMTNSQ

SEQ ID NO: 191108 - protein, 20 aa, Artificial Sequence
  Description of Artificial Sequence: Synthetic peptide
  Seed: GNEKKAKLANVVRKMMTNSQ
GNEWKALLWNVIRKMMTNSQ

SEQ ID NO: 191109 - protein, 20 aa, Artificial Sequence
  Description of Artificial Sequence: Synthetic peptide
  Seed: GNEKKAKLANVVRKMMTNSQ
GNEWKALLYNVIRKMMTNSQ

SEQ ID NO: 191110 - protein, 20 aa, Artificial Sequence
  Description of Artificial Sequence: Synthetic peptide
  Seed: GNEKKAKLANVVRKMMTNSQ
GNEWKALLYNVLRKMMTNSQ

SEQ ID NO: 191111 - protein, 20 aa, Artificial Sequence
  Description of Artificial Sequence: Synthetic peptide
  Seed: GNEKKAKLANVVRKMMTNSQ
GNEWKALLYNVMRKMMTNSQ

SEQ ID NO: 191112 - protein, 20 aa, Artificial Sequence
  Description of Artificial Sequence: Synthetic peptide
  Seed: GNEKKAKLANVVRKMMTNSQ
GNEWKALLYNVVRKMMTNSQ

SEQ ID NO: 191113 - protein, 20 aa, Artificial Sequence
  Description of Artificial Sequence: Synthetic peptide
  Seed: GNEKKAKLANVVRKMMTNSQ
GNEWKAMLANVARKMMTNSQ

SEQ ID NO: 191114 - protein, 20 aa, Artificial Sequence
  Description of Artificial Sequence: Synthetic peptide
  Seed: GNEKKAKLANVVRKMMTNSQ
GNEWKAMLANVCRKMMTNSQ

SEQ ID NO: 191115 - protein, 20 aa, Artificial Sequence
  Description of Artificial Sequence: Synthetic peptide
  Seed: GNEKKAKLANVVRKMMTNSQ
GNEWKAMLANVDRKMMTNSQ

SEQ ID NO: 191116 - protein, 20 aa, Artificial Sequence
  Description of Artificial Sequence: Synthetic peptide
  Seed: GNEKKAKLANVVRKMMTNSQ
GNEWKAMLANVERKMMTNSQ

SEQ ID NO: 191117 - protein, 20 aa, Artificial Sequence
  Description of Artificial Sequence: Synthetic peptide
  Seed: GNEKKAKLANVVRKMMTNSQ
GNEWKAMLANVFRKMMTNSQ

SEQ ID NO: 191118 - protein, 20 aa, Artificial Sequence
  Description of Artificial Sequence: Synthetic peptide
  Seed: GNEKKAKLANVVRKMMTNSQ
GNEWKAMLANVGRKMMTNSQ

SEQ ID NO: 191119 - protein, 20 aa, Artificial Sequence
  Description of Artificial Sequence: Synthetic peptide
  Seed: GNEKKAKLANVVRKMMTNSQ
GNEWKAMLANVHRKMMTNSQ

SEQ ID NO: 191120 - protein, 20 aa, Artificial Sequence
  Description of Artificial Sequence: Synthetic peptide
  Seed: GNEKKAKLANVVRKMMTNSQ
GNEWKAMLANVIRKMMTNSQ

SEQ ID NO: 191121 - protein, 20 aa, Artificial Sequence
  Description of Artificial Sequence: Synthetic peptide
  Seed: GNEKKAKLANVVRKMMTNSQ
GNEWKAMLANVKRKMMTNSQ

SEQ ID NO: 191122 - protein, 20 aa, Artificial Sequence
  Description of Artificial Sequence: Synthetic peptide
  Seed: GNEKKAKLANVVRKMMTNSQ
GNEWKAMLANVLRKMMTNSQ

SEQ ID NO: 191123 - protein, 20 aa, Artificial Sequence
  Description of Artificial Sequence: Synthetic peptide
  Seed: GNEKKAKLANVVRKMMTNSQ
GNEWKAMLANVMRKMMTNSQ

SEQ ID NO: 191124 - protein, 20 aa, Artificial Sequence
  Description of Artificial Sequence: Synthetic peptide
  Seed: GNEKKAKLANVVRKMMTNSQ
GNEWKAMLANVNRKMMTNSQ

SEQ ID NO: 191125 - protein, 20 aa, Artificial Sequence
  Description of Artificial Sequence: Synthetic peptide
  Seed: GNEKKAKLANVVRKMMTNSQ
GNEWKAMLANVPRKMMTNSQ

SEQ ID NO: 191126 - protein, 20 aa, Artificial Sequence
  Description of Artificial Sequence: Synthetic peptide
  Seed: GNEKKAKLANVVRKMMTNSQ
GNEWKAMLANVQRKMMTNSQ

SEQ ID NO: 191127 - protein, 20 aa, Artificial Sequence
  Description of Artificial Sequence: Synthetic peptide
  Seed: GNEKKAKLANVVRKMMTNSQ
GNEWKAMLANVRRKMMTNSQ

SEQ ID NO: 191128 - protein, 20 aa, Artificial Sequence
  Description of Artificial Sequence: Synthetic peptide
  Seed: GNEKKAKLANVVRKMMTNSQ
GNEWKAMLANVSRKMMTNSQ

SEQ ID NO: 191129 - protein, 20 aa, Artificial Sequence
  Description of Artificial Sequence: Synthetic peptide
  Seed: GNEKKAKLANVVRKMMTNSQ
GNEWKAMLANVTRKMMTNSQ

SEQ ID NO: 191130 - protein, 20 aa, Artificial Sequence
  Description of Artificial Sequence: Synthetic peptide
  Seed: GNEKKAKLANVVRKMMTNSQ
GNEWKAMLANVVRKMMTNSQ

SEQ ID NO: 191131 - protein, 20 aa, Artificial Sequence
  Description of Artificial Sequence: Synthetic peptide
  Seed: GNEKKAKLANVVRKMMTNSQ
GNEWKAMLANVYRKMMTNSQ

SEQ ID NO: 191132 - protein, 20 aa, Artificial Sequence
  Description of Artificial Sequence: Synthetic peptide
  Seed: GNEKKAKLANVVRKMMTNSQ
GNEWKAMLFNVIRKMMTNSQ

SEQ ID NO: 191133 - protein, 20 aa, Artificial Sequence
  Description of Artificial Sequence: Synthetic peptide
  Seed: GNEKKAKLANVVRKMMTNSQ
GNEWKAMLFNVLRKMMTNSQ

SEQ ID NO: 191134 - protein, 20 aa, Artificial Sequence
  Description of Artificial Sequence: Synthetic peptide
  Seed: GNEKKAKLANVVRKMMTNSQ
GNEWKAMLFNVMRKMMTNSQ

SEQ ID NO: 191135 - protein, 20 aa, Artificial Sequence
  Description of Artificial Sequence: Synthetic peptide
  Seed: GNEKKAKLANVVRKMMTNSQ
GNEWKAMLFNVVRKMMTNSQ

SEQ ID NO: 191136 - protein, 20 aa, Artificial Sequence
  Description of Artificial Sequence: Synthetic peptide
  Seed: GNEKKAKLANVVRKMMTNSQ
GNEWKAMLFNVYRKMMTNSQ

SEQ ID NO: 191137 - protein, 20 aa, Artificial Sequence
  Description of Artificial Sequence: Synthetic peptide
  Seed: GNEKKAKLANVVRKMMTNSQ
GNEWKAMLGNVARKMMTNSQ

SEQ ID NO: 191138 - protein, 20 aa, Artificial Sequence
  Description of Artificial Sequence: Synthetic peptide
  Seed: GNEKKAKLANVVRKMMTNSQ
GNEWKAMLGNVCRKMMTNSQ

SEQ ID NO: 191139 - protein, 20 aa, Artificial Sequence
  Description of Artificial Sequence: Synthetic peptide
  Seed: GNEKKAKLANVVRKMMTNSQ
GNEWKAMLGNVERKMMTNSQ

SEQ ID NO: 191140 - protein, 20 aa, Artificial Sequence
  Description of Artificial Sequence: Synthetic peptide
  Seed: GNEKKAKLANVVRKMMTNSQ
GNEWKAMLGNVFRKMMTNSQ

SEQ ID NO: 191141 - protein, 20 aa, Artificial Sequence
  Description of Artificial Sequence: Synthetic peptide
  Seed: GNEKKAKLANVVRKMMTNSQ
GNEWKAMLGNVGRKMMTNSQ

SEQ ID NO: 191142 - protein, 20 aa, Artificial Sequence
  Description of Artificial Sequence: Synthetic peptide
  Seed: GNEKKAKLANVVRKMMTNSQ
GNEWKAMLGNVHRKMMTNSQ

SEQ ID NO: 191143 - protein, 20 aa, Artificial Sequence
  Description of Artificial Sequence: Synthetic peptide
  Seed: GNEKKAKLANVVRKMMTNSQ
GNEWKAMLGNVIRKMMTNSQ

SEQ ID NO: 191144 - protein, 20 aa, Artificial Sequence
  Description of Artificial Sequence: Synthetic peptide
  Seed: GNEKKAKLANVVRKMMTNSQ
GNEWKAMLGNVLRKMMTNSQ

SEQ ID NO: 191145 - protein, 20 aa, Artificial Sequence
  Description of Artificial Sequence: Synthetic peptide
  Seed: GNEKKAKLANVVRKMMTNSQ
GNEWKAMLGNVMRKMMTNSQ

SEQ ID NO: 191146 - protein, 20 aa, Artificial Sequence
  Description of Artificial Sequence: Synthetic peptide
  Seed: GNEKKAKLANVVRKMMTNSQ
GNEWKAMLGNVNRKMMTNSQ

SEQ ID NO: 191147 - protein, 20 aa, Artificial Sequence
  Description of Artificial Sequence: Synthetic peptide
  Seed: GNEKKAKLANVVRKMMTNSQ
GNEWKAMLGNVQRKMMTNSQ

SEQ ID NO: 191148 - protein, 20 aa, Artificial Sequence
  Description of Artificial Sequence: Synthetic peptide
  Seed: GNEKKAKLANVVRKMMTNSQ
GNEWKAMLGNVSRKMMTNSQ

SEQ ID NO: 191149 - protein, 20 aa, Artificial Sequence
  Description of Artificial Sequence: Synthetic peptide
  Seed: GNEKKAKLANVVRKMMTNSQ
GNEWKAMLGNVTRKMMTNSQ

SEQ ID NO: 191150 - protein, 20 aa, Artificial Sequence
  Description of Artificial Sequence: Synthetic peptide
  Seed: GNEKKAKLANVVRKMMTNSQ
GNEWKAMLGNVVRKMMTNSQ

SEQ ID NO: 191151 - protein, 20 aa, Artificial Sequence
  Description of Artificial Sequence: Synthetic peptide
  Seed: GNEKKAKLANVVRKMMTNSQ
GNEWKAMLGNVYRKMMTNSQ

SEQ ID NO: 191152 - protein, 20 aa, Artificial Sequence
  Description of Artificial Sequence: Synthetic peptide
  Seed: GNEKKAKLANVVRKMMTNSQ
GNEWKAMLINVARKMMTNSQ

SEQ ID NO: 191153 - protein, 20 aa, Artificial Sequence
  Description of Artificial Sequence: Synthetic peptide
  Seed: GNEKKAKLANVVRKMMTNSQ
GNEWKAMLINVGRKMMTNSQ

SEQ ID NO: 191154 - protein, 20 aa, Artificial Sequence
  Description of Artificial Sequence: Synthetic peptide
  Seed: GNEKKAKLANVVRKMMTNSQ
GNEWKAMLINVHRKMMTNSQ

SEQ ID NO: 191155 - protein, 20 aa, Artificial Sequence
  Description of Artificial Sequence: Synthetic peptide
  Seed: GNEKKAKLANVVRKMMTNSQ
GNEWKAMLINVIRKMMTNSQ

SEQ ID NO: 191156 - protein, 20 aa, Artificial Sequence
  Description of Artificial Sequence: Synthetic peptide
  Seed: GNEKKAKLANVVRKMMTNSQ
GNEWKAMLINVLRKMMTNSQ

SEQ ID NO: 191157 - protein, 20 aa, Artificial Sequence
  Description of Artificial Sequence: Synthetic peptide
  Seed: GNEKKAKLANVVRKMMTNSQ
GNEWKAMLINVMRKMMTNSQ

SEQ ID NO: 191158 - protein, 20 aa, Artificial Sequence
  Description of Artificial Sequence: Synthetic peptide
  Seed: GNEKKAKLANVVRKMMTNSQ
GNEWKAMLINVNRKMMTNSQ

SEQ ID NO: 191159 - protein, 20 aa, Artificial Sequence
  Description of Artificial Sequence: Synthetic peptide
  Seed: GNEKKAKLANVVRKMMTNSQ
GNEWKAMLINVQRKMMTNSQ

SEQ ID NO: 191160 - protein, 20 aa, Artificial Sequence
  Description of Artificial Sequence: Synthetic peptide
  Seed: GNEKKAKLANVVRKMMTNSQ
GNEWKAMLINVSRKMMTNSQ

SEQ ID NO: 191161 - protein, 20 aa, Artificial Sequence
  Description of Artificial Sequence: Synthetic peptide
  Seed: GNEKKAKLANVVRKMMTNSQ
GNEWKAMLINVTRKMMTNSQ

SEQ ID NO: 191162 - protein, 20 aa, Artificial Sequence
  Description of Artificial Sequence: Synthetic peptide
  Seed: GNEKKAKLANVVRKMMTNSQ
GNEWKAMLINVVRKMMTNSQ

SEQ ID NO: 191163 - protein, 20 aa, Artificial Sequence
  Description of Artificial Sequence: Synthetic peptide
  Seed: GNEKKAKLANVVRKMMTNSQ
GNEWKAMLLNVARKMMTNSQ

SEQ ID NO: 191164 - protein, 20 aa, Artificial Sequence
  Description of Artificial Sequence: Synthetic peptide
  Seed: GNEKKAKLANVVRKMMTNSQ
GNEWKAMLLNVNRKMMTNSQ

SEQ ID NO: 191165 - protein, 20 aa, Artificial Sequence
  Description of Artificial Sequence: Synthetic peptide
  Seed: GNEKKAKLANVVRKMMTNSQ
GNEWKAMLLNVSRKMMTNSQ

SEQ ID NO: 191166 - protein, 20 aa, Artificial Sequence
  Description of Artificial Sequence: Synthetic peptide
  Seed: GNEKKAKLANVVRKMMTNSQ
GNEWKAMLMNVARKMMTNSQ

SEQ ID NO: 191167 - protein, 20 aa, Artificial Sequence
  Description of Artificial Sequence: Synthetic peptide
  Seed: GNEKKAKLANVVRKMMTNSQ
GNEWKAMLMNVNRKMMTNSQ

SEQ ID NO: 191168 - protein, 20 aa, Artificial Sequence
  Description of Artificial Sequence: Synthetic peptide
  Seed: GNEKKAKLANVVRKMMTNSQ
GNEWKAMLMNVSRKMMTNSQ

SEQ ID NO: 191169 - protein, 20 aa, Artificial Sequence
  Description of Artificial Sequence: Synthetic peptide
  Seed: GNEKKAKLANVVRKMMTNSQ
GNEWKAMLNNVARKMMTNSQ

SEQ ID NO: 191170 - protein, 20 aa, Artificial Sequence
  Description of Artificial Sequence: Synthetic peptide
  Seed: GNEKKAKLANVVRKMMTNSQ
GNEWKAMLNNVGRKMMTNSQ

SEQ ID NO: 191171 - protein, 20 aa, Artificial Sequence
  Description of Artificial Sequence: Synthetic peptide
  Seed: GNEKKAKLANVVRKMMTNSQ
GNEWKAMLNNVHRKMMTNSQ

SEQ ID NO: 191172 - protein, 20 aa, Artificial Sequence
  Description of Artificial Sequence: Synthetic peptide
  Seed: GNEKKAKLANVVRKMMTNSQ
GNEWKAMLNNVIRKMMTNSQ

SEQ ID NO: 191173 - protein, 20 aa, Artificial Sequence
  Description of Artificial Sequence: Synthetic peptide
  Seed: GNEKKAKLANVVRKMMTNSQ
GNEWKAMLNNVLRKMMTNSQ

SEQ ID NO: 191174 - protein, 20 aa, Artificial Sequence
  Description of Artificial Sequence: Synthetic peptide
  Seed: GNEKKAKLANVVRKMMTNSQ
GNEWKAMLNNVMRKMMTNSQ

SEQ ID NO: 191175 - protein, 20 aa, Artificial Sequence
  Description of Artificial Sequence: Synthetic peptide
  Seed: GNEKKAKLANVVRKMMTNSQ
GNEWKAMLNNVNRKMMTNSQ

SEQ ID NO: 191176 - protein, 20 aa, Artificial Sequence
  Description of Artificial Sequence: Synthetic peptide
  Seed: GNEKKAKLANVVRKMMTNSQ
GNEWKAMLNNVQRKMMTNSQ

SEQ ID NO: 191177 - protein, 20 aa, Artificial Sequence
  Description of Artificial Sequence: Synthetic peptide
  Seed: GNEKKAKLANVVRKMMTNSQ
GNEWKAMLNNVSRKMMTNSQ

SEQ ID NO: 191178 - protein, 20 aa, Artificial Sequence
  Description of Artificial Sequence: Synthetic peptide
  Seed: GNEKKAKLANVVRKMMTNSQ
GNEWKAMLNNVTRKMMTNSQ

SEQ ID NO: 191179 - protein, 20 aa, Artificial Sequence
  Description of Artificial Sequence: Synthetic peptide
  Seed: GNEKKAKLANVVRKMMTNSQ
GNEWKAMLNNVVRKMMTNSQ

SEQ ID NO: 191180 - protein, 20 aa, Artificial Sequence
  Description of Artificial Sequence: Synthetic peptide
  Seed: GNEKKAKLANVVRKMMTNSQ
GNEWKAMLPNVARKMMTNSQ

SEQ ID NO: 191181 - protein, 20 aa, Artificial Sequence
  Description of Artificial Sequence: Synthetic peptide
  Seed: GNEKKAKLANVVRKMMTNSQ
GNEWKAMLPNVCRKMMTNSQ

SEQ ID NO: 191182 - protein, 20 aa, Artificial Sequence
  Description of Artificial Sequence: Synthetic peptide
  Seed: GNEKKAKLANVVRKMMTNSQ
GNEWKAMLPNVDRKMMTNSQ

SEQ ID NO: 191183 - protein, 20 aa, Artificial Sequence
  Description of Artificial Sequence: Synthetic peptide
  Seed: GNEKKAKLANVVRKMMTNSQ
GNEWKAMLPNVERKMMTNSQ

SEQ ID NO: 191184 - protein, 20 aa, Artificial Sequence
  Description of Artificial Sequence: Synthetic peptide
  Seed: GNEKKAKLANVVRKMMTNSQ
GNEWKAMLPNVFRKMMTNSQ

SEQ ID NO: 191185 - protein, 20 aa, Artificial Sequence
  Description of Artificial Sequence: Synthetic peptide
  Seed: GNEKKAKLANVVRKMMTNSQ
GNEWKAMLPNVGRKMMTNSQ

SEQ ID NO: 191186 - protein, 20 aa, Artificial Sequence
  Description of Artificial Sequence: Synthetic peptide
  Seed: GNEKKAKLANVVRKMMTNSQ
GNEWKAMLPNVHRKMMTNSQ

SEQ ID NO: 191187 - protein, 20 aa, Artificial Sequence
  Description of Artificial Sequence: Synthetic peptide
  Seed: GNEKKAKLANVVRKMMTNSQ
GNEWKAMLPNVIRKMMTNSQ

SEQ ID NO: 191188 - protein, 20 aa, Artificial Sequence
  Description of Artificial Sequence: Synthetic peptide
  Seed: GNEKKAKLANVVRKMMTNSQ
GNEWKAMLPNVLRKMMTNSQ

SEQ ID NO: 191189 - protein, 20 aa, Artificial Sequence
  Description of Artificial Sequence: Synthetic peptide
  Seed: GNEKKAKLANVVRKMMTNSQ
GNEWKAMLPNVMRKMMTNSQ

SEQ ID NO: 191190 - protein, 20 aa, Artificial Sequence
  Description of Artificial Sequence: Synthetic peptide
  Seed: GNEKKAKLANVVRKMMTNSQ
GNEWKAMLPNVNRKMMTNSQ

SEQ ID NO: 191191 - protein, 20 aa, Artificial Sequence
  Description of Artificial Sequence: Synthetic peptide
  Seed: GNEKKAKLANVVRKMMTNSQ
GNEWKAMLPNVPRKMMTNSQ

SEQ ID NO: 191192 - protein, 20 aa, Artificial Sequence
  Description of Artificial Sequence: Synthetic peptide
  Seed: GNEKKAKLANVVRKMMTNSQ
GNEWKAMLPNVQRKMMTNSQ

SEQ ID NO: 191193 - protein, 20 aa, Artificial Sequence
  Description of Artificial Sequence: Synthetic peptide
  Seed: GNEKKAKLANVVRKMMTNSQ
GNEWKAMLPNVSRKMMTNSQ

SEQ ID NO: 191194 - protein, 20 aa, Artificial Sequence
  Description of Artificial Sequence: Synthetic peptide
  Seed: GNEKKAKLANVVRKMMTNSQ
GNEWKAMLPNVTRKMMTNSQ

SEQ ID NO: 191195 - protein, 20 aa, Artificial Sequence
  Description of Artificial Sequence: Synthetic peptide
  Seed: GNEKKAKLANVVRKMMTNSQ
GNEWKAMLPNVVRKMMTNSQ

SEQ ID NO: 191196 - protein, 20 aa, Artificial Sequence
  Description of Artificial Sequence: Synthetic peptide
  Seed: GNEKKAKLANVVRKMMTNSQ
GNEWKAMLPNVYRKMMTNSQ

SEQ ID NO: 191197 - protein, 20 aa, Artificial Sequence
  Description of Artificial Sequence: Synthetic peptide
  Seed: GNEKKAKLANVVRKMMTNSQ
GNEWKAMLSNVARKMMTNSQ

SEQ ID NO: 191198 - protein, 20 aa, Artificial Sequence
  Description of Artificial Sequence: Synthetic peptide
  Seed: GNEKKAKLANVVRKMMTNSQ
GNEWKAMLSNVCRKMMTNSQ

SEQ ID NO: 191199 - protein, 20 aa, Artificial Sequence
  Description of Artificial Sequence: Synthetic peptide
  Seed: GNEKKAKLANVVRKMMTNSQ
GNEWKAMLSNVDRKMMTNSQ

SEQ ID NO: 191200 - protein, 20 aa, Artificial Sequence
  Description of Artificial Sequence: Synthetic peptide
  Seed: GNEKKAKLANVVRKMMTNSQ
GNEWKAMLSNVERKMMTNSQ

SEQ ID NO: 191201 - protein, 20 aa, Artificial Sequence
  Description of Artificial Sequence: Synthetic peptide
  Seed: GNEKKAKLANVVRKMMTNSQ
GNEWKAMLSNVFRKMMTNSQ

SEQ ID NO: 191202 - protein, 20 aa, Artificial Sequence
  Description of Artificial Sequence: Synthetic peptide
  Seed: GNEKKAKLANVVRKMMTNSQ
GNEWKAMLSNVGRKMMTNSQ

SEQ ID NO: 191203 - protein, 20 aa, Artificial Sequence
  Description of Artificial Sequence: Synthetic peptide
  Seed: GNEKKAKLANVVRKMMTNSQ
GNEWKAMLSNVHRKMMTNSQ

SEQ ID NO: 191204 - protein, 20 aa, Artificial Sequence
  Description of Artificial Sequence: Synthetic peptide
  Seed: GNEKKAKLANVVRKMMTNSQ
GNEWKAMLSNVIRKMMTNSQ

SEQ ID NO: 191205 - protein, 20 aa, Artificial Sequence
  Description of Artificial Sequence: Synthetic peptide
  Seed: GNEKKAKLANVVRKMMTNSQ
GNEWKAMLSNVLRKMMTNSQ

SEQ ID NO: 191206 - protein, 20 aa, Artificial Sequence
  Description of Artificial Sequence: Synthetic peptide
  Seed: GNEKKAKLANVVRKMMTNSQ
GNEWKAMLSNVMRKMMTNSQ

SEQ ID NO: 191207 - protein, 20 aa, Artificial Sequence
  Description of Artificial Sequence: Synthetic peptide
  Seed: GNEKKAKLANVVRKMMTNSQ
GNEWKAMLSNVNRKMMTNSQ

SEQ ID NO: 191208 - protein, 20 aa, Artificial Sequence
  Description of Artificial Sequence: Synthetic peptide
  Seed: GNEKKAKLANVVRKMMTNSQ
GNEWKAMLSNVPRKMMTNSQ

SEQ ID NO: 191209 - protein, 20 aa, Artificial Sequence
  Description of Artificial Sequence: Synthetic peptide
  Seed: GNEKKAKLANVVRKMMTNSQ
GNEWKAMLSNVQRKMMTNSQ

SEQ ID NO: 191210 - protein, 20 aa, Artificial Sequence
  Description of Artificial Sequence: Synthetic peptide
  Seed: GNEKKAKLANVVRKMMTNSQ
GNEWKAMLSNVSRKMMTNSQ

SEQ ID NO: 191211 - protein, 20 aa, Artificial Sequence
  Description of Artificial Sequence: Synthetic peptide
  Seed: GNEKKAKLANVVRKMMTNSQ
GNEWKAMLSNVTRKMMTNSQ

SEQ ID NO: 191212 - protein, 20 aa, Artificial Sequence
  Description of Artificial Sequence: Synthetic peptide
  Seed: GNEKKAKLANVVRKMMTNSQ
GNEWKAMLSNVVRKMMTNSQ

SEQ ID NO: 191213 - protein, 20 aa, Artificial Sequence
  Description of Artificial Sequence: Synthetic peptide
  Seed: GNEKKAKLANVVRKMMTNSQ
GNEWKAMLSNVYRKMMTNSQ

SEQ ID NO: 191214 - protein, 20 aa, Artificial Sequence
  Description of Artificial Sequence: Synthetic peptide
  Seed: GNEKKAKLANVVRKMMTNSQ
GNEWKAMLTNVARKMMTNSQ

SEQ ID NO: 191215 - protein, 20 aa, Artificial Sequence
  Description of Artificial Sequence: Synthetic peptide
  Seed: GNEKKAKLANVVRKMMTNSQ
GNEWKAMLTNVDRKMMTNSQ

SEQ ID NO: 191216 - protein, 20 aa, Artificial Sequence
  Description of Artificial Sequence: Synthetic peptide
  Seed: GNEKKAKLANVVRKMMTNSQ
GNEWKAMLTNVERKMMTNSQ

SEQ ID NO: 191217 - protein, 20 aa, Artificial Sequence
  Description of Artificial Sequence: Synthetic peptide
  Seed: GNEKKAKLANVVRKMMTNSQ
GNEWKAMLTNVFRKMMTNSQ

SEQ ID NO: 191218 - protein, 20 aa, Artificial Sequence
  Description of Artificial Sequence: Synthetic peptide
  Seed: GNEKKAKLANVVRKMMTNSQ
GNEWKAMLTNVGRKMMTNSQ

SEQ ID NO: 191219 - protein, 20 aa, Artificial Sequence
  Description of Artificial Sequence: Synthetic peptide
  Seed: GNEKKAKLANVVRKMMTNSQ
GNEWKAMLTNVHRKMMTNSQ

SEQ ID NO: 191220 - protein, 20 aa, Artificial Sequence
  Description of Artificial Sequence: Synthetic peptide
  Seed: GNEKKAKLANVVRKMMTNSQ
GNEWKAMLTNVIRKMMTNSQ

SEQ ID NO: 191221 - protein, 20 aa, Artificial Sequence
  Description of Artificial Sequence: Synthetic peptide
  Seed: GNEKKAKLANVVRKMMTNSQ
GNEWKAMLTNVLRKMMTNSQ

SEQ ID NO: 191222 - protein, 20 aa, Artificial Sequence
  Description of Artificial Sequence: Synthetic peptide
  Seed: GNEKKAKLANVVRKMMTNSQ
GNEWKAMLTNVMRKMMTNSQ

SEQ ID NO: 191223 - protein, 20 aa, Artificial Sequence
  Description of Artificial Sequence: Synthetic peptide
  Seed: GNEKKAKLANVVRKMMTNSQ
GNEWKAMLTNVNRKMMTNSQ

SEQ ID NO: 191224 - protein, 20 aa, Artificial Sequence
  Description of Artificial Sequence: Synthetic peptide
  Seed: GNEKKAKLANVVRKMMTNSQ
GNEWKAMLTNVPRKMMTNSQ

SEQ ID NO: 191225 - protein, 20 aa, Artificial Sequence
  Description of Artificial Sequence: Synthetic peptide
  Seed: GNEKKAKLANVVRKMMTNSQ
GNEWKAMLTNVQRKMMTNSQ

SEQ ID NO: 191226 - protein, 20 aa, Artificial Sequence
  Description of Artificial Sequence: Synthetic peptide
  Seed: GNEKKAKLANVVRKMMTNSQ
GNEWKAMLTNVSRKMMTNSQ

SEQ ID NO: 191227 - protein, 20 aa, Artificial Sequence
  Description of Artificial Sequence: Synthetic peptide
  Seed: GNEKKAKLANVVRKMMTNSQ
GNEWKAMLTNVTRKMMTNSQ

SEQ ID NO: 191228 - protein, 20 aa, Artificial Sequence
  Description of Artificial Sequence: Synthetic peptide
  Seed: GNEKKAKLANVVRKMMTNSQ
GNEWKAMLTNVVRKMMTNSQ

SEQ ID NO: 191229 - protein, 20 aa, Artificial Sequence
  Description of Artificial Sequence: Synthetic peptide
  Seed: GNEKKAKLANVVRKMMTNSQ
GNEWKAMLTNVYRKMMTNSQ

SEQ ID NO: 191230 - protein, 20 aa, Artificial Sequence
  Description of Artificial Sequence: Synthetic peptide
  Seed: GNEKKAKLANVVRKMMTNSQ
GNEWKAMLVNVARKMMTNSQ

SEQ ID NO: 191231 - protein, 20 aa, Artificial Sequence
  Description of Artificial Sequence: Synthetic peptide
  Seed: GNEKKAKLANVVRKMMTNSQ
GNEWKAMLVNVDRKMMTNSQ

SEQ ID NO: 191232 - protein, 20 aa, Artificial Sequence
  Description of Artificial Sequence: Synthetic peptide
  Seed: GNEKKAKLANVVRKMMTNSQ
GNEWKAMLVNVERKMMTNSQ

SEQ ID NO: 191233 - protein, 20 aa, Artificial Sequence
  Description of Artificial Sequence: Synthetic peptide
  Seed: GNEKKAKLANVVRKMMTNSQ
GNEWKAMLVNVGRKMMTNSQ

SEQ ID NO: 191234 - protein, 20 aa, Artificial Sequence
  Description of Artificial Sequence: Synthetic peptide
  Seed: GNEKKAKLANVVRKMMTNSQ
GNEWKAMLVNVHRKMMTNSQ

SEQ ID NO: 191235 - protein, 20 aa, Artificial Sequence
  Description of Artificial Sequence: Synthetic peptide
  Seed: GNEKKAKLANVVRKMMTNSQ
GNEWKAMLVNVIRKMMTNSQ

SEQ ID NO: 191236 - protein, 20 aa, Artificial Sequence
  Description of Artificial Sequence: Synthetic peptide
  Seed: GNEKKAKLANVVRKMMTNSQ
GNEWKAMLVNVLRKMMTNSQ

SEQ ID NO: 191237 - protein, 20 aa, Artificial Sequence
  Description of Artificial Sequence: Synthetic peptide
  Seed: GNEKKAKLANVVRKMMTNSQ
GNEWKAMLVNVMRKMMTNSQ

SEQ ID NO: 191238 - protein, 20 aa, Artificial Sequence
  Description of Artificial Sequence: Synthetic peptide
  Seed: GNEKKAKLANVVRKMMTNSQ
GNEWKAMLVNVNRKMMTNSQ

SEQ ID NO: 191239 - protein, 20 aa, Artificial Sequence
  Description of Artificial Sequence: Synthetic peptide
  Seed: GNEKKAKLANVVRKMMTNSQ
GNEWKAMLVNVPRKMMTNSQ

SEQ ID NO: 191240 - protein, 20 aa, Artificial Sequence
  Description of Artificial Sequence: Synthetic peptide
  Seed: GNEKKAKLANVVRKMMTNSQ
GNEWKAMLVNVQRKMMTNSQ

SEQ ID NO: 191241 - protein, 20 aa, Artificial Sequence
  Description of Artificial Sequence: Synthetic peptide
  Seed: GNEKKAKLANVVRKMMTNSQ
GNEWKAMLVNVSRKMMTNSQ

SEQ ID NO: 191242 - protein, 20 aa, Artificial Sequence
  Description of Artificial Sequence: Synthetic peptide
  Seed: GNEKKAKLANVVRKMMTNSQ
GNEWKAMLVNVTRKMMTNSQ

SEQ ID NO: 191243 - protein, 20 aa, Artificial Sequence
  Description of Artificial Sequence: Synthetic peptide
  Seed: GNEKKAKLANVVRKMMTNSQ
GNEWKAMLVNVVRKMMTNSQ

SEQ ID NO: 191244 - protein, 20 aa, Artificial Sequence
  Description of Artificial Sequence: Synthetic peptide
  Seed: GNEKKAKLANVVRKMMTNSQ
GNEWKAMLYNVIRKMMTNSQ

SEQ ID NO: 191245 - protein, 20 aa, Artificial Sequence
  Description of Artificial Sequence: Synthetic peptide
  Seed: GNEKKAKLANVVRKMMTNSQ
GNEWKAMLYNVLRKMMTNSQ

SEQ ID NO: 191246 - protein, 20 aa, Artificial Sequence
  Description of Artificial Sequence: Synthetic peptide
  Seed: GNEKKAKLANVVRKMMTNSQ
GNEWKAMLYNVMRKMMTNSQ

SEQ ID NO: 191247 - protein, 20 aa, Artificial Sequence
  Description of Artificial Sequence: Synthetic peptide
  Seed: GNEKKAKLANVVRKMMTNSQ
GNEWKAMLYNVVRKMMTNSQ

SEQ ID NO: 191248 - protein, 20 aa, Artificial Sequence
  Description of Artificial Sequence: Synthetic peptide
  Seed: GNEKKAKLANVVRKMMTNSQ
GNEWKANLANVARKMMTNSQ

SEQ ID NO: 191249 - protein, 20 aa, Artificial Sequence
  Description of Artificial Sequence: Synthetic peptide
  Seed: GNEKKAKLANVVRKMMTNSQ
GNEWKANLANVIRKMMTNSQ

SEQ ID NO: 191250 - protein, 20 aa, Artificial Sequence
  Description of Artificial Sequence: Synthetic peptide
  Seed: GNEKKAKLANVVRKMMTNSQ
GNEWKANLANVLRKMMTNSQ

SEQ ID NO: 191251 - protein, 20 aa, Artificial Sequence
  Description of Artificial Sequence: Synthetic peptide
  Seed: GNEKKAKLANVVRKMMTNSQ
GNEWKANLANVMRKMMTNSQ

SEQ ID NO: 191252 - protein, 20 aa, Artificial Sequence
  Description of Artificial Sequence: Synthetic peptide
  Seed: GNEKKAKLANVVRKMMTNSQ
GNEWKANLANVVRKMMTNSQ

SEQ ID NO: 191253 - protein, 20 aa, Artificial Sequence
  Description of Artificial Sequence: Synthetic peptide
  Seed: GNEKKAKLANVVRKMMTNSQ
GNEWKANLFNVFRKMMTNSQ

SEQ ID NO: 191254 - protein, 20 aa, Artificial Sequence
  Description of Artificial Sequence: Synthetic peptide
  Seed: GNEKKAKLANVVRKMMTNSQ
GNEWKANLFNVIRKMMTNSQ

SEQ ID NO: 191255 - protein, 20 aa, Artificial Sequence
  Description of Artificial Sequence: Synthetic peptide
  Seed: GNEKKAKLANVVRKMMTNSQ
GNEWKANLFNVLRKMMTNSQ

SEQ ID NO: 191256 - protein, 20 aa, Artificial Sequence
  Description of Artificial Sequence: Synthetic peptide
  Seed: GNEKKAKLANVVRKMMTNSQ
GNEWKANLFNVMRKMMTNSQ

SEQ ID NO: 191257 - protein, 20 aa, Artificial Sequence
  Description of Artificial Sequence: Synthetic peptide
  Seed: GNEKKAKLANVVRKMMTNSQ
GNEWKANLFNVVRKMMTNSQ

SEQ ID NO: 191258 - protein, 20 aa, Artificial Sequence
  Description of Artificial Sequence: Synthetic peptide
  Seed: GNEKKAKLANVVRKMMTNSQ
GNEWKANLGNVIRKMMTNSQ

SEQ ID NO: 191259 - protein, 20 aa, Artificial Sequence
  Description of Artificial Sequence: Synthetic peptide
  Seed: GNEKKAKLANVVRKMMTNSQ
GNEWKANLGNVLRKMMTNSQ

SEQ ID NO: 191260 - protein, 20 aa, Artificial Sequence
  Description of Artificial Sequence: Synthetic peptide
  Seed: GNEKKAKLANVVRKMMTNSQ
GNEWKANLGNVVRKMMTNSQ

SEQ ID NO: 191261 - protein, 20 aa, Artificial Sequence
  Description of Artificial Sequence: Synthetic peptide
  Seed: GNEKKAKLANVVRKMMTNSQ
GNEWKANLPNVIRKMMTNSQ

SEQ ID NO: 191262 - protein, 20 aa, Artificial Sequence
  Description of Artificial Sequence: Synthetic peptide
  Seed: GNEKKAKLANVVRKMMTNSQ
GNEWKANLPNVVRKMMTNSQ

SEQ ID NO: 191263 - protein, 20 aa, Artificial Sequence
  Description of Artificial Sequence: Synthetic peptide
  Seed: GNEKKAKLANVVRKMMTNSQ
GNEWKANLSNVIRKMMTNSQ

SEQ ID NO: 191264 - protein, 20 aa, Artificial Sequence
  Description of Artificial Sequence: Synthetic peptide
  Seed: GNEKKAKLANVVRKMMTNSQ
GNEWKANLSNVLRKMMTNSQ

SEQ ID NO: 191265 - protein, 20 aa, Artificial Sequence
  Description of Artificial Sequence: Synthetic peptide
  Seed: GNEKKAKLANVVRKMMTNSQ
GNEWKANLSNVVRKMMTNSQ

SEQ ID NO: 191266 - protein, 20 aa, Artificial Sequence
  Description of Artificial Sequence: Synthetic peptide
  Seed: GNEKKAKLANVVRKMMTNSQ
GNEWKANLYNVFRKMMTNSQ

SEQ ID NO: 191267 - protein, 20 aa, Artificial Sequence
  Description of Artificial Sequence: Synthetic peptide
  Seed: GNEKKAKLANVVRKMMTNSQ
GNEWKANLYNVLRKMMTNSQ

SEQ ID NO: 191268 - protein, 20 aa, Artificial Sequence
  Description of Artificial Sequence: Synthetic peptide
  Seed: GNEKKAKLANVVRKMMTNSQ
GNEWKAQLANVARKMMTNSQ

SEQ ID NO: 191269 - protein, 20 aa, Artificial Sequence
  Description of Artificial Sequence: Synthetic peptide
  Seed: GNEKKAKLANVVRKMMTNSQ
GNEWKAQLANVFRKMMTNSQ

SEQ ID NO: 191270 - protein, 20 aa, Artificial Sequence
  Description of Artificial Sequence: Synthetic peptide
  Seed: GNEKKAKLANVVRKMMTNSQ
GNEWKAQLANVGRKMMTNSQ

SEQ ID NO: 191271 - protein, 20 aa, Artificial Sequence
  Description of Artificial Sequence: Synthetic peptide
  Seed: GNEKKAKLANVVRKMMTNSQ
GNEWKAQLANVIRKMMTNSQ

SEQ ID NO: 191272 - protein, 20 aa, Artificial Sequence
  Description of Artificial Sequence: Synthetic peptide
  Seed: GNEKKAKLANVVRKMMTNSQ
GNEWKAQLANVLRKMMTNSQ

SEQ ID NO: 191273 - protein, 20 aa, Artificial Sequence
  Description of Artificial Sequence: Synthetic peptide
  Seed: GNEKKAKLANVVRKMMTNSQ
GNEWKAQLANVMRKMMTNSQ

SEQ ID NO: 191274 - protein, 20 aa, Artificial Sequence
  Description of Artificial Sequence: Synthetic peptide
  Seed: GNEKKAKLANVVRKMMTNSQ
GNEWKAQLANVNRKMMTNSQ

SEQ ID NO: 191275 - protein, 20 aa, Artificial Sequence
  Description of Artificial Sequence: Synthetic peptide
  Seed: GNEKKAKLANVVRKMMTNSQ
GNEWKAQLANVSRKMMTNSQ

SEQ ID NO: 191276 - protein, 20 aa, Artificial Sequence
  Description of Artificial Sequence: Synthetic peptide
  Seed: GNEKKAKLANVVRKMMTNSQ
GNEWKAQLANVTRKMMTNSQ

SEQ ID NO: 191277 - protein, 20 aa, Artificial Sequence
  Description of Artificial Sequence: Synthetic peptide
  Seed: GNEKKAKLANVVRKMMTNSQ
GNEWKAQLANVVRKMMTNSQ

SEQ ID NO: 191278 - protein, 20 aa, Artificial Sequence
  Description of Artificial Sequence: Synthetic peptide
  Seed: GNEKKAKLANVVRKMMTNSQ
GNEWKAQLFNVFRKMMTNSQ

SEQ ID NO: 191279 - protein, 20 aa, Artificial Sequence
  Description of Artificial Sequence: Synthetic peptide
  Seed: GNEKKAKLANVVRKMMTNSQ
GNEWKAQLFNVIRKMMTNSQ

SEQ ID NO: 191280 - protein, 20 aa, Artificial Sequence
  Description of Artificial Sequence: Synthetic peptide
  Seed: GNEKKAKLANVVRKMMTNSQ
GNEWKAQLFNVLRKMMTNSQ

SEQ ID NO: 191281 - protein, 20 aa, Artificial Sequence
  Description of Artificial Sequence: Synthetic peptide
  Seed: GNEKKAKLANVVRKMMTNSQ
GNEWKAQLFNVMRKMMTNSQ

SEQ ID NO: 191282 - protein, 20 aa, Artificial Sequence
  Description of Artificial Sequence: Synthetic peptide
  Seed: GNEKKAKLANVVRKMMTNSQ
GNEWKAQLFNVTRKMMTNSQ

SEQ ID NO: 191283 - protein, 20 aa, Artificial Sequence
  Description of Artificial Sequence: Synthetic peptide
  Seed: GNEKKAKLANVVRKMMTNSQ
GNEWKAQLFNVVRKMMTNSQ

SEQ ID NO: 191284 - protein, 20 aa, Artificial Sequence
  Description of Artificial Sequence: Synthetic peptide
  Seed: GNEKKAKLANVVRKMMTNSQ
GNEWKAQLFNVYRKMMTNSQ

SEQ ID NO: 191285 - protein, 20 aa, Artificial Sequence
  Description of Artificial Sequence: Synthetic peptide
  Seed: GNEKKAKLANVVRKMMTNSQ
GNEWKAQLGNVARKMMTNSQ

SEQ ID NO: 191286 - protein, 20 aa, Artificial Sequence
  Description of Artificial Sequence: Synthetic peptide
  Seed: GNEKKAKLANVVRKMMTNSQ
GNEWKAQLGNVIRKMMTNSQ

SEQ ID NO: 191287 - protein, 20 aa, Artificial Sequence
  Description of Artificial Sequence: Synthetic peptide
  Seed: GNEKKAKLANVVRKMMTNSQ
GNEWKAQLGNVLRKMMTNSQ

SEQ ID NO: 191288 - protein, 20 aa, Artificial Sequence
  Description of Artificial Sequence: Synthetic peptide
  Seed: GNEKKAKLANVVRKMMTNSQ
GNEWKAQLGNVMRKMMTNSQ

SEQ ID NO: 191289 - protein, 20 aa, Artificial Sequence
  Description of Artificial Sequence: Synthetic peptide
  Seed: GNEKKAKLANVVRKMMTNSQ
GNEWKAQLGNVSRKMMTNSQ

SEQ ID NO: 191290 - protein, 20 aa, Artificial Sequence
  Description of Artificial Sequence: Synthetic peptide
  Seed: GNEKKAKLANVVRKMMTNSQ
GNEWKAQLGNVTRKMMTNSQ

SEQ ID NO: 191291 - protein, 20 aa, Artificial Sequence
  Description of Artificial Sequence: Synthetic peptide
  Seed: GNEKKAKLANVVRKMMTNSQ
GNEWKAQLGNVVRKMMTNSQ

SEQ ID NO: 191292 - protein, 20 aa, Artificial Sequence
  Description of Artificial Sequence: Synthetic peptide
  Seed: GNEKKAKLANVVRKMMTNSQ
GNEWKAQLINVARKMMTNSQ

SEQ ID NO: 191293 - protein, 20 aa, Artificial Sequence
  Description of Artificial Sequence: Synthetic peptide
  Seed: GNEKKAKLANVVRKMMTNSQ
GNEWKAQLINVNRKMMTNSQ

SEQ ID NO: 191294 - protein, 20 aa, Artificial Sequence
  Description of Artificial Sequence: Synthetic peptide
  Seed: GNEKKAKLANVVRKMMTNSQ
GNEWKAQLINVSRKMMTNSQ

SEQ ID NO: 191295 - protein, 20 aa, Artificial Sequence
  Description of Artificial Sequence: Synthetic peptide
  Seed: GNEKKAKLANVVRKMMTNSQ
GNEWKAQLNNVARKMMTNSQ

SEQ ID NO: 191296 - protein, 20 aa, Artificial Sequence
  Description of Artificial Sequence: Synthetic peptide
  Seed: GNEKKAKLANVVRKMMTNSQ
GNEWKAQLNNVIRKMMTNSQ

SEQ ID NO: 191297 - protein, 20 aa, Artificial Sequence
  Description of Artificial Sequence: Synthetic peptide
  Seed: GNEKKAKLANVVRKMMTNSQ
GNEWKAQLNNVLRKMMTNSQ

SEQ ID NO: 191298 - protein, 20 aa, Artificial Sequence
  Description of Artificial Sequence: Synthetic peptide
  Seed: GNEKKAKLANVVRKMMTNSQ
GNEWKAQLNNVVRKMMTNSQ

SEQ ID NO: 191299 - protein, 20 aa, Artificial Sequence
  Description of Artificial Sequence: Synthetic peptide
  Seed: GNEKKAKLANVVRKMMTNSQ
GNEWKAQLPNVARKMMTNSQ

SEQ ID NO: 191300 - protein, 20 aa, Artificial Sequence
  Description of Artificial Sequence: Synthetic peptide
  Seed: GNEKKAKLANVVRKMMTNSQ
GNEWKAQLPNVIRKMMTNSQ

SEQ ID NO: 191301 - protein, 20 aa, Artificial Sequence
  Description of Artificial Sequence: Synthetic peptide
  Seed: GNEKKAKLANVVRKMMTNSQ
GNEWKAQLPNVLRKMMTNSQ

SEQ ID NO: 191302 - protein, 20 aa, Artificial Sequence
  Description of Artificial Sequence: Synthetic peptide
  Seed: GNEKKAKLANVVRKMMTNSQ
GNEWKAQLPNVNRKMMTNSQ

SEQ ID NO: 191303 - protein, 20 aa, Artificial Sequence
  Description of Artificial Sequence: Synthetic peptide
  Seed: GNEKKAKLANVVRKMMTNSQ
GNEWKAQLPNVSRKMMTNSQ

SEQ ID NO: 191304 - protein, 20 aa, Artificial Sequence
  Description of Artificial Sequence: Synthetic peptide
  Seed: GNEKKAKLANVVRKMMTNSQ
GNEWKAQLPNVVRKMMTNSQ

SEQ ID NO: 191305 - protein, 20 aa, Artificial Sequence
  Description of Artificial Sequence: Synthetic peptide
  Seed: GNEKKAKLANVVRKMMTNSQ
GNEWKAQLSNVARKMMTNSQ

SEQ ID NO: 191306 - protein, 20 aa, Artificial Sequence
  Description of Artificial Sequence: Synthetic peptide
  Seed: GNEKKAKLANVVRKMMTNSQ
GNEWKAQLSNVIRKMMTNSQ

SEQ ID NO: 191307 - protein, 20 aa, Artificial Sequence
  Description of Artificial Sequence: Synthetic peptide
  Seed: GNEKKAKLANVVRKMMTNSQ
GNEWKAQLSNVLRKMMTNSQ

SEQ ID NO: 191308 - protein, 20 aa, Artificial Sequence
  Description of Artificial Sequence: Synthetic peptide
  Seed: GNEKKAKLANVVRKMMTNSQ
GNEWKAQLSNVMRKMMTNSQ

SEQ ID NO: 191309 - protein, 20 aa, Artificial Sequence
  Description of Artificial Sequence: Synthetic peptide
  Seed: GNEKKAKLANVVRKMMTNSQ
GNEWKAQLSNVNRKMMTNSQ

SEQ ID NO: 191310 - protein, 20 aa, Artificial Sequence
  Description of Artificial Sequence: Synthetic peptide
  Seed: GNEKKAKLANVVRKMMTNSQ
GNEWKAQLSNVSRKMMTNSQ

SEQ ID NO: 191311 - protein, 20 aa, Artificial Sequence
  Description of Artificial Sequence: Synthetic peptide
  Seed: GNEKKAKLANVVRKMMTNSQ
GNEWKAQLSNVTRKMMTNSQ

SEQ ID NO: 191312 - protein, 20 aa, Artificial Sequence
  Description of Artificial Sequence: Synthetic peptide
  Seed: GNEKKAKLANVVRKMMTNSQ
GNEWKAQLSNVVRKMMTNSQ

SEQ ID NO: 191313 - protein, 20 aa, Artificial Sequence
  Description of Artificial Sequence: Synthetic peptide
  Seed: GNEKKAKLANVVRKMMTNSQ
GNEWKAQLTNVARKMMTNSQ

SEQ ID NO: 191314 - protein, 20 aa, Artificial Sequence
  Description of Artificial Sequence: Synthetic peptide
  Seed: GNEKKAKLANVVRKMMTNSQ
GNEWKAQLTNVIRKMMTNSQ

SEQ ID NO: 191315 - protein, 20 aa, Artificial Sequence
  Description of Artificial Sequence: Synthetic peptide
  Seed: GNEKKAKLANVVRKMMTNSQ
GNEWKAQLTNVLRKMMTNSQ

SEQ ID NO: 191316 - protein, 20 aa, Artificial Sequence
  Description of Artificial Sequence: Synthetic peptide
  Seed: GNEKKAKLANVVRKMMTNSQ
GNEWKAQLTNVMRKMMTNSQ

SEQ ID NO: 191317 - protein, 20 aa, Artificial Sequence
  Description of Artificial Sequence: Synthetic peptide
  Seed: GNEKKAKLANVVRKMMTNSQ
GNEWKAQLTNVNRKMMTNSQ

SEQ ID NO: 191318 - protein, 20 aa, Artificial Sequence
  Description of Artificial Sequence: Synthetic peptide
  Seed: GNEKKAKLANVVRKMMTNSQ
GNEWKAQLTNVSRKMMTNSQ

SEQ ID NO: 191319 - protein, 20 aa, Artificial Sequence
  Description of Artificial Sequence: Synthetic peptide
  Seed: GNEKKAKLANVVRKMMTNSQ
GNEWKAQLTNVTRKMMTNSQ

SEQ ID NO: 191320 - protein, 20 aa, Artificial Sequence
  Description of Artificial Sequence: Synthetic peptide
  Seed: GNEKKAKLANVVRKMMTNSQ
GNEWKAQLTNVVRKMMTNSQ

SEQ ID NO: 191321 - protein, 20 aa, Artificial Sequence
  Description of Artificial Sequence: Synthetic peptide
  Seed: GNEKKAKLANVVRKMMTNSQ
GNEWKAQLVNVARKMMTNSQ

SEQ ID NO: 191322 - protein, 20 aa, Artificial Sequence
  Description of Artificial Sequence: Synthetic peptide
  Seed: GNEKKAKLANVVRKMMTNSQ
GNEWKAQLVNVIRKMMTNSQ

SEQ ID NO: 191323 - protein, 20 aa, Artificial Sequence
  Description of Artificial Sequence: Synthetic peptide
  Seed: GNEKKAKLANVVRKMMTNSQ
GNEWKAQLVNVLRKMMTNSQ

SEQ ID NO: 191324 - protein, 20 aa, Artificial Sequence
  Description of Artificial Sequence: Synthetic peptide
  Seed: GNEKKAKLANVVRKMMTNSQ
GNEWKAQLVNVNRKMMTNSQ

SEQ ID NO: 191325 - protein, 20 aa, Artificial Sequence
  Description of Artificial Sequence: Synthetic peptide
  Seed: GNEKKAKLANVVRKMMTNSQ
GNEWKAQLVNVSRKMMTNSQ

SEQ ID NO: 191326 - protein, 20 aa, Artificial Sequence
  Description of Artificial Sequence: Synthetic peptide
  Seed: GNEKKAKLANVVRKMMTNSQ
GNEWKAQLVNVTRKMMTNSQ

SEQ ID NO: 191327 - protein, 20 aa, Artificial Sequence
  Description of Artificial Sequence: Synthetic peptide
  Seed: GNEKKAKLANVVRKMMTNSQ
GNEWKAQLVNVVRKMMTNSQ

SEQ ID NO: 191328 - protein, 20 aa, Artificial Sequence
  Description of Artificial Sequence: Synthetic peptide
  Seed: GNEKKAKLANVVRKMMTNSQ
GNEWKAQLYNVFRKMMTNSQ

SEQ ID NO: 191329 - protein, 20 aa, Artificial Sequence
  Description of Artificial Sequence: Synthetic peptide
  Seed: GNEKKAKLANVVRKMMTNSQ
GNEWKAQLYNVIRKMMTNSQ

SEQ ID NO: 191330 - protein, 20 aa, Artificial Sequence
  Description of Artificial Sequence: Synthetic peptide
  Seed: GNEKKAKLANVVRKMMTNSQ
GNEWKAQLYNVLRKMMTNSQ

SEQ ID NO: 191331 - protein, 20 aa, Artificial Sequence
  Description of Artificial Sequence: Synthetic peptide
  Seed: GNEKKAKLANVVRKMMTNSQ
GNEWKARLFNVFRKMMTNSQ

SEQ ID NO: 191332 - protein, 20 aa, Artificial Sequence
  Description of Artificial Sequence: Synthetic peptide
  Seed: GNEKKAKLANVVRKMMTNSQ
GNEWKARLFNVIRKMMTNSQ

SEQ ID NO: 191333 - protein, 20 aa, Artificial Sequence
  Description of Artificial Sequence: Synthetic peptide
  Seed: GNEKKAKLANVVRKMMTNSQ
GNEWKARLFNVLRKMMTNSQ

SEQ ID NO: 191334 - protein, 20 aa, Artificial Sequence
  Description of Artificial Sequence: Synthetic peptide
  Seed: GNEKKAKLANVVRKMMTNSQ
GNEWKARLFNVVRKMMTNSQ

SEQ ID NO: 191335 - protein, 20 aa, Artificial Sequence
  Description of Artificial Sequence: Synthetic peptide
  Seed: GNEKKAKLANVVRKMMTNSQ
GNEWKASLANVARKMMTNSQ

SEQ ID NO: 191336 - protein, 20 aa, Artificial Sequence
  Description of Artificial Sequence: Synthetic peptide
  Seed: GNEKKAKLANVVRKMMTNSQ
GNEWKASLANVIRKMMTNSQ

SEQ ID NO: 191337 - protein, 20 aa, Artificial Sequence
  Description of Artificial Sequence: Synthetic peptide
  Seed: GNEKKAKLANVVRKMMTNSQ
GNEWKASLANVLRKMMTNSQ

SEQ ID NO: 191338 - protein, 20 aa, Artificial Sequence
  Description of Artificial Sequence: Synthetic peptide
  Seed: GNEKKAKLANVVRKMMTNSQ
GNEWKASLANVMRKMMTNSQ

SEQ ID NO: 191339 - protein, 20 aa, Artificial Sequence
  Description of Artificial Sequence: Synthetic peptide
  Seed: GNEKKAKLANVVRKMMTNSQ
GNEWKASLANVNRKMMTNSQ

SEQ ID NO: 191340 - protein, 20 aa, Artificial Sequence
  Description of Artificial Sequence: Synthetic peptide
  Seed: GNEKKAKLANVVRKMMTNSQ
GNEWKASLANVSRKMMTNSQ

SEQ ID NO: 191341 - protein, 20 aa, Artificial Sequence
  Description of Artificial Sequence: Synthetic peptide
  Seed: GNEKKAKLANVVRKMMTNSQ
GNEWKASLANVTRKMMTNSQ

SEQ ID NO: 191342 - protein, 20 aa, Artificial Sequence
  Description of Artificial Sequence: Synthetic peptide
  Seed: GNEKKAKLANVVRKMMTNSQ
GNEWKASLANVVRKMMTNSQ

SEQ ID NO: 191343 - protein, 20 aa, Artificial Sequence
  Description of Artificial Sequence: Synthetic peptide
  Seed: GNEKKAKLANVVRKMMTNSQ
GNEWKASLFNVARKMMTNSQ

SEQ ID NO: 191344 - protein, 20 aa, Artificial Sequence
  Description of Artificial Sequence: Synthetic peptide
  Seed: GNEKKAKLANVVRKMMTNSQ
GNEWKASLFNVERKMMTNSQ

SEQ ID NO: 191345 - protein, 20 aa, Artificial Sequence
  Description of Artificial Sequence: Synthetic peptide
  Seed: GNEKKAKLANVVRKMMTNSQ
GNEWKASLFNVFRKMMTNSQ

SEQ ID NO: 191346 - protein, 20 aa, Artificial Sequence
  Description of Artificial Sequence: Synthetic peptide
  Seed: GNEKKAKLANVVRKMMTNSQ
GNEWKASLFNVIRKMMTNSQ

SEQ ID NO: 191347 - protein, 20 aa, Artificial Sequence
  Description of Artificial Sequence: Synthetic peptide
  Seed: GNEKKAKLANVVRKMMTNSQ
GNEWKASLFNVLRKMMTNSQ

SEQ ID NO: 191348 - protein, 20 aa, Artificial Sequence
  Description of Artificial Sequence: Synthetic peptide
  Seed: GNEKKAKLANVVRKMMTNSQ
GNEWKASLFNVMRKMMTNSQ

SEQ ID NO: 191349 - protein, 20 aa, Artificial Sequence
  Description of Artificial Sequence: Synthetic peptide
  Seed: GNEKKAKLANVVRKMMTNSQ
GNEWKASLFNVNRKMMTNSQ

SEQ ID NO: 191350 - protein, 20 aa, Artificial Sequence
  Description of Artificial Sequence: Synthetic peptide
  Seed: GNEKKAKLANVVRKMMTNSQ
GNEWKASLFNVSRKMMTNSQ

SEQ ID NO: 191351 - protein, 20 aa, Artificial Sequence
  Description of Artificial Sequence: Synthetic peptide
  Seed: GNEKKAKLANVVRKMMTNSQ
GNEWKASLFNVTRKMMTNSQ

SEQ ID NO: 191352 - protein, 20 aa, Artificial Sequence
  Description of Artificial Sequence: Synthetic peptide
  Seed: GNEKKAKLANVVRKMMTNSQ
GNEWKASLFNVVRKMMTNSQ

SEQ ID NO: 191353 - protein, 20 aa, Artificial Sequence
  Description of Artificial Sequence: Synthetic peptide
  Seed: GNEKKAKLANVVRKMMTNSQ
GNEWKASLFNVYRKMMTNSQ

SEQ ID NO: 191354 - protein, 20 aa, Artificial Sequence
  Description of Artificial Sequence: Synthetic peptide
  Seed: GNEKKAKLANVVRKMMTNSQ
GNEWKASLGNVARKMMTNSQ

SEQ ID NO: 191355 - protein, 20 aa, Artificial Sequence
  Description of Artificial Sequence: Synthetic peptide
  Seed: GNEKKAKLANVVRKMMTNSQ
GNEWKASLGNVIRKMMTNSQ

SEQ ID NO: 191356 - protein, 20 aa, Artificial Sequence
  Description of Artificial Sequence: Synthetic peptide
  Seed: GNEKKAKLANVVRKMMTNSQ
GNEWKASLGNVLRKMMTNSQ

SEQ ID NO: 191357 - protein, 20 aa, Artificial Sequence
  Description of Artificial Sequence: Synthetic peptide
  Seed: GNEKKAKLANVVRKMMTNSQ
GNEWKASLGNVMRKMMTNSQ

SEQ ID NO: 191358 - protein, 20 aa, Artificial Sequence
  Description of Artificial Sequence: Synthetic peptide
  Seed: GNEKKAKLANVVRKMMTNSQ
GNEWKASLGNVVRKMMTNSQ

SEQ ID NO: 191359 - protein, 20 aa, Artificial Sequence
  Description of Artificial Sequence: Synthetic peptide
  Seed: GNEKKAKLANVVRKMMTNSQ
GNEWKASLINVARKMMTNSQ

SEQ ID NO: 191360 - protein, 20 aa, Artificial Sequence
  Description of Artificial Sequence: Synthetic peptide
  Seed: GNEKKAKLANVVRKMMTNSQ
GNEWKASLLNVIRKMMTNSQ

SEQ ID NO: 191361 - protein, 20 aa, Artificial Sequence
  Description of Artificial Sequence: Synthetic peptide
  Seed: GNEKKAKLANVVRKMMTNSQ
GNEWKASLLNVLRKMMTNSQ

SEQ ID NO: 191362 - protein, 20 aa, Artificial Sequence
  Description of Artificial Sequence: Synthetic peptide
  Seed: GNEKKAKLANVVRKMMTNSQ
GNEWKASLLNVVRKMMTNSQ

SEQ ID NO: 191363 - protein, 20 aa, Artificial Sequence
  Description of Artificial Sequence: Synthetic peptide
  Seed: GNEKKAKLANVVRKMMTNSQ
GNEWKASLNNVVRKMMTNSQ

SEQ ID NO: 191364 - protein, 20 aa, Artificial Sequence
  Description of Artificial Sequence: Synthetic peptide
  Seed: GNEKKAKLANVVRKMMTNSQ
GNEWKASLPNVARKMMTNSQ

SEQ ID NO: 191365 - protein, 20 aa, Artificial Sequence
  Description of Artificial Sequence: Synthetic peptide
  Seed: GNEKKAKLANVVRKMMTNSQ
GNEWKASLPNVIRKMMTNSQ

SEQ ID NO: 191366 - protein, 20 aa, Artificial Sequence
  Description of Artificial Sequence: Synthetic peptide
  Seed: GNEKKAKLANVVRKMMTNSQ
GNEWKASLPNVLRKMMTNSQ

SEQ ID NO: 191367 - protein, 20 aa, Artificial Sequence
  Description of Artificial Sequence: Synthetic peptide
  Seed: GNEKKAKLANVVRKMMTNSQ
GNEWKASLPNVNRKMMTNSQ

SEQ ID NO: 191368 - protein, 20 aa, Artificial Sequence
  Description of Artificial Sequence: Synthetic peptide
  Seed: GNEKKAKLANVVRKMMTNSQ
GNEWKASLPNVSRKMMTNSQ

SEQ ID NO: 191369 - protein, 20 aa, Artificial Sequence
  Description of Artificial Sequence: Synthetic peptide
  Seed: GNEKKAKLANVVRKMMTNSQ
GNEWKASLPNVVRKMMTNSQ

SEQ ID NO: 191370 - protein, 20 aa, Artificial Sequence
  Description of Artificial Sequence: Synthetic peptide
  Seed: GNEKKAKLANVVRKMMTNSQ
GNEWKASLSNVARKMMTNSQ

SEQ ID NO: 191371 - protein, 20 aa, Artificial Sequence
  Description of Artificial Sequence: Synthetic peptide
  Seed: GNEKKAKLANVVRKMMTNSQ
GNEWKASLSNVIRKMMTNSQ

SEQ ID NO: 191372 - protein, 20 aa, Artificial Sequence
  Description of Artificial Sequence: Synthetic peptide
  Seed: GNEKKAKLANVVRKMMTNSQ
GNEWKASLSNVLRKMMTNSQ

SEQ ID NO: 191373 - protein, 20 aa, Artificial Sequence
  Description of Artificial Sequence: Synthetic peptide
  Seed: GNEKKAKLANVVRKMMTNSQ
GNEWKASLSNVMRKMMTNSQ

SEQ ID NO: 191374 - protein, 20 aa, Artificial Sequence
  Description of Artificial Sequence: Synthetic peptide
  Seed: GNEKKAKLANVVRKMMTNSQ
GNEWKASLSNVNRKMMTNSQ

SEQ ID NO: 191375 - protein, 20 aa, Artificial Sequence
  Description of Artificial Sequence: Synthetic peptide
  Seed: GNEKKAKLANVVRKMMTNSQ
GNEWKASLSNVSRKMMTNSQ

SEQ ID NO: 191376 - protein, 20 aa, Artificial Sequence
  Description of Artificial Sequence: Synthetic peptide
  Seed: GNEKKAKLANVVRKMMTNSQ
GNEWKASLSNVTRKMMTNSQ

SEQ ID NO: 191377 - protein, 20 aa, Artificial Sequence
  Description of Artificial Sequence: Synthetic peptide
  Seed: GNEKKAKLANVVRKMMTNSQ
GNEWKASLSNVVRKMMTNSQ

SEQ ID NO: 191378 - protein, 20 aa, Artificial Sequence
  Description of Artificial Sequence: Synthetic peptide
  Seed: GNEKKAKLANVVRKMMTNSQ
GNEWKASLTNVARKMMTNSQ

SEQ ID NO: 191379 - protein, 20 aa, Artificial Sequence
  Description of Artificial Sequence: Synthetic peptide
  Seed: GNEKKAKLANVVRKMMTNSQ
GNEWKASLTNVIRKMMTNSQ

SEQ ID NO: 191380 - protein, 20 aa, Artificial Sequence
  Description of Artificial Sequence: Synthetic peptide
  Seed: GNEKKAKLANVVRKMMTNSQ
GNEWKASLTNVLRKMMTNSQ

SEQ ID NO: 191381 - protein, 20 aa, Artificial Sequence
  Description of Artificial Sequence: Synthetic peptide
  Seed: GNEKKAKLANVVRKMMTNSQ
GNEWKASLTNVNRKMMTNSQ

SEQ ID NO: 191382 - protein, 20 aa, Artificial Sequence
  Description of Artificial Sequence: Synthetic peptide
  Seed: GNEKKAKLANVVRKMMTNSQ
GNEWKASLTNVSRKMMTNSQ

SEQ ID NO: 191383 - protein, 20 aa, Artificial Sequence
  Description of Artificial Sequence: Synthetic peptide
  Seed: GNEKKAKLANVVRKMMTNSQ
GNEWKASLTNVVRKMMTNSQ

SEQ ID NO: 191384 - protein, 20 aa, Artificial Sequence
  Description of Artificial Sequence: Synthetic peptide
  Seed: GNEKKAKLANVVRKMMTNSQ
GNEWKASLVNVARKMMTNSQ

SEQ ID NO: 191385 - protein, 20 aa, Artificial Sequence
  Description of Artificial Sequence: Synthetic peptide
  Seed: GNEKKAKLANVVRKMMTNSQ
GNEWKASLVNVNRKMMTNSQ

SEQ ID NO: 191386 - protein, 20 aa, Artificial Sequence
  Description of Artificial Sequence: Synthetic peptide
  Seed: GNEKKAKLANVVRKMMTNSQ
GNEWKASLVNVSRKMMTNSQ

SEQ ID NO: 191387 - protein, 20 aa, Artificial Sequence
  Description of Artificial Sequence: Synthetic peptide
  Seed: GNEKKAKLANVVRKMMTNSQ
GNEWKASLWNVFRKMMTNSQ

SEQ ID NO: 191388 - protein, 20 aa, Artificial Sequence
  Description of Artificial Sequence: Synthetic peptide
  Seed: GNEKKAKLANVVRKMMTNSQ
GNEWKASLWNVIRKMMTNSQ

SEQ ID NO: 191389 - protein, 20 aa, Artificial Sequence
  Description of Artificial Sequence: Synthetic peptide
  Seed: GNEKKAKLANVVRKMMTNSQ
GNEWKASLWNVLRKMMTNSQ

SEQ ID NO: 191390 - protein, 20 aa, Artificial Sequence
  Description of Artificial Sequence: Synthetic peptide
  Seed: GNEKKAKLANVVRKMMTNSQ
GNEWKASLWNVVRKMMTNSQ

SEQ ID NO: 191391 - protein, 20 aa, Artificial Sequence
  Description of Artificial Sequence: Synthetic peptide
  Seed: GNEKKAKLANVVRKMMTNSQ
GNEWKASLYNVFRKMMTNSQ

SEQ ID NO: 191392 - protein, 20 aa, Artificial Sequence
  Description of Artificial Sequence: Synthetic peptide
  Seed: GNEKKAKLANVVRKMMTNSQ
GNEWKASLYNVIRKMMTNSQ

SEQ ID NO: 191393 - protein, 20 aa, Artificial Sequence
  Description of Artificial Sequence: Synthetic peptide
  Seed: GNEKKAKLANVVRKMMTNSQ
GNEWKASLYNVLRKMMTNSQ

SEQ ID NO: 191394 - protein, 20 aa, Artificial Sequence
  Description of Artificial Sequence: Synthetic peptide
  Seed: GNEKKAKLANVVRKMMTNSQ
GNEWKASLYNVMRKMMTNSQ

SEQ ID NO: 191395 - protein, 20 aa, Artificial Sequence
  Description of Artificial Sequence: Synthetic peptide
  Seed: GNEKKAKLANVVRKMMTNSQ
GNEWKASLYNVVRKMMTNSQ

SEQ ID NO: 191396 - protein, 20 aa, Artificial Sequence
  Description of Artificial Sequence: Synthetic peptide
  Seed: GNEKKAKLANVVRKMMTNSQ
GNEWKATLANVARKMMTNSQ

SEQ ID NO: 191397 - protein, 20 aa, Artificial Sequence
  Description of Artificial Sequence: Synthetic peptide
  Seed: GNEKKAKLANVVRKMMTNSQ
GNEWKATLANVIRKMMTNSQ

SEQ ID NO: 191398 - protein, 20 aa, Artificial Sequence
  Description of Artificial Sequence: Synthetic peptide
  Seed: GNEKKAKLANVVRKMMTNSQ
GNEWKATLANVLRKMMTNSQ

SEQ ID NO: 191399 - protein, 20 aa, Artificial Sequence
  Description of Artificial Sequence: Synthetic peptide
  Seed: GNEKKAKLANVVRKMMTNSQ
GNEWKATLANVMRKMMTNSQ

SEQ ID NO: 191400 - protein, 20 aa, Artificial Sequence
  Description of Artificial Sequence: Synthetic peptide
  Seed: GNEKKAKLANVVRKMMTNSQ
GNEWKATLANVNRKMMTNSQ

SEQ ID NO: 191401 - protein, 20 aa, Artificial Sequence
  Description of Artificial Sequence: Synthetic peptide
  Seed: GNEKKAKLANVVRKMMTNSQ
GNEWKATLANVSRKMMTNSQ

SEQ ID NO: 191402 - protein, 20 aa, Artificial Sequence
  Description of Artificial Sequence: Synthetic peptide
  Seed: GNEKKAKLANVVRKMMTNSQ
GNEWKATLANVTRKMMTNSQ

SEQ ID NO: 191403 - protein, 20 aa, Artificial Sequence
  Description of Artificial Sequence: Synthetic peptide
  Seed: GNEKKAKLANVVRKMMTNSQ
GNEWKATLANVVRKMMTNSQ

SEQ ID NO: 191404 - protein, 20 aa, Artificial Sequence
  Description of Artificial Sequence: Synthetic peptide
  Seed: GNEKKAKLANVVRKMMTNSQ
GNEWKATLFNVARKMMTNSQ

SEQ ID NO: 191405 - protein, 20 aa, Artificial Sequence
  Description of Artificial Sequence: Synthetic peptide
  Seed: GNEKKAKLANVVRKMMTNSQ
GNEWKATLFNVDRKMMTNSQ

SEQ ID NO: 191406 - protein, 20 aa, Artificial Sequence
  Description of Artificial Sequence: Synthetic peptide
  Seed: GNEKKAKLANVVRKMMTNSQ
GNEWKATLFNVERKMMTNSQ

SEQ ID NO: 191407 - protein, 20 aa, Artificial Sequence
  Description of Artificial Sequence: Synthetic peptide
  Seed: GNEKKAKLANVVRKMMTNSQ
GNEWKATLFNVFRKMMTNSQ

SEQ ID NO: 191408 - protein, 20 aa, Artificial Sequence
  Description of Artificial Sequence: Synthetic peptide
  Seed: GNEKKAKLANVVRKMMTNSQ
GNEWKATLFNVIRKMMTNSQ

SEQ ID NO: 191409 - protein, 20 aa, Artificial Sequence
  Description of Artificial Sequence: Synthetic peptide
  Seed: GNEKKAKLANVVRKMMTNSQ
GNEWKATLFNVLRKMMTNSQ

SEQ ID NO: 191410 - protein, 20 aa, Artificial Sequence
  Description of Artificial Sequence: Synthetic peptide
  Seed: GNEKKAKLANVVRKMMTNSQ
GNEWKATLFNVMRKMMTNSQ

SEQ ID NO: 191411 - protein, 20 aa, Artificial Sequence
  Description of Artificial Sequence: Synthetic peptide
  Seed: GNEKKAKLANVVRKMMTNSQ
GNEWKATLFNVNRKMMTNSQ

SEQ ID NO: 191412 - protein, 20 aa, Artificial Sequence
  Description of Artificial Sequence: Synthetic peptide
  Seed: GNEKKAKLANVVRKMMTNSQ
GNEWKATLFNVSRKMMTNSQ

SEQ ID NO: 191413 - protein, 20 aa, Artificial Sequence
  Description of Artificial Sequence: Synthetic peptide
  Seed: GNEKKAKLANVVRKMMTNSQ
GNEWKATLFNVTRKMMTNSQ

SEQ ID NO: 191414 - protein, 20 aa, Artificial Sequence
  Description of Artificial Sequence: Synthetic peptide
  Seed: GNEKKAKLANVVRKMMTNSQ
GNEWKATLFNVVRKMMTNSQ

SEQ ID NO: 191415 - protein, 20 aa, Artificial Sequence
  Description of Artificial Sequence: Synthetic peptide
  Seed: GNEKKAKLANVVRKMMTNSQ
GNEWKATLFNVYRKMMTNSQ

SEQ ID NO: 191416 - protein, 20 aa, Artificial Sequence
  Description of Artificial Sequence: Synthetic peptide
  Seed: GNEKKAKLANVVRKMMTNSQ
GNEWKATLGNVARKMMTNSQ

SEQ ID NO: 191417 - protein, 20 aa, Artificial Sequence
  Description of Artificial Sequence: Synthetic peptide
  Seed: GNEKKAKLANVVRKMMTNSQ
GNEWKATLGNVIRKMMTNSQ

SEQ ID NO: 191418 - protein, 20 aa, Artificial Sequence
  Description of Artificial Sequence: Synthetic peptide
  Seed: GNEKKAKLANVVRKMMTNSQ
GNEWKATLGNVLRKMMTNSQ

SEQ ID NO: 191419 - protein, 20 aa, Artificial Sequence
  Description of Artificial Sequence: Synthetic peptide
  Seed: GNEKKAKLANVVRKMMTNSQ
GNEWKATLGNVVRKMMTNSQ

SEQ ID NO: 191420 - protein, 20 aa, Artificial Sequence
  Description of Artificial Sequence: Synthetic peptide
  Seed: GNEKKAKLANVVRKMMTNSQ
GNEWKATLLNVIRKMMTNSQ

SEQ ID NO: 191421 - protein, 20 aa, Artificial Sequence
  Description of Artificial Sequence: Synthetic peptide
  Seed: GNEKKAKLANVVRKMMTNSQ
GNEWKATLLNVLRKMMTNSQ

SEQ ID NO: 191422 - protein, 20 aa, Artificial Sequence
  Description of Artificial Sequence: Synthetic peptide
  Seed: GNEKKAKLANVVRKMMTNSQ
GNEWKATLLNVVRKMMTNSQ

SEQ ID NO: 191423 - protein, 20 aa, Artificial Sequence
  Description of Artificial Sequence: Synthetic peptide
  Seed: GNEKKAKLANVVRKMMTNSQ
GNEWKATLPNVARKMMTNSQ

SEQ ID NO: 191424 - protein, 20 aa, Artificial Sequence
  Description of Artificial Sequence: Synthetic peptide
  Seed: GNEKKAKLANVVRKMMTNSQ
GNEWKATLPNVIRKMMTNSQ

SEQ ID NO: 191425 - protein, 20 aa, Artificial Sequence
  Description of Artificial Sequence: Synthetic peptide
  Seed: GNEKKAKLANVVRKMMTNSQ
GNEWKATLPNVLRKMMTNSQ

SEQ ID NO: 191426 - protein, 20 aa, Artificial Sequence
  Description of Artificial Sequence: Synthetic peptide
  Seed: GNEKKAKLANVVRKMMTNSQ
GNEWKATLPNVSRKMMTNSQ

SEQ ID NO: 191427 - protein, 20 aa, Artificial Sequence
  Description of Artificial Sequence: Synthetic peptide
  Seed: GNEKKAKLANVVRKMMTNSQ
GNEWKATLPNVVRKMMTNSQ

SEQ ID NO: 191428 - protein, 20 aa, Artificial Sequence
  Description of Artificial Sequence: Synthetic peptide
  Seed: GNEKKAKLANVVRKMMTNSQ
GNEWKATLSNVARKMMTNSQ

SEQ ID NO: 191429 - protein, 20 aa, Artificial Sequence
  Description of Artificial Sequence: Synthetic peptide
  Seed: GNEKKAKLANVVRKMMTNSQ
GNEWKATLSNVIRKMMTNSQ

SEQ ID NO: 191430 - protein, 20 aa, Artificial Sequence
  Description of Artificial Sequence: Synthetic peptide
  Seed: GNEKKAKLANVVRKMMTNSQ
GNEWKATLSNVLRKMMTNSQ

SEQ ID NO: 191431 - protein, 20 aa, Artificial Sequence
  Description of Artificial Sequence: Synthetic peptide
  Seed: GNEKKAKLANVVRKMMTNSQ
GNEWKATLSNVVRKMMTNSQ

SEQ ID NO: 191432 - protein, 20 aa, Artificial Sequence
  Description of Artificial Sequence: Synthetic peptide
  Seed: GNEKKAKLANVVRKMMTNSQ
GNEWKATLTNVARKMMTNSQ

SEQ ID NO: 191433 - protein, 20 aa, Artificial Sequence
  Description of Artificial Sequence: Synthetic peptide
  Seed: GNEKKAKLANVVRKMMTNSQ
GNEWKATLTNVSRKMMTNSQ

SEQ ID NO: 191434 - protein, 20 aa, Artificial Sequence
  Description of Artificial Sequence: Synthetic peptide
  Seed: GNEKKAKLANVVRKMMTNSQ
GNEWKATLVNVARKMMTNSQ

SEQ ID NO: 191435 - protein, 20 aa, Artificial Sequence
  Description of Artificial Sequence: Synthetic peptide
  Seed: GNEKKAKLANVVRKMMTNSQ
GNEWKATLWNVFRKMMTNSQ

SEQ ID NO: 191436 - protein, 20 aa, Artificial Sequence
  Description of Artificial Sequence: Synthetic peptide
  Seed: GNEKKAKLANVVRKMMTNSQ
GNEWKATLWNVIRKMMTNSQ

SEQ ID NO: 191437 - protein, 20 aa, Artificial Sequence
  Description of Artificial Sequence: Synthetic peptide
  Seed: GNEKKAKLANVVRKMMTNSQ
GNEWKATLWNVLRKMMTNSQ

SEQ ID NO: 191438 - protein, 20 aa, Artificial Sequence
  Description of Artificial Sequence: Synthetic peptide
  Seed: GNEKKAKLANVVRKMMTNSQ
GNEWKATLWNVVRKMMTNSQ

SEQ ID NO: 191439 - protein, 20 aa, Artificial Sequence
  Description of Artificial Sequence: Synthetic peptide
  Seed: GNEKKAKLANVVRKMMTNSQ
GNEWKATLYNVFRKMMTNSQ

SEQ ID NO: 191440 - protein, 20 aa, Artificial Sequence
  Description of Artificial Sequence: Synthetic peptide
  Seed: GNEKKAKLANVVRKMMTNSQ
GNEWKATLYNVIRKMMTNSQ

SEQ ID NO: 191441 - protein, 20 aa, Artificial Sequence
  Description of Artificial Sequence: Synthetic peptide
  Seed: GNEKKAKLANVVRKMMTNSQ
GNEWKATLYNVLRKMMTNSQ

SEQ ID NO: 191442 - protein, 20 aa, Artificial Sequence
  Description of Artificial Sequence: Synthetic peptide
  Seed: GNEKKAKLANVVRKMMTNSQ
GNEWKATLYNVMRKMMTNSQ

SEQ ID NO: 191443 - protein, 20 aa, Artificial Sequence
  Description of Artificial Sequence: Synthetic peptide
  Seed: GNEKKAKLANVVRKMMTNSQ
GNEWKATLYNVVRKMMTNSQ

SEQ ID NO: 191444 - protein, 20 aa, Artificial Sequence
  Description of Artificial Sequence: Synthetic peptide
  Seed: GNEKKAKLANVVRKMMTNSQ
GNEWKAVLANVARKMMTNSQ

SEQ ID NO: 191445 - protein, 20 aa, Artificial Sequence
  Description of Artificial Sequence: Synthetic peptide
  Seed: GNEKKAKLANVVRKMMTNSQ
GNEWKAVLANVGRKMMTNSQ

SEQ ID NO: 191446 - protein, 20 aa, Artificial Sequence
  Description of Artificial Sequence: Synthetic peptide
  Seed: GNEKKAKLANVVRKMMTNSQ
GNEWKAVLANVHRKMMTNSQ

SEQ ID NO: 191447 - protein, 20 aa, Artificial Sequence
  Description of Artificial Sequence: Synthetic peptide
  Seed: GNEKKAKLANVVRKMMTNSQ
GNEWKAVLANVIRKMMTNSQ

SEQ ID NO: 191448 - protein, 20 aa, Artificial Sequence
  Description of Artificial Sequence: Synthetic peptide
  Seed: GNEKKAKLANVVRKMMTNSQ
GNEWKAVLANVLRKMMTNSQ

SEQ ID NO: 191449 - protein, 20 aa, Artificial Sequence
  Description of Artificial Sequence: Synthetic peptide
  Seed: GNEKKAKLANVVRKMMTNSQ
GNEWKAVLANVMRKMMTNSQ

SEQ ID NO: 191450 - protein, 20 aa, Artificial Sequence
  Description of Artificial Sequence: Synthetic peptide
  Seed: GNEKKAKLANVVRKMMTNSQ
GNEWKAVLANVNRKMMTNSQ

SEQ ID NO: 191451 - protein, 20 aa, Artificial Sequence
  Description of Artificial Sequence: Synthetic peptide
  Seed: GNEKKAKLANVVRKMMTNSQ
GNEWKAVLANVQRKMMTNSQ

SEQ ID NO: 191452 - protein, 20 aa, Artificial Sequence
  Description of Artificial Sequence: Synthetic peptide
  Seed: GNEKKAKLANVVRKMMTNSQ
GNEWKAVLANVSRKMMTNSQ

SEQ ID NO: 191453 - protein, 20 aa, Artificial Sequence
  Description of Artificial Sequence: Synthetic peptide
  Seed: GNEKKAKLANVVRKMMTNSQ
GNEWKAVLANVTRKMMTNSQ

SEQ ID NO: 191454 - protein, 20 aa, Artificial Sequence
  Description of Artificial Sequence: Synthetic peptide
  Seed: GNEKKAKLANVVRKMMTNSQ
GNEWKAVLANVVRKMMTNSQ

SEQ ID NO: 191455 - protein, 20 aa, Artificial Sequence
  Description of Artificial Sequence: Synthetic peptide
  Seed: GNEKKAKLANVVRKMMTNSQ
GNEWKAVLFNVARKMMTNSQ

SEQ ID NO: 191456 - protein, 20 aa, Artificial Sequence
  Description of Artificial Sequence: Synthetic peptide
  Seed: GNEKKAKLANVVRKMMTNSQ
GNEWKAVLFNVDRKMMTNSQ

SEQ ID NO: 191457 - protein, 20 aa, Artificial Sequence
  Description of Artificial Sequence: Synthetic peptide
  Seed: GNEKKAKLANVVRKMMTNSQ
GNEWKAVLFNVERKMMTNSQ

SEQ ID NO: 191458 - protein, 20 aa, Artificial Sequence
  Description of Artificial Sequence: Synthetic peptide
  Seed: GNEKKAKLANVVRKMMTNSQ
GNEWKAVLFNVFRKMMTNSQ

SEQ ID NO: 191459 - protein, 20 aa, Artificial Sequence
  Description of Artificial Sequence: Synthetic peptide
  Seed: GNEKKAKLANVVRKMMTNSQ
GNEWKAVLFNVIRKMMTNSQ

SEQ ID NO: 191460 - protein, 20 aa, Artificial Sequence
  Description of Artificial Sequence: Synthetic peptide
  Seed: GNEKKAKLANVVRKMMTNSQ
GNEWKAVLFNVLRKMMTNSQ

SEQ ID NO: 191461 - protein, 20 aa, Artificial Sequence
  Description of Artificial Sequence: Synthetic peptide
  Seed: GNEKKAKLANVVRKMMTNSQ
GNEWKAVLFNVMRKMMTNSQ

SEQ ID NO: 191462 - protein, 20 aa, Artificial Sequence
  Description of Artificial Sequence: Synthetic peptide
  Seed: GNEKKAKLANVVRKMMTNSQ
GNEWKAVLFNVNRKMMTNSQ

SEQ ID NO: 191463 - protein, 20 aa, Artificial Sequence
  Description of Artificial Sequence: Synthetic peptide
  Seed: GNEKKAKLANVVRKMMTNSQ
GNEWKAVLFNVSRKMMTNSQ

SEQ ID NO: 191464 - protein, 20 aa, Artificial Sequence
  Description of Artificial Sequence: Synthetic peptide
  Seed: GNEKKAKLANVVRKMMTNSQ
GNEWKAVLFNVTRKMMTNSQ

SEQ ID NO: 191465 - protein, 20 aa, Artificial Sequence
  Description of Artificial Sequence: Synthetic peptide
  Seed: GNEKKAKLANVVRKMMTNSQ
GNEWKAVLFNVVRKMMTNSQ

SEQ ID NO: 191466 - protein, 20 aa, Artificial Sequence
  Description of Artificial Sequence: Synthetic peptide
  Seed: GNEKKAKLANVVRKMMTNSQ
GNEWKAVLFNVYRKMMTNSQ

SEQ ID NO: 191467 - protein, 20 aa, Artificial Sequence
  Description of Artificial Sequence: Synthetic peptide
  Seed: GNEKKAKLANVVRKMMTNSQ
GNEWKAVLGNVARKMMTNSQ

SEQ ID NO: 191468 - protein, 20 aa, Artificial Sequence
  Description of Artificial Sequence: Synthetic peptide
  Seed: GNEKKAKLANVVRKMMTNSQ
GNEWKAVLGNVIRKMMTNSQ

SEQ ID NO: 191469 - protein, 20 aa, Artificial Sequence
  Description of Artificial Sequence: Synthetic peptide
  Seed: GNEKKAKLANVVRKMMTNSQ
GNEWKAVLGNVLRKMMTNSQ

SEQ ID NO: 191470 - protein, 20 aa, Artificial Sequence
  Description of Artificial Sequence: Synthetic peptide
  Seed: GNEKKAKLANVVRKMMTNSQ
GNEWKAVLGNVMRKMMTNSQ

SEQ ID NO: 191471 - protein, 20 aa, Artificial Sequence
  Description of Artificial Sequence: Synthetic peptide
  Seed: GNEKKAKLANVVRKMMTNSQ
GNEWKAVLGNVNRKMMTNSQ

SEQ ID NO: 191472 - protein, 20 aa, Artificial Sequence
  Description of Artificial Sequence: Synthetic peptide
  Seed: GNEKKAKLANVVRKMMTNSQ
GNEWKAVLGNVSRKMMTNSQ

SEQ ID NO: 191473 - protein, 20 aa, Artificial Sequence
  Description of Artificial Sequence: Synthetic peptide
  Seed: GNEKKAKLANVVRKMMTNSQ
GNEWKAVLGNVTRKMMTNSQ

SEQ ID NO: 191474 - protein, 20 aa, Artificial Sequence
  Description of Artificial Sequence: Synthetic peptide
  Seed: GNEKKAKLANVVRKMMTNSQ
GNEWKAVLGNVVRKMMTNSQ

SEQ ID NO: 191475 - protein, 20 aa, Artificial Sequence
  Description of Artificial Sequence: Synthetic peptide
  Seed: GNEKKAKLANVVRKMMTNSQ
GNEWKAVLINVARKMMTNSQ

SEQ ID NO: 191476 - protein, 20 aa, Artificial Sequence
  Description of Artificial Sequence: Synthetic peptide
  Seed: GNEKKAKLANVVRKMMTNSQ
GNEWKAVLINVNRKMMTNSQ

SEQ ID NO: 191477 - protein, 20 aa, Artificial Sequence
  Description of Artificial Sequence: Synthetic peptide
  Seed: GNEKKAKLANVVRKMMTNSQ
GNEWKAVLINVSRKMMTNSQ

SEQ ID NO: 191478 - protein, 20 aa, Artificial Sequence
  Description of Artificial Sequence: Synthetic peptide
  Seed: GNEKKAKLANVVRKMMTNSQ
GNEWKAVLNNVARKMMTNSQ

SEQ ID NO: 191479 - protein, 20 aa, Artificial Sequence
  Description of Artificial Sequence: Synthetic peptide
  Seed: GNEKKAKLANVVRKMMTNSQ
GNEWKAVLNNVIRKMMTNSQ

SEQ ID NO: 191480 - protein, 20 aa, Artificial Sequence
  Description of Artificial Sequence: Synthetic peptide
  Seed: GNEKKAKLANVVRKMMTNSQ
GNEWKAVLNNVLRKMMTNSQ

SEQ ID NO: 191481 - protein, 20 aa, Artificial Sequence
  Description of Artificial Sequence: Synthetic peptide
  Seed: GNEKKAKLANVVRKMMTNSQ
GNEWKAVLNNVNRKMMTNSQ

SEQ ID NO: 191482 - protein, 20 aa, Artificial Sequence
  Description of Artificial Sequence: Synthetic peptide
  Seed: GNEKKAKLANVVRKMMTNSQ
GNEWKAVLNNVSRKMMTNSQ

SEQ ID NO: 191483 - protein, 20 aa, Artificial Sequence
  Description of Artificial Sequence: Synthetic peptide
  Seed: GNEKKAKLANVVRKMMTNSQ
GNEWKAVLNNVVRKMMTNSQ

SEQ ID NO: 191484 - protein, 20 aa, Artificial Sequence
  Description of Artificial Sequence: Synthetic peptide
  Seed: GNEKKAKLANVVRKMMTNSQ
GNEWKAVLPNVARKMMTNSQ

SEQ ID NO: 191485 - protein, 20 aa, Artificial Sequence
  Description of Artificial Sequence: Synthetic peptide
  Seed: GNEKKAKLANVVRKMMTNSQ
GNEWKAVLPNVGRKMMTNSQ

SEQ ID NO: 191486 - protein, 20 aa, Artificial Sequence
  Description of Artificial Sequence: Synthetic peptide
  Seed: GNEKKAKLANVVRKMMTNSQ
GNEWKAVLPNVIRKMMTNSQ

SEQ ID NO: 191487 - protein, 20 aa, Artificial Sequence
  Description of Artificial Sequence: Synthetic peptide
  Seed: GNEKKAKLANVVRKMMTNSQ
GNEWKAVLPNVLRKMMTNSQ

SEQ ID NO: 191488 - protein, 20 aa, Artificial Sequence
  Description of Artificial Sequence: Synthetic peptide
  Seed: GNEKKAKLANVVRKMMTNSQ
GNEWKAVLPNVMRKMMTNSQ

SEQ ID NO: 191489 - protein, 20 aa, Artificial Sequence
  Description of Artificial Sequence: Synthetic peptide
  Seed: GNEKKAKLANVVRKMMTNSQ
GNEWKAVLPNVNRKMMTNSQ

SEQ ID NO: 191490 - protein, 20 aa, Artificial Sequence
  Description of Artificial Sequence: Synthetic peptide
  Seed: GNEKKAKLANVVRKMMTNSQ
GNEWKAVLPNVSRKMMTNSQ

SEQ ID NO: 191491 - protein, 20 aa, Artificial Sequence
  Description of Artificial Sequence: Synthetic peptide
  Seed: GNEKKAKLANVVRKMMTNSQ
GNEWKAVLPNVTRKMMTNSQ

SEQ ID NO: 191492 - protein, 20 aa, Artificial Sequence
  Description of Artificial Sequence: Synthetic peptide
  Seed: GNEKKAKLANVVRKMMTNSQ
GNEWKAVLPNVVRKMMTNSQ

SEQ ID NO: 191493 - protein, 20 aa, Artificial Sequence
  Description of Artificial Sequence: Synthetic peptide
  Seed: GNEKKAKLANVVRKMMTNSQ
GNEWKAVLSNVARKMMTNSQ

SEQ ID NO: 191494 - protein, 20 aa, Artificial Sequence
  Description of Artificial Sequence: Synthetic peptide
  Seed: GNEKKAKLANVVRKMMTNSQ
GNEWKAVLSNVGRKMMTNSQ

SEQ ID NO: 191495 - protein, 20 aa, Artificial Sequence
  Description of Artificial Sequence: Synthetic peptide
  Seed: GNEKKAKLANVVRKMMTNSQ
GNEWKAVLSNVIRKMMTNSQ

SEQ ID NO: 191496 - protein, 20 aa, Artificial Sequence
  Description of Artificial Sequence: Synthetic peptide
  Seed: GNEKKAKLANVVRKMMTNSQ
GNEWKAVLSNVLRKMMTNSQ

SEQ ID NO: 191497 - protein, 20 aa, Artificial Sequence
  Description of Artificial Sequence: Synthetic peptide
  Seed: GNEKKAKLANVVRKMMTNSQ
GNEWKAVLSNVMRKMMTNSQ

SEQ ID NO: 191498 - protein, 20 aa, Artificial Sequence
  Description of Artificial Sequence: Synthetic peptide
  Seed: GNEKKAKLANVVRKMMTNSQ
GNEWKAVLSNVNRKMMTNSQ

SEQ ID NO: 191499 - protein, 20 aa, Artificial Sequence
  Description of Artificial Sequence: Synthetic peptide
  Seed: GNEKKAKLANVVRKMMTNSQ
GNEWKAVLSNVSRKMMTNSQ

SEQ ID NO: 191500 - protein, 20 aa, Artificial Sequence
  Description of Artificial Sequence: Synthetic peptide
  Seed: GNEKKAKLANVVRKMMTNSQ
GNEWKAVLSNVTRKMMTNSQ

SEQ ID NO: 191501 - protein, 20 aa, Artificial Sequence
  Description of Artificial Sequence: Synthetic peptide
  Seed: GNEKKAKLANVVRKMMTNSQ
GNEWKAVLSNVVRKMMTNSQ

SEQ ID NO: 191502 - protein, 20 aa, Artificial Sequence
  Description of Artificial Sequence: Synthetic peptide
  Seed: GNEKKAKLANVVRKMMTNSQ
GNEWKAVLTNVARKMMTNSQ

SEQ ID NO: 191503 - protein, 20 aa, Artificial Sequence
  Description of Artificial Sequence: Synthetic peptide
  Seed: GNEKKAKLANVVRKMMTNSQ
GNEWKAVLTNVGRKMMTNSQ

SEQ ID NO: 191504 - protein, 20 aa, Artificial Sequence
  Description of Artificial Sequence: Synthetic peptide
  Seed: GNEKKAKLANVVRKMMTNSQ
GNEWKAVLTNVIRKMMTNSQ

SEQ ID NO: 191505 - protein, 20 aa, Artificial Sequence
  Description of Artificial Sequence: Synthetic peptide
  Seed: GNEKKAKLANVVRKMMTNSQ
GNEWKAVLTNVLRKMMTNSQ

SEQ ID NO: 191506 - protein, 20 aa, Artificial Sequence
  Description of Artificial Sequence: Synthetic peptide
  Seed: GNEKKAKLANVVRKMMTNSQ
GNEWKAVLTNVMRKMMTNSQ

SEQ ID NO: 191507 - protein, 20 aa, Artificial Sequence
  Description of Artificial Sequence: Synthetic peptide
  Seed: GNEKKAKLANVVRKMMTNSQ
GNEWKAVLTNVNRKMMTNSQ

SEQ ID NO: 191508 - protein, 20 aa, Artificial Sequence
  Description of Artificial Sequence: Synthetic peptide
  Seed: GNEKKAKLANVVRKMMTNSQ
GNEWKAVLTNVSRKMMTNSQ

SEQ ID NO: 191509 - protein, 20 aa, Artificial Sequence
  Description of Artificial Sequence: Synthetic peptide
  Seed: GNEKKAKLANVVRKMMTNSQ
GNEWKAVLTNVTRKMMTNSQ

SEQ ID NO: 191510 - protein, 20 aa, Artificial Sequence
  Description of Artificial Sequence: Synthetic peptide
  Seed: GNEKKAKLANVVRKMMTNSQ
GNEWKAVLTNVVRKMMTNSQ

SEQ ID NO: 191511 - protein, 20 aa, Artificial Sequence
  Description of Artificial Sequence: Synthetic peptide
  Seed: GNEKKAKLANVVRKMMTNSQ
GNEWKAVLVNVARKMMTNSQ

SEQ ID NO: 191512 - protein, 20 aa, Artificial Sequence
  Description of Artificial Sequence: Synthetic peptide
  Seed: GNEKKAKLANVVRKMMTNSQ
GNEWKAVLVNVNRKMMTNSQ

SEQ ID NO: 191513 - protein, 20 aa, Artificial Sequence
  Description of Artificial Sequence: Synthetic peptide
  Seed: GNEKKAKLANVVRKMMTNSQ
GNEWKAVLVNVSRKMMTNSQ

SEQ ID NO: 191514 - protein, 20 aa, Artificial Sequence
  Description of Artificial Sequence: Synthetic peptide
  Seed: GNEKKAKLANVVRKMMTNSQ
GNEWKAVLVNVTRKMMTNSQ

SEQ ID NO: 191515 - protein, 20 aa, Artificial Sequence
  Description of Artificial Sequence: Synthetic peptide
  Seed: GNEKKAKLANVVRKMMTNSQ
GNEWKAVLWNVIRKMMTNSQ

SEQ ID NO: 191516 - protein, 20 aa, Artificial Sequence
  Description of Artificial Sequence: Synthetic peptide
  Seed: GNEKKAKLANVVRKMMTNSQ
GNEWKAVLWNVLRKMMTNSQ

SEQ ID NO: 191517 - protein, 20 aa, Artificial Sequence
  Description of Artificial Sequence: Synthetic peptide
  Seed: GNEKKAKLANVVRKMMTNSQ
GNEWKAVLWNVVRKMMTNSQ

SEQ ID NO: 191518 - protein, 20 aa, Artificial Sequence
  Description of Artificial Sequence: Synthetic peptide
  Seed: GNEKKAKLANVVRKMMTNSQ
GNEWKAVLYNVIRKMMTNSQ

SEQ ID NO: 191519 - protein, 20 aa, Artificial Sequence
  Description of Artificial Sequence: Synthetic peptide
  Seed: GNEKKAKLANVVRKMMTNSQ
GNEWKAVLYNVLRKMMTNSQ

SEQ ID NO: 191520 - protein, 20 aa, Artificial Sequence
  Description of Artificial Sequence: Synthetic peptide
  Seed: GNEKKAKLANVVRKMMTNSQ
GNEWKAVLYNVMRKMMTNSQ

SEQ ID NO: 191521 - protein, 20 aa, Artificial Sequence
  Description of Artificial Sequence: Synthetic peptide
  Seed: GNEKKAKLANVVRKMMTNSQ
GNEWKAVLYNVVRKMMTNSQ

SEQ ID NO: 191522 - protein, 20 aa, Artificial Sequence
  Description of Artificial Sequence: Synthetic peptide
  Seed: GNEKKAKLANVVRKMMTNSQ
GNEWKAWLANVARKMMTNSQ

SEQ ID NO: 191523 - protein, 20 aa, Artificial Sequence
  Description of Artificial Sequence: Synthetic peptide
  Seed: GNEKKAKLANVVRKMMTNSQ
GNEWKAWLANVVRKMMTNSQ

SEQ ID NO: 191524 - protein, 20 aa, Artificial Sequence
  Description of Artificial Sequence: Synthetic peptide
  Seed: GNEKKAKLANVVRKMMTNSQ
GNEWKAWLFNVIRKMMTNSQ

SEQ ID NO: 191525 - protein, 20 aa, Artificial Sequence
  Description of Artificial Sequence: Synthetic peptide
  Seed: GNEKKAKLANVVRKMMTNSQ
GNEWKAWLFNVLRKMMTNSQ

SEQ ID NO: 191526 - protein, 20 aa, Artificial Sequence
  Description of Artificial Sequence: Synthetic peptide
  Seed: GNEKKAKLANVVRKMMTNSQ
GNEWKAWLFNVMRKMMTNSQ

SEQ ID NO: 191527 - protein, 20 aa, Artificial Sequence
  Description of Artificial Sequence: Synthetic peptide
  Seed: GNEKKAKLANVVRKMMTNSQ
GNEWKAWLFNVVRKMMTNSQ

SEQ ID NO: 191528 - protein, 20 aa, Artificial Sequence
  Description of Artificial Sequence: Synthetic peptide
  Seed: GNEKKAKLANVVRKMMTNSQ
GNEWKAWLLNVIRKMMTNSQ

SEQ ID NO: 191529 - protein, 20 aa, Artificial Sequence
  Description of Artificial Sequence: Synthetic peptide
  Seed: GNEKKAKLANVVRKMMTNSQ
GNEWKAWLLNVLRKMMTNSQ

SEQ ID NO: 191530 - protein, 20 aa, Artificial Sequence
  Description of Artificial Sequence: Synthetic peptide
  Seed: GNEKKAKLANVVRKMMTNSQ
GNEWKAWLSNVARKMMTNSQ

SEQ ID NO: 191531 - protein, 20 aa, Artificial Sequence
  Description of Artificial Sequence: Synthetic peptide
  Seed: GNEKKAKLANVVRKMMTNSQ
GNEWKAWLWNVIRKMMTNSQ

SEQ ID NO: 191532 - protein, 20 aa, Artificial Sequence
  Description of Artificial Sequence: Synthetic peptide
  Seed: GNEKKAKLANVVRKMMTNSQ
GNEWKAWLYNVIRKMMTNSQ

SEQ ID NO: 191533 - protein, 20 aa, Artificial Sequence
  Description of Artificial Sequence: Synthetic peptide
  Seed: GNEKKAKLANVVRKMMTNSQ
GNEWKAWLYNVLRKMMTNSQ

SEQ ID NO: 191534 - protein, 20 aa, Artificial Sequence
  Description of Artificial Sequence: Synthetic peptide
  Seed: GNEKKAKLANVVRKMMTNSQ
GNEWKAWLYNVMRKMMTNSQ

SEQ ID NO: 191535 - protein, 20 aa, Artificial Sequence
  Description of Artificial Sequence: Synthetic peptide
  Seed: GNEKKAKLANVVRKMMTNSQ
GNEWKAWLYNVVRKMMTNSQ

SEQ ID NO: 191536 - protein, 20 aa, Artificial Sequence
  Description of Artificial Sequence: Synthetic peptide
  Seed: GNEKKAKLANVVRKMMTNSQ
GNEWKAYLANVVRKMMTNSQ

SEQ ID NO: 191537 - protein, 20 aa, Artificial Sequence
  Description of Artificial Sequence: Synthetic peptide
  Seed: GNEKKAKLANVVRKMMTNSQ
GNEWKAYLFNVIRKMMTNSQ

SEQ ID NO: 191538 - protein, 20 aa, Artificial Sequence
  Description of Artificial Sequence: Synthetic peptide
  Seed: GNEKKAKLANVVRKMMTNSQ
GNEWKAYLFNVLRKMMTNSQ

SEQ ID NO: 191539 - protein, 20 aa, Artificial Sequence
  Description of Artificial Sequence: Synthetic peptide
  Seed: GNEKKAKLANVVRKMMTNSQ
GNEWKAYLFNVMRKMMTNSQ

SEQ ID NO: 191540 - protein, 20 aa, Artificial Sequence
  Description of Artificial Sequence: Synthetic peptide
  Seed: GNEKKAKLANVVRKMMTNSQ
GNEWKAYLFNVVRKMMTNSQ

SEQ ID NO: 191541 - protein, 20 aa, Artificial Sequence
  Description of Artificial Sequence: Synthetic peptide
  Seed: GNEKKAKLANVVRKMMTNSQ
GNEWKAYLGNVARKMMTNSQ

SEQ ID NO: 191542 - protein, 20 aa, Artificial Sequence
  Description of Artificial Sequence: Synthetic peptide
  Seed: GNEKKAKLANVVRKMMTNSQ
GNEWKAYLYNVVRKMMTNSQ

SEQ ID NO: 191543 - protein, 20 aa, Artificial Sequence
  Description of Artificial Sequence: Synthetic peptide
  Seed: GNEKKAKLANVVRKMMTNSQ
GNEYKAALANVARKMMTNSQ

SEQ ID NO: 191544 - protein, 20 aa, Artificial Sequence
  Description of Artificial Sequence: Synthetic peptide
  Seed: GNEKKAKLANVVRKMMTNSQ
GNEYKAALANVCRKMMTNSQ

SEQ ID NO: 191545 - protein, 20 aa, Artificial Sequence
  Description of Artificial Sequence: Synthetic peptide
  Seed: GNEKKAKLANVVRKMMTNSQ
GNEYKAALANVDRKMMTNSQ

SEQ ID NO: 191546 - protein, 20 aa, Artificial Sequence
  Description of Artificial Sequence: Synthetic peptide
  Seed: GNEKKAKLANVVRKMMTNSQ
GNEYKAALANVERKMMTNSQ

SEQ ID NO: 191547 - protein, 20 aa, Artificial Sequence
  Description of Artificial Sequence: Synthetic peptide
  Seed: GNEKKAKLANVVRKMMTNSQ
GNEYKAALANVFRKMMTNSQ

SEQ ID NO: 191548 - protein, 20 aa, Artificial Sequence
  Description of Artificial Sequence: Synthetic peptide
  Seed: GNEKKAKLANVVRKMMTNSQ
GNEYKAALANVGRKMMTNSQ

SEQ ID NO: 191549 - protein, 20 aa, Artificial Sequence
  Description of Artificial Sequence: Synthetic peptide
  Seed: GNEKKAKLANVVRKMMTNSQ
GNEYKAALANVHRKMMTNSQ

SEQ ID NO: 191550 - protein, 20 aa, Artificial Sequence
  Description of Artificial Sequence: Synthetic peptide
  Seed: GNEKKAKLANVVRKMMTNSQ
GNEYKAALANVIRKMMTNSQ

SEQ ID NO: 191551 - protein, 20 aa, Artificial Sequence
  Description of Artificial Sequence: Synthetic peptide
  Seed: GNEKKAKLANVVRKMMTNSQ
GNEYKAALANVKRKMMTNSQ

SEQ ID NO: 191552 - protein, 20 aa, Artificial Sequence
  Description of Artificial Sequence: Synthetic peptide
  Seed: GNEKKAKLANVVRKMMTNSQ
GNEYKAALANVLRKMMTNSQ

SEQ ID NO: 191553 - protein, 20 aa, Artificial Sequence
  Description of Artificial Sequence: Synthetic peptide
  Seed: GNEKKAKLANVVRKMMTNSQ
GNEYKAALANVMRKMMTNSQ

SEQ ID NO: 191554 - protein, 20 aa, Artificial Sequence
  Description of Artificial Sequence: Synthetic peptide
  Seed: GNEKKAKLANVVRKMMTNSQ
GNEYKAALANVNRKMMTNSQ

SEQ ID NO: 191555 - protein, 20 aa, Artificial Sequence
  Description of Artificial Sequence: Synthetic peptide
  Seed: GNEKKAKLANVVRKMMTNSQ
GNEYKAALANVPRKMMTNSQ

SEQ ID NO: 191556 - protein, 20 aa, Artificial Sequence
  Description of Artificial Sequence: Synthetic peptide
  Seed: GNEKKAKLANVVRKMMTNSQ
GNEYKAALANVQRKMMTNSQ

SEQ ID NO: 191557 - protein, 20 aa, Artificial Sequence
  Description of Artificial Sequence: Synthetic peptide
  Seed: GNEKKAKLANVVRKMMTNSQ
GNEYKAALANVRRKMMTNSQ

SEQ ID NO: 191558 - protein, 20 aa, Artificial Sequence
  Description of Artificial Sequence: Synthetic peptide
  Seed: GNEKKAKLANVVRKMMTNSQ
GNEYKAALANVSRKMMTNSQ

SEQ ID NO: 191559 - protein, 20 aa, Artificial Sequence
  Description of Artificial Sequence: Synthetic peptide
  Seed: GNEKKAKLANVVRKMMTNSQ
GNEYKAALANVTRKMMTNSQ

SEQ ID NO: 191560 - protein, 20 aa, Artificial Sequence
  Description of Artificial Sequence: Synthetic peptide
  Seed: GNEKKAKLANVVRKMMTNSQ
GNEYKAALANVVRKMMTNSQ

SEQ ID NO: 191561 - protein, 20 aa, Artificial Sequence
  Description of Artificial Sequence: Synthetic peptide
  Seed: GNEKKAKLANVVRKMMTNSQ
GNEYKAALANVWRKMMTNSQ

SEQ ID NO: 191562 - protein, 20 aa, Artificial Sequence
  Description of Artificial Sequence: Synthetic peptide
  Seed: GNEKKAKLANVVRKMMTNSQ
GNEYKAALANVYRKMMTNSQ

SEQ ID NO: 191563 - protein, 20 aa, Artificial Sequence
  Description of Artificial Sequence: Synthetic peptide
  Seed: GNEKKAKLANVVRKMMTNSQ
GNEYKAALENVARKMMTNSQ

SEQ ID NO: 191564 - protein, 20 aa, Artificial Sequence
  Description of Artificial Sequence: Synthetic peptide
  Seed: GNEKKAKLANVVRKMMTNSQ
GNEYKAALFNVARKMMTNSQ

SEQ ID NO: 191565 - protein, 20 aa, Artificial Sequence
  Description of Artificial Sequence: Synthetic peptide
  Seed: GNEKKAKLANVVRKMMTNSQ
GNEYKAALFNVDRKMMTNSQ

SEQ ID NO: 191566 - protein, 20 aa, Artificial Sequence
  Description of Artificial Sequence: Synthetic peptide
  Seed: GNEKKAKLANVVRKMMTNSQ
GNEYKAALFNVERKMMTNSQ

SEQ ID NO: 191567 - protein, 20 aa, Artificial Sequence
  Description of Artificial Sequence: Synthetic peptide
  Seed: GNEKKAKLANVVRKMMTNSQ
GNEYKAALFNVFRKMMTNSQ

SEQ ID NO: 191568 - protein, 20 aa, Artificial Sequence
  Description of Artificial Sequence: Synthetic peptide
  Seed: GNEKKAKLANVVRKMMTNSQ
GNEYKAALFNVIRKMMTNSQ

SEQ ID NO: 191569 - protein, 20 aa, Artificial Sequence
  Description of Artificial Sequence: Synthetic peptide
  Seed: GNEKKAKLANVVRKMMTNSQ
GNEYKAALFNVLRKMMTNSQ

SEQ ID NO: 191570 - protein, 20 aa, Artificial Sequence
  Description of Artificial Sequence: Synthetic peptide
  Seed: GNEKKAKLANVVRKMMTNSQ
GNEYKAALFNVMRKMMTNSQ

SEQ ID NO: 191571 - protein, 20 aa, Artificial Sequence
  Description of Artificial Sequence: Synthetic peptide
  Seed: GNEKKAKLANVVRKMMTNSQ
GNEYKAALFNVNRKMMTNSQ

SEQ ID NO: 191572 - protein, 20 aa, Artificial Sequence
  Description of Artificial Sequence: Synthetic peptide
  Seed: GNEKKAKLANVVRKMMTNSQ
GNEYKAALFNVSRKMMTNSQ

SEQ ID NO: 191573 - protein, 20 aa, Artificial Sequence
  Description of Artificial Sequence: Synthetic peptide
  Seed: GNEKKAKLANVVRKMMTNSQ
GNEYKAALFNVTRKMMTNSQ

SEQ ID NO: 191574 - protein, 20 aa, Artificial Sequence
  Description of Artificial Sequence: Synthetic peptide
  Seed: GNEKKAKLANVVRKMMTNSQ
GNEYKAALFNVVRKMMTNSQ

SEQ ID NO: 191575 - protein, 20 aa, Artificial Sequence
  Description of Artificial Sequence: Synthetic peptide
  Seed: GNEKKAKLANVVRKMMTNSQ
GNEYKAALFNVYRKMMTNSQ

SEQ ID NO: 191576 - protein, 20 aa, Artificial Sequence
  Description of Artificial Sequence: Synthetic peptide
  Seed: GNEKKAKLANVVRKMMTNSQ
GNEYKAALGNVARKMMTNSQ

SEQ ID NO: 191577 - protein, 20 aa, Artificial Sequence
  Description of Artificial Sequence: Synthetic peptide
  Seed: GNEKKAKLANVVRKMMTNSQ
GNEYKAALGNVCRKMMTNSQ

SEQ ID NO: 191578 - protein, 20 aa, Artificial Sequence
  Description of Artificial Sequence: Synthetic peptide
  Seed: GNEKKAKLANVVRKMMTNSQ
GNEYKAALGNVDRKMMTNSQ

SEQ ID NO: 191579 - protein, 20 aa, Artificial Sequence
  Description of Artificial Sequence: Synthetic peptide
  Seed: GNEKKAKLANVVRKMMTNSQ
GNEYKAALGNVERKMMTNSQ

SEQ ID NO: 191580 - protein, 20 aa, Artificial Sequence
  Description of Artificial Sequence: Synthetic peptide
  Seed: GNEKKAKLANVVRKMMTNSQ
GNEYKAALGNVFRKMMTNSQ

SEQ ID NO: 191581 - protein, 20 aa, Artificial Sequence
  Description of Artificial Sequence: Synthetic peptide
  Seed: GNEKKAKLANVVRKMMTNSQ
GNEYKAALGNVGRKMMTNSQ

SEQ ID NO: 191582 - protein, 20 aa, Artificial Sequence
  Description of Artificial Sequence: Synthetic peptide
  Seed: GNEKKAKLANVVRKMMTNSQ
GNEYKAALGNVHRKMMTNSQ

SEQ ID NO: 191583 - protein, 20 aa, Artificial Sequence
  Description of Artificial Sequence: Synthetic peptide
  Seed: GNEKKAKLANVVRKMMTNSQ
GNEYKAALGNVIRKMMTNSQ

SEQ ID NO: 191584 - protein, 20 aa, Artificial Sequence
  Description of Artificial Sequence: Synthetic peptide
  Seed: GNEKKAKLANVVRKMMTNSQ
GNEYKAALGNVLRKMMTNSQ

SEQ ID NO: 191585 - protein, 20 aa, Artificial Sequence
  Description of Artificial Sequence: Synthetic peptide
  Seed: GNEKKAKLANVVRKMMTNSQ
GNEYKAALGNVMRKMMTNSQ

SEQ ID NO: 191586 - protein, 20 aa, Artificial Sequence
  Description of Artificial Sequence: Synthetic peptide
  Seed: GNEKKAKLANVVRKMMTNSQ
GNEYKAALGNVNRKMMTNSQ

SEQ ID NO: 191587 - protein, 20 aa, Artificial Sequence
  Description of Artificial Sequence: Synthetic peptide
  Seed: GNEKKAKLANVVRKMMTNSQ
GNEYKAALGNVPRKMMTNSQ

SEQ ID NO: 191588 - protein, 20 aa, Artificial Sequence
  Description of Artificial Sequence: Synthetic peptide
  Seed: GNEKKAKLANVVRKMMTNSQ
GNEYKAALGNVQRKMMTNSQ

SEQ ID NO: 191589 - protein, 20 aa, Artificial Sequence
  Description of Artificial Sequence: Synthetic peptide
  Seed: GNEKKAKLANVVRKMMTNSQ
GNEYKAALGNVSRKMMTNSQ

SEQ ID NO: 191590 - protein, 20 aa, Artificial Sequence
  Description of Artificial Sequence: Synthetic peptide
  Seed: GNEKKAKLANVVRKMMTNSQ
GNEYKAALGNVTRKMMTNSQ

SEQ ID NO: 191591 - protein, 20 aa, Artificial Sequence
  Description of Artificial Sequence: Synthetic peptide
  Seed: GNEKKAKLANVVRKMMTNSQ
GNEYKAALGNVVRKMMTNSQ

SEQ ID NO: 191592 - protein, 20 aa, Artificial Sequence
  Description of Artificial Sequence: Synthetic peptide
  Seed: GNEKKAKLANVVRKMMTNSQ
GNEYKAALGNVYRKMMTNSQ

SEQ ID NO: 191593 - protein, 20 aa, Artificial Sequence
  Description of Artificial Sequence: Synthetic peptide
  Seed: GNEKKAKLANVVRKMMTNSQ
GNEYKAALHNVARKMMTNSQ

SEQ ID NO: 191594 - protein, 20 aa, Artificial Sequence
  Description of Artificial Sequence: Synthetic peptide
  Seed: GNEKKAKLANVVRKMMTNSQ
GNEYKAALHNVIRKMMTNSQ

SEQ ID NO: 191595 - protein, 20 aa, Artificial Sequence
  Description of Artificial Sequence: Synthetic peptide
  Seed: GNEKKAKLANVVRKMMTNSQ
GNEYKAALHNVLRKMMTNSQ

SEQ ID NO: 191596 - protein, 20 aa, Artificial Sequence
  Description of Artificial Sequence: Synthetic peptide
  Seed: GNEKKAKLANVVRKMMTNSQ
GNEYKAALHNVVRKMMTNSQ

SEQ ID NO: 191597 - protein, 20 aa, Artificial Sequence
  Description of Artificial Sequence: Synthetic peptide
  Seed: GNEKKAKLANVVRKMMTNSQ
GNEYKAALINVARKMMTNSQ

SEQ ID NO: 191598 - protein, 20 aa, Artificial Sequence
  Description of Artificial Sequence: Synthetic peptide
  Seed: GNEKKAKLANVVRKMMTNSQ
GNEYKAALINVDRKMMTNSQ

SEQ ID NO: 191599 - protein, 20 aa, Artificial Sequence
  Description of Artificial Sequence: Synthetic peptide
  Seed: GNEKKAKLANVVRKMMTNSQ
GNEYKAALINVERKMMTNSQ

SEQ ID NO: 191600 - protein, 20 aa, Artificial Sequence
  Description of Artificial Sequence: Synthetic peptide
  Seed: GNEKKAKLANVVRKMMTNSQ
GNEYKAALINVFRKMMTNSQ

SEQ ID NO: 191601 - protein, 20 aa, Artificial Sequence
  Description of Artificial Sequence: Synthetic peptide
  Seed: GNEKKAKLANVVRKMMTNSQ
GNEYKAALINVGRKMMTNSQ

SEQ ID NO: 191602 - protein, 20 aa, Artificial Sequence
  Description of Artificial Sequence: Synthetic peptide
  Seed: GNEKKAKLANVVRKMMTNSQ
GNEYKAALINVHRKMMTNSQ

SEQ ID NO: 191603 - protein, 20 aa, Artificial Sequence
  Description of Artificial Sequence: Synthetic peptide
  Seed: GNEKKAKLANVVRKMMTNSQ
GNEYKAALINVIRKMMTNSQ

SEQ ID NO: 191604 - protein, 20 aa, Artificial Sequence
  Description of Artificial Sequence: Synthetic peptide
  Seed: GNEKKAKLANVVRKMMTNSQ
GNEYKAALINVLRKMMTNSQ

SEQ ID NO: 191605 - protein, 20 aa, Artificial Sequence
  Description of Artificial Sequence: Synthetic peptide
  Seed: GNEKKAKLANVVRKMMTNSQ
GNEYKAALINVMRKMMTNSQ

SEQ ID NO: 191606 - protein, 20 aa, Artificial Sequence
  Description of Artificial Sequence: Synthetic peptide
  Seed: GNEKKAKLANVVRKMMTNSQ
GNEYKAALINVNRKMMTNSQ

SEQ ID NO: 191607 - protein, 20 aa, Artificial Sequence
  Description of Artificial Sequence: Synthetic peptide
  Seed: GNEKKAKLANVVRKMMTNSQ
GNEYKAALINVPRKMMTNSQ

SEQ ID NO: 191608 - protein, 20 aa, Artificial Sequence
  Description of Artificial Sequence: Synthetic peptide
  Seed: GNEKKAKLANVVRKMMTNSQ
GNEYKAALINVQRKMMTNSQ

SEQ ID NO: 191609 - protein, 20 aa, Artificial Sequence
  Description of Artificial Sequence: Synthetic peptide
  Seed: GNEKKAKLANVVRKMMTNSQ
GNEYKAALINVSRKMMTNSQ

SEQ ID NO: 191610 - protein, 20 aa, Artificial Sequence
  Description of Artificial Sequence: Synthetic peptide
  Seed: GNEKKAKLANVVRKMMTNSQ
GNEYKAALINVTRKMMTNSQ

SEQ ID NO: 191611 - protein, 20 aa, Artificial Sequence
  Description of Artificial Sequence: Synthetic peptide
  Seed: GNEKKAKLANVVRKMMTNSQ
GNEYKAALINVVRKMMTNSQ

SEQ ID NO: 191612 - protein, 20 aa, Artificial Sequence
  Description of Artificial Sequence: Synthetic peptide
  Seed: GNEKKAKLANVVRKMMTNSQ
GNEYKAALINVYRKMMTNSQ

SEQ ID NO: 191613 - protein, 20 aa, Artificial Sequence
  Description of Artificial Sequence: Synthetic peptide
  Seed: GNEKKAKLANVVRKMMTNSQ
GNEYKAALLNVARKMMTNSQ

SEQ ID NO: 191614 - protein, 20 aa, Artificial Sequence
  Description of Artificial Sequence: Synthetic peptide
  Seed: GNEKKAKLANVVRKMMTNSQ
GNEYKAALLNVGRKMMTNSQ

SEQ ID NO: 191615 - protein, 20 aa, Artificial Sequence
  Description of Artificial Sequence: Synthetic peptide
  Seed: GNEKKAKLANVVRKMMTNSQ
GNEYKAALLNVIRKMMTNSQ

SEQ ID NO: 191616 - protein, 20 aa, Artificial Sequence
  Description of Artificial Sequence: Synthetic peptide
  Seed: GNEKKAKLANVVRKMMTNSQ
GNEYKAALLNVLRKMMTNSQ

SEQ ID NO: 191617 - protein, 20 aa, Artificial Sequence
  Description of Artificial Sequence: Synthetic peptide
  Seed: GNEKKAKLANVVRKMMTNSQ
GNEYKAALLNVMRKMMTNSQ

SEQ ID NO: 191618 - protein, 20 aa, Artificial Sequence
  Description of Artificial Sequence: Synthetic peptide
  Seed: GNEKKAKLANVVRKMMTNSQ
GNEYKAALLNVNRKMMTNSQ

SEQ ID NO: 191619 - protein, 20 aa, Artificial Sequence
  Description of Artificial Sequence: Synthetic peptide
  Seed: GNEKKAKLANVVRKMMTNSQ
GNEYKAALLNVSRKMMTNSQ

SEQ ID NO: 191620 - protein, 20 aa, Artificial Sequence
  Description of Artificial Sequence: Synthetic peptide
  Seed: GNEKKAKLANVVRKMMTNSQ
GNEYKAALLNVTRKMMTNSQ

SEQ ID NO: 191621 - protein, 20 aa, Artificial Sequence
  Description of Artificial Sequence: Synthetic peptide
  Seed: GNEKKAKLANVVRKMMTNSQ
GNEYKAALLNVVRKMMTNSQ

SEQ ID NO: 191622 - protein, 20 aa, Artificial Sequence
  Description of Artificial Sequence: Synthetic peptide
  Seed: GNEKKAKLANVVRKMMTNSQ
GNEYKAALMNVARKMMTNSQ

SEQ ID NO: 191623 - protein, 20 aa, Artificial Sequence
  Description of Artificial Sequence: Synthetic peptide
  Seed: GNEKKAKLANVVRKMMTNSQ
GNEYKAALMNVGRKMMTNSQ

SEQ ID NO: 191624 - protein, 20 aa, Artificial Sequence
  Description of Artificial Sequence: Synthetic peptide
  Seed: GNEKKAKLANVVRKMMTNSQ
GNEYKAALMNVIRKMMTNSQ

SEQ ID NO: 191625 - protein, 20 aa, Artificial Sequence
  Description of Artificial Sequence: Synthetic peptide
  Seed: GNEKKAKLANVVRKMMTNSQ
GNEYKAALMNVLRKMMTNSQ

SEQ ID NO: 191626 - protein, 20 aa, Artificial Sequence
  Description of Artificial Sequence: Synthetic peptide
  Seed: GNEKKAKLANVVRKMMTNSQ
GNEYKAALMNVMRKMMTNSQ

SEQ ID NO: 191627 - protein, 20 aa, Artificial Sequence
  Description of Artificial Sequence: Synthetic peptide
  Seed: GNEKKAKLANVVRKMMTNSQ
GNEYKAALMNVNRKMMTNSQ

SEQ ID NO: 191628 - protein, 20 aa, Artificial Sequence
  Description of Artificial Sequence: Synthetic peptide
  Seed: GNEKKAKLANVVRKMMTNSQ
GNEYKAALMNVSRKMMTNSQ

SEQ ID NO: 191629 - protein, 20 aa, Artificial Sequence
  Description of Artificial Sequence: Synthetic peptide
  Seed: GNEKKAKLANVVRKMMTNSQ
GNEYKAALMNVTRKMMTNSQ

SEQ ID NO: 191630 - protein, 20 aa, Artificial Sequence
  Description of Artificial Sequence: Synthetic peptide
  Seed: GNEKKAKLANVVRKMMTNSQ
GNEYKAALMNVVRKMMTNSQ

SEQ ID NO: 191631 - protein, 20 aa, Artificial Sequence
  Description of Artificial Sequence: Synthetic peptide
  Seed: GNEKKAKLANVVRKMMTNSQ
GNEYKAALNNVARKMMTNSQ

SEQ ID NO: 191632 - protein, 20 aa, Artificial Sequence
  Description of Artificial Sequence: Synthetic peptide
  Seed: GNEKKAKLANVVRKMMTNSQ
GNEYKAALNNVFRKMMTNSQ

SEQ ID NO: 191633 - protein, 20 aa, Artificial Sequence
  Description of Artificial Sequence: Synthetic peptide
  Seed: GNEKKAKLANVVRKMMTNSQ
GNEYKAALNNVGRKMMTNSQ

SEQ ID NO: 191634 - protein, 20 aa, Artificial Sequence
  Description of Artificial Sequence: Synthetic peptide
  Seed: GNEKKAKLANVVRKMMTNSQ
GNEYKAALNNVHRKMMTNSQ

SEQ ID NO: 191635 - protein, 20 aa, Artificial Sequence
  Description of Artificial Sequence: Synthetic peptide
  Seed: GNEKKAKLANVVRKMMTNSQ
GNEYKAALNNVIRKMMTNSQ

SEQ ID NO: 191636 - protein, 20 aa, Artificial Sequence
  Description of Artificial Sequence: Synthetic peptide
  Seed: GNEKKAKLANVVRKMMTNSQ
GNEYKAALNNVLRKMMTNSQ

SEQ ID NO: 191637 - protein, 20 aa, Artificial Sequence
  Description of Artificial Sequence: Synthetic peptide
  Seed: GNEKKAKLANVVRKMMTNSQ
GNEYKAALNNVMRKMMTNSQ

SEQ ID NO: 191638 - protein, 20 aa, Artificial Sequence
  Description of Artificial Sequence: Synthetic peptide
  Seed: GNEKKAKLANVVRKMMTNSQ
GNEYKAALNNVNRKMMTNSQ

SEQ ID NO: 191639 - protein, 20 aa, Artificial Sequence
  Description of Artificial Sequence: Synthetic peptide
  Seed: GNEKKAKLANVVRKMMTNSQ
GNEYKAALNNVQRKMMTNSQ

SEQ ID NO: 191640 - protein, 20 aa, Artificial Sequence
  Description of Artificial Sequence: Synthetic peptide
  Seed: GNEKKAKLANVVRKMMTNSQ
GNEYKAALNNVSRKMMTNSQ

SEQ ID NO: 191641 - protein, 20 aa, Artificial Sequence
  Description of Artificial Sequence: Synthetic peptide
  Seed: GNEKKAKLANVVRKMMTNSQ
GNEYKAALNNVTRKMMTNSQ

SEQ ID NO: 191642 - protein, 20 aa, Artificial Sequence
  Description of Artificial Sequence: Synthetic peptide
  Seed: GNEKKAKLANVVRKMMTNSQ
GNEYKAALNNVVRKMMTNSQ

SEQ ID NO: 191643 - protein, 20 aa, Artificial Sequence
  Description of Artificial Sequence: Synthetic peptide
  Seed: GNEKKAKLANVVRKMMTNSQ
GNEYKAALNNVYRKMMTNSQ

SEQ ID NO: 191644 - protein, 20 aa, Artificial Sequence
  Description of Artificial Sequence: Synthetic peptide
  Seed: GNEKKAKLANVVRKMMTNSQ
GNEYKAALPNVARKMMTNSQ

SEQ ID NO: 191645 - protein, 20 aa, Artificial Sequence
  Description of Artificial Sequence: Synthetic peptide
  Seed: GNEKKAKLANVVRKMMTNSQ
GNEYKAALPNVCRKMMTNSQ

SEQ ID NO: 191646 - protein, 20 aa, Artificial Sequence
  Description of Artificial Sequence: Synthetic peptide
  Seed: GNEKKAKLANVVRKMMTNSQ
GNEYKAALPNVDRKMMTNSQ

SEQ ID NO: 191647 - protein, 20 aa, Artificial Sequence
  Description of Artificial Sequence: Synthetic peptide
  Seed: GNEKKAKLANVVRKMMTNSQ
GNEYKAALPNVERKMMTNSQ

SEQ ID NO: 191648 - protein, 20 aa, Artificial Sequence
  Description of Artificial Sequence: Synthetic peptide
  Seed: GNEKKAKLANVVRKMMTNSQ
GNEYKAALPNVFRKMMTNSQ

SEQ ID NO: 191649 - protein, 20 aa, Artificial Sequence
  Description of Artificial Sequence: Synthetic peptide
  Seed: GNEKKAKLANVVRKMMTNSQ
GNEYKAALPNVGRKMMTNSQ

SEQ ID NO: 191650 - protein, 20 aa, Artificial Sequence
  Description of Artificial Sequence: Synthetic peptide
  Seed: GNEKKAKLANVVRKMMTNSQ
GNEYKAALPNVHRKMMTNSQ

SEQ ID NO: 191651 - protein, 20 aa, Artificial Sequence
  Description of Artificial Sequence: Synthetic peptide
  Seed: GNEKKAKLANVVRKMMTNSQ
GNEYKAALPNVIRKMMTNSQ

SEQ ID NO: 191652 - protein, 20 aa, Artificial Sequence
  Description of Artificial Sequence: Synthetic peptide
  Seed: GNEKKAKLANVVRKMMTNSQ
GNEYKAALPNVLRKMMTNSQ

SEQ ID NO: 191653 - protein, 20 aa, Artificial Sequence
  Description of Artificial Sequence: Synthetic peptide
  Seed: GNEKKAKLANVVRKMMTNSQ
GNEYKAALPNVMRKMMTNSQ

SEQ ID NO: 191654 - protein, 20 aa, Artificial Sequence
  Description of Artificial Sequence: Synthetic peptide
  Seed: GNEKKAKLANVVRKMMTNSQ
GNEYKAALPNVNRKMMTNSQ

SEQ ID NO: 191655 - protein, 20 aa, Artificial Sequence
  Description of Artificial Sequence: Synthetic peptide
  Seed: GNEKKAKLANVVRKMMTNSQ
GNEYKAALPNVPRKMMTNSQ

SEQ ID NO: 191656 - protein, 20 aa, Artificial Sequence
  Description of Artificial Sequence: Synthetic peptide
  Seed: GNEKKAKLANVVRKMMTNSQ
GNEYKAALPNVQRKMMTNSQ

SEQ ID NO: 191657 - protein, 20 aa, Artificial Sequence
  Description of Artificial Sequence: Synthetic peptide
  Seed: GNEKKAKLANVVRKMMTNSQ
GNEYKAALPNVSRKMMTNSQ

SEQ ID NO: 191658 - protein, 20 aa, Artificial Sequence
  Description of Artificial Sequence: Synthetic peptide
  Seed: GNEKKAKLANVVRKMMTNSQ
GNEYKAALPNVTRKMMTNSQ

SEQ ID NO: 191659 - protein, 20 aa, Artificial Sequence
  Description of Artificial Sequence: Synthetic peptide
  Seed: GNEKKAKLANVVRKMMTNSQ
GNEYKAALPNVVRKMMTNSQ

SEQ ID NO: 191660 - protein, 20 aa, Artificial Sequence
  Description of Artificial Sequence: Synthetic peptide
  Seed: GNEKKAKLANVVRKMMTNSQ
GNEYKAALPNVWRKMMTNSQ

SEQ ID NO: 191661 - protein, 20 aa, Artificial Sequence
  Description of Artificial Sequence: Synthetic peptide
  Seed: GNEKKAKLANVVRKMMTNSQ
GNEYKAALPNVYRKMMTNSQ

SEQ ID NO: 191662 - protein, 20 aa, Artificial Sequence
  Description of Artificial Sequence: Synthetic peptide
  Seed: GNEKKAKLANVVRKMMTNSQ
GNEYKAALQNVARKMMTNSQ

SEQ ID NO: 191663 - protein, 20 aa, Artificial Sequence
  Description of Artificial Sequence: Synthetic peptide
  Seed: GNEKKAKLANVVRKMMTNSQ
GNEYKAALQNVIRKMMTNSQ

SEQ ID NO: 191664 - protein, 20 aa, Artificial Sequence
  Description of Artificial Sequence: Synthetic peptide
  Seed: GNEKKAKLANVVRKMMTNSQ
GNEYKAALQNVLRKMMTNSQ

SEQ ID NO: 191665 - protein, 20 aa, Artificial Sequence
  Description of Artificial Sequence: Synthetic peptide
  Seed: GNEKKAKLANVVRKMMTNSQ
GNEYKAALQNVNRKMMTNSQ

SEQ ID NO: 191666 - protein, 20 aa, Artificial Sequence
  Description of Artificial Sequence: Synthetic peptide
  Seed: GNEKKAKLANVVRKMMTNSQ
GNEYKAALQNVSRKMMTNSQ

SEQ ID NO: 191667 - protein, 20 aa, Artificial Sequence
  Description of Artificial Sequence: Synthetic peptide
  Seed: GNEKKAKLANVVRKMMTNSQ
GNEYKAALQNVVRKMMTNSQ

SEQ ID NO: 191668 - protein, 20 aa, Artificial Sequence
  Description of Artificial Sequence: Synthetic peptide
  Seed: GNEKKAKLANVVRKMMTNSQ
GNEYKAALSNVARKMMTNSQ

SEQ ID NO: 191669 - protein, 20 aa, Artificial Sequence
  Description of Artificial Sequence: Synthetic peptide
  Seed: GNEKKAKLANVVRKMMTNSQ
GNEYKAALSNVCRKMMTNSQ

SEQ ID NO: 191670 - protein, 20 aa, Artificial Sequence
  Description of Artificial Sequence: Synthetic peptide
  Seed: GNEKKAKLANVVRKMMTNSQ
GNEYKAALSNVDRKMMTNSQ

SEQ ID NO: 191671 - protein, 20 aa, Artificial Sequence
  Description of Artificial Sequence: Synthetic peptide
  Seed: GNEKKAKLANVVRKMMTNSQ
GNEYKAALSNVERKMMTNSQ

SEQ ID NO: 191672 - protein, 20 aa, Artificial Sequence
  Description of Artificial Sequence: Synthetic peptide
  Seed: GNEKKAKLANVVRKMMTNSQ
GNEYKAALSNVFRKMMTNSQ

SEQ ID NO: 191673 - protein, 20 aa, Artificial Sequence
  Description of Artificial Sequence: Synthetic peptide
  Seed: GNEKKAKLANVVRKMMTNSQ
GNEYKAALSNVGRKMMTNSQ

SEQ ID NO: 191674 - protein, 20 aa, Artificial Sequence
  Description of Artificial Sequence: Synthetic peptide
  Seed: GNEKKAKLANVVRKMMTNSQ
GNEYKAALSNVHRKMMTNSQ

SEQ ID NO: 191675 - protein, 20 aa, Artificial Sequence
  Description of Artificial Sequence: Synthetic peptide
  Seed: GNEKKAKLANVVRKMMTNSQ
GNEYKAALSNVIRKMMTNSQ

SEQ ID NO: 191676 - protein, 20 aa, Artificial Sequence
  Description of Artificial Sequence: Synthetic peptide
  Seed: GNEKKAKLANVVRKMMTNSQ
GNEYKAALSNVLRKMMTNSQ

SEQ ID NO: 191677 - protein, 20 aa, Artificial Sequence
  Description of Artificial Sequence: Synthetic peptide
  Seed: GNEKKAKLANVVRKMMTNSQ
GNEYKAALSNVMRKMMTNSQ

SEQ ID NO: 191678 - protein, 20 aa, Artificial Sequence
  Description of Artificial Sequence: Synthetic peptide
  Seed: GNEKKAKLANVVRKMMTNSQ
GNEYKAALSNVNRKMMTNSQ

SEQ ID NO: 191679 - protein, 20 aa, Artificial Sequence
  Description of Artificial Sequence: Synthetic peptide
  Seed: GNEKKAKLANVVRKMMTNSQ
GNEYKAALSNVPRKMMTNSQ

SEQ ID NO: 191680 - protein, 20 aa, Artificial Sequence
  Description of Artificial Sequence: Synthetic peptide
  Seed: GNEKKAKLANVVRKMMTNSQ
GNEYKAALSNVQRKMMTNSQ

SEQ ID NO: 191681 - protein, 20 aa, Artificial Sequence
  Description of Artificial Sequence: Synthetic peptide
  Seed: GNEKKAKLANVVRKMMTNSQ
GNEYKAALSNVSRKMMTNSQ

SEQ ID NO: 191682 - protein, 20 aa, Artificial Sequence
  Description of Artificial Sequence: Synthetic peptide
  Seed: GNEKKAKLANVVRKMMTNSQ
GNEYKAALSNVTRKMMTNSQ

SEQ ID NO: 191683 - protein, 20 aa, Artificial Sequence
  Description of Artificial Sequence: Synthetic peptide
  Seed: GNEKKAKLANVVRKMMTNSQ
GNEYKAALSNVVRKMMTNSQ

SEQ ID NO: 191684 - protein, 20 aa, Artificial Sequence
  Description of Artificial Sequence: Synthetic peptide
  Seed: GNEKKAKLANVVRKMMTNSQ
GNEYKAALSNVYRKMMTNSQ

SEQ ID NO: 191685 - protein, 20 aa, Artificial Sequence
  Description of Artificial Sequence: Synthetic peptide
  Seed: GNEKKAKLANVVRKMMTNSQ
GNEYKAALTNVARKMMTNSQ

SEQ ID NO: 191686 - protein, 20 aa, Artificial Sequence
  Description of Artificial Sequence: Synthetic peptide
  Seed: GNEKKAKLANVVRKMMTNSQ
GNEYKAALTNVCRKMMTNSQ

SEQ ID NO: 191687 - protein, 20 aa, Artificial Sequence
  Description of Artificial Sequence: Synthetic peptide
  Seed: GNEKKAKLANVVRKMMTNSQ
GNEYKAALTNVDRKMMTNSQ

SEQ ID NO: 191688 - protein, 20 aa, Artificial Sequence
  Description of Artificial Sequence: Synthetic peptide
  Seed: GNEKKAKLANVVRKMMTNSQ
GNEYKAALTNVERKMMTNSQ

SEQ ID NO: 191689 - protein, 20 aa, Artificial Sequence
  Description of Artificial Sequence: Synthetic peptide
  Seed: GNEKKAKLANVVRKMMTNSQ
GNEYKAALTNVFRKMMTNSQ

SEQ ID NO: 191690 - protein, 20 aa, Artificial Sequence
  Description of Artificial Sequence: Synthetic peptide
  Seed: GNEKKAKLANVVRKMMTNSQ
GNEYKAALTNVGRKMMTNSQ

SEQ ID NO: 191691 - protein, 20 aa, Artificial Sequence
  Description of Artificial Sequence: Synthetic peptide
  Seed: GNEKKAKLANVVRKMMTNSQ
GNEYKAALTNVHRKMMTNSQ

SEQ ID NO: 191692 - protein, 20 aa, Artificial Sequence
  Description of Artificial Sequence: Synthetic peptide
  Seed: GNEKKAKLANVVRKMMTNSQ
GNEYKAALTNVIRKMMTNSQ

SEQ ID NO: 191693 - protein, 20 aa, Artificial Sequence
  Description of Artificial Sequence: Synthetic peptide
  Seed: GNEKKAKLANVVRKMMTNSQ
GNEYKAALTNVLRKMMTNSQ

SEQ ID NO: 191694 - protein, 20 aa, Artificial Sequence
  Description of Artificial Sequence: Synthetic peptide
  Seed: GNEKKAKLANVVRKMMTNSQ
GNEYKAALTNVMRKMMTNSQ

SEQ ID NO: 191695 - protein, 20 aa, Artificial Sequence
  Description of Artificial Sequence: Synthetic peptide
  Seed: GNEKKAKLANVVRKMMTNSQ
GNEYKAALTNVNRKMMTNSQ

SEQ ID NO: 191696 - protein, 20 aa, Artificial Sequence
  Description of Artificial Sequence: Synthetic peptide
  Seed: GNEKKAKLANVVRKMMTNSQ
GNEYKAALTNVPRKMMTNSQ

SEQ ID NO: 191697 - protein, 20 aa, Artificial Sequence
  Description of Artificial Sequence: Synthetic peptide
  Seed: GNEKKAKLANVVRKMMTNSQ
GNEYKAALTNVQRKMMTNSQ

SEQ ID NO: 191698 - protein, 20 aa, Artificial Sequence
  Description of Artificial Sequence: Synthetic peptide
  Seed: GNEKKAKLANVVRKMMTNSQ
GNEYKAALTNVSRKMMTNSQ

SEQ ID NO: 191699 - protein, 20 aa, Artificial Sequence
  Description of Artificial Sequence: Synthetic peptide
  Seed: GNEKKAKLANVVRKMMTNSQ
GNEYKAALTNVTRKMMTNSQ

SEQ ID NO: 191700 - protein, 20 aa, Artificial Sequence
  Description of Artificial Sequence: Synthetic peptide
  Seed: GNEKKAKLANVVRKMMTNSQ
GNEYKAALTNVVRKMMTNSQ

SEQ ID NO: 191701 - protein, 20 aa, Artificial Sequence
  Description of Artificial Sequence: Synthetic peptide
  Seed: GNEKKAKLANVVRKMMTNSQ
GNEYKAALTNVYRKMMTNSQ

SEQ ID NO: 191702 - protein, 20 aa, Artificial Sequence
  Description of Artificial Sequence: Synthetic peptide
  Seed: GNEKKAKLANVVRKMMTNSQ
GNEYKAALVNVARKMMTNSQ

SEQ ID NO: 191703 - protein, 20 aa, Artificial Sequence
  Description of Artificial Sequence: Synthetic peptide
  Seed: GNEKKAKLANVVRKMMTNSQ
GNEYKAALVNVCRKMMTNSQ

SEQ ID NO: 191704 - protein, 20 aa, Artificial Sequence
  Description of Artificial Sequence: Synthetic peptide
  Seed: GNEKKAKLANVVRKMMTNSQ
GNEYKAALVNVDRKMMTNSQ

SEQ ID NO: 191705 - protein, 20 aa, Artificial Sequence
  Description of Artificial Sequence: Synthetic peptide
  Seed: GNEKKAKLANVVRKMMTNSQ
GNEYKAALVNVERKMMTNSQ

SEQ ID NO: 191706 - protein, 20 aa, Artificial Sequence
  Description of Artificial Sequence: Synthetic peptide
  Seed: GNEKKAKLANVVRKMMTNSQ
GNEYKAALVNVFRKMMTNSQ

SEQ ID NO: 191707 - protein, 20 aa, Artificial Sequence
  Description of Artificial Sequence: Synthetic peptide
  Seed: GNEKKAKLANVVRKMMTNSQ
GNEYKAALVNVGRKMMTNSQ

SEQ ID NO: 191708 - protein, 20 aa, Artificial Sequence
  Description of Artificial Sequence: Synthetic peptide
  Seed: GNEKKAKLANVVRKMMTNSQ
GNEYKAALVNVHRKMMTNSQ

SEQ ID NO: 191709 - protein, 20 aa, Artificial Sequence
  Description of Artificial Sequence: Synthetic peptide
  Seed: GNEKKAKLANVVRKMMTNSQ
GNEYKAALVNVIRKMMTNSQ

SEQ ID NO: 191710 - protein, 20 aa, Artificial Sequence
  Description of Artificial Sequence: Synthetic peptide
  Seed: GNEKKAKLANVVRKMMTNSQ
GNEYKAALVNVKRKMMTNSQ

SEQ ID NO: 191711 - protein, 20 aa, Artificial Sequence
  Description of Artificial Sequence: Synthetic peptide
  Seed: GNEKKAKLANVVRKMMTNSQ
GNEYKAALVNVLRKMMTNSQ

SEQ ID NO: 191712 - protein, 20 aa, Artificial Sequence
  Description of Artificial Sequence: Synthetic peptide
  Seed: GNEKKAKLANVVRKMMTNSQ
GNEYKAALVNVMRKMMTNSQ

SEQ ID NO: 191713 - protein, 20 aa, Artificial Sequence
  Description of Artificial Sequence: Synthetic peptide
  Seed: GNEKKAKLANVVRKMMTNSQ
GNEYKAALVNVNRKMMTNSQ

SEQ ID NO: 191714 - protein, 20 aa, Artificial Sequence
  Description of Artificial Sequence: Synthetic peptide
  Seed: GNEKKAKLANVVRKMMTNSQ
GNEYKAALVNVPRKMMTNSQ

SEQ ID NO: 191715 - protein, 20 aa, Artificial Sequence
  Description of Artificial Sequence: Synthetic peptide
  Seed: GNEKKAKLANVVRKMMTNSQ
GNEYKAALVNVQRKMMTNSQ

SEQ ID NO: 191716 - protein, 20 aa, Artificial Sequence
  Description of Artificial Sequence: Synthetic peptide
  Seed: GNEKKAKLANVVRKMMTNSQ
GNEYKAALVNVSRKMMTNSQ

SEQ ID NO: 191717 - protein, 20 aa, Artificial Sequence
  Description of Artificial Sequence: Synthetic peptide
  Seed: GNEKKAKLANVVRKMMTNSQ
GNEYKAALVNVTRKMMTNSQ

SEQ ID NO: 191718 - protein, 20 aa, Artificial Sequence
  Description of Artificial Sequence: Synthetic peptide
  Seed: GNEKKAKLANVVRKMMTNSQ
GNEYKAALVNVVRKMMTNSQ

SEQ ID NO: 191719 - protein, 20 aa, Artificial Sequence
  Description of Artificial Sequence: Synthetic peptide
  Seed: GNEKKAKLANVVRKMMTNSQ
GNEYKAALVNVYRKMMTNSQ

SEQ ID NO: 191720 - protein, 20 aa, Artificial Sequence
  Description of Artificial Sequence: Synthetic peptide
  Seed: GNEKKAKLANVVRKMMTNSQ
GNEYKAALWNVFRKMMTNSQ

SEQ ID NO: 191721 - protein, 20 aa, Artificial Sequence
  Description of Artificial Sequence: Synthetic peptide
  Seed: GNEKKAKLANVVRKMMTNSQ
GNEYKAALWNVIRKMMTNSQ

SEQ ID NO: 191722 - protein, 20 aa, Artificial Sequence
  Description of Artificial Sequence: Synthetic peptide
  Seed: GNEKKAKLANVVRKMMTNSQ
GNEYKAALWNVLRKMMTNSQ

SEQ ID NO: 191723 - protein, 20 aa, Artificial Sequence
  Description of Artificial Sequence: Synthetic peptide
  Seed: GNEKKAKLANVVRKMMTNSQ
GNEYKAALWNVVRKMMTNSQ

SEQ ID NO: 191724 - protein, 20 aa, Artificial Sequence
  Description of Artificial Sequence: Synthetic peptide
  Seed: GNEKKAKLANVVRKMMTNSQ
GNEYKAALYNVFRKMMTNSQ

SEQ ID NO: 191725 - protein, 20 aa, Artificial Sequence
  Description of Artificial Sequence: Synthetic peptide
  Seed: GNEKKAKLANVVRKMMTNSQ
GNEYKAALYNVIRKMMTNSQ

SEQ ID NO: 191726 - protein, 20 aa, Artificial Sequence
  Description of Artificial Sequence: Synthetic peptide
  Seed: GNEKKAKLANVVRKMMTNSQ
GNEYKAALYNVLRKMMTNSQ

SEQ ID NO: 191727 - protein, 20 aa, Artificial Sequence
  Description of Artificial Sequence: Synthetic peptide
  Seed: GNEKKAKLANVVRKMMTNSQ
GNEYKAALYNVMRKMMTNSQ

SEQ ID NO: 191728 - protein, 20 aa, Artificial Sequence
  Description of Artificial Sequence: Synthetic peptide
  Seed: GNEKKAKLANVVRKMMTNSQ
GNEYKAALYNVVRKMMTNSQ

SEQ ID NO: 191729 - protein, 20 aa, Artificial Sequence
  Description of Artificial Sequence: Synthetic peptide
  Seed: GNEKKAKLANVVRKMMTNSQ
GNEYKACLANVARKMMTNSQ

SEQ ID NO: 191730 - protein, 20 aa, Artificial Sequence
  Description of Artificial Sequence: Synthetic peptide
  Seed: GNEKKAKLANVVRKMMTNSQ
GNEYKACLANVIRKMMTNSQ

SEQ ID NO: 191731 - protein, 20 aa, Artificial Sequence
  Description of Artificial Sequence: Synthetic peptide
  Seed: GNEKKAKLANVVRKMMTNSQ
GNEYKACLANVLRKMMTNSQ

SEQ ID NO: 191732 - protein, 20 aa, Artificial Sequence
  Description of Artificial Sequence: Synthetic peptide
  Seed: GNEKKAKLANVVRKMMTNSQ
GNEYKACLANVMRKMMTNSQ

SEQ ID NO: 191733 - protein, 20 aa, Artificial Sequence
  Description of Artificial Sequence: Synthetic peptide
  Seed: GNEKKAKLANVVRKMMTNSQ
GNEYKACLANVSRKMMTNSQ

SEQ ID NO: 191734 - protein, 20 aa, Artificial Sequence
  Description of Artificial Sequence: Synthetic peptide
  Seed: GNEKKAKLANVVRKMMTNSQ
GNEYKACLANVTRKMMTNSQ

SEQ ID NO: 191735 - protein, 20 aa, Artificial Sequence
  Description of Artificial Sequence: Synthetic peptide
  Seed: GNEKKAKLANVVRKMMTNSQ
GNEYKACLANVVRKMMTNSQ

SEQ ID NO: 191736 - protein, 20 aa, Artificial Sequence
  Description of Artificial Sequence: Synthetic peptide
  Seed: GNEKKAKLANVVRKMMTNSQ
GNEYKACLFNVFRKMMTNSQ

SEQ ID NO: 191737 - protein, 20 aa, Artificial Sequence
  Description of Artificial Sequence: Synthetic peptide
  Seed: GNEKKAKLANVVRKMMTNSQ
GNEYKACLFNVIRKMMTNSQ

SEQ ID NO: 191738 - protein, 20 aa, Artificial Sequence
  Description of Artificial Sequence: Synthetic peptide
  Seed: GNEKKAKLANVVRKMMTNSQ
GNEYKACLFNVLRKMMTNSQ

SEQ ID NO: 191739 - protein, 20 aa, Artificial Sequence
  Description of Artificial Sequence: Synthetic peptide
  Seed: GNEKKAKLANVVRKMMTNSQ
GNEYKACLFNVVRKMMTNSQ

SEQ ID NO: 191740 - protein, 20 aa, Artificial Sequence
  Description of Artificial Sequence: Synthetic peptide
  Seed: GNEKKAKLANVVRKMMTNSQ
GNEYKACLGNVARKMMTNSQ

SEQ ID NO: 191741 - protein, 20 aa, Artificial Sequence
  Description of Artificial Sequence: Synthetic peptide
  Seed: GNEKKAKLANVVRKMMTNSQ
GNEYKACLGNVIRKMMTNSQ

SEQ ID NO: 191742 - protein, 20 aa, Artificial Sequence
  Description of Artificial Sequence: Synthetic peptide
  Seed: GNEKKAKLANVVRKMMTNSQ
GNEYKACLGNVLRKMMTNSQ

SEQ ID NO: 191743 - protein, 20 aa, Artificial Sequence
  Description of Artificial Sequence: Synthetic peptide
  Seed: GNEKKAKLANVVRKMMTNSQ
GNEYKACLGNVVRKMMTNSQ

SEQ ID NO: 191744 - protein, 20 aa, Artificial Sequence
  Description of Artificial Sequence: Synthetic peptide
  Seed: GNEKKAKLANVVRKMMTNSQ
GNEYKACLPNVIRKMMTNSQ

SEQ ID NO: 191745 - protein, 20 aa, Artificial Sequence
  Description of Artificial Sequence: Synthetic peptide
  Seed: GNEKKAKLANVVRKMMTNSQ
GNEYKACLPNVLRKMMTNSQ

SEQ ID NO: 191746 - protein, 20 aa, Artificial Sequence
  Description of Artificial Sequence: Synthetic peptide
  Seed: GNEKKAKLANVVRKMMTNSQ
GNEYKACLPNVVRKMMTNSQ

SEQ ID NO: 191747 - protein, 20 aa, Artificial Sequence
  Description of Artificial Sequence: Synthetic peptide
  Seed: GNEKKAKLANVVRKMMTNSQ
GNEYKACLSNVARKMMTNSQ

SEQ ID NO: 191748 - protein, 20 aa, Artificial Sequence
  Description of Artificial Sequence: Synthetic peptide
  Seed: GNEKKAKLANVVRKMMTNSQ
GNEYKACLSNVIRKMMTNSQ

SEQ ID NO: 191749 - protein, 20 aa, Artificial Sequence
  Description of Artificial Sequence: Synthetic peptide
  Seed: GNEKKAKLANVVRKMMTNSQ
GNEYKACLSNVLRKMMTNSQ

SEQ ID NO: 191750 - protein, 20 aa, Artificial Sequence
  Description of Artificial Sequence: Synthetic peptide
  Seed: GNEKKAKLANVVRKMMTNSQ
GNEYKACLSNVVRKMMTNSQ

SEQ ID NO: 191751 - protein, 20 aa, Artificial Sequence
  Description of Artificial Sequence: Synthetic peptide
  Seed: GNEKKAKLANVVRKMMTNSQ
GNEYKACLYNVFRKMMTNSQ

SEQ ID NO: 191752 - protein, 20 aa, Artificial Sequence
  Description of Artificial Sequence: Synthetic peptide
  Seed: GNEKKAKLANVVRKMMTNSQ
GNEYKADLANVARKMMTNSQ

SEQ ID NO: 191753 - protein, 20 aa, Artificial Sequence
  Description of Artificial Sequence: Synthetic peptide
  Seed: GNEKKAKLANVVRKMMTNSQ
GNEYKADLANVIRKMMTNSQ

SEQ ID NO: 191754 - protein, 20 aa, Artificial Sequence
  Description of Artificial Sequence: Synthetic peptide
  Seed: GNEKKAKLANVVRKMMTNSQ
GNEYKADLANVLRKMMTNSQ

SEQ ID NO: 191755 - protein, 20 aa, Artificial Sequence
  Description of Artificial Sequence: Synthetic peptide
  Seed: GNEKKAKLANVVRKMMTNSQ
GNEYKADLANVVRKMMTNSQ

SEQ ID NO: 191756 - protein, 20 aa, Artificial Sequence
  Description of Artificial Sequence: Synthetic peptide
  Seed: GNEKKAKLANVVRKMMTNSQ
GNEYKADLFNVFRKMMTNSQ

SEQ ID NO: 191757 - protein, 20 aa, Artificial Sequence
  Description of Artificial Sequence: Synthetic peptide
  Seed: GNEKKAKLANVVRKMMTNSQ
GNEYKADLFNVIRKMMTNSQ

SEQ ID NO: 191758 - protein, 20 aa, Artificial Sequence
  Description of Artificial Sequence: Synthetic peptide
  Seed: GNEKKAKLANVVRKMMTNSQ
GNEYKADLFNVLRKMMTNSQ

SEQ ID NO: 191759 - protein, 20 aa, Artificial Sequence
  Description of Artificial Sequence: Synthetic peptide
  Seed: GNEKKAKLANVVRKMMTNSQ
GNEYKADLFNVVRKMMTNSQ

SEQ ID NO: 191760 - protein, 20 aa, Artificial Sequence
  Description of Artificial Sequence: Synthetic peptide
  Seed: GNEKKAKLANVVRKMMTNSQ
GNEYKAELANVARKMMTNSQ

SEQ ID NO: 191761 - protein, 20 aa, Artificial Sequence
  Description of Artificial Sequence: Synthetic peptide
  Seed: GNEKKAKLANVVRKMMTNSQ
GNEYKAELANVFRKMMTNSQ

SEQ ID NO: 191762 - protein, 20 aa, Artificial Sequence
  Description of Artificial Sequence: Synthetic peptide
  Seed: GNEKKAKLANVVRKMMTNSQ
GNEYKAELANVGRKMMTNSQ

SEQ ID NO: 191763 - protein, 20 aa, Artificial Sequence
  Description of Artificial Sequence: Synthetic peptide
  Seed: GNEKKAKLANVVRKMMTNSQ
GNEYKAELANVHRKMMTNSQ

SEQ ID NO: 191764 - protein, 20 aa, Artificial Sequence
  Description of Artificial Sequence: Synthetic peptide
  Seed: GNEKKAKLANVVRKMMTNSQ
GNEYKAELANVIRKMMTNSQ

SEQ ID NO: 191765 - protein, 20 aa, Artificial Sequence
  Description of Artificial Sequence: Synthetic peptide
  Seed: GNEKKAKLANVVRKMMTNSQ
GNEYKAELANVLRKMMTNSQ

SEQ ID NO: 191766 - protein, 20 aa, Artificial Sequence
  Description of Artificial Sequence: Synthetic peptide
  Seed: GNEKKAKLANVVRKMMTNSQ
GNEYKAELANVMRKMMTNSQ

SEQ ID NO: 191767 - protein, 20 aa, Artificial Sequence
  Description of Artificial Sequence: Synthetic peptide
  Seed: GNEKKAKLANVVRKMMTNSQ
GNEYKAELANVNRKMMTNSQ

SEQ ID NO: 191768 - protein, 20 aa, Artificial Sequence
  Description of Artificial Sequence: Synthetic peptide
  Seed: GNEKKAKLANVVRKMMTNSQ
GNEYKAELANVQRKMMTNSQ

SEQ ID NO: 191769 - protein, 20 aa, Artificial Sequence
  Description of Artificial Sequence: Synthetic peptide
  Seed: GNEKKAKLANVVRKMMTNSQ
GNEYKAELANVSRKMMTNSQ

SEQ ID NO: 191770 - protein, 20 aa, Artificial Sequence
  Description of Artificial Sequence: Synthetic peptide
  Seed: GNEKKAKLANVVRKMMTNSQ
GNEYKAELANVTRKMMTNSQ

SEQ ID NO: 191771 - protein, 20 aa, Artificial Sequence
  Description of Artificial Sequence: Synthetic peptide
  Seed: GNEKKAKLANVVRKMMTNSQ
GNEYKAELANVVRKMMTNSQ

SEQ ID NO: 191772 - protein, 20 aa, Artificial Sequence
  Description of Artificial Sequence: Synthetic peptide
  Seed: GNEKKAKLANVVRKMMTNSQ
GNEYKAELFNVARKMMTNSQ

SEQ ID NO: 191773 - protein, 20 aa, Artificial Sequence
  Description of Artificial Sequence: Synthetic peptide
  Seed: GNEKKAKLANVVRKMMTNSQ
GNEYKAELFNVFRKMMTNSQ

SEQ ID NO: 191774 - protein, 20 aa, Artificial Sequence
  Description of Artificial Sequence: Synthetic peptide
  Seed: GNEKKAKLANVVRKMMTNSQ
GNEYKAELFNVIRKMMTNSQ

SEQ ID NO: 191775 - protein, 20 aa, Artificial Sequence
  Description of Artificial Sequence: Synthetic peptide
  Seed: GNEKKAKLANVVRKMMTNSQ
GNEYKAELFNVLRKMMTNSQ

SEQ ID NO: 191776 - protein, 20 aa, Artificial Sequence
  Description of Artificial Sequence: Synthetic peptide
  Seed: GNEKKAKLANVVRKMMTNSQ
GNEYKAELFNVMRKMMTNSQ

SEQ ID NO: 191777 - protein, 20 aa, Artificial Sequence
  Description of Artificial Sequence: Synthetic peptide
  Seed: GNEKKAKLANVVRKMMTNSQ
GNEYKAELFNVNRKMMTNSQ

SEQ ID NO: 191778 - protein, 20 aa, Artificial Sequence
  Description of Artificial Sequence: Synthetic peptide
  Seed: GNEKKAKLANVVRKMMTNSQ
GNEYKAELFNVSRKMMTNSQ

SEQ ID NO: 191779 - protein, 20 aa, Artificial Sequence
  Description of Artificial Sequence: Synthetic peptide
  Seed: GNEKKAKLANVVRKMMTNSQ
GNEYKAELFNVTRKMMTNSQ

SEQ ID NO: 191780 - protein, 20 aa, Artificial Sequence
  Description of Artificial Sequence: Synthetic peptide
  Seed: GNEKKAKLANVVRKMMTNSQ
GNEYKAELFNVVRKMMTNSQ

SEQ ID NO: 191781 - protein, 20 aa, Artificial Sequence
  Description of Artificial Sequence: Synthetic peptide
  Seed: GNEKKAKLANVVRKMMTNSQ
GNEYKAELFNVYRKMMTNSQ

SEQ ID NO: 191782 - protein, 20 aa, Artificial Sequence
  Description of Artificial Sequence: Synthetic peptide
  Seed: GNEKKAKLANVVRKMMTNSQ
GNEYKAELGNVARKMMTNSQ

SEQ ID NO: 191783 - protein, 20 aa, Artificial Sequence
  Description of Artificial Sequence: Synthetic peptide
  Seed: GNEKKAKLANVVRKMMTNSQ
GNEYKAELGNVGRKMMTNSQ

SEQ ID NO: 191784 - protein, 20 aa, Artificial Sequence
  Description of Artificial Sequence: Synthetic peptide
  Seed: GNEKKAKLANVVRKMMTNSQ
GNEYKAELGNVIRKMMTNSQ

SEQ ID NO: 191785 - protein, 20 aa, Artificial Sequence
  Description of Artificial Sequence: Synthetic peptide
  Seed: GNEKKAKLANVVRKMMTNSQ
GNEYKAELGNVLRKMMTNSQ

SEQ ID NO: 191786 - protein, 20 aa, Artificial Sequence
  Description of Artificial Sequence: Synthetic peptide
  Seed: GNEKKAKLANVVRKMMTNSQ
GNEYKAELGNVMRKMMTNSQ

SEQ ID NO: 191787 - protein, 20 aa, Artificial Sequence
  Description of Artificial Sequence: Synthetic peptide
  Seed: GNEKKAKLANVVRKMMTNSQ
GNEYKAELGNVSRKMMTNSQ

SEQ ID NO: 191788 - protein, 20 aa, Artificial Sequence
  Description of Artificial Sequence: Synthetic peptide
  Seed: GNEKKAKLANVVRKMMTNSQ
GNEYKAELGNVTRKMMTNSQ

SEQ ID NO: 191789 - protein, 20 aa, Artificial Sequence
  Description of Artificial Sequence: Synthetic peptide
  Seed: GNEKKAKLANVVRKMMTNSQ
GNEYKAELGNVVRKMMTNSQ

SEQ ID NO: 191790 - protein, 20 aa, Artificial Sequence
  Description of Artificial Sequence: Synthetic peptide
  Seed: GNEKKAKLANVVRKMMTNSQ
GNEYKAELINVARKMMTNSQ

SEQ ID NO: 191791 - protein, 20 aa, Artificial Sequence
  Description of Artificial Sequence: Synthetic peptide
  Seed: GNEKKAKLANVVRKMMTNSQ
GNEYKAELINVIRKMMTNSQ

SEQ ID NO: 191792 - protein, 20 aa, Artificial Sequence
  Description of Artificial Sequence: Synthetic peptide
  Seed: GNEKKAKLANVVRKMMTNSQ
GNEYKAELINVNRKMMTNSQ

SEQ ID NO: 191793 - protein, 20 aa, Artificial Sequence
  Description of Artificial Sequence: Synthetic peptide
  Seed: GNEKKAKLANVVRKMMTNSQ
GNEYKAELINVSRKMMTNSQ

SEQ ID NO: 191794 - protein, 20 aa, Artificial Sequence
  Description of Artificial Sequence: Synthetic peptide
  Seed: GNEKKAKLANVVRKMMTNSQ
GNEYKAELINVTRKMMTNSQ

SEQ ID NO: 191795 - protein, 20 aa, Artificial Sequence
  Description of Artificial Sequence: Synthetic peptide
  Seed: GNEKKAKLANVVRKMMTNSQ
GNEYKAELINVVRKMMTNSQ

SEQ ID NO: 191796 - protein, 20 aa, Artificial Sequence
  Description of Artificial Sequence: Synthetic peptide
  Seed: GNEKKAKLANVVRKMMTNSQ
GNEYKAELLNVIRKMMTNSQ

SEQ ID NO: 191797 - protein, 20 aa, Artificial Sequence
  Description of Artificial Sequence: Synthetic peptide
  Seed: GNEKKAKLANVVRKMMTNSQ
GNEYKAELLNVLRKMMTNSQ

SEQ ID NO: 191798 - protein, 20 aa, Artificial Sequence
  Description of Artificial Sequence: Synthetic peptide
  Seed: GNEKKAKLANVVRKMMTNSQ
GNEYKAELLNVVRKMMTNSQ

SEQ ID NO: 191799 - protein, 20 aa, Artificial Sequence
  Description of Artificial Sequence: Synthetic peptide
  Seed: GNEKKAKLANVVRKMMTNSQ
GNEYKAELNNVARKMMTNSQ

SEQ ID NO: 191800 - protein, 20 aa, Artificial Sequence
  Description of Artificial Sequence: Synthetic peptide
  Seed: GNEKKAKLANVVRKMMTNSQ
GNEYKAELNNVIRKMMTNSQ

SEQ ID NO: 191801 - protein, 20 aa, Artificial Sequence
  Description of Artificial Sequence: Synthetic peptide
  Seed: GNEKKAKLANVVRKMMTNSQ
GNEYKAELNNVLRKMMTNSQ

SEQ ID NO: 191802 - protein, 20 aa, Artificial Sequence
  Description of Artificial Sequence: Synthetic peptide
  Seed: GNEKKAKLANVVRKMMTNSQ
GNEYKAELNNVVRKMMTNSQ

SEQ ID NO: 191803 - protein, 20 aa, Artificial Sequence
  Description of Artificial Sequence: Synthetic peptide
  Seed: GNEKKAKLANVVRKMMTNSQ
GNEYKAELPNVARKMMTNSQ

SEQ ID NO: 191804 - protein, 20 aa, Artificial Sequence
  Description of Artificial Sequence: Synthetic peptide
  Seed: GNEKKAKLANVVRKMMTNSQ
GNEYKAELPNVIRKMMTNSQ

SEQ ID NO: 191805 - protein, 20 aa, Artificial Sequence
  Description of Artificial Sequence: Synthetic peptide
  Seed: GNEKKAKLANVVRKMMTNSQ
GNEYKAELPNVLRKMMTNSQ

SEQ ID NO: 191806 - protein, 20 aa, Artificial Sequence
  Description of Artificial Sequence: Synthetic peptide
  Seed: GNEKKAKLANVVRKMMTNSQ
GNEYKAELPNVMRKMMTNSQ

SEQ ID NO: 191807 - protein, 20 aa, Artificial Sequence
  Description of Artificial Sequence: Synthetic peptide
  Seed: GNEKKAKLANVVRKMMTNSQ
GNEYKAELPNVNRKMMTNSQ

SEQ ID NO: 191808 - protein, 20 aa, Artificial Sequence
  Description of Artificial Sequence: Synthetic peptide
  Seed: GNEKKAKLANVVRKMMTNSQ
GNEYKAELPNVSRKMMTNSQ

SEQ ID NO: 191809 - protein, 20 aa, Artificial Sequence
  Description of Artificial Sequence: Synthetic peptide
  Seed: GNEKKAKLANVVRKMMTNSQ
GNEYKAELPNVTRKMMTNSQ

SEQ ID NO: 191810 - protein, 20 aa, Artificial Sequence
  Description of Artificial Sequence: Synthetic peptide
  Seed: GNEKKAKLANVVRKMMTNSQ
GNEYKAELPNVVRKMMTNSQ

SEQ ID NO: 191811 - protein, 20 aa, Artificial Sequence
  Description of Artificial Sequence: Synthetic peptide
  Seed: GNEKKAKLANVVRKMMTNSQ
GNEYKAELSNVARKMMTNSQ

SEQ ID NO: 191812 - protein, 20 aa, Artificial Sequence
  Description of Artificial Sequence: Synthetic peptide
  Seed: GNEKKAKLANVVRKMMTNSQ
GNEYKAELSNVIRKMMTNSQ

SEQ ID NO: 191813 - protein, 20 aa, Artificial Sequence
  Description of Artificial Sequence: Synthetic peptide
  Seed: GNEKKAKLANVVRKMMTNSQ
GNEYKAELSNVLRKMMTNSQ

SEQ ID NO: 191814 - protein, 20 aa, Artificial Sequence
  Description of Artificial Sequence: Synthetic peptide
  Seed: GNEKKAKLANVVRKMMTNSQ
GNEYKAELSNVMRKMMTNSQ

SEQ ID NO: 191815 - protein, 20 aa, Artificial Sequence
  Description of Artificial Sequence: Synthetic peptide
  Seed: GNEKKAKLANVVRKMMTNSQ
GNEYKAELSNVNRKMMTNSQ

SEQ ID NO: 191816 - protein, 20 aa, Artificial Sequence
  Description of Artificial Sequence: Synthetic peptide
  Seed: GNEKKAKLANVVRKMMTNSQ
GNEYKAELSNVSRKMMTNSQ

SEQ ID NO: 191817 - protein, 20 aa, Artificial Sequence
  Description of Artificial Sequence: Synthetic peptide
  Seed: GNEKKAKLANVVRKMMTNSQ
GNEYKAELSNVTRKMMTNSQ

SEQ ID NO: 191818 - protein, 20 aa, Artificial Sequence
  Description of Artificial Sequence: Synthetic peptide
  Seed: GNEKKAKLANVVRKMMTNSQ
GNEYKAELSNVVRKMMTNSQ

SEQ ID NO: 191819 - protein, 20 aa, Artificial Sequence
  Description of Artificial Sequence: Synthetic peptide
  Seed: GNEKKAKLANVVRKMMTNSQ
GNEYKAELTNVARKMMTNSQ

SEQ ID NO: 191820 - protein, 20 aa, Artificial Sequence
  Description of Artificial Sequence: Synthetic peptide
  Seed: GNEKKAKLANVVRKMMTNSQ
GNEYKAELTNVIRKMMTNSQ

SEQ ID NO: 191821 - protein, 20 aa, Artificial Sequence
  Description of Artificial Sequence: Synthetic peptide
  Seed: GNEKKAKLANVVRKMMTNSQ
GNEYKAELTNVLRKMMTNSQ

SEQ ID NO: 191822 - protein, 20 aa, Artificial Sequence
  Description of Artificial Sequence: Synthetic peptide
  Seed: GNEKKAKLANVVRKMMTNSQ
GNEYKAELTNVMRKMMTNSQ

SEQ ID NO: 191823 - protein, 20 aa, Artificial Sequence
  Description of Artificial Sequence: Synthetic peptide
  Seed: GNEKKAKLANVVRKMMTNSQ
GNEYKAELTNVNRKMMTNSQ

SEQ ID NO: 191824 - protein, 20 aa, Artificial Sequence
  Description of Artificial Sequence: Synthetic peptide
  Seed: GNEKKAKLANVVRKMMTNSQ
GNEYKAELTNVSRKMMTNSQ

SEQ ID NO: 191825 - protein, 20 aa, Artificial Sequence
  Description of Artificial Sequence: Synthetic peptide
  Seed: GNEKKAKLANVVRKMMTNSQ
GNEYKAELTNVTRKMMTNSQ

SEQ ID NO: 191826 - protein, 20 aa, Artificial Sequence
  Description of Artificial Sequence: Synthetic peptide
  Seed: GNEKKAKLANVVRKMMTNSQ
GNEYKAELTNVVRKMMTNSQ

SEQ ID NO: 191827 - protein, 20 aa, Artificial Sequence
  Description of Artificial Sequence: Synthetic peptide
  Seed: GNEKKAKLANVVRKMMTNSQ
GNEYKAELVNVARKMMTNSQ

SEQ ID NO: 191828 - protein, 20 aa, Artificial Sequence
  Description of Artificial Sequence: Synthetic peptide
  Seed: GNEKKAKLANVVRKMMTNSQ
GNEYKAELVNVGRKMMTNSQ

SEQ ID NO: 191829 - protein, 20 aa, Artificial Sequence
  Description of Artificial Sequence: Synthetic peptide
  Seed: GNEKKAKLANVVRKMMTNSQ
GNEYKAELVNVIRKMMTNSQ

SEQ ID NO: 191830 - protein, 20 aa, Artificial Sequence
  Description of Artificial Sequence: Synthetic peptide
  Seed: GNEKKAKLANVVRKMMTNSQ
GNEYKAELVNVLRKMMTNSQ

SEQ ID NO: 191831 - protein, 20 aa, Artificial Sequence
  Description of Artificial Sequence: Synthetic peptide
  Seed: GNEKKAKLANVVRKMMTNSQ
GNEYKAELVNVMRKMMTNSQ

SEQ ID NO: 191832 - protein, 20 aa, Artificial Sequence
  Description of Artificial Sequence: Synthetic peptide
  Seed: GNEKKAKLANVVRKMMTNSQ
GNEYKAELVNVNRKMMTNSQ

SEQ ID NO: 191833 - protein, 20 aa, Artificial Sequence
  Description of Artificial Sequence: Synthetic peptide
  Seed: GNEKKAKLANVVRKMMTNSQ
GNEYKAELVNVSRKMMTNSQ

SEQ ID NO: 191834 - protein, 20 aa, Artificial Sequence
  Description of Artificial Sequence: Synthetic peptide
  Seed: GNEKKAKLANVVRKMMTNSQ
GNEYKAELVNVTRKMMTNSQ

SEQ ID NO: 191835 - protein, 20 aa, Artificial Sequence
  Description of Artificial Sequence: Synthetic peptide
  Seed: GNEKKAKLANVVRKMMTNSQ
GNEYKAELVNVVRKMMTNSQ

SEQ ID NO: 191836 - protein, 20 aa, Artificial Sequence
  Description of Artificial Sequence: Synthetic peptide
  Seed: GNEKKAKLANVVRKMMTNSQ
GNEYKAELWNVFRKMMTNSQ

SEQ ID NO: 191837 - protein, 20 aa, Artificial Sequence
  Description of Artificial Sequence: Synthetic peptide
  Seed: GNEKKAKLANVVRKMMTNSQ
GNEYKAELWNVIRKMMTNSQ

SEQ ID NO: 191838 - protein, 20 aa, Artificial Sequence
  Description of Artificial Sequence: Synthetic peptide
  Seed: GNEKKAKLANVVRKMMTNSQ
GNEYKAELWNVLRKMMTNSQ

SEQ ID NO: 191839 - protein, 20 aa, Artificial Sequence
  Description of Artificial Sequence: Synthetic peptide
  Seed: GNEKKAKLANVVRKMMTNSQ
GNEYKAELWNVVRKMMTNSQ

SEQ ID NO: 191840 - protein, 20 aa, Artificial Sequence
  Description of Artificial Sequence: Synthetic peptide
  Seed: GNEKKAKLANVVRKMMTNSQ
GNEYKAELYNVFRKMMTNSQ

SEQ ID NO: 191841 - protein, 20 aa, Artificial Sequence
  Description of Artificial Sequence: Synthetic peptide
  Seed: GNEKKAKLANVVRKMMTNSQ
GNEYKAELYNVIRKMMTNSQ

SEQ ID NO: 191842 - protein, 20 aa, Artificial Sequence
  Description of Artificial Sequence: Synthetic peptide
  Seed: GNEKKAKLANVVRKMMTNSQ
GNEYKAELYNVLRKMMTNSQ

SEQ ID NO: 191843 - protein, 20 aa, Artificial Sequence
  Description of Artificial Sequence: Synthetic peptide
  Seed: GNEKKAKLANVVRKMMTNSQ
GNEYKAELYNVMRKMMTNSQ

SEQ ID NO: 191844 - protein, 20 aa, Artificial Sequence
  Description of Artificial Sequence: Synthetic peptide
  Seed: GNEKKAKLANVVRKMMTNSQ
GNEYKAELYNVVRKMMTNSQ

SEQ ID NO: 191845 - protein, 20 aa, Artificial Sequence
  Description of Artificial Sequence: Synthetic peptide
  Seed: GNEKKAKLANVVRKMMTNSQ
GNEYKAFLANVARKMMTNSQ

SEQ ID NO: 191846 - protein, 20 aa, Artificial Sequence
  Description of Artificial Sequence: Synthetic peptide
  Seed: GNEKKAKLANVVRKMMTNSQ
GNEYKAFLANVDRKMMTNSQ

SEQ ID NO: 191847 - protein, 20 aa, Artificial Sequence
  Description of Artificial Sequence: Synthetic peptide
  Seed: GNEKKAKLANVVRKMMTNSQ
GNEYKAFLANVERKMMTNSQ

SEQ ID NO: 191848 - protein, 20 aa, Artificial Sequence
  Description of Artificial Sequence: Synthetic peptide
  Seed: GNEKKAKLANVVRKMMTNSQ
GNEYKAFLANVFRKMMTNSQ

SEQ ID NO: 191849 - protein, 20 aa, Artificial Sequence
  Description of Artificial Sequence: Synthetic peptide
  Seed: GNEKKAKLANVVRKMMTNSQ
GNEYKAFLANVGRKMMTNSQ

SEQ ID NO: 191850 - protein, 20 aa, Artificial Sequence
  Description of Artificial Sequence: Synthetic peptide
  Seed: GNEKKAKLANVVRKMMTNSQ
GNEYKAFLANVHRKMMTNSQ

SEQ ID NO: 191851 - protein, 20 aa, Artificial Sequence
  Description of Artificial Sequence: Synthetic peptide
  Seed: GNEKKAKLANVVRKMMTNSQ
GNEYKAFLANVIRKMMTNSQ

SEQ ID NO: 191852 - protein, 20 aa, Artificial Sequence
  Description of Artificial Sequence: Synthetic peptide
  Seed: GNEKKAKLANVVRKMMTNSQ
GNEYKAFLANVLRKMMTNSQ

SEQ ID NO: 191853 - protein, 20 aa, Artificial Sequence
  Description of Artificial Sequence: Synthetic peptide
  Seed: GNEKKAKLANVVRKMMTNSQ
GNEYKAFLANVMRKMMTNSQ

SEQ ID NO: 191854 - protein, 20 aa, Artificial Sequence
  Description of Artificial Sequence: Synthetic peptide
  Seed: GNEKKAKLANVVRKMMTNSQ
GNEYKAFLANVNRKMMTNSQ

SEQ ID NO: 191855 - protein, 20 aa, Artificial Sequence
  Description of Artificial Sequence: Synthetic peptide
  Seed: GNEKKAKLANVVRKMMTNSQ
GNEYKAFLANVPRKMMTNSQ

SEQ ID NO: 191856 - protein, 20 aa, Artificial Sequence
  Description of Artificial Sequence: Synthetic peptide
  Seed: GNEKKAKLANVVRKMMTNSQ
GNEYKAFLANVQRKMMTNSQ

SEQ ID NO: 191857 - protein, 20 aa, Artificial Sequence
  Description of Artificial Sequence: Synthetic peptide
  Seed: GNEKKAKLANVVRKMMTNSQ
GNEYKAFLANVSRKMMTNSQ

SEQ ID NO: 191858 - protein, 20 aa, Artificial Sequence
  Description of Artificial Sequence: Synthetic peptide
  Seed: GNEKKAKLANVVRKMMTNSQ
GNEYKAFLANVTRKMMTNSQ

SEQ ID NO: 191859 - protein, 20 aa, Artificial Sequence
  Description of Artificial Sequence: Synthetic peptide
  Seed: GNEKKAKLANVVRKMMTNSQ
GNEYKAFLANVVRKMMTNSQ

SEQ ID NO: 191860 - protein, 20 aa, Artificial Sequence
  Description of Artificial Sequence: Synthetic peptide
  Seed: GNEKKAKLANVVRKMMTNSQ
GNEYKAFLFNVARKMMTNSQ

SEQ ID NO: 191861 - protein, 20 aa, Artificial Sequence
  Description of Artificial Sequence: Synthetic peptide
  Seed: GNEKKAKLANVVRKMMTNSQ
GNEYKAFLFNVDRKMMTNSQ

SEQ ID NO: 191862 - protein, 20 aa, Artificial Sequence
  Description of Artificial Sequence: Synthetic peptide
  Seed: GNEKKAKLANVVRKMMTNSQ
GNEYKAFLFNVERKMMTNSQ

SEQ ID NO: 191863 - protein, 20 aa, Artificial Sequence
  Description of Artificial Sequence: Synthetic peptide
  Seed: GNEKKAKLANVVRKMMTNSQ
GNEYKAFLFNVHRKMMTNSQ

SEQ ID NO: 191864 - protein, 20 aa, Artificial Sequence
  Description of Artificial Sequence: Synthetic peptide
  Seed: GNEKKAKLANVVRKMMTNSQ
GNEYKAFLFNVIRKMMTNSQ

SEQ ID NO: 191865 - protein, 20 aa, Artificial Sequence
  Description of Artificial Sequence: Synthetic peptide
  Seed: GNEKKAKLANVVRKMMTNSQ
GNEYKAFLFNVLRKMMTNSQ

SEQ ID NO: 191866 - protein, 20 aa, Artificial Sequence
  Description of Artificial Sequence: Synthetic peptide
  Seed: GNEKKAKLANVVRKMMTNSQ
GNEYKAFLFNVMRKMMTNSQ

SEQ ID NO: 191867 - protein, 20 aa, Artificial Sequence
  Description of Artificial Sequence: Synthetic peptide
  Seed: GNEKKAKLANVVRKMMTNSQ
GNEYKAFLFNVNRKMMTNSQ

SEQ ID NO: 191868 - protein, 20 aa, Artificial Sequence
  Description of Artificial Sequence: Synthetic peptide
  Seed: GNEKKAKLANVVRKMMTNSQ
GNEYKAFLFNVPRKMMTNSQ

SEQ ID NO: 191869 - protein, 20 aa, Artificial Sequence
  Description of Artificial Sequence: Synthetic peptide
  Seed: GNEKKAKLANVVRKMMTNSQ
GNEYKAFLFNVSRKMMTNSQ

SEQ ID NO: 191870 - protein, 20 aa, Artificial Sequence
  Description of Artificial Sequence: Synthetic peptide
  Seed: GNEKKAKLANVVRKMMTNSQ
GNEYKAFLFNVTRKMMTNSQ

SEQ ID NO: 191871 - protein, 20 aa, Artificial Sequence
  Description of Artificial Sequence: Synthetic peptide
  Seed: GNEKKAKLANVVRKMMTNSQ
GNEYKAFLFNVVRKMMTNSQ

SEQ ID NO: 191872 - protein, 20 aa, Artificial Sequence
  Description of Artificial Sequence: Synthetic peptide
  Seed: GNEKKAKLANVVRKMMTNSQ
GNEYKAFLGNVARKMMTNSQ

SEQ ID NO: 191873 - protein, 20 aa, Artificial Sequence
  Description of Artificial Sequence: Synthetic peptide
  Seed: GNEKKAKLANVVRKMMTNSQ
GNEYKAFLGNVGRKMMTNSQ

SEQ ID NO: 191874 - protein, 20 aa, Artificial Sequence
  Description of Artificial Sequence: Synthetic peptide
  Seed: GNEKKAKLANVVRKMMTNSQ
GNEYKAFLGNVIRKMMTNSQ

SEQ ID NO: 191875 - protein, 20 aa, Artificial Sequence
  Description of Artificial Sequence: Synthetic peptide
  Seed: GNEKKAKLANVVRKMMTNSQ
GNEYKAFLGNVLRKMMTNSQ

SEQ ID NO: 191876 - protein, 20 aa, Artificial Sequence
  Description of Artificial Sequence: Synthetic peptide
  Seed: GNEKKAKLANVVRKMMTNSQ
GNEYKAFLGNVMRKMMTNSQ

SEQ ID NO: 191877 - protein, 20 aa, Artificial Sequence
  Description of Artificial Sequence: Synthetic peptide
  Seed: GNEKKAKLANVVRKMMTNSQ
GNEYKAFLGNVNRKMMTNSQ

SEQ ID NO: 191878 - protein, 20 aa, Artificial Sequence
  Description of Artificial Sequence: Synthetic peptide
  Seed: GNEKKAKLANVVRKMMTNSQ
GNEYKAFLGNVSRKMMTNSQ

SEQ ID NO: 191879 - protein, 20 aa, Artificial Sequence
  Description of Artificial Sequence: Synthetic peptide
  Seed: GNEKKAKLANVVRKMMTNSQ
GNEYKAFLGNVTRKMMTNSQ

SEQ ID NO: 191880 - protein, 20 aa, Artificial Sequence
  Description of Artificial Sequence: Synthetic peptide
  Seed: GNEKKAKLANVVRKMMTNSQ
GNEYKAFLGNVVRKMMTNSQ

SEQ ID NO: 191881 - protein, 20 aa, Artificial Sequence
  Description of Artificial Sequence: Synthetic peptide
  Seed: GNEKKAKLANVVRKMMTNSQ
GNEYKAFLINVARKMMTNSQ

SEQ ID NO: 191882 - protein, 20 aa, Artificial Sequence
  Description of Artificial Sequence: Synthetic peptide
  Seed: GNEKKAKLANVVRKMMTNSQ
GNEYKAFLINVGRKMMTNSQ

SEQ ID NO: 191883 - protein, 20 aa, Artificial Sequence
  Description of Artificial Sequence: Synthetic peptide
  Seed: GNEKKAKLANVVRKMMTNSQ
GNEYKAFLINVIRKMMTNSQ

SEQ ID NO: 191884 - protein, 20 aa, Artificial Sequence
  Description of Artificial Sequence: Synthetic peptide
  Seed: GNEKKAKLANVVRKMMTNSQ
GNEYKAFLINVNRKMMTNSQ

SEQ ID NO: 191885 - protein, 20 aa, Artificial Sequence
  Description of Artificial Sequence: Synthetic peptide
  Seed: GNEKKAKLANVVRKMMTNSQ
GNEYKAFLINVSRKMMTNSQ

SEQ ID NO: 191886 - protein, 20 aa, Artificial Sequence
  Description of Artificial Sequence: Synthetic peptide
  Seed: GNEKKAKLANVVRKMMTNSQ
GNEYKAFLINVTRKMMTNSQ

SEQ ID NO: 191887 - protein, 20 aa, Artificial Sequence
  Description of Artificial Sequence: Synthetic peptide
  Seed: GNEKKAKLANVVRKMMTNSQ
GNEYKAFLINVVRKMMTNSQ

SEQ ID NO: 191888 - protein, 20 aa, Artificial Sequence
  Description of Artificial Sequence: Synthetic peptide
  Seed: GNEKKAKLANVVRKMMTNSQ
GNEYKAFLLNVARKMMTNSQ

SEQ ID NO: 191889 - protein, 20 aa, Artificial Sequence
  Description of Artificial Sequence: Synthetic peptide
  Seed: GNEKKAKLANVVRKMMTNSQ
GNEYKAFLLNVIRKMMTNSQ

SEQ ID NO: 191890 - protein, 20 aa, Artificial Sequence
  Description of Artificial Sequence: Synthetic peptide
  Seed: GNEKKAKLANVVRKMMTNSQ
GNEYKAFLLNVLRKMMTNSQ

SEQ ID NO: 191891 - protein, 20 aa, Artificial Sequence
  Description of Artificial Sequence: Synthetic peptide
  Seed: GNEKKAKLANVVRKMMTNSQ
GNEYKAFLLNVMRKMMTNSQ

SEQ ID NO: 191892 - protein, 20 aa, Artificial Sequence
  Description of Artificial Sequence: Synthetic peptide
  Seed: GNEKKAKLANVVRKMMTNSQ
GNEYKAFLLNVNRKMMTNSQ

SEQ ID NO: 191893 - protein, 20 aa, Artificial Sequence
  Description of Artificial Sequence: Synthetic peptide
  Seed: GNEKKAKLANVVRKMMTNSQ
GNEYKAFLLNVSRKMMTNSQ

SEQ ID NO: 191894 - protein, 20 aa, Artificial Sequence
  Description of Artificial Sequence: Synthetic peptide
  Seed: GNEKKAKLANVVRKMMTNSQ
GNEYKAFLLNVVRKMMTNSQ

SEQ ID NO: 191895 - protein, 20 aa, Artificial Sequence
  Description of Artificial Sequence: Synthetic peptide
  Seed: GNEKKAKLANVVRKMMTNSQ
GNEYKAFLMNVIRKMMTNSQ

SEQ ID NO: 191896 - protein, 20 aa, Artificial Sequence
  Description of Artificial Sequence: Synthetic peptide
  Seed: GNEKKAKLANVVRKMMTNSQ
GNEYKAFLMNVNRKMMTNSQ

SEQ ID NO: 191897 - protein, 20 aa, Artificial Sequence
  Description of Artificial Sequence: Synthetic peptide
  Seed: GNEKKAKLANVVRKMMTNSQ
GNEYKAFLMNVVRKMMTNSQ

SEQ ID NO: 191898 - protein, 20 aa, Artificial Sequence
  Description of Artificial Sequence: Synthetic peptide
  Seed: GNEKKAKLANVVRKMMTNSQ
GNEYKAFLNNVARKMMTNSQ

SEQ ID NO: 191899 - protein, 20 aa, Artificial Sequence
  Description of Artificial Sequence: Synthetic peptide
  Seed: GNEKKAKLANVVRKMMTNSQ
GNEYKAFLNNVIRKMMTNSQ

SEQ ID NO: 191900 - protein, 20 aa, Artificial Sequence
  Description of Artificial Sequence: Synthetic peptide
  Seed: GNEKKAKLANVVRKMMTNSQ
GNEYKAFLNNVLRKMMTNSQ

SEQ ID NO: 191901 - protein, 20 aa, Artificial Sequence
  Description of Artificial Sequence: Synthetic peptide
  Seed: GNEKKAKLANVVRKMMTNSQ
GNEYKAFLNNVNRKMMTNSQ

SEQ ID NO: 191902 - protein, 20 aa, Artificial Sequence
  Description of Artificial Sequence: Synthetic peptide
  Seed: GNEKKAKLANVVRKMMTNSQ
GNEYKAFLNNVSRKMMTNSQ

SEQ ID NO: 191903 - protein, 20 aa, Artificial Sequence
  Description of Artificial Sequence: Synthetic peptide
  Seed: GNEKKAKLANVVRKMMTNSQ
GNEYKAFLNNVVRKMMTNSQ

SEQ ID NO: 191904 - protein, 20 aa, Artificial Sequence
  Description of Artificial Sequence: Synthetic peptide
  Seed: GNEKKAKLANVVRKMMTNSQ
GNEYKAFLPNVARKMMTNSQ

SEQ ID NO: 191905 - protein, 20 aa, Artificial Sequence
  Description of Artificial Sequence: Synthetic peptide
  Seed: GNEKKAKLANVVRKMMTNSQ
GNEYKAFLPNVFRKMMTNSQ

SEQ ID NO: 191906 - protein, 20 aa, Artificial Sequence
  Description of Artificial Sequence: Synthetic peptide
  Seed: GNEKKAKLANVVRKMMTNSQ
GNEYKAFLPNVGRKMMTNSQ

SEQ ID NO: 191907 - protein, 20 aa, Artificial Sequence
  Description of Artificial Sequence: Synthetic peptide
  Seed: GNEKKAKLANVVRKMMTNSQ
GNEYKAFLPNVHRKMMTNSQ

SEQ ID NO: 191908 - protein, 20 aa, Artificial Sequence
  Description of Artificial Sequence: Synthetic peptide
  Seed: GNEKKAKLANVVRKMMTNSQ
GNEYKAFLPNVIRKMMTNSQ

SEQ ID NO: 191909 - protein, 20 aa, Artificial Sequence
  Description of Artificial Sequence: Synthetic peptide
  Seed: GNEKKAKLANVVRKMMTNSQ
GNEYKAFLPNVLRKMMTNSQ

SEQ ID NO: 191910 - protein, 20 aa, Artificial Sequence
  Description of Artificial Sequence: Synthetic peptide
  Seed: GNEKKAKLANVVRKMMTNSQ
GNEYKAFLPNVMRKMMTNSQ

SEQ ID NO: 191911 - protein, 20 aa, Artificial Sequence
  Description of Artificial Sequence: Synthetic peptide
  Seed: GNEKKAKLANVVRKMMTNSQ
GNEYKAFLPNVNRKMMTNSQ

SEQ ID NO: 191912 - protein, 20 aa, Artificial Sequence
  Description of Artificial Sequence: Synthetic peptide
  Seed: GNEKKAKLANVVRKMMTNSQ
GNEYKAFLPNVPRKMMTNSQ

SEQ ID NO: 191913 - protein, 20 aa, Artificial Sequence
  Description of Artificial Sequence: Synthetic peptide
  Seed: GNEKKAKLANVVRKMMTNSQ
GNEYKAFLPNVQRKMMTNSQ

SEQ ID NO: 191914 - protein, 20 aa, Artificial Sequence
  Description of Artificial Sequence: Synthetic peptide
  Seed: GNEKKAKLANVVRKMMTNSQ
GNEYKAFLPNVSRKMMTNSQ

SEQ ID NO: 191915 - protein, 20 aa, Artificial Sequence
  Description of Artificial Sequence: Synthetic peptide
  Seed: GNEKKAKLANVVRKMMTNSQ
GNEYKAFLPNVTRKMMTNSQ

SEQ ID NO: 191916 - protein, 20 aa, Artificial Sequence
  Description of Artificial Sequence: Synthetic peptide
  Seed: GNEKKAKLANVVRKMMTNSQ
GNEYKAFLPNVVRKMMTNSQ

SEQ ID NO: 191917 - protein, 20 aa, Artificial Sequence
  Description of Artificial Sequence: Synthetic peptide
  Seed: GNEKKAKLANVVRKMMTNSQ
GNEYKAFLSNVARKMMTNSQ

SEQ ID NO: 191918 - protein, 20 aa, Artificial Sequence
  Description of Artificial Sequence: Synthetic peptide
  Seed: GNEKKAKLANVVRKMMTNSQ
GNEYKAFLSNVGRKMMTNSQ

SEQ ID NO: 191919 - protein, 20 aa, Artificial Sequence
  Description of Artificial Sequence: Synthetic peptide
  Seed: GNEKKAKLANVVRKMMTNSQ
GNEYKAFLSNVHRKMMTNSQ

SEQ ID NO: 191920 - protein, 20 aa, Artificial Sequence
  Description of Artificial Sequence: Synthetic peptide
  Seed: GNEKKAKLANVVRKMMTNSQ
GNEYKAFLSNVIRKMMTNSQ

SEQ ID NO: 191921 - protein, 20 aa, Artificial Sequence
  Description of Artificial Sequence: Synthetic peptide
  Seed: GNEKKAKLANVVRKMMTNSQ
GNEYKAFLSNVLRKMMTNSQ

SEQ ID NO: 191922 - protein, 20 aa, Artificial Sequence
  Description of Artificial Sequence: Synthetic peptide
  Seed: GNEKKAKLANVVRKMMTNSQ
GNEYKAFLSNVMRKMMTNSQ

SEQ ID NO: 191923 - protein, 20 aa, Artificial Sequence
  Description of Artificial Sequence: Synthetic peptide
  Seed: GNEKKAKLANVVRKMMTNSQ
GNEYKAFLSNVNRKMMTNSQ

SEQ ID NO: 191924 - protein, 20 aa, Artificial Sequence
  Description of Artificial Sequence: Synthetic peptide
  Seed: GNEKKAKLANVVRKMMTNSQ
GNEYKAFLSNVSRKMMTNSQ

SEQ ID NO: 191925 - protein, 20 aa, Artificial Sequence
  Description of Artificial Sequence: Synthetic peptide
  Seed: GNEKKAKLANVVRKMMTNSQ
GNEYKAFLSNVTRKMMTNSQ

SEQ ID NO: 191926 - protein, 20 aa, Artificial Sequence
  Description of Artificial Sequence: Synthetic peptide
  Seed: GNEKKAKLANVVRKMMTNSQ
GNEYKAFLSNVVRKMMTNSQ

SEQ ID NO: 191927 - protein, 20 aa, Artificial Sequence
  Description of Artificial Sequence: Synthetic peptide
  Seed: GNEKKAKLANVVRKMMTNSQ
GNEYKAFLTNVARKMMTNSQ

SEQ ID NO: 191928 - protein, 20 aa, Artificial Sequence
  Description of Artificial Sequence: Synthetic peptide
  Seed: GNEKKAKLANVVRKMMTNSQ
GNEYKAFLTNVFRKMMTNSQ

SEQ ID NO: 191929 - protein, 20 aa, Artificial Sequence
  Description of Artificial Sequence: Synthetic peptide
  Seed: GNEKKAKLANVVRKMMTNSQ
GNEYKAFLTNVGRKMMTNSQ

SEQ ID NO: 191930 - protein, 20 aa, Artificial Sequence
  Description of Artificial Sequence: Synthetic peptide
  Seed: GNEKKAKLANVVRKMMTNSQ
GNEYKAFLTNVHRKMMTNSQ

SEQ ID NO: 191931 - protein, 20 aa, Artificial Sequence
  Description of Artificial Sequence: Synthetic peptide
  Seed: GNEKKAKLANVVRKMMTNSQ
GNEYKAFLTNVIRKMMTNSQ

SEQ ID NO: 191932 - protein, 20 aa, Artificial Sequence
  Description of Artificial Sequence: Synthetic peptide
  Seed: GNEKKAKLANVVRKMMTNSQ
GNEYKAFLTNVLRKMMTNSQ

SEQ ID NO: 191933 - protein, 20 aa, Artificial Sequence
  Description of Artificial Sequence: Synthetic peptide
  Seed: GNEKKAKLANVVRKMMTNSQ
GNEYKAFLTNVMRKMMTNSQ

SEQ ID NO: 191934 - protein, 20 aa, Artificial Sequence
  Description of Artificial Sequence: Synthetic peptide
  Seed: GNEKKAKLANVVRKMMTNSQ
GNEYKAFLTNVNRKMMTNSQ

SEQ ID NO: 191935 - protein, 20 aa, Artificial Sequence
  Description of Artificial Sequence: Synthetic peptide
  Seed: GNEKKAKLANVVRKMMTNSQ
GNEYKAFLTNVPRKMMTNSQ

SEQ ID NO: 191936 - protein, 20 aa, Artificial Sequence
  Description of Artificial Sequence: Synthetic peptide
  Seed: GNEKKAKLANVVRKMMTNSQ
GNEYKAFLTNVSRKMMTNSQ

SEQ ID NO: 191937 - protein, 20 aa, Artificial Sequence
  Description of Artificial Sequence: Synthetic peptide
  Seed: GNEKKAKLANVVRKMMTNSQ
GNEYKAFLTNVTRKMMTNSQ

SEQ ID NO: 191938 - protein, 20 aa, Artificial Sequence
  Description of Artificial Sequence: Synthetic peptide
  Seed: GNEKKAKLANVVRKMMTNSQ
GNEYKAFLTNVVRKMMTNSQ

SEQ ID NO: 191939 - protein, 20 aa, Artificial Sequence
  Description of Artificial Sequence: Synthetic peptide
  Seed: GNEKKAKLANVVRKMMTNSQ
GNEYKAFLVNVARKMMTNSQ

SEQ ID NO: 191940 - protein, 20 aa, Artificial Sequence
  Description of Artificial Sequence: Synthetic peptide
  Seed: GNEKKAKLANVVRKMMTNSQ
GNEYKAFLVNVGRKMMTNSQ

SEQ ID NO: 191941 - protein, 20 aa, Artificial Sequence
  Description of Artificial Sequence: Synthetic peptide
  Seed: GNEKKAKLANVVRKMMTNSQ
GNEYKAFLVNVHRKMMTNSQ

SEQ ID NO: 191942 - protein, 20 aa, Artificial Sequence
  Description of Artificial Sequence: Synthetic peptide
  Seed: GNEKKAKLANVVRKMMTNSQ
GNEYKAFLVNVIRKMMTNSQ

SEQ ID NO: 191943 - protein, 20 aa, Artificial Sequence
  Description of Artificial Sequence: Synthetic peptide
  Seed: GNEKKAKLANVVRKMMTNSQ
GNEYKAFLVNVLRKMMTNSQ

SEQ ID NO: 191944 - protein, 20 aa, Artificial Sequence
  Description of Artificial Sequence: Synthetic peptide
  Seed: GNEKKAKLANVVRKMMTNSQ
GNEYKAFLVNVMRKMMTNSQ

SEQ ID NO: 191945 - protein, 20 aa, Artificial Sequence
  Description of Artificial Sequence: Synthetic peptide
  Seed: GNEKKAKLANVVRKMMTNSQ
GNEYKAFLVNVNRKMMTNSQ

SEQ ID NO: 191946 - protein, 20 aa, Artificial Sequence
  Description of Artificial Sequence: Synthetic peptide
  Seed: GNEKKAKLANVVRKMMTNSQ
GNEYKAFLVNVPRKMMTNSQ

SEQ ID NO: 191947 - protein, 20 aa, Artificial Sequence
  Description of Artificial Sequence: Synthetic peptide
  Seed: GNEKKAKLANVVRKMMTNSQ
GNEYKAFLVNVSRKMMTNSQ

SEQ ID NO: 191948 - protein, 20 aa, Artificial Sequence
  Description of Artificial Sequence: Synthetic peptide
  Seed: GNEKKAKLANVVRKMMTNSQ
GNEYKAFLVNVTRKMMTNSQ

SEQ ID NO: 191949 - protein, 20 aa, Artificial Sequence
  Description of Artificial Sequence: Synthetic peptide
  Seed: GNEKKAKLANVVRKMMTNSQ
GNEYKAFLVNVVRKMMTNSQ

SEQ ID NO: 191950 - protein, 20 aa, Artificial Sequence
  Description of Artificial Sequence: Synthetic peptide
  Seed: GNEKKAKLANVVRKMMTNSQ
GNEYKAFLWNVARKMMTNSQ

SEQ ID NO: 191951 - protein, 20 aa, Artificial Sequence
  Description of Artificial Sequence: Synthetic peptide
  Seed: GNEKKAKLANVVRKMMTNSQ
GNEYKAFLWNVIRKMMTNSQ

SEQ ID NO: 191952 - protein, 20 aa, Artificial Sequence
  Description of Artificial Sequence: Synthetic peptide
  Seed: GNEKKAKLANVVRKMMTNSQ
GNEYKAFLWNVVRKMMTNSQ

SEQ ID NO: 191953 - protein, 20 aa, Artificial Sequence
  Description of Artificial Sequence: Synthetic peptide
  Seed: GNEKKAKLANVVRKMMTNSQ
GNEYKAFLYNVARKMMTNSQ

SEQ ID NO: 191954 - protein, 20 aa, Artificial Sequence
  Description of Artificial Sequence: Synthetic peptide
  Seed: GNEKKAKLANVVRKMMTNSQ
GNEYKAFLYNVIRKMMTNSQ

SEQ ID NO: 191955 - protein, 20 aa, Artificial Sequence
  Description of Artificial Sequence: Synthetic peptide
  Seed: GNEKKAKLANVVRKMMTNSQ
GNEYKAFLYNVLRKMMTNSQ

SEQ ID NO: 191956 - protein, 20 aa, Artificial Sequence
  Description of Artificial Sequence: Synthetic peptide
  Seed: GNEKKAKLANVVRKMMTNSQ
GNEYKAFLYNVMRKMMTNSQ

SEQ ID NO: 191957 - protein, 20 aa, Artificial Sequence
  Description of Artificial Sequence: Synthetic peptide
  Seed: GNEKKAKLANVVRKMMTNSQ
GNEYKAFLYNVSRKMMTNSQ

SEQ ID NO: 191958 - protein, 20 aa, Artificial Sequence
  Description of Artificial Sequence: Synthetic peptide
  Seed: GNEKKAKLANVVRKMMTNSQ
GNEYKAFLYNVTRKMMTNSQ

SEQ ID NO: 191959 - protein, 20 aa, Artificial Sequence
  Description of Artificial Sequence: Synthetic peptide
  Seed: GNEKKAKLANVVRKMMTNSQ
GNEYKAFLYNVVRKMMTNSQ

SEQ ID NO: 191960 - protein, 20 aa, Artificial Sequence
  Description of Artificial Sequence: Synthetic peptide
  Seed: GNEKKAKLANVVRKMMTNSQ
GNEYKAGLANVARKMMTNSQ

SEQ ID NO: 191961 - protein, 20 aa, Artificial Sequence
  Description of Artificial Sequence: Synthetic peptide
  Seed: GNEKKAKLANVVRKMMTNSQ
GNEYKAGLANVFRKMMTNSQ

SEQ ID NO: 191962 - protein, 20 aa, Artificial Sequence
  Description of Artificial Sequence: Synthetic peptide
  Seed: GNEKKAKLANVVRKMMTNSQ
GNEYKAGLANVGRKMMTNSQ

SEQ ID NO: 191963 - protein, 20 aa, Artificial Sequence
  Description of Artificial Sequence: Synthetic peptide
  Seed: GNEKKAKLANVVRKMMTNSQ
GNEYKAGLANVIRKMMTNSQ

SEQ ID NO: 191964 - protein, 20 aa, Artificial Sequence
  Description of Artificial Sequence: Synthetic peptide
  Seed: GNEKKAKLANVVRKMMTNSQ
GNEYKAGLANVLRKMMTNSQ

SEQ ID NO: 191965 - protein, 20 aa, Artificial Sequence
  Description of Artificial Sequence: Synthetic peptide
  Seed: GNEKKAKLANVVRKMMTNSQ
GNEYKAGLANVMRKMMTNSQ

SEQ ID NO: 191966 - protein, 20 aa, Artificial Sequence
  Description of Artificial Sequence: Synthetic peptide
  Seed: GNEKKAKLANVVRKMMTNSQ
GNEYKAGLANVNRKMMTNSQ

SEQ ID NO: 191967 - protein, 20 aa, Artificial Sequence
  Description of Artificial Sequence: Synthetic peptide
  Seed: GNEKKAKLANVVRKMMTNSQ
GNEYKAGLANVSRKMMTNSQ

SEQ ID NO: 191968 - protein, 20 aa, Artificial Sequence
  Description of Artificial Sequence: Synthetic peptide
  Seed: GNEKKAKLANVVRKMMTNSQ
GNEYKAGLANVTRKMMTNSQ

SEQ ID NO: 191969 - protein, 20 aa, Artificial Sequence
  Description of Artificial Sequence: Synthetic peptide
  Seed: GNEKKAKLANVVRKMMTNSQ
GNEYKAGLANVVRKMMTNSQ

SEQ ID NO: 191970 - protein, 20 aa, Artificial Sequence
  Description of Artificial Sequence: Synthetic peptide
  Seed: GNEKKAKLANVVRKMMTNSQ
GNEYKAGLANVYRKMMTNSQ

SEQ ID NO: 191971 - protein, 20 aa, Artificial Sequence
  Description of Artificial Sequence: Synthetic peptide
  Seed: GNEKKAKLANVVRKMMTNSQ
GNEYKAGLFNVFRKMMTNSQ

SEQ ID NO: 191972 - protein, 20 aa, Artificial Sequence
  Description of Artificial Sequence: Synthetic peptide
  Seed: GNEKKAKLANVVRKMMTNSQ
GNEYKAGLFNVIRKMMTNSQ

SEQ ID NO: 191973 - protein, 20 aa, Artificial Sequence
  Description of Artificial Sequence: Synthetic peptide
  Seed: GNEKKAKLANVVRKMMTNSQ
GNEYKAGLFNVLRKMMTNSQ

SEQ ID NO: 191974 - protein, 20 aa, Artificial Sequence
  Description of Artificial Sequence: Synthetic peptide
  Seed: GNEKKAKLANVVRKMMTNSQ
GNEYKAGLFNVMRKMMTNSQ

SEQ ID NO: 191975 - protein, 20 aa, Artificial Sequence
  Description of Artificial Sequence: Synthetic peptide
  Seed: GNEKKAKLANVVRKMMTNSQ
GNEYKAGLFNVVRKMMTNSQ

SEQ ID NO: 191976 - protein, 20 aa, Artificial Sequence
  Description of Artificial Sequence: Synthetic peptide
  Seed: GNEKKAKLANVVRKMMTNSQ
GNEYKAGLGNVARKMMTNSQ

SEQ ID NO: 191977 - protein, 20 aa, Artificial Sequence
  Description of Artificial Sequence: Synthetic peptide
  Seed: GNEKKAKLANVVRKMMTNSQ
GNEYKAGLGNVIRKMMTNSQ

SEQ ID NO: 191978 - protein, 20 aa, Artificial Sequence
  Description of Artificial Sequence: Synthetic peptide
  Seed: GNEKKAKLANVVRKMMTNSQ
GNEYKAGLGNVLRKMMTNSQ

SEQ ID NO: 191979 - protein, 20 aa, Artificial Sequence
  Description of Artificial Sequence: Synthetic peptide
  Seed: GNEKKAKLANVVRKMMTNSQ
GNEYKAGLGNVMRKMMTNSQ

SEQ ID NO: 191980 - protein, 20 aa, Artificial Sequence
  Description of Artificial Sequence: Synthetic peptide
  Seed: GNEKKAKLANVVRKMMTNSQ
GNEYKAGLGNVVRKMMTNSQ

SEQ ID NO: 191981 - protein, 20 aa, Artificial Sequence
  Description of Artificial Sequence: Synthetic peptide
  Seed: GNEKKAKLANVVRKMMTNSQ
GNEYKAGLINVARKMMTNSQ

SEQ ID NO: 191982 - protein, 20 aa, Artificial Sequence
  Description of Artificial Sequence: Synthetic peptide
  Seed: GNEKKAKLANVVRKMMTNSQ
GNEYKAGLINVIRKMMTNSQ

SEQ ID NO: 191983 - protein, 20 aa, Artificial Sequence
  Description of Artificial Sequence: Synthetic peptide
  Seed: GNEKKAKLANVVRKMMTNSQ
GNEYKAGLINVLRKMMTNSQ

SEQ ID NO: 191984 - protein, 20 aa, Artificial Sequence
  Description of Artificial Sequence: Synthetic peptide
  Seed: GNEKKAKLANVVRKMMTNSQ
GNEYKAGLINVNRKMMTNSQ

SEQ ID NO: 191985 - protein, 20 aa, Artificial Sequence
  Description of Artificial Sequence: Synthetic peptide
  Seed: GNEKKAKLANVVRKMMTNSQ
GNEYKAGLINVSRKMMTNSQ

SEQ ID NO: 191986 - protein, 20 aa, Artificial Sequence
  Description of Artificial Sequence: Synthetic peptide
  Seed: GNEKKAKLANVVRKMMTNSQ
GNEYKAGLINVVRKMMTNSQ

SEQ ID NO: 191987 - protein, 20 aa, Artificial Sequence
  Description of Artificial Sequence: Synthetic peptide
  Seed: GNEKKAKLANVVRKMMTNSQ
GNEYKAGLNNVARKMMTNSQ

SEQ ID NO: 191988 - protein, 20 aa, Artificial Sequence
  Description of Artificial Sequence: Synthetic peptide
  Seed: GNEKKAKLANVVRKMMTNSQ
GNEYKAGLNNVIRKMMTNSQ

SEQ ID NO: 191989 - protein, 20 aa, Artificial Sequence
  Description of Artificial Sequence: Synthetic peptide
  Seed: GNEKKAKLANVVRKMMTNSQ
GNEYKAGLNNVLRKMMTNSQ

SEQ ID NO: 191990 - protein, 20 aa, Artificial Sequence
  Description of Artificial Sequence: Synthetic peptide
  Seed: GNEKKAKLANVVRKMMTNSQ
GNEYKAGLNNVVRKMMTNSQ

SEQ ID NO: 191991 - protein, 20 aa, Artificial Sequence
  Description of Artificial Sequence: Synthetic peptide
  Seed: GNEKKAKLANVVRKMMTNSQ
GNEYKAGLPNVARKMMTNSQ

SEQ ID NO: 191992 - protein, 20 aa, Artificial Sequence
  Description of Artificial Sequence: Synthetic peptide
  Seed: GNEKKAKLANVVRKMMTNSQ
GNEYKAGLPNVIRKMMTNSQ

SEQ ID NO: 191993 - protein, 20 aa, Artificial Sequence
  Description of Artificial Sequence: Synthetic peptide
  Seed: GNEKKAKLANVVRKMMTNSQ
GNEYKAGLPNVLRKMMTNSQ

SEQ ID NO: 191994 - protein, 20 aa, Artificial Sequence
  Description of Artificial Sequence: Synthetic peptide
  Seed: GNEKKAKLANVVRKMMTNSQ
GNEYKAGLPNVMRKMMTNSQ

SEQ ID NO: 191995 - protein, 20 aa, Artificial Sequence
  Description of Artificial Sequence: Synthetic peptide
  Seed: GNEKKAKLANVVRKMMTNSQ
GNEYKAGLPNVVRKMMTNSQ

SEQ ID NO: 191996 - protein, 20 aa, Artificial Sequence
  Description of Artificial Sequence: Synthetic peptide
  Seed: GNEKKAKLANVVRKMMTNSQ
GNEYKAGLSNVARKMMTNSQ

SEQ ID NO: 191997 - protein, 20 aa, Artificial Sequence
  Description of Artificial Sequence: Synthetic peptide
  Seed: GNEKKAKLANVVRKMMTNSQ
GNEYKAGLSNVFRKMMTNSQ

SEQ ID NO: 191998 - protein, 20 aa, Artificial Sequence
  Description of Artificial Sequence: Synthetic peptide
  Seed: GNEKKAKLANVVRKMMTNSQ
GNEYKAGLSNVIRKMMTNSQ

SEQ ID NO: 191999 - protein, 20 aa, Artificial Sequence
  Description of Artificial Sequence: Synthetic peptide
  Seed: GNEKKAKLANVVRKMMTNSQ
GNEYKAGLSNVLRKMMTNSQ

SEQ ID NO: 192000 - protein, 20 aa, Artificial Sequence
  Description of Artificial Sequence: Synthetic peptide
  Seed: GNEKKAKLANVVRKMMTNSQ
GNEYKAGLSNVMRKMMTNSQ

SEQ ID NO: 192001 - protein, 20 aa, Artificial Sequence
  Description of Artificial Sequence: Synthetic peptide
  Seed: GNEKKAKLANVVRKMMTNSQ
GNEYKAGLSNVNRKMMTNSQ

SEQ ID NO: 192002 - protein, 20 aa, Artificial Sequence
  Description of Artificial Sequence: Synthetic peptide
  Seed: GNEKKAKLANVVRKMMTNSQ
GNEYKAGLSNVSRKMMTNSQ

SEQ ID NO: 192003 - protein, 20 aa, Artificial Sequence
  Description of Artificial Sequence: Synthetic peptide
  Seed: GNEKKAKLANVVRKMMTNSQ
GNEYKAGLSNVTRKMMTNSQ

SEQ ID NO: 192004 - protein, 20 aa, Artificial Sequence
  Description of Artificial Sequence: Synthetic peptide
  Seed: GNEKKAKLANVVRKMMTNSQ
GNEYKAGLSNVVRKMMTNSQ

SEQ ID NO: 192005 - protein, 20 aa, Artificial Sequence
  Description of Artificial Sequence: Synthetic peptide
  Seed: GNEKKAKLANVVRKMMTNSQ
GNEYKAGLTNVARKMMTNSQ

SEQ ID NO: 192006 - protein, 20 aa, Artificial Sequence
  Description of Artificial Sequence: Synthetic peptide
  Seed: GNEKKAKLANVVRKMMTNSQ
GNEYKAGLTNVIRKMMTNSQ

SEQ ID NO: 192007 - protein, 20 aa, Artificial Sequence
  Description of Artificial Sequence: Synthetic peptide
  Seed: GNEKKAKLANVVRKMMTNSQ
GNEYKAGLTNVLRKMMTNSQ

SEQ ID NO: 192008 - protein, 20 aa, Artificial Sequence
  Description of Artificial Sequence: Synthetic peptide
  Seed: GNEKKAKLANVVRKMMTNSQ
GNEYKAGLTNVMRKMMTNSQ

SEQ ID NO: 192009 - protein, 20 aa, Artificial Sequence
  Description of Artificial Sequence: Synthetic peptide
  Seed: GNEKKAKLANVVRKMMTNSQ
GNEYKAGLTNVNRKMMTNSQ

SEQ ID NO: 192010 - protein, 20 aa, Artificial Sequence
  Description of Artificial Sequence: Synthetic peptide
  Seed: GNEKKAKLANVVRKMMTNSQ
GNEYKAGLTNVSRKMMTNSQ

SEQ ID NO: 192011 - protein, 20 aa, Artificial Sequence
  Description of Artificial Sequence: Synthetic peptide
  Seed: GNEKKAKLANVVRKMMTNSQ
GNEYKAGLTNVVRKMMTNSQ

SEQ ID NO: 192012 - protein, 20 aa, Artificial Sequence
  Description of Artificial Sequence: Synthetic peptide
  Seed: GNEKKAKLANVVRKMMTNSQ
GNEYKAGLVNVARKMMTNSQ

SEQ ID NO: 192013 - protein, 20 aa, Artificial Sequence
  Description of Artificial Sequence: Synthetic peptide
  Seed: GNEKKAKLANVVRKMMTNSQ
GNEYKAGLVNVIRKMMTNSQ

SEQ ID NO: 192014 - protein, 20 aa, Artificial Sequence
  Description of Artificial Sequence: Synthetic peptide
  Seed: GNEKKAKLANVVRKMMTNSQ
GNEYKAGLVNVLRKMMTNSQ

SEQ ID NO: 192015 - protein, 20 aa, Artificial Sequence
  Description of Artificial Sequence: Synthetic peptide
  Seed: GNEKKAKLANVVRKMMTNSQ
GNEYKAGLVNVMRKMMTNSQ

SEQ ID NO: 192016 - protein, 20 aa, Artificial Sequence
  Description of Artificial Sequence: Synthetic peptide
  Seed: GNEKKAKLANVVRKMMTNSQ
GNEYKAGLVNVNRKMMTNSQ

SEQ ID NO: 192017 - protein, 20 aa, Artificial Sequence
  Description of Artificial Sequence: Synthetic peptide
  Seed: GNEKKAKLANVVRKMMTNSQ
GNEYKAGLVNVSRKMMTNSQ

SEQ ID NO: 192018 - protein, 20 aa, Artificial Sequence
  Description of Artificial Sequence: Synthetic peptide
  Seed: GNEKKAKLANVVRKMMTNSQ
GNEYKAGLVNVVRKMMTNSQ

SEQ ID NO: 192019 - protein, 20 aa, Artificial Sequence
  Description of Artificial Sequence: Synthetic peptide
  Seed: GNEKKAKLANVVRKMMTNSQ
GNEYKAHLANVARKMMTNSQ

SEQ ID NO: 192020 - protein, 20 aa, Artificial Sequence
  Description of Artificial Sequence: Synthetic peptide
  Seed: GNEKKAKLANVVRKMMTNSQ
GNEYKAHLANVIRKMMTNSQ

SEQ ID NO: 192021 - protein, 20 aa, Artificial Sequence
  Description of Artificial Sequence: Synthetic peptide
  Seed: GNEKKAKLANVVRKMMTNSQ
GNEYKAHLANVLRKMMTNSQ

SEQ ID NO: 192022 - protein, 20 aa, Artificial Sequence
  Description of Artificial Sequence: Synthetic peptide
  Seed: GNEKKAKLANVVRKMMTNSQ
GNEYKAHLANVMRKMMTNSQ

SEQ ID NO: 192023 - protein, 20 aa, Artificial Sequence
  Description of Artificial Sequence: Synthetic peptide
  Seed: GNEKKAKLANVVRKMMTNSQ
GNEYKAHLANVNRKMMTNSQ

SEQ ID NO: 192024 - protein, 20 aa, Artificial Sequence
  Description of Artificial Sequence: Synthetic peptide
  Seed: GNEKKAKLANVVRKMMTNSQ
GNEYKAHLANVVRKMMTNSQ

SEQ ID NO: 192025 - protein, 20 aa, Artificial Sequence
  Description of Artificial Sequence: Synthetic peptide
  Seed: GNEKKAKLANVVRKMMTNSQ
GNEYKAHLFNVARKMMTNSQ

SEQ ID NO: 192026 - protein, 20 aa, Artificial Sequence
  Description of Artificial Sequence: Synthetic peptide
  Seed: GNEKKAKLANVVRKMMTNSQ
GNEYKAHLFNVDRKMMTNSQ

SEQ ID NO: 192027 - protein, 20 aa, Artificial Sequence
  Description of Artificial Sequence: Synthetic peptide
  Seed: GNEKKAKLANVVRKMMTNSQ
GNEYKAHLFNVERKMMTNSQ

SEQ ID NO: 192028 - protein, 20 aa, Artificial Sequence
  Description of Artificial Sequence: Synthetic peptide
  Seed: GNEKKAKLANVVRKMMTNSQ
GNEYKAHLFNVFRKMMTNSQ

SEQ ID NO: 192029 - protein, 20 aa, Artificial Sequence
  Description of Artificial Sequence: Synthetic peptide
  Seed: GNEKKAKLANVVRKMMTNSQ
GNEYKAHLFNVIRKMMTNSQ

SEQ ID NO: 192030 - protein, 20 aa, Artificial Sequence
  Description of Artificial Sequence: Synthetic peptide
  Seed: GNEKKAKLANVVRKMMTNSQ
GNEYKAHLFNVLRKMMTNSQ

SEQ ID NO: 192031 - protein, 20 aa, Artificial Sequence
  Description of Artificial Sequence: Synthetic peptide
  Seed: GNEKKAKLANVVRKMMTNSQ
GNEYKAHLFNVMRKMMTNSQ

SEQ ID NO: 192032 - protein, 20 aa, Artificial Sequence
  Description of Artificial Sequence: Synthetic peptide
  Seed: GNEKKAKLANVVRKMMTNSQ
GNEYKAHLFNVNRKMMTNSQ

SEQ ID NO: 192033 - protein, 20 aa, Artificial Sequence
  Description of Artificial Sequence: Synthetic peptide
  Seed: GNEKKAKLANVVRKMMTNSQ
GNEYKAHLFNVSRKMMTNSQ

SEQ ID NO: 192034 - protein, 20 aa, Artificial Sequence
  Description of Artificial Sequence: Synthetic peptide
  Seed: GNEKKAKLANVVRKMMTNSQ
GNEYKAHLFNVTRKMMTNSQ

SEQ ID NO: 192035 - protein, 20 aa, Artificial Sequence
  Description of Artificial Sequence: Synthetic peptide
  Seed: GNEKKAKLANVVRKMMTNSQ
GNEYKAHLFNVVRKMMTNSQ

SEQ ID NO: 192036 - protein, 20 aa, Artificial Sequence
  Description of Artificial Sequence: Synthetic peptide
  Seed: GNEKKAKLANVVRKMMTNSQ
GNEYKAHLFNVWRKMMTNSQ

SEQ ID NO: 192037 - protein, 20 aa, Artificial Sequence
  Description of Artificial Sequence: Synthetic peptide
  Seed: GNEKKAKLANVVRKMMTNSQ
GNEYKAHLFNVYRKMMTNSQ

SEQ ID NO: 192038 - protein, 20 aa, Artificial Sequence
  Description of Artificial Sequence: Synthetic peptide
  Seed: GNEKKAKLANVVRKMMTNSQ
GNEYKAHLGNVARKMMTNSQ

SEQ ID NO: 192039 - protein, 20 aa, Artificial Sequence
  Description of Artificial Sequence: Synthetic peptide
  Seed: GNEKKAKLANVVRKMMTNSQ
GNEYKAHLGNVIRKMMTNSQ

SEQ ID NO: 192040 - protein, 20 aa, Artificial Sequence
  Description of Artificial Sequence: Synthetic peptide
  Seed: GNEKKAKLANVVRKMMTNSQ
GNEYKAHLGNVLRKMMTNSQ

SEQ ID NO: 192041 - protein, 20 aa, Artificial Sequence
  Description of Artificial Sequence: Synthetic peptide
  Seed: GNEKKAKLANVVRKMMTNSQ
GNEYKAHLGNVVRKMMTNSQ

SEQ ID NO: 192042 - protein, 20 aa, Artificial Sequence
  Description of Artificial Sequence: Synthetic peptide
  Seed: GNEKKAKLANVVRKMMTNSQ
GNEYKAHLINVFRKMMTNSQ

SEQ ID NO: 192043 - protein, 20 aa, Artificial Sequence
  Description of Artificial Sequence: Synthetic peptide
  Seed: GNEKKAKLANVVRKMMTNSQ
GNEYKAHLINVIRKMMTNSQ

SEQ ID NO: 192044 - protein, 20 aa, Artificial Sequence
  Description of Artificial Sequence: Synthetic peptide
  Seed: GNEKKAKLANVVRKMMTNSQ
GNEYKAHLINVLRKMMTNSQ

SEQ ID NO: 192045 - protein, 20 aa, Artificial Sequence
  Description of Artificial Sequence: Synthetic peptide
  Seed: GNEKKAKLANVVRKMMTNSQ
GNEYKAHLINVVRKMMTNSQ

SEQ ID NO: 192046 - protein, 20 aa, Artificial Sequence
  Description of Artificial Sequence: Synthetic peptide
  Seed: GNEKKAKLANVVRKMMTNSQ
GNEYKAHLLNVFRKMMTNSQ

SEQ ID NO: 192047 - protein, 20 aa, Artificial Sequence
  Description of Artificial Sequence: Synthetic peptide
  Seed: GNEKKAKLANVVRKMMTNSQ
GNEYKAHLLNVIRKMMTNSQ

SEQ ID NO: 192048 - protein, 20 aa, Artificial Sequence
  Description of Artificial Sequence: Synthetic peptide
  Seed: GNEKKAKLANVVRKMMTNSQ
GNEYKAHLLNVLRKMMTNSQ

SEQ ID NO: 192049 - protein, 20 aa, Artificial Sequence
  Description of Artificial Sequence: Synthetic peptide
  Seed: GNEKKAKLANVVRKMMTNSQ
GNEYKAHLLNVMRKMMTNSQ

SEQ ID NO: 192050 - protein, 20 aa, Artificial Sequence
  Description of Artificial Sequence: Synthetic peptide
  Seed: GNEKKAKLANVVRKMMTNSQ
GNEYKAHLLNVVRKMMTNSQ

SEQ ID NO: 192051 - protein, 20 aa, Artificial Sequence
  Description of Artificial Sequence: Synthetic peptide
  Seed: GNEKKAKLANVVRKMMTNSQ
GNEYKAHLMNVFRKMMTNSQ

SEQ ID NO: 192052 - protein, 20 aa, Artificial Sequence
  Description of Artificial Sequence: Synthetic peptide
  Seed: GNEKKAKLANVVRKMMTNSQ
GNEYKAHLMNVIRKMMTNSQ

SEQ ID NO: 192053 - protein, 20 aa, Artificial Sequence
  Description of Artificial Sequence: Synthetic peptide
  Seed: GNEKKAKLANVVRKMMTNSQ
GNEYKAHLMNVLRKMMTNSQ

SEQ ID NO: 192054 - protein, 20 aa, Artificial Sequence
  Description of Artificial Sequence: Synthetic peptide
  Seed: GNEKKAKLANVVRKMMTNSQ
GNEYKAHLMNVVRKMMTNSQ

SEQ ID NO: 192055 - protein, 20 aa, Artificial Sequence
  Description of Artificial Sequence: Synthetic peptide
  Seed: GNEKKAKLANVVRKMMTNSQ
GNEYKAHLPNVVRKMMTNSQ

SEQ ID NO: 192056 - protein, 20 aa, Artificial Sequence
  Description of Artificial Sequence: Synthetic peptide
  Seed: GNEKKAKLANVVRKMMTNSQ
GNEYKAHLSNVARKMMTNSQ

SEQ ID NO: 192057 - protein, 20 aa, Artificial Sequence
  Description of Artificial Sequence: Synthetic peptide
  Seed: GNEKKAKLANVVRKMMTNSQ
GNEYKAHLSNVIRKMMTNSQ

SEQ ID NO: 192058 - protein, 20 aa, Artificial Sequence
  Description of Artificial Sequence: Synthetic peptide
  Seed: GNEKKAKLANVVRKMMTNSQ
GNEYKAHLSNVLRKMMTNSQ

SEQ ID NO: 192059 - protein, 20 aa, Artificial Sequence
  Description of Artificial Sequence: Synthetic peptide
  Seed: GNEKKAKLANVVRKMMTNSQ
GNEYKAHLSNVVRKMMTNSQ

SEQ ID NO: 192060 - protein, 20 aa, Artificial Sequence
  Description of Artificial Sequence: Synthetic peptide
  Seed: GNEKKAKLANVVRKMMTNSQ
GNEYKAHLWNVFRKMMTNSQ

SEQ ID NO: 192061 - protein, 20 aa, Artificial Sequence
  Description of Artificial Sequence: Synthetic peptide
  Seed: GNEKKAKLANVVRKMMTNSQ
GNEYKAHLWNVIRKMMTNSQ

SEQ ID NO: 192062 - protein, 20 aa, Artificial Sequence
  Description of Artificial Sequence: Synthetic peptide
  Seed: GNEKKAKLANVVRKMMTNSQ
GNEYKAHLWNVLRKMMTNSQ

SEQ ID NO: 192063 - protein, 20 aa, Artificial Sequence
  Description of Artificial Sequence: Synthetic peptide
  Seed: GNEKKAKLANVVRKMMTNSQ
GNEYKAHLWNVVRKMMTNSQ

SEQ ID NO: 192064 - protein, 20 aa, Artificial Sequence
  Description of Artificial Sequence: Synthetic peptide
  Seed: GNEKKAKLANVVRKMMTNSQ
GNEYKAHLYNVFRKMMTNSQ

SEQ ID NO: 192065 - protein, 20 aa, Artificial Sequence
  Description of Artificial Sequence: Synthetic peptide
  Seed: GNEKKAKLANVVRKMMTNSQ
GNEYKAHLYNVIRKMMTNSQ

SEQ ID NO: 192066 - protein, 20 aa, Artificial Sequence
  Description of Artificial Sequence: Synthetic peptide
  Seed: GNEKKAKLANVVRKMMTNSQ
GNEYKAHLYNVLRKMMTNSQ

SEQ ID NO: 192067 - protein, 20 aa, Artificial Sequence
  Description of Artificial Sequence: Synthetic peptide
  Seed: GNEKKAKLANVVRKMMTNSQ
GNEYKAHLYNVMRKMMTNSQ

SEQ ID NO: 192068 - protein, 20 aa, Artificial Sequence
  Description of Artificial Sequence: Synthetic peptide
  Seed: GNEKKAKLANVVRKMMTNSQ
GNEYKAHLYNVVRKMMTNSQ

SEQ ID NO: 192069 - protein, 20 aa, Artificial Sequence
  Description of Artificial Sequence: Synthetic peptide
  Seed: GNEKKAKLANVVRKMMTNSQ
GNEYKAILANVARKMMTNSQ

SEQ ID NO: 192070 - protein, 20 aa, Artificial Sequence
  Description of Artificial Sequence: Synthetic peptide
  Seed: GNEKKAKLANVVRKMMTNSQ
GNEYKAILANVCRKMMTNSQ

SEQ ID NO: 192071 - protein, 20 aa, Artificial Sequence
  Description of Artificial Sequence: Synthetic peptide
  Seed: GNEKKAKLANVVRKMMTNSQ
GNEYKAILANVDRKMMTNSQ

SEQ ID NO: 192072 - protein, 20 aa, Artificial Sequence
  Description of Artificial Sequence: Synthetic peptide
  Seed: GNEKKAKLANVVRKMMTNSQ
GNEYKAILANVERKMMTNSQ

SEQ ID NO: 192073 - protein, 20 aa, Artificial Sequence
  Description of Artificial Sequence: Synthetic peptide
  Seed: GNEKKAKLANVVRKMMTNSQ
GNEYKAILANVFRKMMTNSQ

SEQ ID NO: 192074 - protein, 20 aa, Artificial Sequence
  Description of Artificial Sequence: Synthetic peptide
  Seed: GNEKKAKLANVVRKMMTNSQ
GNEYKAILANVGRKMMTNSQ

SEQ ID NO: 192075 - protein, 20 aa, Artificial Sequence
  Description of Artificial Sequence: Synthetic peptide
  Seed: GNEKKAKLANVVRKMMTNSQ
GNEYKAILANVHRKMMTNSQ

SEQ ID NO: 192076 - protein, 20 aa, Artificial Sequence
  Description of Artificial Sequence: Synthetic peptide
  Seed: GNEKKAKLANVVRKMMTNSQ
GNEYKAILANVIRKMMTNSQ

SEQ ID NO: 192077 - protein, 20 aa, Artificial Sequence
  Description of Artificial Sequence: Synthetic peptide
  Seed: GNEKKAKLANVVRKMMTNSQ
GNEYKAILANVKRKMMTNSQ

SEQ ID NO: 192078 - protein, 20 aa, Artificial Sequence
  Description of Artificial Sequence: Synthetic peptide
  Seed: GNEKKAKLANVVRKMMTNSQ
GNEYKAILANVLRKMMTNSQ

SEQ ID NO: 192079 - protein, 20 aa, Artificial Sequence
  Description of Artificial Sequence: Synthetic peptide
  Seed: GNEKKAKLANVVRKMMTNSQ
GNEYKAILANVMRKMMTNSQ

SEQ ID NO: 192080 - protein, 20 aa, Artificial Sequence
  Description of Artificial Sequence: Synthetic peptide
  Seed: GNEKKAKLANVVRKMMTNSQ
GNEYKAILANVNRKMMTNSQ

SEQ ID NO: 192081 - protein, 20 aa, Artificial Sequence
  Description of Artificial Sequence: Synthetic peptide
  Seed: GNEKKAKLANVVRKMMTNSQ
GNEYKAILANVPRKMMTNSQ

SEQ ID NO: 192082 - protein, 20 aa, Artificial Sequence
  Description of Artificial Sequence: Synthetic peptide
  Seed: GNEKKAKLANVVRKMMTNSQ
GNEYKAILANVQRKMMTNSQ

SEQ ID NO: 192083 - protein, 20 aa, Artificial Sequence
  Description of Artificial Sequence: Synthetic peptide
  Seed: GNEKKAKLANVVRKMMTNSQ
GNEYKAILANVRRKMMTNSQ

SEQ ID NO: 192084 - protein, 20 aa, Artificial Sequence
  Description of Artificial Sequence: Synthetic peptide
  Seed: GNEKKAKLANVVRKMMTNSQ
GNEYKAILANVSRKMMTNSQ

SEQ ID NO: 192085 - protein, 20 aa, Artificial Sequence
  Description of Artificial Sequence: Synthetic peptide
  Seed: GNEKKAKLANVVRKMMTNSQ
GNEYKAILANVTRKMMTNSQ

SEQ ID NO: 192086 - protein, 20 aa, Artificial Sequence
  Description of Artificial Sequence: Synthetic peptide
  Seed: GNEKKAKLANVVRKMMTNSQ
GNEYKAILANVVRKMMTNSQ

SEQ ID NO: 192087 - protein, 20 aa, Artificial Sequence
  Description of Artificial Sequence: Synthetic peptide
  Seed: GNEKKAKLANVVRKMMTNSQ
GNEYKAILANVYRKMMTNSQ

SEQ ID NO: 192088 - protein, 20 aa, Artificial Sequence
  Description of Artificial Sequence: Synthetic peptide
  Seed: GNEKKAKLANVVRKMMTNSQ
GNEYKAILENVARKMMTNSQ

SEQ ID NO: 192089 - protein, 20 aa, Artificial Sequence
  Description of Artificial Sequence: Synthetic peptide
  Seed: GNEKKAKLANVVRKMMTNSQ
GNEYKAILENVSRKMMTNSQ

SEQ ID NO: 192090 - protein, 20 aa, Artificial Sequence
  Description of Artificial Sequence: Synthetic peptide
  Seed: GNEKKAKLANVVRKMMTNSQ
GNEYKAILFNVARKMMTNSQ

SEQ ID NO: 192091 - protein, 20 aa, Artificial Sequence
  Description of Artificial Sequence: Synthetic peptide
  Seed: GNEKKAKLANVVRKMMTNSQ
GNEYKAILFNVDRKMMTNSQ

SEQ ID NO: 192092 - protein, 20 aa, Artificial Sequence
  Description of Artificial Sequence: Synthetic peptide
  Seed: GNEKKAKLANVVRKMMTNSQ
GNEYKAILFNVERKMMTNSQ

SEQ ID NO: 192093 - protein, 20 aa, Artificial Sequence
  Description of Artificial Sequence: Synthetic peptide
  Seed: GNEKKAKLANVVRKMMTNSQ
GNEYKAILFNVFRKMMTNSQ

SEQ ID NO: 192094 - protein, 20 aa, Artificial Sequence
  Description of Artificial Sequence: Synthetic peptide
  Seed: GNEKKAKLANVVRKMMTNSQ
GNEYKAILFNVHRKMMTNSQ

SEQ ID NO: 192095 - protein, 20 aa, Artificial Sequence
  Description of Artificial Sequence: Synthetic peptide
  Seed: GNEKKAKLANVVRKMMTNSQ
GNEYKAILFNVIRKMMTNSQ

SEQ ID NO: 192096 - protein, 20 aa, Artificial Sequence
  Description of Artificial Sequence: Synthetic peptide
  Seed: GNEKKAKLANVVRKMMTNSQ
GNEYKAILFNVLRKMMTNSQ

SEQ ID NO: 192097 - protein, 20 aa, Artificial Sequence
  Description of Artificial Sequence: Synthetic peptide
  Seed: GNEKKAKLANVVRKMMTNSQ
GNEYKAILFNVMRKMMTNSQ

SEQ ID NO: 192098 - protein, 20 aa, Artificial Sequence
  Description of Artificial Sequence: Synthetic peptide
  Seed: GNEKKAKLANVVRKMMTNSQ
GNEYKAILFNVNRKMMTNSQ

SEQ ID NO: 192099 - protein, 20 aa, Artificial Sequence
  Description of Artificial Sequence: Synthetic peptide
  Seed: GNEKKAKLANVVRKMMTNSQ
GNEYKAILFNVPRKMMTNSQ

SEQ ID NO: 192100 - protein, 20 aa, Artificial Sequence
  Description of Artificial Sequence: Synthetic peptide
  Seed: GNEKKAKLANVVRKMMTNSQ
GNEYKAILFNVSRKMMTNSQ

SEQ ID NO: 192101 - protein, 20 aa, Artificial Sequence
  Description of Artificial Sequence: Synthetic peptide
  Seed: GNEKKAKLANVVRKMMTNSQ
GNEYKAILFNVTRKMMTNSQ

SEQ ID NO: 192102 - protein, 20 aa, Artificial Sequence
  Description of Artificial Sequence: Synthetic peptide
  Seed: GNEKKAKLANVVRKMMTNSQ
GNEYKAILFNVVRKMMTNSQ

SEQ ID NO: 192103 - protein, 20 aa, Artificial Sequence
  Description of Artificial Sequence: Synthetic peptide
  Seed: GNEKKAKLANVVRKMMTNSQ
GNEYKAILFNVYRKMMTNSQ

SEQ ID NO: 192104 - protein, 20 aa, Artificial Sequence
  Description of Artificial Sequence: Synthetic peptide
  Seed: GNEKKAKLANVVRKMMTNSQ
GNEYKAILGNVARKMMTNSQ

SEQ ID NO: 192105 - protein, 20 aa, Artificial Sequence
  Description of Artificial Sequence: Synthetic peptide
  Seed: GNEKKAKLANVVRKMMTNSQ
GNEYKAILGNVCRKMMTNSQ

SEQ ID NO: 192106 - protein, 20 aa, Artificial Sequence
  Description of Artificial Sequence: Synthetic peptide
  Seed: GNEKKAKLANVVRKMMTNSQ
GNEYKAILGNVDRKMMTNSQ

SEQ ID NO: 192107 - protein, 20 aa, Artificial Sequence
  Description of Artificial Sequence: Synthetic peptide
  Seed: GNEKKAKLANVVRKMMTNSQ
GNEYKAILGNVERKMMTNSQ

SEQ ID NO: 192108 - protein, 20 aa, Artificial Sequence
  Description of Artificial Sequence: Synthetic peptide
  Seed: GNEKKAKLANVVRKMMTNSQ
GNEYKAILGNVFRKMMTNSQ

SEQ ID NO: 192109 - protein, 20 aa, Artificial Sequence
  Description of Artificial Sequence: Synthetic peptide
  Seed: GNEKKAKLANVVRKMMTNSQ
GNEYKAILGNVGRKMMTNSQ

SEQ ID NO: 192110 - protein, 20 aa, Artificial Sequence
  Description of Artificial Sequence: Synthetic peptide
  Seed: GNEKKAKLANVVRKMMTNSQ
GNEYKAILGNVHRKMMTNSQ

SEQ ID NO: 192111 - protein, 20 aa, Artificial Sequence
  Description of Artificial Sequence: Synthetic peptide
  Seed: GNEKKAKLANVVRKMMTNSQ
GNEYKAILGNVIRKMMTNSQ

SEQ ID NO: 192112 - protein, 20 aa, Artificial Sequence
  Description of Artificial Sequence: Synthetic peptide
  Seed: GNEKKAKLANVVRKMMTNSQ
GNEYKAILGNVLRKMMTNSQ

SEQ ID NO: 192113 - protein, 20 aa, Artificial Sequence
  Description of Artificial Sequence: Synthetic peptide
  Seed: GNEKKAKLANVVRKMMTNSQ
GNEYKAILGNVMRKMMTNSQ

SEQ ID NO: 192114 - protein, 20 aa, Artificial Sequence
  Description of Artificial Sequence: Synthetic peptide
  Seed: GNEKKAKLANVVRKMMTNSQ
GNEYKAILGNVNRKMMTNSQ

SEQ ID NO: 192115 - protein, 20 aa, Artificial Sequence
  Description of Artificial Sequence: Synthetic peptide
  Seed: GNEKKAKLANVVRKMMTNSQ
GNEYKAILGNVPRKMMTNSQ

SEQ ID NO: 192116 - protein, 20 aa, Artificial Sequence
  Description of Artificial Sequence: Synthetic peptide
  Seed: GNEKKAKLANVVRKMMTNSQ
GNEYKAILGNVQRKMMTNSQ

SEQ ID NO: 192117 - protein, 20 aa, Artificial Sequence
  Description of Artificial Sequence: Synthetic peptide
  Seed: GNEKKAKLANVVRKMMTNSQ
GNEYKAILGNVSRKMMTNSQ

SEQ ID NO: 192118 - protein, 20 aa, Artificial Sequence
  Description of Artificial Sequence: Synthetic peptide
  Seed: GNEKKAKLANVVRKMMTNSQ
GNEYKAILGNVTRKMMTNSQ

SEQ ID NO: 192119 - protein, 20 aa, Artificial Sequence
  Description of Artificial Sequence: Synthetic peptide
  Seed: GNEKKAKLANVVRKMMTNSQ
GNEYKAILGNVVRKMMTNSQ

SEQ ID NO: 192120 - protein, 20 aa, Artificial Sequence
  Description of Artificial Sequence: Synthetic peptide
  Seed: GNEKKAKLANVVRKMMTNSQ
GNEYKAILGNVYRKMMTNSQ

SEQ ID NO: 192121 - protein, 20 aa, Artificial Sequence
  Description of Artificial Sequence: Synthetic peptide
  Seed: GNEKKAKLANVVRKMMTNSQ
GNEYKAILHNVARKMMTNSQ

SEQ ID NO: 192122 - protein, 20 aa, Artificial Sequence
  Description of Artificial Sequence: Synthetic peptide
  Seed: GNEKKAKLANVVRKMMTNSQ
GNEYKAILHNVVRKMMTNSQ

SEQ ID NO: 192123 - protein, 20 aa, Artificial Sequence
  Description of Artificial Sequence: Synthetic peptide
  Seed: GNEKKAKLANVVRKMMTNSQ
GNEYKAILINVARKMMTNSQ

SEQ ID NO: 192124 - protein, 20 aa, Artificial Sequence
  Description of Artificial Sequence: Synthetic peptide
  Seed: GNEKKAKLANVVRKMMTNSQ
GNEYKAILINVDRKMMTNSQ

SEQ ID NO: 192125 - protein, 20 aa, Artificial Sequence
  Description of Artificial Sequence: Synthetic peptide
  Seed: GNEKKAKLANVVRKMMTNSQ
GNEYKAILINVERKMMTNSQ

SEQ ID NO: 192126 - protein, 20 aa, Artificial Sequence
  Description of Artificial Sequence: Synthetic peptide
  Seed: GNEKKAKLANVVRKMMTNSQ
GNEYKAILINVGRKMMTNSQ

SEQ ID NO: 192127 - protein, 20 aa, Artificial Sequence
  Description of Artificial Sequence: Synthetic peptide
  Seed: GNEKKAKLANVVRKMMTNSQ
GNEYKAILINVHRKMMTNSQ

SEQ ID NO: 192128 - protein, 20 aa, Artificial Sequence
  Description of Artificial Sequence: Synthetic peptide
  Seed: GNEKKAKLANVVRKMMTNSQ
GNEYKAILINVIRKMMTNSQ

SEQ ID NO: 192129 - protein, 20 aa, Artificial Sequence
  Description of Artificial Sequence: Synthetic peptide
  Seed: GNEKKAKLANVVRKMMTNSQ
GNEYKAILINVLRKMMTNSQ

SEQ ID NO: 192130 - protein, 20 aa, Artificial Sequence
  Description of Artificial Sequence: Synthetic peptide
  Seed: GNEKKAKLANVVRKMMTNSQ
GNEYKAILINVMRKMMTNSQ

SEQ ID NO: 192131 - protein, 20 aa, Artificial Sequence
  Description of Artificial Sequence: Synthetic peptide
  Seed: GNEKKAKLANVVRKMMTNSQ
GNEYKAILINVNRKMMTNSQ

SEQ ID NO: 192132 - protein, 20 aa, Artificial Sequence
  Description of Artificial Sequence: Synthetic peptide
  Seed: GNEKKAKLANVVRKMMTNSQ
GNEYKAILINVPRKMMTNSQ

SEQ ID NO: 192133 - protein, 20 aa, Artificial Sequence
  Description of Artificial Sequence: Synthetic peptide
  Seed: GNEKKAKLANVVRKMMTNSQ
GNEYKAILINVQRKMMTNSQ

SEQ ID NO: 192134 - protein, 20 aa, Artificial Sequence
  Description of Artificial Sequence: Synthetic peptide
  Seed: GNEKKAKLANVVRKMMTNSQ
GNEYKAILINVSRKMMTNSQ

SEQ ID NO: 192135 - protein, 20 aa, Artificial Sequence
  Description of Artificial Sequence: Synthetic peptide
  Seed: GNEKKAKLANVVRKMMTNSQ
GNEYKAILINVTRKMMTNSQ

SEQ ID NO: 192136 - protein, 20 aa, Artificial Sequence
  Description of Artificial Sequence: Synthetic peptide
  Seed: GNEKKAKLANVVRKMMTNSQ
GNEYKAILINVVRKMMTNSQ

SEQ ID NO: 192137 - protein, 20 aa, Artificial Sequence
  Description of Artificial Sequence: Synthetic peptide
  Seed: GNEKKAKLANVVRKMMTNSQ
GNEYKAILLNVARKMMTNSQ

SEQ ID NO: 192138 - protein, 20 aa, Artificial Sequence
  Description of Artificial Sequence: Synthetic peptide
  Seed: GNEKKAKLANVVRKMMTNSQ
GNEYKAILLNVGRKMMTNSQ

SEQ ID NO: 192139 - protein, 20 aa, Artificial Sequence
  Description of Artificial Sequence: Synthetic peptide
  Seed: GNEKKAKLANVVRKMMTNSQ
GNEYKAILLNVHRKMMTNSQ

SEQ ID NO: 192140 - protein, 20 aa, Artificial Sequence
  Description of Artificial Sequence: Synthetic peptide
  Seed: GNEKKAKLANVVRKMMTNSQ
GNEYKAILLNVIRKMMTNSQ

SEQ ID NO: 192141 - protein, 20 aa, Artificial Sequence
  Description of Artificial Sequence: Synthetic peptide
  Seed: GNEKKAKLANVVRKMMTNSQ
GNEYKAILLNVLRKMMTNSQ

SEQ ID NO: 192142 - protein, 20 aa, Artificial Sequence
  Description of Artificial Sequence: Synthetic peptide
  Seed: GNEKKAKLANVVRKMMTNSQ
GNEYKAILLNVMRKMMTNSQ

SEQ ID NO: 192143 - protein, 20 aa, Artificial Sequence
  Description of Artificial Sequence: Synthetic peptide
  Seed: GNEKKAKLANVVRKMMTNSQ
GNEYKAILLNVNRKMMTNSQ

SEQ ID NO: 192144 - protein, 20 aa, Artificial Sequence
  Description of Artificial Sequence: Synthetic peptide
  Seed: GNEKKAKLANVVRKMMTNSQ
GNEYKAILLNVSRKMMTNSQ

SEQ ID NO: 192145 - protein, 20 aa, Artificial Sequence
  Description of Artificial Sequence: Synthetic peptide
  Seed: GNEKKAKLANVVRKMMTNSQ
GNEYKAILLNVTRKMMTNSQ

SEQ ID NO: 192146 - protein, 20 aa, Artificial Sequence
  Description of Artificial Sequence: Synthetic peptide
  Seed: GNEKKAKLANVVRKMMTNSQ
GNEYKAILLNVVRKMMTNSQ

SEQ ID NO: 192147 - protein, 20 aa, Artificial Sequence
  Description of Artificial Sequence: Synthetic peptide
  Seed: GNEKKAKLANVVRKMMTNSQ
GNEYKAILLNVYRKMMTNSQ

SEQ ID NO: 192148 - protein, 20 aa, Artificial Sequence
  Description of Artificial Sequence: Synthetic peptide
  Seed: GNEKKAKLANVVRKMMTNSQ
GNEYKAILMNVARKMMTNSQ

SEQ ID NO: 192149 - protein, 20 aa, Artificial Sequence
  Description of Artificial Sequence: Synthetic peptide
  Seed: GNEKKAKLANVVRKMMTNSQ
GNEYKAILMNVGRKMMTNSQ

SEQ ID NO: 192150 - protein, 20 aa, Artificial Sequence
  Description of Artificial Sequence: Synthetic peptide
  Seed: GNEKKAKLANVVRKMMTNSQ
GNEYKAILMNVHRKMMTNSQ

SEQ ID NO: 192151 - protein, 20 aa, Artificial Sequence
  Description of Artificial Sequence: Synthetic peptide
  Seed: GNEKKAKLANVVRKMMTNSQ
GNEYKAILMNVIRKMMTNSQ

SEQ ID NO: 192152 - protein, 20 aa, Artificial Sequence
  Description of Artificial Sequence: Synthetic peptide
  Seed: GNEKKAKLANVVRKMMTNSQ
GNEYKAILMNVLRKMMTNSQ

SEQ ID NO: 192153 - protein, 20 aa, Artificial Sequence
  Description of Artificial Sequence: Synthetic peptide
  Seed: GNEKKAKLANVVRKMMTNSQ
GNEYKAILMNVMRKMMTNSQ

SEQ ID NO: 192154 - protein, 20 aa, Artificial Sequence
  Description of Artificial Sequence: Synthetic peptide
  Seed: GNEKKAKLANVVRKMMTNSQ
GNEYKAILMNVNRKMMTNSQ

SEQ ID NO: 192155 - protein, 20 aa, Artificial Sequence
  Description of Artificial Sequence: Synthetic peptide
  Seed: GNEKKAKLANVVRKMMTNSQ
GNEYKAILMNVSRKMMTNSQ

SEQ ID NO: 192156 - protein, 20 aa, Artificial Sequence
  Description of Artificial Sequence: Synthetic peptide
  Seed: GNEKKAKLANVVRKMMTNSQ
GNEYKAILMNVTRKMMTNSQ

SEQ ID NO: 192157 - protein, 20 aa, Artificial Sequence
  Description of Artificial Sequence: Synthetic peptide
  Seed: GNEKKAKLANVVRKMMTNSQ
GNEYKAILMNVVRKMMTNSQ

SEQ ID NO: 192158 - protein, 20 aa, Artificial Sequence
  Description of Artificial Sequence: Synthetic peptide
  Seed: GNEKKAKLANVVRKMMTNSQ
GNEYKAILNNVARKMMTNSQ

SEQ ID NO: 192159 - protein, 20 aa, Artificial Sequence
  Description of Artificial Sequence: Synthetic peptide
  Seed: GNEKKAKLANVVRKMMTNSQ
GNEYKAILNNVFRKMMTNSQ

SEQ ID NO: 192160 - protein, 20 aa, Artificial Sequence
  Description of Artificial Sequence: Synthetic peptide
  Seed: GNEKKAKLANVVRKMMTNSQ
GNEYKAILNNVGRKMMTNSQ

SEQ ID NO: 192161 - protein, 20 aa, Artificial Sequence
  Description of Artificial Sequence: Synthetic peptide
  Seed: GNEKKAKLANVVRKMMTNSQ
GNEYKAILNNVHRKMMTNSQ

SEQ ID NO: 192162 - protein, 20 aa, Artificial Sequence
  Description of Artificial Sequence: Synthetic peptide
  Seed: GNEKKAKLANVVRKMMTNSQ
GNEYKAILNNVIRKMMTNSQ

SEQ ID NO: 192163 - protein, 20 aa, Artificial Sequence
  Description of Artificial Sequence: Synthetic peptide
  Seed: GNEKKAKLANVVRKMMTNSQ
GNEYKAILNNVLRKMMTNSQ

SEQ ID NO: 192164 - protein, 20 aa, Artificial Sequence
  Description of Artificial Sequence: Synthetic peptide
  Seed: GNEKKAKLANVVRKMMTNSQ
GNEYKAILNNVMRKMMTNSQ

SEQ ID NO: 192165 - protein, 20 aa, Artificial Sequence
  Description of Artificial Sequence: Synthetic peptide
  Seed: GNEKKAKLANVVRKMMTNSQ
GNEYKAILNNVNRKMMTNSQ

SEQ ID NO: 192166 - protein, 20 aa, Artificial Sequence
  Description of Artificial Sequence: Synthetic peptide
  Seed: GNEKKAKLANVVRKMMTNSQ
GNEYKAILNNVPRKMMTNSQ

SEQ ID NO: 192167 - protein, 20 aa, Artificial Sequence
  Description of Artificial Sequence: Synthetic peptide
  Seed: GNEKKAKLANVVRKMMTNSQ
GNEYKAILNNVQRKMMTNSQ

SEQ ID NO: 192168 - protein, 20 aa, Artificial Sequence
  Description of Artificial Sequence: Synthetic peptide
  Seed: GNEKKAKLANVVRKMMTNSQ
GNEYKAILNNVSRKMMTNSQ

SEQ ID NO: 192169 - protein, 20 aa, Artificial Sequence
  Description of Artificial Sequence: Synthetic peptide
  Seed: GNEKKAKLANVVRKMMTNSQ
GNEYKAILNNVTRKMMTNSQ

SEQ ID NO: 192170 - protein, 20 aa, Artificial Sequence
  Description of Artificial Sequence: Synthetic peptide
  Seed: GNEKKAKLANVVRKMMTNSQ
GNEYKAILNNVVRKMMTNSQ

SEQ ID NO: 192171 - protein, 20 aa, Artificial Sequence
  Description of Artificial Sequence: Synthetic peptide
  Seed: GNEKKAKLANVVRKMMTNSQ
GNEYKAILPNVARKMMTNSQ

SEQ ID NO: 192172 - protein, 20 aa, Artificial Sequence
  Description of Artificial Sequence: Synthetic peptide
  Seed: GNEKKAKLANVVRKMMTNSQ
GNEYKAILPNVCRKMMTNSQ

SEQ ID NO: 192173 - protein, 20 aa, Artificial Sequence
  Description of Artificial Sequence: Synthetic peptide
  Seed: GNEKKAKLANVVRKMMTNSQ
GNEYKAILPNVDRKMMTNSQ

SEQ ID NO: 192174 - protein, 20 aa, Artificial Sequence
  Description of Artificial Sequence: Synthetic peptide
  Seed: GNEKKAKLANVVRKMMTNSQ
GNEYKAILPNVERKMMTNSQ

SEQ ID NO: 192175 - protein, 20 aa, Artificial Sequence
  Description of Artificial Sequence: Synthetic peptide
  Seed: GNEKKAKLANVVRKMMTNSQ
GNEYKAILPNVFRKMMTNSQ

SEQ ID NO: 192176 - protein, 20 aa, Artificial Sequence
  Description of Artificial Sequence: Synthetic peptide
  Seed: GNEKKAKLANVVRKMMTNSQ
GNEYKAILPNVGRKMMTNSQ

SEQ ID NO: 192177 - protein, 20 aa, Artificial Sequence
  Description of Artificial Sequence: Synthetic peptide
  Seed: GNEKKAKLANVVRKMMTNSQ
GNEYKAILPNVHRKMMTNSQ

SEQ ID NO: 192178 - protein, 20 aa, Artificial Sequence
  Description of Artificial Sequence: Synthetic peptide
  Seed: GNEKKAKLANVVRKMMTNSQ
GNEYKAILPNVIRKMMTNSQ

SEQ ID NO: 192179 - protein, 20 aa, Artificial Sequence
  Description of Artificial Sequence: Synthetic peptide
  Seed: GNEKKAKLANVVRKMMTNSQ
GNEYKAILPNVLRKMMTNSQ

SEQ ID NO: 192180 - protein, 20 aa, Artificial Sequence
  Description of Artificial Sequence: Synthetic peptide
  Seed: GNEKKAKLANVVRKMMTNSQ
GNEYKAILPNVMRKMMTNSQ

SEQ ID NO: 192181 - protein, 20 aa, Artificial Sequence
  Description of Artificial Sequence: Synthetic peptide
  Seed: GNEKKAKLANVVRKMMTNSQ
GNEYKAILPNVNRKMMTNSQ

SEQ ID NO: 192182 - protein, 20 aa, Artificial Sequence
  Description of Artificial Sequence: Synthetic peptide
  Seed: GNEKKAKLANVVRKMMTNSQ
GNEYKAILPNVPRKMMTNSQ

SEQ ID NO: 192183 - protein, 20 aa, Artificial Sequence
  Description of Artificial Sequence: Synthetic peptide
  Seed: GNEKKAKLANVVRKMMTNSQ
GNEYKAILPNVQRKMMTNSQ

SEQ ID NO: 192184 - protein, 20 aa, Artificial Sequence
  Description of Artificial Sequence: Synthetic peptide
  Seed: GNEKKAKLANVVRKMMTNSQ
GNEYKAILPNVSRKMMTNSQ

SEQ ID NO: 192185 - protein, 20 aa, Artificial Sequence
  Description of Artificial Sequence: Synthetic peptide
  Seed: GNEKKAKLANVVRKMMTNSQ
GNEYKAILPNVTRKMMTNSQ

SEQ ID NO: 192186 - protein, 20 aa, Artificial Sequence
  Description of Artificial Sequence: Synthetic peptide
  Seed: GNEKKAKLANVVRKMMTNSQ
GNEYKAILPNVVRKMMTNSQ

SEQ ID NO: 192187 - protein, 20 aa, Artificial Sequence
  Description of Artificial Sequence: Synthetic peptide
  Seed: GNEKKAKLANVVRKMMTNSQ
GNEYKAILPNVWRKMMTNSQ

SEQ ID NO: 192188 - protein, 20 aa, Artificial Sequence
  Description of Artificial Sequence: Synthetic peptide
  Seed: GNEKKAKLANVVRKMMTNSQ
GNEYKAILPNVYRKMMTNSQ

SEQ ID NO: 192189 - protein, 20 aa, Artificial Sequence
  Description of Artificial Sequence: Synthetic peptide
  Seed: GNEKKAKLANVVRKMMTNSQ
GNEYKAILQNVARKMMTNSQ

SEQ ID NO: 192190 - protein, 20 aa, Artificial Sequence
  Description of Artificial Sequence: Synthetic peptide
  Seed: GNEKKAKLANVVRKMMTNSQ
GNEYKAILQNVNRKMMTNSQ

SEQ ID NO: 192191 - protein, 20 aa, Artificial Sequence
  Description of Artificial Sequence: Synthetic peptide
  Seed: GNEKKAKLANVVRKMMTNSQ
GNEYKAILQNVSRKMMTNSQ

SEQ ID NO: 192192 - protein, 20 aa, Artificial Sequence
  Description of Artificial Sequence: Synthetic peptide
  Seed: GNEKKAKLANVVRKMMTNSQ
GNEYKAILQNVVRKMMTNSQ

SEQ ID NO: 192193 - protein, 20 aa, Artificial Sequence
  Description of Artificial Sequence: Synthetic peptide
  Seed: GNEKKAKLANVVRKMMTNSQ
GNEYKAILSNVARKMMTNSQ

SEQ ID NO: 192194 - protein, 20 aa, Artificial Sequence
  Description of Artificial Sequence: Synthetic peptide
  Seed: GNEKKAKLANVVRKMMTNSQ
GNEYKAILSNVCRKMMTNSQ

SEQ ID NO: 192195 - protein, 20 aa, Artificial Sequence
  Description of Artificial Sequence: Synthetic peptide
  Seed: GNEKKAKLANVVRKMMTNSQ
GNEYKAILSNVDRKMMTNSQ

SEQ ID NO: 192196 - protein, 20 aa, Artificial Sequence
  Description of Artificial Sequence: Synthetic peptide
  Seed: GNEKKAKLANVVRKMMTNSQ
GNEYKAILSNVERKMMTNSQ

SEQ ID NO: 192197 - protein, 20 aa, Artificial Sequence
  Description of Artificial Sequence: Synthetic peptide
  Seed: GNEKKAKLANVVRKMMTNSQ
GNEYKAILSNVFRKMMTNSQ

SEQ ID NO: 192198 - protein, 20 aa, Artificial Sequence
  Description of Artificial Sequence: Synthetic peptide
  Seed: GNEKKAKLANVVRKMMTNSQ
GNEYKAILSNVGRKMMTNSQ

SEQ ID NO: 192199 - protein, 20 aa, Artificial Sequence
  Description of Artificial Sequence: Synthetic peptide
  Seed: GNEKKAKLANVVRKMMTNSQ
GNEYKAILSNVHRKMMTNSQ

SEQ ID NO: 192200 - protein, 20 aa, Artificial Sequence
  Description of Artificial Sequence: Synthetic peptide
  Seed: GNEKKAKLANVVRKMMTNSQ
GNEYKAILSNVIRKMMTNSQ

SEQ ID NO: 192201 - protein, 20 aa, Artificial Sequence
  Description of Artificial Sequence: Synthetic peptide
  Seed: GNEKKAKLANVVRKMMTNSQ
GNEYKAILSNVLRKMMTNSQ

SEQ ID NO: 192202 - protein, 20 aa, Artificial Sequence
  Description of Artificial Sequence: Synthetic peptide
  Seed: GNEKKAKLANVVRKMMTNSQ
GNEYKAILSNVMRKMMTNSQ

SEQ ID NO: 192203 - protein, 20 aa, Artificial Sequence
  Description of Artificial Sequence: Synthetic peptide
  Seed: GNEKKAKLANVVRKMMTNSQ
GNEYKAILSNVNRKMMTNSQ

SEQ ID NO: 192204 - protein, 20 aa, Artificial Sequence
  Description of Artificial Sequence: Synthetic peptide
  Seed: GNEKKAKLANVVRKMMTNSQ
GNEYKAILSNVPRKMMTNSQ

SEQ ID NO: 192205 - protein, 20 aa, Artificial Sequence
  Description of Artificial Sequence: Synthetic peptide
  Seed: GNEKKAKLANVVRKMMTNSQ
GNEYKAILSNVQRKMMTNSQ

SEQ ID NO: 192206 - protein, 20 aa, Artificial Sequence
  Description of Artificial Sequence: Synthetic peptide
  Seed: GNEKKAKLANVVRKMMTNSQ
GNEYKAILSNVSRKMMTNSQ

SEQ ID NO: 192207 - protein, 20 aa, Artificial Sequence
  Description of Artificial Sequence: Synthetic peptide
  Seed: GNEKKAKLANVVRKMMTNSQ
GNEYKAILSNVTRKMMTNSQ

SEQ ID NO: 192208 - protein, 20 aa, Artificial Sequence
  Description of Artificial Sequence: Synthetic peptide
  Seed: GNEKKAKLANVVRKMMTNSQ
GNEYKAILSNVVRKMMTNSQ

SEQ ID NO: 192209 - protein, 20 aa, Artificial Sequence
  Description of Artificial Sequence: Synthetic peptide
  Seed: GNEKKAKLANVVRKMMTNSQ
GNEYKAILSNVYRKMMTNSQ

SEQ ID NO: 192210 - protein, 20 aa, Artificial Sequence
  Description of Artificial Sequence: Synthetic peptide
  Seed: GNEKKAKLANVVRKMMTNSQ
GNEYKAILTNVARKMMTNSQ

SEQ ID NO: 192211 - protein, 20 aa, Artificial Sequence
  Description of Artificial Sequence: Synthetic peptide
  Seed: GNEKKAKLANVVRKMMTNSQ
GNEYKAILTNVCRKMMTNSQ

SEQ ID NO: 192212 - protein, 20 aa, Artificial Sequence
  Description of Artificial Sequence: Synthetic peptide
  Seed: GNEKKAKLANVVRKMMTNSQ
GNEYKAILTNVDRKMMTNSQ

SEQ ID NO: 192213 - protein, 20 aa, Artificial Sequence
  Description of Artificial Sequence: Synthetic peptide
  Seed: GNEKKAKLANVVRKMMTNSQ
GNEYKAILTNVERKMMTNSQ

SEQ ID NO: 192214 - protein, 20 aa, Artificial Sequence
  Description of Artificial Sequence: Synthetic peptide
  Seed: GNEKKAKLANVVRKMMTNSQ
GNEYKAILTNVFRKMMTNSQ

SEQ ID NO: 192215 - protein, 20 aa, Artificial Sequence
  Description of Artificial Sequence: Synthetic peptide
  Seed: GNEKKAKLANVVRKMMTNSQ
GNEYKAILTNVGRKMMTNSQ

SEQ ID NO: 192216 - protein, 20 aa, Artificial Sequence
  Description of Artificial Sequence: Synthetic peptide
  Seed: GNEKKAKLANVVRKMMTNSQ
GNEYKAILTNVHRKMMTNSQ

SEQ ID NO: 192217 - protein, 20 aa, Artificial Sequence
  Description of Artificial Sequence: Synthetic peptide
  Seed: GNEKKAKLANVVRKMMTNSQ
GNEYKAILTNVIRKMMTNSQ

SEQ ID NO: 192218 - protein, 20 aa, Artificial Sequence
  Description of Artificial Sequence: Synthetic peptide
  Seed: GNEKKAKLANVVRKMMTNSQ
GNEYKAILTNVLRKMMTNSQ

SEQ ID NO: 192219 - protein, 20 aa, Artificial Sequence
  Description of Artificial Sequence: Synthetic peptide
  Seed: GNEKKAKLANVVRKMMTNSQ
GNEYKAILTNVMRKMMTNSQ

SEQ ID NO: 192220 - protein, 20 aa, Artificial Sequence
  Description of Artificial Sequence: Synthetic peptide
  Seed: GNEKKAKLANVVRKMMTNSQ
GNEYKAILTNVNRKMMTNSQ

SEQ ID NO: 192221 - protein, 20 aa, Artificial Sequence
  Description of Artificial Sequence: Synthetic peptide
  Seed: GNEKKAKLANVVRKMMTNSQ
GNEYKAILTNVPRKMMTNSQ

SEQ ID NO: 192222 - protein, 20 aa, Artificial Sequence
  Description of Artificial Sequence: Synthetic peptide
  Seed: GNEKKAKLANVVRKMMTNSQ
GNEYKAILTNVQRKMMTNSQ

SEQ ID NO: 192223 - protein, 20 aa, Artificial Sequence
  Description of Artificial Sequence: Synthetic peptide
  Seed: GNEKKAKLANVVRKMMTNSQ
GNEYKAILTNVSRKMMTNSQ

SEQ ID NO: 192224 - protein, 20 aa, Artificial Sequence
  Description of Artificial Sequence: Synthetic peptide
  Seed: GNEKKAKLANVVRKMMTNSQ
GNEYKAILTNVTRKMMTNSQ

SEQ ID NO: 192225 - protein, 20 aa, Artificial Sequence
  Description of Artificial Sequence: Synthetic peptide
  Seed: GNEKKAKLANVVRKMMTNSQ
GNEYKAILTNVVRKMMTNSQ

SEQ ID NO: 192226 - protein, 20 aa, Artificial Sequence
  Description of Artificial Sequence: Synthetic peptide
  Seed: GNEKKAKLANVVRKMMTNSQ
GNEYKAILTNVYRKMMTNSQ

SEQ ID NO: 192227 - protein, 20 aa, Artificial Sequence
  Description of Artificial Sequence: Synthetic peptide
  Seed: GNEKKAKLANVVRKMMTNSQ
GNEYKAILVNVARKMMTNSQ

SEQ ID NO: 192228 - protein, 20 aa, Artificial Sequence
  Description of Artificial Sequence: Synthetic peptide
  Seed: GNEKKAKLANVVRKMMTNSQ
GNEYKAILVNVDRKMMTNSQ

SEQ ID NO: 192229 - protein, 20 aa, Artificial Sequence
  Description of Artificial Sequence: Synthetic peptide
  Seed: GNEKKAKLANVVRKMMTNSQ
GNEYKAILVNVERKMMTNSQ

SEQ ID NO: 192230 - protein, 20 aa, Artificial Sequence
  Description of Artificial Sequence: Synthetic peptide
  Seed: GNEKKAKLANVVRKMMTNSQ
GNEYKAILVNVFRKMMTNSQ

SEQ ID NO: 192231 - protein, 20 aa, Artificial Sequence
  Description of Artificial Sequence: Synthetic peptide
  Seed: GNEKKAKLANVVRKMMTNSQ
GNEYKAILVNVGRKMMTNSQ

SEQ ID NO: 192232 - protein, 20 aa, Artificial Sequence
  Description of Artificial Sequence: Synthetic peptide
  Seed: GNEKKAKLANVVRKMMTNSQ
GNEYKAILVNVHRKMMTNSQ

SEQ ID NO: 192233 - protein, 20 aa, Artificial Sequence
  Description of Artificial Sequence: Synthetic peptide
  Seed: GNEKKAKLANVVRKMMTNSQ
GNEYKAILVNVIRKMMTNSQ

SEQ ID NO: 192234 - protein, 20 aa, Artificial Sequence
  Description of Artificial Sequence: Synthetic peptide
  Seed: GNEKKAKLANVVRKMMTNSQ
GNEYKAILVNVKRKMMTNSQ

SEQ ID NO: 192235 - protein, 20 aa, Artificial Sequence
  Description of Artificial Sequence: Synthetic peptide
  Seed: GNEKKAKLANVVRKMMTNSQ
GNEYKAILVNVLRKMMTNSQ

SEQ ID NO: 192236 - protein, 20 aa, Artificial Sequence
  Description of Artificial Sequence: Synthetic peptide
  Seed: GNEKKAKLANVVRKMMTNSQ
GNEYKAILVNVMRKMMTNSQ

SEQ ID NO: 192237 - protein, 20 aa, Artificial Sequence
  Description of Artificial Sequence: Synthetic peptide
  Seed: GNEKKAKLANVVRKMMTNSQ
GNEYKAILVNVNRKMMTNSQ

SEQ ID NO: 192238 - protein, 20 aa, Artificial Sequence
  Description of Artificial Sequence: Synthetic peptide
  Seed: GNEKKAKLANVVRKMMTNSQ
GNEYKAILVNVPRKMMTNSQ

SEQ ID NO: 192239 - protein, 20 aa, Artificial Sequence
  Description of Artificial Sequence: Synthetic peptide
  Seed: GNEKKAKLANVVRKMMTNSQ
GNEYKAILVNVQRKMMTNSQ

SEQ ID NO: 192240 - protein, 20 aa, Artificial Sequence
  Description of Artificial Sequence: Synthetic peptide
  Seed: GNEKKAKLANVVRKMMTNSQ
GNEYKAILVNVSRKMMTNSQ

SEQ ID NO: 192241 - protein, 20 aa, Artificial Sequence
  Description of Artificial Sequence: Synthetic peptide
  Seed: GNEKKAKLANVVRKMMTNSQ
GNEYKAILVNVTRKMMTNSQ

SEQ ID NO: 192242 - protein, 20 aa, Artificial Sequence
  Description of Artificial Sequence: Synthetic peptide
  Seed: GNEKKAKLANVVRKMMTNSQ
GNEYKAILVNVVRKMMTNSQ

SEQ ID NO: 192243 - protein, 20 aa, Artificial Sequence
  Description of Artificial Sequence: Synthetic peptide
  Seed: GNEKKAKLANVVRKMMTNSQ
GNEYKAILVNVYRKMMTNSQ

SEQ ID NO: 192244 - protein, 20 aa, Artificial Sequence
  Description of Artificial Sequence: Synthetic peptide
  Seed: GNEKKAKLANVVRKMMTNSQ
GNEYKAILWNVARKMMTNSQ

SEQ ID NO: 192245 - protein, 20 aa, Artificial Sequence
  Description of Artificial Sequence: Synthetic peptide
  Seed: GNEKKAKLANVVRKMMTNSQ
GNEYKAILWNVIRKMMTNSQ

SEQ ID NO: 192246 - protein, 20 aa, Artificial Sequence
  Description of Artificial Sequence: Synthetic peptide
  Seed: GNEKKAKLANVVRKMMTNSQ
GNEYKAILWNVLRKMMTNSQ

SEQ ID NO: 192247 - protein, 20 aa, Artificial Sequence
  Description of Artificial Sequence: Synthetic peptide
  Seed: GNEKKAKLANVVRKMMTNSQ
GNEYKAILWNVMRKMMTNSQ

SEQ ID NO: 192248 - protein, 20 aa, Artificial Sequence
  Description of Artificial Sequence: Synthetic peptide
  Seed: GNEKKAKLANVVRKMMTNSQ
GNEYKAILWNVVRKMMTNSQ

SEQ ID NO: 192249 - protein, 20 aa, Artificial Sequence
  Description of Artificial Sequence: Synthetic peptide
  Seed: GNEKKAKLANVVRKMMTNSQ
GNEYKAILYNVARKMMTNSQ

SEQ ID NO: 192250 - protein, 20 aa, Artificial Sequence
  Description of Artificial Sequence: Synthetic peptide
  Seed: GNEKKAKLANVVRKMMTNSQ
GNEYKAILYNVIRKMMTNSQ

SEQ ID NO: 192251 - protein, 20 aa, Artificial Sequence
  Description of Artificial Sequence: Synthetic peptide
  Seed: GNEKKAKLANVVRKMMTNSQ
GNEYKAILYNVLRKMMTNSQ

SEQ ID NO: 192252 - protein, 20 aa, Artificial Sequence
  Description of Artificial Sequence: Synthetic peptide
  Seed: GNEKKAKLANVVRKMMTNSQ
GNEYKAILYNVMRKMMTNSQ

SEQ ID NO: 192253 - protein, 20 aa, Artificial Sequence
  Description of Artificial Sequence: Synthetic peptide
  Seed: GNEKKAKLANVVRKMMTNSQ
GNEYKAILYNVVRKMMTNSQ

SEQ ID NO: 192254 - protein, 20 aa, Artificial Sequence
  Description of Artificial Sequence: Synthetic peptide
  Seed: GNEKKAKLANVVRKMMTNSQ
GNEYKAKLANVIRKMMTNSQ

SEQ ID NO: 192255 - protein, 20 aa, Artificial Sequence
  Description of Artificial Sequence: Synthetic peptide
  Seed: GNEKKAKLANVVRKMMTNSQ
GNEYKAKLANVLRKMMTNSQ

SEQ ID NO: 192256 - protein, 20 aa, Artificial Sequence
  Description of Artificial Sequence: Synthetic peptide
  Seed: GNEKKAKLANVVRKMMTNSQ
GNEYKAKLANVVRKMMTNSQ

SEQ ID NO: 192257 - protein, 20 aa, Artificial Sequence
  Description of Artificial Sequence: Synthetic peptide
  Seed: GNEKKAKLANVVRKMMTNSQ
GNEYKAKLFNVARKMMTNSQ

SEQ ID NO: 192258 - protein, 20 aa, Artificial Sequence
  Description of Artificial Sequence: Synthetic peptide
  Seed: GNEKKAKLANVVRKMMTNSQ
GNEYKAKLFNVFRKMMTNSQ

SEQ ID NO: 192259 - protein, 20 aa, Artificial Sequence
  Description of Artificial Sequence: Synthetic peptide
  Seed: GNEKKAKLANVVRKMMTNSQ
GNEYKAKLFNVIRKMMTNSQ

SEQ ID NO: 192260 - protein, 20 aa, Artificial Sequence
  Description of Artificial Sequence: Synthetic peptide
  Seed: GNEKKAKLANVVRKMMTNSQ
GNEYKAKLFNVLRKMMTNSQ

SEQ ID NO: 192261 - protein, 20 aa, Artificial Sequence
  Description of Artificial Sequence: Synthetic peptide
  Seed: GNEKKAKLANVVRKMMTNSQ
GNEYKAKLFNVMRKMMTNSQ

SEQ ID NO: 192262 - protein, 20 aa, Artificial Sequence
  Description of Artificial Sequence: Synthetic peptide
  Seed: GNEKKAKLANVVRKMMTNSQ
GNEYKAKLFNVTRKMMTNSQ

SEQ ID NO: 192263 - protein, 20 aa, Artificial Sequence
  Description of Artificial Sequence: Synthetic peptide
  Seed: GNEKKAKLANVVRKMMTNSQ
GNEYKAKLFNVVRKMMTNSQ

SEQ ID NO: 192264 - protein, 20 aa, Artificial Sequence
  Description of Artificial Sequence: Synthetic peptide
  Seed: GNEKKAKLANVVRKMMTNSQ
GNEYKAKLSNVLRKMMTNSQ

SEQ ID NO: 192265 - protein, 20 aa, Artificial Sequence
  Description of Artificial Sequence: Synthetic peptide
  Seed: GNEKKAKLANVVRKMMTNSQ
GNEYKAKLSNVVRKMMTNSQ

SEQ ID NO: 192266 - protein, 20 aa, Artificial Sequence
  Description of Artificial Sequence: Synthetic peptide
  Seed: GNEKKAKLANVVRKMMTNSQ
GNEYKAKLYNVFRKMMTNSQ

SEQ ID NO: 192267 - protein, 20 aa, Artificial Sequence
  Description of Artificial Sequence: Synthetic peptide
  Seed: GNEKKAKLANVVRKMMTNSQ
GNEYKAKLYNVIRKMMTNSQ

SEQ ID NO: 192268 - protein, 20 aa, Artificial Sequence
  Description of Artificial Sequence: Synthetic peptide
  Seed: GNEKKAKLANVVRKMMTNSQ
GNEYKAKLYNVLRKMMTNSQ

SEQ ID NO: 192269 - protein, 20 aa, Artificial Sequence
  Description of Artificial Sequence: Synthetic peptide
  Seed: GNEKKAKLANVVRKMMTNSQ
GNEYKALLANVARKMMTNSQ

SEQ ID NO: 192270 - protein, 20 aa, Artificial Sequence
  Description of Artificial Sequence: Synthetic peptide
  Seed: GNEKKAKLANVVRKMMTNSQ
GNEYKALLANVCRKMMTNSQ

SEQ ID NO: 192271 - protein, 20 aa, Artificial Sequence
  Description of Artificial Sequence: Synthetic peptide
  Seed: GNEKKAKLANVVRKMMTNSQ
GNEYKALLANVDRKMMTNSQ

SEQ ID NO: 192272 - protein, 20 aa, Artificial Sequence
  Description of Artificial Sequence: Synthetic peptide
  Seed: GNEKKAKLANVVRKMMTNSQ
GNEYKALLANVERKMMTNSQ

SEQ ID NO: 192273 - protein, 20 aa, Artificial Sequence
  Description of Artificial Sequence: Synthetic peptide
  Seed: GNEKKAKLANVVRKMMTNSQ
GNEYKALLANVFRKMMTNSQ

SEQ ID NO: 192274 - protein, 20 aa, Artificial Sequence
  Description of Artificial Sequence: Synthetic peptide
  Seed: GNEKKAKLANVVRKMMTNSQ
GNEYKALLANVGRKMMTNSQ

SEQ ID NO: 192275 - protein, 20 aa, Artificial Sequence
  Description of Artificial Sequence: Synthetic peptide
  Seed: GNEKKAKLANVVRKMMTNSQ
GNEYKALLANVHRKMMTNSQ

SEQ ID NO: 192276 - protein, 20 aa, Artificial Sequence
  Description of Artificial Sequence: Synthetic peptide
  Seed: GNEKKAKLANVVRKMMTNSQ
GNEYKALLANVIRKMMTNSQ

SEQ ID NO: 192277 - protein, 20 aa, Artificial Sequence
  Description of Artificial Sequence: Synthetic peptide
  Seed: GNEKKAKLANVVRKMMTNSQ
GNEYKALLANVKRKMMTNSQ

SEQ ID NO: 192278 - protein, 20 aa, Artificial Sequence
  Description of Artificial Sequence: Synthetic peptide
  Seed: GNEKKAKLANVVRKMMTNSQ
GNEYKALLANVLRKMMTNSQ

SEQ ID NO: 192279 - protein, 20 aa, Artificial Sequence
  Description of Artificial Sequence: Synthetic peptide
  Seed: GNEKKAKLANVVRKMMTNSQ
GNEYKALLANVMRKMMTNSQ

SEQ ID NO: 192280 - protein, 20 aa, Artificial Sequence
  Description of Artificial Sequence: Synthetic peptide
  Seed: GNEKKAKLANVVRKMMTNSQ
GNEYKALLANVNRKMMTNSQ

SEQ ID NO: 192281 - protein, 20 aa, Artificial Sequence
  Description of Artificial Sequence: Synthetic peptide
  Seed: GNEKKAKLANVVRKMMTNSQ
GNEYKALLANVPRKMMTNSQ

SEQ ID NO: 192282 - protein, 20 aa, Artificial Sequence
  Description of Artificial Sequence: Synthetic peptide
  Seed: GNEKKAKLANVVRKMMTNSQ
GNEYKALLANVQRKMMTNSQ

SEQ ID NO: 192283 - protein, 20 aa, Artificial Sequence
  Description of Artificial Sequence: Synthetic peptide
  Seed: GNEKKAKLANVVRKMMTNSQ
GNEYKALLANVRRKMMTNSQ

SEQ ID NO: 192284 - protein, 20 aa, Artificial Sequence
  Description of Artificial Sequence: Synthetic peptide
  Seed: GNEKKAKLANVVRKMMTNSQ
GNEYKALLANVSRKMMTNSQ

SEQ ID NO: 192285 - protein, 20 aa, Artificial Sequence
  Description of Artificial Sequence: Synthetic peptide
  Seed: GNEKKAKLANVVRKMMTNSQ
GNEYKALLANVTRKMMTNSQ

SEQ ID NO: 192286 - protein, 20 aa, Artificial Sequence
  Description of Artificial Sequence: Synthetic peptide
  Seed: GNEKKAKLANVVRKMMTNSQ
GNEYKALLANVVRKMMTNSQ

SEQ ID NO: 192287 - protein, 20 aa, Artificial Sequence
  Description of Artificial Sequence: Synthetic peptide
  Seed: GNEKKAKLANVVRKMMTNSQ
GNEYKALLANVWRKMMTNSQ

SEQ ID NO: 192288 - protein, 20 aa, Artificial Sequence
  Description of Artificial Sequence: Synthetic peptide
  Seed: GNEKKAKLANVVRKMMTNSQ
GNEYKALLANVYRKMMTNSQ

SEQ ID NO: 192289 - protein, 20 aa, Artificial Sequence
  Description of Artificial Sequence: Synthetic peptide
  Seed: GNEKKAKLANVVRKMMTNSQ
GNEYKALLCNVARKMMTNSQ

SEQ ID NO: 192290 - protein, 20 aa, Artificial Sequence
  Description of Artificial Sequence: Synthetic peptide
  Seed: GNEKKAKLANVVRKMMTNSQ
GNEYKALLCNVNRKMMTNSQ

SEQ ID NO: 192291 - protein, 20 aa, Artificial Sequence
  Description of Artificial Sequence: Synthetic peptide
  Seed: GNEKKAKLANVVRKMMTNSQ
GNEYKALLCNVSRKMMTNSQ

SEQ ID NO: 192292 - protein, 20 aa, Artificial Sequence
  Description of Artificial Sequence: Synthetic peptide
  Seed: GNEKKAKLANVVRKMMTNSQ
GNEYKALLDNVARKMMTNSQ

SEQ ID NO: 192293 - protein, 20 aa, Artificial Sequence
  Description of Artificial Sequence: Synthetic peptide
  Seed: GNEKKAKLANVVRKMMTNSQ
GNEYKALLDNVIRKMMTNSQ

SEQ ID NO: 192294 - protein, 20 aa, Artificial Sequence
  Description of Artificial Sequence: Synthetic peptide
  Seed: GNEKKAKLANVVRKMMTNSQ
GNEYKALLDNVLRKMMTNSQ

SEQ ID NO: 192295 - protein, 20 aa, Artificial Sequence
  Description of Artificial Sequence: Synthetic peptide
  Seed: GNEKKAKLANVVRKMMTNSQ
GNEYKALLDNVSRKMMTNSQ

SEQ ID NO: 192296 - protein, 20 aa, Artificial Sequence
  Description of Artificial Sequence: Synthetic peptide
  Seed: GNEKKAKLANVVRKMMTNSQ
GNEYKALLDNVVRKMMTNSQ

SEQ ID NO: 192297 - protein, 20 aa, Artificial Sequence
  Description of Artificial Sequence: Synthetic peptide
  Seed: GNEKKAKLANVVRKMMTNSQ
GNEYKALLENVARKMMTNSQ

SEQ ID NO: 192298 - protein, 20 aa, Artificial Sequence
  Description of Artificial Sequence: Synthetic peptide
  Seed: GNEKKAKLANVVRKMMTNSQ
GNEYKALLENVIRKMMTNSQ

SEQ ID NO: 192299 - protein, 20 aa, Artificial Sequence
  Description of Artificial Sequence: Synthetic peptide
  Seed: GNEKKAKLANVVRKMMTNSQ
GNEYKALLENVLRKMMTNSQ

SEQ ID NO: 192300 - protein, 20 aa, Artificial Sequence
  Description of Artificial Sequence: Synthetic peptide
  Seed: GNEKKAKLANVVRKMMTNSQ
GNEYKALLENVNRKMMTNSQ

SEQ ID NO: 192301 - protein, 20 aa, Artificial Sequence
  Description of Artificial Sequence: Synthetic peptide
  Seed: GNEKKAKLANVVRKMMTNSQ
GNEYKALLENVSRKMMTNSQ

SEQ ID NO: 192302 - protein, 20 aa, Artificial Sequence
  Description of Artificial Sequence: Synthetic peptide
  Seed: GNEKKAKLANVVRKMMTNSQ
GNEYKALLENVTRKMMTNSQ

SEQ ID NO: 192303 - protein, 20 aa, Artificial Sequence
  Description of Artificial Sequence: Synthetic peptide
  Seed: GNEKKAKLANVVRKMMTNSQ
GNEYKALLENVVRKMMTNSQ

SEQ ID NO: 192304 - protein, 20 aa, Artificial Sequence
  Description of Artificial Sequence: Synthetic peptide
  Seed: GNEKKAKLANVVRKMMTNSQ
GNEYKALLFNVARKMMTNSQ

SEQ ID NO: 192305 - protein, 20 aa, Artificial Sequence
  Description of Artificial Sequence: Synthetic peptide
  Seed: GNEKKAKLANVVRKMMTNSQ
GNEYKALLFNVDRKMMTNSQ

SEQ ID NO: 192306 - protein, 20 aa, Artificial Sequence
  Description of Artificial Sequence: Synthetic peptide
  Seed: GNEKKAKLANVVRKMMTNSQ
GNEYKALLFNVERKMMTNSQ

SEQ ID NO: 192307 - protein, 20 aa, Artificial Sequence
  Description of Artificial Sequence: Synthetic peptide
  Seed: GNEKKAKLANVVRKMMTNSQ
GNEYKALLFNVFRKMMTNSQ

SEQ ID NO: 192308 - protein, 20 aa, Artificial Sequence
  Description of Artificial Sequence: Synthetic peptide
  Seed: GNEKKAKLANVVRKMMTNSQ
GNEYKALLFNVIRKMMTNSQ

SEQ ID NO: 192309 - protein, 20 aa, Artificial Sequence
  Description of Artificial Sequence: Synthetic peptide
  Seed: GNEKKAKLANVVRKMMTNSQ
GNEYKALLFNVLRKMMTNSQ

SEQ ID NO: 192310 - protein, 20 aa, Artificial Sequence
  Description of Artificial Sequence: Synthetic peptide
  Seed: GNEKKAKLANVVRKMMTNSQ
GNEYKALLFNVMRKMMTNSQ

SEQ ID NO: 192311 - protein, 20 aa, Artificial Sequence
  Description of Artificial Sequence: Synthetic peptide
  Seed: GNEKKAKLANVVRKMMTNSQ
GNEYKALLFNVNRKMMTNSQ

SEQ ID NO: 192312 - protein, 20 aa, Artificial Sequence
  Description of Artificial Sequence: Synthetic peptide
  Seed: GNEKKAKLANVVRKMMTNSQ
GNEYKALLFNVPRKMMTNSQ

SEQ ID NO: 192313 - protein, 20 aa, Artificial Sequence
  Description of Artificial Sequence: Synthetic peptide
  Seed: GNEKKAKLANVVRKMMTNSQ
GNEYKALLFNVSRKMMTNSQ

SEQ ID NO: 192314 - protein, 20 aa, Artificial Sequence
  Description of Artificial Sequence: Synthetic peptide
  Seed: GNEKKAKLANVVRKMMTNSQ
GNEYKALLFNVTRKMMTNSQ

SEQ ID NO: 192315 - protein, 20 aa, Artificial Sequence
  Description of Artificial Sequence: Synthetic peptide
  Seed: GNEKKAKLANVVRKMMTNSQ
GNEYKALLFNVVRKMMTNSQ

SEQ ID NO: 192316 - protein, 20 aa, Artificial Sequence
  Description of Artificial Sequence: Synthetic peptide
  Seed: GNEKKAKLANVVRKMMTNSQ
GNEYKALLFNVYRKMMTNSQ

SEQ ID NO: 192317 - protein, 20 aa, Artificial Sequence
  Description of Artificial Sequence: Synthetic peptide
  Seed: GNEKKAKLANVVRKMMTNSQ
GNEYKALLGNVARKMMTNSQ

SEQ ID NO: 192318 - protein, 20 aa, Artificial Sequence
  Description of Artificial Sequence: Synthetic peptide
  Seed: GNEKKAKLANVVRKMMTNSQ
GNEYKALLGNVCRKMMTNSQ

SEQ ID NO: 192319 - protein, 20 aa, Artificial Sequence
  Description of Artificial Sequence: Synthetic peptide
  Seed: GNEKKAKLANVVRKMMTNSQ
GNEYKALLGNVDRKMMTNSQ

SEQ ID NO: 192320 - protein, 20 aa, Artificial Sequence
  Description of Artificial Sequence: Synthetic peptide
  Seed: GNEKKAKLANVVRKMMTNSQ
GNEYKALLGNVERKMMTNSQ

SEQ ID NO: 192321 - protein, 20 aa, Artificial Sequence
  Description of Artificial Sequence: Synthetic peptide
  Seed: GNEKKAKLANVVRKMMTNSQ
GNEYKALLGNVFRKMMTNSQ

SEQ ID NO: 192322 - protein, 20 aa, Artificial Sequence
  Description of Artificial Sequence: Synthetic peptide
  Seed: GNEKKAKLANVVRKMMTNSQ
GNEYKALLGNVGRKMMTNSQ

SEQ ID NO: 192323 - protein, 20 aa, Artificial Sequence
  Description of Artificial Sequence: Synthetic peptide
  Seed: GNEKKAKLANVVRKMMTNSQ
GNEYKALLGNVHRKMMTNSQ

SEQ ID NO: 192324 - protein, 20 aa, Artificial Sequence
  Description of Artificial Sequence: Synthetic peptide
  Seed: GNEKKAKLANVVRKMMTNSQ
GNEYKALLGNVIRKMMTNSQ

SEQ ID NO: 192325 - protein, 20 aa, Artificial Sequence
  Description of Artificial Sequence: Synthetic peptide
  Seed: GNEKKAKLANVVRKMMTNSQ
GNEYKALLGNVKRKMMTNSQ

SEQ ID NO: 192326 - protein, 20 aa, Artificial Sequence
  Description of Artificial Sequence: Synthetic peptide
  Seed: GNEKKAKLANVVRKMMTNSQ
GNEYKALLGNVLRKMMTNSQ

SEQ ID NO: 192327 - protein, 20 aa, Artificial Sequence
  Description of Artificial Sequence: Synthetic peptide
  Seed: GNEKKAKLANVVRKMMTNSQ
GNEYKALLGNVMRKMMTNSQ

SEQ ID NO: 192328 - protein, 20 aa, Artificial Sequence
  Description of Artificial Sequence: Synthetic peptide
  Seed: GNEKKAKLANVVRKMMTNSQ
GNEYKALLGNVNRKMMTNSQ

SEQ ID NO: 192329 - protein, 20 aa, Artificial Sequence
  Description of Artificial Sequence: Synthetic peptide
  Seed: GNEKKAKLANVVRKMMTNSQ
GNEYKALLGNVPRKMMTNSQ

SEQ ID NO: 192330 - protein, 20 aa, Artificial Sequence
  Description of Artificial Sequence: Synthetic peptide
  Seed: GNEKKAKLANVVRKMMTNSQ
GNEYKALLGNVQRKMMTNSQ

SEQ ID NO: 192331 - protein, 20 aa, Artificial Sequence
  Description of Artificial Sequence: Synthetic peptide
  Seed: GNEKKAKLANVVRKMMTNSQ
GNEYKALLGNVRRKMMTNSQ

SEQ ID NO: 192332 - protein, 20 aa, Artificial Sequence
  Description of Artificial Sequence: Synthetic peptide
  Seed: GNEKKAKLANVVRKMMTNSQ
GNEYKALLGNVSRKMMTNSQ

SEQ ID NO: 192333 - protein, 20 aa, Artificial Sequence
  Description of Artificial Sequence: Synthetic peptide
  Seed: GNEKKAKLANVVRKMMTNSQ
GNEYKALLGNVTRKMMTNSQ

SEQ ID NO: 192334 - protein, 20 aa, Artificial Sequence
  Description of Artificial Sequence: Synthetic peptide
  Seed: GNEKKAKLANVVRKMMTNSQ
GNEYKALLGNVVRKMMTNSQ

SEQ ID NO: 192335 - protein, 20 aa, Artificial Sequence
  Description of Artificial Sequence: Synthetic peptide
  Seed: GNEKKAKLANVVRKMMTNSQ
GNEYKALLGNVYRKMMTNSQ

SEQ ID NO: 192336 - protein, 20 aa, Artificial Sequence
  Description of Artificial Sequence: Synthetic peptide
  Seed: GNEKKAKLANVVRKMMTNSQ
GNEYKALLHNVARKMMTNSQ

SEQ ID NO: 192337 - protein, 20 aa, Artificial Sequence
  Description of Artificial Sequence: Synthetic peptide
  Seed: GNEKKAKLANVVRKMMTNSQ
GNEYKALLHNVIRKMMTNSQ

SEQ ID NO: 192338 - protein, 20 aa, Artificial Sequence
  Description of Artificial Sequence: Synthetic peptide
  Seed: GNEKKAKLANVVRKMMTNSQ
GNEYKALLHNVLRKMMTNSQ

SEQ ID NO: 192339 - protein, 20 aa, Artificial Sequence
  Description of Artificial Sequence: Synthetic peptide
  Seed: GNEKKAKLANVVRKMMTNSQ
GNEYKALLHNVNRKMMTNSQ

SEQ ID NO: 192340 - protein, 20 aa, Artificial Sequence
  Description of Artificial Sequence: Synthetic peptide
  Seed: GNEKKAKLANVVRKMMTNSQ
GNEYKALLHNVSRKMMTNSQ

SEQ ID NO: 192341 - protein, 20 aa, Artificial Sequence
  Description of Artificial Sequence: Synthetic peptide
  Seed: GNEKKAKLANVVRKMMTNSQ
GNEYKALLHNVVRKMMTNSQ

SEQ ID NO: 192342 - protein, 20 aa, Artificial Sequence
  Description of Artificial Sequence: Synthetic peptide
  Seed: GNEKKAKLANVVRKMMTNSQ
GNEYKALLINVARKMMTNSQ

SEQ ID NO: 192343 - protein, 20 aa, Artificial Sequence
  Description of Artificial Sequence: Synthetic peptide
  Seed: GNEKKAKLANVVRKMMTNSQ
GNEYKALLINVDRKMMTNSQ

SEQ ID NO: 192344 - protein, 20 aa, Artificial Sequence
  Description of Artificial Sequence: Synthetic peptide
  Seed: GNEKKAKLANVVRKMMTNSQ
GNEYKALLINVERKMMTNSQ

SEQ ID NO: 192345 - protein, 20 aa, Artificial Sequence
  Description of Artificial Sequence: Synthetic peptide
  Seed: GNEKKAKLANVVRKMMTNSQ
GNEYKALLINVFRKMMTNSQ

SEQ ID NO: 192346 - protein, 20 aa, Artificial Sequence
  Description of Artificial Sequence: Synthetic peptide
  Seed: GNEKKAKLANVVRKMMTNSQ
GNEYKALLINVGRKMMTNSQ

SEQ ID NO: 192347 - protein, 20 aa, Artificial Sequence
  Description of Artificial Sequence: Synthetic peptide
  Seed: GNEKKAKLANVVRKMMTNSQ
GNEYKALLINVHRKMMTNSQ

SEQ ID NO: 192348 - protein, 20 aa, Artificial Sequence
  Description of Artificial Sequence: Synthetic peptide
  Seed: GNEKKAKLANVVRKMMTNSQ
GNEYKALLINVIRKMMTNSQ

SEQ ID NO: 192349 - protein, 20 aa, Artificial Sequence
  Description of Artificial Sequence: Synthetic peptide
  Seed: GNEKKAKLANVVRKMMTNSQ
GNEYKALLINVKRKMMTNSQ

SEQ ID NO: 192350 - protein, 20 aa, Artificial Sequence
  Description of Artificial Sequence: Synthetic peptide
  Seed: GNEKKAKLANVVRKMMTNSQ
GNEYKALLINVLRKMMTNSQ

SEQ ID NO: 192351 - protein, 20 aa, Artificial Sequence
  Description of Artificial Sequence: Synthetic peptide
  Seed: GNEKKAKLANVVRKMMTNSQ
GNEYKALLINVMRKMMTNSQ

SEQ ID NO: 192352 - protein, 20 aa, Artificial Sequence
  Description of Artificial Sequence: Synthetic peptide
  Seed: GNEKKAKLANVVRKMMTNSQ
GNEYKALLINVNRKMMTNSQ

SEQ ID NO: 192353 - protein, 20 aa, Artificial Sequence
  Description of Artificial Sequence: Synthetic peptide
  Seed: GNEKKAKLANVVRKMMTNSQ
GNEYKALLINVPRKMMTNSQ

SEQ ID NO: 192354 - protein, 20 aa, Artificial Sequence
  Description of Artificial Sequence: Synthetic peptide
  Seed: GNEKKAKLANVVRKMMTNSQ
GNEYKALLINVQRKMMTNSQ

SEQ ID NO: 192355 - protein, 20 aa, Artificial Sequence
  Description of Artificial Sequence: Synthetic peptide
  Seed: GNEKKAKLANVVRKMMTNSQ
GNEYKALLINVSRKMMTNSQ

SEQ ID NO: 192356 - protein, 20 aa, Artificial Sequence
  Description of Artificial Sequence: Synthetic peptide
  Seed: GNEKKAKLANVVRKMMTNSQ
GNEYKALLINVTRKMMTNSQ

SEQ ID NO: 192357 - protein, 20 aa, Artificial Sequence
  Description of Artificial Sequence: Synthetic peptide
  Seed: GNEKKAKLANVVRKMMTNSQ
GNEYKALLINVVRKMMTNSQ

SEQ ID NO: 192358 - protein, 20 aa, Artificial Sequence
  Description of Artificial Sequence: Synthetic peptide
  Seed: GNEKKAKLANVVRKMMTNSQ
GNEYKALLINVYRKMMTNSQ

SEQ ID NO: 192359 - protein, 20 aa, Artificial Sequence
  Description of Artificial Sequence: Synthetic peptide
  Seed: GNEKKAKLANVVRKMMTNSQ
GNEYKALLLNVARKMMTNSQ

SEQ ID NO: 192360 - protein, 20 aa, Artificial Sequence
  Description of Artificial Sequence: Synthetic peptide
  Seed: GNEKKAKLANVVRKMMTNSQ
GNEYKALLLNVGRKMMTNSQ

SEQ ID NO: 192361 - protein, 20 aa, Artificial Sequence
  Description of Artificial Sequence: Synthetic peptide
  Seed: GNEKKAKLANVVRKMMTNSQ
GNEYKALLLNVHRKMMTNSQ

SEQ ID NO: 192362 - protein, 20 aa, Artificial Sequence
  Description of Artificial Sequence: Synthetic peptide
  Seed: GNEKKAKLANVVRKMMTNSQ
GNEYKALLLNVIRKMMTNSQ

SEQ ID NO: 192363 - protein, 20 aa, Artificial Sequence
  Description of Artificial Sequence: Synthetic peptide
  Seed: GNEKKAKLANVVRKMMTNSQ
GNEYKALLLNVLRKMMTNSQ

SEQ ID NO: 192364 - protein, 20 aa, Artificial Sequence
  Description of Artificial Sequence: Synthetic peptide
  Seed: GNEKKAKLANVVRKMMTNSQ
GNEYKALLLNVMRKMMTNSQ

SEQ ID NO: 192365 - protein, 20 aa, Artificial Sequence
  Description of Artificial Sequence: Synthetic peptide
  Seed: GNEKKAKLANVVRKMMTNSQ
GNEYKALLLNVNRKMMTNSQ

SEQ ID NO: 192366 - protein, 20 aa, Artificial Sequence
  Description of Artificial Sequence: Synthetic peptide
  Seed: GNEKKAKLANVVRKMMTNSQ
GNEYKALLLNVSRKMMTNSQ

SEQ ID NO: 192367 - protein, 20 aa, Artificial Sequence
  Description of Artificial Sequence: Synthetic peptide
  Seed: GNEKKAKLANVVRKMMTNSQ
GNEYKALLLNVTRKMMTNSQ

SEQ ID NO: 192368 - protein, 20 aa, Artificial Sequence
  Description of Artificial Sequence: Synthetic peptide
  Seed: GNEKKAKLANVVRKMMTNSQ
GNEYKALLLNVVRKMMTNSQ

SEQ ID NO: 192369 - protein, 20 aa, Artificial Sequence
  Description of Artificial Sequence: Synthetic peptide
  Seed: GNEKKAKLANVVRKMMTNSQ
GNEYKALLMNVARKMMTNSQ

SEQ ID NO: 192370 - protein, 20 aa, Artificial Sequence
  Description of Artificial Sequence: Synthetic peptide
  Seed: GNEKKAKLANVVRKMMTNSQ
GNEYKALLMNVGRKMMTNSQ

SEQ ID NO: 192371 - protein, 20 aa, Artificial Sequence
  Description of Artificial Sequence: Synthetic peptide
  Seed: GNEKKAKLANVVRKMMTNSQ
GNEYKALLMNVHRKMMTNSQ

SEQ ID NO: 192372 - protein, 20 aa, Artificial Sequence
  Description of Artificial Sequence: Synthetic peptide
  Seed: GNEKKAKLANVVRKMMTNSQ
GNEYKALLMNVIRKMMTNSQ

SEQ ID NO: 192373 - protein, 20 aa, Artificial Sequence
  Description of Artificial Sequence: Synthetic peptide
  Seed: GNEKKAKLANVVRKMMTNSQ
GNEYKALLMNVLRKMMTNSQ

SEQ ID NO: 192374 - protein, 20 aa, Artificial Sequence
  Description of Artificial Sequence: Synthetic peptide
  Seed: GNEKKAKLANVVRKMMTNSQ
GNEYKALLMNVMRKMMTNSQ

SEQ ID NO: 192375 - protein, 20 aa, Artificial Sequence
  Description of Artificial Sequence: Synthetic peptide
  Seed: GNEKKAKLANVVRKMMTNSQ
GNEYKALLMNVNRKMMTNSQ

SEQ ID NO: 192376 - protein, 20 aa, Artificial Sequence
  Description of Artificial Sequence: Synthetic peptide
  Seed: GNEKKAKLANVVRKMMTNSQ
GNEYKALLMNVSRKMMTNSQ

SEQ ID NO: 192377 - protein, 20 aa, Artificial Sequence
  Description of Artificial Sequence: Synthetic peptide
  Seed: GNEKKAKLANVVRKMMTNSQ
GNEYKALLMNVTRKMMTNSQ

SEQ ID NO: 192378 - protein, 20 aa, Artificial Sequence
  Description of Artificial Sequence: Synthetic peptide
  Seed: GNEKKAKLANVVRKMMTNSQ
GNEYKALLMNVVRKMMTNSQ

SEQ ID NO: 192379 - protein, 20 aa, Artificial Sequence
  Description of Artificial Sequence: Synthetic peptide
  Seed: GNEKKAKLANVVRKMMTNSQ
GNEYKALLNNVARKMMTNSQ

SEQ ID NO: 192380 - protein, 20 aa, Artificial Sequence
  Description of Artificial Sequence: Synthetic peptide
  Seed: GNEKKAKLANVVRKMMTNSQ
GNEYKALLNNVCRKMMTNSQ

SEQ ID NO: 192381 - protein, 20 aa, Artificial Sequence
  Description of Artificial Sequence: Synthetic peptide
  Seed: GNEKKAKLANVVRKMMTNSQ
GNEYKALLNNVDRKMMTNSQ

SEQ ID NO: 192382 - protein, 20 aa, Artificial Sequence
  Description of Artificial Sequence: Synthetic peptide
  Seed: GNEKKAKLANVVRKMMTNSQ
GNEYKALLNNVERKMMTNSQ

SEQ ID NO: 192383 - protein, 20 aa, Artificial Sequence
  Description of Artificial Sequence: Synthetic peptide
  Seed: GNEKKAKLANVVRKMMTNSQ
GNEYKALLNNVFRKMMTNSQ

SEQ ID NO: 192384 - protein, 20 aa, Artificial Sequence
  Description of Artificial Sequence: Synthetic peptide
  Seed: GNEKKAKLANVVRKMMTNSQ
GNEYKALLNNVGRKMMTNSQ

SEQ ID NO: 192385 - protein, 20 aa, Artificial Sequence
  Description of Artificial Sequence: Synthetic peptide
  Seed: GNEKKAKLANVVRKMMTNSQ
GNEYKALLNNVHRKMMTNSQ

SEQ ID NO: 192386 - protein, 20 aa, Artificial Sequence
  Description of Artificial Sequence: Synthetic peptide
  Seed: GNEKKAKLANVVRKMMTNSQ
GNEYKALLNNVIRKMMTNSQ

SEQ ID NO: 192387 - protein, 20 aa, Artificial Sequence
  Description of Artificial Sequence: Synthetic peptide
  Seed: GNEKKAKLANVVRKMMTNSQ
GNEYKALLNNVLRKMMTNSQ

SEQ ID NO: 192388 - protein, 20 aa, Artificial Sequence
  Description of Artificial Sequence: Synthetic peptide
  Seed: GNEKKAKLANVVRKMMTNSQ
GNEYKALLNNVMRKMMTNSQ

SEQ ID NO: 192389 - protein, 20 aa, Artificial Sequence
  Description of Artificial Sequence: Synthetic peptide
  Seed: GNEKKAKLANVVRKMMTNSQ
GNEYKALLNNVNRKMMTNSQ

SEQ ID NO: 192390 - protein, 20 aa, Artificial Sequence
  Description of Artificial Sequence: Synthetic peptide
  Seed: GNEKKAKLANVVRKMMTNSQ
GNEYKALLNNVPRKMMTNSQ

SEQ ID NO: 192391 - protein, 20 aa, Artificial Sequence
  Description of Artificial Sequence: Synthetic peptide
  Seed: GNEKKAKLANVVRKMMTNSQ
GNEYKALLNNVQRKMMTNSQ

SEQ ID NO: 192392 - protein, 20 aa, Artificial Sequence
  Description of Artificial Sequence: Synthetic peptide
  Seed: GNEKKAKLANVVRKMMTNSQ
GNEYKALLNNVSRKMMTNSQ

SEQ ID NO: 192393 - protein, 20 aa, Artificial Sequence
  Description of Artificial Sequence: Synthetic peptide
  Seed: GNEKKAKLANVVRKMMTNSQ
GNEYKALLNNVTRKMMTNSQ

SEQ ID NO: 192394 - protein, 20 aa, Artificial Sequence
  Description of Artificial Sequence: Synthetic peptide
  Seed: GNEKKAKLANVVRKMMTNSQ
GNEYKALLNNVVRKMMTNSQ

SEQ ID NO: 192395 - protein, 20 aa, Artificial Sequence
  Description of Artificial Sequence: Synthetic peptide
  Seed: GNEKKAKLANVVRKMMTNSQ
GNEYKALLNNVYRKMMTNSQ

SEQ ID NO: 192396 - protein, 20 aa, Artificial Sequence
  Description of Artificial Sequence: Synthetic peptide
  Seed: GNEKKAKLANVVRKMMTNSQ
GNEYKALLPNVARKMMTNSQ

SEQ ID NO: 192397 - protein, 20 aa, Artificial Sequence
  Description of Artificial Sequence: Synthetic peptide
  Seed: GNEKKAKLANVVRKMMTNSQ
GNEYKALLPNVCRKMMTNSQ

SEQ ID NO: 192398 - protein, 20 aa, Artificial Sequence
  Description of Artificial Sequence: Synthetic peptide
  Seed: GNEKKAKLANVVRKMMTNSQ
GNEYKALLPNVDRKMMTNSQ

SEQ ID NO: 192399 - protein, 20 aa, Artificial Sequence
  Description of Artificial Sequence: Synthetic peptide
  Seed: GNEKKAKLANVVRKMMTNSQ
GNEYKALLPNVERKMMTNSQ

SEQ ID NO: 192400 - protein, 20 aa, Artificial Sequence
  Description of Artificial Sequence: Synthetic peptide
  Seed: GNEKKAKLANVVRKMMTNSQ
GNEYKALLPNVFRKMMTNSQ

SEQ ID NO: 192401 - protein, 20 aa, Artificial Sequence
  Description of Artificial Sequence: Synthetic peptide
  Seed: GNEKKAKLANVVRKMMTNSQ
GNEYKALLPNVGRKMMTNSQ

SEQ ID NO: 192402 - protein, 20 aa, Artificial Sequence
  Description of Artificial Sequence: Synthetic peptide
  Seed: GNEKKAKLANVVRKMMTNSQ
GNEYKALLPNVHRKMMTNSQ

SEQ ID NO: 192403 - protein, 20 aa, Artificial Sequence
  Description of Artificial Sequence: Synthetic peptide
  Seed: GNEKKAKLANVVRKMMTNSQ
GNEYKALLPNVIRKMMTNSQ

SEQ ID NO: 192404 - protein, 20 aa, Artificial Sequence
  Description of Artificial Sequence: Synthetic peptide
  Seed: GNEKKAKLANVVRKMMTNSQ
GNEYKALLPNVKRKMMTNSQ

SEQ ID NO: 192405 - protein, 20 aa, Artificial Sequence
  Description of Artificial Sequence: Synthetic peptide
  Seed: GNEKKAKLANVVRKMMTNSQ
GNEYKALLPNVLRKMMTNSQ

SEQ ID NO: 192406 - protein, 20 aa, Artificial Sequence
  Description of Artificial Sequence: Synthetic peptide
  Seed: GNEKKAKLANVVRKMMTNSQ
GNEYKALLPNVMRKMMTNSQ

SEQ ID NO: 192407 - protein, 20 aa, Artificial Sequence
  Description of Artificial Sequence: Synthetic peptide
  Seed: GNEKKAKLANVVRKMMTNSQ
GNEYKALLPNVNRKMMTNSQ

SEQ ID NO: 192408 - protein, 20 aa, Artificial Sequence
  Description of Artificial Sequence: Synthetic peptide
  Seed: GNEKKAKLANVVRKMMTNSQ
GNEYKALLPNVPRKMMTNSQ

SEQ ID NO: 192409 - protein, 20 aa, Artificial Sequence
  Description of Artificial Sequence: Synthetic peptide
  Seed: GNEKKAKLANVVRKMMTNSQ
GNEYKALLPNVQRKMMTNSQ

SEQ ID NO: 192410 - protein, 20 aa, Artificial Sequence
  Description of Artificial Sequence: Synthetic peptide
  Seed: GNEKKAKLANVVRKMMTNSQ
GNEYKALLPNVRRKMMTNSQ

SEQ ID NO: 192411 - protein, 20 aa, Artificial Sequence
  Description of Artificial Sequence: Synthetic peptide
  Seed: GNEKKAKLANVVRKMMTNSQ
GNEYKALLPNVSRKMMTNSQ

SEQ ID NO: 192412 - protein, 20 aa, Artificial Sequence
  Description of Artificial Sequence: Synthetic peptide
  Seed: GNEKKAKLANVVRKMMTNSQ
GNEYKALLPNVTRKMMTNSQ

SEQ ID NO: 192413 - protein, 20 aa, Artificial Sequence
  Description of Artificial Sequence: Synthetic peptide
  Seed: GNEKKAKLANVVRKMMTNSQ
GNEYKALLPNVVRKMMTNSQ

SEQ ID NO: 192414 - protein, 20 aa, Artificial Sequence
  Description of Artificial Sequence: Synthetic peptide
  Seed: GNEKKAKLANVVRKMMTNSQ
GNEYKALLPNVWRKMMTNSQ

SEQ ID NO: 192415 - protein, 20 aa, Artificial Sequence
  Description of Artificial Sequence: Synthetic peptide
  Seed: GNEKKAKLANVVRKMMTNSQ
GNEYKALLPNVYRKMMTNSQ

SEQ ID NO: 192416 - protein, 20 aa, Artificial Sequence
  Description of Artificial Sequence: Synthetic peptide
  Seed: GNEKKAKLANVVRKMMTNSQ
GNEYKALLQNVARKMMTNSQ

SEQ ID NO: 192417 - protein, 20 aa, Artificial Sequence
  Description of Artificial Sequence: Synthetic peptide
  Seed: GNEKKAKLANVVRKMMTNSQ
GNEYKALLQNVIRKMMTNSQ

SEQ ID NO: 192418 - protein, 20 aa, Artificial Sequence
  Description of Artificial Sequence: Synthetic peptide
  Seed: GNEKKAKLANVVRKMMTNSQ
GNEYKALLQNVLRKMMTNSQ

SEQ ID NO: 192419 - protein, 20 aa, Artificial Sequence
  Description of Artificial Sequence: Synthetic peptide
  Seed: GNEKKAKLANVVRKMMTNSQ
GNEYKALLQNVMRKMMTNSQ

SEQ ID NO: 192420 - protein, 20 aa, Artificial Sequence
  Description of Artificial Sequence: Synthetic peptide
  Seed: GNEKKAKLANVVRKMMTNSQ
GNEYKALLQNVNRKMMTNSQ

SEQ ID NO: 192421 - protein, 20 aa, Artificial Sequence
  Description of Artificial Sequence: Synthetic peptide
  Seed: GNEKKAKLANVVRKMMTNSQ
GNEYKALLQNVSRKMMTNSQ

SEQ ID NO: 192422 - protein, 20 aa, Artificial Sequence
  Description of Artificial Sequence: Synthetic peptide
  Seed: GNEKKAKLANVVRKMMTNSQ
GNEYKALLQNVTRKMMTNSQ

SEQ ID NO: 192423 - protein, 20 aa, Artificial Sequence
  Description of Artificial Sequence: Synthetic peptide
  Seed: GNEKKAKLANVVRKMMTNSQ
GNEYKALLQNVVRKMMTNSQ

SEQ ID NO: 192424 - protein, 20 aa, Artificial Sequence
  Description of Artificial Sequence: Synthetic peptide
  Seed: GNEKKAKLANVVRKMMTNSQ
GNEYKALLSNVARKMMTNSQ

SEQ ID NO: 192425 - protein, 20 aa, Artificial Sequence
  Description of Artificial Sequence: Synthetic peptide
  Seed: GNEKKAKLANVVRKMMTNSQ
GNEYKALLSNVCRKMMTNSQ

SEQ ID NO: 192426 - protein, 20 aa, Artificial Sequence
  Description of Artificial Sequence: Synthetic peptide
  Seed: GNEKKAKLANVVRKMMTNSQ
GNEYKALLSNVDRKMMTNSQ

SEQ ID NO: 192427 - protein, 20 aa, Artificial Sequence
  Description of Artificial Sequence: Synthetic peptide
  Seed: GNEKKAKLANVVRKMMTNSQ
GNEYKALLSNVERKMMTNSQ

SEQ ID NO: 192428 - protein, 20 aa, Artificial Sequence
  Description of Artificial Sequence: Synthetic peptide
  Seed: GNEKKAKLANVVRKMMTNSQ
GNEYKALLSNVFRKMMTNSQ

SEQ ID NO: 192429 - protein, 20 aa, Artificial Sequence
  Description of Artificial Sequence: Synthetic peptide
  Seed: GNEKKAKLANVVRKMMTNSQ
GNEYKALLSNVGRKMMTNSQ

SEQ ID NO: 192430 - protein, 20 aa, Artificial Sequence
  Description of Artificial Sequence: Synthetic peptide
  Seed: GNEKKAKLANVVRKMMTNSQ
GNEYKALLSNVHRKMMTNSQ

SEQ ID NO: 192431 - protein, 20 aa, Artificial Sequence
  Description of Artificial Sequence: Synthetic peptide
  Seed: GNEKKAKLANVVRKMMTNSQ
GNEYKALLSNVIRKMMTNSQ

SEQ ID NO: 192432 - protein, 20 aa, Artificial Sequence
  Description of Artificial Sequence: Synthetic peptide
  Seed: GNEKKAKLANVVRKMMTNSQ
GNEYKALLSNVKRKMMTNSQ

SEQ ID NO: 192433 - protein, 20 aa, Artificial Sequence
  Description of Artificial Sequence: Synthetic peptide
  Seed: GNEKKAKLANVVRKMMTNSQ
GNEYKALLSNVLRKMMTNSQ

SEQ ID NO: 192434 - protein, 20 aa, Artificial Sequence
  Description of Artificial Sequence: Synthetic peptide
  Seed: GNEKKAKLANVVRKMMTNSQ
GNEYKALLSNVMRKMMTNSQ

SEQ ID NO: 192435 - protein, 20 aa, Artificial Sequence
  Description of Artificial Sequence: Synthetic peptide
  Seed: GNEKKAKLANVVRKMMTNSQ
GNEYKALLSNVNRKMMTNSQ

SEQ ID NO: 192436 - protein, 20 aa, Artificial Sequence
  Description of Artificial Sequence: Synthetic peptide
  Seed: GNEKKAKLANVVRKMMTNSQ
GNEYKALLSNVPRKMMTNSQ

SEQ ID NO: 192437 - protein, 20 aa, Artificial Sequence
  Description of Artificial Sequence: Synthetic peptide
  Seed: GNEKKAKLANVVRKMMTNSQ
GNEYKALLSNVQRKMMTNSQ

SEQ ID NO: 192438 - protein, 20 aa, Artificial Sequence
  Description of Artificial Sequence: Synthetic peptide
  Seed: GNEKKAKLANVVRKMMTNSQ
GNEYKALLSNVRRKMMTNSQ

SEQ ID NO: 192439 - protein, 20 aa, Artificial Sequence
  Description of Artificial Sequence: Synthetic peptide
  Seed: GNEKKAKLANVVRKMMTNSQ
GNEYKALLSNVSRKMMTNSQ

SEQ ID NO: 192440 - protein, 20 aa, Artificial Sequence
  Description of Artificial Sequence: Synthetic peptide
  Seed: GNEKKAKLANVVRKMMTNSQ
GNEYKALLSNVTRKMMTNSQ

SEQ ID NO: 192441 - protein, 20 aa, Artificial Sequence
  Description of Artificial Sequence: Synthetic peptide
  Seed: GNEKKAKLANVVRKMMTNSQ
GNEYKALLSNVVRKMMTNSQ

SEQ ID NO: 192442 - protein, 20 aa, Artificial Sequence
  Description of Artificial Sequence: Synthetic peptide
  Seed: GNEKKAKLANVVRKMMTNSQ
GNEYKALLSNVYRKMMTNSQ

SEQ ID NO: 192443 - protein, 20 aa, Artificial Sequence
  Description of Artificial Sequence: Synthetic peptide
  Seed: GNEKKAKLANVVRKMMTNSQ
GNEYKALLTNVARKMMTNSQ

SEQ ID NO: 192444 - protein, 20 aa, Artificial Sequence
  Description of Artificial Sequence: Synthetic peptide
  Seed: GNEKKAKLANVVRKMMTNSQ
GNEYKALLTNVCRKMMTNSQ

SEQ ID NO: 192445 - protein, 20 aa, Artificial Sequence
  Description of Artificial Sequence: Synthetic peptide
  Seed: GNEKKAKLANVVRKMMTNSQ
GNEYKALLTNVDRKMMTNSQ

SEQ ID NO: 192446 - protein, 20 aa, Artificial Sequence
  Description of Artificial Sequence: Synthetic peptide
  Seed: GNEKKAKLANVVRKMMTNSQ
GNEYKALLTNVERKMMTNSQ

SEQ ID NO: 192447 - protein, 20 aa, Artificial Sequence
  Description of Artificial Sequence: Synthetic peptide
  Seed: GNEKKAKLANVVRKMMTNSQ
GNEYKALLTNVFRKMMTNSQ

SEQ ID NO: 192448 - protein, 20 aa, Artificial Sequence
  Description of Artificial Sequence: Synthetic peptide
  Seed: GNEKKAKLANVVRKMMTNSQ
GNEYKALLTNVGRKMMTNSQ

SEQ ID NO: 192449 - protein, 20 aa, Artificial Sequence
  Description of Artificial Sequence: Synthetic peptide
  Seed: GNEKKAKLANVVRKMMTNSQ
GNEYKALLTNVHRKMMTNSQ

SEQ ID NO: 192450 - protein, 20 aa, Artificial Sequence
  Description of Artificial Sequence: Synthetic peptide
  Seed: GNEKKAKLANVVRKMMTNSQ
GNEYKALLTNVIRKMMTNSQ

SEQ ID NO: 192451 - protein, 20 aa, Artificial Sequence
  Description of Artificial Sequence: Synthetic peptide
  Seed: GNEKKAKLANVVRKMMTNSQ
GNEYKALLTNVKRKMMTNSQ

SEQ ID NO: 192452 - protein, 20 aa, Artificial Sequence
  Description of Artificial Sequence: Synthetic peptide
  Seed: GNEKKAKLANVVRKMMTNSQ
GNEYKALLTNVLRKMMTNSQ

SEQ ID NO: 192453 - protein, 20 aa, Artificial Sequence
  Description of Artificial Sequence: Synthetic peptide
  Seed: GNEKKAKLANVVRKMMTNSQ
GNEYKALLTNVMRKMMTNSQ

SEQ ID NO: 192454 - protein, 20 aa, Artificial Sequence
  Description of Artificial Sequence: Synthetic peptide
  Seed: GNEKKAKLANVVRKMMTNSQ
GNEYKALLTNVNRKMMTNSQ

SEQ ID NO: 192455 - protein, 20 aa, Artificial Sequence
  Description of Artificial Sequence: Synthetic peptide
  Seed: GNEKKAKLANVVRKMMTNSQ
GNEYKALLTNVPRKMMTNSQ

SEQ ID NO: 192456 - protein, 20 aa, Artificial Sequence
  Description of Artificial Sequence: Synthetic peptide
  Seed: GNEKKAKLANVVRKMMTNSQ
GNEYKALLTNVQRKMMTNSQ

SEQ ID NO: 192457 - protein, 20 aa, Artificial Sequence
  Description of Artificial Sequence: Synthetic peptide
  Seed: GNEKKAKLANVVRKMMTNSQ
GNEYKALLTNVRRKMMTNSQ

SEQ ID NO: 192458 - protein, 20 aa, Artificial Sequence
  Description of Artificial Sequence: Synthetic peptide
  Seed: GNEKKAKLANVVRKMMTNSQ
GNEYKALLTNVSRKMMTNSQ

SEQ ID NO: 192459 - protein, 20 aa, Artificial Sequence
  Description of Artificial Sequence: Synthetic peptide
  Seed: GNEKKAKLANVVRKMMTNSQ
GNEYKALLTNVTRKMMTNSQ

SEQ ID NO: 192460 - protein, 20 aa, Artificial Sequence
  Description of Artificial Sequence: Synthetic peptide
  Seed: GNEKKAKLANVVRKMMTNSQ
GNEYKALLTNVVRKMMTNSQ

SEQ ID NO: 192461 - protein, 20 aa, Artificial Sequence
  Description of Artificial Sequence: Synthetic peptide
  Seed: GNEKKAKLANVVRKMMTNSQ
GNEYKALLTNVYRKMMTNSQ

SEQ ID NO: 192462 - protein, 20 aa, Artificial Sequence
  Description of Artificial Sequence: Synthetic peptide
  Seed: GNEKKAKLANVVRKMMTNSQ
GNEYKALLVNVARKMMTNSQ

SEQ ID NO: 192463 - protein, 20 aa, Artificial Sequence
  Description of Artificial Sequence: Synthetic peptide
  Seed: GNEKKAKLANVVRKMMTNSQ
GNEYKALLVNVCRKMMTNSQ

SEQ ID NO: 192464 - protein, 20 aa, Artificial Sequence
  Description of Artificial Sequence: Synthetic peptide
  Seed: GNEKKAKLANVVRKMMTNSQ
GNEYKALLVNVDRKMMTNSQ

SEQ ID NO: 192465 - protein, 20 aa, Artificial Sequence
  Description of Artificial Sequence: Synthetic peptide
  Seed: GNEKKAKLANVVRKMMTNSQ
GNEYKALLVNVERKMMTNSQ

SEQ ID NO: 192466 - protein, 20 aa, Artificial Sequence
  Description of Artificial Sequence: Synthetic peptide
  Seed: GNEKKAKLANVVRKMMTNSQ
GNEYKALLVNVFRKMMTNSQ

SEQ ID NO: 192467 - protein, 20 aa, Artificial Sequence
  Description of Artificial Sequence: Synthetic peptide
  Seed: GNEKKAKLANVVRKMMTNSQ
GNEYKALLVNVGRKMMTNSQ

SEQ ID NO: 192468 - protein, 20 aa, Artificial Sequence
  Description of Artificial Sequence: Synthetic peptide
  Seed: GNEKKAKLANVVRKMMTNSQ
GNEYKALLVNVHRKMMTNSQ

SEQ ID NO: 192469 - protein, 20 aa, Artificial Sequence
  Description of Artificial Sequence: Synthetic peptide
  Seed: GNEKKAKLANVVRKMMTNSQ
GNEYKALLVNVIRKMMTNSQ

SEQ ID NO: 192470 - protein, 20 aa, Artificial Sequence
  Description of Artificial Sequence: Synthetic peptide
  Seed: GNEKKAKLANVVRKMMTNSQ
GNEYKALLVNVKRKMMTNSQ

SEQ ID NO: 192471 - protein, 20 aa, Artificial Sequence
  Description of Artificial Sequence: Synthetic peptide
  Seed: GNEKKAKLANVVRKMMTNSQ
GNEYKALLVNVLRKMMTNSQ

SEQ ID NO: 192472 - protein, 20 aa, Artificial Sequence
  Description of Artificial Sequence: Synthetic peptide
  Seed: GNEKKAKLANVVRKMMTNSQ
GNEYKALLVNVMRKMMTNSQ

SEQ ID NO: 192473 - protein, 20 aa, Artificial Sequence
  Description of Artificial Sequence: Synthetic peptide
  Seed: GNEKKAKLANVVRKMMTNSQ
GNEYKALLVNVNRKMMTNSQ

SEQ ID NO: 192474 - protein, 20 aa, Artificial Sequence
  Description of Artificial Sequence: Synthetic peptide
  Seed: GNEKKAKLANVVRKMMTNSQ
GNEYKALLVNVPRKMMTNSQ

SEQ ID NO: 192475 - protein, 20 aa, Artificial Sequence
  Description of Artificial Sequence: Synthetic peptide
  Seed: GNEKKAKLANVVRKMMTNSQ
GNEYKALLVNVQRKMMTNSQ

SEQ ID NO: 192476 - protein, 20 aa, Artificial Sequence
  Description of Artificial Sequence: Synthetic peptide
  Seed: GNEKKAKLANVVRKMMTNSQ
GNEYKALLVNVRRKMMTNSQ

SEQ ID NO: 192477 - protein, 20 aa, Artificial Sequence
  Description of Artificial Sequence: Synthetic peptide
  Seed: GNEKKAKLANVVRKMMTNSQ
GNEYKALLVNVSRKMMTNSQ

SEQ ID NO: 192478 - protein, 20 aa, Artificial Sequence
  Description of Artificial Sequence: Synthetic peptide
  Seed: GNEKKAKLANVVRKMMTNSQ
GNEYKALLVNVTRKMMTNSQ

SEQ ID NO: 192479 - protein, 20 aa, Artificial Sequence
  Description of Artificial Sequence: Synthetic peptide
  Seed: GNEKKAKLANVVRKMMTNSQ
GNEYKALLVNVVRKMMTNSQ

SEQ ID NO: 192480 - protein, 20 aa, Artificial Sequence
  Description of Artificial Sequence: Synthetic peptide
  Seed: GNEKKAKLANVVRKMMTNSQ
GNEYKALLVNVYRKMMTNSQ

SEQ ID NO: 192481 - protein, 20 aa, Artificial Sequence
  Description of Artificial Sequence: Synthetic peptide
  Seed: GNEKKAKLANVVRKMMTNSQ
GNEYKALLWNVARKMMTNSQ

SEQ ID NO: 192482 - protein, 20 aa, Artificial Sequence
  Description of Artificial Sequence: Synthetic peptide
  Seed: GNEKKAKLANVVRKMMTNSQ
GNEYKALLWNVIRKMMTNSQ

SEQ ID NO: 192483 - protein, 20 aa, Artificial Sequence
  Description of Artificial Sequence: Synthetic peptide
  Seed: GNEKKAKLANVVRKMMTNSQ
GNEYKALLWNVLRKMMTNSQ

SEQ ID NO: 192484 - protein, 20 aa, Artificial Sequence
  Description of Artificial Sequence: Synthetic peptide
  Seed: GNEKKAKLANVVRKMMTNSQ
GNEYKALLWNVMRKMMTNSQ

SEQ ID NO: 192485 - protein, 20 aa, Artificial Sequence
  Description of Artificial Sequence: Synthetic peptide
  Seed: GNEKKAKLANVVRKMMTNSQ
GNEYKALLWNVVRKMMTNSQ

SEQ ID NO: 192486 - protein, 20 aa, Artificial Sequence
  Description of Artificial Sequence: Synthetic peptide
  Seed: GNEKKAKLANVVRKMMTNSQ
GNEYKALLYNVARKMMTNSQ

SEQ ID NO: 192487 - protein, 20 aa, Artificial Sequence
  Description of Artificial Sequence: Synthetic peptide
  Seed: GNEKKAKLANVVRKMMTNSQ
GNEYKALLYNVIRKMMTNSQ

SEQ ID NO: 192488 - protein, 20 aa, Artificial Sequence
  Description of Artificial Sequence: Synthetic peptide
  Seed: GNEKKAKLANVVRKMMTNSQ
GNEYKALLYNVLRKMMTNSQ

SEQ ID NO: 192489 - protein, 20 aa, Artificial Sequence
  Description of Artificial Sequence: Synthetic peptide
  Seed: GNEKKAKLANVVRKMMTNSQ
GNEYKALLYNVMRKMMTNSQ

SEQ ID NO: 192490 - protein, 20 aa, Artificial Sequence
  Description of Artificial Sequence: Synthetic peptide
  Seed: GNEKKAKLANVVRKMMTNSQ
GNEYKALLYNVVRKMMTNSQ

SEQ ID NO: 192491 - protein, 20 aa, Artificial Sequence
  Description of Artificial Sequence: Synthetic peptide
  Seed: GNEKKAKLANVVRKMMTNSQ
GNEYKAMLANVARKMMTNSQ

SEQ ID NO: 192492 - protein, 20 aa, Artificial Sequence
  Description of Artificial Sequence: Synthetic peptide
  Seed: GNEKKAKLANVVRKMMTNSQ
GNEYKAMLANVCRKMMTNSQ

SEQ ID NO: 192493 - protein, 20 aa, Artificial Sequence
  Description of Artificial Sequence: Synthetic peptide
  Seed: GNEKKAKLANVVRKMMTNSQ
GNEYKAMLANVDRKMMTNSQ

SEQ ID NO: 192494 - protein, 20 aa, Artificial Sequence
  Description of Artificial Sequence: Synthetic peptide
  Seed: GNEKKAKLANVVRKMMTNSQ
GNEYKAMLANVERKMMTNSQ

SEQ ID NO: 192495 - protein, 20 aa, Artificial Sequence
  Description of Artificial Sequence: Synthetic peptide
  Seed: GNEKKAKLANVVRKMMTNSQ
GNEYKAMLANVFRKMMTNSQ

SEQ ID NO: 192496 - protein, 20 aa, Artificial Sequence
  Description of Artificial Sequence: Synthetic peptide
  Seed: GNEKKAKLANVVRKMMTNSQ
GNEYKAMLANVGRKMMTNSQ

SEQ ID NO: 192497 - protein, 20 aa, Artificial Sequence
  Description of Artificial Sequence: Synthetic peptide
  Seed: GNEKKAKLANVVRKMMTNSQ
GNEYKAMLANVHRKMMTNSQ

SEQ ID NO: 192498 - protein, 20 aa, Artificial Sequence
  Description of Artificial Sequence: Synthetic peptide
  Seed: GNEKKAKLANVVRKMMTNSQ
GNEYKAMLANVIRKMMTNSQ

SEQ ID NO: 192499 - protein, 20 aa, Artificial Sequence
  Description of Artificial Sequence: Synthetic peptide
  Seed: GNEKKAKLANVVRKMMTNSQ
GNEYKAMLANVKRKMMTNSQ

SEQ ID NO: 192500 - protein, 20 aa, Artificial Sequence
  Description of Artificial Sequence: Synthetic peptide
  Seed: GNEKKAKLANVVRKMMTNSQ
GNEYKAMLANVLRKMMTNSQ

SEQ ID NO: 192501 - protein, 20 aa, Artificial Sequence
  Description of Artificial Sequence: Synthetic peptide
  Seed: GNEKKAKLANVVRKMMTNSQ
GNEYKAMLANVMRKMMTNSQ

SEQ ID NO: 192502 - protein, 20 aa, Artificial Sequence
  Description of Artificial Sequence: Synthetic peptide
  Seed: GNEKKAKLANVVRKMMTNSQ
GNEYKAMLANVNRKMMTNSQ

SEQ ID NO: 192503 - protein, 20 aa, Artificial Sequence
  Description of Artificial Sequence: Synthetic peptide
  Seed: GNEKKAKLANVVRKMMTNSQ
GNEYKAMLANVPRKMMTNSQ

SEQ ID NO: 192504 - protein, 20 aa, Artificial Sequence
  Description of Artificial Sequence: Synthetic peptide
  Seed: GNEKKAKLANVVRKMMTNSQ
GNEYKAMLANVQRKMMTNSQ

SEQ ID NO: 192505 - protein, 20 aa, Artificial Sequence
  Description of Artificial Sequence: Synthetic peptide
  Seed: GNEKKAKLANVVRKMMTNSQ
GNEYKAMLANVRRKMMTNSQ

SEQ ID NO: 192506 - protein, 20 aa, Artificial Sequence
  Description of Artificial Sequence: Synthetic peptide
  Seed: GNEKKAKLANVVRKMMTNSQ
GNEYKAMLANVSRKMMTNSQ

SEQ ID NO: 192507 - protein, 20 aa, Artificial Sequence
  Description of Artificial Sequence: Synthetic peptide
  Seed: GNEKKAKLANVVRKMMTNSQ
GNEYKAMLANVTRKMMTNSQ

SEQ ID NO: 192508 - protein, 20 aa, Artificial Sequence
  Description of Artificial Sequence: Synthetic peptide
  Seed: GNEKKAKLANVVRKMMTNSQ
GNEYKAMLANVVRKMMTNSQ

SEQ ID NO: 192509 - protein, 20 aa, Artificial Sequence
  Description of Artificial Sequence: Synthetic peptide
  Seed: GNEKKAKLANVVRKMMTNSQ
GNEYKAMLANVWRKMMTNSQ

SEQ ID NO: 192510 - protein, 20 aa, Artificial Sequence
  Description of Artificial Sequence: Synthetic peptide
  Seed: GNEKKAKLANVVRKMMTNSQ
GNEYKAMLANVYRKMMTNSQ

SEQ ID NO: 192511 - protein, 20 aa, Artificial Sequence
  Description of Artificial Sequence: Synthetic peptide
  Seed: GNEKKAKLANVVRKMMTNSQ
GNEYKAMLCNVARKMMTNSQ

SEQ ID NO: 192512 - protein, 20 aa, Artificial Sequence
  Description of Artificial Sequence: Synthetic peptide
  Seed: GNEKKAKLANVVRKMMTNSQ
GNEYKAMLCNVNRKMMTNSQ

SEQ ID NO: 192513 - protein, 20 aa, Artificial Sequence
  Description of Artificial Sequence: Synthetic peptide
  Seed: GNEKKAKLANVVRKMMTNSQ
GNEYKAMLCNVSRKMMTNSQ

SEQ ID NO: 192514 - protein, 20 aa, Artificial Sequence
  Description of Artificial Sequence: Synthetic peptide
  Seed: GNEKKAKLANVVRKMMTNSQ
GNEYKAMLDNVARKMMTNSQ

SEQ ID NO: 192515 - protein, 20 aa, Artificial Sequence
  Description of Artificial Sequence: Synthetic peptide
  Seed: GNEKKAKLANVVRKMMTNSQ
GNEYKAMLDNVIRKMMTNSQ

SEQ ID NO: 192516 - protein, 20 aa, Artificial Sequence
  Description of Artificial Sequence: Synthetic peptide
  Seed: GNEKKAKLANVVRKMMTNSQ
GNEYKAMLDNVLRKMMTNSQ

SEQ ID NO: 192517 - protein, 20 aa, Artificial Sequence
  Description of Artificial Sequence: Synthetic peptide
  Seed: GNEKKAKLANVVRKMMTNSQ
GNEYKAMLDNVSRKMMTNSQ

SEQ ID NO: 192518 - protein, 20 aa, Artificial Sequence
  Description of Artificial Sequence: Synthetic peptide
  Seed: GNEKKAKLANVVRKMMTNSQ
GNEYKAMLDNVVRKMMTNSQ

SEQ ID NO: 192519 - protein, 20 aa, Artificial Sequence
  Description of Artificial Sequence: Synthetic peptide
  Seed: GNEKKAKLANVVRKMMTNSQ
GNEYKAMLENVARKMMTNSQ

SEQ ID NO: 192520 - protein, 20 aa, Artificial Sequence
  Description of Artificial Sequence: Synthetic peptide
  Seed: GNEKKAKLANVVRKMMTNSQ
GNEYKAMLENVIRKMMTNSQ

SEQ ID NO: 192521 - protein, 20 aa, Artificial Sequence
  Description of Artificial Sequence: Synthetic peptide
  Seed: GNEKKAKLANVVRKMMTNSQ
GNEYKAMLENVLRKMMTNSQ

SEQ ID NO: 192522 - protein, 20 aa, Artificial Sequence
  Description of Artificial Sequence: Synthetic peptide
  Seed: GNEKKAKLANVVRKMMTNSQ
GNEYKAMLENVNRKMMTNSQ

SEQ ID NO: 192523 - protein, 20 aa, Artificial Sequence
  Description of Artificial Sequence: Synthetic peptide
  Seed: GNEKKAKLANVVRKMMTNSQ
GNEYKAMLENVSRKMMTNSQ

SEQ ID NO: 192524 - protein, 20 aa, Artificial Sequence
  Description of Artificial Sequence: Synthetic peptide
  Seed: GNEKKAKLANVVRKMMTNSQ
GNEYKAMLENVTRKMMTNSQ

SEQ ID NO: 192525 - protein, 20 aa, Artificial Sequence
  Description of Artificial Sequence: Synthetic peptide
  Seed: GNEKKAKLANVVRKMMTNSQ
GNEYKAMLENVVRKMMTNSQ

SEQ ID NO: 192526 - protein, 20 aa, Artificial Sequence
  Description of Artificial Sequence: Synthetic peptide
  Seed: GNEKKAKLANVVRKMMTNSQ
GNEYKAMLFNVARKMMTNSQ

SEQ ID NO: 192527 - protein, 20 aa, Artificial Sequence
  Description of Artificial Sequence: Synthetic peptide
  Seed: GNEKKAKLANVVRKMMTNSQ
GNEYKAMLFNVFRKMMTNSQ

SEQ ID NO: 192528 - protein, 20 aa, Artificial Sequence
  Description of Artificial Sequence: Synthetic peptide
  Seed: GNEKKAKLANVVRKMMTNSQ
GNEYKAMLFNVIRKMMTNSQ

SEQ ID NO: 192529 - protein, 20 aa, Artificial Sequence
  Description of Artificial Sequence: Synthetic peptide
  Seed: GNEKKAKLANVVRKMMTNSQ
GNEYKAMLFNVLRKMMTNSQ

SEQ ID NO: 192530 - protein, 20 aa, Artificial Sequence
  Description of Artificial Sequence: Synthetic peptide
  Seed: GNEKKAKLANVVRKMMTNSQ
GNEYKAMLFNVMRKMMTNSQ

SEQ ID NO: 192531 - protein, 20 aa, Artificial Sequence
  Description of Artificial Sequence: Synthetic peptide
  Seed: GNEKKAKLANVVRKMMTNSQ
GNEYKAMLFNVNRKMMTNSQ

SEQ ID NO: 192532 - protein, 20 aa, Artificial Sequence
  Description of Artificial Sequence: Synthetic peptide
  Seed: GNEKKAKLANVVRKMMTNSQ
GNEYKAMLFNVTRKMMTNSQ

SEQ ID NO: 192533 - protein, 20 aa, Artificial Sequence
  Description of Artificial Sequence: Synthetic peptide
  Seed: GNEKKAKLANVVRKMMTNSQ
GNEYKAMLFNVVRKMMTNSQ

SEQ ID NO: 192534 - protein, 20 aa, Artificial Sequence
  Description of Artificial Sequence: Synthetic peptide
  Seed: GNEKKAKLANVVRKMMTNSQ
GNEYKAMLFNVYRKMMTNSQ

SEQ ID NO: 192535 - protein, 20 aa, Artificial Sequence
  Description of Artificial Sequence: Synthetic peptide
  Seed: GNEKKAKLANVVRKMMTNSQ
GNEYKAMLGNVARKMMTNSQ

SEQ ID NO: 192536 - protein, 20 aa, Artificial Sequence
  Description of Artificial Sequence: Synthetic peptide
  Seed: GNEKKAKLANVVRKMMTNSQ
GNEYKAMLGNVCRKMMTNSQ

SEQ ID NO: 192537 - protein, 20 aa, Artificial Sequence
  Description of Artificial Sequence: Synthetic peptide
  Seed: GNEKKAKLANVVRKMMTNSQ
GNEYKAMLGNVDRKMMTNSQ

SEQ ID NO: 192538 - protein, 20 aa, Artificial Sequence
  Description of Artificial Sequence: Synthetic peptide
  Seed: GNEKKAKLANVVRKMMTNSQ
GNEYKAMLGNVERKMMTNSQ

SEQ ID NO: 192539 - protein, 20 aa, Artificial Sequence
  Description of Artificial Sequence: Synthetic peptide
  Seed: GNEKKAKLANVVRKMMTNSQ
GNEYKAMLGNVFRKMMTNSQ

SEQ ID NO: 192540 - protein, 20 aa, Artificial Sequence
  Description of Artificial Sequence: Synthetic peptide
  Seed: GNEKKAKLANVVRKMMTNSQ
GNEYKAMLGNVGRKMMTNSQ

SEQ ID NO: 192541 - protein, 20 aa, Artificial Sequence
  Description of Artificial Sequence: Synthetic peptide
  Seed: GNEKKAKLANVVRKMMTNSQ
GNEYKAMLGNVHRKMMTNSQ

SEQ ID NO: 192542 - protein, 20 aa, Artificial Sequence
  Description of Artificial Sequence: Synthetic peptide
  Seed: GNEKKAKLANVVRKMMTNSQ
GNEYKAMLGNVIRKMMTNSQ

SEQ ID NO: 192543 - protein, 20 aa, Artificial Sequence
  Description of Artificial Sequence: Synthetic peptide
  Seed: GNEKKAKLANVVRKMMTNSQ
GNEYKAMLGNVKRKMMTNSQ

SEQ ID NO: 192544 - protein, 20 aa, Artificial Sequence
  Description of Artificial Sequence: Synthetic peptide
  Seed: GNEKKAKLANVVRKMMTNSQ
GNEYKAMLGNVLRKMMTNSQ

SEQ ID NO: 192545 - protein, 20 aa, Artificial Sequence
  Description of Artificial Sequence: Synthetic peptide
  Seed: GNEKKAKLANVVRKMMTNSQ
GNEYKAMLGNVMRKMMTNSQ

SEQ ID NO: 192546 - protein, 20 aa, Artificial Sequence
  Description of Artificial Sequence: Synthetic peptide
  Seed: GNEKKAKLANVVRKMMTNSQ
GNEYKAMLGNVNRKMMTNSQ

SEQ ID NO: 192547 - protein, 20 aa, Artificial Sequence
  Description of Artificial Sequence: Synthetic peptide
  Seed: GNEKKAKLANVVRKMMTNSQ
GNEYKAMLGNVPRKMMTNSQ

SEQ ID NO: 192548 - protein, 20 aa, Artificial Sequence
  Description of Artificial Sequence: Synthetic peptide
  Seed: GNEKKAKLANVVRKMMTNSQ
GNEYKAMLGNVQRKMMTNSQ

SEQ ID NO: 192549 - protein, 20 aa, Artificial Sequence
  Description of Artificial Sequence: Synthetic peptide
  Seed: GNEKKAKLANVVRKMMTNSQ
GNEYKAMLGNVRRKMMTNSQ

SEQ ID NO: 192550 - protein, 20 aa, Artificial Sequence
  Description of Artificial Sequence: Synthetic peptide
  Seed: GNEKKAKLANVVRKMMTNSQ
GNEYKAMLGNVSRKMMTNSQ

SEQ ID NO: 192551 - protein, 20 aa, Artificial Sequence
  Description of Artificial Sequence: Synthetic peptide
  Seed: GNEKKAKLANVVRKMMTNSQ
GNEYKAMLGNVTRKMMTNSQ

SEQ ID NO: 192552 - protein, 20 aa, Artificial Sequence
  Description of Artificial Sequence: Synthetic peptide
  Seed: GNEKKAKLANVVRKMMTNSQ
GNEYKAMLGNVVRKMMTNSQ

SEQ ID NO: 192553 - protein, 20 aa, Artificial Sequence
  Description of Artificial Sequence: Synthetic peptide
  Seed: GNEKKAKLANVVRKMMTNSQ
GNEYKAMLGNVWRKMMTNSQ

SEQ ID NO: 192554 - protein, 20 aa, Artificial Sequence
  Description of Artificial Sequence: Synthetic peptide
  Seed: GNEKKAKLANVVRKMMTNSQ
GNEYKAMLGNVYRKMMTNSQ

SEQ ID NO: 192555 - protein, 20 aa, Artificial Sequence
  Description of Artificial Sequence: Synthetic peptide
  Seed: GNEKKAKLANVVRKMMTNSQ
GNEYKAMLHNVARKMMTNSQ

SEQ ID NO: 192556 - protein, 20 aa, Artificial Sequence
  Description of Artificial Sequence: Synthetic peptide
  Seed: GNEKKAKLANVVRKMMTNSQ
GNEYKAMLHNVIRKMMTNSQ

SEQ ID NO: 192557 - protein, 20 aa, Artificial Sequence
  Description of Artificial Sequence: Synthetic peptide
  Seed: GNEKKAKLANVVRKMMTNSQ
GNEYKAMLHNVLRKMMTNSQ

SEQ ID NO: 192558 - protein, 20 aa, Artificial Sequence
  Description of Artificial Sequence: Synthetic peptide
  Seed: GNEKKAKLANVVRKMMTNSQ
GNEYKAMLHNVMRKMMTNSQ

SEQ ID NO: 192559 - protein, 20 aa, Artificial Sequence
  Description of Artificial Sequence: Synthetic peptide
  Seed: GNEKKAKLANVVRKMMTNSQ
GNEYKAMLHNVNRKMMTNSQ

SEQ ID NO: 192560 - protein, 20 aa, Artificial Sequence
  Description of Artificial Sequence: Synthetic peptide
  Seed: GNEKKAKLANVVRKMMTNSQ
GNEYKAMLHNVSRKMMTNSQ

SEQ ID NO: 192561 - protein, 20 aa, Artificial Sequence
  Description of Artificial Sequence: Synthetic peptide
  Seed: GNEKKAKLANVVRKMMTNSQ
GNEYKAMLHNVTRKMMTNSQ

SEQ ID NO: 192562 - protein, 20 aa, Artificial Sequence
  Description of Artificial Sequence: Synthetic peptide
  Seed: GNEKKAKLANVVRKMMTNSQ
GNEYKAMLHNVVRKMMTNSQ

SEQ ID NO: 192563 - protein, 20 aa, Artificial Sequence
  Description of Artificial Sequence: Synthetic peptide
  Seed: GNEKKAKLANVVRKMMTNSQ
GNEYKAMLINVARKMMTNSQ

SEQ ID NO: 192564 - protein, 20 aa, Artificial Sequence
  Description of Artificial Sequence: Synthetic peptide
  Seed: GNEKKAKLANVVRKMMTNSQ
GNEYKAMLINVDRKMMTNSQ

SEQ ID NO: 192565 - protein, 20 aa, Artificial Sequence
  Description of Artificial Sequence: Synthetic peptide
  Seed: GNEKKAKLANVVRKMMTNSQ
GNEYKAMLINVERKMMTNSQ

SEQ ID NO: 192566 - protein, 20 aa, Artificial Sequence
  Description of Artificial Sequence: Synthetic peptide
  Seed: GNEKKAKLANVVRKMMTNSQ
GNEYKAMLINVFRKMMTNSQ

SEQ ID NO: 192567 - protein, 20 aa, Artificial Sequence
  Description of Artificial Sequence: Synthetic peptide
  Seed: GNEKKAKLANVVRKMMTNSQ
GNEYKAMLINVGRKMMTNSQ

SEQ ID NO: 192568 - protein, 20 aa, Artificial Sequence
  Description of Artificial Sequence: Synthetic peptide
  Seed: GNEKKAKLANVVRKMMTNSQ
GNEYKAMLINVHRKMMTNSQ

SEQ ID NO: 192569 - protein, 20 aa, Artificial Sequence
  Description of Artificial Sequence: Synthetic peptide
  Seed: GNEKKAKLANVVRKMMTNSQ
GNEYKAMLINVIRKMMTNSQ

SEQ ID NO: 192570 - protein, 20 aa, Artificial Sequence
  Description of Artificial Sequence: Synthetic peptide
  Seed: GNEKKAKLANVVRKMMTNSQ
GNEYKAMLINVKRKMMTNSQ

SEQ ID NO: 192571 - protein, 20 aa, Artificial Sequence
  Description of Artificial Sequence: Synthetic peptide
  Seed: GNEKKAKLANVVRKMMTNSQ
GNEYKAMLINVLRKMMTNSQ

SEQ ID NO: 192572 - protein, 20 aa, Artificial Sequence
  Description of Artificial Sequence: Synthetic peptide
  Seed: GNEKKAKLANVVRKMMTNSQ
GNEYKAMLINVMRKMMTNSQ

SEQ ID NO: 192573 - protein, 20 aa, Artificial Sequence
  Description of Artificial Sequence: Synthetic peptide
  Seed: GNEKKAKLANVVRKMMTNSQ
GNEYKAMLINVNRKMMTNSQ

SEQ ID NO: 192574 - protein, 20 aa, Artificial Sequence
  Description of Artificial Sequence: Synthetic peptide
  Seed: GNEKKAKLANVVRKMMTNSQ
GNEYKAMLINVPRKMMTNSQ

SEQ ID NO: 192575 - protein, 20 aa, Artificial Sequence
  Description of Artificial Sequence: Synthetic peptide
  Seed: GNEKKAKLANVVRKMMTNSQ
GNEYKAMLINVQRKMMTNSQ

SEQ ID NO: 192576 - protein, 20 aa, Artificial Sequence
  Description of Artificial Sequence: Synthetic peptide
  Seed: GNEKKAKLANVVRKMMTNSQ
GNEYKAMLINVRRKMMTNSQ

SEQ ID NO: 192577 - protein, 20 aa, Artificial Sequence
  Description of Artificial Sequence: Synthetic peptide
  Seed: GNEKKAKLANVVRKMMTNSQ
GNEYKAMLINVSRKMMTNSQ

SEQ ID NO: 192578 - protein, 20 aa, Artificial Sequence
  Description of Artificial Sequence: Synthetic peptide
  Seed: GNEKKAKLANVVRKMMTNSQ
GNEYKAMLINVTRKMMTNSQ

SEQ ID NO: 192579 - protein, 20 aa, Artificial Sequence
  Description of Artificial Sequence: Synthetic peptide
  Seed: GNEKKAKLANVVRKMMTNSQ
GNEYKAMLINVVRKMMTNSQ

SEQ ID NO: 192580 - protein, 20 aa, Artificial Sequence
  Description of Artificial Sequence: Synthetic peptide
  Seed: GNEKKAKLANVVRKMMTNSQ
GNEYKAMLINVYRKMMTNSQ

SEQ ID NO: 192581 - protein, 20 aa, Artificial Sequence
  Description of Artificial Sequence: Synthetic peptide
  Seed: GNEKKAKLANVVRKMMTNSQ
GNEYKAMLLNVARKMMTNSQ

SEQ ID NO: 192582 - protein, 20 aa, Artificial Sequence
  Description of Artificial Sequence: Synthetic peptide
  Seed: GNEKKAKLANVVRKMMTNSQ
GNEYKAMLLNVDRKMMTNSQ

SEQ ID NO: 192583 - protein, 20 aa, Artificial Sequence
  Description of Artificial Sequence: Synthetic peptide
  Seed: GNEKKAKLANVVRKMMTNSQ
GNEYKAMLLNVERKMMTNSQ

SEQ ID NO: 192584 - protein, 20 aa, Artificial Sequence
  Description of Artificial Sequence: Synthetic peptide
  Seed: GNEKKAKLANVVRKMMTNSQ
GNEYKAMLLNVGRKMMTNSQ

SEQ ID NO: 192585 - protein, 20 aa, Artificial Sequence
  Description of Artificial Sequence: Synthetic peptide
  Seed: GNEKKAKLANVVRKMMTNSQ
GNEYKAMLLNVHRKMMTNSQ

SEQ ID NO: 192586 - protein, 20 aa, Artificial Sequence
  Description of Artificial Sequence: Synthetic peptide
  Seed: GNEKKAKLANVVRKMMTNSQ
GNEYKAMLLNVIRKMMTNSQ

SEQ ID NO: 192587 - protein, 20 aa, Artificial Sequence
  Description of Artificial Sequence: Synthetic peptide
  Seed: GNEKKAKLANVVRKMMTNSQ
GNEYKAMLLNVLRKMMTNSQ

SEQ ID NO: 192588 - protein, 20 aa, Artificial Sequence
  Description of Artificial Sequence: Synthetic peptide
  Seed: GNEKKAKLANVVRKMMTNSQ
GNEYKAMLLNVMRKMMTNSQ

SEQ ID NO: 192589 - protein, 20 aa, Artificial Sequence
  Description of Artificial Sequence: Synthetic peptide
  Seed: GNEKKAKLANVVRKMMTNSQ
GNEYKAMLLNVNRKMMTNSQ

SEQ ID NO: 192590 - protein, 20 aa, Artificial Sequence
  Description of Artificial Sequence: Synthetic peptide
  Seed: GNEKKAKLANVVRKMMTNSQ
GNEYKAMLLNVPRKMMTNSQ

SEQ ID NO: 192591 - protein, 20 aa, Artificial Sequence
  Description of Artificial Sequence: Synthetic peptide
  Seed: GNEKKAKLANVVRKMMTNSQ
GNEYKAMLLNVSRKMMTNSQ

SEQ ID NO: 192592 - protein, 20 aa, Artificial Sequence
  Description of Artificial Sequence: Synthetic peptide
  Seed: GNEKKAKLANVVRKMMTNSQ
GNEYKAMLLNVTRKMMTNSQ

SEQ ID NO: 192593 - protein, 20 aa, Artificial Sequence
  Description of Artificial Sequence: Synthetic peptide
  Seed: GNEKKAKLANVVRKMMTNSQ
GNEYKAMLLNVVRKMMTNSQ

SEQ ID NO: 192594 - protein, 20 aa, Artificial Sequence
  Description of Artificial Sequence: Synthetic peptide
  Seed: GNEKKAKLANVVRKMMTNSQ
GNEYKAMLMNVARKMMTNSQ

SEQ ID NO: 192595 - protein, 20 aa, Artificial Sequence
  Description of Artificial Sequence: Synthetic peptide
  Seed: GNEKKAKLANVVRKMMTNSQ
GNEYKAMLMNVDRKMMTNSQ

SEQ ID NO: 192596 - protein, 20 aa, Artificial Sequence
  Description of Artificial Sequence: Synthetic peptide
  Seed: GNEKKAKLANVVRKMMTNSQ
GNEYKAMLMNVERKMMTNSQ

SEQ ID NO: 192597 - protein, 20 aa, Artificial Sequence
  Description of Artificial Sequence: Synthetic peptide
  Seed: GNEKKAKLANVVRKMMTNSQ
GNEYKAMLMNVGRKMMTNSQ

SEQ ID NO: 192598 - protein, 20 aa, Artificial Sequence
  Description of Artificial Sequence: Synthetic peptide
  Seed: GNEKKAKLANVVRKMMTNSQ
GNEYKAMLMNVHRKMMTNSQ

SEQ ID NO: 192599 - protein, 20 aa, Artificial Sequence
  Description of Artificial Sequence: Synthetic peptide
  Seed: GNEKKAKLANVVRKMMTNSQ
GNEYKAMLMNVIRKMMTNSQ

SEQ ID NO: 192600 - protein, 20 aa, Artificial Sequence
  Description of Artificial Sequence: Synthetic peptide
  Seed: GNEKKAKLANVVRKMMTNSQ
GNEYKAMLMNVLRKMMTNSQ

SEQ ID NO: 192601 - protein, 20 aa, Artificial Sequence
  Description of Artificial Sequence: Synthetic peptide
  Seed: GNEKKAKLANVVRKMMTNSQ
GNEYKAMLMNVMRKMMTNSQ

SEQ ID NO: 192602 - protein, 20 aa, Artificial Sequence
  Description of Artificial Sequence: Synthetic peptide
  Seed: GNEKKAKLANVVRKMMTNSQ
GNEYKAMLMNVNRKMMTNSQ

SEQ ID NO: 192603 - protein, 20 aa, Artificial Sequence
  Description of Artificial Sequence: Synthetic peptide
  Seed: GNEKKAKLANVVRKMMTNSQ
GNEYKAMLMNVPRKMMTNSQ

SEQ ID NO: 192604 - protein, 20 aa, Artificial Sequence
  Description of Artificial Sequence: Synthetic peptide
  Seed: GNEKKAKLANVVRKMMTNSQ
GNEYKAMLMNVQRKMMTNSQ

SEQ ID NO: 192605 - protein, 20 aa, Artificial Sequence
  Description of Artificial Sequence: Synthetic peptide
  Seed: GNEKKAKLANVVRKMMTNSQ
GNEYKAMLMNVSRKMMTNSQ

SEQ ID NO: 192606 - protein, 20 aa, Artificial Sequence
  Description of Artificial Sequence: Synthetic peptide
  Seed: GNEKKAKLANVVRKMMTNSQ
GNEYKAMLMNVTRKMMTNSQ

SEQ ID NO: 192607 - protein, 20 aa, Artificial Sequence
  Description of Artificial Sequence: Synthetic peptide
  Seed: GNEKKAKLANVVRKMMTNSQ
GNEYKAMLMNVVRKMMTNSQ

SEQ ID NO: 192608 - protein, 20 aa, Artificial Sequence
  Description of Artificial Sequence: Synthetic peptide
  Seed: GNEKKAKLANVVRKMMTNSQ
GNEYKAMLNNVARKMMTNSQ

SEQ ID NO: 192609 - protein, 20 aa, Artificial Sequence
  Description of Artificial Sequence: Synthetic peptide
  Seed: GNEKKAKLANVVRKMMTNSQ
GNEYKAMLNNVCRKMMTNSQ

SEQ ID NO: 192610 - protein, 20 aa, Artificial Sequence
  Description of Artificial Sequence: Synthetic peptide
  Seed: GNEKKAKLANVVRKMMTNSQ
GNEYKAMLNNVDRKMMTNSQ

SEQ ID NO: 192611 - protein, 20 aa, Artificial Sequence
  Description of Artificial Sequence: Synthetic peptide
  Seed: GNEKKAKLANVVRKMMTNSQ
GNEYKAMLNNVERKMMTNSQ

SEQ ID NO: 192612 - protein, 20 aa, Artificial Sequence
  Description of Artificial Sequence: Synthetic peptide
  Seed: GNEKKAKLANVVRKMMTNSQ
GNEYKAMLNNVFRKMMTNSQ

SEQ ID NO: 192613 - protein, 20 aa, Artificial Sequence
  Description of Artificial Sequence: Synthetic peptide
  Seed: GNEKKAKLANVVRKMMTNSQ
GNEYKAMLNNVGRKMMTNSQ

SEQ ID NO: 192614 - protein, 20 aa, Artificial Sequence
  Description of Artificial Sequence: Synthetic peptide
  Seed: GNEKKAKLANVVRKMMTNSQ
GNEYKAMLNNVHRKMMTNSQ

SEQ ID NO: 192615 - protein, 20 aa, Artificial Sequence
  Description of Artificial Sequence: Synthetic peptide
  Seed: GNEKKAKLANVVRKMMTNSQ
GNEYKAMLNNVIRKMMTNSQ

SEQ ID NO: 192616 - protein, 20 aa, Artificial Sequence
  Description of Artificial Sequence: Synthetic peptide
  Seed: GNEKKAKLANVVRKMMTNSQ
GNEYKAMLNNVLRKMMTNSQ

SEQ ID NO: 192617 - protein, 20 aa, Artificial Sequence
  Description of Artificial Sequence: Synthetic peptide
  Seed: GNEKKAKLANVVRKMMTNSQ
GNEYKAMLNNVMRKMMTNSQ

SEQ ID NO: 192618 - protein, 20 aa, Artificial Sequence
  Description of Artificial Sequence: Synthetic peptide
  Seed: GNEKKAKLANVVRKMMTNSQ
GNEYKAMLNNVNRKMMTNSQ

SEQ ID NO: 192619 - protein, 20 aa, Artificial Sequence
  Description of Artificial Sequence: Synthetic peptide
  Seed: GNEKKAKLANVVRKMMTNSQ
GNEYKAMLNNVPRKMMTNSQ

SEQ ID NO: 192620 - protein, 20 aa, Artificial Sequence
  Description of Artificial Sequence: Synthetic peptide
  Seed: GNEKKAKLANVVRKMMTNSQ
GNEYKAMLNNVQRKMMTNSQ

SEQ ID NO: 192621 - protein, 20 aa, Artificial Sequence
  Description of Artificial Sequence: Synthetic peptide
  Seed: GNEKKAKLANVVRKMMTNSQ
GNEYKAMLNNVSRKMMTNSQ

SEQ ID NO: 192622 - protein, 20 aa, Artificial Sequence
  Description of Artificial Sequence: Synthetic peptide
  Seed: GNEKKAKLANVVRKMMTNSQ
GNEYKAMLNNVTRKMMTNSQ

SEQ ID NO: 192623 - protein, 20 aa, Artificial Sequence
  Description of Artificial Sequence: Synthetic peptide
  Seed: GNEKKAKLANVVRKMMTNSQ
GNEYKAMLNNVVRKMMTNSQ

SEQ ID NO: 192624 - protein, 20 aa, Artificial Sequence
  Description of Artificial Sequence: Synthetic peptide
  Seed: GNEKKAKLANVVRKMMTNSQ
GNEYKAMLNNVYRKMMTNSQ

SEQ ID NO: 192625 - protein, 20 aa, Artificial Sequence
  Description of Artificial Sequence: Synthetic peptide
  Seed: GNEKKAKLANVVRKMMTNSQ
GNEYKAMLPNVARKMMTNSQ

SEQ ID NO: 192626 - protein, 20 aa, Artificial Sequence
  Description of Artificial Sequence: Synthetic peptide
  Seed: GNEKKAKLANVVRKMMTNSQ
GNEYKAMLPNVCRKMMTNSQ

SEQ ID NO: 192627 - protein, 20 aa, Artificial Sequence
  Description of Artificial Sequence: Synthetic peptide
  Seed: GNEKKAKLANVVRKMMTNSQ
GNEYKAMLPNVDRKMMTNSQ

SEQ ID NO: 192628 - protein, 20 aa, Artificial Sequence
  Description of Artificial Sequence: Synthetic peptide
  Seed: GNEKKAKLANVVRKMMTNSQ
GNEYKAMLPNVERKMMTNSQ

SEQ ID NO: 192629 - protein, 20 aa, Artificial Sequence
  Description of Artificial Sequence: Synthetic peptide
  Seed: GNEKKAKLANVVRKMMTNSQ
GNEYKAMLPNVFRKMMTNSQ

SEQ ID NO: 192630 - protein, 20 aa, Artificial Sequence
  Description of Artificial Sequence: Synthetic peptide
  Seed: GNEKKAKLANVVRKMMTNSQ
GNEYKAMLPNVGRKMMTNSQ

SEQ ID NO: 192631 - protein, 20 aa, Artificial Sequence
  Description of Artificial Sequence: Synthetic peptide
  Seed: GNEKKAKLANVVRKMMTNSQ
GNEYKAMLPNVHRKMMTNSQ

SEQ ID NO: 192632 - protein, 20 aa, Artificial Sequence
  Description of Artificial Sequence: Synthetic peptide
  Seed: GNEKKAKLANVVRKMMTNSQ
GNEYKAMLPNVIRKMMTNSQ

SEQ ID NO: 192633 - protein, 20 aa, Artificial Sequence
  Description of Artificial Sequence: Synthetic peptide
  Seed: GNEKKAKLANVVRKMMTNSQ
GNEYKAMLPNVKRKMMTNSQ

SEQ ID NO: 192634 - protein, 20 aa, Artificial Sequence
  Description of Artificial Sequence: Synthetic peptide
  Seed: GNEKKAKLANVVRKMMTNSQ
GNEYKAMLPNVLRKMMTNSQ

SEQ ID NO: 192635 - protein, 20 aa, Artificial Sequence
  Description of Artificial Sequence: Synthetic peptide
  Seed: GNEKKAKLANVVRKMMTNSQ
GNEYKAMLPNVMRKMMTNSQ

SEQ ID NO: 192636 - protein, 20 aa, Artificial Sequence
  Description of Artificial Sequence: Synthetic peptide
  Seed: GNEKKAKLANVVRKMMTNSQ
GNEYKAMLPNVNRKMMTNSQ

SEQ ID NO: 192637 - protein, 20 aa, Artificial Sequence
  Description of Artificial Sequence: Synthetic peptide
  Seed: GNEKKAKLANVVRKMMTNSQ
GNEYKAMLPNVPRKMMTNSQ

SEQ ID NO: 192638 - protein, 20 aa, Artificial Sequence
  Description of Artificial Sequence: Synthetic peptide
  Seed: GNEKKAKLANVVRKMMTNSQ
GNEYKAMLPNVQRKMMTNSQ

SEQ ID NO: 192639 - protein, 20 aa, Artificial Sequence
  Description of Artificial Sequence: Synthetic peptide
  Seed: GNEKKAKLANVVRKMMTNSQ
GNEYKAMLPNVRRKMMTNSQ

SEQ ID NO: 192640 - protein, 20 aa, Artificial Sequence
  Description of Artificial Sequence: Synthetic peptide
  Seed: GNEKKAKLANVVRKMMTNSQ
GNEYKAMLPNVSRKMMTNSQ

SEQ ID NO: 192641 - protein, 20 aa, Artificial Sequence
  Description of Artificial Sequence: Synthetic peptide
  Seed: GNEKKAKLANVVRKMMTNSQ
GNEYKAMLPNVTRKMMTNSQ

SEQ ID NO: 192642 - protein, 20 aa, Artificial Sequence
  Description of Artificial Sequence: Synthetic peptide
  Seed: GNEKKAKLANVVRKMMTNSQ
GNEYKAMLPNVVRKMMTNSQ

SEQ ID NO: 192643 - protein, 20 aa, Artificial Sequence
  Description of Artificial Sequence: Synthetic peptide
  Seed: GNEKKAKLANVVRKMMTNSQ
GNEYKAMLPNVWRKMMTNSQ

SEQ ID NO: 192644 - protein, 20 aa, Artificial Sequence
  Description of Artificial Sequence: Synthetic peptide
  Seed: GNEKKAKLANVVRKMMTNSQ
GNEYKAMLPNVYRKMMTNSQ

SEQ ID NO: 192645 - protein, 20 aa, Artificial Sequence
  Description of Artificial Sequence: Synthetic peptide
  Seed: GNEKKAKLANVVRKMMTNSQ
GNEYKAMLQNVARKMMTNSQ

SEQ ID NO: 192646 - protein, 20 aa, Artificial Sequence
  Description of Artificial Sequence: Synthetic peptide
  Seed: GNEKKAKLANVVRKMMTNSQ
GNEYKAMLQNVIRKMMTNSQ

SEQ ID NO: 192647 - protein, 20 aa, Artificial Sequence
  Description of Artificial Sequence: Synthetic peptide
  Seed: GNEKKAKLANVVRKMMTNSQ
GNEYKAMLQNVLRKMMTNSQ

SEQ ID NO: 192648 - protein, 20 aa, Artificial Sequence
  Description of Artificial Sequence: Synthetic peptide
  Seed: GNEKKAKLANVVRKMMTNSQ
GNEYKAMLQNVMRKMMTNSQ

SEQ ID NO: 192649 - protein, 20 aa, Artificial Sequence
  Description of Artificial Sequence: Synthetic peptide
  Seed: GNEKKAKLANVVRKMMTNSQ
GNEYKAMLQNVNRKMMTNSQ

SEQ ID NO: 192650 - protein, 20 aa, Artificial Sequence
  Description of Artificial Sequence: Synthetic peptide
  Seed: GNEKKAKLANVVRKMMTNSQ
GNEYKAMLQNVSRKMMTNSQ

SEQ ID NO: 192651 - protein, 20 aa, Artificial Sequence
  Description of Artificial Sequence: Synthetic peptide
  Seed: GNEKKAKLANVVRKMMTNSQ
GNEYKAMLQNVTRKMMTNSQ

SEQ ID NO: 192652 - protein, 20 aa, Artificial Sequence
  Description of Artificial Sequence: Synthetic peptide
  Seed: GNEKKAKLANVVRKMMTNSQ
GNEYKAMLQNVVRKMMTNSQ

SEQ ID NO: 192653 - protein, 20 aa, Artificial Sequence
  Description of Artificial Sequence: Synthetic peptide
  Seed: GNEKKAKLANVVRKMMTNSQ
GNEYKAMLSNVARKMMTNSQ

SEQ ID NO: 192654 - protein, 20 aa, Artificial Sequence
  Description of Artificial Sequence: Synthetic peptide
  Seed: GNEKKAKLANVVRKMMTNSQ
GNEYKAMLSNVCRKMMTNSQ

SEQ ID NO: 192655 - protein, 20 aa, Artificial Sequence
  Description of Artificial Sequence: Synthetic peptide
  Seed: GNEKKAKLANVVRKMMTNSQ
GNEYKAMLSNVDRKMMTNSQ

SEQ ID NO: 192656 - protein, 20 aa, Artificial Sequence
  Description of Artificial Sequence: Synthetic peptide
  Seed: GNEKKAKLANVVRKMMTNSQ
GNEYKAMLSNVERKMMTNSQ

SEQ ID NO: 192657 - protein, 20 aa, Artificial Sequence
  Description of Artificial Sequence: Synthetic peptide
  Seed: GNEKKAKLANVVRKMMTNSQ
GNEYKAMLSNVFRKMMTNSQ

SEQ ID NO: 192658 - protein, 20 aa, Artificial Sequence
  Description of Artificial Sequence: Synthetic peptide
  Seed: GNEKKAKLANVVRKMMTNSQ
GNEYKAMLSNVGRKMMTNSQ

SEQ ID NO: 192659 - protein, 20 aa, Artificial Sequence
  Description of Artificial Sequence: Synthetic peptide
  Seed: GNEKKAKLANVVRKMMTNSQ
GNEYKAMLSNVHRKMMTNSQ

SEQ ID NO: 192660 - protein, 20 aa, Artificial Sequence
  Description of Artificial Sequence: Synthetic peptide
  Seed: GNEKKAKLANVVRKMMTNSQ
GNEYKAMLSNVIRKMMTNSQ

SEQ ID NO: 192661 - protein, 20 aa, Artificial Sequence
  Description of Artificial Sequence: Synthetic peptide
  Seed: GNEKKAKLANVVRKMMTNSQ
GNEYKAMLSNVKRKMMTNSQ

SEQ ID NO: 192662 - protein, 20 aa, Artificial Sequence
  Description of Artificial Sequence: Synthetic peptide
  Seed: GNEKKAKLANVVRKMMTNSQ
GNEYKAMLSNVLRKMMTNSQ

SEQ ID NO: 192663 - protein, 20 aa, Artificial Sequence
  Description of Artificial Sequence: Synthetic peptide
  Seed: GNEKKAKLANVVRKMMTNSQ
GNEYKAMLSNVMRKMMTNSQ

SEQ ID NO: 192664 - protein, 20 aa, Artificial Sequence
  Description of Artificial Sequence: Synthetic peptide
  Seed: GNEKKAKLANVVRKMMTNSQ
GNEYKAMLSNVNRKMMTNSQ

SEQ ID NO: 192665 - protein, 20 aa, Artificial Sequence
  Description of Artificial Sequence: Synthetic peptide
  Seed: GNEKKAKLANVVRKMMTNSQ
GNEYKAMLSNVPRKMMTNSQ

SEQ ID NO: 192666 - protein, 20 aa, Artificial Sequence
  Description of Artificial Sequence: Synthetic peptide
  Seed: GNEKKAKLANVVRKMMTNSQ
GNEYKAMLSNVQRKMMTNSQ

SEQ ID NO: 192667 - protein, 20 aa, Artificial Sequence
  Description of Artificial Sequence: Synthetic peptide
  Seed: GNEKKAKLANVVRKMMTNSQ
GNEYKAMLSNVRRKMMTNSQ

SEQ ID NO: 192668 - protein, 20 aa, Artificial Sequence
  Description of Artificial Sequence: Synthetic peptide
  Seed: GNEKKAKLANVVRKMMTNSQ
GNEYKAMLSNVSRKMMTNSQ

SEQ ID NO: 192669 - protein, 20 aa, Artificial Sequence
  Description of Artificial Sequence: Synthetic peptide
  Seed: GNEKKAKLANVVRKMMTNSQ
GNEYKAMLSNVTRKMMTNSQ

SEQ ID NO: 192670 - protein, 20 aa, Artificial Sequence
  Description of Artificial Sequence: Synthetic peptide
  Seed: GNEKKAKLANVVRKMMTNSQ
GNEYKAMLSNVVRKMMTNSQ

SEQ ID NO: 192671 - protein, 20 aa, Artificial Sequence
  Description of Artificial Sequence: Synthetic peptide
  Seed: GNEKKAKLANVVRKMMTNSQ
GNEYKAMLSNVYRKMMTNSQ

SEQ ID NO: 192672 - protein, 20 aa, Artificial Sequence
  Description of Artificial Sequence: Synthetic peptide
  Seed: GNEKKAKLANVVRKMMTNSQ
GNEYKAMLTNVARKMMTNSQ

SEQ ID NO: 192673 - protein, 20 aa, Artificial Sequence
  Description of Artificial Sequence: Synthetic peptide
  Seed: GNEKKAKLANVVRKMMTNSQ
GNEYKAMLTNVCRKMMTNSQ

SEQ ID NO: 192674 - protein, 20 aa, Artificial Sequence
  Description of Artificial Sequence: Synthetic peptide
  Seed: GNEKKAKLANVVRKMMTNSQ
GNEYKAMLTNVDRKMMTNSQ

SEQ ID NO: 192675 - protein, 20 aa, Artificial Sequence
  Description of Artificial Sequence: Synthetic peptide
  Seed: GNEKKAKLANVVRKMMTNSQ
GNEYKAMLTNVERKMMTNSQ

SEQ ID NO: 192676 - protein, 20 aa, Artificial Sequence
  Description of Artificial Sequence: Synthetic peptide
  Seed: GNEKKAKLANVVRKMMTNSQ
GNEYKAMLTNVFRKMMTNSQ

SEQ ID NO: 192677 - protein, 20 aa, Artificial Sequence
  Description of Artificial Sequence: Synthetic peptide
  Seed: GNEKKAKLANVVRKMMTNSQ
GNEYKAMLTNVGRKMMTNSQ

SEQ ID NO: 192678 - protein, 20 aa, Artificial Sequence
  Description of Artificial Sequence: Synthetic peptide
  Seed: GNEKKAKLANVVRKMMTNSQ
GNEYKAMLTNVHRKMMTNSQ

SEQ ID NO: 192679 - protein, 20 aa, Artificial Sequence
  Description of Artificial Sequence: Synthetic peptide
  Seed: GNEKKAKLANVVRKMMTNSQ
GNEYKAMLTNVIRKMMTNSQ

SEQ ID NO: 192680 - protein, 20 aa, Artificial Sequence
  Description of Artificial Sequence: Synthetic peptide
  Seed: GNEKKAKLANVVRKMMTNSQ
GNEYKAMLTNVKRKMMTNSQ

SEQ ID NO: 192681 - protein, 20 aa, Artificial Sequence
  Description of Artificial Sequence: Synthetic peptide
  Seed: GNEKKAKLANVVRKMMTNSQ
GNEYKAMLTNVLRKMMTNSQ

SEQ ID NO: 192682 - protein, 20 aa, Artificial Sequence
  Description of Artificial Sequence: Synthetic peptide
  Seed: GNEKKAKLANVVRKMMTNSQ
GNEYKAMLTNVMRKMMTNSQ

SEQ ID NO: 192683 - protein, 20 aa, Artificial Sequence
  Description of Artificial Sequence: Synthetic peptide
  Seed: GNEKKAKLANVVRKMMTNSQ
GNEYKAMLTNVNRKMMTNSQ

SEQ ID NO: 192684 - protein, 20 aa, Artificial Sequence
  Description of Artificial Sequence: Synthetic peptide
  Seed: GNEKKAKLANVVRKMMTNSQ
GNEYKAMLTNVPRKMMTNSQ

SEQ ID NO: 192685 - protein, 20 aa, Artificial Sequence
  Description of Artificial Sequence: Synthetic peptide
  Seed: GNEKKAKLANVVRKMMTNSQ
GNEYKAMLTNVQRKMMTNSQ

SEQ ID NO: 192686 - protein, 20 aa, Artificial Sequence
  Description of Artificial Sequence: Synthetic peptide
  Seed: GNEKKAKLANVVRKMMTNSQ
GNEYKAMLTNVRRKMMTNSQ

SEQ ID NO: 192687 - protein, 20 aa, Artificial Sequence
  Description of Artificial Sequence: Synthetic peptide
  Seed: GNEKKAKLANVVRKMMTNSQ
GNEYKAMLTNVSRKMMTNSQ

SEQ ID NO: 192688 - protein, 20 aa, Artificial Sequence
  Description of Artificial Sequence: Synthetic peptide
  Seed: GNEKKAKLANVVRKMMTNSQ
GNEYKAMLTNVTRKMMTNSQ

SEQ ID NO: 192689 - protein, 20 aa, Artificial Sequence
  Description of Artificial Sequence: Synthetic peptide
  Seed: GNEKKAKLANVVRKMMTNSQ
GNEYKAMLTNVVRKMMTNSQ

SEQ ID NO: 192690 - protein, 20 aa, Artificial Sequence
  Description of Artificial Sequence: Synthetic peptide
  Seed: GNEKKAKLANVVRKMMTNSQ
GNEYKAMLTNVYRKMMTNSQ

SEQ ID NO: 192691 - protein, 20 aa, Artificial Sequence
  Description of Artificial Sequence: Synthetic peptide
  Seed: GNEKKAKLANVVRKMMTNSQ
GNEYKAMLVNVARKMMTNSQ

SEQ ID NO: 192692 - protein, 20 aa, Artificial Sequence
  Description of Artificial Sequence: Synthetic peptide
  Seed: GNEKKAKLANVVRKMMTNSQ
GNEYKAMLVNVCRKMMTNSQ

SEQ ID NO: 192693 - protein, 20 aa, Artificial Sequence
  Description of Artificial Sequence: Synthetic peptide
  Seed: GNEKKAKLANVVRKMMTNSQ
GNEYKAMLVNVDRKMMTNSQ

SEQ ID NO: 192694 - protein, 20 aa, Artificial Sequence
  Description of Artificial Sequence: Synthetic peptide
  Seed: GNEKKAKLANVVRKMMTNSQ
GNEYKAMLVNVERKMMTNSQ

SEQ ID NO: 192695 - protein, 20 aa, Artificial Sequence
  Description of Artificial Sequence: Synthetic peptide
  Seed: GNEKKAKLANVVRKMMTNSQ
GNEYKAMLVNVFRKMMTNSQ

SEQ ID NO: 192696 - protein, 20 aa, Artificial Sequence
  Description of Artificial Sequence: Synthetic peptide
  Seed: GNEKKAKLANVVRKMMTNSQ
GNEYKAMLVNVGRKMMTNSQ

SEQ ID NO: 192697 - protein, 20 aa, Artificial Sequence
  Description of Artificial Sequence: Synthetic peptide
  Seed: GNEKKAKLANVVRKMMTNSQ
GNEYKAMLVNVHRKMMTNSQ

SEQ ID NO: 192698 - protein, 20 aa, Artificial Sequence
  Description of Artificial Sequence: Synthetic peptide
  Seed: GNEKKAKLANVVRKMMTNSQ
GNEYKAMLVNVIRKMMTNSQ

SEQ ID NO: 192699 - protein, 20 aa, Artificial Sequence
  Description of Artificial Sequence: Synthetic peptide
  Seed: GNEKKAKLANVVRKMMTNSQ
GNEYKAMLVNVKRKMMTNSQ

SEQ ID NO: 192700 - protein, 20 aa, Artificial Sequence
  Description of Artificial Sequence: Synthetic peptide
  Seed: GNEKKAKLANVVRKMMTNSQ
GNEYKAMLVNVLRKMMTNSQ

SEQ ID NO: 192701 - protein, 20 aa, Artificial Sequence
  Description of Artificial Sequence: Synthetic peptide
  Seed: GNEKKAKLANVVRKMMTNSQ
GNEYKAMLVNVMRKMMTNSQ

SEQ ID NO: 192702 - protein, 20 aa, Artificial Sequence
  Description of Artificial Sequence: Synthetic peptide
  Seed: GNEKKAKLANVVRKMMTNSQ
GNEYKAMLVNVNRKMMTNSQ

SEQ ID NO: 192703 - protein, 20 aa, Artificial Sequence
  Description of Artificial Sequence: Synthetic peptide
  Seed: GNEKKAKLANVVRKMMTNSQ
GNEYKAMLVNVPRKMMTNSQ

SEQ ID NO: 192704 - protein, 20 aa, Artificial Sequence
  Description of Artificial Sequence: Synthetic peptide
  Seed: GNEKKAKLANVVRKMMTNSQ
GNEYKAMLVNVQRKMMTNSQ

SEQ ID NO: 192705 - protein, 20 aa, Artificial Sequence
  Description of Artificial Sequence: Synthetic peptide
  Seed: GNEKKAKLANVVRKMMTNSQ
GNEYKAMLVNVRRKMMTNSQ

SEQ ID NO: 192706 - protein, 20 aa, Artificial Sequence
  Description of Artificial Sequence: Synthetic peptide
  Seed: GNEKKAKLANVVRKMMTNSQ
GNEYKAMLVNVSRKMMTNSQ

SEQ ID NO: 192707 - protein, 20 aa, Artificial Sequence
  Description of Artificial Sequence: Synthetic peptide
  Seed: GNEKKAKLANVVRKMMTNSQ
GNEYKAMLVNVTRKMMTNSQ

SEQ ID NO: 192708 - protein, 20 aa, Artificial Sequence
  Description of Artificial Sequence: Synthetic peptide
  Seed: GNEKKAKLANVVRKMMTNSQ
GNEYKAMLVNVVRKMMTNSQ

SEQ ID NO: 192709 - protein, 20 aa, Artificial Sequence
  Description of Artificial Sequence: Synthetic peptide
  Seed: GNEKKAKLANVVRKMMTNSQ
GNEYKAMLVNVYRKMMTNSQ

SEQ ID NO: 192710 - protein, 20 aa, Artificial Sequence
  Description of Artificial Sequence: Synthetic peptide
  Seed: GNEKKAKLANVVRKMMTNSQ
GNEYKAMLWNVARKMMTNSQ

SEQ ID NO: 192711 - protein, 20 aa, Artificial Sequence
  Description of Artificial Sequence: Synthetic peptide
  Seed: GNEKKAKLANVVRKMMTNSQ
GNEYKAMLWNVIRKMMTNSQ

SEQ ID NO: 192712 - protein, 20 aa, Artificial Sequence
  Description of Artificial Sequence: Synthetic peptide
  Seed: GNEKKAKLANVVRKMMTNSQ
GNEYKAMLWNVLRKMMTNSQ

SEQ ID NO: 192713 - protein, 20 aa, Artificial Sequence
  Description of Artificial Sequence: Synthetic peptide
  Seed: GNEKKAKLANVVRKMMTNSQ
GNEYKAMLWNVVRKMMTNSQ

SEQ ID NO: 192714 - protein, 20 aa, Artificial Sequence
  Description of Artificial Sequence: Synthetic peptide
  Seed: GNEKKAKLANVVRKMMTNSQ
GNEYKAMLYNVARKMMTNSQ

SEQ ID NO: 192715 - protein, 20 aa, Artificial Sequence
  Description of Artificial Sequence: Synthetic peptide
  Seed: GNEKKAKLANVVRKMMTNSQ
GNEYKAMLYNVIRKMMTNSQ

SEQ ID NO: 192716 - protein, 20 aa, Artificial Sequence
  Description of Artificial Sequence: Synthetic peptide
  Seed: GNEKKAKLANVVRKMMTNSQ
GNEYKAMLYNVLRKMMTNSQ

SEQ ID NO: 192717 - protein, 20 aa, Artificial Sequence
  Description of Artificial Sequence: Synthetic peptide
  Seed: GNEKKAKLANVVRKMMTNSQ
GNEYKAMLYNVMRKMMTNSQ

SEQ ID NO: 192718 - protein, 20 aa, Artificial Sequence
  Description of Artificial Sequence: Synthetic peptide
  Seed: GNEKKAKLANVVRKMMTNSQ
GNEYKAMLYNVVRKMMTNSQ

SEQ ID NO: 192719 - protein, 20 aa, Artificial Sequence
  Description of Artificial Sequence: Synthetic peptide
  Seed: GNEKKAKLANVVRKMMTNSQ
GNEYKANLANVARKMMTNSQ

SEQ ID NO: 192720 - protein, 20 aa, Artificial Sequence
  Description of Artificial Sequence: Synthetic peptide
  Seed: GNEKKAKLANVVRKMMTNSQ
GNEYKANLANVFRKMMTNSQ

SEQ ID NO: 192721 - protein, 20 aa, Artificial Sequence
  Description of Artificial Sequence: Synthetic peptide
  Seed: GNEKKAKLANVVRKMMTNSQ
GNEYKANLANVGRKMMTNSQ

SEQ ID NO: 192722 - protein, 20 aa, Artificial Sequence
  Description of Artificial Sequence: Synthetic peptide
  Seed: GNEKKAKLANVVRKMMTNSQ
GNEYKANLANVIRKMMTNSQ

SEQ ID NO: 192723 - protein, 20 aa, Artificial Sequence
  Description of Artificial Sequence: Synthetic peptide
  Seed: GNEKKAKLANVVRKMMTNSQ
GNEYKANLANVLRKMMTNSQ

SEQ ID NO: 192724 - protein, 20 aa, Artificial Sequence
  Description of Artificial Sequence: Synthetic peptide
  Seed: GNEKKAKLANVVRKMMTNSQ
GNEYKANLANVMRKMMTNSQ

SEQ ID NO: 192725 - protein, 20 aa, Artificial Sequence
  Description of Artificial Sequence: Synthetic peptide
  Seed: GNEKKAKLANVVRKMMTNSQ
GNEYKANLANVNRKMMTNSQ

SEQ ID NO: 192726 - protein, 20 aa, Artificial Sequence
  Description of Artificial Sequence: Synthetic peptide
  Seed: GNEKKAKLANVVRKMMTNSQ
GNEYKANLANVSRKMMTNSQ

SEQ ID NO: 192727 - protein, 20 aa, Artificial Sequence
  Description of Artificial Sequence: Synthetic peptide
  Seed: GNEKKAKLANVVRKMMTNSQ
GNEYKANLANVTRKMMTNSQ

SEQ ID NO: 192728 - protein, 20 aa, Artificial Sequence
  Description of Artificial Sequence: Synthetic peptide
  Seed: GNEKKAKLANVVRKMMTNSQ
GNEYKANLANVVRKMMTNSQ

SEQ ID NO: 192729 - protein, 20 aa, Artificial Sequence
  Description of Artificial Sequence: Synthetic peptide
  Seed: GNEKKAKLANVVRKMMTNSQ
GNEYKANLFNVARKMMTNSQ

SEQ ID NO: 192730 - protein, 20 aa, Artificial Sequence
  Description of Artificial Sequence: Synthetic peptide
  Seed: GNEKKAKLANVVRKMMTNSQ
GNEYKANLFNVFRKMMTNSQ

SEQ ID NO: 192731 - protein, 20 aa, Artificial Sequence
  Description of Artificial Sequence: Synthetic peptide
  Seed: GNEKKAKLANVVRKMMTNSQ
GNEYKANLFNVIRKMMTNSQ

SEQ ID NO: 192732 - protein, 20 aa, Artificial Sequence
  Description of Artificial Sequence: Synthetic peptide
  Seed: GNEKKAKLANVVRKMMTNSQ
GNEYKANLFNVLRKMMTNSQ

SEQ ID NO: 192733 - protein, 20 aa, Artificial Sequence
  Description of Artificial Sequence: Synthetic peptide
  Seed: GNEKKAKLANVVRKMMTNSQ
GNEYKANLFNVMRKMMTNSQ

SEQ ID NO: 192734 - protein, 20 aa, Artificial Sequence
  Description of Artificial Sequence: Synthetic peptide
  Seed: GNEKKAKLANVVRKMMTNSQ
GNEYKANLFNVSRKMMTNSQ

SEQ ID NO: 192735 - protein, 20 aa, Artificial Sequence
  Description of Artificial Sequence: Synthetic peptide
  Seed: GNEKKAKLANVVRKMMTNSQ
GNEYKANLFNVTRKMMTNSQ

SEQ ID NO: 192736 - protein, 20 aa, Artificial Sequence
  Description of Artificial Sequence: Synthetic peptide
  Seed: GNEKKAKLANVVRKMMTNSQ
GNEYKANLFNVVRKMMTNSQ

SEQ ID NO: 192737 - protein, 20 aa, Artificial Sequence
  Description of Artificial Sequence: Synthetic peptide
  Seed: GNEKKAKLANVVRKMMTNSQ
GNEYKANLFNVYRKMMTNSQ

SEQ ID NO: 192738 - protein, 20 aa, Artificial Sequence
  Description of Artificial Sequence: Synthetic peptide
  Seed: GNEKKAKLANVVRKMMTNSQ
GNEYKANLGNVARKMMTNSQ

SEQ ID NO: 192739 - protein, 20 aa, Artificial Sequence
  Description of Artificial Sequence: Synthetic peptide
  Seed: GNEKKAKLANVVRKMMTNSQ
GNEYKANLGNVIRKMMTNSQ

SEQ ID NO: 192740 - protein, 20 aa, Artificial Sequence
  Description of Artificial Sequence: Synthetic peptide
  Seed: GNEKKAKLANVVRKMMTNSQ
GNEYKANLGNVLRKMMTNSQ

SEQ ID NO: 192741 - protein, 20 aa, Artificial Sequence
  Description of Artificial Sequence: Synthetic peptide
  Seed: GNEKKAKLANVVRKMMTNSQ
GNEYKANLGNVMRKMMTNSQ

SEQ ID NO: 192742 - protein, 20 aa, Artificial Sequence
  Description of Artificial Sequence: Synthetic peptide
  Seed: GNEKKAKLANVVRKMMTNSQ
GNEYKANLGNVVRKMMTNSQ

SEQ ID NO: 192743 - protein, 20 aa, Artificial Sequence
  Description of Artificial Sequence: Synthetic peptide
  Seed: GNEKKAKLANVVRKMMTNSQ
GNEYKANLLNVIRKMMTNSQ

SEQ ID NO: 192744 - protein, 20 aa, Artificial Sequence
  Description of Artificial Sequence: Synthetic peptide
  Seed: GNEKKAKLANVVRKMMTNSQ
GNEYKANLNNVIRKMMTNSQ

SEQ ID NO: 192745 - protein, 20 aa, Artificial Sequence
  Description of Artificial Sequence: Synthetic peptide
  Seed: GNEKKAKLANVVRKMMTNSQ
GNEYKANLNNVLRKMMTNSQ

SEQ ID NO: 192746 - protein, 20 aa, Artificial Sequence
  Description of Artificial Sequence: Synthetic peptide
  Seed: GNEKKAKLANVVRKMMTNSQ
GNEYKANLNNVVRKMMTNSQ

SEQ ID NO: 192747 - protein, 20 aa, Artificial Sequence
  Description of Artificial Sequence: Synthetic peptide
  Seed: GNEKKAKLANVVRKMMTNSQ
GNEYKANLPNVARKMMTNSQ

SEQ ID NO: 192748 - protein, 20 aa, Artificial Sequence
  Description of Artificial Sequence: Synthetic peptide
  Seed: GNEKKAKLANVVRKMMTNSQ
GNEYKANLPNVIRKMMTNSQ

SEQ ID NO: 192749 - protein, 20 aa, Artificial Sequence
  Description of Artificial Sequence: Synthetic peptide
  Seed: GNEKKAKLANVVRKMMTNSQ
GNEYKANLPNVLRKMMTNSQ

SEQ ID NO: 192750 - protein, 20 aa, Artificial Sequence
  Description of Artificial Sequence: Synthetic peptide
  Seed: GNEKKAKLANVVRKMMTNSQ
GNEYKANLPNVMRKMMTNSQ

SEQ ID NO: 192751 - protein, 20 aa, Artificial Sequence
  Description of Artificial Sequence: Synthetic peptide
  Seed: GNEKKAKLANVVRKMMTNSQ
GNEYKANLPNVVRKMMTNSQ

SEQ ID NO: 192752 - protein, 20 aa, Artificial Sequence
  Description of Artificial Sequence: Synthetic peptide
  Seed: GNEKKAKLANVVRKMMTNSQ
GNEYKANLSNVARKMMTNSQ

SEQ ID NO: 192753 - protein, 20 aa, Artificial Sequence
  Description of Artificial Sequence: Synthetic peptide
  Seed: GNEKKAKLANVVRKMMTNSQ
GNEYKANLSNVIRKMMTNSQ

SEQ ID NO: 192754 - protein, 20 aa, Artificial Sequence
  Description of Artificial Sequence: Synthetic peptide
  Seed: GNEKKAKLANVVRKMMTNSQ
GNEYKANLSNVLRKMMTNSQ

SEQ ID NO: 192755 - protein, 20 aa, Artificial Sequence
  Description of Artificial Sequence: Synthetic peptide
  Seed: GNEKKAKLANVVRKMMTNSQ
GNEYKANLSNVMRKMMTNSQ

SEQ ID NO: 192756 - protein, 20 aa, Artificial Sequence
  Description of Artificial Sequence: Synthetic peptide
  Seed: GNEKKAKLANVVRKMMTNSQ
GNEYKANLSNVVRKMMTNSQ

SEQ ID NO: 192757 - protein, 20 aa, Artificial Sequence
  Description of Artificial Sequence: Synthetic peptide
  Seed: GNEKKAKLANVVRKMMTNSQ
GNEYKANLTNVIRKMMTNSQ

SEQ ID NO: 192758 - protein, 20 aa, Artificial Sequence
  Description of Artificial Sequence: Synthetic peptide
  Seed: GNEKKAKLANVVRKMMTNSQ
GNEYKANLTNVLRKMMTNSQ

SEQ ID NO: 192759 - protein, 20 aa, Artificial Sequence
  Description of Artificial Sequence: Synthetic peptide
  Seed: GNEKKAKLANVVRKMMTNSQ
GNEYKANLTNVVRKMMTNSQ

SEQ ID NO: 192760 - protein, 20 aa, Artificial Sequence
  Description of Artificial Sequence: Synthetic peptide
  Seed: GNEKKAKLANVVRKMMTNSQ
GNEYKANLVNVARKMMTNSQ

SEQ ID NO: 192761 - protein, 20 aa, Artificial Sequence
  Description of Artificial Sequence: Synthetic peptide
  Seed: GNEKKAKLANVVRKMMTNSQ
GNEYKANLVNVIRKMMTNSQ

SEQ ID NO: 192762 - protein, 20 aa, Artificial Sequence
  Description of Artificial Sequence: Synthetic peptide
  Seed: GNEKKAKLANVVRKMMTNSQ
GNEYKANLVNVLRKMMTNSQ

SEQ ID NO: 192763 - protein, 20 aa, Artificial Sequence
  Description of Artificial Sequence: Synthetic peptide
  Seed: GNEKKAKLANVVRKMMTNSQ
GNEYKANLVNVVRKMMTNSQ

SEQ ID NO: 192764 - protein, 20 aa, Artificial Sequence
  Description of Artificial Sequence: Synthetic peptide
  Seed: GNEKKAKLANVVRKMMTNSQ
GNEYKANLYNVFRKMMTNSQ

SEQ ID NO: 192765 - protein, 20 aa, Artificial Sequence
  Description of Artificial Sequence: Synthetic peptide
  Seed: GNEKKAKLANVVRKMMTNSQ
GNEYKANLYNVIRKMMTNSQ

SEQ ID NO: 192766 - protein, 20 aa, Artificial Sequence
  Description of Artificial Sequence: Synthetic peptide
  Seed: GNEKKAKLANVVRKMMTNSQ
GNEYKANLYNVLRKMMTNSQ

SEQ ID NO: 192767 - protein, 20 aa, Artificial Sequence
  Description of Artificial Sequence: Synthetic peptide
  Seed: GNEKKAKLANVVRKMMTNSQ
GNEYKANLYNVVRKMMTNSQ

SEQ ID NO: 192768 - protein, 20 aa, Artificial Sequence
  Description of Artificial Sequence: Synthetic peptide
  Seed: GNEKKAKLANVVRKMMTNSQ
GNEYKAQLANVARKMMTNSQ

SEQ ID NO: 192769 - protein, 20 aa, Artificial Sequence
  Description of Artificial Sequence: Synthetic peptide
  Seed: GNEKKAKLANVVRKMMTNSQ
GNEYKAQLANVCRKMMTNSQ

SEQ ID NO: 192770 - protein, 20 aa, Artificial Sequence
  Description of Artificial Sequence: Synthetic peptide
  Seed: GNEKKAKLANVVRKMMTNSQ
GNEYKAQLANVDRKMMTNSQ

SEQ ID NO: 192771 - protein, 20 aa, Artificial Sequence
  Description of Artificial Sequence: Synthetic peptide
  Seed: GNEKKAKLANVVRKMMTNSQ
GNEYKAQLANVERKMMTNSQ

SEQ ID NO: 192772 - protein, 20 aa, Artificial Sequence
  Description of Artificial Sequence: Synthetic peptide
  Seed: GNEKKAKLANVVRKMMTNSQ
GNEYKAQLANVFRKMMTNSQ

SEQ ID NO: 192773 - protein, 20 aa, Artificial Sequence
  Description of Artificial Sequence: Synthetic peptide
  Seed: GNEKKAKLANVVRKMMTNSQ
GNEYKAQLANVGRKMMTNSQ

SEQ ID NO: 192774 - protein, 20 aa, Artificial Sequence
  Description of Artificial Sequence: Synthetic peptide
  Seed: GNEKKAKLANVVRKMMTNSQ
GNEYKAQLANVHRKMMTNSQ

SEQ ID NO: 192775 - protein, 20 aa, Artificial Sequence
  Description of Artificial Sequence: Synthetic peptide
  Seed: GNEKKAKLANVVRKMMTNSQ
GNEYKAQLANVIRKMMTNSQ

SEQ ID NO: 192776 - protein, 20 aa, Artificial Sequence
  Description of Artificial Sequence: Synthetic peptide
  Seed: GNEKKAKLANVVRKMMTNSQ
GNEYKAQLANVLRKMMTNSQ

SEQ ID NO: 192777 - protein, 20 aa, Artificial Sequence
  Description of Artificial Sequence: Synthetic peptide
  Seed: GNEKKAKLANVVRKMMTNSQ
GNEYKAQLANVMRKMMTNSQ

SEQ ID NO: 192778 - protein, 20 aa, Artificial Sequence
  Description of Artificial Sequence: Synthetic peptide
  Seed: GNEKKAKLANVVRKMMTNSQ
GNEYKAQLANVNRKMMTNSQ

SEQ ID NO: 192779 - protein, 20 aa, Artificial Sequence
  Description of Artificial Sequence: Synthetic peptide
  Seed: GNEKKAKLANVVRKMMTNSQ
GNEYKAQLANVPRKMMTNSQ

SEQ ID NO: 192780 - protein, 20 aa, Artificial Sequence
  Description of Artificial Sequence: Synthetic peptide
  Seed: GNEKKAKLANVVRKMMTNSQ
GNEYKAQLANVQRKMMTNSQ

SEQ ID NO: 192781 - protein, 20 aa, Artificial Sequence
  Description of Artificial Sequence: Synthetic peptide
  Seed: GNEKKAKLANVVRKMMTNSQ
GNEYKAQLANVSRKMMTNSQ

SEQ ID NO: 192782 - protein, 20 aa, Artificial Sequence
  Description of Artificial Sequence: Synthetic peptide
  Seed: GNEKKAKLANVVRKMMTNSQ
GNEYKAQLANVTRKMMTNSQ

SEQ ID NO: 192783 - protein, 20 aa, Artificial Sequence
  Description of Artificial Sequence: Synthetic peptide
  Seed: GNEKKAKLANVVRKMMTNSQ
GNEYKAQLANVVRKMMTNSQ

SEQ ID NO: 192784 - protein, 20 aa, Artificial Sequence
  Description of Artificial Sequence: Synthetic peptide
  Seed: GNEKKAKLANVVRKMMTNSQ
GNEYKAQLANVWRKMMTNSQ

SEQ ID NO: 192785 - protein, 20 aa, Artificial Sequence
  Description of Artificial Sequence: Synthetic peptide
  Seed: GNEKKAKLANVVRKMMTNSQ
GNEYKAQLANVYRKMMTNSQ

SEQ ID NO: 192786 - protein, 20 aa, Artificial Sequence
  Description of Artificial Sequence: Synthetic peptide
  Seed: GNEKKAKLANVVRKMMTNSQ
GNEYKAQLFNVARKMMTNSQ

SEQ ID NO: 192787 - protein, 20 aa, Artificial Sequence
  Description of Artificial Sequence: Synthetic peptide
  Seed: GNEKKAKLANVVRKMMTNSQ
GNEYKAQLFNVFRKMMTNSQ

SEQ ID NO: 192788 - protein, 20 aa, Artificial Sequence
  Description of Artificial Sequence: Synthetic peptide
  Seed: GNEKKAKLANVVRKMMTNSQ
GNEYKAQLFNVIRKMMTNSQ

SEQ ID NO: 192789 - protein, 20 aa, Artificial Sequence
  Description of Artificial Sequence: Synthetic peptide
  Seed: GNEKKAKLANVVRKMMTNSQ
GNEYKAQLFNVLRKMMTNSQ

SEQ ID NO: 192790 - protein, 20 aa, Artificial Sequence
  Description of Artificial Sequence: Synthetic peptide
  Seed: GNEKKAKLANVVRKMMTNSQ
GNEYKAQLFNVMRKMMTNSQ

SEQ ID NO: 192791 - protein, 20 aa, Artificial Sequence
  Description of Artificial Sequence: Synthetic peptide
  Seed: GNEKKAKLANVVRKMMTNSQ
GNEYKAQLFNVSRKMMTNSQ

SEQ ID NO: 192792 - protein, 20 aa, Artificial Sequence
  Description of Artificial Sequence: Synthetic peptide
  Seed: GNEKKAKLANVVRKMMTNSQ
GNEYKAQLFNVTRKMMTNSQ

SEQ ID NO: 192793 - protein, 20 aa, Artificial Sequence
  Description of Artificial Sequence: Synthetic peptide
  Seed: GNEKKAKLANVVRKMMTNSQ
GNEYKAQLFNVVRKMMTNSQ

SEQ ID NO: 192794 - protein, 20 aa, Artificial Sequence
  Description of Artificial Sequence: Synthetic peptide
  Seed: GNEKKAKLANVVRKMMTNSQ
GNEYKAQLFNVYRKMMTNSQ

SEQ ID NO: 192795 - protein, 20 aa, Artificial Sequence
  Description of Artificial Sequence: Synthetic peptide
  Seed: GNEKKAKLANVVRKMMTNSQ
GNEYKAQLGNVARKMMTNSQ

SEQ ID NO: 192796 - protein, 20 aa, Artificial Sequence
  Description of Artificial Sequence: Synthetic peptide
  Seed: GNEKKAKLANVVRKMMTNSQ
GNEYKAQLGNVCRKMMTNSQ

SEQ ID NO: 192797 - protein, 20 aa, Artificial Sequence
  Description of Artificial Sequence: Synthetic peptide
  Seed: GNEKKAKLANVVRKMMTNSQ
GNEYKAQLGNVFRKMMTNSQ

SEQ ID NO: 192798 - protein, 20 aa, Artificial Sequence
  Description of Artificial Sequence: Synthetic peptide
  Seed: GNEKKAKLANVVRKMMTNSQ
GNEYKAQLGNVGRKMMTNSQ

SEQ ID NO: 192799 - protein, 20 aa, Artificial Sequence
  Description of Artificial Sequence: Synthetic peptide
  Seed: GNEKKAKLANVVRKMMTNSQ
GNEYKAQLGNVIRKMMTNSQ

SEQ ID NO: 192800 - protein, 20 aa, Artificial Sequence
  Description of Artificial Sequence: Synthetic peptide
  Seed: GNEKKAKLANVVRKMMTNSQ
GNEYKAQLGNVLRKMMTNSQ

SEQ ID NO: 192801 - protein, 20 aa, Artificial Sequence
  Description of Artificial Sequence: Synthetic peptide
  Seed: GNEKKAKLANVVRKMMTNSQ
GNEYKAQLGNVMRKMMTNSQ

SEQ ID NO: 192802 - protein, 20 aa, Artificial Sequence
  Description of Artificial Sequence: Synthetic peptide
  Seed: GNEKKAKLANVVRKMMTNSQ
GNEYKAQLGNVNRKMMTNSQ

SEQ ID NO: 192803 - protein, 20 aa, Artificial Sequence
  Description of Artificial Sequence: Synthetic peptide
  Seed: GNEKKAKLANVVRKMMTNSQ
GNEYKAQLGNVSRKMMTNSQ

SEQ ID NO: 192804 - protein, 20 aa, Artificial Sequence
  Description of Artificial Sequence: Synthetic peptide
  Seed: GNEKKAKLANVVRKMMTNSQ
GNEYKAQLGNVTRKMMTNSQ

SEQ ID NO: 192805 - protein, 20 aa, Artificial Sequence
  Description of Artificial Sequence: Synthetic peptide
  Seed: GNEKKAKLANVVRKMMTNSQ
GNEYKAQLGNVVRKMMTNSQ

SEQ ID NO: 192806 - protein, 20 aa, Artificial Sequence
  Description of Artificial Sequence: Synthetic peptide
  Seed: GNEKKAKLANVVRKMMTNSQ
GNEYKAQLINVARKMMTNSQ

SEQ ID NO: 192807 - protein, 20 aa, Artificial Sequence
  Description of Artificial Sequence: Synthetic peptide
  Seed: GNEKKAKLANVVRKMMTNSQ
GNEYKAQLINVGRKMMTNSQ

SEQ ID NO: 192808 - protein, 20 aa, Artificial Sequence
  Description of Artificial Sequence: Synthetic peptide
  Seed: GNEKKAKLANVVRKMMTNSQ
GNEYKAQLINVIRKMMTNSQ

SEQ ID NO: 192809 - protein, 20 aa, Artificial Sequence
  Description of Artificial Sequence: Synthetic peptide
  Seed: GNEKKAKLANVVRKMMTNSQ
GNEYKAQLINVLRKMMTNSQ

SEQ ID NO: 192810 - protein, 20 aa, Artificial Sequence
  Description of Artificial Sequence: Synthetic peptide
  Seed: GNEKKAKLANVVRKMMTNSQ
GNEYKAQLINVMRKMMTNSQ

SEQ ID NO: 192811 - protein, 20 aa, Artificial Sequence
  Description of Artificial Sequence: Synthetic peptide
  Seed: GNEKKAKLANVVRKMMTNSQ
GNEYKAQLINVNRKMMTNSQ

SEQ ID NO: 192812 - protein, 20 aa, Artificial Sequence
  Description of Artificial Sequence: Synthetic peptide
  Seed: GNEKKAKLANVVRKMMTNSQ
GNEYKAQLINVSRKMMTNSQ

SEQ ID NO: 192813 - protein, 20 aa, Artificial Sequence
  Description of Artificial Sequence: Synthetic peptide
  Seed: GNEKKAKLANVVRKMMTNSQ
GNEYKAQLINVTRKMMTNSQ

SEQ ID NO: 192814 - protein, 20 aa, Artificial Sequence
  Description of Artificial Sequence: Synthetic peptide
  Seed: GNEKKAKLANVVRKMMTNSQ
GNEYKAQLINVVRKMMTNSQ

SEQ ID NO: 192815 - protein, 20 aa, Artificial Sequence
  Description of Artificial Sequence: Synthetic peptide
  Seed: GNEKKAKLANVVRKMMTNSQ
GNEYKAQLLNVARKMMTNSQ

SEQ ID NO: 192816 - protein, 20 aa, Artificial Sequence
  Description of Artificial Sequence: Synthetic peptide
  Seed: GNEKKAKLANVVRKMMTNSQ
GNEYKAQLLNVIRKMMTNSQ

SEQ ID NO: 192817 - protein, 20 aa, Artificial Sequence
  Description of Artificial Sequence: Synthetic peptide
  Seed: GNEKKAKLANVVRKMMTNSQ
GNEYKAQLLNVLRKMMTNSQ

SEQ ID NO: 192818 - protein, 20 aa, Artificial Sequence
  Description of Artificial Sequence: Synthetic peptide
  Seed: GNEKKAKLANVVRKMMTNSQ
GNEYKAQLLNVNRKMMTNSQ

SEQ ID NO: 192819 - protein, 20 aa, Artificial Sequence
  Description of Artificial Sequence: Synthetic peptide
  Seed: GNEKKAKLANVVRKMMTNSQ
GNEYKAQLLNVSRKMMTNSQ

SEQ ID NO: 192820 - protein, 20 aa, Artificial Sequence
  Description of Artificial Sequence: Synthetic peptide
  Seed: GNEKKAKLANVVRKMMTNSQ
GNEYKAQLLNVVRKMMTNSQ

SEQ ID NO: 192821 - protein, 20 aa, Artificial Sequence
  Description of Artificial Sequence: Synthetic peptide
  Seed: GNEKKAKLANVVRKMMTNSQ
GNEYKAQLMNVARKMMTNSQ

SEQ ID NO: 192822 - protein, 20 aa, Artificial Sequence
  Description of Artificial Sequence: Synthetic peptide
  Seed: GNEKKAKLANVVRKMMTNSQ
GNEYKAQLMNVIRKMMTNSQ

SEQ ID NO: 192823 - protein, 20 aa, Artificial Sequence
  Description of Artificial Sequence: Synthetic peptide
  Seed: GNEKKAKLANVVRKMMTNSQ
GNEYKAQLMNVNRKMMTNSQ

SEQ ID NO: 192824 - protein, 20 aa, Artificial Sequence
  Description of Artificial Sequence: Synthetic peptide
  Seed: GNEKKAKLANVVRKMMTNSQ
GNEYKAQLMNVSRKMMTNSQ

SEQ ID NO: 192825 - protein, 20 aa, Artificial Sequence
  Description of Artificial Sequence: Synthetic peptide
  Seed: GNEKKAKLANVVRKMMTNSQ
GNEYKAQLMNVVRKMMTNSQ

SEQ ID NO: 192826 - protein, 20 aa, Artificial Sequence
  Description of Artificial Sequence: Synthetic peptide
  Seed: GNEKKAKLANVVRKMMTNSQ
GNEYKAQLNNVARKMMTNSQ

SEQ ID NO: 192827 - protein, 20 aa, Artificial Sequence
  Description of Artificial Sequence: Synthetic peptide
  Seed: GNEKKAKLANVVRKMMTNSQ
GNEYKAQLNNVIRKMMTNSQ

SEQ ID NO: 192828 - protein, 20 aa, Artificial Sequence
  Description of Artificial Sequence: Synthetic peptide
  Seed: GNEKKAKLANVVRKMMTNSQ
GNEYKAQLNNVLRKMMTNSQ

SEQ ID NO: 192829 - protein, 20 aa, Artificial Sequence
  Description of Artificial Sequence: Synthetic peptide
  Seed: GNEKKAKLANVVRKMMTNSQ
GNEYKAQLNNVMRKMMTNSQ

SEQ ID NO: 192830 - protein, 20 aa, Artificial Sequence
  Description of Artificial Sequence: Synthetic peptide
  Seed: GNEKKAKLANVVRKMMTNSQ
GNEYKAQLNNVNRKMMTNSQ

SEQ ID NO: 192831 - protein, 20 aa, Artificial Sequence
  Description of Artificial Sequence: Synthetic peptide
  Seed: GNEKKAKLANVVRKMMTNSQ
GNEYKAQLNNVSRKMMTNSQ

SEQ ID NO: 192832 - protein, 20 aa, Artificial Sequence
  Description of Artificial Sequence: Synthetic peptide
  Seed: GNEKKAKLANVVRKMMTNSQ
GNEYKAQLNNVTRKMMTNSQ

SEQ ID NO: 192833 - protein, 20 aa, Artificial Sequence
  Description of Artificial Sequence: Synthetic peptide
  Seed: GNEKKAKLANVVRKMMTNSQ
GNEYKAQLNNVVRKMMTNSQ

SEQ ID NO: 192834 - protein, 20 aa, Artificial Sequence
  Description of Artificial Sequence: Synthetic peptide
  Seed: GNEKKAKLANVVRKMMTNSQ
GNEYKAQLPNVARKMMTNSQ

SEQ ID NO: 192835 - protein, 20 aa, Artificial Sequence
  Description of Artificial Sequence: Synthetic peptide
  Seed: GNEKKAKLANVVRKMMTNSQ
GNEYKAQLPNVFRKMMTNSQ

SEQ ID NO: 192836 - protein, 20 aa, Artificial Sequence
  Description of Artificial Sequence: Synthetic peptide
  Seed: GNEKKAKLANVVRKMMTNSQ
GNEYKAQLPNVGRKMMTNSQ

SEQ ID NO: 192837 - protein, 20 aa, Artificial Sequence
  Description of Artificial Sequence: Synthetic peptide
  Seed: GNEKKAKLANVVRKMMTNSQ
GNEYKAQLPNVHRKMMTNSQ

SEQ ID NO: 192838 - protein, 20 aa, Artificial Sequence
  Description of Artificial Sequence: Synthetic peptide
  Seed: GNEKKAKLANVVRKMMTNSQ
GNEYKAQLPNVIRKMMTNSQ

SEQ ID NO: 192839 - protein, 20 aa, Artificial Sequence
  Description of Artificial Sequence: Synthetic peptide
  Seed: GNEKKAKLANVVRKMMTNSQ
GNEYKAQLPNVLRKMMTNSQ

SEQ ID NO: 192840 - protein, 20 aa, Artificial Sequence
  Description of Artificial Sequence: Synthetic peptide
  Seed: GNEKKAKLANVVRKMMTNSQ
GNEYKAQLPNVMRKMMTNSQ

SEQ ID NO: 192841 - protein, 20 aa, Artificial Sequence
  Description of Artificial Sequence: Synthetic peptide
  Seed: GNEKKAKLANVVRKMMTNSQ
GNEYKAQLPNVNRKMMTNSQ

SEQ ID NO: 192842 - protein, 20 aa, Artificial Sequence
  Description of Artificial Sequence: Synthetic peptide
  Seed: GNEKKAKLANVVRKMMTNSQ
GNEYKAQLPNVQRKMMTNSQ

SEQ ID NO: 192843 - protein, 20 aa, Artificial Sequence
  Description of Artificial Sequence: Synthetic peptide
  Seed: GNEKKAKLANVVRKMMTNSQ
GNEYKAQLPNVSRKMMTNSQ

SEQ ID NO: 192844 - protein, 20 aa, Artificial Sequence
  Description of Artificial Sequence: Synthetic peptide
  Seed: GNEKKAKLANVVRKMMTNSQ
GNEYKAQLPNVTRKMMTNSQ

SEQ ID NO: 192845 - protein, 20 aa, Artificial Sequence
  Description of Artificial Sequence: Synthetic peptide
  Seed: GNEKKAKLANVVRKMMTNSQ
GNEYKAQLPNVVRKMMTNSQ

SEQ ID NO: 192846 - protein, 20 aa, Artificial Sequence
  Description of Artificial Sequence: Synthetic peptide
  Seed: GNEKKAKLANVVRKMMTNSQ
GNEYKAQLSNVARKMMTNSQ

SEQ ID NO: 192847 - protein, 20 aa, Artificial Sequence
  Description of Artificial Sequence: Synthetic peptide
  Seed: GNEKKAKLANVVRKMMTNSQ
GNEYKAQLSNVCRKMMTNSQ

SEQ ID NO: 192848 - protein, 20 aa, Artificial Sequence
  Description of Artificial Sequence: Synthetic peptide
  Seed: GNEKKAKLANVVRKMMTNSQ
GNEYKAQLSNVFRKMMTNSQ

SEQ ID NO: 192849 - protein, 20 aa, Artificial Sequence
  Description of Artificial Sequence: Synthetic peptide
  Seed: GNEKKAKLANVVRKMMTNSQ
GNEYKAQLSNVGRKMMTNSQ

SEQ ID NO: 192850 - protein, 20 aa, Artificial Sequence
  Description of Artificial Sequence: Synthetic peptide
  Seed: GNEKKAKLANVVRKMMTNSQ
GNEYKAQLSNVHRKMMTNSQ

SEQ ID NO: 192851 - protein, 20 aa, Artificial Sequence
  Description of Artificial Sequence: Synthetic peptide
  Seed: GNEKKAKLANVVRKMMTNSQ
GNEYKAQLSNVIRKMMTNSQ

SEQ ID NO: 192852 - protein, 20 aa, Artificial Sequence
  Description of Artificial Sequence: Synthetic peptide
  Seed: GNEKKAKLANVVRKMMTNSQ
GNEYKAQLSNVLRKMMTNSQ

SEQ ID NO: 192853 - protein, 20 aa, Artificial Sequence
  Description of Artificial Sequence: Synthetic peptide
  Seed: GNEKKAKLANVVRKMMTNSQ
GNEYKAQLSNVMRKMMTNSQ

SEQ ID NO: 192854 - protein, 20 aa, Artificial Sequence
  Description of Artificial Sequence: Synthetic peptide
  Seed: GNEKKAKLANVVRKMMTNSQ
GNEYKAQLSNVNRKMMTNSQ

SEQ ID NO: 192855 - protein, 20 aa, Artificial Sequence
  Description of Artificial Sequence: Synthetic peptide
  Seed: GNEKKAKLANVVRKMMTNSQ
GNEYKAQLSNVQRKMMTNSQ

SEQ ID NO: 192856 - protein, 20 aa, Artificial Sequence
  Description of Artificial Sequence: Synthetic peptide
  Seed: GNEKKAKLANVVRKMMTNSQ
GNEYKAQLSNVSRKMMTNSQ

SEQ ID NO: 192857 - protein, 20 aa, Artificial Sequence
  Description of Artificial Sequence: Synthetic peptide
  Seed: GNEKKAKLANVVRKMMTNSQ
GNEYKAQLSNVTRKMMTNSQ

SEQ ID NO: 192858 - protein, 20 aa, Artificial Sequence
  Description of Artificial Sequence: Synthetic peptide
  Seed: GNEKKAKLANVVRKMMTNSQ
GNEYKAQLSNVVRKMMTNSQ

SEQ ID NO: 192859 - protein, 20 aa, Artificial Sequence
  Description of Artificial Sequence: Synthetic peptide
  Seed: GNEKKAKLANVVRKMMTNSQ
GNEYKAQLTNVARKMMTNSQ

SEQ ID NO: 192860 - protein, 20 aa, Artificial Sequence
  Description of Artificial Sequence: Synthetic peptide
  Seed: GNEKKAKLANVVRKMMTNSQ
GNEYKAQLTNVFRKMMTNSQ

SEQ ID NO: 192861 - protein, 20 aa, Artificial Sequence
  Description of Artificial Sequence: Synthetic peptide
  Seed: GNEKKAKLANVVRKMMTNSQ
GNEYKAQLTNVGRKMMTNSQ

SEQ ID NO: 192862 - protein, 20 aa, Artificial Sequence
  Description of Artificial Sequence: Synthetic peptide
  Seed: GNEKKAKLANVVRKMMTNSQ
GNEYKAQLTNVHRKMMTNSQ

SEQ ID NO: 192863 - protein, 20 aa, Artificial Sequence
  Description of Artificial Sequence: Synthetic peptide
  Seed: GNEKKAKLANVVRKMMTNSQ
GNEYKAQLTNVIRKMMTNSQ

SEQ ID NO: 192864 - protein, 20 aa, Artificial Sequence
  Description of Artificial Sequence: Synthetic peptide
  Seed: GNEKKAKLANVVRKMMTNSQ
GNEYKAQLTNVLRKMMTNSQ

SEQ ID NO: 192865 - protein, 20 aa, Artificial Sequence
  Description of Artificial Sequence: Synthetic peptide
  Seed: GNEKKAKLANVVRKMMTNSQ
GNEYKAQLTNVMRKMMTNSQ

SEQ ID NO: 192866 - protein, 20 aa, Artificial Sequence
  Description of Artificial Sequence: Synthetic peptide
  Seed: GNEKKAKLANVVRKMMTNSQ
GNEYKAQLTNVNRKMMTNSQ

SEQ ID NO: 192867 - protein, 20 aa, Artificial Sequence
  Description of Artificial Sequence: Synthetic peptide
  Seed: GNEKKAKLANVVRKMMTNSQ
GNEYKAQLTNVQRKMMTNSQ

SEQ ID NO: 192868 - protein, 20 aa, Artificial Sequence
  Description of Artificial Sequence: Synthetic peptide
  Seed: GNEKKAKLANVVRKMMTNSQ
GNEYKAQLTNVSRKMMTNSQ

SEQ ID NO: 192869 - protein, 20 aa, Artificial Sequence
  Description of Artificial Sequence: Synthetic peptide
  Seed: GNEKKAKLANVVRKMMTNSQ
GNEYKAQLTNVTRKMMTNSQ

SEQ ID NO: 192870 - protein, 20 aa, Artificial Sequence
  Description of Artificial Sequence: Synthetic peptide
  Seed: GNEKKAKLANVVRKMMTNSQ
GNEYKAQLTNVVRKMMTNSQ

SEQ ID NO: 192871 - protein, 20 aa, Artificial Sequence
  Description of Artificial Sequence: Synthetic peptide
  Seed: GNEKKAKLANVVRKMMTNSQ
GNEYKAQLVNVARKMMTNSQ

SEQ ID NO: 192872 - protein, 20 aa, Artificial Sequence
  Description of Artificial Sequence: Synthetic peptide
  Seed: GNEKKAKLANVVRKMMTNSQ
GNEYKAQLVNVFRKMMTNSQ

SEQ ID NO: 192873 - protein, 20 aa, Artificial Sequence
  Description of Artificial Sequence: Synthetic peptide
  Seed: GNEKKAKLANVVRKMMTNSQ
GNEYKAQLVNVGRKMMTNSQ

SEQ ID NO: 192874 - protein, 20 aa, Artificial Sequence
  Description of Artificial Sequence: Synthetic peptide
  Seed: GNEKKAKLANVVRKMMTNSQ
GNEYKAQLVNVHRKMMTNSQ

SEQ ID NO: 192875 - protein, 20 aa, Artificial Sequence
  Description of Artificial Sequence: Synthetic peptide
  Seed: GNEKKAKLANVVRKMMTNSQ
GNEYKAQLVNVIRKMMTNSQ

SEQ ID NO: 192876 - protein, 20 aa, Artificial Sequence
  Description of Artificial Sequence: Synthetic peptide
  Seed: GNEKKAKLANVVRKMMTNSQ
GNEYKAQLVNVLRKMMTNSQ

SEQ ID NO: 192877 - protein, 20 aa, Artificial Sequence
  Description of Artificial Sequence: Synthetic peptide
  Seed: GNEKKAKLANVVRKMMTNSQ
GNEYKAQLVNVMRKMMTNSQ

SEQ ID NO: 192878 - protein, 20 aa, Artificial Sequence
  Description of Artificial Sequence: Synthetic peptide
  Seed: GNEKKAKLANVVRKMMTNSQ
GNEYKAQLVNVNRKMMTNSQ

SEQ ID NO: 192879 - protein, 20 aa, Artificial Sequence
  Description of Artificial Sequence: Synthetic peptide
  Seed: GNEKKAKLANVVRKMMTNSQ
GNEYKAQLVNVQRKMMTNSQ

SEQ ID NO: 192880 - protein, 20 aa, Artificial Sequence
  Description of Artificial Sequence: Synthetic peptide
  Seed: GNEKKAKLANVVRKMMTNSQ
GNEYKAQLVNVSRKMMTNSQ

SEQ ID NO: 192881 - protein, 20 aa, Artificial Sequence
  Description of Artificial Sequence: Synthetic peptide
  Seed: GNEKKAKLANVVRKMMTNSQ
GNEYKAQLVNVTRKMMTNSQ

SEQ ID NO: 192882 - protein, 20 aa, Artificial Sequence
  Description of Artificial Sequence: Synthetic peptide
  Seed: GNEKKAKLANVVRKMMTNSQ
GNEYKAQLVNVVRKMMTNSQ

SEQ ID NO: 192883 - protein, 20 aa, Artificial Sequence
  Description of Artificial Sequence: Synthetic peptide
  Seed: GNEKKAKLANVVRKMMTNSQ
GNEYKAQLWNVLRKMMTNSQ

SEQ ID NO: 192884 - protein, 20 aa, Artificial Sequence
  Description of Artificial Sequence: Synthetic peptide
  Seed: GNEKKAKLANVVRKMMTNSQ
GNEYKAQLYNVFRKMMTNSQ

SEQ ID NO: 192885 - protein, 20 aa, Artificial Sequence
  Description of Artificial Sequence: Synthetic peptide
  Seed: GNEKKAKLANVVRKMMTNSQ
GNEYKAQLYNVIRKMMTNSQ

SEQ ID NO: 192886 - protein, 20 aa, Artificial Sequence
  Description of Artificial Sequence: Synthetic peptide
  Seed: GNEKKAKLANVVRKMMTNSQ
GNEYKAQLYNVLRKMMTNSQ

SEQ ID NO: 192887 - protein, 20 aa, Artificial Sequence
  Description of Artificial Sequence: Synthetic peptide
  Seed: GNEKKAKLANVVRKMMTNSQ
GNEYKAQLYNVVRKMMTNSQ

SEQ ID NO: 192888 - protein, 20 aa, Artificial Sequence
  Description of Artificial Sequence: Synthetic peptide
  Seed: GNEKKAKLANVVRKMMTNSQ
GNEYKARLFNVFRKMMTNSQ

SEQ ID NO: 192889 - protein, 20 aa, Artificial Sequence
  Description of Artificial Sequence: Synthetic peptide
  Seed: GNEKKAKLANVVRKMMTNSQ
GNEYKARLFNVIRKMMTNSQ

SEQ ID NO: 192890 - protein, 20 aa, Artificial Sequence
  Description of Artificial Sequence: Synthetic peptide
  Seed: GNEKKAKLANVVRKMMTNSQ
GNEYKARLFNVLRKMMTNSQ

SEQ ID NO: 192891 - protein, 20 aa, Artificial Sequence
  Description of Artificial Sequence: Synthetic peptide
  Seed: GNEKKAKLANVVRKMMTNSQ
GNEYKARLFNVMRKMMTNSQ

SEQ ID NO: 192892 - protein, 20 aa, Artificial Sequence
  Description of Artificial Sequence: Synthetic peptide
  Seed: GNEKKAKLANVVRKMMTNSQ
GNEYKARLFNVVRKMMTNSQ

SEQ ID NO: 192893 - protein, 20 aa, Artificial Sequence
  Description of Artificial Sequence: Synthetic peptide
  Seed: GNEKKAKLANVVRKMMTNSQ
GNEYKARLYNVFRKMMTNSQ

SEQ ID NO: 192894 - protein, 20 aa, Artificial Sequence
  Description of Artificial Sequence: Synthetic peptide
  Seed: GNEKKAKLANVVRKMMTNSQ
GNEYKASLANVARKMMTNSQ

SEQ ID NO: 192895 - protein, 20 aa, Artificial Sequence
  Description of Artificial Sequence: Synthetic peptide
  Seed: GNEKKAKLANVVRKMMTNSQ
GNEYKASLANVCRKMMTNSQ

SEQ ID NO: 192896 - protein, 20 aa, Artificial Sequence
  Description of Artificial Sequence: Synthetic peptide
  Seed: GNEKKAKLANVVRKMMTNSQ
GNEYKASLANVDRKMMTNSQ

SEQ ID NO: 192897 - protein, 20 aa, Artificial Sequence
  Description of Artificial Sequence: Synthetic peptide
  Seed: GNEKKAKLANVVRKMMTNSQ
GNEYKASLANVERKMMTNSQ

SEQ ID NO: 192898 - protein, 20 aa, Artificial Sequence
  Description of Artificial Sequence: Synthetic peptide
  Seed: GNEKKAKLANVVRKMMTNSQ
GNEYKASLANVFRKMMTNSQ

SEQ ID NO: 192899 - protein, 20 aa, Artificial Sequence
  Description of Artificial Sequence: Synthetic peptide
  Seed: GNEKKAKLANVVRKMMTNSQ
GNEYKASLANVGRKMMTNSQ

SEQ ID NO: 192900 - protein, 20 aa, Artificial Sequence
  Description of Artificial Sequence: Synthetic peptide
  Seed: GNEKKAKLANVVRKMMTNSQ
GNEYKASLANVHRKMMTNSQ

SEQ ID NO: 192901 - protein, 20 aa, Artificial Sequence
  Description of Artificial Sequence: Synthetic peptide
  Seed: GNEKKAKLANVVRKMMTNSQ
GNEYKASLANVIRKMMTNSQ

SEQ ID NO: 192902 - protein, 20 aa, Artificial Sequence
  Description of Artificial Sequence: Synthetic peptide
  Seed: GNEKKAKLANVVRKMMTNSQ
GNEYKASLANVLRKMMTNSQ

SEQ ID NO: 192903 - protein, 20 aa, Artificial Sequence
  Description of Artificial Sequence: Synthetic peptide
  Seed: GNEKKAKLANVVRKMMTNSQ
GNEYKASLANVMRKMMTNSQ

SEQ ID NO: 192904 - protein, 20 aa, Artificial Sequence
  Description of Artificial Sequence: Synthetic peptide
  Seed: GNEKKAKLANVVRKMMTNSQ
GNEYKASLANVNRKMMTNSQ

SEQ ID NO: 192905 - protein, 20 aa, Artificial Sequence
  Description of Artificial Sequence: Synthetic peptide
  Seed: GNEKKAKLANVVRKMMTNSQ
GNEYKASLANVPRKMMTNSQ

SEQ ID NO: 192906 - protein, 20 aa, Artificial Sequence
  Description of Artificial Sequence: Synthetic peptide
  Seed: GNEKKAKLANVVRKMMTNSQ
GNEYKASLANVQRKMMTNSQ

SEQ ID NO: 192907 - protein, 20 aa, Artificial Sequence
  Description of Artificial Sequence: Synthetic peptide
  Seed: GNEKKAKLANVVRKMMTNSQ
GNEYKASLANVSRKMMTNSQ

SEQ ID NO: 192908 - protein, 20 aa, Artificial Sequence
  Description of Artificial Sequence: Synthetic peptide
  Seed: GNEKKAKLANVVRKMMTNSQ
GNEYKASLANVTRKMMTNSQ

SEQ ID NO: 192909 - protein, 20 aa, Artificial Sequence
  Description of Artificial Sequence: Synthetic peptide
  Seed: GNEKKAKLANVVRKMMTNSQ
GNEYKASLANVVRKMMTNSQ

SEQ ID NO: 192910 - protein, 20 aa, Artificial Sequence
  Description of Artificial Sequence: Synthetic peptide
  Seed: GNEKKAKLANVVRKMMTNSQ
GNEYKASLANVYRKMMTNSQ

SEQ ID NO: 192911 - protein, 20 aa, Artificial Sequence
  Description of Artificial Sequence: Synthetic peptide
  Seed: GNEKKAKLANVVRKMMTNSQ
GNEYKASLFNVARKMMTNSQ

SEQ ID NO: 192912 - protein, 20 aa, Artificial Sequence
  Description of Artificial Sequence: Synthetic peptide
  Seed: GNEKKAKLANVVRKMMTNSQ
GNEYKASLFNVDRKMMTNSQ

SEQ ID NO: 192913 - protein, 20 aa, Artificial Sequence
  Description of Artificial Sequence: Synthetic peptide
  Seed: GNEKKAKLANVVRKMMTNSQ
GNEYKASLFNVERKMMTNSQ

SEQ ID NO: 192914 - protein, 20 aa, Artificial Sequence
  Description of Artificial Sequence: Synthetic peptide
  Seed: GNEKKAKLANVVRKMMTNSQ
GNEYKASLFNVFRKMMTNSQ

SEQ ID NO: 192915 - protein, 20 aa, Artificial Sequence
  Description of Artificial Sequence: Synthetic peptide
  Seed: GNEKKAKLANVVRKMMTNSQ
GNEYKASLFNVIRKMMTNSQ

SEQ ID NO: 192916 - protein, 20 aa, Artificial Sequence
  Description of Artificial Sequence: Synthetic peptide
  Seed: GNEKKAKLANVVRKMMTNSQ
GNEYKASLFNVLRKMMTNSQ

SEQ ID NO: 192917 - protein, 20 aa, Artificial Sequence
  Description of Artificial Sequence: Synthetic peptide
  Seed: GNEKKAKLANVVRKMMTNSQ
GNEYKASLFNVMRKMMTNSQ

SEQ ID NO: 192918 - protein, 20 aa, Artificial Sequence
  Description of Artificial Sequence: Synthetic peptide
  Seed: GNEKKAKLANVVRKMMTNSQ
GNEYKASLFNVNRKMMTNSQ

SEQ ID NO: 192919 - protein, 20 aa, Artificial Sequence
  Description of Artificial Sequence: Synthetic peptide
  Seed: GNEKKAKLANVVRKMMTNSQ
GNEYKASLFNVQRKMMTNSQ

SEQ ID NO: 192920 - protein, 20 aa, Artificial Sequence
  Description of Artificial Sequence: Synthetic peptide
  Seed: GNEKKAKLANVVRKMMTNSQ
GNEYKASLFNVSRKMMTNSQ

SEQ ID NO: 192921 - protein, 20 aa, Artificial Sequence
  Description of Artificial Sequence: Synthetic peptide
  Seed: GNEKKAKLANVVRKMMTNSQ
GNEYKASLFNVTRKMMTNSQ

SEQ ID NO: 192922 - protein, 20 aa, Artificial Sequence
  Description of Artificial Sequence: Synthetic peptide
  Seed: GNEKKAKLANVVRKMMTNSQ
GNEYKASLFNVVRKMMTNSQ

SEQ ID NO: 192923 - protein, 20 aa, Artificial Sequence
  Description of Artificial Sequence: Synthetic peptide
  Seed: GNEKKAKLANVVRKMMTNSQ
GNEYKASLFNVYRKMMTNSQ

SEQ ID NO: 192924 - protein, 20 aa, Artificial Sequence
  Description of Artificial Sequence: Synthetic peptide
  Seed: GNEKKAKLANVVRKMMTNSQ
GNEYKASLGNVARKMMTNSQ

SEQ ID NO: 192925 - protein, 20 aa, Artificial Sequence
  Description of Artificial Sequence: Synthetic peptide
  Seed: GNEKKAKLANVVRKMMTNSQ
GNEYKASLGNVFRKMMTNSQ

SEQ ID NO: 192926 - protein, 20 aa, Artificial Sequence
  Description of Artificial Sequence: Synthetic peptide
  Seed: GNEKKAKLANVVRKMMTNSQ
GNEYKASLGNVGRKMMTNSQ

SEQ ID NO: 192927 - protein, 20 aa, Artificial Sequence
  Description of Artificial Sequence: Synthetic peptide
  Seed: GNEKKAKLANVVRKMMTNSQ
GNEYKASLGNVIRKMMTNSQ

SEQ ID NO: 192928 - protein, 20 aa, Artificial Sequence
  Description of Artificial Sequence: Synthetic peptide
  Seed: GNEKKAKLANVVRKMMTNSQ
GNEYKASLGNVLRKMMTNSQ

SEQ ID NO: 192929 - protein, 20 aa, Artificial Sequence
  Description of Artificial Sequence: Synthetic peptide
  Seed: GNEKKAKLANVVRKMMTNSQ
GNEYKASLGNVMRKMMTNSQ

SEQ ID NO: 192930 - protein, 20 aa, Artificial Sequence
  Description of Artificial Sequence: Synthetic peptide
  Seed: GNEKKAKLANVVRKMMTNSQ
GNEYKASLGNVNRKMMTNSQ

SEQ ID NO: 192931 - protein, 20 aa, Artificial Sequence
  Description of Artificial Sequence: Synthetic peptide
  Seed: GNEKKAKLANVVRKMMTNSQ
GNEYKASLGNVSRKMMTNSQ

SEQ ID NO: 192932 - protein, 20 aa, Artificial Sequence
  Description of Artificial Sequence: Synthetic peptide
  Seed: GNEKKAKLANVVRKMMTNSQ
GNEYKASLGNVTRKMMTNSQ

SEQ ID NO: 192933 - protein, 20 aa, Artificial Sequence
  Description of Artificial Sequence: Synthetic peptide
  Seed: GNEKKAKLANVVRKMMTNSQ
GNEYKASLGNVVRKMMTNSQ

SEQ ID NO: 192934 - protein, 20 aa, Artificial Sequence
  Description of Artificial Sequence: Synthetic peptide
  Seed: GNEKKAKLANVVRKMMTNSQ
GNEYKASLINVARKMMTNSQ

SEQ ID NO: 192935 - protein, 20 aa, Artificial Sequence
  Description of Artificial Sequence: Synthetic peptide
  Seed: GNEKKAKLANVVRKMMTNSQ
GNEYKASLINVGRKMMTNSQ

SEQ ID NO: 192936 - protein, 20 aa, Artificial Sequence
  Description of Artificial Sequence: Synthetic peptide
  Seed: GNEKKAKLANVVRKMMTNSQ
GNEYKASLINVIRKMMTNSQ

SEQ ID NO: 192937 - protein, 20 aa, Artificial Sequence
  Description of Artificial Sequence: Synthetic peptide
  Seed: GNEKKAKLANVVRKMMTNSQ
GNEYKASLINVLRKMMTNSQ

SEQ ID NO: 192938 - protein, 20 aa, Artificial Sequence
  Description of Artificial Sequence: Synthetic peptide
  Seed: GNEKKAKLANVVRKMMTNSQ
GNEYKASLINVMRKMMTNSQ

SEQ ID NO: 192939 - protein, 20 aa, Artificial Sequence
  Description of Artificial Sequence: Synthetic peptide
  Seed: GNEKKAKLANVVRKMMTNSQ
GNEYKASLINVNRKMMTNSQ

SEQ ID NO: 192940 - protein, 20 aa, Artificial Sequence
  Description of Artificial Sequence: Synthetic peptide
  Seed: GNEKKAKLANVVRKMMTNSQ
GNEYKASLINVSRKMMTNSQ

SEQ ID NO: 192941 - protein, 20 aa, Artificial Sequence
  Description of Artificial Sequence: Synthetic peptide
  Seed: GNEKKAKLANVVRKMMTNSQ
GNEYKASLINVTRKMMTNSQ

SEQ ID NO: 192942 - protein, 20 aa, Artificial Sequence
  Description of Artificial Sequence: Synthetic peptide
  Seed: GNEKKAKLANVVRKMMTNSQ
GNEYKASLINVVRKMMTNSQ

SEQ ID NO: 192943 - protein, 20 aa, Artificial Sequence
  Description of Artificial Sequence: Synthetic peptide
  Seed: GNEKKAKLANVVRKMMTNSQ
GNEYKASLLNVARKMMTNSQ

SEQ ID NO: 192944 - protein, 20 aa, Artificial Sequence
  Description of Artificial Sequence: Synthetic peptide
  Seed: GNEKKAKLANVVRKMMTNSQ
GNEYKASLLNVFRKMMTNSQ

SEQ ID NO: 192945 - protein, 20 aa, Artificial Sequence
  Description of Artificial Sequence: Synthetic peptide
  Seed: GNEKKAKLANVVRKMMTNSQ
GNEYKASLLNVIRKMMTNSQ

SEQ ID NO: 192946 - protein, 20 aa, Artificial Sequence
  Description of Artificial Sequence: Synthetic peptide
  Seed: GNEKKAKLANVVRKMMTNSQ
GNEYKASLLNVLRKMMTNSQ

SEQ ID NO: 192947 - protein, 20 aa, Artificial Sequence
  Description of Artificial Sequence: Synthetic peptide
  Seed: GNEKKAKLANVVRKMMTNSQ
GNEYKASLLNVVRKMMTNSQ

SEQ ID NO: 192948 - protein, 20 aa, Artificial Sequence
  Description of Artificial Sequence: Synthetic peptide
  Seed: GNEKKAKLANVVRKMMTNSQ
GNEYKASLMNVARKMMTNSQ

SEQ ID NO: 192949 - protein, 20 aa, Artificial Sequence
  Description of Artificial Sequence: Synthetic peptide
  Seed: GNEKKAKLANVVRKMMTNSQ
GNEYKASLMNVIRKMMTNSQ

SEQ ID NO: 192950 - protein, 20 aa, Artificial Sequence
  Description of Artificial Sequence: Synthetic peptide
  Seed: GNEKKAKLANVVRKMMTNSQ
GNEYKASLMNVLRKMMTNSQ

SEQ ID NO: 192951 - protein, 20 aa, Artificial Sequence
  Description of Artificial Sequence: Synthetic peptide
  Seed: GNEKKAKLANVVRKMMTNSQ
GNEYKASLMNVNRKMMTNSQ

SEQ ID NO: 192952 - protein, 20 aa, Artificial Sequence
  Description of Artificial Sequence: Synthetic peptide
  Seed: GNEKKAKLANVVRKMMTNSQ
GNEYKASLMNVSRKMMTNSQ

SEQ ID NO: 192953 - protein, 20 aa, Artificial Sequence
  Description of Artificial Sequence: Synthetic peptide
  Seed: GNEKKAKLANVVRKMMTNSQ
GNEYKASLMNVVRKMMTNSQ

SEQ ID NO: 192954 - protein, 20 aa, Artificial Sequence
  Description of Artificial Sequence: Synthetic peptide
  Seed: GNEKKAKLANVVRKMMTNSQ
GNEYKASLNNVARKMMTNSQ

SEQ ID NO: 192955 - protein, 20 aa, Artificial Sequence
  Description of Artificial Sequence: Synthetic peptide
  Seed: GNEKKAKLANVVRKMMTNSQ
GNEYKASLNNVIRKMMTNSQ

SEQ ID NO: 192956 - protein, 20 aa, Artificial Sequence
  Description of Artificial Sequence: Synthetic peptide
  Seed: GNEKKAKLANVVRKMMTNSQ
GNEYKASLNNVLRKMMTNSQ

SEQ ID NO: 192957 - protein, 20 aa, Artificial Sequence
  Description of Artificial Sequence: Synthetic peptide
  Seed: GNEKKAKLANVVRKMMTNSQ
GNEYKASLNNVMRKMMTNSQ

SEQ ID NO: 192958 - protein, 20 aa, Artificial Sequence
  Description of Artificial Sequence: Synthetic peptide
  Seed: GNEKKAKLANVVRKMMTNSQ
GNEYKASLNNVNRKMMTNSQ

SEQ ID NO: 192959 - protein, 20 aa, Artificial Sequence
  Description of Artificial Sequence: Synthetic peptide
  Seed: GNEKKAKLANVVRKMMTNSQ
GNEYKASLNNVSRKMMTNSQ

SEQ ID NO: 192960 - protein, 20 aa, Artificial Sequence
  Description of Artificial Sequence: Synthetic peptide
  Seed: GNEKKAKLANVVRKMMTNSQ
GNEYKASLNNVVRKMMTNSQ

SEQ ID NO: 192961 - protein, 20 aa, Artificial Sequence
  Description of Artificial Sequence: Synthetic peptide
  Seed: GNEKKAKLANVVRKMMTNSQ
GNEYKASLPNVARKMMTNSQ

SEQ ID NO: 192962 - protein, 20 aa, Artificial Sequence
  Description of Artificial Sequence: Synthetic peptide
  Seed: GNEKKAKLANVVRKMMTNSQ
GNEYKASLPNVFRKMMTNSQ

SEQ ID NO: 192963 - protein, 20 aa, Artificial Sequence
  Description of Artificial Sequence: Synthetic peptide
  Seed: GNEKKAKLANVVRKMMTNSQ
GNEYKASLPNVGRKMMTNSQ

SEQ ID NO: 192964 - protein, 20 aa, Artificial Sequence
  Description of Artificial Sequence: Synthetic peptide
  Seed: GNEKKAKLANVVRKMMTNSQ
GNEYKASLPNVHRKMMTNSQ

SEQ ID NO: 192965 - protein, 20 aa, Artificial Sequence
  Description of Artificial Sequence: Synthetic peptide
  Seed: GNEKKAKLANVVRKMMTNSQ
GNEYKASLPNVIRKMMTNSQ

SEQ ID NO: 192966 - protein, 20 aa, Artificial Sequence
  Description of Artificial Sequence: Synthetic peptide
  Seed: GNEKKAKLANVVRKMMTNSQ
GNEYKASLPNVLRKMMTNSQ

SEQ ID NO: 192967 - protein, 20 aa, Artificial Sequence
  Description of Artificial Sequence: Synthetic peptide
  Seed: GNEKKAKLANVVRKMMTNSQ
GNEYKASLPNVMRKMMTNSQ

SEQ ID NO: 192968 - protein, 20 aa, Artificial Sequence
  Description of Artificial Sequence: Synthetic peptide
  Seed: GNEKKAKLANVVRKMMTNSQ
GNEYKASLPNVNRKMMTNSQ

SEQ ID NO: 192969 - protein, 20 aa, Artificial Sequence
  Description of Artificial Sequence: Synthetic peptide
  Seed: GNEKKAKLANVVRKMMTNSQ
GNEYKASLPNVQRKMMTNSQ

SEQ ID NO: 192970 - protein, 20 aa, Artificial Sequence
  Description of Artificial Sequence: Synthetic peptide
  Seed: GNEKKAKLANVVRKMMTNSQ
GNEYKASLPNVSRKMMTNSQ

SEQ ID NO: 192971 - protein, 20 aa, Artificial Sequence
  Description of Artificial Sequence: Synthetic peptide
  Seed: GNEKKAKLANVVRKMMTNSQ
GNEYKASLPNVTRKMMTNSQ

SEQ ID NO: 192972 - protein, 20 aa, Artificial Sequence
  Description of Artificial Sequence: Synthetic peptide
  Seed: GNEKKAKLANVVRKMMTNSQ
GNEYKASLPNVVRKMMTNSQ

SEQ ID NO: 192973 - protein, 20 aa, Artificial Sequence
  Description of Artificial Sequence: Synthetic peptide
  Seed: GNEKKAKLANVVRKMMTNSQ
GNEYKASLSNVARKMMTNSQ

SEQ ID NO: 192974 - protein, 20 aa, Artificial Sequence
  Description of Artificial Sequence: Synthetic peptide
  Seed: GNEKKAKLANVVRKMMTNSQ
GNEYKASLSNVFRKMMTNSQ

SEQ ID NO: 192975 - protein, 20 aa, Artificial Sequence
  Description of Artificial Sequence: Synthetic peptide
  Seed: GNEKKAKLANVVRKMMTNSQ
GNEYKASLSNVGRKMMTNSQ

SEQ ID NO: 192976 - protein, 20 aa, Artificial Sequence
  Description of Artificial Sequence: Synthetic peptide
  Seed: GNEKKAKLANVVRKMMTNSQ
GNEYKASLSNVIRKMMTNSQ

SEQ ID NO: 192977 - protein, 20 aa, Artificial Sequence
  Description of Artificial Sequence: Synthetic peptide
  Seed: GNEKKAKLANVVRKMMTNSQ
GNEYKASLSNVLRKMMTNSQ

SEQ ID NO: 192978 - protein, 20 aa, Artificial Sequence
  Description of Artificial Sequence: Synthetic peptide
  Seed: GNEKKAKLANVVRKMMTNSQ
GNEYKASLSNVMRKMMTNSQ

SEQ ID NO: 192979 - protein, 20 aa, Artificial Sequence
  Description of Artificial Sequence: Synthetic peptide
  Seed: GNEKKAKLANVVRKMMTNSQ
GNEYKASLSNVNRKMMTNSQ

SEQ ID NO: 192980 - protein, 20 aa, Artificial Sequence
  Description of Artificial Sequence: Synthetic peptide
  Seed: GNEKKAKLANVVRKMMTNSQ
GNEYKASLSNVQRKMMTNSQ

SEQ ID NO: 192981 - protein, 20 aa, Artificial Sequence
  Description of Artificial Sequence: Synthetic peptide
  Seed: GNEKKAKLANVVRKMMTNSQ
GNEYKASLSNVSRKMMTNSQ

SEQ ID NO: 192982 - protein, 20 aa, Artificial Sequence
  Description of Artificial Sequence: Synthetic peptide
  Seed: GNEKKAKLANVVRKMMTNSQ
GNEYKASLSNVTRKMMTNSQ

SEQ ID NO: 192983 - protein, 20 aa, Artificial Sequence
  Description of Artificial Sequence: Synthetic peptide
  Seed: GNEKKAKLANVVRKMMTNSQ
GNEYKASLSNVVRKMMTNSQ

SEQ ID NO: 192984 - protein, 20 aa, Artificial Sequence
  Description of Artificial Sequence: Synthetic peptide
  Seed: GNEKKAKLANVVRKMMTNSQ
GNEYKASLTNVARKMMTNSQ

SEQ ID NO: 192985 - protein, 20 aa, Artificial Sequence
  Description of Artificial Sequence: Synthetic peptide
  Seed: GNEKKAKLANVVRKMMTNSQ
GNEYKASLTNVFRKMMTNSQ

SEQ ID NO: 192986 - protein, 20 aa, Artificial Sequence
  Description of Artificial Sequence: Synthetic peptide
  Seed: GNEKKAKLANVVRKMMTNSQ
GNEYKASLTNVGRKMMTNSQ

SEQ ID NO: 192987 - protein, 20 aa, Artificial Sequence
  Description of Artificial Sequence: Synthetic peptide
  Seed: GNEKKAKLANVVRKMMTNSQ
GNEYKASLTNVIRKMMTNSQ

SEQ ID NO: 192988 - protein, 20 aa, Artificial Sequence
  Description of Artificial Sequence: Synthetic peptide
  Seed: GNEKKAKLANVVRKMMTNSQ
GNEYKASLTNVLRKMMTNSQ

SEQ ID NO: 192989 - protein, 20 aa, Artificial Sequence
  Description of Artificial Sequence: Synthetic peptide
  Seed: GNEKKAKLANVVRKMMTNSQ
GNEYKASLTNVMRKMMTNSQ

SEQ ID NO: 192990 - protein, 20 aa, Artificial Sequence
  Description of Artificial Sequence: Synthetic peptide
  Seed: GNEKKAKLANVVRKMMTNSQ
GNEYKASLTNVNRKMMTNSQ

SEQ ID NO: 192991 - protein, 20 aa, Artificial Sequence
  Description of Artificial Sequence: Synthetic peptide
  Seed: GNEKKAKLANVVRKMMTNSQ
GNEYKASLTNVSRKMMTNSQ

SEQ ID NO: 192992 - protein, 20 aa, Artificial Sequence
  Description of Artificial Sequence: Synthetic peptide
  Seed: GNEKKAKLANVVRKMMTNSQ
GNEYKASLTNVTRKMMTNSQ

SEQ ID NO: 192993 - protein, 20 aa, Artificial Sequence
  Description of Artificial Sequence: Synthetic peptide
  Seed: GNEKKAKLANVVRKMMTNSQ
GNEYKASLTNVVRKMMTNSQ

SEQ ID NO: 192994 - protein, 20 aa, Artificial Sequence
  Description of Artificial Sequence: Synthetic peptide
  Seed: GNEKKAKLANVVRKMMTNSQ
GNEYKASLVNVARKMMTNSQ

SEQ ID NO: 192995 - protein, 20 aa, Artificial Sequence
  Description of Artificial Sequence: Synthetic peptide
  Seed: GNEKKAKLANVVRKMMTNSQ
GNEYKASLVNVGRKMMTNSQ

SEQ ID NO: 192996 - protein, 20 aa, Artificial Sequence
  Description of Artificial Sequence: Synthetic peptide
  Seed: GNEKKAKLANVVRKMMTNSQ
GNEYKASLVNVHRKMMTNSQ

SEQ ID NO: 192997 - protein, 20 aa, Artificial Sequence
  Description of Artificial Sequence: Synthetic peptide
  Seed: GNEKKAKLANVVRKMMTNSQ
GNEYKASLVNVIRKMMTNSQ

SEQ ID NO: 192998 - protein, 20 aa, Artificial Sequence
  Description of Artificial Sequence: Synthetic peptide
  Seed: GNEKKAKLANVVRKMMTNSQ
GNEYKASLVNVLRKMMTNSQ

SEQ ID NO: 192999 - protein, 20 aa, Artificial Sequence
  Description of Artificial Sequence: Synthetic peptide
  Seed: GNEKKAKLANVVRKMMTNSQ
GNEYKASLVNVMRKMMTNSQ

SEQ ID NO: 193000 - protein, 20 aa, Artificial Sequence
  Description of Artificial Sequence: Synthetic peptide
  Seed: GNEKKAKLANVVRKMMTNSQ
GNEYKASLVNVNRKMMTNSQ

SEQ ID NO: 193001 - protein, 20 aa, Artificial Sequence
  Description of Artificial Sequence: Synthetic peptide
  Seed: GNEKKAKLANVVRKMMTNSQ
GNEYKASLVNVQRKMMTNSQ

SEQ ID NO: 193002 - protein, 20 aa, Artificial Sequence
  Description of Artificial Sequence: Synthetic peptide
  Seed: GNEKKAKLANVVRKMMTNSQ
GNEYKASLVNVSRKMMTNSQ

SEQ ID NO: 193003 - protein, 20 aa, Artificial Sequence
  Description of Artificial Sequence: Synthetic peptide
  Seed: GNEKKAKLANVVRKMMTNSQ
GNEYKASLVNVTRKMMTNSQ

SEQ ID NO: 193004 - protein, 20 aa, Artificial Sequence
  Description of Artificial Sequence: Synthetic peptide
  Seed: GNEKKAKLANVVRKMMTNSQ
GNEYKASLVNVVRKMMTNSQ

SEQ ID NO: 193005 - protein, 20 aa, Artificial Sequence
  Description of Artificial Sequence: Synthetic peptide
  Seed: GNEKKAKLANVVRKMMTNSQ
GNEYKASLWNVFRKMMTNSQ

SEQ ID NO: 193006 - protein, 20 aa, Artificial Sequence
  Description of Artificial Sequence: Synthetic peptide
  Seed: GNEKKAKLANVVRKMMTNSQ
GNEYKASLWNVIRKMMTNSQ

SEQ ID NO: 193007 - protein, 20 aa, Artificial Sequence
  Description of Artificial Sequence: Synthetic peptide
  Seed: GNEKKAKLANVVRKMMTNSQ
GNEYKASLWNVLRKMMTNSQ

SEQ ID NO: 193008 - protein, 20 aa, Artificial Sequence
  Description of Artificial Sequence: Synthetic peptide
  Seed: GNEKKAKLANVVRKMMTNSQ
GNEYKASLWNVVRKMMTNSQ

SEQ ID NO: 193009 - protein, 20 aa, Artificial Sequence
  Description of Artificial Sequence: Synthetic peptide
  Seed: GNEKKAKLANVVRKMMTNSQ
GNEYKASLYNVFRKMMTNSQ

SEQ ID NO: 193010 - protein, 20 aa, Artificial Sequence
  Description of Artificial Sequence: Synthetic peptide
  Seed: GNEKKAKLANVVRKMMTNSQ
GNEYKASLYNVIRKMMTNSQ

SEQ ID NO: 193011 - protein, 20 aa, Artificial Sequence
  Description of Artificial Sequence: Synthetic peptide
  Seed: GNEKKAKLANVVRKMMTNSQ
GNEYKASLYNVLRKMMTNSQ

SEQ ID NO: 193012 - protein, 20 aa, Artificial Sequence
  Description of Artificial Sequence: Synthetic peptide
  Seed: GNEKKAKLANVVRKMMTNSQ
GNEYKASLYNVMRKMMTNSQ

SEQ ID NO: 193013 - protein, 20 aa, Artificial Sequence
  Description of Artificial Sequence: Synthetic peptide
  Seed: GNEKKAKLANVVRKMMTNSQ
GNEYKASLYNVTRKMMTNSQ

SEQ ID NO: 193014 - protein, 20 aa, Artificial Sequence
  Description of Artificial Sequence: Synthetic peptide
  Seed: GNEKKAKLANVVRKMMTNSQ
GNEYKASLYNVVRKMMTNSQ

SEQ ID NO: 193015 - protein, 20 aa, Artificial Sequence
  Description of Artificial Sequence: Synthetic peptide
  Seed: GNEKKAKLANVVRKMMTNSQ
GNEYKATLANVARKMMTNSQ

SEQ ID NO: 193016 - protein, 20 aa, Artificial Sequence
  Description of Artificial Sequence: Synthetic peptide
  Seed: GNEKKAKLANVVRKMMTNSQ
GNEYKATLANVFRKMMTNSQ

SEQ ID NO: 193017 - protein, 20 aa, Artificial Sequence
  Description of Artificial Sequence: Synthetic peptide
  Seed: GNEKKAKLANVVRKMMTNSQ
GNEYKATLANVGRKMMTNSQ

SEQ ID NO: 193018 - protein, 20 aa, Artificial Sequence
  Description of Artificial Sequence: Synthetic peptide
  Seed: GNEKKAKLANVVRKMMTNSQ
GNEYKATLANVHRKMMTNSQ

SEQ ID NO: 193019 - protein, 20 aa, Artificial Sequence
  Description of Artificial Sequence: Synthetic peptide
  Seed: GNEKKAKLANVVRKMMTNSQ
GNEYKATLANVIRKMMTNSQ

SEQ ID NO: 193020 - protein, 20 aa, Artificial Sequence
  Description of Artificial Sequence: Synthetic peptide
  Seed: GNEKKAKLANVVRKMMTNSQ
GNEYKATLANVLRKMMTNSQ

SEQ ID NO: 193021 - protein, 20 aa, Artificial Sequence
  Description of Artificial Sequence: Synthetic peptide
  Seed: GNEKKAKLANVVRKMMTNSQ
GNEYKATLANVMRKMMTNSQ

SEQ ID NO: 193022 - protein, 20 aa, Artificial Sequence
  Description of Artificial Sequence: Synthetic peptide
  Seed: GNEKKAKLANVVRKMMTNSQ
GNEYKATLANVNRKMMTNSQ

SEQ ID NO: 193023 - protein, 20 aa, Artificial Sequence
  Description of Artificial Sequence: Synthetic peptide
  Seed: GNEKKAKLANVVRKMMTNSQ
GNEYKATLANVQRKMMTNSQ

SEQ ID NO: 193024 - protein, 20 aa, Artificial Sequence
  Description of Artificial Sequence: Synthetic peptide
  Seed: GNEKKAKLANVVRKMMTNSQ
GNEYKATLANVSRKMMTNSQ

SEQ ID NO: 193025 - protein, 20 aa, Artificial Sequence
  Description of Artificial Sequence: Synthetic peptide
  Seed: GNEKKAKLANVVRKMMTNSQ
GNEYKATLANVTRKMMTNSQ

SEQ ID NO: 193026 - protein, 20 aa, Artificial Sequence
  Description of Artificial Sequence: Synthetic peptide
  Seed: GNEKKAKLANVVRKMMTNSQ
GNEYKATLANVVRKMMTNSQ

SEQ ID NO: 193027 - protein, 20 aa, Artificial Sequence
  Description of Artificial Sequence: Synthetic peptide
  Seed: GNEKKAKLANVVRKMMTNSQ
GNEYKATLFNVARKMMTNSQ

SEQ ID NO: 193028 - protein, 20 aa, Artificial Sequence
  Description of Artificial Sequence: Synthetic peptide
  Seed: GNEKKAKLANVVRKMMTNSQ
GNEYKATLFNVDRKMMTNSQ

SEQ ID NO: 193029 - protein, 20 aa, Artificial Sequence
  Description of Artificial Sequence: Synthetic peptide
  Seed: GNEKKAKLANVVRKMMTNSQ
GNEYKATLFNVERKMMTNSQ

SEQ ID NO: 193030 - protein, 20 aa, Artificial Sequence
  Description of Artificial Sequence: Synthetic peptide
  Seed: GNEKKAKLANVVRKMMTNSQ
GNEYKATLFNVFRKMMTNSQ

SEQ ID NO: 193031 - protein, 20 aa, Artificial Sequence
  Description of Artificial Sequence: Synthetic peptide
  Seed: GNEKKAKLANVVRKMMTNSQ
GNEYKATLFNVHRKMMTNSQ

SEQ ID NO: 193032 - protein, 20 aa, Artificial Sequence
  Description of Artificial Sequence: Synthetic peptide
  Seed: GNEKKAKLANVVRKMMTNSQ
GNEYKATLFNVIRKMMTNSQ

SEQ ID NO: 193033 - protein, 20 aa, Artificial Sequence
  Description of Artificial Sequence: Synthetic peptide
  Seed: GNEKKAKLANVVRKMMTNSQ
GNEYKATLFNVLRKMMTNSQ

SEQ ID NO: 193034 - protein, 20 aa, Artificial Sequence
  Description of Artificial Sequence: Synthetic peptide
  Seed: GNEKKAKLANVVRKMMTNSQ
GNEYKATLFNVMRKMMTNSQ

SEQ ID NO: 193035 - protein, 20 aa, Artificial Sequence
  Description of Artificial Sequence: Synthetic peptide
  Seed: GNEKKAKLANVVRKMMTNSQ
GNEYKATLFNVNRKMMTNSQ

SEQ ID NO: 193036 - protein, 20 aa, Artificial Sequence
  Description of Artificial Sequence: Synthetic peptide
  Seed: GNEKKAKLANVVRKMMTNSQ
GNEYKATLFNVPRKMMTNSQ

SEQ ID NO: 193037 - protein, 20 aa, Artificial Sequence
  Description of Artificial Sequence: Synthetic peptide
  Seed: GNEKKAKLANVVRKMMTNSQ
GNEYKATLFNVQRKMMTNSQ

SEQ ID NO: 193038 - protein, 20 aa, Artificial Sequence
  Description of Artificial Sequence: Synthetic peptide
  Seed: GNEKKAKLANVVRKMMTNSQ
GNEYKATLFNVSRKMMTNSQ

SEQ ID NO: 193039 - protein, 20 aa, Artificial Sequence
  Description of Artificial Sequence: Synthetic peptide
  Seed: GNEKKAKLANVVRKMMTNSQ
GNEYKATLFNVTRKMMTNSQ

SEQ ID NO: 193040 - protein, 20 aa, Artificial Sequence
  Description of Artificial Sequence: Synthetic peptide
  Seed: GNEKKAKLANVVRKMMTNSQ
GNEYKATLFNVVRKMMTNSQ

SEQ ID NO: 193041 - protein, 20 aa, Artificial Sequence
  Description of Artificial Sequence: Synthetic peptide
  Seed: GNEKKAKLANVVRKMMTNSQ
GNEYKATLFNVYRKMMTNSQ

SEQ ID NO: 193042 - protein, 20 aa, Artificial Sequence
  Description of Artificial Sequence: Synthetic peptide
  Seed: GNEKKAKLANVVRKMMTNSQ
GNEYKATLGNVARKMMTNSQ

SEQ ID NO: 193043 - protein, 20 aa, Artificial Sequence
  Description of Artificial Sequence: Synthetic peptide
  Seed: GNEKKAKLANVVRKMMTNSQ
GNEYKATLGNVIRKMMTNSQ

SEQ ID NO: 193044 - protein, 20 aa, Artificial Sequence
  Description of Artificial Sequence: Synthetic peptide
  Seed: GNEKKAKLANVVRKMMTNSQ
GNEYKATLGNVLRKMMTNSQ

SEQ ID NO: 193045 - protein, 20 aa, Artificial Sequence
  Description of Artificial Sequence: Synthetic peptide
  Seed: GNEKKAKLANVVRKMMTNSQ
GNEYKATLGNVMRKMMTNSQ

SEQ ID NO: 193046 - protein, 20 aa, Artificial Sequence
  Description of Artificial Sequence: Synthetic peptide
  Seed: GNEKKAKLANVVRKMMTNSQ
GNEYKATLGNVNRKMMTNSQ

SEQ ID NO: 193047 - protein, 20 aa, Artificial Sequence
  Description of Artificial Sequence: Synthetic peptide
  Seed: GNEKKAKLANVVRKMMTNSQ
GNEYKATLGNVSRKMMTNSQ

SEQ ID NO: 193048 - protein, 20 aa, Artificial Sequence
  Description of Artificial Sequence: Synthetic peptide
  Seed: GNEKKAKLANVVRKMMTNSQ
GNEYKATLGNVTRKMMTNSQ

SEQ ID NO: 193049 - protein, 20 aa, Artificial Sequence
  Description of Artificial Sequence: Synthetic peptide
  Seed: GNEKKAKLANVVRKMMTNSQ
GNEYKATLGNVVRKMMTNSQ

SEQ ID NO: 193050 - protein, 20 aa, Artificial Sequence
  Description of Artificial Sequence: Synthetic peptide
  Seed: GNEKKAKLANVVRKMMTNSQ
GNEYKATLINVARKMMTNSQ

SEQ ID NO: 193051 - protein, 20 aa, Artificial Sequence
  Description of Artificial Sequence: Synthetic peptide
  Seed: GNEKKAKLANVVRKMMTNSQ
GNEYKATLINVIRKMMTNSQ

SEQ ID NO: 193052 - protein, 20 aa, Artificial Sequence
  Description of Artificial Sequence: Synthetic peptide
  Seed: GNEKKAKLANVVRKMMTNSQ
GNEYKATLINVLRKMMTNSQ

SEQ ID NO: 193053 - protein, 20 aa, Artificial Sequence
  Description of Artificial Sequence: Synthetic peptide
  Seed: GNEKKAKLANVVRKMMTNSQ
GNEYKATLINVNRKMMTNSQ

SEQ ID NO: 193054 - protein, 20 aa, Artificial Sequence
  Description of Artificial Sequence: Synthetic peptide
  Seed: GNEKKAKLANVVRKMMTNSQ
GNEYKATLINVSRKMMTNSQ

SEQ ID NO: 193055 - protein, 20 aa, Artificial Sequence
  Description of Artificial Sequence: Synthetic peptide
  Seed: GNEKKAKLANVVRKMMTNSQ
GNEYKATLINVTRKMMTNSQ

SEQ ID NO: 193056 - protein, 20 aa, Artificial Sequence
  Description of Artificial Sequence: Synthetic peptide
  Seed: GNEKKAKLANVVRKMMTNSQ
GNEYKATLINVVRKMMTNSQ

SEQ ID NO: 193057 - protein, 20 aa, Artificial Sequence
  Description of Artificial Sequence: Synthetic peptide
  Seed: GNEKKAKLANVVRKMMTNSQ
GNEYKATLLNVFRKMMTNSQ

SEQ ID NO: 193058 - protein, 20 aa, Artificial Sequence
  Description of Artificial Sequence: Synthetic peptide
  Seed: GNEKKAKLANVVRKMMTNSQ
GNEYKATLLNVIRKMMTNSQ

SEQ ID NO: 193059 - protein, 20 aa, Artificial Sequence
  Description of Artificial Sequence: Synthetic peptide
  Seed: GNEKKAKLANVVRKMMTNSQ
GNEYKATLLNVLRKMMTNSQ

SEQ ID NO: 193060 - protein, 20 aa, Artificial Sequence
  Description of Artificial Sequence: Synthetic peptide
  Seed: GNEKKAKLANVVRKMMTNSQ
GNEYKATLLNVMRKMMTNSQ

SEQ ID NO: 193061 - protein, 20 aa, Artificial Sequence
  Description of Artificial Sequence: Synthetic peptide
  Seed: GNEKKAKLANVVRKMMTNSQ
GNEYKATLLNVVRKMMTNSQ

SEQ ID NO: 193062 - protein, 20 aa, Artificial Sequence
  Description of Artificial Sequence: Synthetic peptide
  Seed: GNEKKAKLANVVRKMMTNSQ
GNEYKATLMNVARKMMTNSQ

SEQ ID NO: 193063 - protein, 20 aa, Artificial Sequence
  Description of Artificial Sequence: Synthetic peptide
  Seed: GNEKKAKLANVVRKMMTNSQ
GNEYKATLMNVIRKMMTNSQ

SEQ ID NO: 193064 - protein, 20 aa, Artificial Sequence
  Description of Artificial Sequence: Synthetic peptide
  Seed: GNEKKAKLANVVRKMMTNSQ
GNEYKATLMNVLRKMMTNSQ

SEQ ID NO: 193065 - protein, 20 aa, Artificial Sequence
  Description of Artificial Sequence: Synthetic peptide
  Seed: GNEKKAKLANVVRKMMTNSQ
GNEYKATLMNVVRKMMTNSQ

SEQ ID NO: 193066 - protein, 20 aa, Artificial Sequence
  Description of Artificial Sequence: Synthetic peptide
  Seed: GNEKKAKLANVVRKMMTNSQ
GNEYKATLNNVARKMMTNSQ

SEQ ID NO: 193067 - protein, 20 aa, Artificial Sequence
  Description of Artificial Sequence: Synthetic peptide
  Seed: GNEKKAKLANVVRKMMTNSQ
GNEYKATLNNVIRKMMTNSQ

SEQ ID NO: 193068 - protein, 20 aa, Artificial Sequence
  Description of Artificial Sequence: Synthetic peptide
  Seed: GNEKKAKLANVVRKMMTNSQ
GNEYKATLNNVLRKMMTNSQ

SEQ ID NO: 193069 - protein, 20 aa, Artificial Sequence
  Description of Artificial Sequence: Synthetic peptide
  Seed: GNEKKAKLANVVRKMMTNSQ
GNEYKATLNNVSRKMMTNSQ

SEQ ID NO: 193070 - protein, 20 aa, Artificial Sequence
  Description of Artificial Sequence: Synthetic peptide
  Seed: GNEKKAKLANVVRKMMTNSQ
GNEYKATLNNVVRKMMTNSQ

SEQ ID NO: 193071 - protein, 20 aa, Artificial Sequence
  Description of Artificial Sequence: Synthetic peptide
  Seed: GNEKKAKLANVVRKMMTNSQ
GNEYKATLPNVARKMMTNSQ

SEQ ID NO: 193072 - protein, 20 aa, Artificial Sequence
  Description of Artificial Sequence: Synthetic peptide
  Seed: GNEKKAKLANVVRKMMTNSQ
GNEYKATLPNVGRKMMTNSQ

SEQ ID NO: 193073 - protein, 20 aa, Artificial Sequence
  Description of Artificial Sequence: Synthetic peptide
  Seed: GNEKKAKLANVVRKMMTNSQ
GNEYKATLPNVIRKMMTNSQ

SEQ ID NO: 193074 - protein, 20 aa, Artificial Sequence
  Description of Artificial Sequence: Synthetic peptide
  Seed: GNEKKAKLANVVRKMMTNSQ
GNEYKATLPNVLRKMMTNSQ

SEQ ID NO: 193075 - protein, 20 aa, Artificial Sequence
  Description of Artificial Sequence: Synthetic peptide
  Seed: GNEKKAKLANVVRKMMTNSQ
GNEYKATLPNVMRKMMTNSQ

SEQ ID NO: 193076 - protein, 20 aa, Artificial Sequence
  Description of Artificial Sequence: Synthetic peptide
  Seed: GNEKKAKLANVVRKMMTNSQ
GNEYKATLPNVNRKMMTNSQ

SEQ ID NO: 193077 - protein, 20 aa, Artificial Sequence
  Description of Artificial Sequence: Synthetic peptide
  Seed: GNEKKAKLANVVRKMMTNSQ
GNEYKATLPNVSRKMMTNSQ

SEQ ID NO: 193078 - protein, 20 aa, Artificial Sequence
  Description of Artificial Sequence: Synthetic peptide
  Seed: GNEKKAKLANVVRKMMTNSQ
GNEYKATLPNVTRKMMTNSQ

SEQ ID NO: 193079 - protein, 20 aa, Artificial Sequence
  Description of Artificial Sequence: Synthetic peptide
  Seed: GNEKKAKLANVVRKMMTNSQ
GNEYKATLPNVVRKMMTNSQ

SEQ ID NO: 193080 - protein, 20 aa, Artificial Sequence
  Description of Artificial Sequence: Synthetic peptide
  Seed: GNEKKAKLANVVRKMMTNSQ
GNEYKATLSNVARKMMTNSQ

SEQ ID NO: 193081 - protein, 20 aa, Artificial Sequence
  Description of Artificial Sequence: Synthetic peptide
  Seed: GNEKKAKLANVVRKMMTNSQ
GNEYKATLSNVGRKMMTNSQ

SEQ ID NO: 193082 - protein, 20 aa, Artificial Sequence
  Description of Artificial Sequence: Synthetic peptide
  Seed: GNEKKAKLANVVRKMMTNSQ
GNEYKATLSNVIRKMMTNSQ

SEQ ID NO: 193083 - protein, 20 aa, Artificial Sequence
  Description of Artificial Sequence: Synthetic peptide
  Seed: GNEKKAKLANVVRKMMTNSQ
GNEYKATLSNVLRKMMTNSQ

SEQ ID NO: 193084 - protein, 20 aa, Artificial Sequence
  Description of Artificial Sequence: Synthetic peptide
  Seed: GNEKKAKLANVVRKMMTNSQ
GNEYKATLSNVMRKMMTNSQ

SEQ ID NO: 193085 - protein, 20 aa, Artificial Sequence
  Description of Artificial Sequence: Synthetic peptide
  Seed: GNEKKAKLANVVRKMMTNSQ
GNEYKATLSNVNRKMMTNSQ

SEQ ID NO: 193086 - protein, 20 aa, Artificial Sequence
  Description of Artificial Sequence: Synthetic peptide
  Seed: GNEKKAKLANVVRKMMTNSQ
GNEYKATLSNVSRKMMTNSQ

SEQ ID NO: 193087 - protein, 20 aa, Artificial Sequence
  Description of Artificial Sequence: Synthetic peptide
  Seed: GNEKKAKLANVVRKMMTNSQ
GNEYKATLSNVTRKMMTNSQ

SEQ ID NO: 193088 - protein, 20 aa, Artificial Sequence
  Description of Artificial Sequence: Synthetic peptide
  Seed: GNEKKAKLANVVRKMMTNSQ
GNEYKATLSNVVRKMMTNSQ

SEQ ID NO: 193089 - protein, 20 aa, Artificial Sequence
  Description of Artificial Sequence: Synthetic peptide
  Seed: GNEKKAKLANVVRKMMTNSQ
GNEYKATLTNVARKMMTNSQ

SEQ ID NO: 193090 - protein, 20 aa, Artificial Sequence
  Description of Artificial Sequence: Synthetic peptide
  Seed: GNEKKAKLANVVRKMMTNSQ
GNEYKATLTNVIRKMMTNSQ

SEQ ID NO: 193091 - protein, 20 aa, Artificial Sequence
  Description of Artificial Sequence: Synthetic peptide
  Seed: GNEKKAKLANVVRKMMTNSQ
GNEYKATLTNVLRKMMTNSQ

SEQ ID NO: 193092 - protein, 20 aa, Artificial Sequence
  Description of Artificial Sequence: Synthetic peptide
  Seed: GNEKKAKLANVVRKMMTNSQ
GNEYKATLTNVMRKMMTNSQ

SEQ ID NO: 193093 - protein, 20 aa, Artificial Sequence
  Description of Artificial Sequence: Synthetic peptide
  Seed: GNEKKAKLANVVRKMMTNSQ
GNEYKATLTNVNRKMMTNSQ

SEQ ID NO: 193094 - protein, 20 aa, Artificial Sequence
  Description of Artificial Sequence: Synthetic peptide
  Seed: GNEKKAKLANVVRKMMTNSQ
GNEYKATLTNVSRKMMTNSQ

SEQ ID NO: 193095 - protein, 20 aa, Artificial Sequence
  Description of Artificial Sequence: Synthetic peptide
  Seed: GNEKKAKLANVVRKMMTNSQ
GNEYKATLTNVTRKMMTNSQ

SEQ ID NO: 193096 - protein, 20 aa, Artificial Sequence
  Description of Artificial Sequence: Synthetic peptide
  Seed: GNEKKAKLANVVRKMMTNSQ
GNEYKATLTNVVRKMMTNSQ

SEQ ID NO: 193097 - protein, 20 aa, Artificial Sequence
  Description of Artificial Sequence: Synthetic peptide
  Seed: GNEKKAKLANVVRKMMTNSQ
GNEYKATLVNVARKMMTNSQ

SEQ ID NO: 193098 - protein, 20 aa, Artificial Sequence
  Description of Artificial Sequence: Synthetic peptide
  Seed: GNEKKAKLANVVRKMMTNSQ
GNEYKATLVNVGRKMMTNSQ

SEQ ID NO: 193099 - protein, 20 aa, Artificial Sequence
  Description of Artificial Sequence: Synthetic peptide
  Seed: GNEKKAKLANVVRKMMTNSQ
GNEYKATLVNVIRKMMTNSQ

SEQ ID NO: 193100 - protein, 20 aa, Artificial Sequence
  Description of Artificial Sequence: Synthetic peptide
  Seed: GNEKKAKLANVVRKMMTNSQ
GNEYKATLVNVLRKMMTNSQ

SEQ ID NO: 193101 - protein, 20 aa, Artificial Sequence
  Description of Artificial Sequence: Synthetic peptide
  Seed: GNEKKAKLANVVRKMMTNSQ
GNEYKATLVNVMRKMMTNSQ

SEQ ID NO: 193102 - protein, 20 aa, Artificial Sequence
  Description of Artificial Sequence: Synthetic peptide
  Seed: GNEKKAKLANVVRKMMTNSQ
GNEYKATLVNVNRKMMTNSQ

SEQ ID NO: 193103 - protein, 20 aa, Artificial Sequence
  Description of Artificial Sequence: Synthetic peptide
  Seed: GNEKKAKLANVVRKMMTNSQ
GNEYKATLVNVSRKMMTNSQ

SEQ ID NO: 193104 - protein, 20 aa, Artificial Sequence
  Description of Artificial Sequence: Synthetic peptide
  Seed: GNEKKAKLANVVRKMMTNSQ
GNEYKATLVNVTRKMMTNSQ

SEQ ID NO: 193105 - protein, 20 aa, Artificial Sequence
  Description of Artificial Sequence: Synthetic peptide
  Seed: GNEKKAKLANVVRKMMTNSQ
GNEYKATLVNVVRKMMTNSQ

SEQ ID NO: 193106 - protein, 20 aa, Artificial Sequence
  Description of Artificial Sequence: Synthetic peptide
  Seed: GNEKKAKLANVVRKMMTNSQ
GNEYKATLWNVFRKMMTNSQ

SEQ ID NO: 193107 - protein, 20 aa, Artificial Sequence
  Description of Artificial Sequence: Synthetic peptide
  Seed: GNEKKAKLANVVRKMMTNSQ
GNEYKATLWNVIRKMMTNSQ

SEQ ID NO: 193108 - protein, 20 aa, Artificial Sequence
  Description of Artificial Sequence: Synthetic peptide
  Seed: GNEKKAKLANVVRKMMTNSQ
GNEYKATLWNVLRKMMTNSQ

SEQ ID NO: 193109 - protein, 20 aa, Artificial Sequence
  Description of Artificial Sequence: Synthetic peptide
  Seed: GNEKKAKLANVVRKMMTNSQ
GNEYKATLWNVMRKMMTNSQ

SEQ ID NO: 193110 - protein, 20 aa, Artificial Sequence
  Description of Artificial Sequence: Synthetic peptide
  Seed: GNEKKAKLANVVRKMMTNSQ
GNEYKATLWNVVRKMMTNSQ

SEQ ID NO: 193111 - protein, 20 aa, Artificial Sequence
  Description of Artificial Sequence: Synthetic peptide
  Seed: GNEKKAKLANVVRKMMTNSQ
GNEYKATLYNVARKMMTNSQ

SEQ ID NO: 193112 - protein, 20 aa, Artificial Sequence
  Description of Artificial Sequence: Synthetic peptide
  Seed: GNEKKAKLANVVRKMMTNSQ
GNEYKATLYNVFRKMMTNSQ

SEQ ID NO: 193113 - protein, 20 aa, Artificial Sequence
  Description of Artificial Sequence: Synthetic peptide
  Seed: GNEKKAKLANVVRKMMTNSQ
GNEYKATLYNVIRKMMTNSQ

SEQ ID NO: 193114 - protein, 20 aa, Artificial Sequence
  Description of Artificial Sequence: Synthetic peptide
  Seed: GNEKKAKLANVVRKMMTNSQ
GNEYKATLYNVLRKMMTNSQ

SEQ ID NO: 193115 - protein, 20 aa, Artificial Sequence
  Description of Artificial Sequence: Synthetic peptide
  Seed: GNEKKAKLANVVRKMMTNSQ
GNEYKATLYNVMRKMMTNSQ

SEQ ID NO: 193116 - protein, 20 aa, Artificial Sequence
  Description of Artificial Sequence: Synthetic peptide
  Seed: GNEKKAKLANVVRKMMTNSQ
GNEYKATLYNVTRKMMTNSQ

SEQ ID NO: 193117 - protein, 20 aa, Artificial Sequence
  Description of Artificial Sequence: Synthetic peptide
  Seed: GNEKKAKLANVVRKMMTNSQ
GNEYKATLYNVVRKMMTNSQ

SEQ ID NO: 193118 - protein, 20 aa, Artificial Sequence
  Description of Artificial Sequence: Synthetic peptide
  Seed: GNEKKAKLANVVRKMMTNSQ
GNEYKATLYNVYRKMMTNSQ

SEQ ID NO: 193119 - protein, 20 aa, Artificial Sequence
  Description of Artificial Sequence: Synthetic peptide
  Seed: GNEKKAKLANVVRKMMTNSQ
GNEYKAVLANVARKMMTNSQ

SEQ ID NO: 193120 - protein, 20 aa, Artificial Sequence
  Description of Artificial Sequence: Synthetic peptide
  Seed: GNEKKAKLANVVRKMMTNSQ
GNEYKAVLANVCRKMMTNSQ

SEQ ID NO: 193121 - protein, 20 aa, Artificial Sequence
  Description of Artificial Sequence: Synthetic peptide
  Seed: GNEKKAKLANVVRKMMTNSQ
GNEYKAVLANVDRKMMTNSQ

SEQ ID NO: 193122 - protein, 20 aa, Artificial Sequence
  Description of Artificial Sequence: Synthetic peptide
  Seed: GNEKKAKLANVVRKMMTNSQ
GNEYKAVLANVERKMMTNSQ

SEQ ID NO: 193123 - protein, 20 aa, Artificial Sequence
  Description of Artificial Sequence: Synthetic peptide
  Seed: GNEKKAKLANVVRKMMTNSQ
GNEYKAVLANVFRKMMTNSQ

SEQ ID NO: 193124 - protein, 20 aa, Artificial Sequence
  Description of Artificial Sequence: Synthetic peptide
  Seed: GNEKKAKLANVVRKMMTNSQ
GNEYKAVLANVGRKMMTNSQ

SEQ ID NO: 193125 - protein, 20 aa, Artificial Sequence
  Description of Artificial Sequence: Synthetic peptide
  Seed: GNEKKAKLANVVRKMMTNSQ
GNEYKAVLANVHRKMMTNSQ

SEQ ID NO: 193126 - protein, 20 aa, Artificial Sequence
  Description of Artificial Sequence: Synthetic peptide
  Seed: GNEKKAKLANVVRKMMTNSQ
GNEYKAVLANVIRKMMTNSQ

SEQ ID NO: 193127 - protein, 20 aa, Artificial Sequence
  Description of Artificial Sequence: Synthetic peptide
  Seed: GNEKKAKLANVVRKMMTNSQ
GNEYKAVLANVLRKMMTNSQ

SEQ ID NO: 193128 - protein, 20 aa, Artificial Sequence
  Description of Artificial Sequence: Synthetic peptide
  Seed: GNEKKAKLANVVRKMMTNSQ
GNEYKAVLANVMRKMMTNSQ

SEQ ID NO: 193129 - protein, 20 aa, Artificial Sequence
  Description of Artificial Sequence: Synthetic peptide
  Seed: GNEKKAKLANVVRKMMTNSQ
GNEYKAVLANVNRKMMTNSQ

SEQ ID NO: 193130 - protein, 20 aa, Artificial Sequence
  Description of Artificial Sequence: Synthetic peptide
  Seed: GNEKKAKLANVVRKMMTNSQ
GNEYKAVLANVPRKMMTNSQ

SEQ ID NO: 193131 - protein, 20 aa, Artificial Sequence
  Description of Artificial Sequence: Synthetic peptide
  Seed: GNEKKAKLANVVRKMMTNSQ
GNEYKAVLANVQRKMMTNSQ

SEQ ID NO: 193132 - protein, 20 aa, Artificial Sequence
  Description of Artificial Sequence: Synthetic peptide
  Seed: GNEKKAKLANVVRKMMTNSQ
GNEYKAVLANVSRKMMTNSQ

SEQ ID NO: 193133 - protein, 20 aa, Artificial Sequence
  Description of Artificial Sequence: Synthetic peptide
  Seed: GNEKKAKLANVVRKMMTNSQ
GNEYKAVLANVTRKMMTNSQ

SEQ ID NO: 193134 - protein, 20 aa, Artificial Sequence
  Description of Artificial Sequence: Synthetic peptide
  Seed: GNEKKAKLANVVRKMMTNSQ
GNEYKAVLANVVRKMMTNSQ

SEQ ID NO: 193135 - protein, 20 aa, Artificial Sequence
  Description of Artificial Sequence: Synthetic peptide
  Seed: GNEKKAKLANVVRKMMTNSQ
GNEYKAVLANVYRKMMTNSQ

SEQ ID NO: 193136 - protein, 20 aa, Artificial Sequence
  Description of Artificial Sequence: Synthetic peptide
  Seed: GNEKKAKLANVVRKMMTNSQ
GNEYKAVLFNVARKMMTNSQ

SEQ ID NO: 193137 - protein, 20 aa, Artificial Sequence
  Description of Artificial Sequence: Synthetic peptide
  Seed: GNEKKAKLANVVRKMMTNSQ
GNEYKAVLFNVDRKMMTNSQ

SEQ ID NO: 193138 - protein, 20 aa, Artificial Sequence
  Description of Artificial Sequence: Synthetic peptide
  Seed: GNEKKAKLANVVRKMMTNSQ
GNEYKAVLFNVERKMMTNSQ

SEQ ID NO: 193139 - protein, 20 aa, Artificial Sequence
  Description of Artificial Sequence: Synthetic peptide
  Seed: GNEKKAKLANVVRKMMTNSQ
GNEYKAVLFNVFRKMMTNSQ

SEQ ID NO: 193140 - protein, 20 aa, Artificial Sequence
  Description of Artificial Sequence: Synthetic peptide
  Seed: GNEKKAKLANVVRKMMTNSQ
GNEYKAVLFNVHRKMMTNSQ

SEQ ID NO: 193141 - protein, 20 aa, Artificial Sequence
  Description of Artificial Sequence: Synthetic peptide
  Seed: GNEKKAKLANVVRKMMTNSQ
GNEYKAVLFNVIRKMMTNSQ

SEQ ID NO: 193142 - protein, 20 aa, Artificial Sequence
  Description of Artificial Sequence: Synthetic peptide
  Seed: GNEKKAKLANVVRKMMTNSQ
GNEYKAVLFNVLRKMMTNSQ

SEQ ID NO: 193143 - protein, 20 aa, Artificial Sequence
  Description of Artificial Sequence: Synthetic peptide
  Seed: GNEKKAKLANVVRKMMTNSQ
GNEYKAVLFNVMRKMMTNSQ

SEQ ID NO: 193144 - protein, 20 aa, Artificial Sequence
  Description of Artificial Sequence: Synthetic peptide
  Seed: GNEKKAKLANVVRKMMTNSQ
GNEYKAVLFNVNRKMMTNSQ

SEQ ID NO: 193145 - protein, 20 aa, Artificial Sequence
  Description of Artificial Sequence: Synthetic peptide
  Seed: GNEKKAKLANVVRKMMTNSQ
GNEYKAVLFNVPRKMMTNSQ

SEQ ID NO: 193146 - protein, 20 aa, Artificial Sequence
  Description of Artificial Sequence: Synthetic peptide
  Seed: GNEKKAKLANVVRKMMTNSQ
GNEYKAVLFNVSRKMMTNSQ

SEQ ID NO: 193147 - protein, 20 aa, Artificial Sequence
  Description of Artificial Sequence: Synthetic peptide
  Seed: GNEKKAKLANVVRKMMTNSQ
GNEYKAVLFNVTRKMMTNSQ

SEQ ID NO: 193148 - protein, 20 aa, Artificial Sequence
  Description of Artificial Sequence: Synthetic peptide
  Seed: GNEKKAKLANVVRKMMTNSQ
GNEYKAVLFNVVRKMMTNSQ

SEQ ID NO: 193149 - protein, 20 aa, Artificial Sequence
  Description of Artificial Sequence: Synthetic peptide
  Seed: GNEKKAKLANVVRKMMTNSQ
GNEYKAVLFNVYRKMMTNSQ

SEQ ID NO: 193150 - protein, 20 aa, Artificial Sequence
  Description of Artificial Sequence: Synthetic peptide
  Seed: GNEKKAKLANVVRKMMTNSQ
GNEYKAVLGNVARKMMTNSQ

SEQ ID NO: 193151 - protein, 20 aa, Artificial Sequence
  Description of Artificial Sequence: Synthetic peptide
  Seed: GNEKKAKLANVVRKMMTNSQ
GNEYKAVLGNVCRKMMTNSQ

SEQ ID NO: 193152 - protein, 20 aa, Artificial Sequence
  Description of Artificial Sequence: Synthetic peptide
  Seed: GNEKKAKLANVVRKMMTNSQ
GNEYKAVLGNVFRKMMTNSQ

SEQ ID NO: 193153 - protein, 20 aa, Artificial Sequence
  Description of Artificial Sequence: Synthetic peptide
  Seed: GNEKKAKLANVVRKMMTNSQ
GNEYKAVLGNVGRKMMTNSQ

SEQ ID NO: 193154 - protein, 20 aa, Artificial Sequence
  Description of Artificial Sequence: Synthetic peptide
  Seed: GNEKKAKLANVVRKMMTNSQ
GNEYKAVLGNVHRKMMTNSQ

SEQ ID NO: 193155 - protein, 20 aa, Artificial Sequence
  Description of Artificial Sequence: Synthetic peptide
  Seed: GNEKKAKLANVVRKMMTNSQ
GNEYKAVLGNVIRKMMTNSQ

SEQ ID NO: 193156 - protein, 20 aa, Artificial Sequence
  Description of Artificial Sequence: Synthetic peptide
  Seed: GNEKKAKLANVVRKMMTNSQ
GNEYKAVLGNVLRKMMTNSQ

SEQ ID NO: 193157 - protein, 20 aa, Artificial Sequence
  Description of Artificial Sequence: Synthetic peptide
  Seed: GNEKKAKLANVVRKMMTNSQ
GNEYKAVLGNVMRKMMTNSQ

SEQ ID NO: 193158 - protein, 20 aa, Artificial Sequence
  Description of Artificial Sequence: Synthetic peptide
  Seed: GNEKKAKLANVVRKMMTNSQ
GNEYKAVLGNVNRKMMTNSQ

SEQ ID NO: 193159 - protein, 20 aa, Artificial Sequence
  Description of Artificial Sequence: Synthetic peptide
  Seed: GNEKKAKLANVVRKMMTNSQ
GNEYKAVLGNVQRKMMTNSQ

SEQ ID NO: 193160 - protein, 20 aa, Artificial Sequence
  Description of Artificial Sequence: Synthetic peptide
  Seed: GNEKKAKLANVVRKMMTNSQ
GNEYKAVLGNVSRKMMTNSQ

SEQ ID NO: 193161 - protein, 20 aa, Artificial Sequence
  Description of Artificial Sequence: Synthetic peptide
  Seed: GNEKKAKLANVVRKMMTNSQ
GNEYKAVLGNVTRKMMTNSQ

SEQ ID NO: 193162 - protein, 20 aa, Artificial Sequence
  Description of Artificial Sequence: Synthetic peptide
  Seed: GNEKKAKLANVVRKMMTNSQ
GNEYKAVLGNVVRKMMTNSQ

SEQ ID NO: 193163 - protein, 20 aa, Artificial Sequence
  Description of Artificial Sequence: Synthetic peptide
  Seed: GNEKKAKLANVVRKMMTNSQ
GNEYKAVLINVARKMMTNSQ

SEQ ID NO: 193164 - protein, 20 aa, Artificial Sequence
  Description of Artificial Sequence: Synthetic peptide
  Seed: GNEKKAKLANVVRKMMTNSQ
GNEYKAVLINVGRKMMTNSQ

SEQ ID NO: 193165 - protein, 20 aa, Artificial Sequence
  Description of Artificial Sequence: Synthetic peptide
  Seed: GNEKKAKLANVVRKMMTNSQ
GNEYKAVLINVHRKMMTNSQ

SEQ ID NO: 193166 - protein, 20 aa, Artificial Sequence
  Description of Artificial Sequence: Synthetic peptide
  Seed: GNEKKAKLANVVRKMMTNSQ
GNEYKAVLINVIRKMMTNSQ

SEQ ID NO: 193167 - protein, 20 aa, Artificial Sequence
  Description of Artificial Sequence: Synthetic peptide
  Seed: GNEKKAKLANVVRKMMTNSQ
GNEYKAVLINVLRKMMTNSQ

SEQ ID NO: 193168 - protein, 20 aa, Artificial Sequence
  Description of Artificial Sequence: Synthetic peptide
  Seed: GNEKKAKLANVVRKMMTNSQ
GNEYKAVLINVMRKMMTNSQ

SEQ ID NO: 193169 - protein, 20 aa, Artificial Sequence
  Description of Artificial Sequence: Synthetic peptide
  Seed: GNEKKAKLANVVRKMMTNSQ
GNEYKAVLINVNRKMMTNSQ

SEQ ID NO: 193170 - protein, 20 aa, Artificial Sequence
  Description of Artificial Sequence: Synthetic peptide
  Seed: GNEKKAKLANVVRKMMTNSQ
GNEYKAVLINVSRKMMTNSQ

SEQ ID NO: 193171 - protein, 20 aa, Artificial Sequence
  Description of Artificial Sequence: Synthetic peptide
  Seed: GNEKKAKLANVVRKMMTNSQ
GNEYKAVLINVTRKMMTNSQ

SEQ ID NO: 193172 - protein, 20 aa, Artificial Sequence
  Description of Artificial Sequence: Synthetic peptide
  Seed: GNEKKAKLANVVRKMMTNSQ
GNEYKAVLINVVRKMMTNSQ

SEQ ID NO: 193173 - protein, 20 aa, Artificial Sequence
  Description of Artificial Sequence: Synthetic peptide
  Seed: GNEKKAKLANVVRKMMTNSQ
GNEYKAVLLNVARKMMTNSQ

SEQ ID NO: 193174 - protein, 20 aa, Artificial Sequence
  Description of Artificial Sequence: Synthetic peptide
  Seed: GNEKKAKLANVVRKMMTNSQ
GNEYKAVLLNVIRKMMTNSQ

SEQ ID NO: 193175 - protein, 20 aa, Artificial Sequence
  Description of Artificial Sequence: Synthetic peptide
  Seed: GNEKKAKLANVVRKMMTNSQ
GNEYKAVLLNVLRKMMTNSQ

SEQ ID NO: 193176 - protein, 20 aa, Artificial Sequence
  Description of Artificial Sequence: Synthetic peptide
  Seed: GNEKKAKLANVVRKMMTNSQ
GNEYKAVLLNVNRKMMTNSQ

SEQ ID NO: 193177 - protein, 20 aa, Artificial Sequence
  Description of Artificial Sequence: Synthetic peptide
  Seed: GNEKKAKLANVVRKMMTNSQ
GNEYKAVLLNVSRKMMTNSQ

SEQ ID NO: 193178 - protein, 20 aa, Artificial Sequence
  Description of Artificial Sequence: Synthetic peptide
  Seed: GNEKKAKLANVVRKMMTNSQ
GNEYKAVLLNVVRKMMTNSQ

SEQ ID NO: 193179 - protein, 20 aa, Artificial Sequence
  Description of Artificial Sequence: Synthetic peptide
  Seed: GNEKKAKLANVVRKMMTNSQ
GNEYKAVLMNVARKMMTNSQ

SEQ ID NO: 193180 - protein, 20 aa, Artificial Sequence
  Description of Artificial Sequence: Synthetic peptide
  Seed: GNEKKAKLANVVRKMMTNSQ
GNEYKAVLMNVIRKMMTNSQ

SEQ ID NO: 193181 - protein, 20 aa, Artificial Sequence
  Description of Artificial Sequence: Synthetic peptide
  Seed: GNEKKAKLANVVRKMMTNSQ
GNEYKAVLMNVLRKMMTNSQ

SEQ ID NO: 193182 - protein, 20 aa, Artificial Sequence
  Description of Artificial Sequence: Synthetic peptide
  Seed: GNEKKAKLANVVRKMMTNSQ
GNEYKAVLMNVNRKMMTNSQ

SEQ ID NO: 193183 - protein, 20 aa, Artificial Sequence
  Description of Artificial Sequence: Synthetic peptide
  Seed: GNEKKAKLANVVRKMMTNSQ
GNEYKAVLMNVSRKMMTNSQ

SEQ ID NO: 193184 - protein, 20 aa, Artificial Sequence
  Description of Artificial Sequence: Synthetic peptide
  Seed: GNEKKAKLANVVRKMMTNSQ
GNEYKAVLMNVTRKMMTNSQ

SEQ ID NO: 193185 - protein, 20 aa, Artificial Sequence
  Description of Artificial Sequence: Synthetic peptide
  Seed: GNEKKAKLANVVRKMMTNSQ
GNEYKAVLMNVVRKMMTNSQ

SEQ ID NO: 193186 - protein, 20 aa, Artificial Sequence
  Description of Artificial Sequence: Synthetic peptide
  Seed: GNEKKAKLANVVRKMMTNSQ
GNEYKAVLNNVARKMMTNSQ

SEQ ID NO: 193187 - protein, 20 aa, Artificial Sequence
  Description of Artificial Sequence: Synthetic peptide
  Seed: GNEKKAKLANVVRKMMTNSQ
GNEYKAVLNNVGRKMMTNSQ

SEQ ID NO: 193188 - protein, 20 aa, Artificial Sequence
  Description of Artificial Sequence: Synthetic peptide
  Seed: GNEKKAKLANVVRKMMTNSQ
GNEYKAVLNNVIRKMMTNSQ

SEQ ID NO: 193189 - protein, 20 aa, Artificial Sequence
  Description of Artificial Sequence: Synthetic peptide
  Seed: GNEKKAKLANVVRKMMTNSQ
GNEYKAVLNNVLRKMMTNSQ

SEQ ID NO: 193190 - protein, 20 aa, Artificial Sequence
  Description of Artificial Sequence: Synthetic peptide
  Seed: GNEKKAKLANVVRKMMTNSQ
GNEYKAVLNNVMRKMMTNSQ

SEQ ID NO: 193191 - protein, 20 aa, Artificial Sequence
  Description of Artificial Sequence: Synthetic peptide
  Seed: GNEKKAKLANVVRKMMTNSQ
GNEYKAVLNNVNRKMMTNSQ

SEQ ID NO: 193192 - protein, 20 aa, Artificial Sequence
  Description of Artificial Sequence: Synthetic peptide
  Seed: GNEKKAKLANVVRKMMTNSQ
GNEYKAVLNNVSRKMMTNSQ

SEQ ID NO: 193193 - protein, 20 aa, Artificial Sequence
  Description of Artificial Sequence: Synthetic peptide
  Seed: GNEKKAKLANVVRKMMTNSQ
GNEYKAVLNNVTRKMMTNSQ

SEQ ID NO: 193194 - protein, 20 aa, Artificial Sequence
  Description of Artificial Sequence: Synthetic peptide
  Seed: GNEKKAKLANVVRKMMTNSQ
GNEYKAVLNNVVRKMMTNSQ

SEQ ID NO: 193195 - protein, 20 aa, Artificial Sequence
  Description of Artificial Sequence: Synthetic peptide
  Seed: GNEKKAKLANVVRKMMTNSQ
GNEYKAVLPNVARKMMTNSQ

SEQ ID NO: 193196 - protein, 20 aa, Artificial Sequence
  Description of Artificial Sequence: Synthetic peptide
  Seed: GNEKKAKLANVVRKMMTNSQ
GNEYKAVLPNVCRKMMTNSQ

SEQ ID NO: 193197 - protein, 20 aa, Artificial Sequence
  Description of Artificial Sequence: Synthetic peptide
  Seed: GNEKKAKLANVVRKMMTNSQ
GNEYKAVLPNVDRKMMTNSQ

SEQ ID NO: 193198 - protein, 20 aa, Artificial Sequence
  Description of Artificial Sequence: Synthetic peptide
  Seed: GNEKKAKLANVVRKMMTNSQ
GNEYKAVLPNVERKMMTNSQ

SEQ ID NO: 193199 - protein, 20 aa, Artificial Sequence
  Description of Artificial Sequence: Synthetic peptide
  Seed: GNEKKAKLANVVRKMMTNSQ
GNEYKAVLPNVFRKMMTNSQ

SEQ ID NO: 193200 - protein, 20 aa, Artificial Sequence
  Description of Artificial Sequence: Synthetic peptide
  Seed: GNEKKAKLANVVRKMMTNSQ
GNEYKAVLPNVGRKMMTNSQ

SEQ ID NO: 193201 - protein, 20 aa, Artificial Sequence
  Description of Artificial Sequence: Synthetic peptide
  Seed: GNEKKAKLANVVRKMMTNSQ
GNEYKAVLPNVHRKMMTNSQ

SEQ ID NO: 193202 - protein, 20 aa, Artificial Sequence
  Description of Artificial Sequence: Synthetic peptide
  Seed: GNEKKAKLANVVRKMMTNSQ
GNEYKAVLPNVIRKMMTNSQ

SEQ ID NO: 193203 - protein, 20 aa, Artificial Sequence
  Description of Artificial Sequence: Synthetic peptide
  Seed: GNEKKAKLANVVRKMMTNSQ
GNEYKAVLPNVLRKMMTNSQ

SEQ ID NO: 193204 - protein, 20 aa, Artificial Sequence
  Description of Artificial Sequence: Synthetic peptide
  Seed: GNEKKAKLANVVRKMMTNSQ
GNEYKAVLPNVMRKMMTNSQ

SEQ ID NO: 193205 - protein, 20 aa, Artificial Sequence
  Description of Artificial Sequence: Synthetic peptide
  Seed: GNEKKAKLANVVRKMMTNSQ
GNEYKAVLPNVNRKMMTNSQ

SEQ ID NO: 193206 - protein, 20 aa, Artificial Sequence
  Description of Artificial Sequence: Synthetic peptide
  Seed: GNEKKAKLANVVRKMMTNSQ
GNEYKAVLPNVPRKMMTNSQ

SEQ ID NO: 193207 - protein, 20 aa, Artificial Sequence
  Description of Artificial Sequence: Synthetic peptide
  Seed: GNEKKAKLANVVRKMMTNSQ
GNEYKAVLPNVQRKMMTNSQ

SEQ ID NO: 193208 - protein, 20 aa, Artificial Sequence
  Description of Artificial Sequence: Synthetic peptide
  Seed: GNEKKAKLANVVRKMMTNSQ
GNEYKAVLPNVSRKMMTNSQ

SEQ ID NO: 193209 - protein, 20 aa, Artificial Sequence
  Description of Artificial Sequence: Synthetic peptide
  Seed: GNEKKAKLANVVRKMMTNSQ
GNEYKAVLPNVTRKMMTNSQ

SEQ ID NO: 193210 - protein, 20 aa, Artificial Sequence
  Description of Artificial Sequence: Synthetic peptide
  Seed: GNEKKAKLANVVRKMMTNSQ
GNEYKAVLPNVVRKMMTNSQ

SEQ ID NO: 193211 - protein, 20 aa, Artificial Sequence
  Description of Artificial Sequence: Synthetic peptide
  Seed: GNEKKAKLANVVRKMMTNSQ
GNEYKAVLPNVYRKMMTNSQ

SEQ ID NO: 193212 - protein, 20 aa, Artificial Sequence
  Description of Artificial Sequence: Synthetic peptide
  Seed: GNEKKAKLANVVRKMMTNSQ
GNEYKAVLSNVARKMMTNSQ

SEQ ID NO: 193213 - protein, 20 aa, Artificial Sequence
  Description of Artificial Sequence: Synthetic peptide
  Seed: GNEKKAKLANVVRKMMTNSQ
GNEYKAVLSNVCRKMMTNSQ

SEQ ID NO: 193214 - protein, 20 aa, Artificial Sequence
  Description of Artificial Sequence: Synthetic peptide
  Seed: GNEKKAKLANVVRKMMTNSQ
GNEYKAVLSNVERKMMTNSQ

SEQ ID NO: 193215 - protein, 20 aa, Artificial Sequence
  Description of Artificial Sequence: Synthetic peptide
  Seed: GNEKKAKLANVVRKMMTNSQ
GNEYKAVLSNVFRKMMTNSQ

SEQ ID NO: 193216 - protein, 20 aa, Artificial Sequence
  Description of Artificial Sequence: Synthetic peptide
  Seed: GNEKKAKLANVVRKMMTNSQ
GNEYKAVLSNVGRKMMTNSQ

SEQ ID NO: 193217 - protein, 20 aa, Artificial Sequence
  Description of Artificial Sequence: Synthetic peptide
  Seed: GNEKKAKLANVVRKMMTNSQ
GNEYKAVLSNVHRKMMTNSQ

SEQ ID NO: 193218 - protein, 20 aa, Artificial Sequence
  Description of Artificial Sequence: Synthetic peptide
  Seed: GNEKKAKLANVVRKMMTNSQ
GNEYKAVLSNVIRKMMTNSQ

SEQ ID NO: 193219 - protein, 20 aa, Artificial Sequence
  Description of Artificial Sequence: Synthetic peptide
  Seed: GNEKKAKLANVVRKMMTNSQ
GNEYKAVLSNVLRKMMTNSQ

SEQ ID NO: 193220 - protein, 20 aa, Artificial Sequence
  Description of Artificial Sequence: Synthetic peptide
  Seed: GNEKKAKLANVVRKMMTNSQ
GNEYKAVLSNVMRKMMTNSQ

SEQ ID NO: 193221 - protein, 20 aa, Artificial Sequence
  Description of Artificial Sequence: Synthetic peptide
  Seed: GNEKKAKLANVVRKMMTNSQ
GNEYKAVLSNVNRKMMTNSQ

SEQ ID NO: 193222 - protein, 20 aa, Artificial Sequence
  Description of Artificial Sequence: Synthetic peptide
  Seed: GNEKKAKLANVVRKMMTNSQ
GNEYKAVLSNVPRKMMTNSQ

SEQ ID NO: 193223 - protein, 20 aa, Artificial Sequence
  Description of Artificial Sequence: Synthetic peptide
  Seed: GNEKKAKLANVVRKMMTNSQ
GNEYKAVLSNVQRKMMTNSQ

SEQ ID NO: 193224 - protein, 20 aa, Artificial Sequence
  Description of Artificial Sequence: Synthetic peptide
  Seed: GNEKKAKLANVVRKMMTNSQ
GNEYKAVLSNVSRKMMTNSQ

SEQ ID NO: 193225 - protein, 20 aa, Artificial Sequence
  Description of Artificial Sequence: Synthetic peptide
  Seed: GNEKKAKLANVVRKMMTNSQ
GNEYKAVLSNVTRKMMTNSQ

SEQ ID NO: 193226 - protein, 20 aa, Artificial Sequence
  Description of Artificial Sequence: Synthetic peptide
  Seed: GNEKKAKLANVVRKMMTNSQ
GNEYKAVLSNVVRKMMTNSQ

SEQ ID NO: 193227 - protein, 20 aa, Artificial Sequence
  Description of Artificial Sequence: Synthetic peptide
  Seed: GNEKKAKLANVVRKMMTNSQ
GNEYKAVLTNVARKMMTNSQ

SEQ ID NO: 193228 - protein, 20 aa, Artificial Sequence
  Description of Artificial Sequence: Synthetic peptide
  Seed: GNEKKAKLANVVRKMMTNSQ
GNEYKAVLTNVFRKMMTNSQ

SEQ ID NO: 193229 - protein, 20 aa, Artificial Sequence
  Description of Artificial Sequence: Synthetic peptide
  Seed: GNEKKAKLANVVRKMMTNSQ
GNEYKAVLTNVGRKMMTNSQ

SEQ ID NO: 193230 - protein, 20 aa, Artificial Sequence
  Description of Artificial Sequence: Synthetic peptide
  Seed: GNEKKAKLANVVRKMMTNSQ
GNEYKAVLTNVHRKMMTNSQ

SEQ ID NO: 193231 - protein, 20 aa, Artificial Sequence
  Description of Artificial Sequence: Synthetic peptide
  Seed: GNEKKAKLANVVRKMMTNSQ
GNEYKAVLTNVIRKMMTNSQ

SEQ ID NO: 193232 - protein, 20 aa, Artificial Sequence
  Description of Artificial Sequence: Synthetic peptide
  Seed: GNEKKAKLANVVRKMMTNSQ
GNEYKAVLTNVLRKMMTNSQ

SEQ ID NO: 193233 - protein, 20 aa, Artificial Sequence
  Description of Artificial Sequence: Synthetic peptide
  Seed: GNEKKAKLANVVRKMMTNSQ
GNEYKAVLTNVMRKMMTNSQ

SEQ ID NO: 193234 - protein, 20 aa, Artificial Sequence
  Description of Artificial Sequence: Synthetic peptide
  Seed: GNEKKAKLANVVRKMMTNSQ
GNEYKAVLTNVNRKMMTNSQ

SEQ ID NO: 193235 - protein, 20 aa, Artificial Sequence
  Description of Artificial Sequence: Synthetic peptide
  Seed: GNEKKAKLANVVRKMMTNSQ
GNEYKAVLTNVPRKMMTNSQ

SEQ ID NO: 193236 - protein, 20 aa, Artificial Sequence
  Description of Artificial Sequence: Synthetic peptide
  Seed: GNEKKAKLANVVRKMMTNSQ
GNEYKAVLTNVQRKMMTNSQ

SEQ ID NO: 193237 - protein, 20 aa, Artificial Sequence
  Description of Artificial Sequence: Synthetic peptide
  Seed: GNEKKAKLANVVRKMMTNSQ
GNEYKAVLTNVSRKMMTNSQ

SEQ ID NO: 193238 - protein, 20 aa, Artificial Sequence
  Description of Artificial Sequence: Synthetic peptide
  Seed: GNEKKAKLANVVRKMMTNSQ
GNEYKAVLTNVTRKMMTNSQ

SEQ ID NO: 193239 - protein, 20 aa, Artificial Sequence
  Description of Artificial Sequence: Synthetic peptide
  Seed: GNEKKAKLANVVRKMMTNSQ
GNEYKAVLTNVVRKMMTNSQ

SEQ ID NO: 193240 - protein, 20 aa, Artificial Sequence
  Description of Artificial Sequence: Synthetic peptide
  Seed: GNEKKAKLANVVRKMMTNSQ
GNEYKAVLVNVARKMMTNSQ

SEQ ID NO: 193241 - protein, 20 aa, Artificial Sequence
  Description of Artificial Sequence: Synthetic peptide
  Seed: GNEKKAKLANVVRKMMTNSQ
GNEYKAVLVNVGRKMMTNSQ

SEQ ID NO: 193242 - protein, 20 aa, Artificial Sequence
  Description of Artificial Sequence: Synthetic peptide
  Seed: GNEKKAKLANVVRKMMTNSQ
GNEYKAVLVNVHRKMMTNSQ

SEQ ID NO: 193243 - protein, 20 aa, Artificial Sequence
  Description of Artificial Sequence: Synthetic peptide
  Seed: GNEKKAKLANVVRKMMTNSQ
GNEYKAVLVNVIRKMMTNSQ

SEQ ID NO: 193244 - protein, 20 aa, Artificial Sequence
  Description of Artificial Sequence: Synthetic peptide
  Seed: GNEKKAKLANVVRKMMTNSQ
GNEYKAVLVNVLRKMMTNSQ

SEQ ID NO: 193245 - protein, 20 aa, Artificial Sequence
  Description of Artificial Sequence: Synthetic peptide
  Seed: GNEKKAKLANVVRKMMTNSQ
GNEYKAVLVNVMRKMMTNSQ

SEQ ID NO: 193246 - protein, 20 aa, Artificial Sequence
  Description of Artificial Sequence: Synthetic peptide
  Seed: GNEKKAKLANVVRKMMTNSQ
GNEYKAVLVNVNRKMMTNSQ

SEQ ID NO: 193247 - protein, 20 aa, Artificial Sequence
  Description of Artificial Sequence: Synthetic peptide
  Seed: GNEKKAKLANVVRKMMTNSQ
GNEYKAVLVNVPRKMMTNSQ

SEQ ID NO: 193248 - protein, 20 aa, Artificial Sequence
  Description of Artificial Sequence: Synthetic peptide
  Seed: GNEKKAKLANVVRKMMTNSQ
GNEYKAVLVNVQRKMMTNSQ

SEQ ID NO: 193249 - protein, 20 aa, Artificial Sequence
  Description of Artificial Sequence: Synthetic peptide
  Seed: GNEKKAKLANVVRKMMTNSQ
GNEYKAVLVNVSRKMMTNSQ

SEQ ID NO: 193250 - protein, 20 aa, Artificial Sequence
  Description of Artificial Sequence: Synthetic peptide
  Seed: GNEKKAKLANVVRKMMTNSQ
GNEYKAVLVNVTRKMMTNSQ

SEQ ID NO: 193251 - protein, 20 aa, Artificial Sequence
  Description of Artificial Sequence: Synthetic peptide
  Seed: GNEKKAKLANVVRKMMTNSQ
GNEYKAVLVNVVRKMMTNSQ

SEQ ID NO: 193252 - protein, 20 aa, Artificial Sequence
  Description of Artificial Sequence: Synthetic peptide
  Seed: GNEKKAKLANVVRKMMTNSQ
GNEYKAVLWNVIRKMMTNSQ

SEQ ID NO: 193253 - protein, 20 aa, Artificial Sequence
  Description of Artificial Sequence: Synthetic peptide
  Seed: GNEKKAKLANVVRKMMTNSQ
GNEYKAVLWNVLRKMMTNSQ

SEQ ID NO: 193254 - protein, 20 aa, Artificial Sequence
  Description of Artificial Sequence: Synthetic peptide
  Seed: GNEKKAKLANVVRKMMTNSQ
GNEYKAVLWNVMRKMMTNSQ

SEQ ID NO: 193255 - protein, 20 aa, Artificial Sequence
  Description of Artificial Sequence: Synthetic peptide
  Seed: GNEKKAKLANVVRKMMTNSQ
GNEYKAVLWNVVRKMMTNSQ

SEQ ID NO: 193256 - protein, 20 aa, Artificial Sequence
  Description of Artificial Sequence: Synthetic peptide
  Seed: GNEKKAKLANVVRKMMTNSQ
GNEYKAVLWNVYRKMMTNSQ

SEQ ID NO: 193257 - protein, 20 aa, Artificial Sequence
  Description of Artificial Sequence: Synthetic peptide
  Seed: GNEKKAKLANVVRKMMTNSQ
GNEYKAVLYNVIRKMMTNSQ

SEQ ID NO: 193258 - protein, 20 aa, Artificial Sequence
  Description of Artificial Sequence: Synthetic peptide
  Seed: GNEKKAKLANVVRKMMTNSQ
GNEYKAVLYNVLRKMMTNSQ

SEQ ID NO: 193259 - protein, 20 aa, Artificial Sequence
  Description of Artificial Sequence: Synthetic peptide
  Seed: GNEKKAKLANVVRKMMTNSQ
GNEYKAVLYNVMRKMMTNSQ

SEQ ID NO: 193260 - protein, 20 aa, Artificial Sequence
  Description of Artificial Sequence: Synthetic peptide
  Seed: GNEKKAKLANVVRKMMTNSQ
GNEYKAVLYNVVRKMMTNSQ

SEQ ID NO: 193261 - protein, 20 aa, Artificial Sequence
  Description of Artificial Sequence: Synthetic peptide
  Seed: GNEKKAKLANVVRKMMTNSQ
GNEYKAVLYNVYRKMMTNSQ

SEQ ID NO: 193262 - protein, 20 aa, Artificial Sequence
  Description of Artificial Sequence: Synthetic peptide
  Seed: GNEKKAKLANVVRKMMTNSQ
GNEYKAWLANVARKMMTNSQ

SEQ ID NO: 193263 - protein, 20 aa, Artificial Sequence
  Description of Artificial Sequence: Synthetic peptide
  Seed: GNEKKAKLANVVRKMMTNSQ
GNEYKAWLANVGRKMMTNSQ

SEQ ID NO: 193264 - protein, 20 aa, Artificial Sequence
  Description of Artificial Sequence: Synthetic peptide
  Seed: GNEKKAKLANVVRKMMTNSQ
GNEYKAWLANVIRKMMTNSQ

SEQ ID NO: 193265 - protein, 20 aa, Artificial Sequence
  Description of Artificial Sequence: Synthetic peptide
  Seed: GNEKKAKLANVVRKMMTNSQ
GNEYKAWLANVLRKMMTNSQ

SEQ ID NO: 193266 - protein, 20 aa, Artificial Sequence
  Description of Artificial Sequence: Synthetic peptide
  Seed: GNEKKAKLANVVRKMMTNSQ
GNEYKAWLANVMRKMMTNSQ

SEQ ID NO: 193267 - protein, 20 aa, Artificial Sequence
  Description of Artificial Sequence: Synthetic peptide
  Seed: GNEKKAKLANVVRKMMTNSQ
GNEYKAWLANVNRKMMTNSQ

SEQ ID NO: 193268 - protein, 20 aa, Artificial Sequence
  Description of Artificial Sequence: Synthetic peptide
  Seed: GNEKKAKLANVVRKMMTNSQ
GNEYKAWLANVSRKMMTNSQ

SEQ ID NO: 193269 - protein, 20 aa, Artificial Sequence
  Description of Artificial Sequence: Synthetic peptide
  Seed: GNEKKAKLANVVRKMMTNSQ
GNEYKAWLANVTRKMMTNSQ

SEQ ID NO: 193270 - protein, 20 aa, Artificial Sequence
  Description of Artificial Sequence: Synthetic peptide
  Seed: GNEKKAKLANVVRKMMTNSQ
GNEYKAWLANVVRKMMTNSQ

SEQ ID NO: 193271 - protein, 20 aa, Artificial Sequence
  Description of Artificial Sequence: Synthetic peptide
  Seed: GNEKKAKLANVVRKMMTNSQ
GNEYKAWLFNVARKMMTNSQ

SEQ ID NO: 193272 - protein, 20 aa, Artificial Sequence
  Description of Artificial Sequence: Synthetic peptide
  Seed: GNEKKAKLANVVRKMMTNSQ
GNEYKAWLFNVIRKMMTNSQ

SEQ ID NO: 193273 - protein, 20 aa, Artificial Sequence
  Description of Artificial Sequence: Synthetic peptide
  Seed: GNEKKAKLANVVRKMMTNSQ
GNEYKAWLFNVLRKMMTNSQ

SEQ ID NO: 193274 - protein, 20 aa, Artificial Sequence
  Description of Artificial Sequence: Synthetic peptide
  Seed: GNEKKAKLANVVRKMMTNSQ
GNEYKAWLFNVMRKMMTNSQ

SEQ ID NO: 193275 - protein, 20 aa, Artificial Sequence
  Description of Artificial Sequence: Synthetic peptide
  Seed: GNEKKAKLANVVRKMMTNSQ
GNEYKAWLFNVTRKMMTNSQ

SEQ ID NO: 193276 - protein, 20 aa, Artificial Sequence
  Description of Artificial Sequence: Synthetic peptide
  Seed: GNEKKAKLANVVRKMMTNSQ
GNEYKAWLFNVVRKMMTNSQ

SEQ ID NO: 193277 - protein, 20 aa, Artificial Sequence
  Description of Artificial Sequence: Synthetic peptide
  Seed: GNEKKAKLANVVRKMMTNSQ
GNEYKAWLFNVYRKMMTNSQ

SEQ ID NO: 193278 - protein, 20 aa, Artificial Sequence
  Description of Artificial Sequence: Synthetic peptide
  Seed: GNEKKAKLANVVRKMMTNSQ
GNEYKAWLGNVARKMMTNSQ

SEQ ID NO: 193279 - protein, 20 aa, Artificial Sequence
  Description of Artificial Sequence: Synthetic peptide
  Seed: GNEKKAKLANVVRKMMTNSQ
GNEYKAWLGNVIRKMMTNSQ

SEQ ID NO: 193280 - protein, 20 aa, Artificial Sequence
  Description of Artificial Sequence: Synthetic peptide
  Seed: GNEKKAKLANVVRKMMTNSQ
GNEYKAWLGNVLRKMMTNSQ

SEQ ID NO: 193281 - protein, 20 aa, Artificial Sequence
  Description of Artificial Sequence: Synthetic peptide
  Seed: GNEKKAKLANVVRKMMTNSQ
GNEYKAWLGNVVRKMMTNSQ

SEQ ID NO: 193282 - protein, 20 aa, Artificial Sequence
  Description of Artificial Sequence: Synthetic peptide
  Seed: GNEKKAKLANVVRKMMTNSQ
GNEYKAWLINVARKMMTNSQ

SEQ ID NO: 193283 - protein, 20 aa, Artificial Sequence
  Description of Artificial Sequence: Synthetic peptide
  Seed: GNEKKAKLANVVRKMMTNSQ
GNEYKAWLINVIRKMMTNSQ

SEQ ID NO: 193284 - protein, 20 aa, Artificial Sequence
  Description of Artificial Sequence: Synthetic peptide
  Seed: GNEKKAKLANVVRKMMTNSQ
GNEYKAWLINVLRKMMTNSQ

SEQ ID NO: 193285 - protein, 20 aa, Artificial Sequence
  Description of Artificial Sequence: Synthetic peptide
  Seed: GNEKKAKLANVVRKMMTNSQ
GNEYKAWLLNVIRKMMTNSQ

SEQ ID NO: 193286 - protein, 20 aa, Artificial Sequence
  Description of Artificial Sequence: Synthetic peptide
  Seed: GNEKKAKLANVVRKMMTNSQ
GNEYKAWLLNVLRKMMTNSQ

SEQ ID NO: 193287 - protein, 20 aa, Artificial Sequence
  Description of Artificial Sequence: Synthetic peptide
  Seed: GNEKKAKLANVVRKMMTNSQ
GNEYKAWLLNVMRKMMTNSQ

SEQ ID NO: 193288 - protein, 20 aa, Artificial Sequence
  Description of Artificial Sequence: Synthetic peptide
  Seed: GNEKKAKLANVVRKMMTNSQ
GNEYKAWLLNVVRKMMTNSQ

SEQ ID NO: 193289 - protein, 20 aa, Artificial Sequence
  Description of Artificial Sequence: Synthetic peptide
  Seed: GNEKKAKLANVVRKMMTNSQ
GNEYKAWLLNVYRKMMTNSQ

SEQ ID NO: 193290 - protein, 20 aa, Artificial Sequence
  Description of Artificial Sequence: Synthetic peptide
  Seed: GNEKKAKLANVVRKMMTNSQ
GNEYKAWLMNVIRKMMTNSQ

SEQ ID NO: 193291 - protein, 20 aa, Artificial Sequence
  Description of Artificial Sequence: Synthetic peptide
  Seed: GNEKKAKLANVVRKMMTNSQ
GNEYKAWLMNVLRKMMTNSQ

SEQ ID NO: 193292 - protein, 20 aa, Artificial Sequence
  Description of Artificial Sequence: Synthetic peptide
  Seed: GNEKKAKLANVVRKMMTNSQ
GNEYKAWLMNVVRKMMTNSQ

SEQ ID NO: 193293 - protein, 20 aa, Artificial Sequence
  Description of Artificial Sequence: Synthetic peptide
  Seed: GNEKKAKLANVVRKMMTNSQ
GNEYKAWLPNVARKMMTNSQ

SEQ ID NO: 193294 - protein, 20 aa, Artificial Sequence
  Description of Artificial Sequence: Synthetic peptide
  Seed: GNEKKAKLANVVRKMMTNSQ
GNEYKAWLPNVIRKMMTNSQ

SEQ ID NO: 193295 - protein, 20 aa, Artificial Sequence
  Description of Artificial Sequence: Synthetic peptide
  Seed: GNEKKAKLANVVRKMMTNSQ
GNEYKAWLPNVSRKMMTNSQ

SEQ ID NO: 193296 - protein, 20 aa, Artificial Sequence
  Description of Artificial Sequence: Synthetic peptide
  Seed: GNEKKAKLANVVRKMMTNSQ
GNEYKAWLPNVVRKMMTNSQ

SEQ ID NO: 193297 - protein, 20 aa, Artificial Sequence
  Description of Artificial Sequence: Synthetic peptide
  Seed: GNEKKAKLANVVRKMMTNSQ
GNEYKAWLSNVARKMMTNSQ

SEQ ID NO: 193298 - protein, 20 aa, Artificial Sequence
  Description of Artificial Sequence: Synthetic peptide
  Seed: GNEKKAKLANVVRKMMTNSQ
GNEYKAWLSNVIRKMMTNSQ

SEQ ID NO: 193299 - protein, 20 aa, Artificial Sequence
  Description of Artificial Sequence: Synthetic peptide
  Seed: GNEKKAKLANVVRKMMTNSQ
GNEYKAWLSNVLRKMMTNSQ

SEQ ID NO: 193300 - protein, 20 aa, Artificial Sequence
  Description of Artificial Sequence: Synthetic peptide
  Seed: GNEKKAKLANVVRKMMTNSQ
GNEYKAWLSNVSRKMMTNSQ

SEQ ID NO: 193301 - protein, 20 aa, Artificial Sequence
  Description of Artificial Sequence: Synthetic peptide
  Seed: GNEKKAKLANVVRKMMTNSQ
GNEYKAWLSNVVRKMMTNSQ

SEQ ID NO: 193302 - protein, 20 aa, Artificial Sequence
  Description of Artificial Sequence: Synthetic peptide
  Seed: GNEKKAKLANVVRKMMTNSQ
GNEYKAWLTNVARKMMTNSQ

SEQ ID NO: 193303 - protein, 20 aa, Artificial Sequence
  Description of Artificial Sequence: Synthetic peptide
  Seed: GNEKKAKLANVVRKMMTNSQ
GNEYKAWLTNVVRKMMTNSQ

SEQ ID NO: 193304 - protein, 20 aa, Artificial Sequence
  Description of Artificial Sequence: Synthetic peptide
  Seed: GNEKKAKLANVVRKMMTNSQ
GNEYKAWLVNVARKMMTNSQ

SEQ ID NO: 193305 - protein, 20 aa, Artificial Sequence
  Description of Artificial Sequence: Synthetic peptide
  Seed: GNEKKAKLANVVRKMMTNSQ
GNEYKAWLVNVNRKMMTNSQ

SEQ ID NO: 193306 - protein, 20 aa, Artificial Sequence
  Description of Artificial Sequence: Synthetic peptide
  Seed: GNEKKAKLANVVRKMMTNSQ
GNEYKAWLVNVSRKMMTNSQ

SEQ ID NO: 193307 - protein, 20 aa, Artificial Sequence
  Description of Artificial Sequence: Synthetic peptide
  Seed: GNEKKAKLANVVRKMMTNSQ
GNEYKAWLVNVVRKMMTNSQ

SEQ ID NO: 193308 - protein, 20 aa, Artificial Sequence
  Description of Artificial Sequence: Synthetic peptide
  Seed: GNEKKAKLANVVRKMMTNSQ
GNEYKAWLWNVIRKMMTNSQ

SEQ ID NO: 193309 - protein, 20 aa, Artificial Sequence
  Description of Artificial Sequence: Synthetic peptide
  Seed: GNEKKAKLANVVRKMMTNSQ
GNEYKAWLWNVLRKMMTNSQ

SEQ ID NO: 193310 - protein, 20 aa, Artificial Sequence
  Description of Artificial Sequence: Synthetic peptide
  Seed: GNEKKAKLANVVRKMMTNSQ
GNEYKAWLWNVVRKMMTNSQ

SEQ ID NO: 193311 - protein, 20 aa, Artificial Sequence
  Description of Artificial Sequence: Synthetic peptide
  Seed: GNEKKAKLANVVRKMMTNSQ
GNEYKAWLYNVIRKMMTNSQ

SEQ ID NO: 193312 - protein, 20 aa, Artificial Sequence
  Description of Artificial Sequence: Synthetic peptide
  Seed: GNEKKAKLANVVRKMMTNSQ
GNEYKAWLYNVLRKMMTNSQ

SEQ ID NO: 193313 - protein, 20 aa, Artificial Sequence
  Description of Artificial Sequence: Synthetic peptide
  Seed: GNEKKAKLANVVRKMMTNSQ
GNEYKAWLYNVMRKMMTNSQ

SEQ ID NO: 193314 - protein, 20 aa, Artificial Sequence
  Description of Artificial Sequence: Synthetic peptide
  Seed: GNEKKAKLANVVRKMMTNSQ
GNEYKAWLYNVVRKMMTNSQ

SEQ ID NO: 193315 - protein, 20 aa, Artificial Sequence
  Description of Artificial Sequence: Synthetic peptide
  Seed: GNEKKAKLANVVRKMMTNSQ
GNEYKAYLANVARKMMTNSQ

SEQ ID NO: 193316 - protein, 20 aa, Artificial Sequence
  Description of Artificial Sequence: Synthetic peptide
  Seed: GNEKKAKLANVVRKMMTNSQ
GNEYKAYLANVIRKMMTNSQ

SEQ ID NO: 193317 - protein, 20 aa, Artificial Sequence
  Description of Artificial Sequence: Synthetic peptide
  Seed: GNEKKAKLANVVRKMMTNSQ
GNEYKAYLANVLRKMMTNSQ

SEQ ID NO: 193318 - protein, 20 aa, Artificial Sequence
  Description of Artificial Sequence: Synthetic peptide
  Seed: GNEKKAKLANVVRKMMTNSQ
GNEYKAYLANVNRKMMTNSQ

SEQ ID NO: 193319 - protein, 20 aa, Artificial Sequence
  Description of Artificial Sequence: Synthetic peptide
  Seed: GNEKKAKLANVVRKMMTNSQ
GNEYKAYLANVSRKMMTNSQ

SEQ ID NO: 193320 - protein, 20 aa, Artificial Sequence
  Description of Artificial Sequence: Synthetic peptide
  Seed: GNEKKAKLANVVRKMMTNSQ
GNEYKAYLANVVRKMMTNSQ

SEQ ID NO: 193321 - protein, 20 aa, Artificial Sequence
  Description of Artificial Sequence: Synthetic peptide
  Seed: GNEKKAKLANVVRKMMTNSQ
GNEYKAYLFNVARKMMTNSQ

SEQ ID NO: 193322 - protein, 20 aa, Artificial Sequence
  Description of Artificial Sequence: Synthetic peptide
  Seed: GNEKKAKLANVVRKMMTNSQ
GNEYKAYLFNVIRKMMTNSQ

SEQ ID NO: 193323 - protein, 20 aa, Artificial Sequence
  Description of Artificial Sequence: Synthetic peptide
  Seed: GNEKKAKLANVVRKMMTNSQ
GNEYKAYLFNVLRKMMTNSQ

SEQ ID NO: 193324 - protein, 20 aa, Artificial Sequence
  Description of Artificial Sequence: Synthetic peptide
  Seed: GNEKKAKLANVVRKMMTNSQ
GNEYKAYLFNVMRKMMTNSQ

SEQ ID NO: 193325 - protein, 20 aa, Artificial Sequence
  Description of Artificial Sequence: Synthetic peptide
  Seed: GNEKKAKLANVVRKMMTNSQ
GNEYKAYLFNVTRKMMTNSQ

SEQ ID NO: 193326 - protein, 20 aa, Artificial Sequence
  Description of Artificial Sequence: Synthetic peptide
  Seed: GNEKKAKLANVVRKMMTNSQ
GNEYKAYLFNVVRKMMTNSQ

SEQ ID NO: 193327 - protein, 20 aa, Artificial Sequence
  Description of Artificial Sequence: Synthetic peptide
  Seed: GNEKKAKLANVVRKMMTNSQ
GNEYKAYLGNVARKMMTNSQ

SEQ ID NO: 193328 - protein, 20 aa, Artificial Sequence
  Description of Artificial Sequence: Synthetic peptide
  Seed: GNEKKAKLANVVRKMMTNSQ
GNEYKAYLGNVVRKMMTNSQ

SEQ ID NO: 193329 - protein, 20 aa, Artificial Sequence
  Description of Artificial Sequence: Synthetic peptide
  Seed: GNEKKAKLANVVRKMMTNSQ
GNEYKAYLLNVIRKMMTNSQ

SEQ ID NO: 193330 - protein, 20 aa, Artificial Sequence
  Description of Artificial Sequence: Synthetic peptide
  Seed: GNEKKAKLANVVRKMMTNSQ
GNEYKAYLLNVLRKMMTNSQ

SEQ ID NO: 193331 - protein, 20 aa, Artificial Sequence
  Description of Artificial Sequence: Synthetic peptide
  Seed: GNEKKAKLANVVRKMMTNSQ
GNEYKAYLLNVMRKMMTNSQ

SEQ ID NO: 193332 - protein, 20 aa, Artificial Sequence
  Description of Artificial Sequence: Synthetic peptide
  Seed: GNEKKAKLANVVRKMMTNSQ
GNEYKAYLLNVVRKMMTNSQ

SEQ ID NO: 193333 - protein, 20 aa, Artificial Sequence
  Description of Artificial Sequence: Synthetic peptide
  Seed: GNEKKAKLANVVRKMMTNSQ
GNEYKAYLMNVIRKMMTNSQ

SEQ ID NO: 193334 - protein, 20 aa, Artificial Sequence
  Description of Artificial Sequence: Synthetic peptide
  Seed: GNEKKAKLANVVRKMMTNSQ
GNEYKAYLMNVVRKMMTNSQ

SEQ ID NO: 193335 - protein, 20 aa, Artificial Sequence
  Description of Artificial Sequence: Synthetic peptide
  Seed: GNEKKAKLANVVRKMMTNSQ
GNEYKAYLPNVARKMMTNSQ

SEQ ID NO: 193336 - protein, 20 aa, Artificial Sequence
  Description of Artificial Sequence: Synthetic peptide
  Seed: GNEKKAKLANVVRKMMTNSQ
GNEYKAYLSNVARKMMTNSQ

SEQ ID NO: 193337 - protein, 20 aa, Artificial Sequence
  Description of Artificial Sequence: Synthetic peptide
  Seed: GNEKKAKLANVVRKMMTNSQ
GNEYKAYLSNVIRKMMTNSQ

SEQ ID NO: 193338 - protein, 20 aa, Artificial Sequence
  Description of Artificial Sequence: Synthetic peptide
  Seed: GNEKKAKLANVVRKMMTNSQ
GNEYKAYLSNVVRKMMTNSQ

SEQ ID NO: 193339 - protein, 20 aa, Artificial Sequence
  Description of Artificial Sequence: Synthetic peptide
  Seed: GNEKKAKLANVVRKMMTNSQ
GNEYKAYLTNVARKMMTNSQ

SEQ ID NO: 193340 - protein, 20 aa, Artificial Sequence
  Description of Artificial Sequence: Synthetic peptide
  Seed: GNEKKAKLANVVRKMMTNSQ
GNEYKAYLVNVARKMMTNSQ

SEQ ID NO: 193341 - protein, 20 aa, Artificial Sequence
  Description of Artificial Sequence: Synthetic peptide
  Seed: GNEKKAKLANVVRKMMTNSQ
GNEYKAYLWNVVRKMMTNSQ

SEQ ID NO: 193342 - protein, 20 aa, Artificial Sequence
  Description of Artificial Sequence: Synthetic peptide
  Seed: GNEKKAKLANVVRKMMTNSQ
GNEYKAYLYNVIRKMMTNSQ

SEQ ID NO: 193343 - protein, 20 aa, Artificial Sequence
  Description of Artificial Sequence: Synthetic peptide
  Seed: GNEKKAKLANVVRKMMTNSQ
GNEYKAYLYNVVRKMMTNSQ

SEQ ID NO: 193344 - protein, 20 aa, Artificial Sequence
  Description of Artificial Sequence: Synthetic peptide
  Seed: GNEKKAKLANVVRKMMTNSQ
GNEKKAKFANAVFKMITNSQ

SEQ ID NO: 193345 - protein, 20 aa, Artificial Sequence
  Description of Artificial Sequence: Synthetic peptide
  Seed: GNEKKAKLANVVRKMMTNSQ
GNEKKAKFANAVFKMLTNSQ

SEQ ID NO: 193346 - protein, 20 aa, Artificial Sequence
  Description of Artificial Sequence: Synthetic peptide
  Seed: GNEKKAKLANVVRKMMTNSQ
GNEKKAKFANAVFKMVTNSQ

SEQ ID NO: 193347 - protein, 20 aa, Artificial Sequence
  Description of Artificial Sequence: Synthetic peptide
  Seed: GNEKKAKLANVVRKMMTNSQ
GNEKKAKFANAVKKMATNSQ

SEQ ID NO: 193348 - protein, 20 aa, Artificial Sequence
  Description of Artificial Sequence: Synthetic peptide
  Seed: GNEKKAKLANVVRKMMTNSQ
GNEKKAKFANAVKKMGTNSQ

SEQ ID NO: 193349 - protein, 20 aa, Artificial Sequence
  Description of Artificial Sequence: Synthetic peptide
  Seed: GNEKKAKLANVVRKMMTNSQ
GNEKKAKFANAVKKMSTNSQ

SEQ ID NO: 193350 - protein, 20 aa, Artificial Sequence
  Description of Artificial Sequence: Synthetic peptide
  Seed: GNEKKAKLANVVRKMMTNSQ
GNEKKAKFANAVKKMTTNSQ

SEQ ID NO: 193351 - protein, 20 aa, Artificial Sequence
  Description of Artificial Sequence: Synthetic peptide
  Seed: GNEKKAKLANVVRKMMTNSQ
GNEKKAKFANAVRKMATNSQ

SEQ ID NO: 193352 - protein, 20 aa, Artificial Sequence
  Description of Artificial Sequence: Synthetic peptide
  Seed: GNEKKAKLANVVRKMMTNSQ
GNEKKAKFANAVRKMGTNSQ

SEQ ID NO: 193353 - protein, 20 aa, Artificial Sequence
  Description of Artificial Sequence: Synthetic peptide
  Seed: GNEKKAKLANVVRKMMTNSQ
GNEKKAKFANAVRKMQTNSQ

SEQ ID NO: 193354 - protein, 20 aa, Artificial Sequence
  Description of Artificial Sequence: Synthetic peptide
  Seed: GNEKKAKLANVVRKMMTNSQ
GNEKKAKFANAVRKMSTNSQ

SEQ ID NO: 193355 - protein, 20 aa, Artificial Sequence
  Description of Artificial Sequence: Synthetic peptide
  Seed: GNEKKAKLANVVRKMMTNSQ
GNEKKAKFANAVRKMTTNSQ

SEQ ID NO: 193356 - protein, 20 aa, Artificial Sequence
  Description of Artificial Sequence: Synthetic peptide
  Seed: GNEKKAKLANVVRKMMTNSQ
GNEKKAKFANEVFKMITNSQ

SEQ ID NO: 193357 - protein, 20 aa, Artificial Sequence
  Description of Artificial Sequence: Synthetic peptide
  Seed: GNEKKAKLANVVRKMMTNSQ
GNEKKAKFANEVFKMLTNSQ

SEQ ID NO: 193358 - protein, 20 aa, Artificial Sequence
  Description of Artificial Sequence: Synthetic peptide
  Seed: GNEKKAKLANVVRKMMTNSQ
GNEKKAKFANEVFKMVTNSQ

SEQ ID NO: 193359 - protein, 20 aa, Artificial Sequence
  Description of Artificial Sequence: Synthetic peptide
  Seed: GNEKKAKLANVVRKMMTNSQ
GNEKKAKFANFVFKMVTNSQ

SEQ ID NO: 193360 - protein, 20 aa, Artificial Sequence
  Description of Artificial Sequence: Synthetic peptide
  Seed: GNEKKAKLANVVRKMMTNSQ
GNEKKAKFANIVFKMITNSQ

SEQ ID NO: 193361 - protein, 20 aa, Artificial Sequence
  Description of Artificial Sequence: Synthetic peptide
  Seed: GNEKKAKLANVVRKMMTNSQ
GNEKKAKFANIVFKMLTNSQ

SEQ ID NO: 193362 - protein, 20 aa, Artificial Sequence
  Description of Artificial Sequence: Synthetic peptide
  Seed: GNEKKAKLANVVRKMMTNSQ
GNEKKAKFANIVFKMVTNSQ

SEQ ID NO: 193363 - protein, 20 aa, Artificial Sequence
  Description of Artificial Sequence: Synthetic peptide
  Seed: GNEKKAKLANVVRKMMTNSQ
GNEKKAKFANIVKKMATNSQ

SEQ ID NO: 193364 - protein, 20 aa, Artificial Sequence
  Description of Artificial Sequence: Synthetic peptide
  Seed: GNEKKAKLANVVRKMMTNSQ
GNEKKAKFANIVKKMGTNSQ

SEQ ID NO: 193365 - protein, 20 aa, Artificial Sequence
  Description of Artificial Sequence: Synthetic peptide
  Seed: GNEKKAKLANVVRKMMTNSQ
GNEKKAKFANIVKKMHTNSQ

SEQ ID NO: 193366 - protein, 20 aa, Artificial Sequence
  Description of Artificial Sequence: Synthetic peptide
  Seed: GNEKKAKLANVVRKMMTNSQ
GNEKKAKFANIVKKMMTNSQ

SEQ ID NO: 193367 - protein, 20 aa, Artificial Sequence
  Description of Artificial Sequence: Synthetic peptide
  Seed: GNEKKAKLANVVRKMMTNSQ
GNEKKAKFANIVKKMNTNSQ

SEQ ID NO: 193368 - protein, 20 aa, Artificial Sequence
  Description of Artificial Sequence: Synthetic peptide
  Seed: GNEKKAKLANVVRKMMTNSQ
GNEKKAKFANIVKKMPTNSQ

SEQ ID NO: 193369 - protein, 20 aa, Artificial Sequence
  Description of Artificial Sequence: Synthetic peptide
  Seed: GNEKKAKLANVVRKMMTNSQ
GNEKKAKFANIVKKMQTNSQ

SEQ ID NO: 193370 - protein, 20 aa, Artificial Sequence
  Description of Artificial Sequence: Synthetic peptide
  Seed: GNEKKAKLANVVRKMMTNSQ
GNEKKAKFANIVKKMSTNSQ

SEQ ID NO: 193371 - protein, 20 aa, Artificial Sequence
  Description of Artificial Sequence: Synthetic peptide
  Seed: GNEKKAKLANVVRKMMTNSQ
GNEKKAKFANIVKKMTTNSQ

SEQ ID NO: 193372 - protein, 20 aa, Artificial Sequence
  Description of Artificial Sequence: Synthetic peptide
  Seed: GNEKKAKLANVVRKMMTNSQ
GNEKKAKFANIVKKMVTNSQ

SEQ ID NO: 193373 - protein, 20 aa, Artificial Sequence
  Description of Artificial Sequence: Synthetic peptide
  Seed: GNEKKAKLANVVRKMMTNSQ
GNEKKAKFANIVRKMATNSQ

SEQ ID NO: 193374 - protein, 20 aa, Artificial Sequence
  Description of Artificial Sequence: Synthetic peptide
  Seed: GNEKKAKLANVVRKMMTNSQ
GNEKKAKFANIVRKMGTNSQ

SEQ ID NO: 193375 - protein, 20 aa, Artificial Sequence
  Description of Artificial Sequence: Synthetic peptide
  Seed: GNEKKAKLANVVRKMMTNSQ
GNEKKAKFANIVRKMHTNSQ

SEQ ID NO: 193376 - protein, 20 aa, Artificial Sequence
  Description of Artificial Sequence: Synthetic peptide
  Seed: GNEKKAKLANVVRKMMTNSQ
GNEKKAKFANIVRKMNTNSQ

SEQ ID NO: 193377 - protein, 20 aa, Artificial Sequence
  Description of Artificial Sequence: Synthetic peptide
  Seed: GNEKKAKLANVVRKMMTNSQ
GNEKKAKFANIVRKMPTNSQ

SEQ ID NO: 193378 - protein, 20 aa, Artificial Sequence
  Description of Artificial Sequence: Synthetic peptide
  Seed: GNEKKAKLANVVRKMMTNSQ
GNEKKAKFANIVRKMQTNSQ

SEQ ID NO: 193379 - protein, 20 aa, Artificial Sequence
  Description of Artificial Sequence: Synthetic peptide
  Seed: GNEKKAKLANVVRKMMTNSQ
GNEKKAKFANIVRKMSTNSQ

SEQ ID NO: 193380 - protein, 20 aa, Artificial Sequence
  Description of Artificial Sequence: Synthetic peptide
  Seed: GNEKKAKLANVVRKMMTNSQ
GNEKKAKFANIVRKMTTNSQ

SEQ ID NO: 193381 - protein, 20 aa, Artificial Sequence
  Description of Artificial Sequence: Synthetic peptide
  Seed: GNEKKAKLANVVRKMMTNSQ
GNEKKAKFANIVRKMVTNSQ

SEQ ID NO: 193382 - protein, 20 aa, Artificial Sequence
  Description of Artificial Sequence: Synthetic peptide
  Seed: GNEKKAKLANVVRKMMTNSQ
GNEKKAKFANLVFKMITNSQ

SEQ ID NO: 193383 - protein, 20 aa, Artificial Sequence
  Description of Artificial Sequence: Synthetic peptide
  Seed: GNEKKAKLANVVRKMMTNSQ
GNEKKAKFANLVFKMLTNSQ

SEQ ID NO: 193384 - protein, 20 aa, Artificial Sequence
  Description of Artificial Sequence: Synthetic peptide
  Seed: GNEKKAKLANVVRKMMTNSQ
GNEKKAKFANLVFKMVTNSQ

SEQ ID NO: 193385 - protein, 20 aa, Artificial Sequence
  Description of Artificial Sequence: Synthetic peptide
  Seed: GNEKKAKLANVVRKMMTNSQ
GNEKKAKFANLVKKMATNSQ

SEQ ID NO: 193386 - protein, 20 aa, Artificial Sequence
  Description of Artificial Sequence: Synthetic peptide
  Seed: GNEKKAKLANVVRKMMTNSQ
GNEKKAKFANLVKKMGTNSQ

SEQ ID NO: 193387 - protein, 20 aa, Artificial Sequence
  Description of Artificial Sequence: Synthetic peptide
  Seed: GNEKKAKLANVVRKMMTNSQ
GNEKKAKFANLVKKMHTNSQ

SEQ ID NO: 193388 - protein, 20 aa, Artificial Sequence
  Description of Artificial Sequence: Synthetic peptide
  Seed: GNEKKAKLANVVRKMMTNSQ
GNEKKAKFANLVKKMNTNSQ

SEQ ID NO: 193389 - protein, 20 aa, Artificial Sequence
  Description of Artificial Sequence: Synthetic peptide
  Seed: GNEKKAKLANVVRKMMTNSQ
GNEKKAKFANLVKKMPTNSQ

SEQ ID NO: 193390 - protein, 20 aa, Artificial Sequence
  Description of Artificial Sequence: Synthetic peptide
  Seed: GNEKKAKLANVVRKMMTNSQ
GNEKKAKFANLVKKMQTNSQ

SEQ ID NO: 193391 - protein, 20 aa, Artificial Sequence
  Description of Artificial Sequence: Synthetic peptide
  Seed: GNEKKAKLANVVRKMMTNSQ
GNEKKAKFANLVKKMSTNSQ

SEQ ID NO: 193392 - protein, 20 aa, Artificial Sequence
  Description of Artificial Sequence: Synthetic peptide
  Seed: GNEKKAKLANVVRKMMTNSQ
GNEKKAKFANLVKKMTTNSQ

SEQ ID NO: 193393 - protein, 20 aa, Artificial Sequence
  Description of Artificial Sequence: Synthetic peptide
  Seed: GNEKKAKLANVVRKMMTNSQ
GNEKKAKFANLVKKMVTNSQ

SEQ ID NO: 193394 - protein, 20 aa, Artificial Sequence
  Description of Artificial Sequence: Synthetic peptide
  Seed: GNEKKAKLANVVRKMMTNSQ
GNEKKAKFANLVRKMATNSQ

SEQ ID NO: 193395 - protein, 20 aa, Artificial Sequence
  Description of Artificial Sequence: Synthetic peptide
  Seed: GNEKKAKLANVVRKMMTNSQ
GNEKKAKFANLVRKMGTNSQ

SEQ ID NO: 193396 - protein, 20 aa, Artificial Sequence
  Description of Artificial Sequence: Synthetic peptide
  Seed: GNEKKAKLANVVRKMMTNSQ
GNEKKAKFANLVRKMHTNSQ

SEQ ID NO: 193397 - protein, 20 aa, Artificial Sequence
  Description of Artificial Sequence: Synthetic peptide
  Seed: GNEKKAKLANVVRKMMTNSQ
GNEKKAKFANLVRKMITNSQ

SEQ ID NO: 193398 - protein, 20 aa, Artificial Sequence
  Description of Artificial Sequence: Synthetic peptide
  Seed: GNEKKAKLANVVRKMMTNSQ
GNEKKAKFANLVRKMNTNSQ

SEQ ID NO: 193399 - protein, 20 aa, Artificial Sequence
  Description of Artificial Sequence: Synthetic peptide
  Seed: GNEKKAKLANVVRKMMTNSQ
GNEKKAKFANLVRKMPTNSQ

SEQ ID NO: 193400 - protein, 20 aa, Artificial Sequence
  Description of Artificial Sequence: Synthetic peptide
  Seed: GNEKKAKLANVVRKMMTNSQ
GNEKKAKFANLVRKMQTNSQ

SEQ ID NO: 193401 - protein, 20 aa, Artificial Sequence
  Description of Artificial Sequence: Synthetic peptide
  Seed: GNEKKAKLANVVRKMMTNSQ
GNEKKAKFANLVRKMSTNSQ

SEQ ID NO: 193402 - protein, 20 aa, Artificial Sequence
  Description of Artificial Sequence: Synthetic peptide
  Seed: GNEKKAKLANVVRKMMTNSQ
GNEKKAKFANLVRKMTTNSQ

SEQ ID NO: 193403 - protein, 20 aa, Artificial Sequence
  Description of Artificial Sequence: Synthetic peptide
  Seed: GNEKKAKLANVVRKMMTNSQ
GNEKKAKFANLVRKMVTNSQ

SEQ ID NO: 193404 - protein, 20 aa, Artificial Sequence
  Description of Artificial Sequence: Synthetic peptide
  Seed: GNEKKAKLANVVRKMMTNSQ
GNEKKAKFANMVFKMVTNSQ

SEQ ID NO: 193405 - protein, 20 aa, Artificial Sequence
  Description of Artificial Sequence: Synthetic peptide
  Seed: GNEKKAKLANVVRKMMTNSQ
GNEKKAKFANMVKKMATNSQ

SEQ ID NO: 193406 - protein, 20 aa, Artificial Sequence
  Description of Artificial Sequence: Synthetic peptide
  Seed: GNEKKAKLANVVRKMMTNSQ
GNEKKAKFANMVKKMGTNSQ

SEQ ID NO: 193407 - protein, 20 aa, Artificial Sequence
  Description of Artificial Sequence: Synthetic peptide
  Seed: GNEKKAKLANVVRKMMTNSQ
GNEKKAKFANMVKKMHTNSQ

SEQ ID NO: 193408 - protein, 20 aa, Artificial Sequence
  Description of Artificial Sequence: Synthetic peptide
  Seed: GNEKKAKLANVVRKMMTNSQ
GNEKKAKFANMVKKMITNSQ

SEQ ID NO: 193409 - protein, 20 aa, Artificial Sequence
  Description of Artificial Sequence: Synthetic peptide
  Seed: GNEKKAKLANVVRKMMTNSQ
GNEKKAKFANMVKKMLTNSQ

SEQ ID NO: 193410 - protein, 20 aa, Artificial Sequence
  Description of Artificial Sequence: Synthetic peptide
  Seed: GNEKKAKLANVVRKMMTNSQ
GNEKKAKFANMVKKMMTNSQ

SEQ ID NO: 193411 - protein, 20 aa, Artificial Sequence
  Description of Artificial Sequence: Synthetic peptide
  Seed: GNEKKAKLANVVRKMMTNSQ
GNEKKAKFANMVKKMNTNSQ

SEQ ID NO: 193412 - protein, 20 aa, Artificial Sequence
  Description of Artificial Sequence: Synthetic peptide
  Seed: GNEKKAKLANVVRKMMTNSQ
GNEKKAKFANMVKKMPTNSQ

SEQ ID NO: 193413 - protein, 20 aa, Artificial Sequence
  Description of Artificial Sequence: Synthetic peptide
  Seed: GNEKKAKLANVVRKMMTNSQ
GNEKKAKFANMVKKMQTNSQ

SEQ ID NO: 193414 - protein, 20 aa, Artificial Sequence
  Description of Artificial Sequence: Synthetic peptide
  Seed: GNEKKAKLANVVRKMMTNSQ
GNEKKAKFANMVKKMSTNSQ

SEQ ID NO: 193415 - protein, 20 aa, Artificial Sequence
  Description of Artificial Sequence: Synthetic peptide
  Seed: GNEKKAKLANVVRKMMTNSQ
GNEKKAKFANMVKKMTTNSQ

SEQ ID NO: 193416 - protein, 20 aa, Artificial Sequence
  Description of Artificial Sequence: Synthetic peptide
  Seed: GNEKKAKLANVVRKMMTNSQ
GNEKKAKFANMVKKMVTNSQ

SEQ ID NO: 193417 - protein, 20 aa, Artificial Sequence
  Description of Artificial Sequence: Synthetic peptide
  Seed: GNEKKAKLANVVRKMMTNSQ
GNEKKAKFANMVRKMATNSQ

SEQ ID NO: 193418 - protein, 20 aa, Artificial Sequence
  Description of Artificial Sequence: Synthetic peptide
  Seed: GNEKKAKLANVVRKMMTNSQ
GNEKKAKFANMVRKMGTNSQ

SEQ ID NO: 193419 - protein, 20 aa, Artificial Sequence
  Description of Artificial Sequence: Synthetic peptide
  Seed: GNEKKAKLANVVRKMMTNSQ
GNEKKAKFANMVRKMHTNSQ

SEQ ID NO: 193420 - protein, 20 aa, Artificial Sequence
  Description of Artificial Sequence: Synthetic peptide
  Seed: GNEKKAKLANVVRKMMTNSQ
GNEKKAKFANMVRKMITNSQ

SEQ ID NO: 193421 - protein, 20 aa, Artificial Sequence
  Description of Artificial Sequence: Synthetic peptide
  Seed: GNEKKAKLANVVRKMMTNSQ
GNEKKAKFANMVRKMLTNSQ

SEQ ID NO: 193422 - protein, 20 aa, Artificial Sequence
  Description of Artificial Sequence: Synthetic peptide
  Seed: GNEKKAKLANVVRKMMTNSQ
GNEKKAKFANMVRKMNTNSQ

SEQ ID NO: 193423 - protein, 20 aa, Artificial Sequence
  Description of Artificial Sequence: Synthetic peptide
  Seed: GNEKKAKLANVVRKMMTNSQ
GNEKKAKFANMVRKMPTNSQ

SEQ ID NO: 193424 - protein, 20 aa, Artificial Sequence
  Description of Artificial Sequence: Synthetic peptide
  Seed: GNEKKAKLANVVRKMMTNSQ
GNEKKAKFANMVRKMQTNSQ

SEQ ID NO: 193425 - protein, 20 aa, Artificial Sequence
  Description of Artificial Sequence: Synthetic peptide
  Seed: GNEKKAKLANVVRKMMTNSQ
GNEKKAKFANMVRKMRTNSQ

SEQ ID NO: 193426 - protein, 20 aa, Artificial Sequence
  Description of Artificial Sequence: Synthetic peptide
  Seed: GNEKKAKLANVVRKMMTNSQ
GNEKKAKFANMVRKMSTNSQ

SEQ ID NO: 193427 - protein, 20 aa, Artificial Sequence
  Description of Artificial Sequence: Synthetic peptide
  Seed: GNEKKAKLANVVRKMMTNSQ
GNEKKAKFANMVRKMTTNSQ

SEQ ID NO: 193428 - protein, 20 aa, Artificial Sequence
  Description of Artificial Sequence: Synthetic peptide
  Seed: GNEKKAKLANVVRKMMTNSQ
GNEKKAKFANMVRKMVTNSQ

SEQ ID NO: 193429 - protein, 20 aa, Artificial Sequence
  Description of Artificial Sequence: Synthetic peptide
  Seed: GNEKKAKLANVVRKMMTNSQ
GNEKKAKFANNVAKMFTNSQ

SEQ ID NO: 193430 - protein, 20 aa, Artificial Sequence
  Description of Artificial Sequence: Synthetic peptide
  Seed: GNEKKAKLANVVRKMMTNSQ
GNEKKAKFANNVAKMITNSQ

SEQ ID NO: 193431 - protein, 20 aa, Artificial Sequence
  Description of Artificial Sequence: Synthetic peptide
  Seed: GNEKKAKLANVVRKMMTNSQ
GNEKKAKFANNVAKMLTNSQ

SEQ ID NO: 193432 - protein, 20 aa, Artificial Sequence
  Description of Artificial Sequence: Synthetic peptide
  Seed: GNEKKAKLANVVRKMMTNSQ
GNEKKAKFANNVAKMVTNSQ

SEQ ID NO: 193433 - protein, 20 aa, Artificial Sequence
  Description of Artificial Sequence: Synthetic peptide
  Seed: GNEKKAKLANVVRKMMTNSQ
GNEKKAKFANNVAKMYTNSQ

SEQ ID NO: 193434 - protein, 20 aa, Artificial Sequence
  Description of Artificial Sequence: Synthetic peptide
  Seed: GNEKKAKLANVVRKMMTNSQ
GNEKKAKFANNVGKMITNSQ

SEQ ID NO: 193435 - protein, 20 aa, Artificial Sequence
  Description of Artificial Sequence: Synthetic peptide
  Seed: GNEKKAKLANVVRKMMTNSQ
GNEKKAKFANNVGKMVTNSQ

SEQ ID NO: 193436 - protein, 20 aa, Artificial Sequence
  Description of Artificial Sequence: Synthetic peptide
  Seed: GNEKKAKLANVVRKMMTNSQ
GNEKKAKFANNVIKMFTNSQ

SEQ ID NO: 193437 - protein, 20 aa, Artificial Sequence
  Description of Artificial Sequence: Synthetic peptide
  Seed: GNEKKAKLANVVRKMMTNSQ
GNEKKAKFANNVIKMITNSQ

SEQ ID NO: 193438 - protein, 20 aa, Artificial Sequence
  Description of Artificial Sequence: Synthetic peptide
  Seed: GNEKKAKLANVVRKMMTNSQ
GNEKKAKFANNVIKMVTNSQ

SEQ ID NO: 193439 - protein, 20 aa, Artificial Sequence
  Description of Artificial Sequence: Synthetic peptide
  Seed: GNEKKAKLANVVRKMMTNSQ
GNEKKAKFANNVNKMFTNSQ

SEQ ID NO: 193440 - protein, 20 aa, Artificial Sequence
  Description of Artificial Sequence: Synthetic peptide
  Seed: GNEKKAKLANVVRKMMTNSQ
GNEKKAKFANNVNKMITNSQ

SEQ ID NO: 193441 - protein, 20 aa, Artificial Sequence
  Description of Artificial Sequence: Synthetic peptide
  Seed: GNEKKAKLANVVRKMMTNSQ
GNEKKAKFANNVNKMLTNSQ

SEQ ID NO: 193442 - protein, 20 aa, Artificial Sequence
  Description of Artificial Sequence: Synthetic peptide
  Seed: GNEKKAKLANVVRKMMTNSQ
GNEKKAKFANNVNKMVTNSQ

SEQ ID NO: 193443 - protein, 20 aa, Artificial Sequence
  Description of Artificial Sequence: Synthetic peptide
  Seed: GNEKKAKLANVVRKMMTNSQ
GNEKKAKFANNVNKMYTNSQ

SEQ ID NO: 193444 - protein, 20 aa, Artificial Sequence
  Description of Artificial Sequence: Synthetic peptide
  Seed: GNEKKAKLANVVRKMMTNSQ
GNEKKAKFANNVPKMITNSQ

SEQ ID NO: 193445 - protein, 20 aa, Artificial Sequence
  Description of Artificial Sequence: Synthetic peptide
  Seed: GNEKKAKLANVVRKMMTNSQ
GNEKKAKFANNVPKMVTNSQ

SEQ ID NO: 193446 - protein, 20 aa, Artificial Sequence
  Description of Artificial Sequence: Synthetic peptide
  Seed: GNEKKAKLANVVRKMMTNSQ
GNEKKAKFANNVSKMFTNSQ

SEQ ID NO: 193447 - protein, 20 aa, Artificial Sequence
  Description of Artificial Sequence: Synthetic peptide
  Seed: GNEKKAKLANVVRKMMTNSQ
GNEKKAKFANNVSKMITNSQ

SEQ ID NO: 193448 - protein, 20 aa, Artificial Sequence
  Description of Artificial Sequence: Synthetic peptide
  Seed: GNEKKAKLANVVRKMMTNSQ
GNEKKAKFANNVSKMLTNSQ

SEQ ID NO: 193449 - protein, 20 aa, Artificial Sequence
  Description of Artificial Sequence: Synthetic peptide
  Seed: GNEKKAKLANVVRKMMTNSQ
GNEKKAKFANNVSKMVTNSQ

SEQ ID NO: 193450 - protein, 20 aa, Artificial Sequence
  Description of Artificial Sequence: Synthetic peptide
  Seed: GNEKKAKLANVVRKMMTNSQ
GNEKKAKFANNVTKMFTNSQ

SEQ ID NO: 193451 - protein, 20 aa, Artificial Sequence
  Description of Artificial Sequence: Synthetic peptide
  Seed: GNEKKAKLANVVRKMMTNSQ
GNEKKAKFANNVTKMITNSQ

SEQ ID NO: 193452 - protein, 20 aa, Artificial Sequence
  Description of Artificial Sequence: Synthetic peptide
  Seed: GNEKKAKLANVVRKMMTNSQ
GNEKKAKFANNVTKMVTNSQ

SEQ ID NO: 193453 - protein, 20 aa, Artificial Sequence
  Description of Artificial Sequence: Synthetic peptide
  Seed: GNEKKAKLANVVRKMMTNSQ
GNEKKAKFANNVVKMFTNSQ

SEQ ID NO: 193454 - protein, 20 aa, Artificial Sequence
  Description of Artificial Sequence: Synthetic peptide
  Seed: GNEKKAKLANVVRKMMTNSQ
GNEKKAKFANNVVKMITNSQ

SEQ ID NO: 193455 - protein, 20 aa, Artificial Sequence
  Description of Artificial Sequence: Synthetic peptide
  Seed: GNEKKAKLANVVRKMMTNSQ
GNEKKAKFANNVVKMLTNSQ

SEQ ID NO: 193456 - protein, 20 aa, Artificial Sequence
  Description of Artificial Sequence: Synthetic peptide
  Seed: GNEKKAKLANVVRKMMTNSQ
GNEKKAKFANNVVKMVTNSQ

SEQ ID NO: 193457 - protein, 20 aa, Artificial Sequence
  Description of Artificial Sequence: Synthetic peptide
  Seed: GNEKKAKLANVVRKMMTNSQ
GNEKKAKFANNVVKMYTNSQ

SEQ ID NO: 193458 - protein, 20 aa, Artificial Sequence
  Description of Artificial Sequence: Synthetic peptide
  Seed: GNEKKAKLANVVRKMMTNSQ
GNEKKAKFANSVFKMFTNSQ

SEQ ID NO: 193459 - protein, 20 aa, Artificial Sequence
  Description of Artificial Sequence: Synthetic peptide
  Seed: GNEKKAKLANVVRKMMTNSQ
GNEKKAKFANSVFKMITNSQ

SEQ ID NO: 193460 - protein, 20 aa, Artificial Sequence
  Description of Artificial Sequence: Synthetic peptide
  Seed: GNEKKAKLANVVRKMMTNSQ
GNEKKAKFANSVFKMLTNSQ

SEQ ID NO: 193461 - protein, 20 aa, Artificial Sequence
  Description of Artificial Sequence: Synthetic peptide
  Seed: GNEKKAKLANVVRKMMTNSQ
GNEKKAKFANSVFKMVTNSQ

SEQ ID NO: 193462 - protein, 20 aa, Artificial Sequence
  Description of Artificial Sequence: Synthetic peptide
  Seed: GNEKKAKLANVVRKMMTNSQ
GNEKKAKFANTVFKMFTNSQ

SEQ ID NO: 193463 - protein, 20 aa, Artificial Sequence
  Description of Artificial Sequence: Synthetic peptide
  Seed: GNEKKAKLANVVRKMMTNSQ
GNEKKAKFANTVFKMITNSQ

SEQ ID NO: 193464 - protein, 20 aa, Artificial Sequence
  Description of Artificial Sequence: Synthetic peptide
  Seed: GNEKKAKLANVVRKMMTNSQ
GNEKKAKFANTVFKMLTNSQ

SEQ ID NO: 193465 - protein, 20 aa, Artificial Sequence
  Description of Artificial Sequence: Synthetic peptide
  Seed: GNEKKAKLANVVRKMMTNSQ
GNEKKAKFANTVFKMMTNSQ

SEQ ID NO: 193466 - protein, 20 aa, Artificial Sequence
  Description of Artificial Sequence: Synthetic peptide
  Seed: GNEKKAKLANVVRKMMTNSQ
GNEKKAKFANTVFKMVTNSQ

SEQ ID NO: 193467 - protein, 20 aa, Artificial Sequence
  Description of Artificial Sequence: Synthetic peptide
  Seed: GNEKKAKLANVVRKMMTNSQ
GNEKKAKFANTVRKMATNSQ

SEQ ID NO: 193468 - protein, 20 aa, Artificial Sequence
  Description of Artificial Sequence: Synthetic peptide
  Seed: GNEKKAKLANVVRKMMTNSQ
GNEKKAKFANVVFKMFTNSQ

SEQ ID NO: 193469 - protein, 20 aa, Artificial Sequence
  Description of Artificial Sequence: Synthetic peptide
  Seed: GNEKKAKLANVVRKMMTNSQ
GNEKKAKFANVVFKMITNSQ

SEQ ID NO: 193470 - protein, 20 aa, Artificial Sequence
  Description of Artificial Sequence: Synthetic peptide
  Seed: GNEKKAKLANVVRKMMTNSQ
GNEKKAKFANVVFKMLTNSQ

SEQ ID NO: 193471 - protein, 20 aa, Artificial Sequence
  Description of Artificial Sequence: Synthetic peptide
  Seed: GNEKKAKLANVVRKMMTNSQ
GNEKKAKFANVVFKMVTNSQ

SEQ ID NO: 193472 - protein, 20 aa, Artificial Sequence
  Description of Artificial Sequence: Synthetic peptide
  Seed: GNEKKAKLANVVRKMMTNSQ
GNEKKAKFANVVKKMATNSQ

SEQ ID NO: 193473 - protein, 20 aa, Artificial Sequence
  Description of Artificial Sequence: Synthetic peptide
  Seed: GNEKKAKLANVVRKMMTNSQ
GNEKKAKFANVVKKMGTNSQ

SEQ ID NO: 193474 - protein, 20 aa, Artificial Sequence
  Description of Artificial Sequence: Synthetic peptide
  Seed: GNEKKAKLANVVRKMMTNSQ
GNEKKAKFANVVKKMQTNSQ

SEQ ID NO: 193475 - protein, 20 aa, Artificial Sequence
  Description of Artificial Sequence: Synthetic peptide
  Seed: GNEKKAKLANVVRKMMTNSQ
GNEKKAKFANVVKKMSTNSQ

SEQ ID NO: 193476 - protein, 20 aa, Artificial Sequence
  Description of Artificial Sequence: Synthetic peptide
  Seed: GNEKKAKLANVVRKMMTNSQ
GNEKKAKFANVVKKMTTNSQ

SEQ ID NO: 193477 - protein, 20 aa, Artificial Sequence
  Description of Artificial Sequence: Synthetic peptide
  Seed: GNEKKAKLANVVRKMMTNSQ
GNEKKAKFANVVRKMATNSQ

SEQ ID NO: 193478 - protein, 20 aa, Artificial Sequence
  Description of Artificial Sequence: Synthetic peptide
  Seed: GNEKKAKLANVVRKMMTNSQ
GNEKKAKFANVVRKMGTNSQ

SEQ ID NO: 193479 - protein, 20 aa, Artificial Sequence
  Description of Artificial Sequence: Synthetic peptide
  Seed: GNEKKAKLANVVRKMMTNSQ
GNEKKAKFANVVRKMHTNSQ

SEQ ID NO: 193480 - protein, 20 aa, Artificial Sequence
  Description of Artificial Sequence: Synthetic peptide
  Seed: GNEKKAKLANVVRKMMTNSQ
GNEKKAKFANVVRKMQTNSQ

SEQ ID NO: 193481 - protein, 20 aa, Artificial Sequence
  Description of Artificial Sequence: Synthetic peptide
  Seed: GNEKKAKLANVVRKMMTNSQ
GNEKKAKFANVVRKMSTNSQ

SEQ ID NO: 193482 - protein, 20 aa, Artificial Sequence
  Description of Artificial Sequence: Synthetic peptide
  Seed: GNEKKAKLANVVRKMMTNSQ
GNEKKAKFANVVRKMTTNSQ

SEQ ID NO: 193483 - protein, 20 aa, Artificial Sequence
  Description of Artificial Sequence: Synthetic peptide
  Seed: GNEKKAKLANVVRKMMTNSQ
GNEKKAKIANAVKKMATNSQ

SEQ ID NO: 193484 - protein, 20 aa, Artificial Sequence
  Description of Artificial Sequence: Synthetic peptide
  Seed: GNEKKAKLANVVRKMMTNSQ
GNEKKAKIANAVKKMSTNSQ

SEQ ID NO: 193485 - protein, 20 aa, Artificial Sequence
  Description of Artificial Sequence: Synthetic peptide
  Seed: GNEKKAKLANVVRKMMTNSQ
GNEKKAKIANAVRKMATNSQ

SEQ ID NO: 193486 - protein, 20 aa, Artificial Sequence
  Description of Artificial Sequence: Synthetic peptide
  Seed: GNEKKAKLANVVRKMMTNSQ
GNEKKAKIANAVRKMGTNSQ

SEQ ID NO: 193487 - protein, 20 aa, Artificial Sequence
  Description of Artificial Sequence: Synthetic peptide
  Seed: GNEKKAKLANVVRKMMTNSQ
GNEKKAKIANAVRKMQTNSQ

SEQ ID NO: 193488 - protein, 20 aa, Artificial Sequence
  Description of Artificial Sequence: Synthetic peptide
  Seed: GNEKKAKLANVVRKMMTNSQ
GNEKKAKIANAVRKMSTNSQ

SEQ ID NO: 193489 - protein, 20 aa, Artificial Sequence
  Description of Artificial Sequence: Synthetic peptide
  Seed: GNEKKAKLANVVRKMMTNSQ
GNEKKAKIANFVAKMITNSQ

SEQ ID NO: 193490 - protein, 20 aa, Artificial Sequence
  Description of Artificial Sequence: Synthetic peptide
  Seed: GNEKKAKLANVVRKMMTNSQ
GNEKKAKIANFVAKMLTNSQ

SEQ ID NO: 193491 - protein, 20 aa, Artificial Sequence
  Description of Artificial Sequence: Synthetic peptide
  Seed: GNEKKAKLANVVRKMMTNSQ
GNEKKAKIANFVAKMVTNSQ

SEQ ID NO: 193492 - protein, 20 aa, Artificial Sequence
  Description of Artificial Sequence: Synthetic peptide
  Seed: GNEKKAKLANVVRKMMTNSQ
GNEKKAKIANFVGKMATNSQ

SEQ ID NO: 193493 - protein, 20 aa, Artificial Sequence
  Description of Artificial Sequence: Synthetic peptide
  Seed: GNEKKAKLANVVRKMMTNSQ
GNEKKAKIANFVGKMITNSQ

SEQ ID NO: 193494 - protein, 20 aa, Artificial Sequence
  Description of Artificial Sequence: Synthetic peptide
  Seed: GNEKKAKLANVVRKMMTNSQ
GNEKKAKIANFVGKMLTNSQ

SEQ ID NO: 193495 - protein, 20 aa, Artificial Sequence
  Description of Artificial Sequence: Synthetic peptide
  Seed: GNEKKAKLANVVRKMMTNSQ
GNEKKAKIANFVGKMVTNSQ

SEQ ID NO: 193496 - protein, 20 aa, Artificial Sequence
  Description of Artificial Sequence: Synthetic peptide
  Seed: GNEKKAKLANVVRKMMTNSQ
GNEKKAKIANFVNKMATNSQ

SEQ ID NO: 193497 - protein, 20 aa, Artificial Sequence
  Description of Artificial Sequence: Synthetic peptide
  Seed: GNEKKAKLANVVRKMMTNSQ
GNEKKAKIANFVNKMITNSQ

SEQ ID NO: 193498 - protein, 20 aa, Artificial Sequence
  Description of Artificial Sequence: Synthetic peptide
  Seed: GNEKKAKLANVVRKMMTNSQ
GNEKKAKIANFVNKMLTNSQ

SEQ ID NO: 193499 - protein, 20 aa, Artificial Sequence
  Description of Artificial Sequence: Synthetic peptide
  Seed: GNEKKAKLANVVRKMMTNSQ
GNEKKAKIANFVNKMMTNSQ

SEQ ID NO: 193500 - protein, 20 aa, Artificial Sequence
  Description of Artificial Sequence: Synthetic peptide
  Seed: GNEKKAKLANVVRKMMTNSQ
GNEKKAKIANFVNKMVTNSQ

SEQ ID NO: 193501 - protein, 20 aa, Artificial Sequence
  Description of Artificial Sequence: Synthetic peptide
  Seed: GNEKKAKLANVVRKMMTNSQ
GNEKKAKIANFVRKMATNSQ

SEQ ID NO: 193502 - protein, 20 aa, Artificial Sequence
  Description of Artificial Sequence: Synthetic peptide
  Seed: GNEKKAKLANVVRKMMTNSQ
GNEKKAKIANFVRKMSTNSQ

SEQ ID NO: 193503 - protein, 20 aa, Artificial Sequence
  Description of Artificial Sequence: Synthetic peptide
  Seed: GNEKKAKLANVVRKMMTNSQ
GNEKKAKIANFVSKMATNSQ

SEQ ID NO: 193504 - protein, 20 aa, Artificial Sequence
  Description of Artificial Sequence: Synthetic peptide
  Seed: GNEKKAKLANVVRKMMTNSQ
GNEKKAKIANFVSKMITNSQ

SEQ ID NO: 193505 - protein, 20 aa, Artificial Sequence
  Description of Artificial Sequence: Synthetic peptide
  Seed: GNEKKAKLANVVRKMMTNSQ
GNEKKAKIANFVSKMLTNSQ

SEQ ID NO: 193506 - protein, 20 aa, Artificial Sequence
  Description of Artificial Sequence: Synthetic peptide
  Seed: GNEKKAKLANVVRKMMTNSQ
GNEKKAKIANFVSKMMTNSQ

SEQ ID NO: 193507 - protein, 20 aa, Artificial Sequence
  Description of Artificial Sequence: Synthetic peptide
  Seed: GNEKKAKLANVVRKMMTNSQ
GNEKKAKIANFVSKMTTNSQ

SEQ ID NO: 193508 - protein, 20 aa, Artificial Sequence
  Description of Artificial Sequence: Synthetic peptide
  Seed: GNEKKAKLANVVRKMMTNSQ
GNEKKAKIANFVSKMVTNSQ

SEQ ID NO: 193509 - protein, 20 aa, Artificial Sequence
  Description of Artificial Sequence: Synthetic peptide
  Seed: GNEKKAKLANVVRKMMTNSQ
GNEKKAKIANFVTKMITNSQ

SEQ ID NO: 193510 - protein, 20 aa, Artificial Sequence
  Description of Artificial Sequence: Synthetic peptide
  Seed: GNEKKAKLANVVRKMMTNSQ
GNEKKAKIANFVTKMLTNSQ

SEQ ID NO: 193511 - protein, 20 aa, Artificial Sequence
  Description of Artificial Sequence: Synthetic peptide
  Seed: GNEKKAKLANVVRKMMTNSQ
GNEKKAKIANFVTKMVTNSQ

SEQ ID NO: 193512 - protein, 20 aa, Artificial Sequence
  Description of Artificial Sequence: Synthetic peptide
  Seed: GNEKKAKLANVVRKMMTNSQ
GNEKKAKIANIVKKMATNSQ

SEQ ID NO: 193513 - protein, 20 aa, Artificial Sequence
  Description of Artificial Sequence: Synthetic peptide
  Seed: GNEKKAKLANVVRKMMTNSQ
GNEKKAKIANIVKKMGTNSQ

SEQ ID NO: 193514 - protein, 20 aa, Artificial Sequence
  Description of Artificial Sequence: Synthetic peptide
  Seed: GNEKKAKLANVVRKMMTNSQ
GNEKKAKIANIVKKMHTNSQ

SEQ ID NO: 193515 - protein, 20 aa, Artificial Sequence
  Description of Artificial Sequence: Synthetic peptide
  Seed: GNEKKAKLANVVRKMMTNSQ
GNEKKAKIANIVKKMQTNSQ

SEQ ID NO: 193516 - protein, 20 aa, Artificial Sequence
  Description of Artificial Sequence: Synthetic peptide
  Seed: GNEKKAKLANVVRKMMTNSQ
GNEKKAKIANIVKKMSTNSQ

SEQ ID NO: 193517 - protein, 20 aa, Artificial Sequence
  Description of Artificial Sequence: Synthetic peptide
  Seed: GNEKKAKLANVVRKMMTNSQ
GNEKKAKIANIVKKMTTNSQ

SEQ ID NO: 193518 - protein, 20 aa, Artificial Sequence
  Description of Artificial Sequence: Synthetic peptide
  Seed: GNEKKAKLANVVRKMMTNSQ
GNEKKAKIANIVKKMVTNSQ

SEQ ID NO: 193519 - protein, 20 aa, Artificial Sequence
  Description of Artificial Sequence: Synthetic peptide
  Seed: GNEKKAKLANVVRKMMTNSQ
GNEKKAKIANIVRKMGTNSQ

SEQ ID NO: 193520 - protein, 20 aa, Artificial Sequence
  Description of Artificial Sequence: Synthetic peptide
  Seed: GNEKKAKLANVVRKMMTNSQ
GNEKKAKIANIVRKMHTNSQ

SEQ ID NO: 193521 - protein, 20 aa, Artificial Sequence
  Description of Artificial Sequence: Synthetic peptide
  Seed: GNEKKAKLANVVRKMMTNSQ
GNEKKAKIANIVRKMNTNSQ

SEQ ID NO: 193522 - protein, 20 aa, Artificial Sequence
  Description of Artificial Sequence: Synthetic peptide
  Seed: GNEKKAKLANVVRKMMTNSQ
GNEKKAKIANIVRKMQTNSQ

SEQ ID NO: 193523 - protein, 20 aa, Artificial Sequence
  Description of Artificial Sequence: Synthetic peptide
  Seed: GNEKKAKLANVVRKMMTNSQ
GNEKKAKIANIVRKMSTNSQ

SEQ ID NO: 193524 - protein, 20 aa, Artificial Sequence
  Description of Artificial Sequence: Synthetic peptide
  Seed: GNEKKAKLANVVRKMMTNSQ
GNEKKAKIANIVRKMTTNSQ

SEQ ID NO: 193525 - protein, 20 aa, Artificial Sequence
  Description of Artificial Sequence: Synthetic peptide
  Seed: GNEKKAKLANVVRKMMTNSQ
GNEKKAKIANIVSKMVTNSQ

SEQ ID NO: 193526 - protein, 20 aa, Artificial Sequence
  Description of Artificial Sequence: Synthetic peptide
  Seed: GNEKKAKLANVVRKMMTNSQ
GNEKKAKIANLVKKMATNSQ

SEQ ID NO: 193527 - protein, 20 aa, Artificial Sequence
  Description of Artificial Sequence: Synthetic peptide
  Seed: GNEKKAKLANVVRKMMTNSQ
GNEKKAKIANLVKKMGTNSQ

SEQ ID NO: 193528 - protein, 20 aa, Artificial Sequence
  Description of Artificial Sequence: Synthetic peptide
  Seed: GNEKKAKLANVVRKMMTNSQ
GNEKKAKIANLVKKMHTNSQ

SEQ ID NO: 193529 - protein, 20 aa, Artificial Sequence
  Description of Artificial Sequence: Synthetic peptide
  Seed: GNEKKAKLANVVRKMMTNSQ
GNEKKAKIANLVKKMQTNSQ

SEQ ID NO: 193530 - protein, 20 aa, Artificial Sequence
  Description of Artificial Sequence: Synthetic peptide
  Seed: GNEKKAKLANVVRKMMTNSQ
GNEKKAKIANLVKKMSTNSQ

SEQ ID NO: 193531 - protein, 20 aa, Artificial Sequence
  Description of Artificial Sequence: Synthetic peptide
  Seed: GNEKKAKLANVVRKMMTNSQ
GNEKKAKIANLVKKMTTNSQ

SEQ ID NO: 193532 - protein, 20 aa, Artificial Sequence
  Description of Artificial Sequence: Synthetic peptide
  Seed: GNEKKAKLANVVRKMMTNSQ
GNEKKAKIANLVKKMVTNSQ

SEQ ID NO: 193533 - protein, 20 aa, Artificial Sequence
  Description of Artificial Sequence: Synthetic peptide
  Seed: GNEKKAKLANVVRKMMTNSQ
GNEKKAKIANLVRKMATNSQ

SEQ ID NO: 193534 - protein, 20 aa, Artificial Sequence
  Description of Artificial Sequence: Synthetic peptide
  Seed: GNEKKAKLANVVRKMMTNSQ
GNEKKAKIANLVRKMGTNSQ

SEQ ID NO: 193535 - protein, 20 aa, Artificial Sequence
  Description of Artificial Sequence: Synthetic peptide
  Seed: GNEKKAKLANVVRKMMTNSQ
GNEKKAKIANLVRKMHTNSQ

SEQ ID NO: 193536 - protein, 20 aa, Artificial Sequence
  Description of Artificial Sequence: Synthetic peptide
  Seed: GNEKKAKLANVVRKMMTNSQ
GNEKKAKIANLVRKMITNSQ

SEQ ID NO: 193537 - protein, 20 aa, Artificial Sequence
  Description of Artificial Sequence: Synthetic peptide
  Seed: GNEKKAKLANVVRKMMTNSQ
GNEKKAKIANLVRKMNTNSQ

SEQ ID NO: 193538 - protein, 20 aa, Artificial Sequence
  Description of Artificial Sequence: Synthetic peptide
  Seed: GNEKKAKLANVVRKMMTNSQ
GNEKKAKIANLVRKMPTNSQ

SEQ ID NO: 193539 - protein, 20 aa, Artificial Sequence
  Description of Artificial Sequence: Synthetic peptide
  Seed: GNEKKAKLANVVRKMMTNSQ
GNEKKAKIANLVRKMQTNSQ

SEQ ID NO: 193540 - protein, 20 aa, Artificial Sequence
  Description of Artificial Sequence: Synthetic peptide
  Seed: GNEKKAKLANVVRKMMTNSQ
GNEKKAKIANLVRKMRTNSQ

SEQ ID NO: 193541 - protein, 20 aa, Artificial Sequence
  Description of Artificial Sequence: Synthetic peptide
  Seed: GNEKKAKLANVVRKMMTNSQ
GNEKKAKIANLVRKMSTNSQ

SEQ ID NO: 193542 - protein, 20 aa, Artificial Sequence
  Description of Artificial Sequence: Synthetic peptide
  Seed: GNEKKAKLANVVRKMMTNSQ
GNEKKAKIANLVRKMTTNSQ

SEQ ID NO: 193543 - protein, 20 aa, Artificial Sequence
  Description of Artificial Sequence: Synthetic peptide
  Seed: GNEKKAKLANVVRKMMTNSQ
GNEKKAKIANLVRKMVTNSQ

SEQ ID NO: 193544 - protein, 20 aa, Artificial Sequence
  Description of Artificial Sequence: Synthetic peptide
  Seed: GNEKKAKLANVVRKMMTNSQ
GNEKKAKIANMVKKMATNSQ

SEQ ID NO: 193545 - protein, 20 aa, Artificial Sequence
  Description of Artificial Sequence: Synthetic peptide
  Seed: GNEKKAKLANVVRKMMTNSQ
GNEKKAKIANMVKKMGTNSQ

SEQ ID NO: 193546 - protein, 20 aa, Artificial Sequence
  Description of Artificial Sequence: Synthetic peptide
  Seed: GNEKKAKLANVVRKMMTNSQ
GNEKKAKIANMVKKMHTNSQ

SEQ ID NO: 193547 - protein, 20 aa, Artificial Sequence
  Description of Artificial Sequence: Synthetic peptide
  Seed: GNEKKAKLANVVRKMMTNSQ
GNEKKAKIANMVKKMITNSQ

SEQ ID NO: 193548 - protein, 20 aa, Artificial Sequence
  Description of Artificial Sequence: Synthetic peptide
  Seed: GNEKKAKLANVVRKMMTNSQ
GNEKKAKIANMVKKMKTNSQ

SEQ ID NO: 193549 - protein, 20 aa, Artificial Sequence
  Description of Artificial Sequence: Synthetic peptide
  Seed: GNEKKAKLANVVRKMMTNSQ
GNEKKAKIANMVKKMLTNSQ

SEQ ID NO: 193550 - protein, 20 aa, Artificial Sequence
  Description of Artificial Sequence: Synthetic peptide
  Seed: GNEKKAKLANVVRKMMTNSQ
GNEKKAKIANMVKKMMTNSQ

SEQ ID NO: 193551 - protein, 20 aa, Artificial Sequence
  Description of Artificial Sequence: Synthetic peptide
  Seed: GNEKKAKLANVVRKMMTNSQ
GNEKKAKIANMVKKMNTNSQ

SEQ ID NO: 193552 - protein, 20 aa, Artificial Sequence
  Description of Artificial Sequence: Synthetic peptide
  Seed: GNEKKAKLANVVRKMMTNSQ
GNEKKAKIANMVKKMQTNSQ

SEQ ID NO: 193553 - protein, 20 aa, Artificial Sequence
  Description of Artificial Sequence: Synthetic peptide
  Seed: GNEKKAKLANVVRKMMTNSQ
GNEKKAKIANMVKKMRTNSQ

SEQ ID NO: 193554 - protein, 20 aa, Artificial Sequence
  Description of Artificial Sequence: Synthetic peptide
  Seed: GNEKKAKLANVVRKMMTNSQ
GNEKKAKIANMVKKMSTNSQ

SEQ ID NO: 193555 - protein, 20 aa, Artificial Sequence
  Description of Artificial Sequence: Synthetic peptide
  Seed: GNEKKAKLANVVRKMMTNSQ
GNEKKAKIANMVKKMTTNSQ

SEQ ID NO: 193556 - protein, 20 aa, Artificial Sequence
  Description of Artificial Sequence: Synthetic peptide
  Seed: GNEKKAKLANVVRKMMTNSQ
GNEKKAKIANMVKKMVTNSQ

SEQ ID NO: 193557 - protein, 20 aa, Artificial Sequence
  Description of Artificial Sequence: Synthetic peptide
  Seed: GNEKKAKLANVVRKMMTNSQ
GNEKKAKIANMVRKMATNSQ

SEQ ID NO: 193558 - protein, 20 aa, Artificial Sequence
  Description of Artificial Sequence: Synthetic peptide
  Seed: GNEKKAKLANVVRKMMTNSQ
GNEKKAKIANMVRKMGTNSQ

SEQ ID NO: 193559 - protein, 20 aa, Artificial Sequence
  Description of Artificial Sequence: Synthetic peptide
  Seed: GNEKKAKLANVVRKMMTNSQ
GNEKKAKIANMVRKMHTNSQ

SEQ ID NO: 193560 - protein, 20 aa, Artificial Sequence
  Description of Artificial Sequence: Synthetic peptide
  Seed: GNEKKAKLANVVRKMMTNSQ
GNEKKAKIANMVRKMITNSQ

SEQ ID NO: 193561 - protein, 20 aa, Artificial Sequence
  Description of Artificial Sequence: Synthetic peptide
  Seed: GNEKKAKLANVVRKMMTNSQ
GNEKKAKIANMVRKMKTNSQ

SEQ ID NO: 193562 - protein, 20 aa, Artificial Sequence
  Description of Artificial Sequence: Synthetic peptide
  Seed: GNEKKAKLANVVRKMMTNSQ
GNEKKAKIANMVRKMLTNSQ

SEQ ID NO: 193563 - protein, 20 aa, Artificial Sequence
  Description of Artificial Sequence: Synthetic peptide
  Seed: GNEKKAKLANVVRKMMTNSQ
GNEKKAKIANMVRKMNTNSQ

SEQ ID NO: 193564 - protein, 20 aa, Artificial Sequence
  Description of Artificial Sequence: Synthetic peptide
  Seed: GNEKKAKLANVVRKMMTNSQ
GNEKKAKIANMVRKMPTNSQ

SEQ ID NO: 193565 - protein, 20 aa, Artificial Sequence
  Description of Artificial Sequence: Synthetic peptide
  Seed: GNEKKAKLANVVRKMMTNSQ
GNEKKAKIANMVRKMQTNSQ

SEQ ID NO: 193566 - protein, 20 aa, Artificial Sequence
  Description of Artificial Sequence: Synthetic peptide
  Seed: GNEKKAKLANVVRKMMTNSQ
GNEKKAKIANMVRKMRTNSQ

SEQ ID NO: 193567 - protein, 20 aa, Artificial Sequence
  Description of Artificial Sequence: Synthetic peptide
  Seed: GNEKKAKLANVVRKMMTNSQ
GNEKKAKIANMVRKMSTNSQ

SEQ ID NO: 193568 - protein, 20 aa, Artificial Sequence
  Description of Artificial Sequence: Synthetic peptide
  Seed: GNEKKAKLANVVRKMMTNSQ
GNEKKAKIANMVRKMTTNSQ

SEQ ID NO: 193569 - protein, 20 aa, Artificial Sequence
  Description of Artificial Sequence: Synthetic peptide
  Seed: GNEKKAKLANVVRKMMTNSQ
GNEKKAKIANMVRKMYTNSQ

SEQ ID NO: 193570 - protein, 20 aa, Artificial Sequence
  Description of Artificial Sequence: Synthetic peptide
  Seed: GNEKKAKLANVVRKMMTNSQ
GNEKKAKIANNVAKMATNSQ

SEQ ID NO: 193571 - protein, 20 aa, Artificial Sequence
  Description of Artificial Sequence: Synthetic peptide
  Seed: GNEKKAKLANVVRKMMTNSQ
GNEKKAKIANNVAKMFTNSQ

SEQ ID NO: 193572 - protein, 20 aa, Artificial Sequence
  Description of Artificial Sequence: Synthetic peptide
  Seed: GNEKKAKLANVVRKMMTNSQ
GNEKKAKIANNVAKMITNSQ

SEQ ID NO: 193573 - protein, 20 aa, Artificial Sequence
  Description of Artificial Sequence: Synthetic peptide
  Seed: GNEKKAKLANVVRKMMTNSQ
GNEKKAKIANNVAKMLTNSQ

SEQ ID NO: 193574 - protein, 20 aa, Artificial Sequence
  Description of Artificial Sequence: Synthetic peptide
  Seed: GNEKKAKLANVVRKMMTNSQ
GNEKKAKIANNVAKMMTNSQ

SEQ ID NO: 193575 - protein, 20 aa, Artificial Sequence
  Description of Artificial Sequence: Synthetic peptide
  Seed: GNEKKAKLANVVRKMMTNSQ
GNEKKAKIANNVAKMVTNSQ

SEQ ID NO: 193576 - protein, 20 aa, Artificial Sequence
  Description of Artificial Sequence: Synthetic peptide
  Seed: GNEKKAKLANVVRKMMTNSQ
GNEKKAKIANNVAKMWTNSQ

SEQ ID NO: 193577 - protein, 20 aa, Artificial Sequence
  Description of Artificial Sequence: Synthetic peptide
  Seed: GNEKKAKLANVVRKMMTNSQ
GNEKKAKIANNVAKMYTNSQ

SEQ ID NO: 193578 - protein, 20 aa, Artificial Sequence
  Description of Artificial Sequence: Synthetic peptide
  Seed: GNEKKAKLANVVRKMMTNSQ
GNEKKAKIANNVGKMFTNSQ

SEQ ID NO: 193579 - protein, 20 aa, Artificial Sequence
  Description of Artificial Sequence: Synthetic peptide
  Seed: GNEKKAKLANVVRKMMTNSQ
GNEKKAKIANNVGKMITNSQ

SEQ ID NO: 193580 - protein, 20 aa, Artificial Sequence
  Description of Artificial Sequence: Synthetic peptide
  Seed: GNEKKAKLANVVRKMMTNSQ
GNEKKAKIANNVGKMLTNSQ

SEQ ID NO: 193581 - protein, 20 aa, Artificial Sequence
  Description of Artificial Sequence: Synthetic peptide
  Seed: GNEKKAKLANVVRKMMTNSQ
GNEKKAKIANNVGKMMTNSQ

SEQ ID NO: 193582 - protein, 20 aa, Artificial Sequence
  Description of Artificial Sequence: Synthetic peptide
  Seed: GNEKKAKLANVVRKMMTNSQ
GNEKKAKIANNVGKMVTNSQ

SEQ ID NO: 193583 - protein, 20 aa, Artificial Sequence
  Description of Artificial Sequence: Synthetic peptide
  Seed: GNEKKAKLANVVRKMMTNSQ
GNEKKAKIANNVIKMATNSQ

SEQ ID NO: 193584 - protein, 20 aa, Artificial Sequence
  Description of Artificial Sequence: Synthetic peptide
  Seed: GNEKKAKLANVVRKMMTNSQ
GNEKKAKIANNVIKMFTNSQ

SEQ ID NO: 193585 - protein, 20 aa, Artificial Sequence
  Description of Artificial Sequence: Synthetic peptide
  Seed: GNEKKAKLANVVRKMMTNSQ
GNEKKAKIANNVIKMITNSQ

SEQ ID NO: 193586 - protein, 20 aa, Artificial Sequence
  Description of Artificial Sequence: Synthetic peptide
  Seed: GNEKKAKLANVVRKMMTNSQ
GNEKKAKIANNVIKMLTNSQ

SEQ ID NO: 193587 - protein, 20 aa, Artificial Sequence
  Description of Artificial Sequence: Synthetic peptide
  Seed: GNEKKAKLANVVRKMMTNSQ
GNEKKAKIANNVIKMMTNSQ

SEQ ID NO: 193588 - protein, 20 aa, Artificial Sequence
  Description of Artificial Sequence: Synthetic peptide
  Seed: GNEKKAKLANVVRKMMTNSQ
GNEKKAKIANNVIKMVTNSQ

SEQ ID NO: 193589 - protein, 20 aa, Artificial Sequence
  Description of Artificial Sequence: Synthetic peptide
  Seed: GNEKKAKLANVVRKMMTNSQ
GNEKKAKIANNVIKMYTNSQ

SEQ ID NO: 193590 - protein, 20 aa, Artificial Sequence
  Description of Artificial Sequence: Synthetic peptide
  Seed: GNEKKAKLANVVRKMMTNSQ
GNEKKAKIANNVLKMFTNSQ

SEQ ID NO: 193591 - protein, 20 aa, Artificial Sequence
  Description of Artificial Sequence: Synthetic peptide
  Seed: GNEKKAKLANVVRKMMTNSQ
GNEKKAKIANNVLKMITNSQ

SEQ ID NO: 193592 - protein, 20 aa, Artificial Sequence
  Description of Artificial Sequence: Synthetic peptide
  Seed: GNEKKAKLANVVRKMMTNSQ
GNEKKAKIANNVLKMLTNSQ

SEQ ID NO: 193593 - protein, 20 aa, Artificial Sequence
  Description of Artificial Sequence: Synthetic peptide
  Seed: GNEKKAKLANVVRKMMTNSQ
GNEKKAKIANNVLKMVTNSQ

SEQ ID NO: 193594 - protein, 20 aa, Artificial Sequence
  Description of Artificial Sequence: Synthetic peptide
  Seed: GNEKKAKLANVVRKMMTNSQ
GNEKKAKIANNVMKMFTNSQ

SEQ ID NO: 193595 - protein, 20 aa, Artificial Sequence
  Description of Artificial Sequence: Synthetic peptide
  Seed: GNEKKAKLANVVRKMMTNSQ
GNEKKAKIANNVMKMITNSQ

SEQ ID NO: 193596 - protein, 20 aa, Artificial Sequence
  Description of Artificial Sequence: Synthetic peptide
  Seed: GNEKKAKLANVVRKMMTNSQ
GNEKKAKIANNVMKMLTNSQ

SEQ ID NO: 193597 - protein, 20 aa, Artificial Sequence
  Description of Artificial Sequence: Synthetic peptide
  Seed: GNEKKAKLANVVRKMMTNSQ
GNEKKAKIANNVMKMVTNSQ

SEQ ID NO: 193598 - protein, 20 aa, Artificial Sequence
  Description of Artificial Sequence: Synthetic peptide
  Seed: GNEKKAKLANVVRKMMTNSQ
GNEKKAKIANNVNKMFTNSQ

SEQ ID NO: 193599 - protein, 20 aa, Artificial Sequence
  Description of Artificial Sequence: Synthetic peptide
  Seed: GNEKKAKLANVVRKMMTNSQ
GNEKKAKIANNVNKMITNSQ

SEQ ID NO: 193600 - protein, 20 aa, Artificial Sequence
  Description of Artificial Sequence: Synthetic peptide
  Seed: GNEKKAKLANVVRKMMTNSQ
GNEKKAKIANNVNKMLTNSQ

SEQ ID NO: 193601 - protein, 20 aa, Artificial Sequence
  Description of Artificial Sequence: Synthetic peptide
  Seed: GNEKKAKLANVVRKMMTNSQ
GNEKKAKIANNVNKMMTNSQ

SEQ ID NO: 193602 - protein, 20 aa, Artificial Sequence
  Description of Artificial Sequence: Synthetic peptide
  Seed: GNEKKAKLANVVRKMMTNSQ
GNEKKAKIANNVNKMVTNSQ

SEQ ID NO: 193603 - protein, 20 aa, Artificial Sequence
  Description of Artificial Sequence: Synthetic peptide
  Seed: GNEKKAKLANVVRKMMTNSQ
GNEKKAKIANNVNKMYTNSQ

SEQ ID NO: 193604 - protein, 20 aa, Artificial Sequence
  Description of Artificial Sequence: Synthetic peptide
  Seed: GNEKKAKLANVVRKMMTNSQ
GNEKKAKIANNVPKMFTNSQ

SEQ ID NO: 193605 - protein, 20 aa, Artificial Sequence
  Description of Artificial Sequence: Synthetic peptide
  Seed: GNEKKAKLANVVRKMMTNSQ
GNEKKAKIANNVPKMITNSQ

SEQ ID NO: 193606 - protein, 20 aa, Artificial Sequence
  Description of Artificial Sequence: Synthetic peptide
  Seed: GNEKKAKLANVVRKMMTNSQ
GNEKKAKIANNVPKMLTNSQ

SEQ ID NO: 193607 - protein, 20 aa, Artificial Sequence
  Description of Artificial Sequence: Synthetic peptide
  Seed: GNEKKAKLANVVRKMMTNSQ
GNEKKAKIANNVPKMMTNSQ

SEQ ID NO: 193608 - protein, 20 aa, Artificial Sequence
  Description of Artificial Sequence: Synthetic peptide
  Seed: GNEKKAKLANVVRKMMTNSQ
GNEKKAKIANNVPKMVTNSQ

SEQ ID NO: 193609 - protein, 20 aa, Artificial Sequence
  Description of Artificial Sequence: Synthetic peptide
  Seed: GNEKKAKLANVVRKMMTNSQ
GNEKKAKIANNVPKMYTNSQ

SEQ ID NO: 193610 - protein, 20 aa, Artificial Sequence
  Description of Artificial Sequence: Synthetic peptide
  Seed: GNEKKAKLANVVRKMMTNSQ
GNEKKAKIANNVSKMFTNSQ

SEQ ID NO: 193611 - protein, 20 aa, Artificial Sequence
  Description of Artificial Sequence: Synthetic peptide
  Seed: GNEKKAKLANVVRKMMTNSQ
GNEKKAKIANNVSKMITNSQ

SEQ ID NO: 193612 - protein, 20 aa, Artificial Sequence
  Description of Artificial Sequence: Synthetic peptide
  Seed: GNEKKAKLANVVRKMMTNSQ
GNEKKAKIANNVSKMLTNSQ

SEQ ID NO: 193613 - protein, 20 aa, Artificial Sequence
  Description of Artificial Sequence: Synthetic peptide
  Seed: GNEKKAKLANVVRKMMTNSQ
GNEKKAKIANNVSKMMTNSQ

SEQ ID NO: 193614 - protein, 20 aa, Artificial Sequence
  Description of Artificial Sequence: Synthetic peptide
  Seed: GNEKKAKLANVVRKMMTNSQ
GNEKKAKIANNVSKMVTNSQ

SEQ ID NO: 193615 - protein, 20 aa, Artificial Sequence
  Description of Artificial Sequence: Synthetic peptide
  Seed: GNEKKAKLANVVRKMMTNSQ
GNEKKAKIANNVSKMYTNSQ

SEQ ID NO: 193616 - protein, 20 aa, Artificial Sequence
  Description of Artificial Sequence: Synthetic peptide
  Seed: GNEKKAKLANVVRKMMTNSQ
GNEKKAKIANNVTKMFTNSQ

SEQ ID NO: 193617 - protein, 20 aa, Artificial Sequence
  Description of Artificial Sequence: Synthetic peptide
  Seed: GNEKKAKLANVVRKMMTNSQ
GNEKKAKIANNVTKMITNSQ

SEQ ID NO: 193618 - protein, 20 aa, Artificial Sequence
  Description of Artificial Sequence: Synthetic peptide
  Seed: GNEKKAKLANVVRKMMTNSQ
GNEKKAKIANNVTKMLTNSQ

SEQ ID NO: 193619 - protein, 20 aa, Artificial Sequence
  Description of Artificial Sequence: Synthetic peptide
  Seed: GNEKKAKLANVVRKMMTNSQ
GNEKKAKIANNVTKMMTNSQ

SEQ ID NO: 193620 - protein, 20 aa, Artificial Sequence
  Description of Artificial Sequence: Synthetic peptide
  Seed: GNEKKAKLANVVRKMMTNSQ
GNEKKAKIANNVTKMVTNSQ

SEQ ID NO: 193621 - protein, 20 aa, Artificial Sequence
  Description of Artificial Sequence: Synthetic peptide
  Seed: GNEKKAKLANVVRKMMTNSQ
GNEKKAKIANNVTKMYTNSQ

SEQ ID NO: 193622 - protein, 20 aa, Artificial Sequence
  Description of Artificial Sequence: Synthetic peptide
  Seed: GNEKKAKLANVVRKMMTNSQ
GNEKKAKIANNVVKMATNSQ

SEQ ID NO: 193623 - protein, 20 aa, Artificial Sequence
  Description of Artificial Sequence: Synthetic peptide
  Seed: GNEKKAKLANVVRKMMTNSQ
GNEKKAKIANNVVKMFTNSQ

SEQ ID NO: 193624 - protein, 20 aa, Artificial Sequence
  Description of Artificial Sequence: Synthetic peptide
  Seed: GNEKKAKLANVVRKMMTNSQ
GNEKKAKIANNVVKMITNSQ

SEQ ID NO: 193625 - protein, 20 aa, Artificial Sequence
  Description of Artificial Sequence: Synthetic peptide
  Seed: GNEKKAKLANVVRKMMTNSQ
GNEKKAKIANNVVKMLTNSQ

SEQ ID NO: 193626 - protein, 20 aa, Artificial Sequence
  Description of Artificial Sequence: Synthetic peptide
  Seed: GNEKKAKLANVVRKMMTNSQ
GNEKKAKIANNVVKMMTNSQ

SEQ ID NO: 193627 - protein, 20 aa, Artificial Sequence
  Description of Artificial Sequence: Synthetic peptide
  Seed: GNEKKAKLANVVRKMMTNSQ
GNEKKAKIANNVVKMVTNSQ

SEQ ID NO: 193628 - protein, 20 aa, Artificial Sequence
  Description of Artificial Sequence: Synthetic peptide
  Seed: GNEKKAKLANVVRKMMTNSQ
GNEKKAKIANNVVKMYTNSQ

SEQ ID NO: 193629 - protein, 20 aa, Artificial Sequence
  Description of Artificial Sequence: Synthetic peptide
  Seed: GNEKKAKLANVVRKMMTNSQ
GNEKKAKIANSVAKMITNSQ

SEQ ID NO: 193630 - protein, 20 aa, Artificial Sequence
  Description of Artificial Sequence: Synthetic peptide
  Seed: GNEKKAKLANVVRKMMTNSQ
GNEKKAKIANTVFKMITNSQ

SEQ ID NO: 193631 - protein, 20 aa, Artificial Sequence
  Description of Artificial Sequence: Synthetic peptide
  Seed: GNEKKAKLANVVRKMMTNSQ
GNEKKAKIANTVFKMVTNSQ

SEQ ID NO: 193632 - protein, 20 aa, Artificial Sequence
  Description of Artificial Sequence: Synthetic peptide
  Seed: GNEKKAKLANVVRKMMTNSQ
GNEKKAKIANVVKKMATNSQ

SEQ ID NO: 193633 - protein, 20 aa, Artificial Sequence
  Description of Artificial Sequence: Synthetic peptide
  Seed: GNEKKAKLANVVRKMMTNSQ
GNEKKAKIANVVKKMGTNSQ

SEQ ID NO: 193634 - protein, 20 aa, Artificial Sequence
  Description of Artificial Sequence: Synthetic peptide
  Seed: GNEKKAKLANVVRKMMTNSQ
GNEKKAKIANVVKKMSTNSQ

SEQ ID NO: 193635 - protein, 20 aa, Artificial Sequence
  Description of Artificial Sequence: Synthetic peptide
  Seed: GNEKKAKLANVVRKMMTNSQ
GNEKKAKIANVVKKMTTNSQ

SEQ ID NO: 193636 - protein, 20 aa, Artificial Sequence
  Description of Artificial Sequence: Synthetic peptide
  Seed: GNEKKAKLANVVRKMMTNSQ
GNEKKAKIANVVRKMATNSQ

SEQ ID NO: 193637 - protein, 20 aa, Artificial Sequence
  Description of Artificial Sequence: Synthetic peptide
  Seed: GNEKKAKLANVVRKMMTNSQ
GNEKKAKIANVVRKMGTNSQ

SEQ ID NO: 193638 - protein, 20 aa, Artificial Sequence
  Description of Artificial Sequence: Synthetic peptide
  Seed: GNEKKAKLANVVRKMMTNSQ
GNEKKAKIANVVRKMHTNSQ

SEQ ID NO: 193639 - protein, 20 aa, Artificial Sequence
  Description of Artificial Sequence: Synthetic peptide
  Seed: GNEKKAKLANVVRKMMTNSQ
GNEKKAKIANVVRKMQTNSQ

SEQ ID NO: 193640 - protein, 20 aa, Artificial Sequence
  Description of Artificial Sequence: Synthetic peptide
  Seed: GNEKKAKLANVVRKMMTNSQ
GNEKKAKIANVVRKMSTNSQ

SEQ ID NO: 193641 - protein, 20 aa, Artificial Sequence
  Description of Artificial Sequence: Synthetic peptide
  Seed: GNEKKAKLANVVRKMMTNSQ
GNEKKAKIANVVRKMTTNSQ

SEQ ID NO: 193642 - protein, 20 aa, Artificial Sequence
  Description of Artificial Sequence: Synthetic peptide
  Seed: GNEKKAKLANVVRKMMTNSQ
GNEKKAKIANWVNKMITNSQ

SEQ ID NO: 193643 - protein, 20 aa, Artificial Sequence
  Description of Artificial Sequence: Synthetic peptide
  Seed: GNEKKAKLANVVRKMMTNSQ
GNEKKAKIANWVNKMLTNSQ

SEQ ID NO: 193644 - protein, 20 aa, Artificial Sequence
  Description of Artificial Sequence: Synthetic peptide
  Seed: GNEKKAKLANVVRKMMTNSQ
GNEKKAKIANWVNKMVTNSQ

SEQ ID NO: 193645 - protein, 20 aa, Artificial Sequence
  Description of Artificial Sequence: Synthetic peptide
  Seed: GNEKKAKLANVVRKMMTNSQ
GNEKKAKIANWVSKMATNSQ

SEQ ID NO: 193646 - protein, 20 aa, Artificial Sequence
  Description of Artificial Sequence: Synthetic peptide
  Seed: GNEKKAKLANVVRKMMTNSQ
GNEKKAKIANWVSKMITNSQ

SEQ ID NO: 193647 - protein, 20 aa, Artificial Sequence
  Description of Artificial Sequence: Synthetic peptide
  Seed: GNEKKAKLANVVRKMMTNSQ
GNEKKAKIANWVSKMLTNSQ

SEQ ID NO: 193648 - protein, 20 aa, Artificial Sequence
  Description of Artificial Sequence: Synthetic peptide
  Seed: GNEKKAKLANVVRKMMTNSQ
GNEKKAKIANWVSKMVTNSQ

SEQ ID NO: 193649 - protein, 20 aa, Artificial Sequence
  Description of Artificial Sequence: Synthetic peptide
  Seed: GNEKKAKLANVVRKMMTNSQ
GNEKKAKIANYVAKMATNSQ

SEQ ID NO: 193650 - protein, 20 aa, Artificial Sequence
  Description of Artificial Sequence: Synthetic peptide
  Seed: GNEKKAKLANVVRKMMTNSQ
GNEKKAKIANYVAKMITNSQ

SEQ ID NO: 193651 - protein, 20 aa, Artificial Sequence
  Description of Artificial Sequence: Synthetic peptide
  Seed: GNEKKAKLANVVRKMMTNSQ
GNEKKAKIANYVAKMLTNSQ

SEQ ID NO: 193652 - protein, 20 aa, Artificial Sequence
  Description of Artificial Sequence: Synthetic peptide
  Seed: GNEKKAKLANVVRKMMTNSQ
GNEKKAKIANYVAKMVTNSQ

SEQ ID NO: 193653 - protein, 20 aa, Artificial Sequence
  Description of Artificial Sequence: Synthetic peptide
  Seed: GNEKKAKLANVVRKMMTNSQ
GNEKKAKIANYVGKMATNSQ

SEQ ID NO: 193654 - protein, 20 aa, Artificial Sequence
  Description of Artificial Sequence: Synthetic peptide
  Seed: GNEKKAKLANVVRKMMTNSQ
GNEKKAKIANYVGKMITNSQ

SEQ ID NO: 193655 - protein, 20 aa, Artificial Sequence
  Description of Artificial Sequence: Synthetic peptide
  Seed: GNEKKAKLANVVRKMMTNSQ
GNEKKAKIANYVGKMLTNSQ

SEQ ID NO: 193656 - protein, 20 aa, Artificial Sequence
  Description of Artificial Sequence: Synthetic peptide
  Seed: GNEKKAKLANVVRKMMTNSQ
GNEKKAKIANYVGKMMTNSQ

SEQ ID NO: 193657 - protein, 20 aa, Artificial Sequence
  Description of Artificial Sequence: Synthetic peptide
  Seed: GNEKKAKLANVVRKMMTNSQ
GNEKKAKIANYVGKMVTNSQ

SEQ ID NO: 193658 - protein, 20 aa, Artificial Sequence
  Description of Artificial Sequence: Synthetic peptide
  Seed: GNEKKAKLANVVRKMMTNSQ
GNEKKAKIANYVNKMATNSQ

SEQ ID NO: 193659 - protein, 20 aa, Artificial Sequence
  Description of Artificial Sequence: Synthetic peptide
  Seed: GNEKKAKLANVVRKMMTNSQ
GNEKKAKIANYVNKMFTNSQ

SEQ ID NO: 193660 - protein, 20 aa, Artificial Sequence
  Description of Artificial Sequence: Synthetic peptide
  Seed: GNEKKAKLANVVRKMMTNSQ
GNEKKAKIANYVNKMITNSQ

SEQ ID NO: 193661 - protein, 20 aa, Artificial Sequence
  Description of Artificial Sequence: Synthetic peptide
  Seed: GNEKKAKLANVVRKMMTNSQ
GNEKKAKIANYVNKMLTNSQ

SEQ ID NO: 193662 - protein, 20 aa, Artificial Sequence
  Description of Artificial Sequence: Synthetic peptide
  Seed: GNEKKAKLANVVRKMMTNSQ
GNEKKAKIANYVNKMMTNSQ

SEQ ID NO: 193663 - protein, 20 aa, Artificial Sequence
  Description of Artificial Sequence: Synthetic peptide
  Seed: GNEKKAKLANVVRKMMTNSQ
GNEKKAKIANYVNKMTTNSQ

SEQ ID NO: 193664 - protein, 20 aa, Artificial Sequence
  Description of Artificial Sequence: Synthetic peptide
  Seed: GNEKKAKLANVVRKMMTNSQ
GNEKKAKIANYVNKMVTNSQ

SEQ ID NO: 193665 - protein, 20 aa, Artificial Sequence
  Description of Artificial Sequence: Synthetic peptide
  Seed: GNEKKAKLANVVRKMMTNSQ
GNEKKAKIANYVSKMATNSQ

SEQ ID NO: 193666 - protein, 20 aa, Artificial Sequence
  Description of Artificial Sequence: Synthetic peptide
  Seed: GNEKKAKLANVVRKMMTNSQ
GNEKKAKIANYVSKMFTNSQ

SEQ ID NO: 193667 - protein, 20 aa, Artificial Sequence
  Description of Artificial Sequence: Synthetic peptide
  Seed: GNEKKAKLANVVRKMMTNSQ
GNEKKAKIANYVSKMITNSQ

SEQ ID NO: 193668 - protein, 20 aa, Artificial Sequence
  Description of Artificial Sequence: Synthetic peptide
  Seed: GNEKKAKLANVVRKMMTNSQ
GNEKKAKIANYVSKMLTNSQ

SEQ ID NO: 193669 - protein, 20 aa, Artificial Sequence
  Description of Artificial Sequence: Synthetic peptide
  Seed: GNEKKAKLANVVRKMMTNSQ
GNEKKAKIANYVSKMMTNSQ

SEQ ID NO: 193670 - protein, 20 aa, Artificial Sequence
  Description of Artificial Sequence: Synthetic peptide
  Seed: GNEKKAKLANVVRKMMTNSQ
GNEKKAKIANYVSKMSTNSQ

SEQ ID NO: 193671 - protein, 20 aa, Artificial Sequence
  Description of Artificial Sequence: Synthetic peptide
  Seed: GNEKKAKLANVVRKMMTNSQ
GNEKKAKIANYVSKMTTNSQ

SEQ ID NO: 193672 - protein, 20 aa, Artificial Sequence
  Description of Artificial Sequence: Synthetic peptide
  Seed: GNEKKAKLANVVRKMMTNSQ
GNEKKAKIANYVSKMVTNSQ

SEQ ID NO: 193673 - protein, 20 aa, Artificial Sequence
  Description of Artificial Sequence: Synthetic peptide
  Seed: GNEKKAKLANVVRKMMTNSQ
GNEKKAKIANYVTKMATNSQ

SEQ ID NO: 193674 - protein, 20 aa, Artificial Sequence
  Description of Artificial Sequence: Synthetic peptide
  Seed: GNEKKAKLANVVRKMMTNSQ
GNEKKAKIANYVTKMITNSQ

SEQ ID NO: 193675 - protein, 20 aa, Artificial Sequence
  Description of Artificial Sequence: Synthetic peptide
  Seed: GNEKKAKLANVVRKMMTNSQ
GNEKKAKIANYVTKMLTNSQ

SEQ ID NO: 193676 - protein, 20 aa, Artificial Sequence
  Description of Artificial Sequence: Synthetic peptide
  Seed: GNEKKAKLANVVRKMMTNSQ
GNEKKAKIANYVTKMVTNSQ

SEQ ID NO: 193677 - protein, 20 aa, Artificial Sequence
  Description of Artificial Sequence: Synthetic peptide
  Seed: GNEKKAKLANVVRKMMTNSQ
GNEKKAKLANAVRKMATNSQ

SEQ ID NO: 193678 - protein, 20 aa, Artificial Sequence
  Description of Artificial Sequence: Synthetic peptide
  Seed: GNEKKAKLANVVRKMMTNSQ
GNEKKAKLANAVRKMSTNSQ

SEQ ID NO: 193679 - protein, 20 aa, Artificial Sequence
  Description of Artificial Sequence: Synthetic peptide
  Seed: GNEKKAKLANVVRKMMTNSQ
GNEKKAKLANFVNKMITNSQ

SEQ ID NO: 193680 - protein, 20 aa, Artificial Sequence
  Description of Artificial Sequence: Synthetic peptide
  Seed: GNEKKAKLANVVRKMMTNSQ
GNEKKAKLANFVNKMLTNSQ

SEQ ID NO: 193681 - protein, 20 aa, Artificial Sequence
  Description of Artificial Sequence: Synthetic peptide
  Seed: GNEKKAKLANVVRKMMTNSQ
GNEKKAKLANFVNKMVTNSQ

SEQ ID NO: 193682 - protein, 20 aa, Artificial Sequence
  Description of Artificial Sequence: Synthetic peptide
  Seed: GNEKKAKLANVVRKMMTNSQ
GNEKKAKLANFVSKMITNSQ

SEQ ID NO: 193683 - protein, 20 aa, Artificial Sequence
  Description of Artificial Sequence: Synthetic peptide
  Seed: GNEKKAKLANVVRKMMTNSQ
GNEKKAKLANFVSKMLTNSQ

SEQ ID NO: 193684 - protein, 20 aa, Artificial Sequence
  Description of Artificial Sequence: Synthetic peptide
  Seed: GNEKKAKLANVVRKMMTNSQ
GNEKKAKLANFVSKMVTNSQ

SEQ ID NO: 193685 - protein, 20 aa, Artificial Sequence
  Description of Artificial Sequence: Synthetic peptide
  Seed: GNEKKAKLANVVRKMMTNSQ
GNEKKAKLANIVKKMATNSQ

SEQ ID NO: 193686 - protein, 20 aa, Artificial Sequence
  Description of Artificial Sequence: Synthetic peptide
  Seed: GNEKKAKLANVVRKMMTNSQ
GNEKKAKLANIVKKMGTNSQ

SEQ ID NO: 193687 - protein, 20 aa, Artificial Sequence
  Description of Artificial Sequence: Synthetic peptide
  Seed: GNEKKAKLANVVRKMMTNSQ
GNEKKAKLANIVKKMQTNSQ

SEQ ID NO: 193688 - protein, 20 aa, Artificial Sequence
  Description of Artificial Sequence: Synthetic peptide
  Seed: GNEKKAKLANVVRKMMTNSQ
GNEKKAKLANIVKKMSTNSQ

SEQ ID NO: 193689 - protein, 20 aa, Artificial Sequence
  Description of Artificial Sequence: Synthetic peptide
  Seed: GNEKKAKLANVVRKMMTNSQ
GNEKKAKLANIVKKMTTNSQ

SEQ ID NO: 193690 - protein, 20 aa, Artificial Sequence
  Description of Artificial Sequence: Synthetic peptide
  Seed: GNEKKAKLANVVRKMMTNSQ
GNEKKAKLANIVRKMATNSQ

SEQ ID NO: 193691 - protein, 20 aa, Artificial Sequence
  Description of Artificial Sequence: Synthetic peptide
  Seed: GNEKKAKLANVVRKMMTNSQ
GNEKKAKLANIVRKMGTNSQ

SEQ ID NO: 193692 - protein, 20 aa, Artificial Sequence
  Description of Artificial Sequence: Synthetic peptide
  Seed: GNEKKAKLANVVRKMMTNSQ
GNEKKAKLANIVRKMHTNSQ

SEQ ID NO: 193693 - protein, 20 aa, Artificial Sequence
  Description of Artificial Sequence: Synthetic peptide
  Seed: GNEKKAKLANVVRKMMTNSQ
GNEKKAKLANIVRKMQTNSQ

SEQ ID NO: 193694 - protein, 20 aa, Artificial Sequence
  Description of Artificial Sequence: Synthetic peptide
  Seed: GNEKKAKLANVVRKMMTNSQ
GNEKKAKLANIVRKMSTNSQ

SEQ ID NO: 193695 - protein, 20 aa, Artificial Sequence
  Description of Artificial Sequence: Synthetic peptide
  Seed: GNEKKAKLANVVRKMMTNSQ
GNEKKAKLANIVRKMTTNSQ

SEQ ID NO: 193696 - protein, 20 aa, Artificial Sequence
  Description of Artificial Sequence: Synthetic peptide
  Seed: GNEKKAKLANVVRKMMTNSQ
GNEKKAKLANLVKKMATNSQ

SEQ ID NO: 193697 - protein, 20 aa, Artificial Sequence
  Description of Artificial Sequence: Synthetic peptide
  Seed: GNEKKAKLANVVRKMMTNSQ
GNEKKAKLANLVKKMGTNSQ

SEQ ID NO: 193698 - protein, 20 aa, Artificial Sequence
  Description of Artificial Sequence: Synthetic peptide
  Seed: GNEKKAKLANVVRKMMTNSQ
GNEKKAKLANLVKKMHTNSQ

SEQ ID NO: 193699 - protein, 20 aa, Artificial Sequence
  Description of Artificial Sequence: Synthetic peptide
  Seed: GNEKKAKLANVVRKMMTNSQ
GNEKKAKLANLVKKMQTNSQ

SEQ ID NO: 193700 - protein, 20 aa, Artificial Sequence
  Description of Artificial Sequence: Synthetic peptide
  Seed: GNEKKAKLANVVRKMMTNSQ
GNEKKAKLANLVKKMSTNSQ

SEQ ID NO: 193701 - protein, 20 aa, Artificial Sequence
  Description of Artificial Sequence: Synthetic peptide
  Seed: GNEKKAKLANVVRKMMTNSQ
GNEKKAKLANLVKKMTTNSQ

SEQ ID NO: 193702 - protein, 20 aa, Artificial Sequence
  Description of Artificial Sequence: Synthetic peptide
  Seed: GNEKKAKLANVVRKMMTNSQ
GNEKKAKLANLVRKMATNSQ

SEQ ID NO: 193703 - protein, 20 aa, Artificial Sequence
  Description of Artificial Sequence: Synthetic peptide
  Seed: GNEKKAKLANVVRKMMTNSQ
GNEKKAKLANLVRKMGTNSQ

SEQ ID NO: 193704 - protein, 20 aa, Artificial Sequence
  Description of Artificial Sequence: Synthetic peptide
  Seed: GNEKKAKLANVVRKMMTNSQ
GNEKKAKLANLVRKMHTNSQ

SEQ ID NO: 193705 - protein, 20 aa, Artificial Sequence
  Description of Artificial Sequence: Synthetic peptide
  Seed: GNEKKAKLANVVRKMMTNSQ
GNEKKAKLANLVRKMQTNSQ

SEQ ID NO: 193706 - protein, 20 aa, Artificial Sequence
  Description of Artificial Sequence: Synthetic peptide
  Seed: GNEKKAKLANVVRKMMTNSQ
GNEKKAKLANLVRKMSTNSQ

SEQ ID NO: 193707 - protein, 20 aa, Artificial Sequence
  Description of Artificial Sequence: Synthetic peptide
  Seed: GNEKKAKLANVVRKMMTNSQ
GNEKKAKLANLVRKMTTNSQ

SEQ ID NO: 193708 - protein, 20 aa, Artificial Sequence
  Description of Artificial Sequence: Synthetic peptide
  Seed: GNEKKAKLANVVRKMMTNSQ
GNEKKAKLANLVRKMVTNSQ

SEQ ID NO: 193709 - protein, 20 aa, Artificial Sequence
  Description of Artificial Sequence: Synthetic peptide
  Seed: GNEKKAKLANVVRKMMTNSQ
GNEKKAKLANMVKKMATNSQ

SEQ ID NO: 193710 - protein, 20 aa, Artificial Sequence
  Description of Artificial Sequence: Synthetic peptide
  Seed: GNEKKAKLANVVRKMMTNSQ
GNEKKAKLANMVKKMGTNSQ

SEQ ID NO: 193711 - protein, 20 aa, Artificial Sequence
  Description of Artificial Sequence: Synthetic peptide
  Seed: GNEKKAKLANVVRKMMTNSQ
GNEKKAKLANMVKKMHTNSQ

SEQ ID NO: 193712 - protein, 20 aa, Artificial Sequence
  Description of Artificial Sequence: Synthetic peptide
  Seed: GNEKKAKLANVVRKMMTNSQ
GNEKKAKLANMVKKMMTNSQ

SEQ ID NO: 193713 - protein, 20 aa, Artificial Sequence
  Description of Artificial Sequence: Synthetic peptide
  Seed: GNEKKAKLANVVRKMMTNSQ
GNEKKAKLANMVKKMQTNSQ

SEQ ID NO: 193714 - protein, 20 aa, Artificial Sequence
  Description of Artificial Sequence: Synthetic peptide
  Seed: GNEKKAKLANVVRKMMTNSQ
GNEKKAKLANMVKKMSTNSQ

SEQ ID NO: 193715 - protein, 20 aa, Artificial Sequence
  Description of Artificial Sequence: Synthetic peptide
  Seed: GNEKKAKLANVVRKMMTNSQ
GNEKKAKLANMVKKMTTNSQ

SEQ ID NO: 193716 - protein, 20 aa, Artificial Sequence
  Description of Artificial Sequence: Synthetic peptide
  Seed: GNEKKAKLANVVRKMMTNSQ
GNEKKAKLANMVKKMVTNSQ

SEQ ID NO: 193717 - protein, 20 aa, Artificial Sequence
  Description of Artificial Sequence: Synthetic peptide
  Seed: GNEKKAKLANVVRKMMTNSQ
GNEKKAKLANMVRKMATNSQ

SEQ ID NO: 193718 - protein, 20 aa, Artificial Sequence
  Description of Artificial Sequence: Synthetic peptide
  Seed: GNEKKAKLANVVRKMMTNSQ
GNEKKAKLANMVRKMGTNSQ

SEQ ID NO: 193719 - protein, 20 aa, Artificial Sequence
  Description of Artificial Sequence: Synthetic peptide
  Seed: GNEKKAKLANVVRKMMTNSQ
GNEKKAKLANMVRKMHTNSQ

SEQ ID NO: 193720 - protein, 20 aa, Artificial Sequence
  Description of Artificial Sequence: Synthetic peptide
  Seed: GNEKKAKLANVVRKMMTNSQ
GNEKKAKLANMVRKMITNSQ

SEQ ID NO: 193721 - protein, 20 aa, Artificial Sequence
  Description of Artificial Sequence: Synthetic peptide
  Seed: GNEKKAKLANVVRKMMTNSQ
GNEKKAKLANMVRKMKTNSQ

SEQ ID NO: 193722 - protein, 20 aa, Artificial Sequence
  Description of Artificial Sequence: Synthetic peptide
  Seed: GNEKKAKLANVVRKMMTNSQ
GNEKKAKLANMVRKMLTNSQ

SEQ ID NO: 193723 - protein, 20 aa, Artificial Sequence
  Description of Artificial Sequence: Synthetic peptide
  Seed: GNEKKAKLANVVRKMMTNSQ
GNEKKAKLANMVRKMQTNSQ

SEQ ID NO: 193724 - protein, 20 aa, Artificial Sequence
  Description of Artificial Sequence: Synthetic peptide
  Seed: GNEKKAKLANVVRKMMTNSQ
GNEKKAKLANMVRKMRTNSQ

SEQ ID NO: 193725 - protein, 20 aa, Artificial Sequence
  Description of Artificial Sequence: Synthetic peptide
  Seed: GNEKKAKLANVVRKMMTNSQ
GNEKKAKLANMVRKMSTNSQ

SEQ ID NO: 193726 - protein, 20 aa, Artificial Sequence
  Description of Artificial Sequence: Synthetic peptide
  Seed: GNEKKAKLANVVRKMMTNSQ
GNEKKAKLANMVRKMTTNSQ

SEQ ID NO: 193727 - protein, 20 aa, Artificial Sequence
  Description of Artificial Sequence: Synthetic peptide
  Seed: GNEKKAKLANVVRKMMTNSQ
GNEKKAKLANMVRKMVTNSQ

SEQ ID NO: 193728 - protein, 20 aa, Artificial Sequence
  Description of Artificial Sequence: Synthetic peptide
  Seed: GNEKKAKLANVVRKMMTNSQ
GNEKKAKLANMVRKMYTNSQ

SEQ ID NO: 193729 - protein, 20 aa, Artificial Sequence
  Description of Artificial Sequence: Synthetic peptide
  Seed: GNEKKAKLANVVRKMMTNSQ
GNEKKAKLANNVAKMFTNSQ

SEQ ID NO: 193730 - protein, 20 aa, Artificial Sequence
  Description of Artificial Sequence: Synthetic peptide
  Seed: GNEKKAKLANVVRKMMTNSQ
GNEKKAKLANNVAKMITNSQ

SEQ ID NO: 193731 - protein, 20 aa, Artificial Sequence
  Description of Artificial Sequence: Synthetic peptide
  Seed: GNEKKAKLANVVRKMMTNSQ
GNEKKAKLANNVAKMLTNSQ

SEQ ID NO: 193732 - protein, 20 aa, Artificial Sequence
  Description of Artificial Sequence: Synthetic peptide
  Seed: GNEKKAKLANVVRKMMTNSQ
GNEKKAKLANNVAKMMTNSQ

SEQ ID NO: 193733 - protein, 20 aa, Artificial Sequence
  Description of Artificial Sequence: Synthetic peptide
  Seed: GNEKKAKLANVVRKMMTNSQ
GNEKKAKLANNVAKMVTNSQ

SEQ ID NO: 193734 - protein, 20 aa, Artificial Sequence
  Description of Artificial Sequence: Synthetic peptide
  Seed: GNEKKAKLANVVRKMMTNSQ
GNEKKAKLANNVAKMYTNSQ

SEQ ID NO: 193735 - protein, 20 aa, Artificial Sequence
  Description of Artificial Sequence: Synthetic peptide
  Seed: GNEKKAKLANVVRKMMTNSQ
GNEKKAKLANNVGKMITNSQ

SEQ ID NO: 193736 - protein, 20 aa, Artificial Sequence
  Description of Artificial Sequence: Synthetic peptide
  Seed: GNEKKAKLANVVRKMMTNSQ
GNEKKAKLANNVGKMVTNSQ

SEQ ID NO: 193737 - protein, 20 aa, Artificial Sequence
  Description of Artificial Sequence: Synthetic peptide
  Seed: GNEKKAKLANVVRKMMTNSQ
GNEKKAKLANNVIKMFTNSQ

SEQ ID NO: 193738 - protein, 20 aa, Artificial Sequence
  Description of Artificial Sequence: Synthetic peptide
  Seed: GNEKKAKLANVVRKMMTNSQ
GNEKKAKLANNVIKMITNSQ

SEQ ID NO: 193739 - protein, 20 aa, Artificial Sequence
  Description of Artificial Sequence: Synthetic peptide
  Seed: GNEKKAKLANVVRKMMTNSQ
GNEKKAKLANNVIKMLTNSQ

SEQ ID NO: 193740 - protein, 20 aa, Artificial Sequence
  Description of Artificial Sequence: Synthetic peptide
  Seed: GNEKKAKLANVVRKMMTNSQ
GNEKKAKLANNVIKMVTNSQ

SEQ ID NO: 193741 - protein, 20 aa, Artificial Sequence
  Description of Artificial Sequence: Synthetic peptide
  Seed: GNEKKAKLANVVRKMMTNSQ
GNEKKAKLANNVLKMITNSQ

SEQ ID NO: 193742 - protein, 20 aa, Artificial Sequence
  Description of Artificial Sequence: Synthetic peptide
  Seed: GNEKKAKLANVVRKMMTNSQ
GNEKKAKLANNVLKMVTNSQ

SEQ ID NO: 193743 - protein, 20 aa, Artificial Sequence
  Description of Artificial Sequence: Synthetic peptide
  Seed: GNEKKAKLANVVRKMMTNSQ
GNEKKAKLANNVMKMITNSQ

SEQ ID NO: 193744 - protein, 20 aa, Artificial Sequence
  Description of Artificial Sequence: Synthetic peptide
  Seed: GNEKKAKLANVVRKMMTNSQ
GNEKKAKLANNVMKMVTNSQ

SEQ ID NO: 193745 - protein, 20 aa, Artificial Sequence
  Description of Artificial Sequence: Synthetic peptide
  Seed: GNEKKAKLANVVRKMMTNSQ
GNEKKAKLANNVNKMFTNSQ

SEQ ID NO: 193746 - protein, 20 aa, Artificial Sequence
  Description of Artificial Sequence: Synthetic peptide
  Seed: GNEKKAKLANVVRKMMTNSQ
GNEKKAKLANNVNKMITNSQ

SEQ ID NO: 193747 - protein, 20 aa, Artificial Sequence
  Description of Artificial Sequence: Synthetic peptide
  Seed: GNEKKAKLANVVRKMMTNSQ
GNEKKAKLANNVNKMLTNSQ

SEQ ID NO: 193748 - protein, 20 aa, Artificial Sequence
  Description of Artificial Sequence: Synthetic peptide
  Seed: GNEKKAKLANVVRKMMTNSQ
GNEKKAKLANNVNKMVTNSQ

SEQ ID NO: 193749 - protein, 20 aa, Artificial Sequence
  Description of Artificial Sequence: Synthetic peptide
  Seed: GNEKKAKLANVVRKMMTNSQ
GNEKKAKLANNVNKMYTNSQ

SEQ ID NO: 193750 - protein, 20 aa, Artificial Sequence
  Description of Artificial Sequence: Synthetic peptide
  Seed: GNEKKAKLANVVRKMMTNSQ
GNEKKAKLANNVPKMFTNSQ

SEQ ID NO: 193751 - protein, 20 aa, Artificial Sequence
  Description of Artificial Sequence: Synthetic peptide
  Seed: GNEKKAKLANVVRKMMTNSQ
GNEKKAKLANNVPKMITNSQ

SEQ ID NO: 193752 - protein, 20 aa, Artificial Sequence
  Description of Artificial Sequence: Synthetic peptide
  Seed: GNEKKAKLANVVRKMMTNSQ
GNEKKAKLANNVPKMLTNSQ

SEQ ID NO: 193753 - protein, 20 aa, Artificial Sequence
  Description of Artificial Sequence: Synthetic peptide
  Seed: GNEKKAKLANVVRKMMTNSQ
GNEKKAKLANNVPKMVTNSQ

SEQ ID NO: 193754 - protein, 20 aa, Artificial Sequence
  Description of Artificial Sequence: Synthetic peptide
  Seed: GNEKKAKLANVVRKMMTNSQ
GNEKKAKLANNVSKMFTNSQ

SEQ ID NO: 193755 - protein, 20 aa, Artificial Sequence
  Description of Artificial Sequence: Synthetic peptide
  Seed: GNEKKAKLANVVRKMMTNSQ
GNEKKAKLANNVSKMITNSQ

SEQ ID NO: 193756 - protein, 20 aa, Artificial Sequence
  Description of Artificial Sequence: Synthetic peptide
  Seed: GNEKKAKLANVVRKMMTNSQ
GNEKKAKLANNVSKMLTNSQ

SEQ ID NO: 193757 - protein, 20 aa, Artificial Sequence
  Description of Artificial Sequence: Synthetic peptide
  Seed: GNEKKAKLANVVRKMMTNSQ
GNEKKAKLANNVSKMVTNSQ

SEQ ID NO: 193758 - protein, 20 aa, Artificial Sequence
  Description of Artificial Sequence: Synthetic peptide
  Seed: GNEKKAKLANVVRKMMTNSQ
GNEKKAKLANNVSKMYTNSQ

SEQ ID NO: 193759 - protein, 20 aa, Artificial Sequence
  Description of Artificial Sequence: Synthetic peptide
  Seed: GNEKKAKLANVVRKMMTNSQ
GNEKKAKLANNVTKMFTNSQ

SEQ ID NO: 193760 - protein, 20 aa, Artificial Sequence
  Description of Artificial Sequence: Synthetic peptide
  Seed: GNEKKAKLANVVRKMMTNSQ
GNEKKAKLANNVTKMITNSQ

SEQ ID NO: 193761 - protein, 20 aa, Artificial Sequence
  Description of Artificial Sequence: Synthetic peptide
  Seed: GNEKKAKLANVVRKMMTNSQ
GNEKKAKLANNVTKMLTNSQ

SEQ ID NO: 193762 - protein, 20 aa, Artificial Sequence
  Description of Artificial Sequence: Synthetic peptide
  Seed: GNEKKAKLANVVRKMMTNSQ
GNEKKAKLANNVTKMVTNSQ

SEQ ID NO: 193763 - protein, 20 aa, Artificial Sequence
  Description of Artificial Sequence: Synthetic peptide
  Seed: GNEKKAKLANVVRKMMTNSQ
GNEKKAKLANNVVKMFTNSQ

SEQ ID NO: 193764 - protein, 20 aa, Artificial Sequence
  Description of Artificial Sequence: Synthetic peptide
  Seed: GNEKKAKLANVVRKMMTNSQ
GNEKKAKLANNVVKMITNSQ

SEQ ID NO: 193765 - protein, 20 aa, Artificial Sequence
  Description of Artificial Sequence: Synthetic peptide
  Seed: GNEKKAKLANVVRKMMTNSQ
GNEKKAKLANNVVKMLTNSQ

SEQ ID NO: 193766 - protein, 20 aa, Artificial Sequence
  Description of Artificial Sequence: Synthetic peptide
  Seed: GNEKKAKLANVVRKMMTNSQ
GNEKKAKLANNVVKMVTNSQ

SEQ ID NO: 193767 - protein, 20 aa, Artificial Sequence
  Description of Artificial Sequence: Synthetic peptide
  Seed: GNEKKAKLANVVRKMMTNSQ
GNEKKAKLANNVVKMYTNSQ

SEQ ID NO: 193768 - protein, 20 aa, Artificial Sequence
  Description of Artificial Sequence: Synthetic peptide
  Seed: GNEKKAKLANVVRKMMTNSQ
GNEKKAKLANVVKKMATNSQ

SEQ ID NO: 193769 - protein, 20 aa, Artificial Sequence
  Description of Artificial Sequence: Synthetic peptide
  Seed: GNEKKAKLANVVRKMMTNSQ
GNEKKAKLANVVKKMGTNSQ

SEQ ID NO: 193770 - protein, 20 aa, Artificial Sequence
  Description of Artificial Sequence: Synthetic peptide
  Seed: GNEKKAKLANVVRKMMTNSQ
GNEKKAKLANVVKKMSTNSQ

SEQ ID NO: 193771 - protein, 20 aa, Artificial Sequence
  Description of Artificial Sequence: Synthetic peptide
  Seed: GNEKKAKLANVVRKMMTNSQ
GNEKKAKLANVVRKMATNSQ

SEQ ID NO: 193772 - protein, 20 aa, Artificial Sequence
  Description of Artificial Sequence: Synthetic peptide
  Seed: GNEKKAKLANVVRKMMTNSQ
GNEKKAKLANVVRKMGTNSQ

SEQ ID NO: 193773 - protein, 20 aa, Artificial Sequence
  Description of Artificial Sequence: Synthetic peptide
  Seed: GNEKKAKLANVVRKMMTNSQ
GNEKKAKLANVVRKMQTNSQ

SEQ ID NO: 193774 - protein, 20 aa, Artificial Sequence
  Description of Artificial Sequence: Synthetic peptide
  Seed: GNEKKAKLANVVRKMMTNSQ
GNEKKAKLANVVRKMSTNSQ

SEQ ID NO: 193775 - protein, 20 aa, Artificial Sequence
  Description of Artificial Sequence: Synthetic peptide
  Seed: GNEKKAKLANVVRKMMTNSQ
GNEKKAKLANYVGKMVTNSQ

SEQ ID NO: 193776 - protein, 20 aa, Artificial Sequence
  Description of Artificial Sequence: Synthetic peptide
  Seed: GNEKKAKLANVVRKMMTNSQ
GNEKKAKLANYVNKMATNSQ

SEQ ID NO: 193777 - protein, 20 aa, Artificial Sequence
  Description of Artificial Sequence: Synthetic peptide
  Seed: GNEKKAKLANVVRKMMTNSQ
GNEKKAKLANYVNKMITNSQ

SEQ ID NO: 193778 - protein, 20 aa, Artificial Sequence
  Description of Artificial Sequence: Synthetic peptide
  Seed: GNEKKAKLANVVRKMMTNSQ
GNEKKAKLANYVNKMLTNSQ

SEQ ID NO: 193779 - protein, 20 aa, Artificial Sequence
  Description of Artificial Sequence: Synthetic peptide
  Seed: GNEKKAKLANVVRKMMTNSQ
GNEKKAKLANYVNKMVTNSQ

SEQ ID NO: 193780 - protein, 20 aa, Artificial Sequence
  Description of Artificial Sequence: Synthetic peptide
  Seed: GNEKKAKLANVVRKMMTNSQ
GNEKKAKLANYVSKMATNSQ

SEQ ID NO: 193781 - protein, 20 aa, Artificial Sequence
  Description of Artificial Sequence: Synthetic peptide
  Seed: GNEKKAKLANVVRKMMTNSQ
GNEKKAKLANYVSKMITNSQ

SEQ ID NO: 193782 - protein, 20 aa, Artificial Sequence
  Description of Artificial Sequence: Synthetic peptide
  Seed: GNEKKAKLANVVRKMMTNSQ
GNEKKAKLANYVSKMLTNSQ

SEQ ID NO: 193783 - protein, 20 aa, Artificial Sequence
  Description of Artificial Sequence: Synthetic peptide
  Seed: GNEKKAKLANVVRKMMTNSQ
GNEKKAKLANYVSKMVTNSQ

SEQ ID NO: 193784 - protein, 20 aa, Artificial Sequence
  Description of Artificial Sequence: Synthetic peptide
  Seed: GNEKKAKLANVVRKMMTNSQ
GNEKKAKMANIVKKMATNSQ

SEQ ID NO: 193785 - protein, 20 aa, Artificial Sequence
  Description of Artificial Sequence: Synthetic peptide
  Seed: GNEKKAKLANVVRKMMTNSQ
GNEKKAKMANIVKKMSTNSQ

SEQ ID NO: 193786 - protein, 20 aa, Artificial Sequence
  Description of Artificial Sequence: Synthetic peptide
  Seed: GNEKKAKLANVVRKMMTNSQ
GNEKKAKMANIVRKMATNSQ

SEQ ID NO: 193787 - protein, 20 aa, Artificial Sequence
  Description of Artificial Sequence: Synthetic peptide
  Seed: GNEKKAKLANVVRKMMTNSQ
GNEKKAKMANIVRKMGTNSQ

SEQ ID NO: 193788 - protein, 20 aa, Artificial Sequence
  Description of Artificial Sequence: Synthetic peptide
  Seed: GNEKKAKLANVVRKMMTNSQ
GNEKKAKMANIVRKMQTNSQ

SEQ ID NO: 193789 - protein, 20 aa, Artificial Sequence
  Description of Artificial Sequence: Synthetic peptide
  Seed: GNEKKAKLANVVRKMMTNSQ
GNEKKAKMANIVRKMSTNSQ

SEQ ID NO: 193790 - protein, 20 aa, Artificial Sequence
  Description of Artificial Sequence: Synthetic peptide
  Seed: GNEKKAKLANVVRKMMTNSQ
GNEKKAKMANLVKKMATNSQ

SEQ ID NO: 193791 - protein, 20 aa, Artificial Sequence
  Description of Artificial Sequence: Synthetic peptide
  Seed: GNEKKAKLANVVRKMMTNSQ
GNEKKAKMANLVKKMGTNSQ

SEQ ID NO: 193792 - protein, 20 aa, Artificial Sequence
  Description of Artificial Sequence: Synthetic peptide
  Seed: GNEKKAKLANVVRKMMTNSQ
GNEKKAKMANLVKKMSTNSQ

SEQ ID NO: 193793 - protein, 20 aa, Artificial Sequence
  Description of Artificial Sequence: Synthetic peptide
  Seed: GNEKKAKLANVVRKMMTNSQ
GNEKKAKMANLVRKMATNSQ

SEQ ID NO: 193794 - protein, 20 aa, Artificial Sequence
  Description of Artificial Sequence: Synthetic peptide
  Seed: GNEKKAKLANVVRKMMTNSQ
GNEKKAKMANLVRKMGTNSQ

SEQ ID NO: 193795 - protein, 20 aa, Artificial Sequence
  Description of Artificial Sequence: Synthetic peptide
  Seed: GNEKKAKLANVVRKMMTNSQ
GNEKKAKMANLVRKMHTNSQ

SEQ ID NO: 193796 - protein, 20 aa, Artificial Sequence
  Description of Artificial Sequence: Synthetic peptide
  Seed: GNEKKAKLANVVRKMMTNSQ
GNEKKAKMANLVRKMQTNSQ

SEQ ID NO: 193797 - protein, 20 aa, Artificial Sequence
  Description of Artificial Sequence: Synthetic peptide
  Seed: GNEKKAKLANVVRKMMTNSQ
GNEKKAKMANLVRKMSTNSQ

SEQ ID NO: 193798 - protein, 20 aa, Artificial Sequence
  Description of Artificial Sequence: Synthetic peptide
  Seed: GNEKKAKLANVVRKMMTNSQ
GNEKKAKMANLVRKMTTNSQ

SEQ ID NO: 193799 - protein, 20 aa, Artificial Sequence
  Description of Artificial Sequence: Synthetic peptide
  Seed: GNEKKAKLANVVRKMMTNSQ
GNEKKAKMANMVKKMATNSQ

SEQ ID NO: 193800 - protein, 20 aa, Artificial Sequence
  Description of Artificial Sequence: Synthetic peptide
  Seed: GNEKKAKLANVVRKMMTNSQ
GNEKKAKMANMVKKMGTNSQ

SEQ ID NO: 193801 - protein, 20 aa, Artificial Sequence
  Description of Artificial Sequence: Synthetic peptide
  Seed: GNEKKAKLANVVRKMMTNSQ
GNEKKAKMANMVKKMQTNSQ

SEQ ID NO: 193802 - protein, 20 aa, Artificial Sequence
  Description of Artificial Sequence: Synthetic peptide
  Seed: GNEKKAKLANVVRKMMTNSQ
GNEKKAKMANMVKKMSTNSQ

SEQ ID NO: 193803 - protein, 20 aa, Artificial Sequence
  Description of Artificial Sequence: Synthetic peptide
  Seed: GNEKKAKLANVVRKMMTNSQ
GNEKKAKMANMVKKMTTNSQ

SEQ ID NO: 193804 - protein, 20 aa, Artificial Sequence
  Description of Artificial Sequence: Synthetic peptide
  Seed: GNEKKAKLANVVRKMMTNSQ
GNEKKAKMANMVRKMATNSQ

SEQ ID NO: 193805 - protein, 20 aa, Artificial Sequence
  Description of Artificial Sequence: Synthetic peptide
  Seed: GNEKKAKLANVVRKMMTNSQ
GNEKKAKMANMVRKMGTNSQ

SEQ ID NO: 193806 - protein, 20 aa, Artificial Sequence
  Description of Artificial Sequence: Synthetic peptide
  Seed: GNEKKAKLANVVRKMMTNSQ
GNEKKAKMANMVRKMHTNSQ

SEQ ID NO: 193807 - protein, 20 aa, Artificial Sequence
  Description of Artificial Sequence: Synthetic peptide
  Seed: GNEKKAKLANVVRKMMTNSQ
GNEKKAKMANMVRKMQTNSQ

SEQ ID NO: 193808 - protein, 20 aa, Artificial Sequence
  Description of Artificial Sequence: Synthetic peptide
  Seed: GNEKKAKLANVVRKMMTNSQ
GNEKKAKMANMVRKMSTNSQ

SEQ ID NO: 193809 - protein, 20 aa, Artificial Sequence
  Description of Artificial Sequence: Synthetic peptide
  Seed: GNEKKAKLANVVRKMMTNSQ
GNEKKAKMANMVRKMTTNSQ

SEQ ID NO: 193810 - protein, 20 aa, Artificial Sequence
  Description of Artificial Sequence: Synthetic peptide
  Seed: GNEKKAKLANVVRKMMTNSQ
GNEKKAKMANMVRKMVTNSQ

SEQ ID NO: 193811 - protein, 20 aa, Artificial Sequence
  Description of Artificial Sequence: Synthetic peptide
  Seed: GNEKKAKLANVVRKMMTNSQ
GNEKKAKMANNVAKMITNSQ

SEQ ID NO: 193812 - protein, 20 aa, Artificial Sequence
  Description of Artificial Sequence: Synthetic peptide
  Seed: GNEKKAKLANVVRKMMTNSQ
GNEKKAKMANNVAKMVTNSQ

SEQ ID NO: 193813 - protein, 20 aa, Artificial Sequence
  Description of Artificial Sequence: Synthetic peptide
  Seed: GNEKKAKLANVVRKMMTNSQ
GNEKKAKMANNVIKMITNSQ

SEQ ID NO: 193814 - protein, 20 aa, Artificial Sequence
  Description of Artificial Sequence: Synthetic peptide
  Seed: GNEKKAKLANVVRKMMTNSQ
GNEKKAKMANNVNKMITNSQ

SEQ ID NO: 193815 - protein, 20 aa, Artificial Sequence
  Description of Artificial Sequence: Synthetic peptide
  Seed: GNEKKAKLANVVRKMMTNSQ
GNEKKAKMANNVSKMITNSQ

SEQ ID NO: 193816 - protein, 20 aa, Artificial Sequence
  Description of Artificial Sequence: Synthetic peptide
  Seed: GNEKKAKLANVVRKMMTNSQ
GNEKKAKMANNVSKMVTNSQ

SEQ ID NO: 193817 - protein, 20 aa, Artificial Sequence
  Description of Artificial Sequence: Synthetic peptide
  Seed: GNEKKAKLANVVRKMMTNSQ
GNEKKAKMANNVVKMITNSQ

SEQ ID NO: 193818 - protein, 20 aa, Artificial Sequence
  Description of Artificial Sequence: Synthetic peptide
  Seed: GNEKKAKLANVVRKMMTNSQ
GNEKKAKMANVVRKMATNSQ

SEQ ID NO: 193819 - protein, 20 aa, Artificial Sequence
  Description of Artificial Sequence: Synthetic peptide
  Seed: GNEKKAKLANVVRKMMTNSQ
GNEKKAKMANVVRKMSTNSQ

SEQ ID NO: 193820 - protein, 20 aa, Artificial Sequence
  Description of Artificial Sequence: Synthetic peptide
  Seed: GNEKKAKLANVVRKMMTNSQ
GNEKKAKMANYVSKMVTNSQ

SEQ ID NO: 193821 - protein, 20 aa, Artificial Sequence
  Description of Artificial Sequence: Synthetic peptide
  Seed: GNEKKAKLANVVRKMMTNSQ
GNEKKAKVANFVNKMITNSQ

SEQ ID NO: 193822 - protein, 20 aa, Artificial Sequence
  Description of Artificial Sequence: Synthetic peptide
  Seed: GNEKKAKLANVVRKMMTNSQ
GNEKKAKVANFVNKMLTNSQ

SEQ ID NO: 193823 - protein, 20 aa, Artificial Sequence
  Description of Artificial Sequence: Synthetic peptide
  Seed: GNEKKAKLANVVRKMMTNSQ
GNEKKAKVANFVNKMVTNSQ

SEQ ID NO: 193824 - protein, 20 aa, Artificial Sequence
  Description of Artificial Sequence: Synthetic peptide
  Seed: GNEKKAKLANVVRKMMTNSQ
GNEKKAKVANFVSKMITNSQ

SEQ ID NO: 193825 - protein, 20 aa, Artificial Sequence
  Description of Artificial Sequence: Synthetic peptide
  Seed: GNEKKAKLANVVRKMMTNSQ
GNEKKAKVANFVSKMLTNSQ

SEQ ID NO: 193826 - protein, 20 aa, Artificial Sequence
  Description of Artificial Sequence: Synthetic peptide
  Seed: GNEKKAKLANVVRKMMTNSQ
GNEKKAKVANFVSKMVTNSQ

SEQ ID NO: 193827 - protein, 20 aa, Artificial Sequence
  Description of Artificial Sequence: Synthetic peptide
  Seed: GNEKKAKLANVVRKMMTNSQ
GNEKKAKVANIVKKMATNSQ

SEQ ID NO: 193828 - protein, 20 aa, Artificial Sequence
  Description of Artificial Sequence: Synthetic peptide
  Seed: GNEKKAKLANVVRKMMTNSQ
GNEKKAKVANIVKKMSTNSQ

SEQ ID NO: 193829 - protein, 20 aa, Artificial Sequence
  Description of Artificial Sequence: Synthetic peptide
  Seed: GNEKKAKLANVVRKMMTNSQ
GNEKKAKVANIVRKMATNSQ

SEQ ID NO: 193830 - protein, 20 aa, Artificial Sequence
  Description of Artificial Sequence: Synthetic peptide
  Seed: GNEKKAKLANVVRKMMTNSQ
GNEKKAKVANIVRKMGTNSQ

SEQ ID NO: 193831 - protein, 20 aa, Artificial Sequence
  Description of Artificial Sequence: Synthetic peptide
  Seed: GNEKKAKLANVVRKMMTNSQ
GNEKKAKVANIVRKMQTNSQ

SEQ ID NO: 193832 - protein, 20 aa, Artificial Sequence
  Description of Artificial Sequence: Synthetic peptide
  Seed: GNEKKAKLANVVRKMMTNSQ
GNEKKAKVANIVRKMSTNSQ

SEQ ID NO: 193833 - protein, 20 aa, Artificial Sequence
  Description of Artificial Sequence: Synthetic peptide
  Seed: GNEKKAKLANVVRKMMTNSQ
GNEKKAKVANLVKKMATNSQ

SEQ ID NO: 193834 - protein, 20 aa, Artificial Sequence
  Description of Artificial Sequence: Synthetic peptide
  Seed: GNEKKAKLANVVRKMMTNSQ
GNEKKAKVANLVKKMSTNSQ

SEQ ID NO: 193835 - protein, 20 aa, Artificial Sequence
  Description of Artificial Sequence: Synthetic peptide
  Seed: GNEKKAKLANVVRKMMTNSQ
GNEKKAKVANLVRKMATNSQ

SEQ ID NO: 193836 - protein, 20 aa, Artificial Sequence
  Description of Artificial Sequence: Synthetic peptide
  Seed: GNEKKAKLANVVRKMMTNSQ
GNEKKAKVANLVRKMGTNSQ

SEQ ID NO: 193837 - protein, 20 aa, Artificial Sequence
  Description of Artificial Sequence: Synthetic peptide
  Seed: GNEKKAKLANVVRKMMTNSQ
GNEKKAKVANLVRKMHTNSQ

SEQ ID NO: 193838 - protein, 20 aa, Artificial Sequence
  Description of Artificial Sequence: Synthetic peptide
  Seed: GNEKKAKLANVVRKMMTNSQ
GNEKKAKVANLVRKMQTNSQ

SEQ ID NO: 193839 - protein, 20 aa, Artificial Sequence
  Description of Artificial Sequence: Synthetic peptide
  Seed: GNEKKAKLANVVRKMMTNSQ
GNEKKAKVANLVRKMSTNSQ

SEQ ID NO: 193840 - protein, 20 aa, Artificial Sequence
  Description of Artificial Sequence: Synthetic peptide
  Seed: GNEKKAKLANVVRKMMTNSQ
GNEKKAKVANLVRKMTTNSQ

SEQ ID NO: 193841 - protein, 20 aa, Artificial Sequence
  Description of Artificial Sequence: Synthetic peptide
  Seed: GNEKKAKLANVVRKMMTNSQ
GNEKKAKVANMVKKMATNSQ

SEQ ID NO: 193842 - protein, 20 aa, Artificial Sequence
  Description of Artificial Sequence: Synthetic peptide
  Seed: GNEKKAKLANVVRKMMTNSQ
GNEKKAKVANMVKKMGTNSQ

SEQ ID NO: 193843 - protein, 20 aa, Artificial Sequence
  Description of Artificial Sequence: Synthetic peptide
  Seed: GNEKKAKLANVVRKMMTNSQ
GNEKKAKVANMVKKMSTNSQ

SEQ ID NO: 193844 - protein, 20 aa, Artificial Sequence
  Description of Artificial Sequence: Synthetic peptide
  Seed: GNEKKAKLANVVRKMMTNSQ
GNEKKAKVANMVKKMTTNSQ

SEQ ID NO: 193845 - protein, 20 aa, Artificial Sequence
  Description of Artificial Sequence: Synthetic peptide
  Seed: GNEKKAKLANVVRKMMTNSQ
GNEKKAKVANMVRKMATNSQ

SEQ ID NO: 193846 - protein, 20 aa, Artificial Sequence
  Description of Artificial Sequence: Synthetic peptide
  Seed: GNEKKAKLANVVRKMMTNSQ
GNEKKAKVANMVRKMGTNSQ

SEQ ID NO: 193847 - protein, 20 aa, Artificial Sequence
  Description of Artificial Sequence: Synthetic peptide
  Seed: GNEKKAKLANVVRKMMTNSQ
GNEKKAKVANMVRKMHTNSQ

SEQ ID NO: 193848 - protein, 20 aa, Artificial Sequence
  Description of Artificial Sequence: Synthetic peptide
  Seed: GNEKKAKLANVVRKMMTNSQ
GNEKKAKVANMVRKMQTNSQ

SEQ ID NO: 193849 - protein, 20 aa, Artificial Sequence
  Description of Artificial Sequence: Synthetic peptide
  Seed: GNEKKAKLANVVRKMMTNSQ
GNEKKAKVANMVRKMSTNSQ

SEQ ID NO: 193850 - protein, 20 aa, Artificial Sequence
  Description of Artificial Sequence: Synthetic peptide
  Seed: GNEKKAKLANVVRKMMTNSQ
GNEKKAKVANMVRKMTTNSQ

SEQ ID NO: 193851 - protein, 20 aa, Artificial Sequence
  Description of Artificial Sequence: Synthetic peptide
  Seed: GNEKKAKLANVVRKMMTNSQ
GNEKKAKVANNVAKMFTNSQ

SEQ ID NO: 193852 - protein, 20 aa, Artificial Sequence
  Description of Artificial Sequence: Synthetic peptide
  Seed: GNEKKAKLANVVRKMMTNSQ
GNEKKAKVANNVAKMITNSQ

SEQ ID NO: 193853 - protein, 20 aa, Artificial Sequence
  Description of Artificial Sequence: Synthetic peptide
  Seed: GNEKKAKLANVVRKMMTNSQ
GNEKKAKVANNVAKMLTNSQ

SEQ ID NO: 193854 - protein, 20 aa, Artificial Sequence
  Description of Artificial Sequence: Synthetic peptide
  Seed: GNEKKAKLANVVRKMMTNSQ
GNEKKAKVANNVAKMVTNSQ

SEQ ID NO: 193855 - protein, 20 aa, Artificial Sequence
  Description of Artificial Sequence: Synthetic peptide
  Seed: GNEKKAKLANVVRKMMTNSQ
GNEKKAKVANNVIKMITNSQ

SEQ ID NO: 193856 - protein, 20 aa, Artificial Sequence
  Description of Artificial Sequence: Synthetic peptide
  Seed: GNEKKAKLANVVRKMMTNSQ
GNEKKAKVANNVIKMVTNSQ

SEQ ID NO: 193857 - protein, 20 aa, Artificial Sequence
  Description of Artificial Sequence: Synthetic peptide
  Seed: GNEKKAKLANVVRKMMTNSQ
GNEKKAKVANNVNKMFTNSQ

SEQ ID NO: 193858 - protein, 20 aa, Artificial Sequence
  Description of Artificial Sequence: Synthetic peptide
  Seed: GNEKKAKLANVVRKMMTNSQ
GNEKKAKVANNVNKMITNSQ

SEQ ID NO: 193859 - protein, 20 aa, Artificial Sequence
  Description of Artificial Sequence: Synthetic peptide
  Seed: GNEKKAKLANVVRKMMTNSQ
GNEKKAKVANNVNKMLTNSQ

SEQ ID NO: 193860 - protein, 20 aa, Artificial Sequence
  Description of Artificial Sequence: Synthetic peptide
  Seed: GNEKKAKLANVVRKMMTNSQ
GNEKKAKVANNVNKMVTNSQ

SEQ ID NO: 193861 - protein, 20 aa, Artificial Sequence
  Description of Artificial Sequence: Synthetic peptide
  Seed: GNEKKAKLANVVRKMMTNSQ
GNEKKAKVANNVPKMITNSQ

SEQ ID NO: 193862 - protein, 20 aa, Artificial Sequence
  Description of Artificial Sequence: Synthetic peptide
  Seed: GNEKKAKLANVVRKMMTNSQ
GNEKKAKVANNVPKMVTNSQ

SEQ ID NO: 193863 - protein, 20 aa, Artificial Sequence
  Description of Artificial Sequence: Synthetic peptide
  Seed: GNEKKAKLANVVRKMMTNSQ
GNEKKAKVANNVSKMITNSQ

SEQ ID NO: 193864 - protein, 20 aa, Artificial Sequence
  Description of Artificial Sequence: Synthetic peptide
  Seed: GNEKKAKLANVVRKMMTNSQ
GNEKKAKVANNVSKMLTNSQ

SEQ ID NO: 193865 - protein, 20 aa, Artificial Sequence
  Description of Artificial Sequence: Synthetic peptide
  Seed: GNEKKAKLANVVRKMMTNSQ
GNEKKAKVANNVSKMVTNSQ

SEQ ID NO: 193866 - protein, 20 aa, Artificial Sequence
  Description of Artificial Sequence: Synthetic peptide
  Seed: GNEKKAKLANVVRKMMTNSQ
GNEKKAKVANNVTKMITNSQ

SEQ ID NO: 193867 - protein, 20 aa, Artificial Sequence
  Description of Artificial Sequence: Synthetic peptide
  Seed: GNEKKAKLANVVRKMMTNSQ
GNEKKAKVANNVTKMVTNSQ

SEQ ID NO: 193868 - protein, 20 aa, Artificial Sequence
  Description of Artificial Sequence: Synthetic peptide
  Seed: GNEKKAKLANVVRKMMTNSQ
GNEKKAKVANNVVKMITNSQ

SEQ ID NO: 193869 - protein, 20 aa, Artificial Sequence
  Description of Artificial Sequence: Synthetic peptide
  Seed: GNEKKAKLANVVRKMMTNSQ
GNEKKAKVANNVVKMLTNSQ

SEQ ID NO: 193870 - protein, 20 aa, Artificial Sequence
  Description of Artificial Sequence: Synthetic peptide
  Seed: GNEKKAKLANVVRKMMTNSQ
GNEKKAKVANNVVKMVTNSQ

SEQ ID NO: 193871 - protein, 20 aa, Artificial Sequence
  Description of Artificial Sequence: Synthetic peptide
  Seed: GNEKKAKLANVVRKMMTNSQ
GNEKKAKVANVVRKMATNSQ

SEQ ID NO: 193872 - protein, 20 aa, Artificial Sequence
  Description of Artificial Sequence: Synthetic peptide
  Seed: GNEKKAKLANVVRKMMTNSQ
GNEKKAKVANVVRKMSTNSQ

SEQ ID NO: 193873 - protein, 20 aa, Artificial Sequence
  Description of Artificial Sequence: Synthetic peptide
  Seed: GNEKKAKLANVVRKMMTNSQ
GNEKKAKVANYVNKMITNSQ

SEQ ID NO: 193874 - protein, 20 aa, Artificial Sequence
  Description of Artificial Sequence: Synthetic peptide
  Seed: GNEKKAKLANVVRKMMTNSQ
GNEKKAKVANYVNKMLTNSQ

SEQ ID NO: 193875 - protein, 20 aa, Artificial Sequence
  Description of Artificial Sequence: Synthetic peptide
  Seed: GNEKKAKLANVVRKMMTNSQ
GNEKKAKVANYVNKMVTNSQ

SEQ ID NO: 193876 - protein, 20 aa, Artificial Sequence
  Description of Artificial Sequence: Synthetic peptide
  Seed: GNEKKAKLANVVRKMMTNSQ
GNEKKAKVANYVSKMATNSQ

SEQ ID NO: 193877 - protein, 20 aa, Artificial Sequence
  Description of Artificial Sequence: Synthetic peptide
  Seed: GNEKKAKLANVVRKMMTNSQ
GNEKKAKVANYVSKMITNSQ

SEQ ID NO: 193878 - protein, 20 aa, Artificial Sequence
  Description of Artificial Sequence: Synthetic peptide
  Seed: GNEKKAKLANVVRKMMTNSQ
GNEKKAKVANYVSKMLTNSQ

SEQ ID NO: 193879 - protein, 20 aa, Artificial Sequence
  Description of Artificial Sequence: Synthetic peptide
  Seed: GNEKKAKLANVVRKMMTNSQ
GNEKKAKVANYVSKMVTNSQ

SEQ ID NO: 193880 - protein, 20 aa, Artificial Sequence
  Description of Artificial Sequence: Synthetic peptide
  Seed: GNEKKAKLANVVRKMMTNSQ
GNEKKAKWANIVKKMATNSQ

SEQ ID NO: 193881 - protein, 20 aa, Artificial Sequence
  Description of Artificial Sequence: Synthetic peptide
  Seed: GNEKKAKLANVVRKMMTNSQ
GNEKKAKWANIVKKMSTNSQ

SEQ ID NO: 193882 - protein, 20 aa, Artificial Sequence
  Description of Artificial Sequence: Synthetic peptide
  Seed: GNEKKAKLANVVRKMMTNSQ
GNEKKAKWANIVRKMATNSQ

SEQ ID NO: 193883 - protein, 20 aa, Artificial Sequence
  Description of Artificial Sequence: Synthetic peptide
  Seed: GNEKKAKLANVVRKMMTNSQ
GNEKKAKWANIVRKMSTNSQ

SEQ ID NO: 193884 - protein, 20 aa, Artificial Sequence
  Description of Artificial Sequence: Synthetic peptide
  Seed: GNEKKAKLANVVRKMMTNSQ
GNEKKAKWANLVKKMATNSQ

SEQ ID NO: 193885 - protein, 20 aa, Artificial Sequence
  Description of Artificial Sequence: Synthetic peptide
  Seed: GNEKKAKLANVVRKMMTNSQ
GNEKKAKWANLVKKMSTNSQ

SEQ ID NO: 193886 - protein, 20 aa, Artificial Sequence
  Description of Artificial Sequence: Synthetic peptide
  Seed: GNEKKAKLANVVRKMMTNSQ
GNEKKAKWANLVRKMATNSQ

SEQ ID NO: 193887 - protein, 20 aa, Artificial Sequence
  Description of Artificial Sequence: Synthetic peptide
  Seed: GNEKKAKLANVVRKMMTNSQ
GNEKKAKWANLVRKMSTNSQ

SEQ ID NO: 193888 - protein, 20 aa, Artificial Sequence
  Description of Artificial Sequence: Synthetic peptide
  Seed: GNEKKAKLANVVRKMMTNSQ
GNEKKAKWANMVKKMATNSQ

SEQ ID NO: 193889 - protein, 20 aa, Artificial Sequence
  Description of Artificial Sequence: Synthetic peptide
  Seed: GNEKKAKLANVVRKMMTNSQ
GNEKKAKWANMVKKMSTNSQ

SEQ ID NO: 193890 - protein, 20 aa, Artificial Sequence
  Description of Artificial Sequence: Synthetic peptide
  Seed: GNEKKAKLANVVRKMMTNSQ
GNEKKAKWANMVRKMATNSQ

SEQ ID NO: 193891 - protein, 20 aa, Artificial Sequence
  Description of Artificial Sequence: Synthetic peptide
  Seed: GNEKKAKLANVVRKMMTNSQ
GNEKKAKWANMVRKMSTNSQ

SEQ ID NO: 193892 - protein, 20 aa, Artificial Sequence
  Description of Artificial Sequence: Synthetic peptide
  Seed: GNEKKAKLANVVRKMMTNSQ
GNEKKAKYANAVKKMATNSQ

SEQ ID NO: 193893 - protein, 20 aa, Artificial Sequence
  Description of Artificial Sequence: Synthetic peptide
  Seed: GNEKKAKLANVVRKMMTNSQ
GNEKKAKYANAVKKMSTNSQ

SEQ ID NO: 193894 - protein, 20 aa, Artificial Sequence
  Description of Artificial Sequence: Synthetic peptide
  Seed: GNEKKAKLANVVRKMMTNSQ
GNEKKAKYANAVRKMATNSQ

SEQ ID NO: 193895 - protein, 20 aa, Artificial Sequence
  Description of Artificial Sequence: Synthetic peptide
  Seed: GNEKKAKLANVVRKMMTNSQ
GNEKKAKYANAVRKMSTNSQ

SEQ ID NO: 193896 - protein, 20 aa, Artificial Sequence
  Description of Artificial Sequence: Synthetic peptide
  Seed: GNEKKAKLANVVRKMMTNSQ
GNEKKAKYANIVKKMATNSQ

SEQ ID NO: 193897 - protein, 20 aa, Artificial Sequence
  Description of Artificial Sequence: Synthetic peptide
  Seed: GNEKKAKLANVVRKMMTNSQ
GNEKKAKYANIVKKMGTNSQ

SEQ ID NO: 193898 - protein, 20 aa, Artificial Sequence
  Description of Artificial Sequence: Synthetic peptide
  Seed: GNEKKAKLANVVRKMMTNSQ
GNEKKAKYANIVKKMSTNSQ

SEQ ID NO: 193899 - protein, 20 aa, Artificial Sequence
  Description of Artificial Sequence: Synthetic peptide
  Seed: GNEKKAKLANVVRKMMTNSQ
GNEKKAKYANIVKKMTTNSQ

SEQ ID NO: 193900 - protein, 20 aa, Artificial Sequence
  Description of Artificial Sequence: Synthetic peptide
  Seed: GNEKKAKLANVVRKMMTNSQ
GNEKKAKYANIVRKMATNSQ

SEQ ID NO: 193901 - protein, 20 aa, Artificial Sequence
  Description of Artificial Sequence: Synthetic peptide
  Seed: GNEKKAKLANVVRKMMTNSQ
GNEKKAKYANIVRKMGTNSQ

SEQ ID NO: 193902 - protein, 20 aa, Artificial Sequence
  Description of Artificial Sequence: Synthetic peptide
  Seed: GNEKKAKLANVVRKMMTNSQ
GNEKKAKYANIVRKMQTNSQ

SEQ ID NO: 193903 - protein, 20 aa, Artificial Sequence
  Description of Artificial Sequence: Synthetic peptide
  Seed: GNEKKAKLANVVRKMMTNSQ
GNEKKAKYANIVRKMSTNSQ

SEQ ID NO: 193904 - protein, 20 aa, Artificial Sequence
  Description of Artificial Sequence: Synthetic peptide
  Seed: GNEKKAKLANVVRKMMTNSQ
GNEKKAKYANIVRKMTTNSQ

SEQ ID NO: 193905 - protein, 20 aa, Artificial Sequence
  Description of Artificial Sequence: Synthetic peptide
  Seed: GNEKKAKLANVVRKMMTNSQ
GNEKKAKYANIVRKMVTNSQ

SEQ ID NO: 193906 - protein, 20 aa, Artificial Sequence
  Description of Artificial Sequence: Synthetic peptide
  Seed: GNEKKAKLANVVRKMMTNSQ
GNEKKAKYANLVKKMATNSQ

SEQ ID NO: 193907 - protein, 20 aa, Artificial Sequence
  Description of Artificial Sequence: Synthetic peptide
  Seed: GNEKKAKLANVVRKMMTNSQ
GNEKKAKYANLVKKMGTNSQ

SEQ ID NO: 193908 - protein, 20 aa, Artificial Sequence
  Description of Artificial Sequence: Synthetic peptide
  Seed: GNEKKAKLANVVRKMMTNSQ
GNEKKAKYANLVKKMSTNSQ

SEQ ID NO: 193909 - protein, 20 aa, Artificial Sequence
  Description of Artificial Sequence: Synthetic peptide
  Seed: GNEKKAKLANVVRKMMTNSQ
GNEKKAKYANLVKKMTTNSQ

SEQ ID NO: 193910 - protein, 20 aa, Artificial Sequence
  Description of Artificial Sequence: Synthetic peptide
  Seed: GNEKKAKLANVVRKMMTNSQ
GNEKKAKYANLVRKMATNSQ

SEQ ID NO: 193911 - protein, 20 aa, Artificial Sequence
  Description of Artificial Sequence: Synthetic peptide
  Seed: GNEKKAKLANVVRKMMTNSQ
GNEKKAKYANLVRKMGTNSQ

SEQ ID NO: 193912 - protein, 20 aa, Artificial Sequence
  Description of Artificial Sequence: Synthetic peptide
  Seed: GNEKKAKLANVVRKMMTNSQ
GNEKKAKYANLVRKMSTNSQ

SEQ ID NO: 193913 - protein, 20 aa, Artificial Sequence
  Description of Artificial Sequence: Synthetic peptide
  Seed: GNEKKAKLANVVRKMMTNSQ
GNEKKAKYANLVRKMTTNSQ

SEQ ID NO: 193914 - protein, 20 aa, Artificial Sequence
  Description of Artificial Sequence: Synthetic peptide
  Seed: GNEKKAKLANVVRKMMTNSQ
GNEKKAKYANLVRKMVTNSQ

SEQ ID NO: 193915 - protein, 20 aa, Artificial Sequence
  Description of Artificial Sequence: Synthetic peptide
  Seed: GNEKKAKLANVVRKMMTNSQ
GNEKKAKYANMVKKMATNSQ

SEQ ID NO: 193916 - protein, 20 aa, Artificial Sequence
  Description of Artificial Sequence: Synthetic peptide
  Seed: GNEKKAKLANVVRKMMTNSQ
GNEKKAKYANMVKKMGTNSQ

SEQ ID NO: 193917 - protein, 20 aa, Artificial Sequence
  Description of Artificial Sequence: Synthetic peptide
  Seed: GNEKKAKLANVVRKMMTNSQ
GNEKKAKYANMVKKMSTNSQ

SEQ ID NO: 193918 - protein, 20 aa, Artificial Sequence
  Description of Artificial Sequence: Synthetic peptide
  Seed: GNEKKAKLANVVRKMMTNSQ
GNEKKAKYANMVKKMTTNSQ

SEQ ID NO: 193919 - protein, 20 aa, Artificial Sequence
  Description of Artificial Sequence: Synthetic peptide
  Seed: GNEKKAKLANVVRKMMTNSQ
GNEKKAKYANMVKKMVTNSQ

SEQ ID NO: 193920 - protein, 20 aa, Artificial Sequence
  Description of Artificial Sequence: Synthetic peptide
  Seed: GNEKKAKLANVVRKMMTNSQ
GNEKKAKYANMVRKMATNSQ

SEQ ID NO: 193921 - protein, 20 aa, Artificial Sequence
  Description of Artificial Sequence: Synthetic peptide
  Seed: GNEKKAKLANVVRKMMTNSQ
GNEKKAKYANMVRKMGTNSQ

SEQ ID NO: 193922 - protein, 20 aa, Artificial Sequence
  Description of Artificial Sequence: Synthetic peptide
  Seed: GNEKKAKLANVVRKMMTNSQ
GNEKKAKYANMVRKMHTNSQ

SEQ ID NO: 193923 - protein, 20 aa, Artificial Sequence
  Description of Artificial Sequence: Synthetic peptide
  Seed: GNEKKAKLANVVRKMMTNSQ
GNEKKAKYANMVRKMITNSQ

SEQ ID NO: 193924 - protein, 20 aa, Artificial Sequence
  Description of Artificial Sequence: Synthetic peptide
  Seed: GNEKKAKLANVVRKMMTNSQ
GNEKKAKYANMVRKMPTNSQ

SEQ ID NO: 193925 - protein, 20 aa, Artificial Sequence
  Description of Artificial Sequence: Synthetic peptide
  Seed: GNEKKAKLANVVRKMMTNSQ
GNEKKAKYANMVRKMQTNSQ

SEQ ID NO: 193926 - protein, 20 aa, Artificial Sequence
  Description of Artificial Sequence: Synthetic peptide
  Seed: GNEKKAKLANVVRKMMTNSQ
GNEKKAKYANMVRKMSTNSQ

SEQ ID NO: 193927 - protein, 20 aa, Artificial Sequence
  Description of Artificial Sequence: Synthetic peptide
  Seed: GNEKKAKLANVVRKMMTNSQ
GNEKKAKYANMVRKMTTNSQ

SEQ ID NO: 193928 - protein, 20 aa, Artificial Sequence
  Description of Artificial Sequence: Synthetic peptide
  Seed: GNEKKAKLANVVRKMMTNSQ
GNEKKAKYANMVRKMVTNSQ

SEQ ID NO: 193929 - protein, 20 aa, Artificial Sequence
  Description of Artificial Sequence: Synthetic peptide
  Seed: GNEKKAKLANVVRKMMTNSQ
GNEKKAKYANVVKKMATNSQ

SEQ ID NO: 193930 - protein, 20 aa, Artificial Sequence
  Description of Artificial Sequence: Synthetic peptide
  Seed: GNEKKAKLANVVRKMMTNSQ
GNEKKAKYANVVKKMSTNSQ

SEQ ID NO: 193931 - protein, 20 aa, Artificial Sequence
  Description of Artificial Sequence: Synthetic peptide
  Seed: GNEKKAKLANVVRKMMTNSQ
GNEKKAKYANVVRKMATNSQ

SEQ ID NO: 193932 - protein, 20 aa, Artificial Sequence
  Description of Artificial Sequence: Synthetic peptide
  Seed: GNEKKAKLANVVRKMMTNSQ
GNEKKAKYANVVRKMGTNSQ

SEQ ID NO: 193933 - protein, 20 aa, Artificial Sequence
  Description of Artificial Sequence: Synthetic peptide
  Seed: GNEKKAKLANVVRKMMTNSQ
GNEKKAKYANVVRKMSTNSQ

SEQ ID NO: 193934 - protein, 20 aa, Artificial Sequence
  Description of Artificial Sequence: Synthetic peptide
  Seed: GNEKKAKLANVVRKMMTNSQ
GNEKKAKYANVVRKMTTNSQ

SEQ ID NO: 193935 - protein, 15 aa, Artificial Sequence
  Description of Artificial Sequence: Synthetic peptide
  Seed: SPGMMMGMFNMLSTV
SPGMFMGAFAMLATV

SEQ ID NO: 193936 - protein, 15 aa, Artificial Sequence
  Description of Artificial Sequence: Synthetic peptide
  Seed: SPGMMMGMFNMLSTV
SPGMFMGAFAMLDTV

SEQ ID NO: 193937 - protein, 15 aa, Artificial Sequence
  Description of Artificial Sequence: Synthetic peptide
  Seed: SPGMMMGMFNMLSTV
SPGMFMGAFAMLETV

SEQ ID NO: 193938 - protein, 15 aa, Artificial Sequence
  Description of Artificial Sequence: Synthetic peptide
  Seed: SPGMMMGMFNMLSTV
SPGMFMGAFAMLGTV

SEQ ID NO: 193939 - protein, 15 aa, Artificial Sequence
  Description of Artificial Sequence: Synthetic peptide
  Seed: SPGMMMGMFNMLSTV
SPGMFMGAFAMLHTV

SEQ ID NO: 193940 - protein, 15 aa, Artificial Sequence
  Description of Artificial Sequence: Synthetic peptide
  Seed: SPGMMMGMFNMLSTV
SPGMFMGAFAMLITV

SEQ ID NO: 193941 - protein, 15 aa, Artificial Sequence
  Description of Artificial Sequence: Synthetic peptide
  Seed: SPGMMMGMFNMLSTV
SPGMFMGAFAMLKTV

SEQ ID NO: 193942 - protein, 15 aa, Artificial Sequence
  Description of Artificial Sequence: Synthetic peptide
  Seed: SPGMMMGMFNMLSTV
SPGMFMGAFAMLLTV

SEQ ID NO: 193943 - protein, 15 aa, Artificial Sequence
  Description of Artificial Sequence: Synthetic peptide
  Seed: SPGMMMGMFNMLSTV
SPGMFMGAFAMLMTV

SEQ ID NO: 193944 - protein, 15 aa, Artificial Sequence
  Description of Artificial Sequence: Synthetic peptide
  Seed: SPGMMMGMFNMLSTV
SPGMFMGAFAMLNTV

SEQ ID NO: 193945 - protein, 15 aa, Artificial Sequence
  Description of Artificial Sequence: Synthetic peptide
  Seed: SPGMMMGMFNMLSTV
SPGMFMGAFAMLQTV

SEQ ID NO: 193946 - protein, 15 aa, Artificial Sequence
  Description of Artificial Sequence: Synthetic peptide
  Seed: SPGMMMGMFNMLSTV
SPGMFMGAFAMLRTV

SEQ ID NO: 193947 - protein, 15 aa, Artificial Sequence
  Description of Artificial Sequence: Synthetic peptide
  Seed: SPGMMMGMFNMLSTV
SPGMFMGAFAMLSTV

SEQ ID NO: 193948 - protein, 15 aa, Artificial Sequence
  Description of Artificial Sequence: Synthetic peptide
  Seed: SPGMMMGMFNMLSTV
SPGMFMGAFAMLTTV

SEQ ID NO: 193949 - protein, 15 aa, Artificial Sequence
  Description of Artificial Sequence: Synthetic peptide
  Seed: SPGMMMGMFNMLSTV
SPGMFMGAFAMLVTV

SEQ ID NO: 193950 - protein, 15 aa, Artificial Sequence
  Description of Artificial Sequence: Synthetic peptide
  Seed: SPGMMMGMFNMLSTV
SPGMFMGAFGMLATV

SEQ ID NO: 193951 - protein, 15 aa, Artificial Sequence
  Description of Artificial Sequence: Synthetic peptide
  Seed: SPGMMMGMFNMLSTV
SPGMFMGAFGMLITV

SEQ ID NO: 193952 - protein, 15 aa, Artificial Sequence
  Description of Artificial Sequence: Synthetic peptide
  Seed: SPGMMMGMFNMLSTV
SPGMFMGAFGMLLTV

SEQ ID NO: 193953 - protein, 15 aa, Artificial Sequence
  Description of Artificial Sequence: Synthetic peptide
  Seed: SPGMMMGMFNMLSTV
SPGMFMGAFGMLMTV

SEQ ID NO: 193954 - protein, 15 aa, Artificial Sequence
  Description of Artificial Sequence: Synthetic peptide
  Seed: SPGMMMGMFNMLSTV
SPGMFMGAFGMLNTV

SEQ ID NO: 193955 - protein, 15 aa, Artificial Sequence
  Description of Artificial Sequence: Synthetic peptide
  Seed: SPGMMMGMFNMLSTV
SPGMFMGAFGMLSTV

SEQ ID NO: 193956 - protein, 15 aa, Artificial Sequence
  Description of Artificial Sequence: Synthetic peptide
  Seed: SPGMMMGMFNMLSTV
SPGMFMGAFGMLTTV

SEQ ID NO: 193957 - protein, 15 aa, Artificial Sequence
  Description of Artificial Sequence: Synthetic peptide
  Seed: SPGMMMGMFNMLSTV
SPGMFMGAFGMLVTV

SEQ ID NO: 193958 - protein, 15 aa, Artificial Sequence
  Description of Artificial Sequence: Synthetic peptide
  Seed: SPGMMMGMFNMLSTV
SPGMFMGAFIMLNTV

SEQ ID NO: 193959 - protein, 15 aa, Artificial Sequence
  Description of Artificial Sequence: Synthetic peptide
  Seed: SPGMMMGMFNMLSTV
SPGMFMGAFKMLSTV

SEQ ID NO: 193960 - protein, 15 aa, Artificial Sequence
  Description of Artificial Sequence: Synthetic peptide
  Seed: SPGMMMGMFNMLSTV
SPGMFMGAFNMLATV

SEQ ID NO: 193961 - protein, 15 aa, Artificial Sequence
  Description of Artificial Sequence: Synthetic peptide
  Seed: SPGMMMGMFNMLSTV
SPGMFMGAFNMLDTV

SEQ ID NO: 193962 - protein, 15 aa, Artificial Sequence
  Description of Artificial Sequence: Synthetic peptide
  Seed: SPGMMMGMFNMLSTV
SPGMFMGAFNMLNTV

SEQ ID NO: 193963 - protein, 15 aa, Artificial Sequence
  Description of Artificial Sequence: Synthetic peptide
  Seed: SPGMMMGMFNMLSTV
SPGMFMGAFNMLSTV

SEQ ID NO: 193964 - protein, 15 aa, Artificial Sequence
  Description of Artificial Sequence: Synthetic peptide
  Seed: SPGMMMGMFNMLSTV
SPGMFMGAFNMLVTV

SEQ ID NO: 193965 - protein, 15 aa, Artificial Sequence
  Description of Artificial Sequence: Synthetic peptide
  Seed: SPGMMMGMFNMLSTV
SPGMFMGAFPMLATV

SEQ ID NO: 193966 - protein, 15 aa, Artificial Sequence
  Description of Artificial Sequence: Synthetic peptide
  Seed: SPGMMMGMFNMLSTV
SPGMFMGAFPMLGTV

SEQ ID NO: 193967 - protein, 15 aa, Artificial Sequence
  Description of Artificial Sequence: Synthetic peptide
  Seed: SPGMMMGMFNMLSTV
SPGMFMGAFPMLHTV

SEQ ID NO: 193968 - protein, 15 aa, Artificial Sequence
  Description of Artificial Sequence: Synthetic peptide
  Seed: SPGMMMGMFNMLSTV
SPGMFMGAFPMLITV

SEQ ID NO: 193969 - protein, 15 aa, Artificial Sequence
  Description of Artificial Sequence: Synthetic peptide
  Seed: SPGMMMGMFNMLSTV
SPGMFMGAFPMLKTV

SEQ ID NO: 193970 - protein, 15 aa, Artificial Sequence
  Description of Artificial Sequence: Synthetic peptide
  Seed: SPGMMMGMFNMLSTV
SPGMFMGAFPMLLTV

SEQ ID NO: 193971 - protein, 15 aa, Artificial Sequence
  Description of Artificial Sequence: Synthetic peptide
  Seed: SPGMMMGMFNMLSTV
SPGMFMGAFPMLMTV

SEQ ID NO: 193972 - protein, 15 aa, Artificial Sequence
  Description of Artificial Sequence: Synthetic peptide
  Seed: SPGMMMGMFNMLSTV
SPGMFMGAFPMLNTV

SEQ ID NO: 193973 - protein, 15 aa, Artificial Sequence
  Description of Artificial Sequence: Synthetic peptide
  Seed: SPGMMMGMFNMLSTV
SPGMFMGAFPMLQTV

SEQ ID NO: 193974 - protein, 15 aa, Artificial Sequence
  Description of Artificial Sequence: Synthetic peptide
  Seed: SPGMMMGMFNMLSTV
SPGMFMGAFPMLRTV

SEQ ID NO: 193975 - protein, 15 aa, Artificial Sequence
  Description of Artificial Sequence: Synthetic peptide
  Seed: SPGMMMGMFNMLSTV
SPGMFMGAFPMLSTV

SEQ ID NO: 193976 - protein, 15 aa, Artificial Sequence
  Description of Artificial Sequence: Synthetic peptide
  Seed: SPGMMMGMFNMLSTV
SPGMFMGAFPMLTTV

SEQ ID NO: 193977 - protein, 15 aa, Artificial Sequence
  Description of Artificial Sequence: Synthetic peptide
  Seed: SPGMMMGMFNMLSTV
SPGMFMGAFPMLVTV

SEQ ID NO: 193978 - protein, 15 aa, Artificial Sequence
  Description of Artificial Sequence: Synthetic peptide
  Seed: SPGMMMGMFNMLSTV
SPGMFMGAFPMLYTV

SEQ ID NO: 193979 - protein, 15 aa, Artificial Sequence
  Description of Artificial Sequence: Synthetic peptide
  Seed: SPGMMMGMFNMLSTV
SPGMFMGAFSMLATV

SEQ ID NO: 193980 - protein, 15 aa, Artificial Sequence
  Description of Artificial Sequence: Synthetic peptide
  Seed: SPGMMMGMFNMLSTV
SPGMFMGAFSMLDTV

SEQ ID NO: 193981 - protein, 15 aa, Artificial Sequence
  Description of Artificial Sequence: Synthetic peptide
  Seed: SPGMMMGMFNMLSTV
SPGMFMGAFSMLGTV

SEQ ID NO: 193982 - protein, 15 aa, Artificial Sequence
  Description of Artificial Sequence: Synthetic peptide
  Seed: SPGMMMGMFNMLSTV
SPGMFMGAFSMLHTV

SEQ ID NO: 193983 - protein, 15 aa, Artificial Sequence
  Description of Artificial Sequence: Synthetic peptide
  Seed: SPGMMMGMFNMLSTV
SPGMFMGAFSMLITV

SEQ ID NO: 193984 - protein, 15 aa, Artificial Sequence
  Description of Artificial Sequence: Synthetic peptide
  Seed: SPGMMMGMFNMLSTV
SPGMFMGAFSMLLTV

SEQ ID NO: 193985 - protein, 15 aa, Artificial Sequence
  Description of Artificial Sequence: Synthetic peptide
  Seed: SPGMMMGMFNMLSTV
SPGMFMGAFSMLNTV

SEQ ID NO: 193986 - protein, 15 aa, Artificial Sequence
  Description of Artificial Sequence: Synthetic peptide
  Seed: SPGMMMGMFNMLSTV
SPGMFMGAFSMLSTV

SEQ ID NO: 193987 - protein, 15 aa, Artificial Sequence
  Description of Artificial Sequence: Synthetic peptide
  Seed: SPGMMMGMFNMLSTV
SPGMFMGAFSMLTTV

SEQ ID NO: 193988 - protein, 15 aa, Artificial Sequence
  Description of Artificial Sequence: Synthetic peptide
  Seed: SPGMMMGMFNMLSTV
SPGMFMGAFSMLVTV

SEQ ID NO: 193989 - protein, 15 aa, Artificial Sequence
  Description of Artificial Sequence: Synthetic peptide
  Seed: SPGMMMGMFNMLSTV
SPGMFMGAFTMLATV

SEQ ID NO: 193990 - protein, 15 aa, Artificial Sequence
  Description of Artificial Sequence: Synthetic peptide
  Seed: SPGMMMGMFNMLSTV
SPGMFMGAFTMLDTV

SEQ ID NO: 193991 - protein, 15 aa, Artificial Sequence
  Description of Artificial Sequence: Synthetic peptide
  Seed: SPGMMMGMFNMLSTV
SPGMFMGAFTMLGTV

SEQ ID NO: 193992 - protein, 15 aa, Artificial Sequence
  Description of Artificial Sequence: Synthetic peptide
  Seed: SPGMMMGMFNMLSTV
SPGMFMGAFTMLHTV

SEQ ID NO: 193993 - protein, 15 aa, Artificial Sequence
  Description of Artificial Sequence: Synthetic peptide
  Seed: SPGMMMGMFNMLSTV
SPGMFMGAFTMLNTV

SEQ ID NO: 193994 - protein, 15 aa, Artificial Sequence
  Description of Artificial Sequence: Synthetic peptide
  Seed: SPGMMMGMFNMLSTV
SPGMFMGAFTMLSTV

SEQ ID NO: 193995 - protein, 15 aa, Artificial Sequence
  Description of Artificial Sequence: Synthetic peptide
  Seed: SPGMMMGMFNMLSTV
SPGMFMGAFTMLTTV

SEQ ID NO: 193996 - protein, 15 aa, Artificial Sequence
  Description of Artificial Sequence: Synthetic peptide
  Seed: SPGMMMGMFNMLSTV
SPGMFMGAFTMLVTV

SEQ ID NO: 193997 - protein, 15 aa, Artificial Sequence
  Description of Artificial Sequence: Synthetic peptide
  Seed: SPGMMMGMFNMLSTV
SPGMFMGAFVMLHTV

SEQ ID NO: 193998 - protein, 15 aa, Artificial Sequence
  Description of Artificial Sequence: Synthetic peptide
  Seed: SPGMMMGMFNMLSTV
SPGMFMGAFVMLNTV

SEQ ID NO: 193999 - protein, 15 aa, Artificial Sequence
  Description of Artificial Sequence: Synthetic peptide
  Seed: SPGMMMGMFNMLSTV
SPGMFMGDFNMLATV

SEQ ID NO: 194000 - protein, 15 aa, Artificial Sequence
  Description of Artificial Sequence: Synthetic peptide
  Seed: SPGMMMGMFNMLSTV
SPGMFMGEFAMLATV

SEQ ID NO: 194001 - protein, 15 aa, Artificial Sequence
  Description of Artificial Sequence: Synthetic peptide
  Seed: SPGMMMGMFNMLSTV
SPGMFMGEFAMLHTV

SEQ ID NO: 194002 - protein, 15 aa, Artificial Sequence
  Description of Artificial Sequence: Synthetic peptide
  Seed: SPGMMMGMFNMLSTV
SPGMFMGEFAMLLTV

SEQ ID NO: 194003 - protein, 15 aa, Artificial Sequence
  Description of Artificial Sequence: Synthetic peptide
  Seed: SPGMMMGMFNMLSTV
SPGMFMGEFAMLNTV

SEQ ID NO: 194004 - protein, 15 aa, Artificial Sequence
  Description of Artificial Sequence: Synthetic peptide
  Seed: SPGMMMGMFNMLSTV
SPGMFMGEFAMLSTV

SEQ ID NO: 194005 - protein, 15 aa, Artificial Sequence
  Description of Artificial Sequence: Synthetic peptide
  Seed: SPGMMMGMFNMLSTV
SPGMFMGEFAMLTTV

SEQ ID NO: 194006 - protein, 15 aa, Artificial Sequence
  Description of Artificial Sequence: Synthetic peptide
  Seed: SPGMMMGMFNMLSTV
SPGMFMGEFAMLVTV

SEQ ID NO: 194007 - protein, 15 aa, Artificial Sequence
  Description of Artificial Sequence: Synthetic peptide
  Seed: SPGMMMGMFNMLSTV
SPGMFMGEFPMLATV

SEQ ID NO: 194008 - protein, 15 aa, Artificial Sequence
  Description of Artificial Sequence: Synthetic peptide
  Seed: SPGMMMGMFNMLSTV
SPGMFMGEFPMLITV

SEQ ID NO: 194009 - protein, 15 aa, Artificial Sequence
  Description of Artificial Sequence: Synthetic peptide
  Seed: SPGMMMGMFNMLSTV
SPGMFMGEFPMLNTV

SEQ ID NO: 194010 - protein, 15 aa, Artificial Sequence
  Description of Artificial Sequence: Synthetic peptide
  Seed: SPGMMMGMFNMLSTV
SPGMFMGEFPMLSTV

SEQ ID NO: 194011 - protein, 15 aa, Artificial Sequence
  Description of Artificial Sequence: Synthetic peptide
  Seed: SPGMMMGMFNMLSTV
SPGMFMGEFPMLVTV

SEQ ID NO: 194012 - protein, 15 aa, Artificial Sequence
  Description of Artificial Sequence: Synthetic peptide
  Seed: SPGMMMGMFNMLSTV
SPGMFMGEFSMLNTV

SEQ ID NO: 194013 - protein, 15 aa, Artificial Sequence
  Description of Artificial Sequence: Synthetic peptide
  Seed: SPGMMMGMFNMLSTV
SPGMFMGEFTMLNTV

SEQ ID NO: 194014 - protein, 15 aa, Artificial Sequence
  Description of Artificial Sequence: Synthetic peptide
  Seed: SPGMMMGMFNMLSTV
SPGMFMGFFPMLATV

SEQ ID NO: 194015 - protein, 15 aa, Artificial Sequence
  Description of Artificial Sequence: Synthetic peptide
  Seed: SPGMMMGMFNMLSTV
SPGMFMGFFPMLHTV

SEQ ID NO: 194016 - protein, 15 aa, Artificial Sequence
  Description of Artificial Sequence: Synthetic peptide
  Seed: SPGMMMGMFNMLSTV
SPGMFMGFFPMLNTV

SEQ ID NO: 194017 - protein, 15 aa, Artificial Sequence
  Description of Artificial Sequence: Synthetic peptide
  Seed: SPGMMMGMFNMLSTV
SPGMFMGFFPMLSTV

SEQ ID NO: 194018 - protein, 15 aa, Artificial Sequence
  Description of Artificial Sequence: Synthetic peptide
  Seed: SPGMMMGMFNMLSTV
SPGMFMGGFAMLATV

SEQ ID NO: 194019 - protein, 15 aa, Artificial Sequence
  Description of Artificial Sequence: Synthetic peptide
  Seed: SPGMMMGMFNMLSTV
SPGMFMGGFAMLITV

SEQ ID NO: 194020 - protein, 15 aa, Artificial Sequence
  Description of Artificial Sequence: Synthetic peptide
  Seed: SPGMMMGMFNMLSTV
SPGMFMGGFAMLLTV

SEQ ID NO: 194021 - protein, 15 aa, Artificial Sequence
  Description of Artificial Sequence: Synthetic peptide
  Seed: SPGMMMGMFNMLSTV
SPGMFMGGFAMLMTV

SEQ ID NO: 194022 - protein, 15 aa, Artificial Sequence
  Description of Artificial Sequence: Synthetic peptide
  Seed: SPGMMMGMFNMLSTV
SPGMFMGGFAMLSTV

SEQ ID NO: 194023 - protein, 15 aa, Artificial Sequence
  Description of Artificial Sequence: Synthetic peptide
  Seed: SPGMMMGMFNMLSTV
SPGMFMGGFAMLVTV

SEQ ID NO: 194024 - protein, 15 aa, Artificial Sequence
  Description of Artificial Sequence: Synthetic peptide
  Seed: SPGMMMGMFNMLSTV
SPGMFMGGFPMLATV

SEQ ID NO: 194025 - protein, 15 aa, Artificial Sequence
  Description of Artificial Sequence: Synthetic peptide
  Seed: SPGMMMGMFNMLSTV
SPGMFMGGFPMLITV

SEQ ID NO: 194026 - protein, 15 aa, Artificial Sequence
  Description of Artificial Sequence: Synthetic peptide
  Seed: SPGMMMGMFNMLSTV
SPGMFMGGFPMLLTV

SEQ ID NO: 194027 - protein, 15 aa, Artificial Sequence
  Description of Artificial Sequence: Synthetic peptide
  Seed: SPGMMMGMFNMLSTV
SPGMFMGGFPMLMTV

SEQ ID NO: 194028 - protein, 15 aa, Artificial Sequence
  Description of Artificial Sequence: Synthetic peptide
  Seed: SPGMMMGMFNMLSTV
SPGMFMGGFPMLVTV

SEQ ID NO: 194029 - protein, 15 aa, Artificial Sequence
  Description of Artificial Sequence: Synthetic peptide
  Seed: SPGMMMGMFNMLSTV
SPGMFMGGFSMLVTV

SEQ ID NO: 194030 - protein, 15 aa, Artificial Sequence
  Description of Artificial Sequence: Synthetic peptide
  Seed: SPGMMMGMFNMLSTV
SPGMFMGHFAMLATV

SEQ ID NO: 194031 - protein, 15 aa, Artificial Sequence
  Description of Artificial Sequence: Synthetic peptide
  Seed: SPGMMMGMFNMLSTV
SPGMFMGHFAMLITV

SEQ ID NO: 194032 - protein, 15 aa, Artificial Sequence
  Description of Artificial Sequence: Synthetic peptide
  Seed: SPGMMMGMFNMLSTV
SPGMFMGHFAMLLTV

SEQ ID NO: 194033 - protein, 15 aa, Artificial Sequence
  Description of Artificial Sequence: Synthetic peptide
  Seed: SPGMMMGMFNMLSTV
SPGMFMGHFAMLMTV

SEQ ID NO: 194034 - protein, 15 aa, Artificial Sequence
  Description of Artificial Sequence: Synthetic peptide
  Seed: SPGMMMGMFNMLSTV
SPGMFMGHFAMLNTV

SEQ ID NO: 194035 - protein, 15 aa, Artificial Sequence
  Description of Artificial Sequence: Synthetic peptide
  Seed: SPGMMMGMFNMLSTV
SPGMFMGHFAMLVTV

SEQ ID NO: 194036 - protein, 15 aa, Artificial Sequence
  Description of Artificial Sequence: Synthetic peptide
  Seed: SPGMMMGMFNMLSTV
SPGMFMGHFPMLVTV

SEQ ID NO: 194037 - protein, 15 aa, Artificial Sequence
  Description of Artificial Sequence: Synthetic peptide
  Seed: SPGMMMGMFNMLSTV
SPGMFMGIFAMLDTV

SEQ ID NO: 194038 - protein, 15 aa, Artificial Sequence
  Description of Artificial Sequence: Synthetic peptide
  Seed: SPGMMMGMFNMLSTV
SPGMFMGIFAMLHTV

SEQ ID NO: 194039 - protein, 15 aa, Artificial Sequence
  Description of Artificial Sequence: Synthetic peptide
  Seed: SPGMMMGMFNMLSTV
SPGMFMGIFAMLNTV

SEQ ID NO: 194040 - protein, 15 aa, Artificial Sequence
  Description of Artificial Sequence: Synthetic peptide
  Seed: SPGMMMGMFNMLSTV
SPGMFMGIFDMLDTV

SEQ ID NO: 194041 - protein, 15 aa, Artificial Sequence
  Description of Artificial Sequence: Synthetic peptide
  Seed: SPGMMMGMFNMLSTV
SPGMFMGIFGMLNTV

SEQ ID NO: 194042 - protein, 15 aa, Artificial Sequence
  Description of Artificial Sequence: Synthetic peptide
  Seed: SPGMMMGMFNMLSTV
SPGMFMGIFKMLHTV

SEQ ID NO: 194043 - protein, 15 aa, Artificial Sequence
  Description of Artificial Sequence: Synthetic peptide
  Seed: SPGMMMGMFNMLSTV
SPGMFMGIFNMLDTV

SEQ ID NO: 194044 - protein, 15 aa, Artificial Sequence
  Description of Artificial Sequence: Synthetic peptide
  Seed: SPGMMMGMFNMLSTV
SPGMFMGIFNMLETV

SEQ ID NO: 194045 - protein, 15 aa, Artificial Sequence
  Description of Artificial Sequence: Synthetic peptide
  Seed: SPGMMMGMFNMLSTV
SPGMFMGIFNMLNTV

SEQ ID NO: 194046 - protein, 15 aa, Artificial Sequence
  Description of Artificial Sequence: Synthetic peptide
  Seed: SPGMMMGMFNMLSTV
SPGMFMGIFPMLATV

SEQ ID NO: 194047 - protein, 15 aa, Artificial Sequence
  Description of Artificial Sequence: Synthetic peptide
  Seed: SPGMMMGMFNMLSTV
SPGMFMGIFPMLDTV

SEQ ID NO: 194048 - protein, 15 aa, Artificial Sequence
  Description of Artificial Sequence: Synthetic peptide
  Seed: SPGMMMGMFNMLSTV
SPGMFMGIFPMLGTV

SEQ ID NO: 194049 - protein, 15 aa, Artificial Sequence
  Description of Artificial Sequence: Synthetic peptide
  Seed: SPGMMMGMFNMLSTV
SPGMFMGIFPMLHTV

SEQ ID NO: 194050 - protein, 15 aa, Artificial Sequence
  Description of Artificial Sequence: Synthetic peptide
  Seed: SPGMMMGMFNMLSTV
SPGMFMGIFPMLITV

SEQ ID NO: 194051 - protein, 15 aa, Artificial Sequence
  Description of Artificial Sequence: Synthetic peptide
  Seed: SPGMMMGMFNMLSTV
SPGMFMGIFPMLLTV

SEQ ID NO: 194052 - protein, 15 aa, Artificial Sequence
  Description of Artificial Sequence: Synthetic peptide
  Seed: SPGMMMGMFNMLSTV
SPGMFMGIFPMLMTV

SEQ ID NO: 194053 - protein, 15 aa, Artificial Sequence
  Description of Artificial Sequence: Synthetic peptide
  Seed: SPGMMMGMFNMLSTV
SPGMFMGIFPMLNTV

SEQ ID NO: 194054 - protein, 15 aa, Artificial Sequence
  Description of Artificial Sequence: Synthetic peptide
  Seed: SPGMMMGMFNMLSTV
SPGMFMGIFPMLQTV

SEQ ID NO: 194055 - protein, 15 aa, Artificial Sequence
  Description of Artificial Sequence: Synthetic peptide
  Seed: SPGMMMGMFNMLSTV
SPGMFMGIFPMLSTV

SEQ ID NO: 194056 - protein, 15 aa, Artificial Sequence
  Description of Artificial Sequence: Synthetic peptide
  Seed: SPGMMMGMFNMLSTV
SPGMFMGIFPMLTTV

SEQ ID NO: 194057 - protein, 15 aa, Artificial Sequence
  Description of Artificial Sequence: Synthetic peptide
  Seed: SPGMMMGMFNMLSTV
SPGMFMGIFPMLVTV

SEQ ID NO: 194058 - protein, 15 aa, Artificial Sequence
  Description of Artificial Sequence: Synthetic peptide
  Seed: SPGMMMGMFNMLSTV
SPGMFMGIFRMLHTV

SEQ ID NO: 194059 - protein, 15 aa, Artificial Sequence
  Description of Artificial Sequence: Synthetic peptide
  Seed: SPGMMMGMFNMLSTV
SPGMFMGIFSMLDTV

SEQ ID NO: 194060 - protein, 15 aa, Artificial Sequence
  Description of Artificial Sequence: Synthetic peptide
  Seed: SPGMMMGMFNMLSTV
SPGMFMGIFSMLHTV

SEQ ID NO: 194061 - protein, 15 aa, Artificial Sequence
  Description of Artificial Sequence: Synthetic peptide
  Seed: SPGMMMGMFNMLSTV
SPGMFMGIFSMLNTV

SEQ ID NO: 194062 - protein, 15 aa, Artificial Sequence
  Description of Artificial Sequence: Synthetic peptide
  Seed: SPGMMMGMFNMLSTV
SPGMFMGIFTMLDTV

SEQ ID NO: 194063 - protein, 15 aa, Artificial Sequence
  Description of Artificial Sequence: Synthetic peptide
  Seed: SPGMMMGMFNMLSTV
SPGMFMGIFTMLETV

SEQ ID NO: 194064 - protein, 15 aa, Artificial Sequence
  Description of Artificial Sequence: Synthetic peptide
  Seed: SPGMMMGMFNMLSTV
SPGMFMGIFTMLHTV

SEQ ID NO: 194065 - protein, 15 aa, Artificial Sequence
  Description of Artificial Sequence: Synthetic peptide
  Seed: SPGMMMGMFNMLSTV
SPGMFMGIFTMLNTV

SEQ ID NO: 194066 - protein, 15 aa, Artificial Sequence
  Description of Artificial Sequence: Synthetic peptide
  Seed: SPGMMMGMFNMLSTV
SPGMFMGLFAMLDTV

SEQ ID NO: 194067 - protein, 15 aa, Artificial Sequence
  Description of Artificial Sequence: Synthetic peptide
  Seed: SPGMMMGMFNMLSTV
SPGMFMGLFAMLETV

SEQ ID NO: 194068 - protein, 15 aa, Artificial Sequence
  Description of Artificial Sequence: Synthetic peptide
  Seed: SPGMMMGMFNMLSTV
SPGMFMGLFAMLHTV

SEQ ID NO: 194069 - protein, 15 aa, Artificial Sequence
  Description of Artificial Sequence: Synthetic peptide
  Seed: SPGMMMGMFNMLSTV
SPGMFMGLFAMLNTV

SEQ ID NO: 194070 - protein, 15 aa, Artificial Sequence
  Description of Artificial Sequence: Synthetic peptide
  Seed: SPGMMMGMFNMLSTV
SPGMFMGLFDMLDTV

SEQ ID NO: 194071 - protein, 15 aa, Artificial Sequence
  Description of Artificial Sequence: Synthetic peptide
  Seed: SPGMMMGMFNMLSTV
SPGMFMGLFGMLATV

SEQ ID NO: 194072 - protein, 15 aa, Artificial Sequence
  Description of Artificial Sequence: Synthetic peptide
  Seed: SPGMMMGMFNMLSTV
SPGMFMGLFGMLHTV

SEQ ID NO: 194073 - protein, 15 aa, Artificial Sequence
  Description of Artificial Sequence: Synthetic peptide
  Seed: SPGMMMGMFNMLSTV
SPGMFMGLFGMLNTV

SEQ ID NO: 194074 - protein, 15 aa, Artificial Sequence
  Description of Artificial Sequence: Synthetic peptide
  Seed: SPGMMMGMFNMLSTV
SPGMFMGLFGMLSTV

SEQ ID NO: 194075 - protein, 15 aa, Artificial Sequence
  Description of Artificial Sequence: Synthetic peptide
  Seed: SPGMMMGMFNMLSTV
SPGMFMGLFGMLTTV

SEQ ID NO: 194076 - protein, 15 aa, Artificial Sequence
  Description of Artificial Sequence: Synthetic peptide
  Seed: SPGMMMGMFNMLSTV
SPGMFMGLFGMLVTV

SEQ ID NO: 194077 - protein, 15 aa, Artificial Sequence
  Description of Artificial Sequence: Synthetic peptide
  Seed: SPGMMMGMFNMLSTV
SPGMFMGLFKMLHTV

SEQ ID NO: 194078 - protein, 15 aa, Artificial Sequence
  Description of Artificial Sequence: Synthetic peptide
  Seed: SPGMMMGMFNMLSTV
SPGMFMGLFKMLRTV

SEQ ID NO: 194079 - protein, 15 aa, Artificial Sequence
  Description of Artificial Sequence: Synthetic peptide
  Seed: SPGMMMGMFNMLSTV
SPGMFMGLFNMLATV

SEQ ID NO: 194080 - protein, 15 aa, Artificial Sequence
  Description of Artificial Sequence: Synthetic peptide
  Seed: SPGMMMGMFNMLSTV
SPGMFMGLFNMLDTV

SEQ ID NO: 194081 - protein, 15 aa, Artificial Sequence
  Description of Artificial Sequence: Synthetic peptide
  Seed: SPGMMMGMFNMLSTV
SPGMFMGLFNMLETV

SEQ ID NO: 194082 - protein, 15 aa, Artificial Sequence
  Description of Artificial Sequence: Synthetic peptide
  Seed: SPGMMMGMFNMLSTV
SPGMFMGLFNMLHTV

SEQ ID NO: 194083 - protein, 15 aa, Artificial Sequence
  Description of Artificial Sequence: Synthetic peptide
  Seed: SPGMMMGMFNMLSTV
SPGMFMGLFNMLNTV

SEQ ID NO: 194084 - protein, 15 aa, Artificial Sequence
  Description of Artificial Sequence: Synthetic peptide
  Seed: SPGMMMGMFNMLSTV
SPGMFMGLFNMLSTV

SEQ ID NO: 194085 - protein, 15 aa, Artificial Sequence
  Description of Artificial Sequence: Synthetic peptide
  Seed: SPGMMMGMFNMLSTV
SPGMFMGLFPMLATV

SEQ ID NO: 194086 - protein, 15 aa, Artificial Sequence
  Description of Artificial Sequence: Synthetic peptide
  Seed: SPGMMMGMFNMLSTV
SPGMFMGLFPMLDTV

SEQ ID NO: 194087 - protein, 15 aa, Artificial Sequence
  Description of Artificial Sequence: Synthetic peptide
  Seed: SPGMMMGMFNMLSTV
SPGMFMGLFPMLETV

SEQ ID NO: 194088 - protein, 15 aa, Artificial Sequence
  Description of Artificial Sequence: Synthetic peptide
  Seed: SPGMMMGMFNMLSTV
SPGMFMGLFPMLGTV

SEQ ID NO: 194089 - protein, 15 aa, Artificial Sequence
  Description of Artificial Sequence: Synthetic peptide
  Seed: SPGMMMGMFNMLSTV
SPGMFMGLFPMLHTV

SEQ ID NO: 194090 - protein, 15 aa, Artificial Sequence
  Description of Artificial Sequence: Synthetic peptide
  Seed: SPGMMMGMFNMLSTV
SPGMFMGLFPMLITV

SEQ ID NO: 194091 - protein, 15 aa, Artificial Sequence
  Description of Artificial Sequence: Synthetic peptide
  Seed: SPGMMMGMFNMLSTV
SPGMFMGLFPMLKTV

SEQ ID NO: 194092 - protein, 15 aa, Artificial Sequence
  Description of Artificial Sequence: Synthetic peptide
  Seed: SPGMMMGMFNMLSTV
SPGMFMGLFPMLLTV

SEQ ID NO: 194093 - protein, 15 aa, Artificial Sequence
  Description of Artificial Sequence: Synthetic peptide
  Seed: SPGMMMGMFNMLSTV
SPGMFMGLFPMLMTV

SEQ ID NO: 194094 - protein, 15 aa, Artificial Sequence
  Description of Artificial Sequence: Synthetic peptide
  Seed: SPGMMMGMFNMLSTV
SPGMFMGLFPMLNTV

SEQ ID NO: 194095 - protein, 15 aa, Artificial Sequence
  Description of Artificial Sequence: Synthetic peptide
  Seed: SPGMMMGMFNMLSTV
SPGMFMGLFPMLPTV

SEQ ID NO: 194096 - protein, 15 aa, Artificial Sequence
  Description of Artificial Sequence: Synthetic peptide
  Seed: SPGMMMGMFNMLSTV
SPGMFMGLFPMLQTV

SEQ ID NO: 194097 - protein, 15 aa, Artificial Sequence
  Description of Artificial Sequence: Synthetic peptide
  Seed: SPGMMMGMFNMLSTV
SPGMFMGLFPMLSTV

SEQ ID NO: 194098 - protein, 15 aa, Artificial Sequence
  Description of Artificial Sequence: Synthetic peptide
  Seed: SPGMMMGMFNMLSTV
SPGMFMGLFPMLTTV

SEQ ID NO: 194099 - protein, 15 aa, Artificial Sequence
  Description of Artificial Sequence: Synthetic peptide
  Seed: SPGMMMGMFNMLSTV
SPGMFMGLFPMLVTV

SEQ ID NO: 194100 - protein, 15 aa, Artificial Sequence
  Description of Artificial Sequence: Synthetic peptide
  Seed: SPGMMMGMFNMLSTV
SPGMFMGLFRMLHTV

SEQ ID NO: 194101 - protein, 15 aa, Artificial Sequence
  Description of Artificial Sequence: Synthetic peptide
  Seed: SPGMMMGMFNMLSTV
SPGMFMGLFSMLATV

SEQ ID NO: 194102 - protein, 15 aa, Artificial Sequence
  Description of Artificial Sequence: Synthetic peptide
  Seed: SPGMMMGMFNMLSTV
SPGMFMGLFSMLDTV

SEQ ID NO: 194103 - protein, 15 aa, Artificial Sequence
  Description of Artificial Sequence: Synthetic peptide
  Seed: SPGMMMGMFNMLSTV
SPGMFMGLFSMLHTV

SEQ ID NO: 194104 - protein, 15 aa, Artificial Sequence
  Description of Artificial Sequence: Synthetic peptide
  Seed: SPGMMMGMFNMLSTV
SPGMFMGLFSMLNTV

SEQ ID NO: 194105 - protein, 15 aa, Artificial Sequence
  Description of Artificial Sequence: Synthetic peptide
  Seed: SPGMMMGMFNMLSTV
SPGMFMGLFTMLDTV

SEQ ID NO: 194106 - protein, 15 aa, Artificial Sequence
  Description of Artificial Sequence: Synthetic peptide
  Seed: SPGMMMGMFNMLSTV
SPGMFMGLFTMLHTV

SEQ ID NO: 194107 - protein, 15 aa, Artificial Sequence
  Description of Artificial Sequence: Synthetic peptide
  Seed: SPGMMMGMFNMLSTV
SPGMFMGLFTMLNTV

SEQ ID NO: 194108 - protein, 15 aa, Artificial Sequence
  Description of Artificial Sequence: Synthetic peptide
  Seed: SPGMMMGMFNMLSTV
SPGMFMGLFTMLSTV

SEQ ID NO: 194109 - protein, 15 aa, Artificial Sequence
  Description of Artificial Sequence: Synthetic peptide
  Seed: SPGMMMGMFNMLSTV
SPGMFMGMFAMLATV

SEQ ID NO: 194110 - protein, 15 aa, Artificial Sequence
  Description of Artificial Sequence: Synthetic peptide
  Seed: SPGMMMGMFNMLSTV
SPGMFMGMFAMLDTV

SEQ ID NO: 194111 - protein, 15 aa, Artificial Sequence
  Description of Artificial Sequence: Synthetic peptide
  Seed: SPGMMMGMFNMLSTV
SPGMFMGMFAMLETV

SEQ ID NO: 194112 - protein, 15 aa, Artificial Sequence
  Description of Artificial Sequence: Synthetic peptide
  Seed: SPGMMMGMFNMLSTV
SPGMFMGMFAMLGTV

SEQ ID NO: 194113 - protein, 15 aa, Artificial Sequence
  Description of Artificial Sequence: Synthetic peptide
  Seed: SPGMMMGMFNMLSTV
SPGMFMGMFAMLHTV

SEQ ID NO: 194114 - protein, 15 aa, Artificial Sequence
  Description of Artificial Sequence: Synthetic peptide
  Seed: SPGMMMGMFNMLSTV
SPGMFMGMFAMLKTV

SEQ ID NO: 194115 - protein, 15 aa, Artificial Sequence
  Description of Artificial Sequence: Synthetic peptide
  Seed: SPGMMMGMFNMLSTV
SPGMFMGMFAMLNTV

SEQ ID NO: 194116 - protein, 15 aa, Artificial Sequence
  Description of Artificial Sequence: Synthetic peptide
  Seed: SPGMMMGMFNMLSTV
SPGMFMGMFAMLPTV

SEQ ID NO: 194117 - protein, 15 aa, Artificial Sequence
  Description of Artificial Sequence: Synthetic peptide
  Seed: SPGMMMGMFNMLSTV
SPGMFMGMFAMLQTV

SEQ ID NO: 194118 - protein, 15 aa, Artificial Sequence
  Description of Artificial Sequence: Synthetic peptide
  Seed: SPGMMMGMFNMLSTV
SPGMFMGMFAMLRTV

SEQ ID NO: 194119 - protein, 15 aa, Artificial Sequence
  Description of Artificial Sequence: Synthetic peptide
  Seed: SPGMMMGMFNMLSTV
SPGMFMGMFAMLSTV

SEQ ID NO: 194120 - protein, 15 aa, Artificial Sequence
  Description of Artificial Sequence: Synthetic peptide
  Seed: SPGMMMGMFNMLSTV
SPGMFMGMFAMLTTV

SEQ ID NO: 194121 - protein, 15 aa, Artificial Sequence
  Description of Artificial Sequence: Synthetic peptide
  Seed: SPGMMMGMFNMLSTV
SPGMFMGMFAMLVTV

SEQ ID NO: 194122 - protein, 15 aa, Artificial Sequence
  Description of Artificial Sequence: Synthetic peptide
  Seed: SPGMMMGMFNMLSTV
SPGMFMGMFDMLDTV

SEQ ID NO: 194123 - protein, 15 aa, Artificial Sequence
  Description of Artificial Sequence: Synthetic peptide
  Seed: SPGMMMGMFNMLSTV
SPGMFMGMFGMLATV

SEQ ID NO: 194124 - protein, 15 aa, Artificial Sequence
  Description of Artificial Sequence: Synthetic peptide
  Seed: SPGMMMGMFNMLSTV
SPGMFMGMFGMLHTV

SEQ ID NO: 194125 - protein, 15 aa, Artificial Sequence
  Description of Artificial Sequence: Synthetic peptide
  Seed: SPGMMMGMFNMLSTV
SPGMFMGMFGMLNTV

SEQ ID NO: 194126 - protein, 15 aa, Artificial Sequence
  Description of Artificial Sequence: Synthetic peptide
  Seed: SPGMMMGMFNMLSTV
SPGMFMGMFGMLSTV

SEQ ID NO: 194127 - protein, 15 aa, Artificial Sequence
  Description of Artificial Sequence: Synthetic peptide
  Seed: SPGMMMGMFNMLSTV
SPGMFMGMFGMLTTV

SEQ ID NO: 194128 - protein, 15 aa, Artificial Sequence
  Description of Artificial Sequence: Synthetic peptide
  Seed: SPGMMMGMFNMLSTV
SPGMFMGMFGMLVTV

SEQ ID NO: 194129 - protein, 15 aa, Artificial Sequence
  Description of Artificial Sequence: Synthetic peptide
  Seed: SPGMMMGMFNMLSTV
SPGMFMGMFKMLHTV

SEQ ID NO: 194130 - protein, 15 aa, Artificial Sequence
  Description of Artificial Sequence: Synthetic peptide
  Seed: SPGMMMGMFNMLSTV
SPGMFMGMFKMLKTV

SEQ ID NO: 194131 - protein, 15 aa, Artificial Sequence
  Description of Artificial Sequence: Synthetic peptide
  Seed: SPGMMMGMFNMLSTV
SPGMFMGMFKMLRTV

SEQ ID NO: 194132 - protein, 15 aa, Artificial Sequence
  Description of Artificial Sequence: Synthetic peptide
  Seed: SPGMMMGMFNMLSTV
SPGMFMGMFKMLSTV

SEQ ID NO: 194133 - protein, 15 aa, Artificial Sequence
  Description of Artificial Sequence: Synthetic peptide
  Seed: SPGMMMGMFNMLSTV
SPGMFMGMFNMLATV

SEQ ID NO: 194134 - protein, 15 aa, Artificial Sequence
  Description of Artificial Sequence: Synthetic peptide
  Seed: SPGMMMGMFNMLSTV
SPGMFMGMFNMLDTV

SEQ ID NO: 194135 - protein, 15 aa, Artificial Sequence
  Description of Artificial Sequence: Synthetic peptide
  Seed: SPGMMMGMFNMLSTV
SPGMFMGMFNMLETV

SEQ ID NO: 194136 - protein, 15 aa, Artificial Sequence
  Description of Artificial Sequence: Synthetic peptide
  Seed: SPGMMMGMFNMLSTV
SPGMFMGMFNMLGTV

SEQ ID NO: 194137 - protein, 15 aa, Artificial Sequence
  Description of Artificial Sequence: Synthetic peptide
  Seed: SPGMMMGMFNMLSTV
SPGMFMGMFNMLHTV

SEQ ID NO: 194138 - protein, 15 aa, Artificial Sequence
  Description of Artificial Sequence: Synthetic peptide
  Seed: SPGMMMGMFNMLSTV
SPGMFMGMFNMLNTV

SEQ ID NO: 194139 - protein, 15 aa, Artificial Sequence
  Description of Artificial Sequence: Synthetic peptide
  Seed: SPGMMMGMFNMLSTV
SPGMFMGMFNMLSTV

SEQ ID NO: 194140 - protein, 15 aa, Artificial Sequence
  Description of Artificial Sequence: Synthetic peptide
  Seed: SPGMMMGMFNMLSTV
SPGMFMGMFNMLTTV

SEQ ID NO: 194141 - protein, 15 aa, Artificial Sequence
  Description of Artificial Sequence: Synthetic peptide
  Seed: SPGMMMGMFNMLSTV
SPGMFMGMFNMLVTV

SEQ ID NO: 194142 - protein, 15 aa, Artificial Sequence
  Description of Artificial Sequence: Synthetic peptide
  Seed: SPGMMMGMFNMLSTV
SPGMFMGMFPMLATV

SEQ ID NO: 194143 - protein, 15 aa, Artificial Sequence
  Description of Artificial Sequence: Synthetic peptide
  Seed: SPGMMMGMFNMLSTV
SPGMFMGMFPMLDTV

SEQ ID NO: 194144 - protein, 15 aa, Artificial Sequence
  Description of Artificial Sequence: Synthetic peptide
  Seed: SPGMMMGMFNMLSTV
SPGMFMGMFPMLETV

SEQ ID NO: 194145 - protein, 15 aa, Artificial Sequence
  Description of Artificial Sequence: Synthetic peptide
  Seed: SPGMMMGMFNMLSTV
SPGMFMGMFPMLGTV

SEQ ID NO: 194146 - protein, 15 aa, Artificial Sequence
  Description of Artificial Sequence: Synthetic peptide
  Seed: SPGMMMGMFNMLSTV
SPGMFMGMFPMLHTV

SEQ ID NO: 194147 - protein, 15 aa, Artificial Sequence
  Description of Artificial Sequence: Synthetic peptide
  Seed: SPGMMMGMFNMLSTV
SPGMFMGMFPMLITV

SEQ ID NO: 194148 - protein, 15 aa, Artificial Sequence
  Description of Artificial Sequence: Synthetic peptide
  Seed: SPGMMMGMFNMLSTV
SPGMFMGMFPMLKTV

SEQ ID NO: 194149 - protein, 15 aa, Artificial Sequence
  Description of Artificial Sequence: Synthetic peptide
  Seed: SPGMMMGMFNMLSTV
SPGMFMGMFPMLLTV

SEQ ID NO: 194150 - protein, 15 aa, Artificial Sequence
  Description of Artificial Sequence: Synthetic peptide
  Seed: SPGMMMGMFNMLSTV
SPGMFMGMFPMLMTV

SEQ ID NO: 194151 - protein, 15 aa, Artificial Sequence
  Description of Artificial Sequence: Synthetic peptide
  Seed: SPGMMMGMFNMLSTV
SPGMFMGMFPMLNTV

SEQ ID NO: 194152 - protein, 15 aa, Artificial Sequence
  Description of Artificial Sequence: Synthetic peptide
  Seed: SPGMMMGMFNMLSTV
SPGMFMGMFPMLPTV

SEQ ID NO: 194153 - protein, 15 aa, Artificial Sequence
  Description of Artificial Sequence: Synthetic peptide
  Seed: SPGMMMGMFNMLSTV
SPGMFMGMFPMLQTV

SEQ ID NO: 194154 - protein, 15 aa, Artificial Sequence
  Description of Artificial Sequence: Synthetic peptide
  Seed: SPGMMMGMFNMLSTV
SPGMFMGMFPMLRTV

SEQ ID NO: 194155 - protein, 15 aa, Artificial Sequence
  Description of Artificial Sequence: Synthetic peptide
  Seed: SPGMMMGMFNMLSTV
SPGMFMGMFPMLSTV

SEQ ID NO: 194156 - protein, 15 aa, Artificial Sequence
  Description of Artificial Sequence: Synthetic peptide
  Seed: SPGMMMGMFNMLSTV
SPGMFMGMFPMLTTV

SEQ ID NO: 194157 - protein, 15 aa, Artificial Sequence
  Description of Artificial Sequence: Synthetic peptide
  Seed: SPGMMMGMFNMLSTV
SPGMFMGMFPMLVTV

SEQ ID NO: 194158 - protein, 15 aa, Artificial Sequence
  Description of Artificial Sequence: Synthetic peptide
  Seed: SPGMMMGMFNMLSTV
SPGMFMGMFPMLYTV

SEQ ID NO: 194159 - protein, 15 aa, Artificial Sequence
  Description of Artificial Sequence: Synthetic peptide
  Seed: SPGMMMGMFNMLSTV
SPGMFMGMFRMLHTV

SEQ ID NO: 194160 - protein, 15 aa, Artificial Sequence
  Description of Artificial Sequence: Synthetic peptide
  Seed: SPGMMMGMFNMLSTV
SPGMFMGMFRMLKTV

SEQ ID NO: 194161 - protein, 15 aa, Artificial Sequence
  Description of Artificial Sequence: Synthetic peptide
  Seed: SPGMMMGMFNMLSTV
SPGMFMGMFRMLRTV

SEQ ID NO: 194162 - protein, 15 aa, Artificial Sequence
  Description of Artificial Sequence: Synthetic peptide
  Seed: SPGMMMGMFNMLSTV
SPGMFMGMFSMLATV

SEQ ID NO: 194163 - protein, 15 aa, Artificial Sequence
  Description of Artificial Sequence: Synthetic peptide
  Seed: SPGMMMGMFNMLSTV
SPGMFMGMFSMLDTV

SEQ ID NO: 194164 - protein, 15 aa, Artificial Sequence
  Description of Artificial Sequence: Synthetic peptide
  Seed: SPGMMMGMFNMLSTV
SPGMFMGMFSMLHTV

SEQ ID NO: 194165 - protein, 15 aa, Artificial Sequence
  Description of Artificial Sequence: Synthetic peptide
  Seed: SPGMMMGMFNMLSTV
SPGMFMGMFSMLNTV

SEQ ID NO: 194166 - protein, 15 aa, Artificial Sequence
  Description of Artificial Sequence: Synthetic peptide
  Seed: SPGMMMGMFNMLSTV
SPGMFMGMFSMLSTV

SEQ ID NO: 194167 - protein, 15 aa, Artificial Sequence
  Description of Artificial Sequence: Synthetic peptide
  Seed: SPGMMMGMFNMLSTV
SPGMFMGMFSMLTTV

SEQ ID NO: 194168 - protein, 15 aa, Artificial Sequence
  Description of Artificial Sequence: Synthetic peptide
  Seed: SPGMMMGMFNMLSTV
SPGMFMGMFSMLVTV

SEQ ID NO: 194169 - protein, 15 aa, Artificial Sequence
  Description of Artificial Sequence: Synthetic peptide
  Seed: SPGMMMGMFNMLSTV
SPGMFMGMFTMLATV

SEQ ID NO: 194170 - protein, 15 aa, Artificial Sequence
  Description of Artificial Sequence: Synthetic peptide
  Seed: SPGMMMGMFNMLSTV
SPGMFMGMFTMLDTV

SEQ ID NO: 194171 - protein, 15 aa, Artificial Sequence
  Description of Artificial Sequence: Synthetic peptide
  Seed: SPGMMMGMFNMLSTV
SPGMFMGMFTMLETV

SEQ ID NO: 194172 - protein, 15 aa, Artificial Sequence
  Description of Artificial Sequence: Synthetic peptide
  Seed: SPGMMMGMFNMLSTV
SPGMFMGMFTMLHTV

SEQ ID NO: 194173 - protein, 15 aa, Artificial Sequence
  Description of Artificial Sequence: Synthetic peptide
  Seed: SPGMMMGMFNMLSTV
SPGMFMGMFTMLKTV

SEQ ID NO: 194174 - protein, 15 aa, Artificial Sequence
  Description of Artificial Sequence: Synthetic peptide
  Seed: SPGMMMGMFNMLSTV
SPGMFMGMFTMLNTV

SEQ ID NO: 194175 - protein, 15 aa, Artificial Sequence
  Description of Artificial Sequence: Synthetic peptide
  Seed: SPGMMMGMFNMLSTV
SPGMFMGMFTMLSTV

SEQ ID NO: 194176 - protein, 15 aa, Artificial Sequence
  Description of Artificial Sequence: Synthetic peptide
  Seed: SPGMMMGMFNMLSTV
SPGMFMGMFTMLTTV

SEQ ID NO: 194177 - protein, 15 aa, Artificial Sequence
  Description of Artificial Sequence: Synthetic peptide
  Seed: SPGMMMGMFNMLSTV
SPGMFMGMFVMLHTV

SEQ ID NO: 194178 - protein, 15 aa, Artificial Sequence
  Description of Artificial Sequence: Synthetic peptide
  Seed: SPGMMMGMFNMLSTV
SPGMFMGNFAMLATV

SEQ ID NO: 194179 - protein, 15 aa, Artificial Sequence
  Description of Artificial Sequence: Synthetic peptide
  Seed: SPGMMMGMFNMLSTV
SPGMFMGNFAMLGTV

SEQ ID NO: 194180 - protein, 15 aa, Artificial Sequence
  Description of Artificial Sequence: Synthetic peptide
  Seed: SPGMMMGMFNMLSTV
SPGMFMGNFAMLITV

SEQ ID NO: 194181 - protein, 15 aa, Artificial Sequence
  Description of Artificial Sequence: Synthetic peptide
  Seed: SPGMMMGMFNMLSTV
SPGMFMGNFAMLLTV

SEQ ID NO: 194182 - protein, 15 aa, Artificial Sequence
  Description of Artificial Sequence: Synthetic peptide
  Seed: SPGMMMGMFNMLSTV
SPGMFMGNFAMLMTV

SEQ ID NO: 194183 - protein, 15 aa, Artificial Sequence
  Description of Artificial Sequence: Synthetic peptide
  Seed: SPGMMMGMFNMLSTV
SPGMFMGNFAMLNTV

SEQ ID NO: 194184 - protein, 15 aa, Artificial Sequence
  Description of Artificial Sequence: Synthetic peptide
  Seed: SPGMMMGMFNMLSTV
SPGMFMGNFAMLSTV

SEQ ID NO: 194185 - protein, 15 aa, Artificial Sequence
  Description of Artificial Sequence: Synthetic peptide
  Seed: SPGMMMGMFNMLSTV
SPGMFMGNFAMLTTV

SEQ ID NO: 194186 - protein, 15 aa, Artificial Sequence
  Description of Artificial Sequence: Synthetic peptide
  Seed: SPGMMMGMFNMLSTV
SPGMFMGNFAMLVTV

SEQ ID NO: 194187 - protein, 15 aa, Artificial Sequence
  Description of Artificial Sequence: Synthetic peptide
  Seed: SPGMMMGMFNMLSTV
SPGMFMGNFGMLITV

SEQ ID NO: 194188 - protein, 15 aa, Artificial Sequence
  Description of Artificial Sequence: Synthetic peptide
  Seed: SPGMMMGMFNMLSTV
SPGMFMGNFGMLLTV

SEQ ID NO: 194189 - protein, 15 aa, Artificial Sequence
  Description of Artificial Sequence: Synthetic peptide
  Seed: SPGMMMGMFNMLSTV
SPGMFMGNFGMLVTV

SEQ ID NO: 194190 - protein, 15 aa, Artificial Sequence
  Description of Artificial Sequence: Synthetic peptide
  Seed: SPGMMMGMFNMLSTV
SPGMFMGNFPMLATV

SEQ ID NO: 194191 - protein, 15 aa, Artificial Sequence
  Description of Artificial Sequence: Synthetic peptide
  Seed: SPGMMMGMFNMLSTV
SPGMFMGNFPMLITV

SEQ ID NO: 194192 - protein, 15 aa, Artificial Sequence
  Description of Artificial Sequence: Synthetic peptide
  Seed: SPGMMMGMFNMLSTV
SPGMFMGNFPMLLTV

SEQ ID NO: 194193 - protein, 15 aa, Artificial Sequence
  Description of Artificial Sequence: Synthetic peptide
  Seed: SPGMMMGMFNMLSTV
SPGMFMGNFPMLMTV

SEQ ID NO: 194194 - protein, 15 aa, Artificial Sequence
  Description of Artificial Sequence: Synthetic peptide
  Seed: SPGMMMGMFNMLSTV
SPGMFMGNFPMLVTV

SEQ ID NO: 194195 - protein, 15 aa, Artificial Sequence
  Description of Artificial Sequence: Synthetic peptide
  Seed: SPGMMMGMFNMLSTV
SPGMFMGNFSMLLTV

SEQ ID NO: 194196 - protein, 15 aa, Artificial Sequence
  Description of Artificial Sequence: Synthetic peptide
  Seed: SPGMMMGMFNMLSTV
SPGMFMGNFSMLVTV

SEQ ID NO: 194197 - protein, 15 aa, Artificial Sequence
  Description of Artificial Sequence: Synthetic peptide
  Seed: SPGMMMGMFNMLSTV
SPGMFMGQFAMLATV

SEQ ID NO: 194198 - protein, 15 aa, Artificial Sequence
  Description of Artificial Sequence: Synthetic peptide
  Seed: SPGMMMGMFNMLSTV
SPGMFMGQFAMLGTV

SEQ ID NO: 194199 - protein, 15 aa, Artificial Sequence
  Description of Artificial Sequence: Synthetic peptide
  Seed: SPGMMMGMFNMLSTV
SPGMFMGQFAMLHTV

SEQ ID NO: 194200 - protein, 15 aa, Artificial Sequence
  Description of Artificial Sequence: Synthetic peptide
  Seed: SPGMMMGMFNMLSTV
SPGMFMGQFAMLITV

SEQ ID NO: 194201 - protein, 15 aa, Artificial Sequence
  Description of Artificial Sequence: Synthetic peptide
  Seed: SPGMMMGMFNMLSTV
SPGMFMGQFAMLLTV

SEQ ID NO: 194202 - protein, 15 aa, Artificial Sequence
  Description of Artificial Sequence: Synthetic peptide
  Seed: SPGMMMGMFNMLSTV
SPGMFMGQFAMLMTV

SEQ ID NO: 194203 - protein, 15 aa, Artificial Sequence
  Description of Artificial Sequence: Synthetic peptide
  Seed: SPGMMMGMFNMLSTV
SPGMFMGQFAMLNTV

SEQ ID NO: 194204 - protein, 15 aa, Artificial Sequence
  Description of Artificial Sequence: Synthetic peptide
  Seed: SPGMMMGMFNMLSTV
SPGMFMGQFAMLQTV

SEQ ID NO: 194205 - protein, 15 aa, Artificial Sequence
  Description of Artificial Sequence: Synthetic peptide
  Seed: SPGMMMGMFNMLSTV
SPGMFMGQFAMLSTV

SEQ ID NO: 194206 - protein, 15 aa, Artificial Sequence
  Description of Artificial Sequence: Synthetic peptide
  Seed: SPGMMMGMFNMLSTV
SPGMFMGQFAMLTTV

SEQ ID NO: 194207 - protein, 15 aa, Artificial Sequence
  Description of Artificial Sequence: Synthetic peptide
  Seed: SPGMMMGMFNMLSTV
SPGMFMGQFAMLVTV

SEQ ID NO: 194208 - protein, 15 aa, Artificial Sequence
  Description of Artificial Sequence: Synthetic peptide
  Seed: SPGMMMGMFNMLSTV
SPGMFMGQFGMLATV

SEQ ID NO: 194209 - protein, 15 aa, Artificial Sequence
  Description of Artificial Sequence: Synthetic peptide
  Seed: SPGMMMGMFNMLSTV
SPGMFMGQFGMLITV

SEQ ID NO: 194210 - protein, 15 aa, Artificial Sequence
  Description of Artificial Sequence: Synthetic peptide
  Seed: SPGMMMGMFNMLSTV
SPGMFMGQFGMLLTV

SEQ ID NO: 194211 - protein, 15 aa, Artificial Sequence
  Description of Artificial Sequence: Synthetic peptide
  Seed: SPGMMMGMFNMLSTV
SPGMFMGQFGMLNTV

SEQ ID NO: 194212 - protein, 15 aa, Artificial Sequence
  Description of Artificial Sequence: Synthetic peptide
  Seed: SPGMMMGMFNMLSTV
SPGMFMGQFGMLTTV

SEQ ID NO: 194213 - protein, 15 aa, Artificial Sequence
  Description of Artificial Sequence: Synthetic peptide
  Seed: SPGMMMGMFNMLSTV
SPGMFMGQFGMLVTV

SEQ ID NO: 194214 - protein, 15 aa, Artificial Sequence
  Description of Artificial Sequence: Synthetic peptide
  Seed: SPGMMMGMFNMLSTV
SPGMFMGQFNMLATV

SEQ ID NO: 194215 - protein, 15 aa, Artificial Sequence
  Description of Artificial Sequence: Synthetic peptide
  Seed: SPGMMMGMFNMLSTV
SPGMFMGQFNMLDTV

SEQ ID NO: 194216 - protein, 15 aa, Artificial Sequence
  Description of Artificial Sequence: Synthetic peptide
  Seed: SPGMMMGMFNMLSTV
SPGMFMGQFNMLNTV

SEQ ID NO: 194217 - protein, 15 aa, Artificial Sequence
  Description of Artificial Sequence: Synthetic peptide
  Seed: SPGMMMGMFNMLSTV
SPGMFMGQFNMLVTV

SEQ ID NO: 194218 - protein, 15 aa, Artificial Sequence
  Description of Artificial Sequence: Synthetic peptide
  Seed: SPGMMMGMFNMLSTV
SPGMFMGQFPMLATV

SEQ ID NO: 194219 - protein, 15 aa, Artificial Sequence
  Description of Artificial Sequence: Synthetic peptide
  Seed: SPGMMMGMFNMLSTV
SPGMFMGQFPMLGTV

SEQ ID NO: 194220 - protein, 15 aa, Artificial Sequence
  Description of Artificial Sequence: Synthetic peptide
  Seed: SPGMMMGMFNMLSTV
SPGMFMGQFPMLHTV

SEQ ID NO: 194221 - protein, 15 aa, Artificial Sequence
  Description of Artificial Sequence: Synthetic peptide
  Seed: SPGMMMGMFNMLSTV
SPGMFMGQFPMLITV

SEQ ID NO: 194222 - protein, 15 aa, Artificial Sequence
  Description of Artificial Sequence: Synthetic peptide
  Seed: SPGMMMGMFNMLSTV
SPGMFMGQFPMLLTV

SEQ ID NO: 194223 - protein, 15 aa, Artificial Sequence
  Description of Artificial Sequence: Synthetic peptide
  Seed: SPGMMMGMFNMLSTV
SPGMFMGQFPMLMTV

SEQ ID NO: 194224 - protein, 15 aa, Artificial Sequence
  Description of Artificial Sequence: Synthetic peptide
  Seed: SPGMMMGMFNMLSTV
SPGMFMGQFPMLNTV

SEQ ID NO: 194225 - protein, 15 aa, Artificial Sequence
  Description of Artificial Sequence: Synthetic peptide
  Seed: SPGMMMGMFNMLSTV
SPGMFMGQFPMLQTV

SEQ ID NO: 194226 - protein, 15 aa, Artificial Sequence
  Description of Artificial Sequence: Synthetic peptide
  Seed: SPGMMMGMFNMLSTV
SPGMFMGQFPMLSTV

SEQ ID NO: 194227 - protein, 15 aa, Artificial Sequence
  Description of Artificial Sequence: Synthetic peptide
  Seed: SPGMMMGMFNMLSTV
SPGMFMGQFPMLTTV

SEQ ID NO: 194228 - protein, 15 aa, Artificial Sequence
  Description of Artificial Sequence: Synthetic peptide
  Seed: SPGMMMGMFNMLSTV
SPGMFMGQFPMLVTV

SEQ ID NO: 194229 - protein, 15 aa, Artificial Sequence
  Description of Artificial Sequence: Synthetic peptide
  Seed: SPGMMMGMFNMLSTV
SPGMFMGQFSMLATV

SEQ ID NO: 194230 - protein, 15 aa, Artificial Sequence
  Description of Artificial Sequence: Synthetic peptide
  Seed: SPGMMMGMFNMLSTV
SPGMFMGQFSMLITV

SEQ ID NO: 194231 - protein, 15 aa, Artificial Sequence
  Description of Artificial Sequence: Synthetic peptide
  Seed: SPGMMMGMFNMLSTV
SPGMFMGQFSMLLTV

SEQ ID NO: 194232 - protein, 15 aa, Artificial Sequence
  Description of Artificial Sequence: Synthetic peptide
  Seed: SPGMMMGMFNMLSTV
SPGMFMGQFSMLNTV

SEQ ID NO: 194233 - protein, 15 aa, Artificial Sequence
  Description of Artificial Sequence: Synthetic peptide
  Seed: SPGMMMGMFNMLSTV
SPGMFMGQFSMLSTV

SEQ ID NO: 194234 - protein, 15 aa, Artificial Sequence
  Description of Artificial Sequence: Synthetic peptide
  Seed: SPGMMMGMFNMLSTV
SPGMFMGQFSMLTTV

SEQ ID NO: 194235 - protein, 15 aa, Artificial Sequence
  Description of Artificial Sequence: Synthetic peptide
  Seed: SPGMMMGMFNMLSTV
SPGMFMGQFSMLVTV

SEQ ID NO: 194236 - protein, 15 aa, Artificial Sequence
  Description of Artificial Sequence: Synthetic peptide
  Seed: SPGMMMGMFNMLSTV
SPGMFMGQFTMLATV

SEQ ID NO: 194237 - protein, 15 aa, Artificial Sequence
  Description of Artificial Sequence: Synthetic peptide
  Seed: SPGMMMGMFNMLSTV
SPGMFMGQFTMLDTV

SEQ ID NO: 194238 - protein, 15 aa, Artificial Sequence
  Description of Artificial Sequence: Synthetic peptide
  Seed: SPGMMMGMFNMLSTV
SPGMFMGQFTMLHTV

SEQ ID NO: 194239 - protein, 15 aa, Artificial Sequence
  Description of Artificial Sequence: Synthetic peptide
  Seed: SPGMMMGMFNMLSTV
SPGMFMGQFTMLNTV

SEQ ID NO: 194240 - protein, 15 aa, Artificial Sequence
  Description of Artificial Sequence: Synthetic peptide
  Seed: SPGMMMGMFNMLSTV
SPGMFMGQFTMLSTV

SEQ ID NO: 194241 - protein, 15 aa, Artificial Sequence
  Description of Artificial Sequence: Synthetic peptide
  Seed: SPGMMMGMFNMLSTV
SPGMFMGQFTMLTTV

SEQ ID NO: 194242 - protein, 15 aa, Artificial Sequence
  Description of Artificial Sequence: Synthetic peptide
  Seed: SPGMMMGMFNMLSTV
SPGMFMGQFVMLNTV

SEQ ID NO: 194243 - protein, 15 aa, Artificial Sequence
  Description of Artificial Sequence: Synthetic peptide
  Seed: SPGMMMGMFNMLSTV
SPGMFMGSFAMLATV

SEQ ID NO: 194244 - protein, 15 aa, Artificial Sequence
  Description of Artificial Sequence: Synthetic peptide
  Seed: SPGMMMGMFNMLSTV
SPGMFMGSFAMLGTV

SEQ ID NO: 194245 - protein, 15 aa, Artificial Sequence
  Description of Artificial Sequence: Synthetic peptide
  Seed: SPGMMMGMFNMLSTV
SPGMFMGSFAMLHTV

SEQ ID NO: 194246 - protein, 15 aa, Artificial Sequence
  Description of Artificial Sequence: Synthetic peptide
  Seed: SPGMMMGMFNMLSTV
SPGMFMGSFAMLITV

SEQ ID NO: 194247 - protein, 15 aa, Artificial Sequence
  Description of Artificial Sequence: Synthetic peptide
  Seed: SPGMMMGMFNMLSTV
SPGMFMGSFAMLLTV

SEQ ID NO: 194248 - protein, 15 aa, Artificial Sequence
  Description of Artificial Sequence: Synthetic peptide
  Seed: SPGMMMGMFNMLSTV
SPGMFMGSFAMLMTV

SEQ ID NO: 194249 - protein, 15 aa, Artificial Sequence
  Description of Artificial Sequence: Synthetic peptide
  Seed: SPGMMMGMFNMLSTV
SPGMFMGSFAMLNTV

SEQ ID NO: 194250 - protein, 15 aa, Artificial Sequence
  Description of Artificial Sequence: Synthetic peptide
  Seed: SPGMMMGMFNMLSTV
SPGMFMGSFAMLSTV

SEQ ID NO: 194251 - protein, 15 aa, Artificial Sequence
  Description of Artificial Sequence: Synthetic peptide
  Seed: SPGMMMGMFNMLSTV
SPGMFMGSFAMLTTV

SEQ ID NO: 194252 - protein, 15 aa, Artificial Sequence
  Description of Artificial Sequence: Synthetic peptide
  Seed: SPGMMMGMFNMLSTV
SPGMFMGSFAMLVTV

SEQ ID NO: 194253 - protein, 15 aa, Artificial Sequence
  Description of Artificial Sequence: Synthetic peptide
  Seed: SPGMMMGMFNMLSTV
SPGMFMGSFGMLATV

SEQ ID NO: 194254 - protein, 15 aa, Artificial Sequence
  Description of Artificial Sequence: Synthetic peptide
  Seed: SPGMMMGMFNMLSTV
SPGMFMGSFGMLVTV

SEQ ID NO: 194255 - protein, 15 aa, Artificial Sequence
  Description of Artificial Sequence: Synthetic peptide
  Seed: SPGMMMGMFNMLSTV
SPGMFMGSFPMLATV

SEQ ID NO: 194256 - protein, 15 aa, Artificial Sequence
  Description of Artificial Sequence: Synthetic peptide
  Seed: SPGMMMGMFNMLSTV
SPGMFMGSFPMLITV

SEQ ID NO: 194257 - protein, 15 aa, Artificial Sequence
  Description of Artificial Sequence: Synthetic peptide
  Seed: SPGMMMGMFNMLSTV
SPGMFMGSFPMLLTV

SEQ ID NO: 194258 - protein, 15 aa, Artificial Sequence
  Description of Artificial Sequence: Synthetic peptide
  Seed: SPGMMMGMFNMLSTV
SPGMFMGSFPMLMTV

SEQ ID NO: 194259 - protein, 15 aa, Artificial Sequence
  Description of Artificial Sequence: Synthetic peptide
  Seed: SPGMMMGMFNMLSTV
SPGMFMGSFPMLNTV

SEQ ID NO: 194260 - protein, 15 aa, Artificial Sequence
  Description of Artificial Sequence: Synthetic peptide
  Seed: SPGMMMGMFNMLSTV
SPGMFMGSFPMLSTV

SEQ ID NO: 194261 - protein, 15 aa, Artificial Sequence
  Description of Artificial Sequence: Synthetic peptide
  Seed: SPGMMMGMFNMLSTV
SPGMFMGSFPMLTTV

SEQ ID NO: 194262 - protein, 15 aa, Artificial Sequence
  Description of Artificial Sequence: Synthetic peptide
  Seed: SPGMMMGMFNMLSTV
SPGMFMGSFPMLVTV

SEQ ID NO: 194263 - protein, 15 aa, Artificial Sequence
  Description of Artificial Sequence: Synthetic peptide
  Seed: SPGMMMGMFNMLSTV
SPGMFMGSFSMLATV

SEQ ID NO: 194264 - protein, 15 aa, Artificial Sequence
  Description of Artificial Sequence: Synthetic peptide
  Seed: SPGMMMGMFNMLSTV
SPGMFMGSFSMLNTV

SEQ ID NO: 194265 - protein, 15 aa, Artificial Sequence
  Description of Artificial Sequence: Synthetic peptide
  Seed: SPGMMMGMFNMLSTV
SPGMFMGSFSMLVTV

SEQ ID NO: 194266 - protein, 15 aa, Artificial Sequence
  Description of Artificial Sequence: Synthetic peptide
  Seed: SPGMMMGMFNMLSTV
SPGMFMGSFTMLNTV

SEQ ID NO: 194267 - protein, 15 aa, Artificial Sequence
  Description of Artificial Sequence: Synthetic peptide
  Seed: SPGMMMGMFNMLSTV
SPGMFMGTFAMLATV

SEQ ID NO: 194268 - protein, 15 aa, Artificial Sequence
  Description of Artificial Sequence: Synthetic peptide
  Seed: SPGMMMGMFNMLSTV
SPGMFMGTFAMLNTV

SEQ ID NO: 194269 - protein, 15 aa, Artificial Sequence
  Description of Artificial Sequence: Synthetic peptide
  Seed: SPGMMMGMFNMLSTV
SPGMFMGTFAMLSTV

SEQ ID NO: 194270 - protein, 15 aa, Artificial Sequence
  Description of Artificial Sequence: Synthetic peptide
  Seed: SPGMMMGMFNMLSTV
SPGMFMGTFAMLVTV

SEQ ID NO: 194271 - protein, 15 aa, Artificial Sequence
  Description of Artificial Sequence: Synthetic peptide
  Seed: SPGMMMGMFNMLSTV
SPGMFMGTFPMLATV

SEQ ID NO: 194272 - protein, 15 aa, Artificial Sequence
  Description of Artificial Sequence: Synthetic peptide
  Seed: SPGMMMGMFNMLSTV
SPGMFMGTFPMLITV

SEQ ID NO: 194273 - protein, 15 aa, Artificial Sequence
  Description of Artificial Sequence: Synthetic peptide
  Seed: SPGMMMGMFNMLSTV
SPGMFMGTFPMLLTV

SEQ ID NO: 194274 - protein, 15 aa, Artificial Sequence
  Description of Artificial Sequence: Synthetic peptide
  Seed: SPGMMMGMFNMLSTV
SPGMFMGTFPMLMTV

SEQ ID NO: 194275 - protein, 15 aa, Artificial Sequence
  Description of Artificial Sequence: Synthetic peptide
  Seed: SPGMMMGMFNMLSTV
SPGMFMGTFPMLNTV

SEQ ID NO: 194276 - protein, 15 aa, Artificial Sequence
  Description of Artificial Sequence: Synthetic peptide
  Seed: SPGMMMGMFNMLSTV
SPGMFMGTFPMLSTV

SEQ ID NO: 194277 - protein, 15 aa, Artificial Sequence
  Description of Artificial Sequence: Synthetic peptide
  Seed: SPGMMMGMFNMLSTV
SPGMFMGTFPMLVTV

SEQ ID NO: 194278 - protein, 15 aa, Artificial Sequence
  Description of Artificial Sequence: Synthetic peptide
  Seed: SPGMMMGMFNMLSTV
SPGMFMGTFSMLNTV

SEQ ID NO: 194279 - protein, 15 aa, Artificial Sequence
  Description of Artificial Sequence: Synthetic peptide
  Seed: SPGMMMGMFNMLSTV
SPGMFMGTFTMLNTV

SEQ ID NO: 194280 - protein, 15 aa, Artificial Sequence
  Description of Artificial Sequence: Synthetic peptide
  Seed: SPGMMMGMFNMLSTV
SPGMFMGVFAMLHTV

SEQ ID NO: 194281 - protein, 15 aa, Artificial Sequence
  Description of Artificial Sequence: Synthetic peptide
  Seed: SPGMMMGMFNMLSTV
SPGMFMGVFAMLNTV

SEQ ID NO: 194282 - protein, 15 aa, Artificial Sequence
  Description of Artificial Sequence: Synthetic peptide
  Seed: SPGMMMGMFNMLSTV
SPGMFMGVFNMLDTV

SEQ ID NO: 194283 - protein, 15 aa, Artificial Sequence
  Description of Artificial Sequence: Synthetic peptide
  Seed: SPGMMMGMFNMLSTV
SPGMFMGVFNMLNTV

SEQ ID NO: 194284 - protein, 15 aa, Artificial Sequence
  Description of Artificial Sequence: Synthetic peptide
  Seed: SPGMMMGMFNMLSTV
SPGMFMGVFPMLATV

SEQ ID NO: 194285 - protein, 15 aa, Artificial Sequence
  Description of Artificial Sequence: Synthetic peptide
  Seed: SPGMMMGMFNMLSTV
SPGMFMGVFPMLGTV

SEQ ID NO: 194286 - protein, 15 aa, Artificial Sequence
  Description of Artificial Sequence: Synthetic peptide
  Seed: SPGMMMGMFNMLSTV
SPGMFMGVFPMLHTV

SEQ ID NO: 194287 - protein, 15 aa, Artificial Sequence
  Description of Artificial Sequence: Synthetic peptide
  Seed: SPGMMMGMFNMLSTV
SPGMFMGVFPMLNTV

SEQ ID NO: 194288 - protein, 15 aa, Artificial Sequence
  Description of Artificial Sequence: Synthetic peptide
  Seed: SPGMMMGMFNMLSTV
SPGMFMGVFPMLSTV

SEQ ID NO: 194289 - protein, 15 aa, Artificial Sequence
  Description of Artificial Sequence: Synthetic peptide
  Seed: SPGMMMGMFNMLSTV
SPGMFMGVFPMLTTV

SEQ ID NO: 194290 - protein, 15 aa, Artificial Sequence
  Description of Artificial Sequence: Synthetic peptide
  Seed: SPGMMMGMFNMLSTV
SPGMFMGVFPMLVTV

SEQ ID NO: 194291 - protein, 15 aa, Artificial Sequence
  Description of Artificial Sequence: Synthetic peptide
  Seed: SPGMMMGMFNMLSTV
SPGMFMGVFSMLNTV

SEQ ID NO: 194292 - protein, 15 aa, Artificial Sequence
  Description of Artificial Sequence: Synthetic peptide
  Seed: SPGMMMGMFNMLSTV
SPGMFMGVFTMLDTV

SEQ ID NO: 194293 - protein, 15 aa, Artificial Sequence
  Description of Artificial Sequence: Synthetic peptide
  Seed: SPGMMMGMFNMLSTV
SPGMFMGVFTMLNTV

SEQ ID NO: 194294 - protein, 15 aa, Artificial Sequence
  Description of Artificial Sequence: Synthetic peptide
  Seed: SPGMMMGMFNMLSTV
SPGMFMGWFDMLITV

SEQ ID NO: 194295 - protein, 15 aa, Artificial Sequence
  Description of Artificial Sequence: Synthetic peptide
  Seed: SPGMMMGMFNMLSTV
SPGMFMGWFDMLVTV

SEQ ID NO: 194296 - protein, 15 aa, Artificial Sequence
  Description of Artificial Sequence: Synthetic peptide
  Seed: SPGMMMGMFNMLSTV
SPGMFMGYFDMLITV

SEQ ID NO: 194297 - protein, 15 aa, Artificial Sequence
  Description of Artificial Sequence: Synthetic peptide
  Seed: SPGMMMGMFNMLSTV
SPGMFMGYFDMLVTV

SEQ ID NO: 194298 - protein, 15 aa, Artificial Sequence
  Description of Artificial Sequence: Synthetic peptide
  Seed: SPGMMMGMFNMLSTV
SPGMIMGAFAMLATV

SEQ ID NO: 194299 - protein, 15 aa, Artificial Sequence
  Description of Artificial Sequence: Synthetic peptide
  Seed: SPGMMMGMFNMLSTV
SPGMIMGAFAMLHTV

SEQ ID NO: 194300 - protein, 15 aa, Artificial Sequence
  Description of Artificial Sequence: Synthetic peptide
  Seed: SPGMMMGMFNMLSTV
SPGMIMGAFAMLNTV

SEQ ID NO: 194301 - protein, 15 aa, Artificial Sequence
  Description of Artificial Sequence: Synthetic peptide
  Seed: SPGMMMGMFNMLSTV
SPGMIMGAFDMLATV

SEQ ID NO: 194302 - protein, 15 aa, Artificial Sequence
  Description of Artificial Sequence: Synthetic peptide
  Seed: SPGMMMGMFNMLSTV
SPGMIMGAFDMLVTV

SEQ ID NO: 194303 - protein, 15 aa, Artificial Sequence
  Description of Artificial Sequence: Synthetic peptide
  Seed: SPGMMMGMFNMLSTV
SPGMIMGAFKMLHTV

SEQ ID NO: 194304 - protein, 15 aa, Artificial Sequence
  Description of Artificial Sequence: Synthetic peptide
  Seed: SPGMMMGMFNMLSTV
SPGMIMGAFKMLRTV

SEQ ID NO: 194305 - protein, 15 aa, Artificial Sequence
  Description of Artificial Sequence: Synthetic peptide
  Seed: SPGMMMGMFNMLSTV
SPGMIMGAFKMLSTV

SEQ ID NO: 194306 - protein, 15 aa, Artificial Sequence
  Description of Artificial Sequence: Synthetic peptide
  Seed: SPGMMMGMFNMLSTV
SPGMIMGAFPMLITV

SEQ ID NO: 194307 - protein, 15 aa, Artificial Sequence
  Description of Artificial Sequence: Synthetic peptide
  Seed: SPGMMMGMFNMLSTV
SPGMIMGAFPMLLTV

SEQ ID NO: 194308 - protein, 15 aa, Artificial Sequence
  Description of Artificial Sequence: Synthetic peptide
  Seed: SPGMMMGMFNMLSTV
SPGMIMGAFPMLMTV

SEQ ID NO: 194309 - protein, 15 aa, Artificial Sequence
  Description of Artificial Sequence: Synthetic peptide
  Seed: SPGMMMGMFNMLSTV
SPGMIMGAFPMLNTV

SEQ ID NO: 194310 - protein, 15 aa, Artificial Sequence
  Description of Artificial Sequence: Synthetic peptide
  Seed: SPGMMMGMFNMLSTV
SPGMIMGAFPMLRTV

SEQ ID NO: 194311 - protein, 15 aa, Artificial Sequence
  Description of Artificial Sequence: Synthetic peptide
  Seed: SPGMMMGMFNMLSTV
SPGMIMGAFPMLSTV

SEQ ID NO: 194312 - protein, 15 aa, Artificial Sequence
  Description of Artificial Sequence: Synthetic peptide
  Seed: SPGMMMGMFNMLSTV
SPGMIMGAFPMLTTV

SEQ ID NO: 194313 - protein, 15 aa, Artificial Sequence
  Description of Artificial Sequence: Synthetic peptide
  Seed: SPGMMMGMFNMLSTV
SPGMIMGAFPMLVTV

SEQ ID NO: 194314 - protein, 15 aa, Artificial Sequence
  Description of Artificial Sequence: Synthetic peptide
  Seed: SPGMMMGMFNMLSTV
SPGMIMGAFRMLHTV

SEQ ID NO: 194315 - protein, 15 aa, Artificial Sequence
  Description of Artificial Sequence: Synthetic peptide
  Seed: SPGMMMGMFNMLSTV
SPGMIMGAFRMLKTV

SEQ ID NO: 194316 - protein, 15 aa, Artificial Sequence
  Description of Artificial Sequence: Synthetic peptide
  Seed: SPGMMMGMFNMLSTV
SPGMIMGAFRMLRTV

SEQ ID NO: 194317 - protein, 15 aa, Artificial Sequence
  Description of Artificial Sequence: Synthetic peptide
  Seed: SPGMMMGMFNMLSTV
SPGMIMGFFDMLATV

SEQ ID NO: 194318 - protein, 15 aa, Artificial Sequence
  Description of Artificial Sequence: Synthetic peptide
  Seed: SPGMMMGMFNMLSTV
SPGMIMGFFDMLDTV

SEQ ID NO: 194319 - protein, 15 aa, Artificial Sequence
  Description of Artificial Sequence: Synthetic peptide
  Seed: SPGMMMGMFNMLSTV
SPGMIMGFFDMLETV

SEQ ID NO: 194320 - protein, 15 aa, Artificial Sequence
  Description of Artificial Sequence: Synthetic peptide
  Seed: SPGMMMGMFNMLSTV
SPGMIMGFFDMLGTV

SEQ ID NO: 194321 - protein, 15 aa, Artificial Sequence
  Description of Artificial Sequence: Synthetic peptide
  Seed: SPGMMMGMFNMLSTV
SPGMIMGFFDMLITV

SEQ ID NO: 194322 - protein, 15 aa, Artificial Sequence
  Description of Artificial Sequence: Synthetic peptide
  Seed: SPGMMMGMFNMLSTV
SPGMIMGFFDMLLTV

SEQ ID NO: 194323 - protein, 15 aa, Artificial Sequence
  Description of Artificial Sequence: Synthetic peptide
  Seed: SPGMMMGMFNMLSTV
SPGMIMGFFDMLMTV

SEQ ID NO: 194324 - protein, 15 aa, Artificial Sequence
  Description of Artificial Sequence: Synthetic peptide
  Seed: SPGMMMGMFNMLSTV
SPGMIMGFFDMLPTV

SEQ ID NO: 194325 - protein, 15 aa, Artificial Sequence
  Description of Artificial Sequence: Synthetic peptide
  Seed: SPGMMMGMFNMLSTV
SPGMIMGFFDMLSTV

SEQ ID NO: 194326 - protein, 15 aa, Artificial Sequence
  Description of Artificial Sequence: Synthetic peptide
  Seed: SPGMMMGMFNMLSTV
SPGMIMGFFDMLVTV

SEQ ID NO: 194327 - protein, 15 aa, Artificial Sequence
  Description of Artificial Sequence: Synthetic peptide
  Seed: SPGMMMGMFNMLSTV
SPGMIMGFFDMLYTV

SEQ ID NO: 194328 - protein, 15 aa, Artificial Sequence
  Description of Artificial Sequence: Synthetic peptide
  Seed: SPGMMMGMFNMLSTV
SPGMIMGHFAMLRTV

SEQ ID NO: 194329 - protein, 15 aa, Artificial Sequence
  Description of Artificial Sequence: Synthetic peptide
  Seed: SPGMMMGMFNMLSTV
SPGMIMGHFDMLATV

SEQ ID NO: 194330 - protein, 15 aa, Artificial Sequence
  Description of Artificial Sequence: Synthetic peptide
  Seed: SPGMMMGMFNMLSTV
SPGMIMGHFDMLITV

SEQ ID NO: 194331 - protein, 15 aa, Artificial Sequence
  Description of Artificial Sequence: Synthetic peptide
  Seed: SPGMMMGMFNMLSTV
SPGMIMGHFDMLLTV

SEQ ID NO: 194332 - protein, 15 aa, Artificial Sequence
  Description of Artificial Sequence: Synthetic peptide
  Seed: SPGMMMGMFNMLSTV
SPGMIMGHFDMLMTV

SEQ ID NO: 194333 - protein, 15 aa, Artificial Sequence
  Description of Artificial Sequence: Synthetic peptide
  Seed: SPGMMMGMFNMLSTV
SPGMIMGHFDMLVTV

SEQ ID NO: 194334 - protein, 15 aa, Artificial Sequence
  Description of Artificial Sequence: Synthetic peptide
  Seed: SPGMMMGMFNMLSTV
SPGMIMGHFKMLRTV

SEQ ID NO: 194335 - protein, 15 aa, Artificial Sequence
  Description of Artificial Sequence: Synthetic peptide
  Seed: SPGMMMGMFNMLSTV
SPGMIMGHFKMLYTV

SEQ ID NO: 194336 - protein, 15 aa, Artificial Sequence
  Description of Artificial Sequence: Synthetic peptide
  Seed: SPGMMMGMFNMLSTV
SPGMIMGHFRMLHTV

SEQ ID NO: 194337 - protein, 15 aa, Artificial Sequence
  Description of Artificial Sequence: Synthetic peptide
  Seed: SPGMMMGMFNMLSTV
SPGMIMGHFRMLKTV

SEQ ID NO: 194338 - protein, 15 aa, Artificial Sequence
  Description of Artificial Sequence: Synthetic peptide
  Seed: SPGMMMGMFNMLSTV
SPGMIMGHFRMLMTV

SEQ ID NO: 194339 - protein, 15 aa, Artificial Sequence
  Description of Artificial Sequence: Synthetic peptide
  Seed: SPGMMMGMFNMLSTV
SPGMIMGHFRMLRTV

SEQ ID NO: 194340 - protein, 15 aa, Artificial Sequence
  Description of Artificial Sequence: Synthetic peptide
  Seed: SPGMMMGMFNMLSTV
SPGMIMGHFRMLYTV

SEQ ID NO: 194341 - protein, 15 aa, Artificial Sequence
  Description of Artificial Sequence: Synthetic peptide
  Seed: SPGMMMGMFNMLSTV
SPGMIMGHFSMLRTV

SEQ ID NO: 194342 - protein, 15 aa, Artificial Sequence
  Description of Artificial Sequence: Synthetic peptide
  Seed: SPGMMMGMFNMLSTV
SPGMIMGHFTMLRTV

SEQ ID NO: 194343 - protein, 15 aa, Artificial Sequence
  Description of Artificial Sequence: Synthetic peptide
  Seed: SPGMMMGMFNMLSTV
SPGMIMGIFDMLATV

SEQ ID NO: 194344 - protein, 15 aa, Artificial Sequence
  Description of Artificial Sequence: Synthetic peptide
  Seed: SPGMMMGMFNMLSTV
SPGMIMGIFKMLHTV

SEQ ID NO: 194345 - protein, 15 aa, Artificial Sequence
  Description of Artificial Sequence: Synthetic peptide
  Seed: SPGMMMGMFNMLSTV
SPGMIMGIFKMLKTV

SEQ ID NO: 194346 - protein, 15 aa, Artificial Sequence
  Description of Artificial Sequence: Synthetic peptide
  Seed: SPGMMMGMFNMLSTV
SPGMIMGIFKMLRTV

SEQ ID NO: 194347 - protein, 15 aa, Artificial Sequence
  Description of Artificial Sequence: Synthetic peptide
  Seed: SPGMMMGMFNMLSTV
SPGMIMGIFPMLNTV

SEQ ID NO: 194348 - protein, 15 aa, Artificial Sequence
  Description of Artificial Sequence: Synthetic peptide
  Seed: SPGMMMGMFNMLSTV
SPGMIMGIFRMLHTV

SEQ ID NO: 194349 - protein, 15 aa, Artificial Sequence
  Description of Artificial Sequence: Synthetic peptide
  Seed: SPGMMMGMFNMLSTV
SPGMIMGIFRMLKTV

SEQ ID NO: 194350 - protein, 15 aa, Artificial Sequence
  Description of Artificial Sequence: Synthetic peptide
  Seed: SPGMMMGMFNMLSTV
SPGMIMGKFKMLRTV

SEQ ID NO: 194351 - protein, 15 aa, Artificial Sequence
  Description of Artificial Sequence: Synthetic peptide
  Seed: SPGMMMGMFNMLSTV
SPGMIMGKFRMLHTV

SEQ ID NO: 194352 - protein, 15 aa, Artificial Sequence
  Description of Artificial Sequence: Synthetic peptide
  Seed: SPGMMMGMFNMLSTV
SPGMIMGKFRMLRTV

SEQ ID NO: 194353 - protein, 15 aa, Artificial Sequence
  Description of Artificial Sequence: Synthetic peptide
  Seed: SPGMMMGMFNMLSTV
SPGMIMGLFKMLHTV

SEQ ID NO: 194354 - protein, 15 aa, Artificial Sequence
  Description of Artificial Sequence: Synthetic peptide
  Seed: SPGMMMGMFNMLSTV
SPGMIMGLFKMLKTV

SEQ ID NO: 194355 - protein, 15 aa, Artificial Sequence
  Description of Artificial Sequence: Synthetic peptide
  Seed: SPGMMMGMFNMLSTV
SPGMIMGLFKMLRTV

SEQ ID NO: 194356 - protein, 15 aa, Artificial Sequence
  Description of Artificial Sequence: Synthetic peptide
  Seed: SPGMMMGMFNMLSTV
SPGMIMGLFPMLATV

SEQ ID NO: 194357 - protein, 15 aa, Artificial Sequence
  Description of Artificial Sequence: Synthetic peptide
  Seed: SPGMMMGMFNMLSTV
SPGMIMGLFPMLHTV

SEQ ID NO: 194358 - protein, 15 aa, Artificial Sequence
  Description of Artificial Sequence: Synthetic peptide
  Seed: SPGMMMGMFNMLSTV
SPGMIMGLFPMLNTV

SEQ ID NO: 194359 - protein, 15 aa, Artificial Sequence
  Description of Artificial Sequence: Synthetic peptide
  Seed: SPGMMMGMFNMLSTV
SPGMIMGLFPMLSTV

SEQ ID NO: 194360 - protein, 15 aa, Artificial Sequence
  Description of Artificial Sequence: Synthetic peptide
  Seed: SPGMMMGMFNMLSTV
SPGMIMGLFPMLTTV

SEQ ID NO: 194361 - protein, 15 aa, Artificial Sequence
  Description of Artificial Sequence: Synthetic peptide
  Seed: SPGMMMGMFNMLSTV
SPGMIMGLFPMLVTV

SEQ ID NO: 194362 - protein, 15 aa, Artificial Sequence
  Description of Artificial Sequence: Synthetic peptide
  Seed: SPGMMMGMFNMLSTV
SPGMIMGLFRMLHTV

SEQ ID NO: 194363 - protein, 15 aa, Artificial Sequence
  Description of Artificial Sequence: Synthetic peptide
  Seed: SPGMMMGMFNMLSTV
SPGMIMGLFRMLKTV

SEQ ID NO: 194364 - protein, 15 aa, Artificial Sequence
  Description of Artificial Sequence: Synthetic peptide
  Seed: SPGMMMGMFNMLSTV
SPGMIMGLFRMLRTV

SEQ ID NO: 194365 - protein, 15 aa, Artificial Sequence
  Description of Artificial Sequence: Synthetic peptide
  Seed: SPGMMMGMFNMLSTV
SPGMIMGMFAMLHTV

SEQ ID NO: 194366 - protein, 15 aa, Artificial Sequence
  Description of Artificial Sequence: Synthetic peptide
  Seed: SPGMMMGMFNMLSTV
SPGMIMGMFDMLATV

SEQ ID NO: 194367 - protein, 15 aa, Artificial Sequence
  Description of Artificial Sequence: Synthetic peptide
  Seed: SPGMMMGMFNMLSTV
SPGMIMGMFDMLITV

SEQ ID NO: 194368 - protein, 15 aa, Artificial Sequence
  Description of Artificial Sequence: Synthetic peptide
  Seed: SPGMMMGMFNMLSTV
SPGMIMGMFDMLMTV

SEQ ID NO: 194369 - protein, 15 aa, Artificial Sequence
  Description of Artificial Sequence: Synthetic peptide
  Seed: SPGMMMGMFNMLSTV
SPGMIMGMFDMLVTV

SEQ ID NO: 194370 - protein, 15 aa, Artificial Sequence
  Description of Artificial Sequence: Synthetic peptide
  Seed: SPGMMMGMFNMLSTV
SPGMIMGMFKMLHTV

SEQ ID NO: 194371 - protein, 15 aa, Artificial Sequence
  Description of Artificial Sequence: Synthetic peptide
  Seed: SPGMMMGMFNMLSTV
SPGMIMGMFKMLKTV

SEQ ID NO: 194372 - protein, 15 aa, Artificial Sequence
  Description of Artificial Sequence: Synthetic peptide
  Seed: SPGMMMGMFNMLSTV
SPGMIMGMFKMLRTV

SEQ ID NO: 194373 - protein, 15 aa, Artificial Sequence
  Description of Artificial Sequence: Synthetic peptide
  Seed: SPGMMMGMFNMLSTV
SPGMIMGMFKMLSTV

SEQ ID NO: 194374 - protein, 15 aa, Artificial Sequence
  Description of Artificial Sequence: Synthetic peptide
  Seed: SPGMMMGMFNMLSTV
SPGMIMGMFNMLATV

SEQ ID NO: 194375 - protein, 15 aa, Artificial Sequence
  Description of Artificial Sequence: Synthetic peptide
  Seed: SPGMMMGMFNMLSTV
SPGMIMGMFNMLHTV

SEQ ID NO: 194376 - protein, 15 aa, Artificial Sequence
  Description of Artificial Sequence: Synthetic peptide
  Seed: SPGMMMGMFNMLSTV
SPGMIMGMFNMLSTV

SEQ ID NO: 194377 - protein, 15 aa, Artificial Sequence
  Description of Artificial Sequence: Synthetic peptide
  Seed: SPGMMMGMFNMLSTV
SPGMIMGMFPMLATV

SEQ ID NO: 194378 - protein, 15 aa, Artificial Sequence
  Description of Artificial Sequence: Synthetic peptide
  Seed: SPGMMMGMFNMLSTV
SPGMIMGMFPMLHTV

SEQ ID NO: 194379 - protein, 15 aa, Artificial Sequence
  Description of Artificial Sequence: Synthetic peptide
  Seed: SPGMMMGMFNMLSTV
SPGMIMGMFPMLITV

SEQ ID NO: 194380 - protein, 15 aa, Artificial Sequence
  Description of Artificial Sequence: Synthetic peptide
  Seed: SPGMMMGMFNMLSTV
SPGMIMGMFPMLLTV

SEQ ID NO: 194381 - protein, 15 aa, Artificial Sequence
  Description of Artificial Sequence: Synthetic peptide
  Seed: SPGMMMGMFNMLSTV
SPGMIMGMFPMLMTV

SEQ ID NO: 194382 - protein, 15 aa, Artificial Sequence
  Description of Artificial Sequence: Synthetic peptide
  Seed: SPGMMMGMFNMLSTV
SPGMIMGMFPMLNTV

SEQ ID NO: 194383 - protein, 15 aa, Artificial Sequence
  Description of Artificial Sequence: Synthetic peptide
  Seed: SPGMMMGMFNMLSTV
SPGMIMGMFPMLSTV

SEQ ID NO: 194384 - protein, 15 aa, Artificial Sequence
  Description of Artificial Sequence: Synthetic peptide
  Seed: SPGMMMGMFNMLSTV
SPGMIMGMFPMLTTV

SEQ ID NO: 194385 - protein, 15 aa, Artificial Sequence
  Description of Artificial Sequence: Synthetic peptide
  Seed: SPGMMMGMFNMLSTV
SPGMIMGMFPMLVTV

SEQ ID NO: 194386 - protein, 15 aa, Artificial Sequence
  Description of Artificial Sequence: Synthetic peptide
  Seed: SPGMMMGMFNMLSTV
SPGMIMGMFRMLKTV

SEQ ID NO: 194387 - protein, 15 aa, Artificial Sequence
  Description of Artificial Sequence: Synthetic peptide
  Seed: SPGMMMGMFNMLSTV
SPGMIMGMFTMLHTV

SEQ ID NO: 194388 - protein, 15 aa, Artificial Sequence
  Description of Artificial Sequence: Synthetic peptide
  Seed: SPGMMMGMFNMLSTV
SPGMIMGNFAMLVTV

SEQ ID NO: 194389 - protein, 15 aa, Artificial Sequence
  Description of Artificial Sequence: Synthetic peptide
  Seed: SPGMMMGMFNMLSTV
SPGMIMGQFAMLATV

SEQ ID NO: 194390 - protein, 15 aa, Artificial Sequence
  Description of Artificial Sequence: Synthetic peptide
  Seed: SPGMMMGMFNMLSTV
SPGMIMGQFAMLVTV

SEQ ID NO: 194391 - protein, 15 aa, Artificial Sequence
  Description of Artificial Sequence: Synthetic peptide
  Seed: SPGMMMGMFNMLSTV
SPGMIMGQFNMLATV

SEQ ID NO: 194392 - protein, 15 aa, Artificial Sequence
  Description of Artificial Sequence: Synthetic peptide
  Seed: SPGMMMGMFNMLSTV
SPGMIMGQFPMLVTV

SEQ ID NO: 194393 - protein, 15 aa, Artificial Sequence
  Description of Artificial Sequence: Synthetic peptide
  Seed: SPGMMMGMFNMLSTV
SPGMIMGQFRMLRTV

SEQ ID NO: 194394 - protein, 15 aa, Artificial Sequence
  Description of Artificial Sequence: Synthetic peptide
  Seed: SPGMMMGMFNMLSTV
SPGMIMGRFKMLRTV

SEQ ID NO: 194395 - protein, 15 aa, Artificial Sequence
  Description of Artificial Sequence: Synthetic peptide
  Seed: SPGMMMGMFNMLSTV
SPGMIMGRFRMLHTV

SEQ ID NO: 194396 - protein, 15 aa, Artificial Sequence
  Description of Artificial Sequence: Synthetic peptide
  Seed: SPGMMMGMFNMLSTV
SPGMIMGRFRMLKTV

SEQ ID NO: 194397 - protein, 15 aa, Artificial Sequence
  Description of Artificial Sequence: Synthetic peptide
  Seed: SPGMMMGMFNMLSTV
SPGMIMGRFRMLRTV

SEQ ID NO: 194398 - protein, 15 aa, Artificial Sequence
  Description of Artificial Sequence: Synthetic peptide
  Seed: SPGMMMGMFNMLSTV
SPGMIMGRFRMLYTV

SEQ ID NO: 194399 - protein, 15 aa, Artificial Sequence
  Description of Artificial Sequence: Synthetic peptide
  Seed: SPGMMMGMFNMLSTV
SPGMIMGSFPMLATV

SEQ ID NO: 194400 - protein, 15 aa, Artificial Sequence
  Description of Artificial Sequence: Synthetic peptide
  Seed: SPGMMMGMFNMLSTV
SPGMIMGSFPMLVTV

SEQ ID NO: 194401 - protein, 15 aa, Artificial Sequence
  Description of Artificial Sequence: Synthetic peptide
  Seed: SPGMMMGMFNMLSTV
SPGMIMGSFRMLRTV

SEQ ID NO: 194402 - protein, 15 aa, Artificial Sequence
  Description of Artificial Sequence: Synthetic peptide
  Seed: SPGMMMGMFNMLSTV
SPGMIMGVFKMLHTV

SEQ ID NO: 194403 - protein, 15 aa, Artificial Sequence
  Description of Artificial Sequence: Synthetic peptide
  Seed: SPGMMMGMFNMLSTV
SPGMIMGVFKMLKTV

SEQ ID NO: 194404 - protein, 15 aa, Artificial Sequence
  Description of Artificial Sequence: Synthetic peptide
  Seed: SPGMMMGMFNMLSTV
SPGMIMGVFRMLHTV

SEQ ID NO: 194405 - protein, 15 aa, Artificial Sequence
  Description of Artificial Sequence: Synthetic peptide
  Seed: SPGMMMGMFNMLSTV
SPGMIMGVFRMLKTV

SEQ ID NO: 194406 - protein, 15 aa, Artificial Sequence
  Description of Artificial Sequence: Synthetic peptide
  Seed: SPGMMMGMFNMLSTV
SPGMIMGWFDMLATV

SEQ ID NO: 194407 - protein, 15 aa, Artificial Sequence
  Description of Artificial Sequence: Synthetic peptide
  Seed: SPGMMMGMFNMLSTV
SPGMIMGWFDMLFTV

SEQ ID NO: 194408 - protein, 15 aa, Artificial Sequence
  Description of Artificial Sequence: Synthetic peptide
  Seed: SPGMMMGMFNMLSTV
SPGMIMGWFDMLITV

SEQ ID NO: 194409 - protein, 15 aa, Artificial Sequence
  Description of Artificial Sequence: Synthetic peptide
  Seed: SPGMMMGMFNMLSTV
SPGMIMGWFDMLLTV

SEQ ID NO: 194410 - protein, 15 aa, Artificial Sequence
  Description of Artificial Sequence: Synthetic peptide
  Seed: SPGMMMGMFNMLSTV
SPGMIMGWFDMLMTV

SEQ ID NO: 194411 - protein, 15 aa, Artificial Sequence
  Description of Artificial Sequence: Synthetic peptide
  Seed: SPGMMMGMFNMLSTV
SPGMIMGWFDMLSTV

SEQ ID NO: 194412 - protein, 15 aa, Artificial Sequence
  Description of Artificial Sequence: Synthetic peptide
  Seed: SPGMMMGMFNMLSTV
SPGMIMGWFDMLVTV

SEQ ID NO: 194413 - protein, 15 aa, Artificial Sequence
  Description of Artificial Sequence: Synthetic peptide
  Seed: SPGMMMGMFNMLSTV
SPGMIMGWFDMLYTV

SEQ ID NO: 194414 - protein, 15 aa, Artificial Sequence
  Description of Artificial Sequence: Synthetic peptide
  Seed: SPGMMMGMFNMLSTV
SPGMIMGWFNMLATV

SEQ ID NO: 194415 - protein, 15 aa, Artificial Sequence
  Description of Artificial Sequence: Synthetic peptide
  Seed: SPGMMMGMFNMLSTV
SPGMIMGWFNMLITV

SEQ ID NO: 194416 - protein, 15 aa, Artificial Sequence
  Description of Artificial Sequence: Synthetic peptide
  Seed: SPGMMMGMFNMLSTV
SPGMIMGWFNMLVTV

SEQ ID NO: 194417 - protein, 15 aa, Artificial Sequence
  Description of Artificial Sequence: Synthetic peptide
  Seed: SPGMMMGMFNMLSTV
SPGMIMGYFDMLATV

SEQ ID NO: 194418 - protein, 15 aa, Artificial Sequence
  Description of Artificial Sequence: Synthetic peptide
  Seed: SPGMMMGMFNMLSTV
SPGMIMGYFDMLETV

SEQ ID NO: 194419 - protein, 15 aa, Artificial Sequence
  Description of Artificial Sequence: Synthetic peptide
  Seed: SPGMMMGMFNMLSTV
SPGMIMGYFDMLFTV

SEQ ID NO: 194420 - protein, 15 aa, Artificial Sequence
  Description of Artificial Sequence: Synthetic peptide
  Seed: SPGMMMGMFNMLSTV
SPGMIMGYFDMLITV

SEQ ID NO: 194421 - protein, 15 aa, Artificial Sequence
  Description of Artificial Sequence: Synthetic peptide
  Seed: SPGMMMGMFNMLSTV
SPGMIMGYFDMLLTV

SEQ ID NO: 194422 - protein, 15 aa, Artificial Sequence
  Description of Artificial Sequence: Synthetic peptide
  Seed: SPGMMMGMFNMLSTV
SPGMIMGYFDMLMTV

SEQ ID NO: 194423 - protein, 15 aa, Artificial Sequence
  Description of Artificial Sequence: Synthetic peptide
  Seed: SPGMMMGMFNMLSTV
SPGMIMGYFDMLQTV

SEQ ID NO: 194424 - protein, 15 aa, Artificial Sequence
  Description of Artificial Sequence: Synthetic peptide
  Seed: SPGMMMGMFNMLSTV
SPGMIMGYFDMLSTV

SEQ ID NO: 194425 - protein, 15 aa, Artificial Sequence
  Description of Artificial Sequence: Synthetic peptide
  Seed: SPGMMMGMFNMLSTV
SPGMIMGYFDMLVTV

SEQ ID NO: 194426 - protein, 15 aa, Artificial Sequence
  Description of Artificial Sequence: Synthetic peptide
  Seed: SPGMMMGMFNMLSTV
SPGMIMGYFDMLYTV

SEQ ID NO: 194427 - protein, 15 aa, Artificial Sequence
  Description of Artificial Sequence: Synthetic peptide
  Seed: SPGMMMGMFNMLSTV
SPGMIMGYFNMLATV

SEQ ID NO: 194428 - protein, 15 aa, Artificial Sequence
  Description of Artificial Sequence: Synthetic peptide
  Seed: SPGMMMGMFNMLSTV
SPGMIMGYFNMLVTV

SEQ ID NO: 194429 - protein, 15 aa, Artificial Sequence
  Description of Artificial Sequence: Synthetic peptide
  Seed: SPGMMMGMFNMLSTV
SPGMLMGAFAMLATV

SEQ ID NO: 194430 - protein, 15 aa, Artificial Sequence
  Description of Artificial Sequence: Synthetic peptide
  Seed: SPGMMMGMFNMLSTV
SPGMLMGAFAMLHTV

SEQ ID NO: 194431 - protein, 15 aa, Artificial Sequence
  Description of Artificial Sequence: Synthetic peptide
  Seed: SPGMMMGMFNMLSTV
SPGMLMGAFAMLNTV

SEQ ID NO: 194432 - protein, 15 aa, Artificial Sequence
  Description of Artificial Sequence: Synthetic peptide
  Seed: SPGMMMGMFNMLSTV
SPGMLMGAFAMLSTV

SEQ ID NO: 194433 - protein, 15 aa, Artificial Sequence
  Description of Artificial Sequence: Synthetic peptide
  Seed: SPGMMMGMFNMLSTV
SPGMLMGAFDMLATV

SEQ ID NO: 194434 - protein, 15 aa, Artificial Sequence
  Description of Artificial Sequence: Synthetic peptide
  Seed: SPGMMMGMFNMLSTV
SPGMLMGAFPMLATV

SEQ ID NO: 194435 - protein, 15 aa, Artificial Sequence
  Description of Artificial Sequence: Synthetic peptide
  Seed: SPGMMMGMFNMLSTV
SPGMLMGAFPMLITV

SEQ ID NO: 194436 - protein, 15 aa, Artificial Sequence
  Description of Artificial Sequence: Synthetic peptide
  Seed: SPGMMMGMFNMLSTV
SPGMLMGAFPMLLTV

SEQ ID NO: 194437 - protein, 15 aa, Artificial Sequence
  Description of Artificial Sequence: Synthetic peptide
  Seed: SPGMMMGMFNMLSTV
SPGMLMGAFPMLMTV

SEQ ID NO: 194438 - protein, 15 aa, Artificial Sequence
  Description of Artificial Sequence: Synthetic peptide
  Seed: SPGMMMGMFNMLSTV
SPGMLMGAFPMLNTV

SEQ ID NO: 194439 - protein, 15 aa, Artificial Sequence
  Description of Artificial Sequence: Synthetic peptide
  Seed: SPGMMMGMFNMLSTV
SPGMLMGAFPMLRTV

SEQ ID NO: 194440 - protein, 15 aa, Artificial Sequence
  Description of Artificial Sequence: Synthetic peptide
  Seed: SPGMMMGMFNMLSTV
SPGMLMGAFPMLSTV

SEQ ID NO: 194441 - protein, 15 aa, Artificial Sequence
  Description of Artificial Sequence: Synthetic peptide
  Seed: SPGMMMGMFNMLSTV
SPGMLMGAFPMLTTV

SEQ ID NO: 194442 - protein, 15 aa, Artificial Sequence
  Description of Artificial Sequence: Synthetic peptide
  Seed: SPGMMMGMFNMLSTV
SPGMLMGAFPMLVTV

SEQ ID NO: 194443 - protein, 15 aa, Artificial Sequence
  Description of Artificial Sequence: Synthetic peptide
  Seed: SPGMMMGMFNMLSTV
SPGMLMGFFDMLATV

SEQ ID NO: 194444 - protein, 15 aa, Artificial Sequence
  Description of Artificial Sequence: Synthetic peptide
  Seed: SPGMMMGMFNMLSTV
SPGMLMGFFDMLITV

SEQ ID NO: 194445 - protein, 15 aa, Artificial Sequence
  Description of Artificial Sequence: Synthetic peptide
  Seed: SPGMMMGMFNMLSTV
SPGMLMGFFDMLMTV

SEQ ID NO: 194446 - protein, 15 aa, Artificial Sequence
  Description of Artificial Sequence: Synthetic peptide
  Seed: SPGMMMGMFNMLSTV
SPGMLMGFFDMLSTV

SEQ ID NO: 194447 - protein, 15 aa, Artificial Sequence
  Description of Artificial Sequence: Synthetic peptide
  Seed: SPGMMMGMFNMLSTV
SPGMLMGFFDMLVTV

SEQ ID NO: 194448 - protein, 15 aa, Artificial Sequence
  Description of Artificial Sequence: Synthetic peptide
  Seed: SPGMMMGMFNMLSTV
SPGMLMGHFKMLRTV

SEQ ID NO: 194449 - protein, 15 aa, Artificial Sequence
  Description of Artificial Sequence: Synthetic peptide
  Seed: SPGMMMGMFNMLSTV
SPGMLMGHFKMLYTV

SEQ ID NO: 194450 - protein, 15 aa, Artificial Sequence
  Description of Artificial Sequence: Synthetic peptide
  Seed: SPGMMMGMFNMLSTV
SPGMLMGHFRMLRTV

SEQ ID NO: 194451 - protein, 15 aa, Artificial Sequence
  Description of Artificial Sequence: Synthetic peptide
  Seed: SPGMMMGMFNMLSTV
SPGMLMGHFRMLYTV

SEQ ID NO: 194452 - protein, 15 aa, Artificial Sequence
  Description of Artificial Sequence: Synthetic peptide
  Seed: SPGMMMGMFNMLSTV
SPGMLMGIFKMLHTV

SEQ ID NO: 194453 - protein, 15 aa, Artificial Sequence
  Description of Artificial Sequence: Synthetic peptide
  Seed: SPGMMMGMFNMLSTV
SPGMLMGIFKMLKTV

SEQ ID NO: 194454 - protein, 15 aa, Artificial Sequence
  Description of Artificial Sequence: Synthetic peptide
  Seed: SPGMMMGMFNMLSTV
SPGMLMGIFKMLRTV

SEQ ID NO: 194455 - protein, 15 aa, Artificial Sequence
  Description of Artificial Sequence: Synthetic peptide
  Seed: SPGMMMGMFNMLSTV
SPGMLMGIFPMLNTV

SEQ ID NO: 194456 - protein, 15 aa, Artificial Sequence
  Description of Artificial Sequence: Synthetic peptide
  Seed: SPGMMMGMFNMLSTV
SPGMLMGIFRMLHTV

SEQ ID NO: 194457 - protein, 15 aa, Artificial Sequence
  Description of Artificial Sequence: Synthetic peptide
  Seed: SPGMMMGMFNMLSTV
SPGMLMGIFRMLKTV

SEQ ID NO: 194458 - protein, 15 aa, Artificial Sequence
  Description of Artificial Sequence: Synthetic peptide
  Seed: SPGMMMGMFNMLSTV
SPGMLMGKFRMLRTV

SEQ ID NO: 194459 - protein, 15 aa, Artificial Sequence
  Description of Artificial Sequence: Synthetic peptide
  Seed: SPGMMMGMFNMLSTV
SPGMLMGLFKMLHTV

SEQ ID NO: 194460 - protein, 15 aa, Artificial Sequence
  Description of Artificial Sequence: Synthetic peptide
  Seed: SPGMMMGMFNMLSTV
SPGMLMGLFKMLKTV

SEQ ID NO: 194461 - protein, 15 aa, Artificial Sequence
  Description of Artificial Sequence: Synthetic peptide
  Seed: SPGMMMGMFNMLSTV
SPGMLMGLFKMLRTV

SEQ ID NO: 194462 - protein, 15 aa, Artificial Sequence
  Description of Artificial Sequence: Synthetic peptide
  Seed: SPGMMMGMFNMLSTV
SPGMLMGLFPMLATV

SEQ ID NO: 194463 - protein, 15 aa, Artificial Sequence
  Description of Artificial Sequence: Synthetic peptide
  Seed: SPGMMMGMFNMLSTV
SPGMLMGLFPMLHTV

SEQ ID NO: 194464 - protein, 15 aa, Artificial Sequence
  Description of Artificial Sequence: Synthetic peptide
  Seed: SPGMMMGMFNMLSTV
SPGMLMGLFPMLNTV

SEQ ID NO: 194465 - protein, 15 aa, Artificial Sequence
  Description of Artificial Sequence: Synthetic peptide
  Seed: SPGMMMGMFNMLSTV
SPGMLMGLFPMLSTV

SEQ ID NO: 194466 - protein, 15 aa, Artificial Sequence
  Description of Artificial Sequence: Synthetic peptide
  Seed: SPGMMMGMFNMLSTV
SPGMLMGLFPMLVTV

SEQ ID NO: 194467 - protein, 15 aa, Artificial Sequence
  Description of Artificial Sequence: Synthetic peptide
  Seed: SPGMMMGMFNMLSTV
SPGMLMGLFRMLHTV

SEQ ID NO: 194468 - protein, 15 aa, Artificial Sequence
  Description of Artificial Sequence: Synthetic peptide
  Seed: SPGMMMGMFNMLSTV
SPGMLMGLFRMLKTV

SEQ ID NO: 194469 - protein, 15 aa, Artificial Sequence
  Description of Artificial Sequence: Synthetic peptide
  Seed: SPGMMMGMFNMLSTV
SPGMLMGLFRMLRTV

SEQ ID NO: 194470 - protein, 15 aa, Artificial Sequence
  Description of Artificial Sequence: Synthetic peptide
  Seed: SPGMMMGMFNMLSTV
SPGMLMGMFAMLHTV

SEQ ID NO: 194471 - protein, 15 aa, Artificial Sequence
  Description of Artificial Sequence: Synthetic peptide
  Seed: SPGMMMGMFNMLSTV
SPGMLMGMFAMLNTV

SEQ ID NO: 194472 - protein, 15 aa, Artificial Sequence
  Description of Artificial Sequence: Synthetic peptide
  Seed: SPGMMMGMFNMLSTV
SPGMLMGMFDMLATV

SEQ ID NO: 194473 - protein, 15 aa, Artificial Sequence
  Description of Artificial Sequence: Synthetic peptide
  Seed: SPGMMMGMFNMLSTV
SPGMLMGMFDMLITV

SEQ ID NO: 194474 - protein, 15 aa, Artificial Sequence
  Description of Artificial Sequence: Synthetic peptide
  Seed: SPGMMMGMFNMLSTV
SPGMLMGMFDMLMTV

SEQ ID NO: 194475 - protein, 15 aa, Artificial Sequence
  Description of Artificial Sequence: Synthetic peptide
  Seed: SPGMMMGMFNMLSTV
SPGMLMGMFDMLVTV

SEQ ID NO: 194476 - protein, 15 aa, Artificial Sequence
  Description of Artificial Sequence: Synthetic peptide
  Seed: SPGMMMGMFNMLSTV
SPGMLMGMFKMLHTV

SEQ ID NO: 194477 - protein, 15 aa, Artificial Sequence
  Description of Artificial Sequence: Synthetic peptide
  Seed: SPGMMMGMFNMLSTV
SPGMLMGMFKMLKTV

SEQ ID NO: 194478 - protein, 15 aa, Artificial Sequence
  Description of Artificial Sequence: Synthetic peptide
  Seed: SPGMMMGMFNMLSTV
SPGMLMGMFKMLRTV

SEQ ID NO: 194479 - protein, 15 aa, Artificial Sequence
  Description of Artificial Sequence: Synthetic peptide
  Seed: SPGMMMGMFNMLSTV
SPGMLMGMFKMLSTV

SEQ ID NO: 194480 - protein, 15 aa, Artificial Sequence
  Description of Artificial Sequence: Synthetic peptide
  Seed: SPGMMMGMFNMLSTV
SPGMLMGMFPMLATV

SEQ ID NO: 194481 - protein, 15 aa, Artificial Sequence
  Description of Artificial Sequence: Synthetic peptide
  Seed: SPGMMMGMFNMLSTV
SPGMLMGMFPMLHTV

SEQ ID NO: 194482 - protein, 15 aa, Artificial Sequence
  Description of Artificial Sequence: Synthetic peptide
  Seed: SPGMMMGMFNMLSTV
SPGMLMGMFPMLITV

SEQ ID NO: 194483 - protein, 15 aa, Artificial Sequence
  Description of Artificial Sequence: Synthetic peptide
  Seed: SPGMMMGMFNMLSTV
SPGMLMGMFPMLLTV

SEQ ID NO: 194484 - protein, 15 aa, Artificial Sequence
  Description of Artificial Sequence: Synthetic peptide
  Seed: SPGMMMGMFNMLSTV
SPGMLMGMFPMLMTV

SEQ ID NO: 194485 - protein, 15 aa, Artificial Sequence
  Description of Artificial Sequence: Synthetic peptide
  Seed: SPGMMMGMFNMLSTV
SPGMLMGMFPMLNTV

SEQ ID NO: 194486 - protein, 15 aa, Artificial Sequence
  Description of Artificial Sequence: Synthetic peptide
  Seed: SPGMMMGMFNMLSTV
SPGMLMGMFPMLSTV

SEQ ID NO: 194487 - protein, 15 aa, Artificial Sequence
  Description of Artificial Sequence: Synthetic peptide
  Seed: SPGMMMGMFNMLSTV
SPGMLMGMFPMLTTV

SEQ ID NO: 194488 - protein, 15 aa, Artificial Sequence
  Description of Artificial Sequence: Synthetic peptide
  Seed: SPGMMMGMFNMLSTV
SPGMLMGMFPMLVTV

SEQ ID NO: 194489 - protein, 15 aa, Artificial Sequence
  Description of Artificial Sequence: Synthetic peptide
  Seed: SPGMMMGMFNMLSTV
SPGMLMGMFRMLHTV

SEQ ID NO: 194490 - protein, 15 aa, Artificial Sequence
  Description of Artificial Sequence: Synthetic peptide
  Seed: SPGMMMGMFNMLSTV
SPGMLMGMFRMLKTV

SEQ ID NO: 194491 - protein, 15 aa, Artificial Sequence
  Description of Artificial Sequence: Synthetic peptide
  Seed: SPGMMMGMFNMLSTV
SPGMLMGMFRMLRTV

SEQ ID NO: 194492 - protein, 15 aa, Artificial Sequence
  Description of Artificial Sequence: Synthetic peptide
  Seed: SPGMMMGMFNMLSTV
SPGMLMGQFAMLATV

SEQ ID NO: 194493 - protein, 15 aa, Artificial Sequence
  Description of Artificial Sequence: Synthetic peptide
  Seed: SPGMMMGMFNMLSTV
SPGMLMGQFAMLVTV

SEQ ID NO: 194494 - protein, 15 aa, Artificial Sequence
  Description of Artificial Sequence: Synthetic peptide
  Seed: SPGMMMGMFNMLSTV
SPGMLMGRFRMLRTV

SEQ ID NO: 194495 - protein, 15 aa, Artificial Sequence
  Description of Artificial Sequence: Synthetic peptide
  Seed: SPGMMMGMFNMLSTV
SPGMLMGWFDMLATV

SEQ ID NO: 194496 - protein, 15 aa, Artificial Sequence
  Description of Artificial Sequence: Synthetic peptide
  Seed: SPGMMMGMFNMLSTV
SPGMLMGWFDMLITV

SEQ ID NO: 194497 - protein, 15 aa, Artificial Sequence
  Description of Artificial Sequence: Synthetic peptide
  Seed: SPGMMMGMFNMLSTV
SPGMLMGWFDMLLTV

SEQ ID NO: 194498 - protein, 15 aa, Artificial Sequence
  Description of Artificial Sequence: Synthetic peptide
  Seed: SPGMMMGMFNMLSTV
SPGMLMGWFDMLMTV

SEQ ID NO: 194499 - protein, 15 aa, Artificial Sequence
  Description of Artificial Sequence: Synthetic peptide
  Seed: SPGMMMGMFNMLSTV
SPGMLMGWFDMLVTV

SEQ ID NO: 194500 - protein, 15 aa, Artificial Sequence
  Description of Artificial Sequence: Synthetic peptide
  Seed: SPGMMMGMFNMLSTV
SPGMLMGWFNMLATV

SEQ ID NO: 194501 - protein, 15 aa, Artificial Sequence
  Description of Artificial Sequence: Synthetic peptide
  Seed: SPGMMMGMFNMLSTV
SPGMLMGWFNMLVTV

SEQ ID NO: 194502 - protein, 15 aa, Artificial Sequence
  Description of Artificial Sequence: Synthetic peptide
  Seed: SPGMMMGMFNMLSTV
SPGMLMGYFDMLATV

SEQ ID NO: 194503 - protein, 15 aa, Artificial Sequence
  Description of Artificial Sequence: Synthetic peptide
  Seed: SPGMMMGMFNMLSTV
SPGMLMGYFDMLITV

SEQ ID NO: 194504 - protein, 15 aa, Artificial Sequence
  Description of Artificial Sequence: Synthetic peptide
  Seed: SPGMMMGMFNMLSTV
SPGMLMGYFDMLLTV

SEQ ID NO: 194505 - protein, 15 aa, Artificial Sequence
  Description of Artificial Sequence: Synthetic peptide
  Seed: SPGMMMGMFNMLSTV
SPGMLMGYFDMLMTV

SEQ ID NO: 194506 - protein, 15 aa, Artificial Sequence
  Description of Artificial Sequence: Synthetic peptide
  Seed: SPGMMMGMFNMLSTV
SPGMLMGYFDMLVTV

SEQ ID NO: 194507 - protein, 15 aa, Artificial Sequence
  Description of Artificial Sequence: Synthetic peptide
  Seed: SPGMMMGMFNMLSTV
SPGMLMGYFDMLYTV

SEQ ID NO: 194508 - protein, 15 aa, Artificial Sequence
  Description of Artificial Sequence: Synthetic peptide
  Seed: SPGMMMGMFNMLSTV
SPGMMMGAFAMLATV

SEQ ID NO: 194509 - protein, 15 aa, Artificial Sequence
  Description of Artificial Sequence: Synthetic peptide
  Seed: SPGMMMGMFNMLSTV
SPGMMMGAFAMLNTV

SEQ ID NO: 194510 - protein, 15 aa, Artificial Sequence
  Description of Artificial Sequence: Synthetic peptide
  Seed: SPGMMMGMFNMLSTV
SPGMMMGAFAMLSTV

SEQ ID NO: 194511 - protein, 15 aa, Artificial Sequence
  Description of Artificial Sequence: Synthetic peptide
  Seed: SPGMMMGMFNMLSTV
SPGMMMGAFAMLTTV

SEQ ID NO: 194512 - protein, 15 aa, Artificial Sequence
  Description of Artificial Sequence: Synthetic peptide
  Seed: SPGMMMGMFNMLSTV
SPGMMMGAFAMLVTV

SEQ ID NO: 194513 - protein, 15 aa, Artificial Sequence
  Description of Artificial Sequence: Synthetic peptide
  Seed: SPGMMMGMFNMLSTV
SPGMMMGAFPMLATV

SEQ ID NO: 194514 - protein, 15 aa, Artificial Sequence
  Description of Artificial Sequence: Synthetic peptide
  Seed: SPGMMMGMFNMLSTV
SPGMMMGAFPMLITV

SEQ ID NO: 194515 - protein, 15 aa, Artificial Sequence
  Description of Artificial Sequence: Synthetic peptide
  Seed: SPGMMMGMFNMLSTV
SPGMMMGAFPMLLTV

SEQ ID NO: 194516 - protein, 15 aa, Artificial Sequence
  Description of Artificial Sequence: Synthetic peptide
  Seed: SPGMMMGMFNMLSTV
SPGMMMGAFPMLMTV

SEQ ID NO: 194517 - protein, 15 aa, Artificial Sequence
  Description of Artificial Sequence: Synthetic peptide
  Seed: SPGMMMGMFNMLSTV
SPGMMMGAFPMLRTV

SEQ ID NO: 194518 - protein, 15 aa, Artificial Sequence
  Description of Artificial Sequence: Synthetic peptide
  Seed: SPGMMMGMFNMLSTV
SPGMMMGAFPMLSTV

SEQ ID NO: 194519 - protein, 15 aa, Artificial Sequence
  Description of Artificial Sequence: Synthetic peptide
  Seed: SPGMMMGMFNMLSTV
SPGMMMGAFPMLTTV

SEQ ID NO: 194520 - protein, 15 aa, Artificial Sequence
  Description of Artificial Sequence: Synthetic peptide
  Seed: SPGMMMGMFNMLSTV
SPGMMMGAFPMLVTV

SEQ ID NO: 194521 - protein, 15 aa, Artificial Sequence
  Description of Artificial Sequence: Synthetic peptide
  Seed: SPGMMMGMFNMLSTV
SPGMMMGFFDMLATV

SEQ ID NO: 194522 - protein, 15 aa, Artificial Sequence
  Description of Artificial Sequence: Synthetic peptide
  Seed: SPGMMMGMFNMLSTV
SPGMMMGFFDMLITV

SEQ ID NO: 194523 - protein, 15 aa, Artificial Sequence
  Description of Artificial Sequence: Synthetic peptide
  Seed: SPGMMMGMFNMLSTV
SPGMMMGFFDMLMTV

SEQ ID NO: 194524 - protein, 15 aa, Artificial Sequence
  Description of Artificial Sequence: Synthetic peptide
  Seed: SPGMMMGMFNMLSTV
SPGMMMGFFDMLVTV

SEQ ID NO: 194525 - protein, 15 aa, Artificial Sequence
  Description of Artificial Sequence: Synthetic peptide
  Seed: SPGMMMGMFNMLSTV
SPGMMMGHFRMLRTV

SEQ ID NO: 194526 - protein, 15 aa, Artificial Sequence
  Description of Artificial Sequence: Synthetic peptide
  Seed: SPGMMMGMFNMLSTV
SPGMMMGIFKMLKTV

SEQ ID NO: 194527 - protein, 15 aa, Artificial Sequence
  Description of Artificial Sequence: Synthetic peptide
  Seed: SPGMMMGMFNMLSTV
SPGMMMGIFKMLRTV

SEQ ID NO: 194528 - protein, 15 aa, Artificial Sequence
  Description of Artificial Sequence: Synthetic peptide
  Seed: SPGMMMGMFNMLSTV
SPGMMMGIFRMLKTV

SEQ ID NO: 194529 - protein, 15 aa, Artificial Sequence
  Description of Artificial Sequence: Synthetic peptide
  Seed: SPGMMMGMFNMLSTV
SPGMMMGLFAMLNTV

SEQ ID NO: 194530 - protein, 15 aa, Artificial Sequence
  Description of Artificial Sequence: Synthetic peptide
  Seed: SPGMMMGMFNMLSTV
SPGMMMGLFKMLKTV

SEQ ID NO: 194531 - protein, 15 aa, Artificial Sequence
  Description of Artificial Sequence: Synthetic peptide
  Seed: SPGMMMGMFNMLSTV
SPGMMMGLFKMLRTV

SEQ ID NO: 194532 - protein, 15 aa, Artificial Sequence
  Description of Artificial Sequence: Synthetic peptide
  Seed: SPGMMMGMFNMLSTV
SPGMMMGLFPMLATV

SEQ ID NO: 194533 - protein, 15 aa, Artificial Sequence
  Description of Artificial Sequence: Synthetic peptide
  Seed: SPGMMMGMFNMLSTV
SPGMMMGLFPMLNTV

SEQ ID NO: 194534 - protein, 15 aa, Artificial Sequence
  Description of Artificial Sequence: Synthetic peptide
  Seed: SPGMMMGMFNMLSTV
SPGMMMGLFPMLSTV

SEQ ID NO: 194535 - protein, 15 aa, Artificial Sequence
  Description of Artificial Sequence: Synthetic peptide
  Seed: SPGMMMGMFNMLSTV
SPGMMMGLFPMLVTV

SEQ ID NO: 194536 - protein, 15 aa, Artificial Sequence
  Description of Artificial Sequence: Synthetic peptide
  Seed: SPGMMMGMFNMLSTV
SPGMMMGLFRMLHTV

SEQ ID NO: 194537 - protein, 15 aa, Artificial Sequence
  Description of Artificial Sequence: Synthetic peptide
  Seed: SPGMMMGMFNMLSTV
SPGMMMGLFRMLKTV

SEQ ID NO: 194538 - protein, 15 aa, Artificial Sequence
  Description of Artificial Sequence: Synthetic peptide
  Seed: SPGMMMGMFNMLSTV
SPGMMMGLFRMLRTV

SEQ ID NO: 194539 - protein, 15 aa, Artificial Sequence
  Description of Artificial Sequence: Synthetic peptide
  Seed: SPGMMMGMFNMLSTV
SPGMMMGMFAMLHTV

SEQ ID NO: 194540 - protein, 15 aa, Artificial Sequence
  Description of Artificial Sequence: Synthetic peptide
  Seed: SPGMMMGMFNMLSTV
SPGMMMGMFAMLNTV

SEQ ID NO: 194541 - protein, 15 aa, Artificial Sequence
  Description of Artificial Sequence: Synthetic peptide
  Seed: SPGMMMGMFNMLSTV
SPGMMMGMFDMLATV

SEQ ID NO: 194542 - protein, 15 aa, Artificial Sequence
  Description of Artificial Sequence: Synthetic peptide
  Seed: SPGMMMGMFNMLSTV
SPGMMMGMFDMLITV

SEQ ID NO: 194543 - protein, 15 aa, Artificial Sequence
  Description of Artificial Sequence: Synthetic peptide
  Seed: SPGMMMGMFNMLSTV
SPGMMMGMFDMLVTV

SEQ ID NO: 194544 - protein, 15 aa, Artificial Sequence
  Description of Artificial Sequence: Synthetic peptide
  Seed: SPGMMMGMFNMLSTV
SPGMMMGMFKMLHTV

SEQ ID NO: 194545 - protein, 15 aa, Artificial Sequence
  Description of Artificial Sequence: Synthetic peptide
  Seed: SPGMMMGMFNMLSTV
SPGMMMGMFKMLKTV

SEQ ID NO: 194546 - protein, 15 aa, Artificial Sequence
  Description of Artificial Sequence: Synthetic peptide
  Seed: SPGMMMGMFNMLSTV
SPGMMMGMFKMLRTV

SEQ ID NO: 194547 - protein, 15 aa, Artificial Sequence
  Description of Artificial Sequence: Synthetic peptide
  Seed: SPGMMMGMFNMLSTV
SPGMMMGMFKMLSTV

SEQ ID NO: 194548 - protein, 15 aa, Artificial Sequence
  Description of Artificial Sequence: Synthetic peptide
  Seed: SPGMMMGMFNMLSTV
SPGMMMGMFNMLATV

SEQ ID NO: 194549 - protein, 15 aa, Artificial Sequence
  Description of Artificial Sequence: Synthetic peptide
  Seed: SPGMMMGMFNMLSTV
SPGMMMGMFPMLATV

SEQ ID NO: 194550 - protein, 15 aa, Artificial Sequence
  Description of Artificial Sequence: Synthetic peptide
  Seed: SPGMMMGMFNMLSTV
SPGMMMGMFPMLHTV

SEQ ID NO: 194551 - protein, 15 aa, Artificial Sequence
  Description of Artificial Sequence: Synthetic peptide
  Seed: SPGMMMGMFNMLSTV
SPGMMMGMFPMLITV

SEQ ID NO: 194552 - protein, 15 aa, Artificial Sequence
  Description of Artificial Sequence: Synthetic peptide
  Seed: SPGMMMGMFNMLSTV
SPGMMMGMFPMLLTV

SEQ ID NO: 194553 - protein, 15 aa, Artificial Sequence
  Description of Artificial Sequence: Synthetic peptide
  Seed: SPGMMMGMFNMLSTV
SPGMMMGMFPMLMTV

SEQ ID NO: 194554 - protein, 15 aa, Artificial Sequence
  Description of Artificial Sequence: Synthetic peptide
  Seed: SPGMMMGMFNMLSTV
SPGMMMGMFPMLNTV

SEQ ID NO: 194555 - protein, 15 aa, Artificial Sequence
  Description of Artificial Sequence: Synthetic peptide
  Seed: SPGMMMGMFNMLSTV
SPGMMMGMFPMLSTV

SEQ ID NO: 194556 - protein, 15 aa, Artificial Sequence
  Description of Artificial Sequence: Synthetic peptide
  Seed: SPGMMMGMFNMLSTV
SPGMMMGMFPMLTTV

SEQ ID NO: 194557 - protein, 15 aa, Artificial Sequence
  Description of Artificial Sequence: Synthetic peptide
  Seed: SPGMMMGMFNMLSTV
SPGMMMGMFPMLVTV

SEQ ID NO: 194558 - protein, 15 aa, Artificial Sequence
  Description of Artificial Sequence: Synthetic peptide
  Seed: SPGMMMGMFNMLSTV
SPGMMMGMFRMLHTV

SEQ ID NO: 194559 - protein, 15 aa, Artificial Sequence
  Description of Artificial Sequence: Synthetic peptide
  Seed: SPGMMMGMFNMLSTV
SPGMMMGMFRMLKTV

SEQ ID NO: 194560 - protein, 15 aa, Artificial Sequence
  Description of Artificial Sequence: Synthetic peptide
  Seed: SPGMMMGMFNMLSTV
SPGMMMGMFRMLRTV

SEQ ID NO: 194561 - protein, 15 aa, Artificial Sequence
  Description of Artificial Sequence: Synthetic peptide
  Seed: SPGMMMGMFNMLSTV
SPGMMMGMFSMLNTV

SEQ ID NO: 194562 - protein, 15 aa, Artificial Sequence
  Description of Artificial Sequence: Synthetic peptide
  Seed: SPGMMMGMFNMLSTV
SPGMMMGMFTMLNTV

SEQ ID NO: 194563 - protein, 15 aa, Artificial Sequence
  Description of Artificial Sequence: Synthetic peptide
  Seed: SPGMMMGMFNMLSTV
SPGMMMGRFRMLRTV

SEQ ID NO: 194564 - protein, 15 aa, Artificial Sequence
  Description of Artificial Sequence: Synthetic peptide
  Seed: SPGMMMGMFNMLSTV
SPGMMMGSFAMLATV

SEQ ID NO: 194565 - protein, 15 aa, Artificial Sequence
  Description of Artificial Sequence: Synthetic peptide
  Seed: SPGMMMGMFNMLSTV
SPGMMMGWFDMLATV

SEQ ID NO: 194566 - protein, 15 aa, Artificial Sequence
  Description of Artificial Sequence: Synthetic peptide
  Seed: SPGMMMGMFNMLSTV
SPGMMMGWFDMLITV

SEQ ID NO: 194567 - protein, 15 aa, Artificial Sequence
  Description of Artificial Sequence: Synthetic peptide
  Seed: SPGMMMGMFNMLSTV
SPGMMMGWFDMLLTV

SEQ ID NO: 194568 - protein, 15 aa, Artificial Sequence
  Description of Artificial Sequence: Synthetic peptide
  Seed: SPGMMMGMFNMLSTV
SPGMMMGWFDMLMTV

SEQ ID NO: 194569 - protein, 15 aa, Artificial Sequence
  Description of Artificial Sequence: Synthetic peptide
  Seed: SPGMMMGMFNMLSTV
SPGMMMGWFDMLVTV

SEQ ID NO: 194570 - protein, 15 aa, Artificial Sequence
  Description of Artificial Sequence: Synthetic peptide
  Seed: SPGMMMGMFNMLSTV
SPGMMMGWFNMLVTV

SEQ ID NO: 194571 - protein, 15 aa, Artificial Sequence
  Description of Artificial Sequence: Synthetic peptide
  Seed: SPGMMMGMFNMLSTV
SPGMMMGYFDMLATV

SEQ ID NO: 194572 - protein, 15 aa, Artificial Sequence
  Description of Artificial Sequence: Synthetic peptide
  Seed: SPGMMMGMFNMLSTV
SPGMMMGYFDMLITV

SEQ ID NO: 194573 - protein, 15 aa, Artificial Sequence
  Description of Artificial Sequence: Synthetic peptide
  Seed: SPGMMMGMFNMLSTV
SPGMMMGYFDMLLTV

SEQ ID NO: 194574 - protein, 15 aa, Artificial Sequence
  Description of Artificial Sequence: Synthetic peptide
  Seed: SPGMMMGMFNMLSTV
SPGMMMGYFDMLMTV

SEQ ID NO: 194575 - protein, 15 aa, Artificial Sequence
  Description of Artificial Sequence: Synthetic peptide
  Seed: SPGMMMGMFNMLSTV
SPGMMMGYFDMLVTV

SEQ ID NO: 194576 - protein, 15 aa, Artificial Sequence
  Description of Artificial Sequence: Synthetic peptide
  Seed: SPGMMMGMFNMLSTV
SPGMNMGAFAMLATV

SEQ ID NO: 194577 - protein, 15 aa, Artificial Sequence
  Description of Artificial Sequence: Synthetic peptide
  Seed: SPGMMMGMFNMLSTV
SPGMNMGAFAMLGTV

SEQ ID NO: 194578 - protein, 15 aa, Artificial Sequence
  Description of Artificial Sequence: Synthetic peptide
  Seed: SPGMMMGMFNMLSTV
SPGMNMGAFAMLQTV

SEQ ID NO: 194579 - protein, 15 aa, Artificial Sequence
  Description of Artificial Sequence: Synthetic peptide
  Seed: SPGMMMGMFNMLSTV
SPGMNMGAFAMLSTV

SEQ ID NO: 194580 - protein, 15 aa, Artificial Sequence
  Description of Artificial Sequence: Synthetic peptide
  Seed: SPGMMMGMFNMLSTV
SPGMNMGAFIMLATV

SEQ ID NO: 194581 - protein, 15 aa, Artificial Sequence
  Description of Artificial Sequence: Synthetic peptide
  Seed: SPGMMMGMFNMLSTV
SPGMNMGAFIMLGTV

SEQ ID NO: 194582 - protein, 15 aa, Artificial Sequence
  Description of Artificial Sequence: Synthetic peptide
  Seed: SPGMMMGMFNMLSTV
SPGMNMGAFIMLHTV

SEQ ID NO: 194583 - protein, 15 aa, Artificial Sequence
  Description of Artificial Sequence: Synthetic peptide
  Seed: SPGMMMGMFNMLSTV
SPGMNMGAFIMLQTV

SEQ ID NO: 194584 - protein, 15 aa, Artificial Sequence
  Description of Artificial Sequence: Synthetic peptide
  Seed: SPGMMMGMFNMLSTV
SPGMNMGAFIMLSTV

SEQ ID NO: 194585 - protein, 15 aa, Artificial Sequence
  Description of Artificial Sequence: Synthetic peptide
  Seed: SPGMMMGMFNMLSTV
SPGMNMGAFIMLTTV

SEQ ID NO: 194586 - protein, 15 aa, Artificial Sequence
  Description of Artificial Sequence: Synthetic peptide
  Seed: SPGMMMGMFNMLSTV
SPGMNMGAFLMLATV

SEQ ID NO: 194587 - protein, 15 aa, Artificial Sequence
  Description of Artificial Sequence: Synthetic peptide
  Seed: SPGMMMGMFNMLSTV
SPGMNMGAFLMLSTV

SEQ ID NO: 194588 - protein, 15 aa, Artificial Sequence
  Description of Artificial Sequence: Synthetic peptide
  Seed: SPGMMMGMFNMLSTV
SPGMNMGAFMMLATV

SEQ ID NO: 194589 - protein, 15 aa, Artificial Sequence
  Description of Artificial Sequence: Synthetic peptide
  Seed: SPGMMMGMFNMLSTV
SPGMNMGAFMMLGTV

SEQ ID NO: 194590 - protein, 15 aa, Artificial Sequence
  Description of Artificial Sequence: Synthetic peptide
  Seed: SPGMMMGMFNMLSTV
SPGMNMGAFMMLSTV

SEQ ID NO: 194591 - protein, 15 aa, Artificial Sequence
  Description of Artificial Sequence: Synthetic peptide
  Seed: SPGMMMGMFNMLSTV
SPGMNMGAFPMLATV

SEQ ID NO: 194592 - protein, 15 aa, Artificial Sequence
  Description of Artificial Sequence: Synthetic peptide
  Seed: SPGMMMGMFNMLSTV
SPGMNMGAFSMLATV

SEQ ID NO: 194593 - protein, 15 aa, Artificial Sequence
  Description of Artificial Sequence: Synthetic peptide
  Seed: SPGMMMGMFNMLSTV
SPGMNMGAFTMLATV

SEQ ID NO: 194594 - protein, 15 aa, Artificial Sequence
  Description of Artificial Sequence: Synthetic peptide
  Seed: SPGMMMGMFNMLSTV
SPGMNMGAFTMLSTV

SEQ ID NO: 194595 - protein, 15 aa, Artificial Sequence
  Description of Artificial Sequence: Synthetic peptide
  Seed: SPGMMMGMFNMLSTV
SPGMNMGAFVMLATV

SEQ ID NO: 194596 - protein, 15 aa, Artificial Sequence
  Description of Artificial Sequence: Synthetic peptide
  Seed: SPGMMMGMFNMLSTV
SPGMNMGAFVMLGTV

SEQ ID NO: 194597 - protein, 15 aa, Artificial Sequence
  Description of Artificial Sequence: Synthetic peptide
  Seed: SPGMMMGMFNMLSTV
SPGMNMGAFVMLHTV

SEQ ID NO: 194598 - protein, 15 aa, Artificial Sequence
  Description of Artificial Sequence: Synthetic peptide
  Seed: SPGMMMGMFNMLSTV
SPGMNMGAFVMLQTV

SEQ ID NO: 194599 - protein, 15 aa, Artificial Sequence
  Description of Artificial Sequence: Synthetic peptide
  Seed: SPGMMMGMFNMLSTV
SPGMNMGAFVMLSTV

SEQ ID NO: 194600 - protein, 15 aa, Artificial Sequence
  Description of Artificial Sequence: Synthetic peptide
  Seed: SPGMMMGMFNMLSTV
SPGMNMGAFVMLTTV

SEQ ID NO: 194601 - protein, 15 aa, Artificial Sequence
  Description of Artificial Sequence: Synthetic peptide
  Seed: SPGMMMGMFNMLSTV
SPGMNMGSFAMLGTV

SEQ ID NO: 194602 - protein, 15 aa, Artificial Sequence
  Description of Artificial Sequence: Synthetic peptide
  Seed: SPGMMMGMFNMLSTV
SPGMNMGSFAMLSTV

SEQ ID NO: 194603 - protein, 15 aa, Artificial Sequence
  Description of Artificial Sequence: Synthetic peptide
  Seed: SPGMMMGMFNMLSTV
SPGMNMGSFIMLATV

SEQ ID NO: 194604 - protein, 15 aa, Artificial Sequence
  Description of Artificial Sequence: Synthetic peptide
  Seed: SPGMMMGMFNMLSTV
SPGMNMGSFIMLGTV

SEQ ID NO: 194605 - protein, 15 aa, Artificial Sequence
  Description of Artificial Sequence: Synthetic peptide
  Seed: SPGMMMGMFNMLSTV
SPGMNMGSFIMLQTV

SEQ ID NO: 194606 - protein, 15 aa, Artificial Sequence
  Description of Artificial Sequence: Synthetic peptide
  Seed: SPGMMMGMFNMLSTV
SPGMNMGSFIMLSTV

SEQ ID NO: 194607 - protein, 15 aa, Artificial Sequence
  Description of Artificial Sequence: Synthetic peptide
  Seed: SPGMMMGMFNMLSTV
SPGMNMGSFIMLTTV

SEQ ID NO: 194608 - protein, 15 aa, Artificial Sequence
  Description of Artificial Sequence: Synthetic peptide
  Seed: SPGMMMGMFNMLSTV
SPGMNMGSFLMLATV

SEQ ID NO: 194609 - protein, 15 aa, Artificial Sequence
  Description of Artificial Sequence: Synthetic peptide
  Seed: SPGMMMGMFNMLSTV
SPGMNMGSFLMLSTV

SEQ ID NO: 194610 - protein, 15 aa, Artificial Sequence
  Description of Artificial Sequence: Synthetic peptide
  Seed: SPGMMMGMFNMLSTV
SPGMNMGSFMMLATV

SEQ ID NO: 194611 - protein, 15 aa, Artificial Sequence
  Description of Artificial Sequence: Synthetic peptide
  Seed: SPGMMMGMFNMLSTV
SPGMNMGSFMMLSTV

SEQ ID NO: 194612 - protein, 15 aa, Artificial Sequence
  Description of Artificial Sequence: Synthetic peptide
  Seed: SPGMMMGMFNMLSTV
SPGMNMGSFPMLATV

SEQ ID NO: 194613 - protein, 15 aa, Artificial Sequence
  Description of Artificial Sequence: Synthetic peptide
  Seed: SPGMMMGMFNMLSTV
SPGMNMGSFTMLATV

SEQ ID NO: 194614 - protein, 15 aa, Artificial Sequence
  Description of Artificial Sequence: Synthetic peptide
  Seed: SPGMMMGMFNMLSTV
SPGMNMGSFVMLATV

SEQ ID NO: 194615 - protein, 15 aa, Artificial Sequence
  Description of Artificial Sequence: Synthetic peptide
  Seed: SPGMMMGMFNMLSTV
SPGMNMGSFVMLGTV

SEQ ID NO: 194616 - protein, 15 aa, Artificial Sequence
  Description of Artificial Sequence: Synthetic peptide
  Seed: SPGMMMGMFNMLSTV
SPGMNMGSFVMLQTV

SEQ ID NO: 194617 - protein, 15 aa, Artificial Sequence
  Description of Artificial Sequence: Synthetic peptide
  Seed: SPGMMMGMFNMLSTV
SPGMNMGSFVMLSTV

SEQ ID NO: 194618 - protein, 15 aa, Artificial Sequence
  Description of Artificial Sequence: Synthetic peptide
  Seed: SPGMMMGMFNMLSTV
SPGMNMGTFAMLATV

SEQ ID NO: 194619 - protein, 15 aa, Artificial Sequence
  Description of Artificial Sequence: Synthetic peptide
  Seed: SPGMMMGMFNMLSTV
SPGMNMGTFAMLSTV

SEQ ID NO: 194620 - protein, 15 aa, Artificial Sequence
  Description of Artificial Sequence: Synthetic peptide
  Seed: SPGMMMGMFNMLSTV
SPGMNMGTFIMLATV

SEQ ID NO: 194621 - protein, 15 aa, Artificial Sequence
  Description of Artificial Sequence: Synthetic peptide
  Seed: SPGMMMGMFNMLSTV
SPGMNMGTFIMLGTV

SEQ ID NO: 194622 - protein, 15 aa, Artificial Sequence
  Description of Artificial Sequence: Synthetic peptide
  Seed: SPGMMMGMFNMLSTV
SPGMNMGTFIMLSTV

SEQ ID NO: 194623 - protein, 15 aa, Artificial Sequence
  Description of Artificial Sequence: Synthetic peptide
  Seed: SPGMMMGMFNMLSTV
SPGMNMGTFMMLATV

SEQ ID NO: 194624 - protein, 15 aa, Artificial Sequence
  Description of Artificial Sequence: Synthetic peptide
  Seed: SPGMMMGMFNMLSTV
SPGMNMGTFMMLSTV

SEQ ID NO: 194625 - protein, 15 aa, Artificial Sequence
  Description of Artificial Sequence: Synthetic peptide
  Seed: SPGMMMGMFNMLSTV
SPGMNMGTFVMLATV

SEQ ID NO: 194626 - protein, 15 aa, Artificial Sequence
  Description of Artificial Sequence: Synthetic peptide
  Seed: SPGMMMGMFNMLSTV
SPGMNMGTFVMLGTV

SEQ ID NO: 194627 - protein, 15 aa, Artificial Sequence
  Description of Artificial Sequence: Synthetic peptide
  Seed: SPGMMMGMFNMLSTV
SPGMNMGTFVMLSTV

SEQ ID NO: 194628 - protein, 15 aa, Artificial Sequence
  Description of Artificial Sequence: Synthetic peptide
  Seed: SPGMMMGMFNMLSTV
SPGMQMGAFIMLATV

SEQ ID NO: 194629 - protein, 15 aa, Artificial Sequence
  Description of Artificial Sequence: Synthetic peptide
  Seed: SPGMMMGMFNMLSTV
SPGMQMGAFVMLATV

SEQ ID NO: 194630 - protein, 15 aa, Artificial Sequence
  Description of Artificial Sequence: Synthetic peptide
  Seed: SPGMMMGMFNMLSTV
SPGMVMGFFDMLATV

SEQ ID NO: 194631 - protein, 15 aa, Artificial Sequence
  Description of Artificial Sequence: Synthetic peptide
  Seed: SPGMMMGMFNMLSTV
SPGMVMGFFDMLITV

SEQ ID NO: 194632 - protein, 15 aa, Artificial Sequence
  Description of Artificial Sequence: Synthetic peptide
  Seed: SPGMMMGMFNMLSTV
SPGMVMGFFDMLVTV

SEQ ID NO: 194633 - protein, 15 aa, Artificial Sequence
  Description of Artificial Sequence: Synthetic peptide
  Seed: SPGMMMGMFNMLSTV
SPGMVMGHFRMLRTV

SEQ ID NO: 194634 - protein, 15 aa, Artificial Sequence
  Description of Artificial Sequence: Synthetic peptide
  Seed: SPGMMMGMFNMLSTV
SPGMVMGLFKMLHTV

SEQ ID NO: 194635 - protein, 15 aa, Artificial Sequence
  Description of Artificial Sequence: Synthetic peptide
  Seed: SPGMMMGMFNMLSTV
SPGMVMGLFKMLKTV

SEQ ID NO: 194636 - protein, 15 aa, Artificial Sequence
  Description of Artificial Sequence: Synthetic peptide
  Seed: SPGMMMGMFNMLSTV
SPGMVMGLFPMLNTV

SEQ ID NO: 194637 - protein, 15 aa, Artificial Sequence
  Description of Artificial Sequence: Synthetic peptide
  Seed: SPGMMMGMFNMLSTV
SPGMVMGLFRMLHTV

SEQ ID NO: 194638 - protein, 15 aa, Artificial Sequence
  Description of Artificial Sequence: Synthetic peptide
  Seed: SPGMMMGMFNMLSTV
SPGMVMGMFKMLHTV

SEQ ID NO: 194639 - protein, 15 aa, Artificial Sequence
  Description of Artificial Sequence: Synthetic peptide
  Seed: SPGMMMGMFNMLSTV
SPGMVMGMFKMLKTV

SEQ ID NO: 194640 - protein, 15 aa, Artificial Sequence
  Description of Artificial Sequence: Synthetic peptide
  Seed: SPGMMMGMFNMLSTV
SPGMVMGMFKMLRTV

SEQ ID NO: 194641 - protein, 15 aa, Artificial Sequence
  Description of Artificial Sequence: Synthetic peptide
  Seed: SPGMMMGMFNMLSTV
SPGMVMGMFPMLATV

SEQ ID NO: 194642 - protein, 15 aa, Artificial Sequence
  Description of Artificial Sequence: Synthetic peptide
  Seed: SPGMMMGMFNMLSTV
SPGMVMGMFPMLHTV

SEQ ID NO: 194643 - protein, 15 aa, Artificial Sequence
  Description of Artificial Sequence: Synthetic peptide
  Seed: SPGMMMGMFNMLSTV
SPGMVMGMFPMLNTV

SEQ ID NO: 194644 - protein, 15 aa, Artificial Sequence
  Description of Artificial Sequence: Synthetic peptide
  Seed: SPGMMMGMFNMLSTV
SPGMVMGMFPMLSTV

SEQ ID NO: 194645 - protein, 15 aa, Artificial Sequence
  Description of Artificial Sequence: Synthetic peptide
  Seed: SPGMMMGMFNMLSTV
SPGMVMGMFRMLHTV

SEQ ID NO: 194646 - protein, 15 aa, Artificial Sequence
  Description of Artificial Sequence: Synthetic peptide
  Seed: SPGMMMGMFNMLSTV
SPGMVMGMFRMLKTV

SEQ ID NO: 194647 - protein, 15 aa, Artificial Sequence
  Description of Artificial Sequence: Synthetic peptide
  Seed: SPGMMMGMFNMLSTV
SPGMVMGMFRMLRTV

SEQ ID NO: 194648 - protein, 15 aa, Artificial Sequence
  Description of Artificial Sequence: Synthetic peptide
  Seed: SPGMMMGMFNMLSTV
SPGMVMGRFRMLRTV

SEQ ID NO: 194649 - protein, 15 aa, Artificial Sequence
  Description of Artificial Sequence: Synthetic peptide
  Seed: SPGMMMGMFNMLSTV
SPGMVMGWFDMLITV

SEQ ID NO: 194650 - protein, 15 aa, Artificial Sequence
  Description of Artificial Sequence: Synthetic peptide
  Seed: SPGMMMGMFNMLSTV
SPGMVMGWFDMLMTV

SEQ ID NO: 194651 - protein, 15 aa, Artificial Sequence
  Description of Artificial Sequence: Synthetic peptide
  Seed: SPGMMMGMFNMLSTV
SPGMVMGWFDMLVTV

SEQ ID NO: 194652 - protein, 15 aa, Artificial Sequence
  Description of Artificial Sequence: Synthetic peptide
  Seed: SPGMMMGMFNMLSTV
SPGMVMGYFDMLATV

SEQ ID NO: 194653 - protein, 15 aa, Artificial Sequence
  Description of Artificial Sequence: Synthetic peptide
  Seed: SPGMMMGMFNMLSTV
SPGMVMGYFDMLITV

SEQ ID NO: 194654 - protein, 15 aa, Artificial Sequence
  Description of Artificial Sequence: Synthetic peptide
  Seed: SPGMMMGMFNMLSTV
SPGMVMGYFDMLLTV

SEQ ID NO: 194655 - protein, 15 aa, Artificial Sequence
  Description of Artificial Sequence: Synthetic peptide
  Seed: SPGMMMGMFNMLSTV
SPGMVMGYFDMLMTV

SEQ ID NO: 194656 - protein, 15 aa, Artificial Sequence
  Description of Artificial Sequence: Synthetic peptide
  Seed: SPGMMMGMFNMLSTV
SPGMVMGYFDMLVTV

SEQ ID NO: 194657 - protein, 15 aa, Artificial Sequence
  Description of Artificial Sequence: Synthetic peptide
  Seed: SPGMMMGMFNMLSTV
SPGMWMGIFPMLNTV

SEQ ID NO: 194658 - protein, 15 aa, Artificial Sequence
  Description of Artificial Sequence: Synthetic peptide
  Seed: SPGMMMGMFNMLSTV
SPGMWMGLFPMLATV

SEQ ID NO: 194659 - protein, 15 aa, Artificial Sequence
  Description of Artificial Sequence: Synthetic peptide
  Seed: SPGMMMGMFNMLSTV
SPGMWMGLFPMLNTV

SEQ ID NO: 194660 - protein, 15 aa, Artificial Sequence
  Description of Artificial Sequence: Synthetic peptide
  Seed: SPGMMMGMFNMLSTV
SPGMWMGLFPMLSTV

SEQ ID NO: 194661 - protein, 15 aa, Artificial Sequence
  Description of Artificial Sequence: Synthetic peptide
  Seed: SPGMMMGMFNMLSTV
SPGMWMGMFPMLATV

SEQ ID NO: 194662 - protein, 15 aa, Artificial Sequence
  Description of Artificial Sequence: Synthetic peptide
  Seed: SPGMMMGMFNMLSTV
SPGMWMGMFPMLNTV

SEQ ID NO: 194663 - protein, 15 aa, Artificial Sequence
  Description of Artificial Sequence: Synthetic peptide
  Seed: SPGMMMGMFNMLSTV
SPGMWMGMFPMLSTV

SEQ ID NO: 194664 - protein, 15 aa, Artificial Sequence
  Description of Artificial Sequence: Synthetic peptide
  Seed: SPGMMMGMFNMLSTV
SPGMWMGMFPMLVTV

SEQ ID NO: 194665 - protein, 15 aa, Artificial Sequence
  Description of Artificial Sequence: Synthetic peptide
  Seed: SPGMMMGMFNMLSTV
SPGMYMGAFAMLATV

SEQ ID NO: 194666 - protein, 15 aa, Artificial Sequence
  Description of Artificial Sequence: Synthetic peptide
  Seed: SPGMMMGMFNMLSTV
SPGMYMGAFAMLDTV

SEQ ID NO: 194667 - protein, 15 aa, Artificial Sequence
  Description of Artificial Sequence: Synthetic peptide
  Seed: SPGMMMGMFNMLSTV
SPGMYMGAFAMLETV

SEQ ID NO: 194668 - protein, 15 aa, Artificial Sequence
  Description of Artificial Sequence: Synthetic peptide
  Seed: SPGMMMGMFNMLSTV
SPGMYMGAFAMLGTV

SEQ ID NO: 194669 - protein, 15 aa, Artificial Sequence
  Description of Artificial Sequence: Synthetic peptide
  Seed: SPGMMMGMFNMLSTV
SPGMYMGAFAMLHTV

SEQ ID NO: 194670 - protein, 15 aa, Artificial Sequence
  Description of Artificial Sequence: Synthetic peptide
  Seed: SPGMMMGMFNMLSTV
SPGMYMGAFAMLITV

SEQ ID NO: 194671 - protein, 15 aa, Artificial Sequence
  Description of Artificial Sequence: Synthetic peptide
  Seed: SPGMMMGMFNMLSTV
SPGMYMGAFAMLKTV

SEQ ID NO: 194672 - protein, 15 aa, Artificial Sequence
  Description of Artificial Sequence: Synthetic peptide
  Seed: SPGMMMGMFNMLSTV
SPGMYMGAFAMLLTV

SEQ ID NO: 194673 - protein, 15 aa, Artificial Sequence
  Description of Artificial Sequence: Synthetic peptide
  Seed: SPGMMMGMFNMLSTV
SPGMYMGAFAMLMTV

SEQ ID NO: 194674 - protein, 15 aa, Artificial Sequence
  Description of Artificial Sequence: Synthetic peptide
  Seed: SPGMMMGMFNMLSTV
SPGMYMGAFAMLNTV

SEQ ID NO: 194675 - protein, 15 aa, Artificial Sequence
  Description of Artificial Sequence: Synthetic peptide
  Seed: SPGMMMGMFNMLSTV
SPGMYMGAFAMLPTV

SEQ ID NO: 194676 - protein, 15 aa, Artificial Sequence
  Description of Artificial Sequence: Synthetic peptide
  Seed: SPGMMMGMFNMLSTV
SPGMYMGAFAMLQTV

SEQ ID NO: 194677 - protein, 15 aa, Artificial Sequence
  Description of Artificial Sequence: Synthetic peptide
  Seed: SPGMMMGMFNMLSTV
SPGMYMGAFAMLRTV

SEQ ID NO: 194678 - protein, 15 aa, Artificial Sequence
  Description of Artificial Sequence: Synthetic peptide
  Seed: SPGMMMGMFNMLSTV
SPGMYMGAFAMLSTV

SEQ ID NO: 194679 - protein, 15 aa, Artificial Sequence
  Description of Artificial Sequence: Synthetic peptide
  Seed: SPGMMMGMFNMLSTV
SPGMYMGAFAMLTTV

SEQ ID NO: 194680 - protein, 15 aa, Artificial Sequence
  Description of Artificial Sequence: Synthetic peptide
  Seed: SPGMMMGMFNMLSTV
SPGMYMGAFAMLVTV

SEQ ID NO: 194681 - protein, 15 aa, Artificial Sequence
  Description of Artificial Sequence: Synthetic peptide
  Seed: SPGMMMGMFNMLSTV
SPGMYMGAFGMLATV

SEQ ID NO: 194682 - protein, 15 aa, Artificial Sequence
  Description of Artificial Sequence: Synthetic peptide
  Seed: SPGMMMGMFNMLSTV
SPGMYMGAFGMLITV

SEQ ID NO: 194683 - protein, 15 aa, Artificial Sequence
  Description of Artificial Sequence: Synthetic peptide
  Seed: SPGMMMGMFNMLSTV
SPGMYMGAFGMLLTV

SEQ ID NO: 194684 - protein, 15 aa, Artificial Sequence
  Description of Artificial Sequence: Synthetic peptide
  Seed: SPGMMMGMFNMLSTV
SPGMYMGAFGMLMTV

SEQ ID NO: 194685 - protein, 15 aa, Artificial Sequence
  Description of Artificial Sequence: Synthetic peptide
  Seed: SPGMMMGMFNMLSTV
SPGMYMGAFGMLNTV

SEQ ID NO: 194686 - protein, 15 aa, Artificial Sequence
  Description of Artificial Sequence: Synthetic peptide
  Seed: SPGMMMGMFNMLSTV
SPGMYMGAFGMLSTV

SEQ ID NO: 194687 - protein, 15 aa, Artificial Sequence
  Description of Artificial Sequence: Synthetic peptide
  Seed: SPGMMMGMFNMLSTV
SPGMYMGAFGMLTTV

SEQ ID NO: 194688 - protein, 15 aa, Artificial Sequence
  Description of Artificial Sequence: Synthetic peptide
  Seed: SPGMMMGMFNMLSTV
SPGMYMGAFGMLVTV

SEQ ID NO: 194689 - protein, 15 aa, Artificial Sequence
  Description of Artificial Sequence: Synthetic peptide
  Seed: SPGMMMGMFNMLSTV
SPGMYMGAFIMLNTV

SEQ ID NO: 194690 - protein, 15 aa, Artificial Sequence
  Description of Artificial Sequence: Synthetic peptide
  Seed: SPGMMMGMFNMLSTV
SPGMYMGAFNMLATV

SEQ ID NO: 194691 - protein, 15 aa, Artificial Sequence
  Description of Artificial Sequence: Synthetic peptide
  Seed: SPGMMMGMFNMLSTV
SPGMYMGAFNMLDTV

SEQ ID NO: 194692 - protein, 15 aa, Artificial Sequence
  Description of Artificial Sequence: Synthetic peptide
  Seed: SPGMMMGMFNMLSTV
SPGMYMGAFNMLITV

SEQ ID NO: 194693 - protein, 15 aa, Artificial Sequence
  Description of Artificial Sequence: Synthetic peptide
  Seed: SPGMMMGMFNMLSTV
SPGMYMGAFNMLLTV

SEQ ID NO: 194694 - protein, 15 aa, Artificial Sequence
  Description of Artificial Sequence: Synthetic peptide
  Seed: SPGMMMGMFNMLSTV
SPGMYMGAFNMLNTV

SEQ ID NO: 194695 - protein, 15 aa, Artificial Sequence
  Description of Artificial Sequence: Synthetic peptide
  Seed: SPGMMMGMFNMLSTV
SPGMYMGAFNMLSTV

SEQ ID NO: 194696 - protein, 15 aa, Artificial Sequence
  Description of Artificial Sequence: Synthetic peptide
  Seed: SPGMMMGMFNMLSTV
SPGMYMGAFNMLVTV

SEQ ID NO: 194697 - protein, 15 aa, Artificial Sequence
  Description of Artificial Sequence: Synthetic peptide
  Seed: SPGMMMGMFNMLSTV
SPGMYMGAFPMLATV

SEQ ID NO: 194698 - protein, 15 aa, Artificial Sequence
  Description of Artificial Sequence: Synthetic peptide
  Seed: SPGMMMGMFNMLSTV
SPGMYMGAFPMLGTV

SEQ ID NO: 194699 - protein, 15 aa, Artificial Sequence
  Description of Artificial Sequence: Synthetic peptide
  Seed: SPGMMMGMFNMLSTV
SPGMYMGAFPMLHTV

SEQ ID NO: 194700 - protein, 15 aa, Artificial Sequence
  Description of Artificial Sequence: Synthetic peptide
  Seed: SPGMMMGMFNMLSTV
SPGMYMGAFPMLITV

SEQ ID NO: 194701 - protein, 15 aa, Artificial Sequence
  Description of Artificial Sequence: Synthetic peptide
  Seed: SPGMMMGMFNMLSTV
SPGMYMGAFPMLKTV

SEQ ID NO: 194702 - protein, 15 aa, Artificial Sequence
  Description of Artificial Sequence: Synthetic peptide
  Seed: SPGMMMGMFNMLSTV
SPGMYMGAFPMLLTV

SEQ ID NO: 194703 - protein, 15 aa, Artificial Sequence
  Description of Artificial Sequence: Synthetic peptide
  Seed: SPGMMMGMFNMLSTV
SPGMYMGAFPMLMTV

SEQ ID NO: 194704 - protein, 15 aa, Artificial Sequence
  Description of Artificial Sequence: Synthetic peptide
  Seed: SPGMMMGMFNMLSTV
SPGMYMGAFPMLNTV

SEQ ID NO: 194705 - protein, 15 aa, Artificial Sequence
  Description of Artificial Sequence: Synthetic peptide
  Seed: SPGMMMGMFNMLSTV
SPGMYMGAFPMLQTV

SEQ ID NO: 194706 - protein, 15 aa, Artificial Sequence
  Description of Artificial Sequence: Synthetic peptide
  Seed: SPGMMMGMFNMLSTV
SPGMYMGAFPMLRTV

SEQ ID NO: 194707 - protein, 15 aa, Artificial Sequence
  Description of Artificial Sequence: Synthetic peptide
  Seed: SPGMMMGMFNMLSTV
SPGMYMGAFPMLSTV

SEQ ID NO: 194708 - protein, 15 aa, Artificial Sequence
  Description of Artificial Sequence: Synthetic peptide
  Seed: SPGMMMGMFNMLSTV
SPGMYMGAFPMLTTV

SEQ ID NO: 194709 - protein, 15 aa, Artificial Sequence
  Description of Artificial Sequence: Synthetic peptide
  Seed: SPGMMMGMFNMLSTV
SPGMYMGAFPMLVTV

SEQ ID NO: 194710 - protein, 15 aa, Artificial Sequence
  Description of Artificial Sequence: Synthetic peptide
  Seed: SPGMMMGMFNMLSTV
SPGMYMGAFSMLATV

SEQ ID NO: 194711 - protein, 15 aa, Artificial Sequence
  Description of Artificial Sequence: Synthetic peptide
  Seed: SPGMMMGMFNMLSTV
SPGMYMGAFSMLGTV

SEQ ID NO: 194712 - protein, 15 aa, Artificial Sequence
  Description of Artificial Sequence: Synthetic peptide
  Seed: SPGMMMGMFNMLSTV
SPGMYMGAFSMLHTV

SEQ ID NO: 194713 - protein, 15 aa, Artificial Sequence
  Description of Artificial Sequence: Synthetic peptide
  Seed: SPGMMMGMFNMLSTV
SPGMYMGAFSMLITV

SEQ ID NO: 194714 - protein, 15 aa, Artificial Sequence
  Description of Artificial Sequence: Synthetic peptide
  Seed: SPGMMMGMFNMLSTV
SPGMYMGAFSMLLTV

SEQ ID NO: 194715 - protein, 15 aa, Artificial Sequence
  Description of Artificial Sequence: Synthetic peptide
  Seed: SPGMMMGMFNMLSTV
SPGMYMGAFSMLMTV

SEQ ID NO: 194716 - protein, 15 aa, Artificial Sequence
  Description of Artificial Sequence: Synthetic peptide
  Seed: SPGMMMGMFNMLSTV
SPGMYMGAFSMLNTV

SEQ ID NO: 194717 - protein, 15 aa, Artificial Sequence
  Description of Artificial Sequence: Synthetic peptide
  Seed: SPGMMMGMFNMLSTV
SPGMYMGAFSMLSTV

SEQ ID NO: 194718 - protein, 15 aa, Artificial Sequence
  Description of Artificial Sequence: Synthetic peptide
  Seed: SPGMMMGMFNMLSTV
SPGMYMGAFSMLTTV

SEQ ID NO: 194719 - protein, 15 aa, Artificial Sequence
  Description of Artificial Sequence: Synthetic peptide
  Seed: SPGMMMGMFNMLSTV
SPGMYMGAFSMLVTV

SEQ ID NO: 194720 - protein, 15 aa, Artificial Sequence
  Description of Artificial Sequence: Synthetic peptide
  Seed: SPGMMMGMFNMLSTV
SPGMYMGAFTMLATV

SEQ ID NO: 194721 - protein, 15 aa, Artificial Sequence
  Description of Artificial Sequence: Synthetic peptide
  Seed: SPGMMMGMFNMLSTV
SPGMYMGAFTMLGTV

SEQ ID NO: 194722 - protein, 15 aa, Artificial Sequence
  Description of Artificial Sequence: Synthetic peptide
  Seed: SPGMMMGMFNMLSTV
SPGMYMGAFTMLHTV

SEQ ID NO: 194723 - protein, 15 aa, Artificial Sequence
  Description of Artificial Sequence: Synthetic peptide
  Seed: SPGMMMGMFNMLSTV
SPGMYMGAFTMLITV

SEQ ID NO: 194724 - protein, 15 aa, Artificial Sequence
  Description of Artificial Sequence: Synthetic peptide
  Seed: SPGMMMGMFNMLSTV
SPGMYMGAFTMLLTV

SEQ ID NO: 194725 - protein, 15 aa, Artificial Sequence
  Description of Artificial Sequence: Synthetic peptide
  Seed: SPGMMMGMFNMLSTV
SPGMYMGAFTMLNTV

SEQ ID NO: 194726 - protein, 15 aa, Artificial Sequence
  Description of Artificial Sequence: Synthetic peptide
  Seed: SPGMMMGMFNMLSTV
SPGMYMGAFTMLSTV

SEQ ID NO: 194727 - protein, 15 aa, Artificial Sequence
  Description of Artificial Sequence: Synthetic peptide
  Seed: SPGMMMGMFNMLSTV
SPGMYMGAFTMLTTV

SEQ ID NO: 194728 - protein, 15 aa, Artificial Sequence
  Description of Artificial Sequence: Synthetic peptide
  Seed: SPGMMMGMFNMLSTV
SPGMYMGAFTMLVTV

SEQ ID NO: 194729 - protein, 15 aa, Artificial Sequence
  Description of Artificial Sequence: Synthetic peptide
  Seed: SPGMMMGMFNMLSTV
SPGMYMGAFVMLHTV

SEQ ID NO: 194730 - protein, 15 aa, Artificial Sequence
  Description of Artificial Sequence: Synthetic peptide
  Seed: SPGMMMGMFNMLSTV
SPGMYMGAFVMLNTV

SEQ ID NO: 194731 - protein, 15 aa, Artificial Sequence
  Description of Artificial Sequence: Synthetic peptide
  Seed: SPGMMMGMFNMLSTV
SPGMYMGEFAMLATV

SEQ ID NO: 194732 - protein, 15 aa, Artificial Sequence
  Description of Artificial Sequence: Synthetic peptide
  Seed: SPGMMMGMFNMLSTV
SPGMYMGEFAMLITV

SEQ ID NO: 194733 - protein, 15 aa, Artificial Sequence
  Description of Artificial Sequence: Synthetic peptide
  Seed: SPGMMMGMFNMLSTV
SPGMYMGEFAMLLTV

SEQ ID NO: 194734 - protein, 15 aa, Artificial Sequence
  Description of Artificial Sequence: Synthetic peptide
  Seed: SPGMMMGMFNMLSTV
SPGMYMGEFAMLNTV

SEQ ID NO: 194735 - protein, 15 aa, Artificial Sequence
  Description of Artificial Sequence: Synthetic peptide
  Seed: SPGMMMGMFNMLSTV
SPGMYMGEFAMLSTV

SEQ ID NO: 194736 - protein, 15 aa, Artificial Sequence
  Description of Artificial Sequence: Synthetic peptide
  Seed: SPGMMMGMFNMLSTV
SPGMYMGEFAMLVTV

SEQ ID NO: 194737 - protein, 15 aa, Artificial Sequence
  Description of Artificial Sequence: Synthetic peptide
  Seed: SPGMMMGMFNMLSTV
SPGMYMGEFPMLATV

SEQ ID NO: 194738 - protein, 15 aa, Artificial Sequence
  Description of Artificial Sequence: Synthetic peptide
  Seed: SPGMMMGMFNMLSTV
SPGMYMGFFPMLNTV

SEQ ID NO: 194739 - protein, 15 aa, Artificial Sequence
  Description of Artificial Sequence: Synthetic peptide
  Seed: SPGMMMGMFNMLSTV
SPGMYMGGFAMLATV

SEQ ID NO: 194740 - protein, 15 aa, Artificial Sequence
  Description of Artificial Sequence: Synthetic peptide
  Seed: SPGMMMGMFNMLSTV
SPGMYMGGFAMLITV

SEQ ID NO: 194741 - protein, 15 aa, Artificial Sequence
  Description of Artificial Sequence: Synthetic peptide
  Seed: SPGMMMGMFNMLSTV
SPGMYMGGFAMLLTV

SEQ ID NO: 194742 - protein, 15 aa, Artificial Sequence
  Description of Artificial Sequence: Synthetic peptide
  Seed: SPGMMMGMFNMLSTV
SPGMYMGGFAMLMTV

SEQ ID NO: 194743 - protein, 15 aa, Artificial Sequence
  Description of Artificial Sequence: Synthetic peptide
  Seed: SPGMMMGMFNMLSTV
SPGMYMGGFAMLVTV

SEQ ID NO: 194744 - protein, 15 aa, Artificial Sequence
  Description of Artificial Sequence: Synthetic peptide
  Seed: SPGMMMGMFNMLSTV
SPGMYMGGFPMLITV

SEQ ID NO: 194745 - protein, 15 aa, Artificial Sequence
  Description of Artificial Sequence: Synthetic peptide
  Seed: SPGMMMGMFNMLSTV
SPGMYMGGFPMLVTV

SEQ ID NO: 194746 - protein, 15 aa, Artificial Sequence
  Description of Artificial Sequence: Synthetic peptide
  Seed: SPGMMMGMFNMLSTV
SPGMYMGGFSMLVTV

SEQ ID NO: 194747 - protein, 15 aa, Artificial Sequence
  Description of Artificial Sequence: Synthetic peptide
  Seed: SPGMMMGMFNMLSTV
SPGMYMGHFAMLATV

SEQ ID NO: 194748 - protein, 15 aa, Artificial Sequence
  Description of Artificial Sequence: Synthetic peptide
  Seed: SPGMMMGMFNMLSTV
SPGMYMGHFAMLITV

SEQ ID NO: 194749 - protein, 15 aa, Artificial Sequence
  Description of Artificial Sequence: Synthetic peptide
  Seed: SPGMMMGMFNMLSTV
SPGMYMGHFAMLLTV

SEQ ID NO: 194750 - protein, 15 aa, Artificial Sequence
  Description of Artificial Sequence: Synthetic peptide
  Seed: SPGMMMGMFNMLSTV
SPGMYMGHFAMLMTV

SEQ ID NO: 194751 - protein, 15 aa, Artificial Sequence
  Description of Artificial Sequence: Synthetic peptide
  Seed: SPGMMMGMFNMLSTV
SPGMYMGHFAMLVTV

SEQ ID NO: 194752 - protein, 15 aa, Artificial Sequence
  Description of Artificial Sequence: Synthetic peptide
  Seed: SPGMMMGMFNMLSTV
SPGMYMGIFAMLATV

SEQ ID NO: 194753 - protein, 15 aa, Artificial Sequence
  Description of Artificial Sequence: Synthetic peptide
  Seed: SPGMMMGMFNMLSTV
SPGMYMGIFAMLHTV

SEQ ID NO: 194754 - protein, 15 aa, Artificial Sequence
  Description of Artificial Sequence: Synthetic peptide
  Seed: SPGMMMGMFNMLSTV
SPGMYMGIFAMLNTV

SEQ ID NO: 194755 - protein, 15 aa, Artificial Sequence
  Description of Artificial Sequence: Synthetic peptide
  Seed: SPGMMMGMFNMLSTV
SPGMYMGIFAMLSTV

SEQ ID NO: 194756 - protein, 15 aa, Artificial Sequence
  Description of Artificial Sequence: Synthetic peptide
  Seed: SPGMMMGMFNMLSTV
SPGMYMGIFGMLATV

SEQ ID NO: 194757 - protein, 15 aa, Artificial Sequence
  Description of Artificial Sequence: Synthetic peptide
  Seed: SPGMMMGMFNMLSTV
SPGMYMGIFGMLNTV

SEQ ID NO: 194758 - protein, 15 aa, Artificial Sequence
  Description of Artificial Sequence: Synthetic peptide
  Seed: SPGMMMGMFNMLSTV
SPGMYMGIFNMLDTV

SEQ ID NO: 194759 - protein, 15 aa, Artificial Sequence
  Description of Artificial Sequence: Synthetic peptide
  Seed: SPGMMMGMFNMLSTV
SPGMYMGIFNMLETV

SEQ ID NO: 194760 - protein, 15 aa, Artificial Sequence
  Description of Artificial Sequence: Synthetic peptide
  Seed: SPGMMMGMFNMLSTV
SPGMYMGIFNMLNTV

SEQ ID NO: 194761 - protein, 15 aa, Artificial Sequence
  Description of Artificial Sequence: Synthetic peptide
  Seed: SPGMMMGMFNMLSTV
SPGMYMGIFPMLATV

SEQ ID NO: 194762 - protein, 15 aa, Artificial Sequence
  Description of Artificial Sequence: Synthetic peptide
  Seed: SPGMMMGMFNMLSTV
SPGMYMGIFPMLGTV

SEQ ID NO: 194763 - protein, 15 aa, Artificial Sequence
  Description of Artificial Sequence: Synthetic peptide
  Seed: SPGMMMGMFNMLSTV
SPGMYMGIFPMLHTV

SEQ ID NO: 194764 - protein, 15 aa, Artificial Sequence
  Description of Artificial Sequence: Synthetic peptide
  Seed: SPGMMMGMFNMLSTV
SPGMYMGIFPMLITV

SEQ ID NO: 194765 - protein, 15 aa, Artificial Sequence
  Description of Artificial Sequence: Synthetic peptide
  Seed: SPGMMMGMFNMLSTV
SPGMYMGIFPMLLTV

SEQ ID NO: 194766 - protein, 15 aa, Artificial Sequence
  Description of Artificial Sequence: Synthetic peptide
  Seed: SPGMMMGMFNMLSTV
SPGMYMGIFPMLMTV

SEQ ID NO: 194767 - protein, 15 aa, Artificial Sequence
  Description of Artificial Sequence: Synthetic peptide
  Seed: SPGMMMGMFNMLSTV
SPGMYMGIFPMLNTV

SEQ ID NO: 194768 - protein, 15 aa, Artificial Sequence
  Description of Artificial Sequence: Synthetic peptide
  Seed: SPGMMMGMFNMLSTV
SPGMYMGIFPMLQTV

SEQ ID NO: 194769 - protein, 15 aa, Artificial Sequence
  Description of Artificial Sequence: Synthetic peptide
  Seed: SPGMMMGMFNMLSTV
SPGMYMGIFPMLSTV

SEQ ID NO: 194770 - protein, 15 aa, Artificial Sequence
  Description of Artificial Sequence: Synthetic peptide
  Seed: SPGMMMGMFNMLSTV
SPGMYMGIFPMLTTV

SEQ ID NO: 194771 - protein, 15 aa, Artificial Sequence
  Description of Artificial Sequence: Synthetic peptide
  Seed: SPGMMMGMFNMLSTV
SPGMYMGIFPMLVTV

SEQ ID NO: 194772 - protein, 15 aa, Artificial Sequence
  Description of Artificial Sequence: Synthetic peptide
  Seed: SPGMMMGMFNMLSTV
SPGMYMGIFRMLHTV

SEQ ID NO: 194773 - protein, 15 aa, Artificial Sequence
  Description of Artificial Sequence: Synthetic peptide
  Seed: SPGMMMGMFNMLSTV
SPGMYMGIFSMLDTV

SEQ ID NO: 194774 - protein, 15 aa, Artificial Sequence
  Description of Artificial Sequence: Synthetic peptide
  Seed: SPGMMMGMFNMLSTV
SPGMYMGIFSMLHTV

SEQ ID NO: 194775 - protein, 15 aa, Artificial Sequence
  Description of Artificial Sequence: Synthetic peptide
  Seed: SPGMMMGMFNMLSTV
SPGMYMGIFSMLNTV

SEQ ID NO: 194776 - protein, 15 aa, Artificial Sequence
  Description of Artificial Sequence: Synthetic peptide
  Seed: SPGMMMGMFNMLSTV
SPGMYMGIFTMLDTV

SEQ ID NO: 194777 - protein, 15 aa, Artificial Sequence
  Description of Artificial Sequence: Synthetic peptide
  Seed: SPGMMMGMFNMLSTV
SPGMYMGIFTMLHTV

SEQ ID NO: 194778 - protein, 15 aa, Artificial Sequence
  Description of Artificial Sequence: Synthetic peptide
  Seed: SPGMMMGMFNMLSTV
SPGMYMGIFTMLNTV

SEQ ID NO: 194779 - protein, 15 aa, Artificial Sequence
  Description of Artificial Sequence: Synthetic peptide
  Seed: SPGMMMGMFNMLSTV
SPGMYMGIFTMLSTV

SEQ ID NO: 194780 - protein, 15 aa, Artificial Sequence
  Description of Artificial Sequence: Synthetic peptide
  Seed: SPGMMMGMFNMLSTV
SPGMYMGLFAMLATV

SEQ ID NO: 194781 - protein, 15 aa, Artificial Sequence
  Description of Artificial Sequence: Synthetic peptide
  Seed: SPGMMMGMFNMLSTV
SPGMYMGLFAMLDTV

SEQ ID NO: 194782 - protein, 15 aa, Artificial Sequence
  Description of Artificial Sequence: Synthetic peptide
  Seed: SPGMMMGMFNMLSTV
SPGMYMGLFAMLETV

SEQ ID NO: 194783 - protein, 15 aa, Artificial Sequence
  Description of Artificial Sequence: Synthetic peptide
  Seed: SPGMMMGMFNMLSTV
SPGMYMGLFAMLHTV

SEQ ID NO: 194784 - protein, 15 aa, Artificial Sequence
  Description of Artificial Sequence: Synthetic peptide
  Seed: SPGMMMGMFNMLSTV
SPGMYMGLFAMLKTV

SEQ ID NO: 194785 - protein, 15 aa, Artificial Sequence
  Description of Artificial Sequence: Synthetic peptide
  Seed: SPGMMMGMFNMLSTV
SPGMYMGLFAMLNTV

SEQ ID NO: 194786 - protein, 15 aa, Artificial Sequence
  Description of Artificial Sequence: Synthetic peptide
  Seed: SPGMMMGMFNMLSTV
SPGMYMGLFAMLRTV

SEQ ID NO: 194787 - protein, 15 aa, Artificial Sequence
  Description of Artificial Sequence: Synthetic peptide
  Seed: SPGMMMGMFNMLSTV
SPGMYMGLFAMLSTV

SEQ ID NO: 194788 - protein, 15 aa, Artificial Sequence
  Description of Artificial Sequence: Synthetic peptide
  Seed: SPGMMMGMFNMLSTV
SPGMYMGLFAMLTTV

SEQ ID NO: 194789 - protein, 15 aa, Artificial Sequence
  Description of Artificial Sequence: Synthetic peptide
  Seed: SPGMMMGMFNMLSTV
SPGMYMGLFGMLATV

SEQ ID NO: 194790 - protein, 15 aa, Artificial Sequence
  Description of Artificial Sequence: Synthetic peptide
  Seed: SPGMMMGMFNMLSTV
SPGMYMGLFGMLHTV

SEQ ID NO: 194791 - protein, 15 aa, Artificial Sequence
  Description of Artificial Sequence: Synthetic peptide
  Seed: SPGMMMGMFNMLSTV
SPGMYMGLFGMLLTV

SEQ ID NO: 194792 - protein, 15 aa, Artificial Sequence
  Description of Artificial Sequence: Synthetic peptide
  Seed: SPGMMMGMFNMLSTV
SPGMYMGLFGMLNTV

SEQ ID NO: 194793 - protein, 15 aa, Artificial Sequence
  Description of Artificial Sequence: Synthetic peptide
  Seed: SPGMMMGMFNMLSTV
SPGMYMGLFGMLSTV

SEQ ID NO: 194794 - protein, 15 aa, Artificial Sequence
  Description of Artificial Sequence: Synthetic peptide
  Seed: SPGMMMGMFNMLSTV
SPGMYMGLFGMLTTV

SEQ ID NO: 194795 - protein, 15 aa, Artificial Sequence
  Description of Artificial Sequence: Synthetic peptide
  Seed: SPGMMMGMFNMLSTV
SPGMYMGLFGMLVTV

SEQ ID NO: 194796 - protein, 15 aa, Artificial Sequence
  Description of Artificial Sequence: Synthetic peptide
  Seed: SPGMMMGMFNMLSTV
SPGMYMGLFKMLHTV

SEQ ID NO: 194797 - protein, 15 aa, Artificial Sequence
  Description of Artificial Sequence: Synthetic peptide
  Seed: SPGMMMGMFNMLSTV
SPGMYMGLFNMLATV

SEQ ID NO: 194798 - protein, 15 aa, Artificial Sequence
  Description of Artificial Sequence: Synthetic peptide
  Seed: SPGMMMGMFNMLSTV
SPGMYMGLFNMLDTV

SEQ ID NO: 194799 - protein, 15 aa, Artificial Sequence
  Description of Artificial Sequence: Synthetic peptide
  Seed: SPGMMMGMFNMLSTV
SPGMYMGLFNMLETV

SEQ ID NO: 194800 - protein, 15 aa, Artificial Sequence
  Description of Artificial Sequence: Synthetic peptide
  Seed: SPGMMMGMFNMLSTV
SPGMYMGLFNMLHTV

SEQ ID NO: 194801 - protein, 15 aa, Artificial Sequence
  Description of Artificial Sequence: Synthetic peptide
  Seed: SPGMMMGMFNMLSTV
SPGMYMGLFNMLNTV

SEQ ID NO: 194802 - protein, 15 aa, Artificial Sequence
  Description of Artificial Sequence: Synthetic peptide
  Seed: SPGMMMGMFNMLSTV
SPGMYMGLFNMLSTV

SEQ ID NO: 194803 - protein, 15 aa, Artificial Sequence
  Description of Artificial Sequence: Synthetic peptide
  Seed: SPGMMMGMFNMLSTV
SPGMYMGLFNMLTTV

SEQ ID NO: 194804 - protein, 15 aa, Artificial Sequence
  Description of Artificial Sequence: Synthetic peptide
  Seed: SPGMMMGMFNMLSTV
SPGMYMGLFNMLVTV

SEQ ID NO: 194805 - protein, 15 aa, Artificial Sequence
  Description of Artificial Sequence: Synthetic peptide
  Seed: SPGMMMGMFNMLSTV
SPGMYMGLFPMLATV

SEQ ID NO: 194806 - protein, 15 aa, Artificial Sequence
  Description of Artificial Sequence: Synthetic peptide
  Seed: SPGMMMGMFNMLSTV
SPGMYMGLFPMLDTV

SEQ ID NO: 194807 - protein, 15 aa, Artificial Sequence
  Description of Artificial Sequence: Synthetic peptide
  Seed: SPGMMMGMFNMLSTV
SPGMYMGLFPMLETV

SEQ ID NO: 194808 - protein, 15 aa, Artificial Sequence
  Description of Artificial Sequence: Synthetic peptide
  Seed: SPGMMMGMFNMLSTV
SPGMYMGLFPMLGTV

SEQ ID NO: 194809 - protein, 15 aa, Artificial Sequence
  Description of Artificial Sequence: Synthetic peptide
  Seed: SPGMMMGMFNMLSTV
SPGMYMGLFPMLHTV

SEQ ID NO: 194810 - protein, 15 aa, Artificial Sequence
  Description of Artificial Sequence: Synthetic peptide
  Seed: SPGMMMGMFNMLSTV
SPGMYMGLFPMLITV

SEQ ID NO: 194811 - protein, 15 aa, Artificial Sequence
  Description of Artificial Sequence: Synthetic peptide
  Seed: SPGMMMGMFNMLSTV
SPGMYMGLFPMLLTV

SEQ ID NO: 194812 - protein, 15 aa, Artificial Sequence
  Description of Artificial Sequence: Synthetic peptide
  Seed: SPGMMMGMFNMLSTV
SPGMYMGLFPMLMTV

SEQ ID NO: 194813 - protein, 15 aa, Artificial Sequence
  Description of Artificial Sequence: Synthetic peptide
  Seed: SPGMMMGMFNMLSTV
SPGMYMGLFPMLNTV

SEQ ID NO: 194814 - protein, 15 aa, Artificial Sequence
  Description of Artificial Sequence: Synthetic peptide
  Seed: SPGMMMGMFNMLSTV
SPGMYMGLFPMLPTV

SEQ ID NO: 194815 - protein, 15 aa, Artificial Sequence
  Description of Artificial Sequence: Synthetic peptide
  Seed: SPGMMMGMFNMLSTV
SPGMYMGLFPMLQTV

SEQ ID NO: 194816 - protein, 15 aa, Artificial Sequence
  Description of Artificial Sequence: Synthetic peptide
  Seed: SPGMMMGMFNMLSTV
SPGMYMGLFPMLSTV

SEQ ID NO: 194817 - protein, 15 aa, Artificial Sequence
  Description of Artificial Sequence: Synthetic peptide
  Seed: SPGMMMGMFNMLSTV
SPGMYMGLFPMLTTV

SEQ ID NO: 194818 - protein, 15 aa, Artificial Sequence
  Description of Artificial Sequence: Synthetic peptide
  Seed: SPGMMMGMFNMLSTV
SPGMYMGLFPMLVTV

SEQ ID NO: 194819 - protein, 15 aa, Artificial Sequence
  Description of Artificial Sequence: Synthetic peptide
  Seed: SPGMMMGMFNMLSTV
SPGMYMGLFRMLHTV

SEQ ID NO: 194820 - protein, 15 aa, Artificial Sequence
  Description of Artificial Sequence: Synthetic peptide
  Seed: SPGMMMGMFNMLSTV
SPGMYMGLFSMLATV

SEQ ID NO: 194821 - protein, 15 aa, Artificial Sequence
  Description of Artificial Sequence: Synthetic peptide
  Seed: SPGMMMGMFNMLSTV
SPGMYMGLFSMLDTV

SEQ ID NO: 194822 - protein, 15 aa, Artificial Sequence
  Description of Artificial Sequence: Synthetic peptide
  Seed: SPGMMMGMFNMLSTV
SPGMYMGLFSMLHTV

SEQ ID NO: 194823 - protein, 15 aa, Artificial Sequence
  Description of Artificial Sequence: Synthetic peptide
  Seed: SPGMMMGMFNMLSTV
SPGMYMGLFSMLNTV

SEQ ID NO: 194824 - protein, 15 aa, Artificial Sequence
  Description of Artificial Sequence: Synthetic peptide
  Seed: SPGMMMGMFNMLSTV
SPGMYMGLFSMLSTV

SEQ ID NO: 194825 - protein, 15 aa, Artificial Sequence
  Description of Artificial Sequence: Synthetic peptide
  Seed: SPGMMMGMFNMLSTV
SPGMYMGLFSMLTTV

SEQ ID NO: 194826 - protein, 15 aa, Artificial Sequence
  Description of Artificial Sequence: Synthetic peptide
  Seed: SPGMMMGMFNMLSTV
SPGMYMGLFSMLVTV

SEQ ID NO: 194827 - protein, 15 aa, Artificial Sequence
  Description of Artificial Sequence: Synthetic peptide
  Seed: SPGMMMGMFNMLSTV
SPGMYMGLFTMLATV

SEQ ID NO: 194828 - protein, 15 aa, Artificial Sequence
  Description of Artificial Sequence: Synthetic peptide
  Seed: SPGMMMGMFNMLSTV
SPGMYMGLFTMLDTV

SEQ ID NO: 194829 - protein, 15 aa, Artificial Sequence
  Description of Artificial Sequence: Synthetic peptide
  Seed: SPGMMMGMFNMLSTV
SPGMYMGLFTMLHTV

SEQ ID NO: 194830 - protein, 15 aa, Artificial Sequence
  Description of Artificial Sequence: Synthetic peptide
  Seed: SPGMMMGMFNMLSTV
SPGMYMGLFTMLNTV

SEQ ID NO: 194831 - protein, 15 aa, Artificial Sequence
  Description of Artificial Sequence: Synthetic peptide
  Seed: SPGMMMGMFNMLSTV
SPGMYMGLFTMLSTV

SEQ ID NO: 194832 - protein, 15 aa, Artificial Sequence
  Description of Artificial Sequence: Synthetic peptide
  Seed: SPGMMMGMFNMLSTV
SPGMYMGLFTMLTTV

SEQ ID NO: 194833 - protein, 15 aa, Artificial Sequence
  Description of Artificial Sequence: Synthetic peptide
  Seed: SPGMMMGMFNMLSTV
SPGMYMGMFAMLATV

SEQ ID NO: 194834 - protein, 15 aa, Artificial Sequence
  Description of Artificial Sequence: Synthetic peptide
  Seed: SPGMMMGMFNMLSTV
SPGMYMGMFAMLDTV

SEQ ID NO: 194835 - protein, 15 aa, Artificial Sequence
  Description of Artificial Sequence: Synthetic peptide
  Seed: SPGMMMGMFNMLSTV
SPGMYMGMFAMLETV

SEQ ID NO: 194836 - protein, 15 aa, Artificial Sequence
  Description of Artificial Sequence: Synthetic peptide
  Seed: SPGMMMGMFNMLSTV
SPGMYMGMFAMLGTV

SEQ ID NO: 194837 - protein, 15 aa, Artificial Sequence
  Description of Artificial Sequence: Synthetic peptide
  Seed: SPGMMMGMFNMLSTV
SPGMYMGMFAMLHTV

SEQ ID NO: 194838 - protein, 15 aa, Artificial Sequence
  Description of Artificial Sequence: Synthetic peptide
  Seed: SPGMMMGMFNMLSTV
SPGMYMGMFAMLKTV

SEQ ID NO: 194839 - protein, 15 aa, Artificial Sequence
  Description of Artificial Sequence: Synthetic peptide
  Seed: SPGMMMGMFNMLSTV
SPGMYMGMFAMLLTV

SEQ ID NO: 194840 - protein, 15 aa, Artificial Sequence
  Description of Artificial Sequence: Synthetic peptide
  Seed: SPGMMMGMFNMLSTV
SPGMYMGMFAMLMTV

SEQ ID NO: 194841 - protein, 15 aa, Artificial Sequence
  Description of Artificial Sequence: Synthetic peptide
  Seed: SPGMMMGMFNMLSTV
SPGMYMGMFAMLNTV

SEQ ID NO: 194842 - protein, 15 aa, Artificial Sequence
  Description of Artificial Sequence: Synthetic peptide
  Seed: SPGMMMGMFNMLSTV
SPGMYMGMFAMLPTV

SEQ ID NO: 194843 - protein, 15 aa, Artificial Sequence
  Description of Artificial Sequence: Synthetic peptide
  Seed: SPGMMMGMFNMLSTV
SPGMYMGMFAMLQTV

SEQ ID NO: 194844 - protein, 15 aa, Artificial Sequence
  Description of Artificial Sequence: Synthetic peptide
  Seed: SPGMMMGMFNMLSTV
SPGMYMGMFAMLRTV

SEQ ID NO: 194845 - protein, 15 aa, Artificial Sequence
  Description of Artificial Sequence: Synthetic peptide
  Seed: SPGMMMGMFNMLSTV
SPGMYMGMFAMLSTV

SEQ ID NO: 194846 - protein, 15 aa, Artificial Sequence
  Description of Artificial Sequence: Synthetic peptide
  Seed: SPGMMMGMFNMLSTV
SPGMYMGMFAMLTTV

SEQ ID NO: 194847 - protein, 15 aa, Artificial Sequence
  Description of Artificial Sequence: Synthetic peptide
  Seed: SPGMMMGMFNMLSTV
SPGMYMGMFAMLVTV

SEQ ID NO: 194848 - protein, 15 aa, Artificial Sequence
  Description of Artificial Sequence: Synthetic peptide
  Seed: SPGMMMGMFNMLSTV
SPGMYMGMFGMLATV

SEQ ID NO: 194849 - protein, 15 aa, Artificial Sequence
  Description of Artificial Sequence: Synthetic peptide
  Seed: SPGMMMGMFNMLSTV
SPGMYMGMFGMLHTV

SEQ ID NO: 194850 - protein, 15 aa, Artificial Sequence
  Description of Artificial Sequence: Synthetic peptide
  Seed: SPGMMMGMFNMLSTV
SPGMYMGMFGMLITV

SEQ ID NO: 194851 - protein, 15 aa, Artificial Sequence
  Description of Artificial Sequence: Synthetic peptide
  Seed: SPGMMMGMFNMLSTV
SPGMYMGMFGMLLTV

SEQ ID NO: 194852 - protein, 15 aa, Artificial Sequence
  Description of Artificial Sequence: Synthetic peptide
  Seed: SPGMMMGMFNMLSTV
SPGMYMGMFGMLMTV

SEQ ID NO: 194853 - protein, 15 aa, Artificial Sequence
  Description of Artificial Sequence: Synthetic peptide
  Seed: SPGMMMGMFNMLSTV
SPGMYMGMFGMLNTV

SEQ ID NO: 194854 - protein, 15 aa, Artificial Sequence
  Description of Artificial Sequence: Synthetic peptide
  Seed: SPGMMMGMFNMLSTV
SPGMYMGMFGMLSTV

SEQ ID NO: 194855 - protein, 15 aa, Artificial Sequence
  Description of Artificial Sequence: Synthetic peptide
  Seed: SPGMMMGMFNMLSTV
SPGMYMGMFGMLTTV

SEQ ID NO: 194856 - protein, 15 aa, Artificial Sequence
  Description of Artificial Sequence: Synthetic peptide
  Seed: SPGMMMGMFNMLSTV
SPGMYMGMFGMLVTV

SEQ ID NO: 194857 - protein, 15 aa, Artificial Sequence
  Description of Artificial Sequence: Synthetic peptide
  Seed: SPGMMMGMFNMLSTV
SPGMYMGMFKMLHTV

SEQ ID NO: 194858 - protein, 15 aa, Artificial Sequence
  Description of Artificial Sequence: Synthetic peptide
  Seed: SPGMMMGMFNMLSTV
SPGMYMGMFKMLSTV

SEQ ID NO: 194859 - protein, 15 aa, Artificial Sequence
  Description of Artificial Sequence: Synthetic peptide
  Seed: SPGMMMGMFNMLSTV
SPGMYMGMFNMLATV

SEQ ID NO: 194860 - protein, 15 aa, Artificial Sequence
  Description of Artificial Sequence: Synthetic peptide
  Seed: SPGMMMGMFNMLSTV
SPGMYMGMFNMLDTV

SEQ ID NO: 194861 - protein, 15 aa, Artificial Sequence
  Description of Artificial Sequence: Synthetic peptide
  Seed: SPGMMMGMFNMLSTV
SPGMYMGMFNMLETV

SEQ ID NO: 194862 - protein, 15 aa, Artificial Sequence
  Description of Artificial Sequence: Synthetic peptide
  Seed: SPGMMMGMFNMLSTV
SPGMYMGMFNMLHTV

SEQ ID NO: 194863 - protein, 15 aa, Artificial Sequence
  Description of Artificial Sequence: Synthetic peptide
  Seed: SPGMMMGMFNMLSTV
SPGMYMGMFNMLITV

SEQ ID NO: 194864 - protein, 15 aa, Artificial Sequence
  Description of Artificial Sequence: Synthetic peptide
  Seed: SPGMMMGMFNMLSTV
SPGMYMGMFNMLLTV

SEQ ID NO: 194865 - protein, 15 aa, Artificial Sequence
  Description of Artificial Sequence: Synthetic peptide
  Seed: SPGMMMGMFNMLSTV
SPGMYMGMFNMLNTV

SEQ ID NO: 194866 - protein, 15 aa, Artificial Sequence
  Description of Artificial Sequence: Synthetic peptide
  Seed: SPGMMMGMFNMLSTV
SPGMYMGMFNMLSTV

SEQ ID NO: 194867 - protein, 15 aa, Artificial Sequence
  Description of Artificial Sequence: Synthetic peptide
  Seed: SPGMMMGMFNMLSTV
SPGMYMGMFNMLTTV

SEQ ID NO: 194868 - protein, 15 aa, Artificial Sequence
  Description of Artificial Sequence: Synthetic peptide
  Seed: SPGMMMGMFNMLSTV
SPGMYMGMFNMLVTV

SEQ ID NO: 194869 - protein, 15 aa, Artificial Sequence
  Description of Artificial Sequence: Synthetic peptide
  Seed: SPGMMMGMFNMLSTV
SPGMYMGMFPMLATV

SEQ ID NO: 194870 - protein, 15 aa, Artificial Sequence
  Description of Artificial Sequence: Synthetic peptide
  Seed: SPGMMMGMFNMLSTV
SPGMYMGMFPMLDTV

SEQ ID NO: 194871 - protein, 15 aa, Artificial Sequence
  Description of Artificial Sequence: Synthetic peptide
  Seed: SPGMMMGMFNMLSTV
SPGMYMGMFPMLETV

SEQ ID NO: 194872 - protein, 15 aa, Artificial Sequence
  Description of Artificial Sequence: Synthetic peptide
  Seed: SPGMMMGMFNMLSTV
SPGMYMGMFPMLGTV

SEQ ID NO: 194873 - protein, 15 aa, Artificial Sequence
  Description of Artificial Sequence: Synthetic peptide
  Seed: SPGMMMGMFNMLSTV
SPGMYMGMFPMLHTV

SEQ ID NO: 194874 - protein, 15 aa, Artificial Sequence
  Description of Artificial Sequence: Synthetic peptide
  Seed: SPGMMMGMFNMLSTV
SPGMYMGMFPMLITV

SEQ ID NO: 194875 - protein, 15 aa, Artificial Sequence
  Description of Artificial Sequence: Synthetic peptide
  Seed: SPGMMMGMFNMLSTV
SPGMYMGMFPMLKTV

SEQ ID NO: 194876 - protein, 15 aa, Artificial Sequence
  Description of Artificial Sequence: Synthetic peptide
  Seed: SPGMMMGMFNMLSTV
SPGMYMGMFPMLLTV

SEQ ID NO: 194877 - protein, 15 aa, Artificial Sequence
  Description of Artificial Sequence: Synthetic peptide
  Seed: SPGMMMGMFNMLSTV
SPGMYMGMFPMLMTV

SEQ ID NO: 194878 - protein, 15 aa, Artificial Sequence
  Description of Artificial Sequence: Synthetic peptide
  Seed: SPGMMMGMFNMLSTV
SPGMYMGMFPMLNTV

SEQ ID NO: 194879 - protein, 15 aa, Artificial Sequence
  Description of Artificial Sequence: Synthetic peptide
  Seed: SPGMMMGMFNMLSTV
SPGMYMGMFPMLPTV

SEQ ID NO: 194880 - protein, 15 aa, Artificial Sequence
  Description of Artificial Sequence: Synthetic peptide
  Seed: SPGMMMGMFNMLSTV
SPGMYMGMFPMLQTV

SEQ ID NO: 194881 - protein, 15 aa, Artificial Sequence
  Description of Artificial Sequence: Synthetic peptide
  Seed: SPGMMMGMFNMLSTV
SPGMYMGMFPMLRTV

SEQ ID NO: 194882 - protein, 15 aa, Artificial Sequence
  Description of Artificial Sequence: Synthetic peptide
  Seed: SPGMMMGMFNMLSTV
SPGMYMGMFPMLSTV

SEQ ID NO: 194883 - protein, 15 aa, Artificial Sequence
  Description of Artificial Sequence: Synthetic peptide
  Seed: SPGMMMGMFNMLSTV
SPGMYMGMFPMLTTV

SEQ ID NO: 194884 - protein, 15 aa, Artificial Sequence
  Description of Artificial Sequence: Synthetic peptide
  Seed: SPGMMMGMFNMLSTV
SPGMYMGMFPMLVTV

SEQ ID NO: 194885 - protein, 15 aa, Artificial Sequence
  Description of Artificial Sequence: Synthetic peptide
  Seed: SPGMMMGMFNMLSTV
SPGMYMGMFRMLHTV

SEQ ID NO: 194886 - protein, 15 aa, Artificial Sequence
  Description of Artificial Sequence: Synthetic peptide
  Seed: SPGMMMGMFNMLSTV
SPGMYMGMFSMLATV

SEQ ID NO: 194887 - protein, 15 aa, Artificial Sequence
  Description of Artificial Sequence: Synthetic peptide
  Seed: SPGMMMGMFNMLSTV
SPGMYMGMFSMLDTV

SEQ ID NO: 194888 - protein, 15 aa, Artificial Sequence
  Description of Artificial Sequence: Synthetic peptide
  Seed: SPGMMMGMFNMLSTV
SPGMYMGMFSMLHTV

SEQ ID NO: 194889 - protein, 15 aa, Artificial Sequence
  Description of Artificial Sequence: Synthetic peptide
  Seed: SPGMMMGMFNMLSTV
SPGMYMGMFSMLITV

SEQ ID NO: 194890 - protein, 15 aa, Artificial Sequence
  Description of Artificial Sequence: Synthetic peptide
  Seed: SPGMMMGMFNMLSTV
SPGMYMGMFSMLLTV

SEQ ID NO: 194891 - protein, 15 aa, Artificial Sequence
  Description of Artificial Sequence: Synthetic peptide
  Seed: SPGMMMGMFNMLSTV
SPGMYMGMFSMLMTV

SEQ ID NO: 194892 - protein, 15 aa, Artificial Sequence
  Description of Artificial Sequence: Synthetic peptide
  Seed: SPGMMMGMFNMLSTV
SPGMYMGMFSMLNTV

SEQ ID NO: 194893 - protein, 15 aa, Artificial Sequence
  Description of Artificial Sequence: Synthetic peptide
  Seed: SPGMMMGMFNMLSTV
SPGMYMGMFSMLRTV

SEQ ID NO: 194894 - protein, 15 aa, Artificial Sequence
  Description of Artificial Sequence: Synthetic peptide
  Seed: SPGMMMGMFNMLSTV
SPGMYMGMFSMLSTV

SEQ ID NO: 194895 - protein, 15 aa, Artificial Sequence
  Description of Artificial Sequence: Synthetic peptide
  Seed: SPGMMMGMFNMLSTV
SPGMYMGMFSMLTTV

SEQ ID NO: 194896 - protein, 15 aa, Artificial Sequence
  Description of Artificial Sequence: Synthetic peptide
  Seed: SPGMMMGMFNMLSTV
SPGMYMGMFSMLVTV

SEQ ID NO: 194897 - protein, 15 aa, Artificial Sequence
  Description of Artificial Sequence: Synthetic peptide
  Seed: SPGMMMGMFNMLSTV
SPGMYMGMFTMLATV

SEQ ID NO: 194898 - protein, 15 aa, Artificial Sequence
  Description of Artificial Sequence: Synthetic peptide
  Seed: SPGMMMGMFNMLSTV
SPGMYMGMFTMLDTV

SEQ ID NO: 194899 - protein, 15 aa, Artificial Sequence
  Description of Artificial Sequence: Synthetic peptide
  Seed: SPGMMMGMFNMLSTV
SPGMYMGMFTMLHTV

SEQ ID NO: 194900 - protein, 15 aa, Artificial Sequence
  Description of Artificial Sequence: Synthetic peptide
  Seed: SPGMMMGMFNMLSTV
SPGMYMGMFTMLKTV

SEQ ID NO: 194901 - protein, 15 aa, Artificial Sequence
  Description of Artificial Sequence: Synthetic peptide
  Seed: SPGMMMGMFNMLSTV
SPGMYMGMFTMLNTV

SEQ ID NO: 194902 - protein, 15 aa, Artificial Sequence
  Description of Artificial Sequence: Synthetic peptide
  Seed: SPGMMMGMFNMLSTV
SPGMYMGMFTMLSTV

SEQ ID NO: 194903 - protein, 15 aa, Artificial Sequence
  Description of Artificial Sequence: Synthetic peptide
  Seed: SPGMMMGMFNMLSTV
SPGMYMGMFTMLTTV

SEQ ID NO: 194904 - protein, 15 aa, Artificial Sequence
  Description of Artificial Sequence: Synthetic peptide
  Seed: SPGMMMGMFNMLSTV
SPGMYMGMFVMLHTV

SEQ ID NO: 194905 - protein, 15 aa, Artificial Sequence
  Description of Artificial Sequence: Synthetic peptide
  Seed: SPGMMMGMFNMLSTV
SPGMYMGMFVMLNTV

SEQ ID NO: 194906 - protein, 15 aa, Artificial Sequence
  Description of Artificial Sequence: Synthetic peptide
  Seed: SPGMMMGMFNMLSTV
SPGMYMGNFAMLATV

SEQ ID NO: 194907 - protein, 15 aa, Artificial Sequence
  Description of Artificial Sequence: Synthetic peptide
  Seed: SPGMMMGMFNMLSTV
SPGMYMGNFAMLITV

SEQ ID NO: 194908 - protein, 15 aa, Artificial Sequence
  Description of Artificial Sequence: Synthetic peptide
  Seed: SPGMMMGMFNMLSTV
SPGMYMGNFAMLLTV

SEQ ID NO: 194909 - protein, 15 aa, Artificial Sequence
  Description of Artificial Sequence: Synthetic peptide
  Seed: SPGMMMGMFNMLSTV
SPGMYMGNFAMLMTV

SEQ ID NO: 194910 - protein, 15 aa, Artificial Sequence
  Description of Artificial Sequence: Synthetic peptide
  Seed: SPGMMMGMFNMLSTV
SPGMYMGNFAMLSTV

SEQ ID NO: 194911 - protein, 15 aa, Artificial Sequence
  Description of Artificial Sequence: Synthetic peptide
  Seed: SPGMMMGMFNMLSTV
SPGMYMGNFAMLTTV

SEQ ID NO: 194912 - protein, 15 aa, Artificial Sequence
  Description of Artificial Sequence: Synthetic peptide
  Seed: SPGMMMGMFNMLSTV
SPGMYMGNFAMLVTV

SEQ ID NO: 194913 - protein, 15 aa, Artificial Sequence
  Description of Artificial Sequence: Synthetic peptide
  Seed: SPGMMMGMFNMLSTV
SPGMYMGNFGMLVTV

SEQ ID NO: 194914 - protein, 15 aa, Artificial Sequence
  Description of Artificial Sequence: Synthetic peptide
  Seed: SPGMMMGMFNMLSTV
SPGMYMGNFPMLITV

SEQ ID NO: 194915 - protein, 15 aa, Artificial Sequence
  Description of Artificial Sequence: Synthetic peptide
  Seed: SPGMMMGMFNMLSTV
SPGMYMGNFPMLLTV

SEQ ID NO: 194916 - protein, 15 aa, Artificial Sequence
  Description of Artificial Sequence: Synthetic peptide
  Seed: SPGMMMGMFNMLSTV
SPGMYMGNFPMLVTV

SEQ ID NO: 194917 - protein, 15 aa, Artificial Sequence
  Description of Artificial Sequence: Synthetic peptide
  Seed: SPGMMMGMFNMLSTV
SPGMYMGNFSMLVTV

SEQ ID NO: 194918 - protein, 15 aa, Artificial Sequence
  Description of Artificial Sequence: Synthetic peptide
  Seed: SPGMMMGMFNMLSTV
SPGMYMGQFAMLATV

SEQ ID NO: 194919 - protein, 15 aa, Artificial Sequence
  Description of Artificial Sequence: Synthetic peptide
  Seed: SPGMMMGMFNMLSTV
SPGMYMGQFAMLGTV

SEQ ID NO: 194920 - protein, 15 aa, Artificial Sequence
  Description of Artificial Sequence: Synthetic peptide
  Seed: SPGMMMGMFNMLSTV
SPGMYMGQFAMLHTV

SEQ ID NO: 194921 - protein, 15 aa, Artificial Sequence
  Description of Artificial Sequence: Synthetic peptide
  Seed: SPGMMMGMFNMLSTV
SPGMYMGQFAMLITV

SEQ ID NO: 194922 - protein, 15 aa, Artificial Sequence
  Description of Artificial Sequence: Synthetic peptide
  Seed: SPGMMMGMFNMLSTV
SPGMYMGQFAMLLTV

SEQ ID NO: 194923 - protein, 15 aa, Artificial Sequence
  Description of Artificial Sequence: Synthetic peptide
  Seed: SPGMMMGMFNMLSTV
SPGMYMGQFAMLMTV

SEQ ID NO: 194924 - protein, 15 aa, Artificial Sequence
  Description of Artificial Sequence: Synthetic peptide
  Seed: SPGMMMGMFNMLSTV
SPGMYMGQFAMLNTV

SEQ ID NO: 194925 - protein, 15 aa, Artificial Sequence
  Description of Artificial Sequence: Synthetic peptide
  Seed: SPGMMMGMFNMLSTV
SPGMYMGQFAMLQTV

SEQ ID NO: 194926 - protein, 15 aa, Artificial Sequence
  Description of Artificial Sequence: Synthetic peptide
  Seed: SPGMMMGMFNMLSTV
SPGMYMGQFAMLSTV

SEQ ID NO: 194927 - protein, 15 aa, Artificial Sequence
  Description of Artificial Sequence: Synthetic peptide
  Seed: SPGMMMGMFNMLSTV
SPGMYMGQFAMLTTV

SEQ ID NO: 194928 - protein, 15 aa, Artificial Sequence
  Description of Artificial Sequence: Synthetic peptide
  Seed: SPGMMMGMFNMLSTV
SPGMYMGQFAMLVTV

SEQ ID NO: 194929 - protein, 15 aa, Artificial Sequence
  Description of Artificial Sequence: Synthetic peptide
  Seed: SPGMMMGMFNMLSTV
SPGMYMGQFGMLATV

SEQ ID NO: 194930 - protein, 15 aa, Artificial Sequence
  Description of Artificial Sequence: Synthetic peptide
  Seed: SPGMMMGMFNMLSTV
SPGMYMGQFGMLITV

SEQ ID NO: 194931 - protein, 15 aa, Artificial Sequence
  Description of Artificial Sequence: Synthetic peptide
  Seed: SPGMMMGMFNMLSTV
SPGMYMGQFGMLLTV

SEQ ID NO: 194932 - protein, 15 aa, Artificial Sequence
  Description of Artificial Sequence: Synthetic peptide
  Seed: SPGMMMGMFNMLSTV
SPGMYMGQFGMLNTV

SEQ ID NO: 194933 - protein, 15 aa, Artificial Sequence
  Description of Artificial Sequence: Synthetic peptide
  Seed: SPGMMMGMFNMLSTV
SPGMYMGQFGMLTTV

SEQ ID NO: 194934 - protein, 15 aa, Artificial Sequence
  Description of Artificial Sequence: Synthetic peptide
  Seed: SPGMMMGMFNMLSTV
SPGMYMGQFGMLVTV

SEQ ID NO: 194935 - protein, 15 aa, Artificial Sequence
  Description of Artificial Sequence: Synthetic peptide
  Seed: SPGMMMGMFNMLSTV
SPGMYMGQFPMLATV

SEQ ID NO: 194936 - protein, 15 aa, Artificial Sequence
  Description of Artificial Sequence: Synthetic peptide
  Seed: SPGMMMGMFNMLSTV
SPGMYMGQFPMLITV

SEQ ID NO: 194937 - protein, 15 aa, Artificial Sequence
  Description of Artificial Sequence: Synthetic peptide
  Seed: SPGMMMGMFNMLSTV
SPGMYMGQFPMLLTV

SEQ ID NO: 194938 - protein, 15 aa, Artificial Sequence
  Description of Artificial Sequence: Synthetic peptide
  Seed: SPGMMMGMFNMLSTV
SPGMYMGQFPMLMTV

SEQ ID NO: 194939 - protein, 15 aa, Artificial Sequence
  Description of Artificial Sequence: Synthetic peptide
  Seed: SPGMMMGMFNMLSTV
SPGMYMGQFPMLNTV

SEQ ID NO: 194940 - protein, 15 aa, Artificial Sequence
  Description of Artificial Sequence: Synthetic peptide
  Seed: SPGMMMGMFNMLSTV
SPGMYMGQFPMLSTV

SEQ ID NO: 194941 - protein, 15 aa, Artificial Sequence
  Description of Artificial Sequence: Synthetic peptide
  Seed: SPGMMMGMFNMLSTV
SPGMYMGQFPMLTTV

SEQ ID NO: 194942 - protein, 15 aa, Artificial Sequence
  Description of Artificial Sequence: Synthetic peptide
  Seed: SPGMMMGMFNMLSTV
SPGMYMGQFPMLVTV

SEQ ID NO: 194943 - protein, 15 aa, Artificial Sequence
  Description of Artificial Sequence: Synthetic peptide
  Seed: SPGMMMGMFNMLSTV
SPGMYMGQFSMLATV

SEQ ID NO: 194944 - protein, 15 aa, Artificial Sequence
  Description of Artificial Sequence: Synthetic peptide
  Seed: SPGMMMGMFNMLSTV
SPGMYMGQFSMLITV

SEQ ID NO: 194945 - protein, 15 aa, Artificial Sequence
  Description of Artificial Sequence: Synthetic peptide
  Seed: SPGMMMGMFNMLSTV
SPGMYMGQFSMLLTV

SEQ ID NO: 194946 - protein, 15 aa, Artificial Sequence
  Description of Artificial Sequence: Synthetic peptide
  Seed: SPGMMMGMFNMLSTV
SPGMYMGQFSMLNTV

SEQ ID NO: 194947 - protein, 15 aa, Artificial Sequence
  Description of Artificial Sequence: Synthetic peptide
  Seed: SPGMMMGMFNMLSTV
SPGMYMGQFSMLSTV

SEQ ID NO: 194948 - protein, 15 aa, Artificial Sequence
  Description of Artificial Sequence: Synthetic peptide
  Seed: SPGMMMGMFNMLSTV
SPGMYMGQFSMLVTV

SEQ ID NO: 194949 - protein, 15 aa, Artificial Sequence
  Description of Artificial Sequence: Synthetic peptide
  Seed: SPGMMMGMFNMLSTV
SPGMYMGQFTMLATV

SEQ ID NO: 194950 - protein, 15 aa, Artificial Sequence
  Description of Artificial Sequence: Synthetic peptide
  Seed: SPGMMMGMFNMLSTV
SPGMYMGQFTMLNTV

SEQ ID NO: 194951 - protein, 15 aa, Artificial Sequence
  Description of Artificial Sequence: Synthetic peptide
  Seed: SPGMMMGMFNMLSTV
SPGMYMGQFTMLSTV

SEQ ID NO: 194952 - protein, 15 aa, Artificial Sequence
  Description of Artificial Sequence: Synthetic peptide
  Seed: SPGMMMGMFNMLSTV
SPGMYMGQFTMLTTV

SEQ ID NO: 194953 - protein, 15 aa, Artificial Sequence
  Description of Artificial Sequence: Synthetic peptide
  Seed: SPGMMMGMFNMLSTV
SPGMYMGQFVMLNTV

SEQ ID NO: 194954 - protein, 15 aa, Artificial Sequence
  Description of Artificial Sequence: Synthetic peptide
  Seed: SPGMMMGMFNMLSTV
SPGMYMGSFAMLATV

SEQ ID NO: 194955 - protein, 15 aa, Artificial Sequence
  Description of Artificial Sequence: Synthetic peptide
  Seed: SPGMMMGMFNMLSTV
SPGMYMGSFAMLGTV

SEQ ID NO: 194956 - protein, 15 aa, Artificial Sequence
  Description of Artificial Sequence: Synthetic peptide
  Seed: SPGMMMGMFNMLSTV
SPGMYMGSFAMLITV

SEQ ID NO: 194957 - protein, 15 aa, Artificial Sequence
  Description of Artificial Sequence: Synthetic peptide
  Seed: SPGMMMGMFNMLSTV
SPGMYMGSFAMLLTV

SEQ ID NO: 194958 - protein, 15 aa, Artificial Sequence
  Description of Artificial Sequence: Synthetic peptide
  Seed: SPGMMMGMFNMLSTV
SPGMYMGSFAMLMTV

SEQ ID NO: 194959 - protein, 15 aa, Artificial Sequence
  Description of Artificial Sequence: Synthetic peptide
  Seed: SPGMMMGMFNMLSTV
SPGMYMGSFAMLNTV

SEQ ID NO: 194960 - protein, 15 aa, Artificial Sequence
  Description of Artificial Sequence: Synthetic peptide
  Seed: SPGMMMGMFNMLSTV
SPGMYMGSFAMLSTV

SEQ ID NO: 194961 - protein, 15 aa, Artificial Sequence
  Description of Artificial Sequence: Synthetic peptide
  Seed: SPGMMMGMFNMLSTV
SPGMYMGSFAMLTTV

SEQ ID NO: 194962 - protein, 15 aa, Artificial Sequence
  Description of Artificial Sequence: Synthetic peptide
  Seed: SPGMMMGMFNMLSTV
SPGMYMGSFAMLVTV

SEQ ID NO: 194963 - protein, 15 aa, Artificial Sequence
  Description of Artificial Sequence: Synthetic peptide
  Seed: SPGMMMGMFNMLSTV
SPGMYMGSFGMLVTV

SEQ ID NO: 194964 - protein, 15 aa, Artificial Sequence
  Description of Artificial Sequence: Synthetic peptide
  Seed: SPGMMMGMFNMLSTV
SPGMYMGSFPMLATV

SEQ ID NO: 194965 - protein, 15 aa, Artificial Sequence
  Description of Artificial Sequence: Synthetic peptide
  Seed: SPGMMMGMFNMLSTV
SPGMYMGSFPMLITV

SEQ ID NO: 194966 - protein, 15 aa, Artificial Sequence
  Description of Artificial Sequence: Synthetic peptide
  Seed: SPGMMMGMFNMLSTV
SPGMYMGSFPMLLTV

SEQ ID NO: 194967 - protein, 15 aa, Artificial Sequence
  Description of Artificial Sequence: Synthetic peptide
  Seed: SPGMMMGMFNMLSTV
SPGMYMGSFPMLMTV

SEQ ID NO: 194968 - protein, 15 aa, Artificial Sequence
  Description of Artificial Sequence: Synthetic peptide
  Seed: SPGMMMGMFNMLSTV
SPGMYMGSFPMLNTV

SEQ ID NO: 194969 - protein, 15 aa, Artificial Sequence
  Description of Artificial Sequence: Synthetic peptide
  Seed: SPGMMMGMFNMLSTV
SPGMYMGSFPMLSTV

SEQ ID NO: 194970 - protein, 15 aa, Artificial Sequence
  Description of Artificial Sequence: Synthetic peptide
  Seed: SPGMMMGMFNMLSTV
SPGMYMGSFPMLVTV

SEQ ID NO: 194971 - protein, 15 aa, Artificial Sequence
  Description of Artificial Sequence: Synthetic peptide
  Seed: SPGMMMGMFNMLSTV
SPGMYMGSFSMLATV

SEQ ID NO: 194972 - protein, 15 aa, Artificial Sequence
  Description of Artificial Sequence: Synthetic peptide
  Seed: SPGMMMGMFNMLSTV
SPGMYMGSFSMLNTV

SEQ ID NO: 194973 - protein, 15 aa, Artificial Sequence
  Description of Artificial Sequence: Synthetic peptide
  Seed: SPGMMMGMFNMLSTV
SPGMYMGSFSMLVTV

SEQ ID NO: 194974 - protein, 15 aa, Artificial Sequence
  Description of Artificial Sequence: Synthetic peptide
  Seed: SPGMMMGMFNMLSTV
SPGMYMGSFTMLNTV

SEQ ID NO: 194975 - protein, 15 aa, Artificial Sequence
  Description of Artificial Sequence: Synthetic peptide
  Seed: SPGMMMGMFNMLSTV
SPGMYMGTFAMLATV

SEQ ID NO: 194976 - protein, 15 aa, Artificial Sequence
  Description of Artificial Sequence: Synthetic peptide
  Seed: SPGMMMGMFNMLSTV
SPGMYMGTFAMLNTV

SEQ ID NO: 194977 - protein, 15 aa, Artificial Sequence
  Description of Artificial Sequence: Synthetic peptide
  Seed: SPGMMMGMFNMLSTV
SPGMYMGTFAMLSTV

SEQ ID NO: 194978 - protein, 15 aa, Artificial Sequence
  Description of Artificial Sequence: Synthetic peptide
  Seed: SPGMMMGMFNMLSTV
SPGMYMGTFAMLVTV

SEQ ID NO: 194979 - protein, 15 aa, Artificial Sequence
  Description of Artificial Sequence: Synthetic peptide
  Seed: SPGMMMGMFNMLSTV
SPGMYMGTFPMLATV

SEQ ID NO: 194980 - protein, 15 aa, Artificial Sequence
  Description of Artificial Sequence: Synthetic peptide
  Seed: SPGMMMGMFNMLSTV
SPGMYMGTFPMLITV

SEQ ID NO: 194981 - protein, 15 aa, Artificial Sequence
  Description of Artificial Sequence: Synthetic peptide
  Seed: SPGMMMGMFNMLSTV
SPGMYMGTFPMLLTV

SEQ ID NO: 194982 - protein, 15 aa, Artificial Sequence
  Description of Artificial Sequence: Synthetic peptide
  Seed: SPGMMMGMFNMLSTV
SPGMYMGTFPMLNTV

SEQ ID NO: 194983 - protein, 15 aa, Artificial Sequence
  Description of Artificial Sequence: Synthetic peptide
  Seed: SPGMMMGMFNMLSTV
SPGMYMGTFPMLSTV

SEQ ID NO: 194984 - protein, 15 aa, Artificial Sequence
  Description of Artificial Sequence: Synthetic peptide
  Seed: SPGMMMGMFNMLSTV
SPGMYMGTFPMLVTV

SEQ ID NO: 194985 - protein, 15 aa, Artificial Sequence
  Description of Artificial Sequence: Synthetic peptide
  Seed: SPGMMMGMFNMLSTV
SPGMYMGVFAMLHTV

SEQ ID NO: 194986 - protein, 15 aa, Artificial Sequence
  Description of Artificial Sequence: Synthetic peptide
  Seed: SPGMMMGMFNMLSTV
SPGMYMGVFAMLNTV

SEQ ID NO: 194987 - protein, 15 aa, Artificial Sequence
  Description of Artificial Sequence: Synthetic peptide
  Seed: SPGMMMGMFNMLSTV
SPGMYMGVFNMLDTV

SEQ ID NO: 194988 - protein, 15 aa, Artificial Sequence
  Description of Artificial Sequence: Synthetic peptide
  Seed: SPGMMMGMFNMLSTV
SPGMYMGVFPMLATV

SEQ ID NO: 194989 - protein, 15 aa, Artificial Sequence
  Description of Artificial Sequence: Synthetic peptide
  Seed: SPGMMMGMFNMLSTV
SPGMYMGVFPMLHTV

SEQ ID NO: 194990 - protein, 15 aa, Artificial Sequence
  Description of Artificial Sequence: Synthetic peptide
  Seed: SPGMMMGMFNMLSTV
SPGMYMGVFPMLITV

SEQ ID NO: 194991 - protein, 15 aa, Artificial Sequence
  Description of Artificial Sequence: Synthetic peptide
  Seed: SPGMMMGMFNMLSTV
SPGMYMGVFPMLLTV

SEQ ID NO: 194992 - protein, 15 aa, Artificial Sequence
  Description of Artificial Sequence: Synthetic peptide
  Seed: SPGMMMGMFNMLSTV
SPGMYMGVFPMLNTV

SEQ ID NO: 194993 - protein, 15 aa, Artificial Sequence
  Description of Artificial Sequence: Synthetic peptide
  Seed: SPGMMMGMFNMLSTV
SPGMYMGVFPMLSTV

SEQ ID NO: 194994 - protein, 15 aa, Artificial Sequence
  Description of Artificial Sequence: Synthetic peptide
  Seed: SPGMMMGMFNMLSTV
SPGMYMGVFPMLTTV

SEQ ID NO: 194995 - protein, 15 aa, Artificial Sequence
  Description of Artificial Sequence: Synthetic peptide
  Seed: SPGMMMGMFNMLSTV
SPGMYMGVFPMLVTV

SEQ ID NO: 194996 - protein, 15 aa, Artificial Sequence
  Description of Artificial Sequence: Synthetic peptide
  Seed: SPGMMMGMFNMLSTV
SPGMYMGVFSMLNTV

SEQ ID NO: 194997 - protein, 15 aa, Artificial Sequence
  Description of Artificial Sequence: Synthetic peptide
  Seed: SPGMMMGMFNMLSTV
SPGMYMGVFTMLNTV

SEQ ID NO: 194998 - protein, 15 aa, Artificial Sequence
  Description of Artificial Sequence: Synthetic peptide
  Seed: SPGMMMGMFNMLSTV
SPGAMMAMANMASTV

SEQ ID NO: 194999 - protein, 15 aa, Artificial Sequence
  Description of Artificial Sequence: Synthetic peptide
  Seed: SPGMMMGMFNMLSTV
SPGAMMAMANMSSTV

SEQ ID NO: 195000 - protein, 15 aa, Artificial Sequence
  Description of Artificial Sequence: Synthetic peptide
  Seed: SPGMMMGMFNMLSTV
SPGAMMGMANMASTV

SEQ ID NO: 195001 - protein, 15 aa, Artificial Sequence
  Description of Artificial Sequence: Synthetic peptide
  Seed: SPGMMMGMFNMLSTV
SPGAMMHMFNMLSTV

SEQ ID NO: 195002 - protein, 15 aa, Artificial Sequence
  Description of Artificial Sequence: Synthetic peptide
  Seed: SPGMMMGMFNMLSTV
SPGAMMNMANMFSTV

SEQ ID NO: 195003 - protein, 15 aa, Artificial Sequence
  Description of Artificial Sequence: Synthetic peptide
  Seed: SPGMMMGMFNMLSTV
SPGAMMNMANMISTV

SEQ ID NO: 195004 - protein, 15 aa, Artificial Sequence
  Description of Artificial Sequence: Synthetic peptide
  Seed: SPGMMMGMFNMLSTV
SPGAMMNMANMLSTV

SEQ ID NO: 195005 - protein, 15 aa, Artificial Sequence
  Description of Artificial Sequence: Synthetic peptide
  Seed: SPGMMMGMFNMLSTV
SPGAMMNMANMVSTV

SEQ ID NO: 195006 - protein, 15 aa, Artificial Sequence
  Description of Artificial Sequence: Synthetic peptide
  Seed: SPGMMMGMFNMLSTV
SPGAMMNMNNMISTV

SEQ ID NO: 195007 - protein, 15 aa, Artificial Sequence
  Description of Artificial Sequence: Synthetic peptide
  Seed: SPGMMMGMFNMLSTV
SPGAMMNMNNMLSTV

SEQ ID NO: 195008 - protein, 15 aa, Artificial Sequence
  Description of Artificial Sequence: Synthetic peptide
  Seed: SPGMMMGMFNMLSTV
SPGAMMNMNNMVSTV

SEQ ID NO: 195009 - protein, 15 aa, Artificial Sequence
  Description of Artificial Sequence: Synthetic peptide
  Seed: SPGMMMGMFNMLSTV
SPGAMMNMSNMISTV

SEQ ID NO: 195010 - protein, 15 aa, Artificial Sequence
  Description of Artificial Sequence: Synthetic peptide
  Seed: SPGMMMGMFNMLSTV
SPGAMMNMSNMLSTV

SEQ ID NO: 195011 - protein, 15 aa, Artificial Sequence
  Description of Artificial Sequence: Synthetic peptide
  Seed: SPGMMMGMFNMLSTV
SPGAMMNMSNMVSTV

SEQ ID NO: 195012 - protein, 15 aa, Artificial Sequence
  Description of Artificial Sequence: Synthetic peptide
  Seed: SPGMMMGMFNMLSTV
SPGAMMSMANMISTV

SEQ ID NO: 195013 - protein, 15 aa, Artificial Sequence
  Description of Artificial Sequence: Synthetic peptide
  Seed: SPGMMMGMFNMLSTV
SPGAMMSMANMLSTV

SEQ ID NO: 195014 - protein, 15 aa, Artificial Sequence
  Description of Artificial Sequence: Synthetic peptide
  Seed: SPGMMMGMFNMLSTV
SPGAMMSMSNMISTV

SEQ ID NO: 195015 - protein, 15 aa, Artificial Sequence
  Description of Artificial Sequence: Synthetic peptide
  Seed: SPGMMMGMFNMLSTV
SPGAMMSMSNMLSTV

SEQ ID NO: 195016 - protein, 15 aa, Artificial Sequence
  Description of Artificial Sequence: Synthetic peptide
  Seed: SPGMMMGMFNMLSTV
SPGAMMTMANMISTV

SEQ ID NO: 195017 - protein, 15 aa, Artificial Sequence
  Description of Artificial Sequence: Synthetic peptide
  Seed: SPGMMMGMFNMLSTV
SPGAMMTMANMLSTV

SEQ ID NO: 195018 - protein, 15 aa, Artificial Sequence
  Description of Artificial Sequence: Synthetic peptide
  Seed: SPGMMMGMFNMLSTV
SPGAMMTMANMVSTV

SEQ ID NO: 195019 - protein, 15 aa, Artificial Sequence
  Description of Artificial Sequence: Synthetic peptide
  Seed: SPGMMMGMFNMLSTV
SPGAMMTMFNMLSTV

SEQ ID NO: 195020 - protein, 15 aa, Artificial Sequence
  Description of Artificial Sequence: Synthetic peptide
  Seed: SPGMMMGMFNMLSTV
SPGAMMTMGNMISTV

SEQ ID NO: 195021 - protein, 15 aa, Artificial Sequence
  Description of Artificial Sequence: Synthetic peptide
  Seed: SPGMMMGMFNMLSTV
SPGAMMTMSNMISTV

SEQ ID NO: 195022 - protein, 15 aa, Artificial Sequence
  Description of Artificial Sequence: Synthetic peptide
  Seed: SPGMMMGMFNMLSTV
SPGAMMTMSNMLSTV

SEQ ID NO: 195023 - protein, 15 aa, Artificial Sequence
  Description of Artificial Sequence: Synthetic peptide
  Seed: SPGMMMGMFNMLSTV
SPGAMMTMSNMVSTV

SEQ ID NO: 195024 - protein, 15 aa, Artificial Sequence
  Description of Artificial Sequence: Synthetic peptide
  Seed: SPGMMMGMFNMLSTV
SPGCMMAMANMISTV

SEQ ID NO: 195025 - protein, 15 aa, Artificial Sequence
  Description of Artificial Sequence: Synthetic peptide
  Seed: SPGMMMGMFNMLSTV
SPGCMMAMANMLSTV

SEQ ID NO: 195026 - protein, 15 aa, Artificial Sequence
  Description of Artificial Sequence: Synthetic peptide
  Seed: SPGMMMGMFNMLSTV
SPGCMMAMANMMSTV

SEQ ID NO: 195027 - protein, 15 aa, Artificial Sequence
  Description of Artificial Sequence: Synthetic peptide
  Seed: SPGMMMGMFNMLSTV
SPGCMMAMANMVSTV

SEQ ID NO: 195028 - protein, 15 aa, Artificial Sequence
  Description of Artificial Sequence: Synthetic peptide
  Seed: SPGMMMGMFNMLSTV
SPGCMMAMFNMLSTV

SEQ ID NO: 195029 - protein, 15 aa, Artificial Sequence
  Description of Artificial Sequence: Synthetic peptide
  Seed: SPGMMMGMFNMLSTV
SPGCMMAMFNMVSTV

SEQ ID NO: 195030 - protein, 15 aa, Artificial Sequence
  Description of Artificial Sequence: Synthetic peptide
  Seed: SPGMMMGMFNMLSTV
SPGCMMAMSNMISTV

SEQ ID NO: 195031 - protein, 15 aa, Artificial Sequence
  Description of Artificial Sequence: Synthetic peptide
  Seed: SPGMMMGMFNMLSTV
SPGCMMAMSNMLSTV

SEQ ID NO: 195032 - protein, 15 aa, Artificial Sequence
  Description of Artificial Sequence: Synthetic peptide
  Seed: SPGMMMGMFNMLSTV
SPGCMMAMSNMVSTV

SEQ ID NO: 195033 - protein, 15 aa, Artificial Sequence
  Description of Artificial Sequence: Synthetic peptide
  Seed: SPGMMMGMFNMLSTV
SPGCMMEMFNMLSTV

SEQ ID NO: 195034 - protein, 15 aa, Artificial Sequence
  Description of Artificial Sequence: Synthetic peptide
  Seed: SPGMMMGMFNMLSTV
SPGCMMFMFNMISTV

SEQ ID NO: 195035 - protein, 15 aa, Artificial Sequence
  Description of Artificial Sequence: Synthetic peptide
  Seed: SPGMMMGMFNMLSTV
SPGCMMFMFNMLSTV

SEQ ID NO: 195036 - protein, 15 aa, Artificial Sequence
  Description of Artificial Sequence: Synthetic peptide
  Seed: SPGMMMGMFNMLSTV
SPGCMMFMYNMVSTV

SEQ ID NO: 195037 - protein, 15 aa, Artificial Sequence
  Description of Artificial Sequence: Synthetic peptide
  Seed: SPGMMMGMFNMLSTV
SPGCMMHMFNMISTV

SEQ ID NO: 195038 - protein, 15 aa, Artificial Sequence
  Description of Artificial Sequence: Synthetic peptide
  Seed: SPGMMMGMFNMLSTV
SPGCMMHMFNMLSTV

SEQ ID NO: 195039 - protein, 15 aa, Artificial Sequence
  Description of Artificial Sequence: Synthetic peptide
  Seed: SPGMMMGMFNMLSTV
SPGCMMHMFNMVSTV

SEQ ID NO: 195040 - protein, 15 aa, Artificial Sequence
  Description of Artificial Sequence: Synthetic peptide
  Seed: SPGMMMGMFNMLSTV
SPGCMMIMFNMLSTV

SEQ ID NO: 195041 - protein, 15 aa, Artificial Sequence
  Description of Artificial Sequence: Synthetic peptide
  Seed: SPGMMMGMFNMLSTV
SPGCMMIMSNMISTV

SEQ ID NO: 195042 - protein, 15 aa, Artificial Sequence
  Description of Artificial Sequence: Synthetic peptide
  Seed: SPGMMMGMFNMLSTV
SPGCMMIMYNMLSTV

SEQ ID NO: 195043 - protein, 15 aa, Artificial Sequence
  Description of Artificial Sequence: Synthetic peptide
  Seed: SPGMMMGMFNMLSTV
SPGCMMNMANMFSTV

SEQ ID NO: 195044 - protein, 15 aa, Artificial Sequence
  Description of Artificial Sequence: Synthetic peptide
  Seed: SPGMMMGMFNMLSTV
SPGCMMNMANMISTV

SEQ ID NO: 195045 - protein, 15 aa, Artificial Sequence
  Description of Artificial Sequence: Synthetic peptide
  Seed: SPGMMMGMFNMLSTV
SPGCMMNMANMLSTV

SEQ ID NO: 195046 - protein, 15 aa, Artificial Sequence
  Description of Artificial Sequence: Synthetic peptide
  Seed: SPGMMMGMFNMLSTV
SPGCMMNMANMMSTV

SEQ ID NO: 195047 - protein, 15 aa, Artificial Sequence
  Description of Artificial Sequence: Synthetic peptide
  Seed: SPGMMMGMFNMLSTV
SPGCMMNMANMVSTV

SEQ ID NO: 195048 - protein, 15 aa, Artificial Sequence
  Description of Artificial Sequence: Synthetic peptide
  Seed: SPGMMMGMFNMLSTV
SPGCMMNMANMYSTV

SEQ ID NO: 195049 - protein, 15 aa, Artificial Sequence
  Description of Artificial Sequence: Synthetic peptide
  Seed: SPGMMMGMFNMLSTV
SPGCMMNMGNMISTV

SEQ ID NO: 195050 - protein, 15 aa, Artificial Sequence
  Description of Artificial Sequence: Synthetic peptide
  Seed: SPGMMMGMFNMLSTV
SPGCMMNMGNMVSTV

SEQ ID NO: 195051 - protein, 15 aa, Artificial Sequence
  Description of Artificial Sequence: Synthetic peptide
  Seed: SPGMMMGMFNMLSTV
SPGCMMNMINMISTV

SEQ ID NO: 195052 - protein, 15 aa, Artificial Sequence
  Description of Artificial Sequence: Synthetic peptide
  Seed: SPGMMMGMFNMLSTV
SPGCMMNMINMVSTV

SEQ ID NO: 195053 - protein, 15 aa, Artificial Sequence
  Description of Artificial Sequence: Synthetic peptide
  Seed: SPGMMMGMFNMLSTV
SPGCMMNMNNMFSTV

SEQ ID NO: 195054 - protein, 15 aa, Artificial Sequence
  Description of Artificial Sequence: Synthetic peptide
  Seed: SPGMMMGMFNMLSTV
SPGCMMNMNNMISTV

SEQ ID NO: 195055 - protein, 15 aa, Artificial Sequence
  Description of Artificial Sequence: Synthetic peptide
  Seed: SPGMMMGMFNMLSTV
SPGCMMNMNNMLSTV

SEQ ID NO: 195056 - protein, 15 aa, Artificial Sequence
  Description of Artificial Sequence: Synthetic peptide
  Seed: SPGMMMGMFNMLSTV
SPGCMMNMNNMMSTV

SEQ ID NO: 195057 - protein, 15 aa, Artificial Sequence
  Description of Artificial Sequence: Synthetic peptide
  Seed: SPGMMMGMFNMLSTV
SPGCMMNMNNMVSTV

SEQ ID NO: 195058 - protein, 15 aa, Artificial Sequence
  Description of Artificial Sequence: Synthetic peptide
  Seed: SPGMMMGMFNMLSTV
SPGCMMNMNNMYSTV

SEQ ID NO: 195059 - protein, 15 aa, Artificial Sequence
  Description of Artificial Sequence: Synthetic peptide
  Seed: SPGMMMGMFNMLSTV
SPGCMMNMPNMISTV

SEQ ID NO: 195060 - protein, 15 aa, Artificial Sequence
  Description of Artificial Sequence: Synthetic peptide
  Seed: SPGMMMGMFNMLSTV
SPGCMMNMPNMLSTV

SEQ ID NO: 195061 - protein, 15 aa, Artificial Sequence
  Description of Artificial Sequence: Synthetic peptide
  Seed: SPGMMMGMFNMLSTV
SPGCMMNMPNMVSTV

SEQ ID NO: 195062 - protein, 15 aa, Artificial Sequence
  Description of Artificial Sequence: Synthetic peptide
  Seed: SPGMMMGMFNMLSTV
SPGCMMNMSNMISTV

SEQ ID NO: 195063 - protein, 15 aa, Artificial Sequence
  Description of Artificial Sequence: Synthetic peptide
  Seed: SPGMMMGMFNMLSTV
SPGCMMNMSNMLSTV

SEQ ID NO: 195064 - protein, 15 aa, Artificial Sequence
  Description of Artificial Sequence: Synthetic peptide
  Seed: SPGMMMGMFNMLSTV
SPGCMMNMSNMVSTV

SEQ ID NO: 195065 - protein, 15 aa, Artificial Sequence
  Description of Artificial Sequence: Synthetic peptide
  Seed: SPGMMMGMFNMLSTV
SPGCMMNMTNMISTV

SEQ ID NO: 195066 - protein, 15 aa, Artificial Sequence
  Description of Artificial Sequence: Synthetic peptide
  Seed: SPGMMMGMFNMLSTV
SPGCMMNMTNMVSTV

SEQ ID NO: 195067 - protein, 15 aa, Artificial Sequence
  Description of Artificial Sequence: Synthetic peptide
  Seed: SPGMMMGMFNMLSTV
SPGCMMNMVNMISTV

SEQ ID NO: 195068 - protein, 15 aa, Artificial Sequence
  Description of Artificial Sequence: Synthetic peptide
  Seed: SPGMMMGMFNMLSTV
SPGCMMNMVNMVSTV

SEQ ID NO: 195069 - protein, 15 aa, Artificial Sequence
  Description of Artificial Sequence: Synthetic peptide
  Seed: SPGMMMGMFNMLSTV
SPGCMMQMFNMLSTV

SEQ ID NO: 195070 - protein, 15 aa, Artificial Sequence
  Description of Artificial Sequence: Synthetic peptide
  Seed: SPGMMMGMFNMLSTV
SPGCMMSMANMFSTV

SEQ ID NO: 195071 - protein, 15 aa, Artificial Sequence
  Description of Artificial Sequence: Synthetic peptide
  Seed: SPGMMMGMFNMLSTV
SPGCMMSMANMISTV

SEQ ID NO: 195072 - protein, 15 aa, Artificial Sequence
  Description of Artificial Sequence: Synthetic peptide
  Seed: SPGMMMGMFNMLSTV
SPGCMMSMANMLSTV

SEQ ID NO: 195073 - protein, 15 aa, Artificial Sequence
  Description of Artificial Sequence: Synthetic peptide
  Seed: SPGMMMGMFNMLSTV
SPGCMMSMANMMSTV

SEQ ID NO: 195074 - protein, 15 aa, Artificial Sequence
  Description of Artificial Sequence: Synthetic peptide
  Seed: SPGMMMGMFNMLSTV
SPGCMMSMANMVSTV

SEQ ID NO: 195075 - protein, 15 aa, Artificial Sequence
  Description of Artificial Sequence: Synthetic peptide
  Seed: SPGMMMGMFNMLSTV
SPGCMMSMFNMISTV

SEQ ID NO: 195076 - protein, 15 aa, Artificial Sequence
  Description of Artificial Sequence: Synthetic peptide
  Seed: SPGMMMGMFNMLSTV
SPGCMMSMFNMLSTV

SEQ ID NO: 195077 - protein, 15 aa, Artificial Sequence
  Description of Artificial Sequence: Synthetic peptide
  Seed: SPGMMMGMFNMLSTV
SPGCMMSMFNMVSTV

SEQ ID NO: 195078 - protein, 15 aa, Artificial Sequence
  Description of Artificial Sequence: Synthetic peptide
  Seed: SPGMMMGMFNMLSTV
SPGCMMSMGNMISTV

SEQ ID NO: 195079 - protein, 15 aa, Artificial Sequence
  Description of Artificial Sequence: Synthetic peptide
  Seed: SPGMMMGMFNMLSTV
SPGCMMSMPNMISTV

SEQ ID NO: 195080 - protein, 15 aa, Artificial Sequence
  Description of Artificial Sequence: Synthetic peptide
  Seed: SPGMMMGMFNMLSTV
SPGCMMSMSNMISTV

SEQ ID NO: 195081 - protein, 15 aa, Artificial Sequence
  Description of Artificial Sequence: Synthetic peptide
  Seed: SPGMMMGMFNMLSTV
SPGCMMSMSNMLSTV

SEQ ID NO: 195082 - protein, 15 aa, Artificial Sequence
  Description of Artificial Sequence: Synthetic peptide
  Seed: SPGMMMGMFNMLSTV
SPGCMMSMSNMVSTV

SEQ ID NO: 195083 - protein, 15 aa, Artificial Sequence
  Description of Artificial Sequence: Synthetic peptide
  Seed: SPGMMMGMFNMLSTV
SPGCMMTMANMFSTV

SEQ ID NO: 195084 - protein, 15 aa, Artificial Sequence
  Description of Artificial Sequence: Synthetic peptide
  Seed: SPGMMMGMFNMLSTV
SPGCMMTMANMISTV

SEQ ID NO: 195085 - protein, 15 aa, Artificial Sequence
  Description of Artificial Sequence: Synthetic peptide
  Seed: SPGMMMGMFNMLSTV
SPGCMMTMANMLSTV

SEQ ID NO: 195086 - protein, 15 aa, Artificial Sequence
  Description of Artificial Sequence: Synthetic peptide
  Seed: SPGMMMGMFNMLSTV
SPGCMMTMANMMSTV

SEQ ID NO: 195087 - protein, 15 aa, Artificial Sequence
  Description of Artificial Sequence: Synthetic peptide
  Seed: SPGMMMGMFNMLSTV
SPGCMMTMANMVSTV

SEQ ID NO: 195088 - protein, 15 aa, Artificial Sequence
  Description of Artificial Sequence: Synthetic peptide
  Seed: SPGMMMGMFNMLSTV
SPGCMMTMFNMISTV

SEQ ID NO: 195089 - protein, 15 aa, Artificial Sequence
  Description of Artificial Sequence: Synthetic peptide
  Seed: SPGMMMGMFNMLSTV
SPGCMMTMFNMLSTV

SEQ ID NO: 195090 - protein, 15 aa, Artificial Sequence
  Description of Artificial Sequence: Synthetic peptide
  Seed: SPGMMMGMFNMLSTV
SPGCMMTMFNMMSTV

SEQ ID NO: 195091 - protein, 15 aa, Artificial Sequence
  Description of Artificial Sequence: Synthetic peptide
  Seed: SPGMMMGMFNMLSTV
SPGCMMTMFNMVSTV

SEQ ID NO: 195092 - protein, 15 aa, Artificial Sequence
  Description of Artificial Sequence: Synthetic peptide
  Seed: SPGMMMGMFNMLSTV
SPGCMMTMGNMISTV

SEQ ID NO: 195093 - protein, 15 aa, Artificial Sequence
  Description of Artificial Sequence: Synthetic peptide
  Seed: SPGMMMGMFNMLSTV
SPGCMMTMGNMLSTV

SEQ ID NO: 195094 - protein, 15 aa, Artificial Sequence
  Description of Artificial Sequence: Synthetic peptide
  Seed: SPGMMMGMFNMLSTV
SPGCMMTMGNMVSTV

SEQ ID NO: 195095 - protein, 15 aa, Artificial Sequence
  Description of Artificial Sequence: Synthetic peptide
  Seed: SPGMMMGMFNMLSTV
SPGCMMTMPNMISTV

SEQ ID NO: 195096 - protein, 15 aa, Artificial Sequence
  Description of Artificial Sequence: Synthetic peptide
  Seed: SPGMMMGMFNMLSTV
SPGCMMTMPNMLSTV

SEQ ID NO: 195097 - protein, 15 aa, Artificial Sequence
  Description of Artificial Sequence: Synthetic peptide
  Seed: SPGMMMGMFNMLSTV
SPGCMMTMPNMVSTV

SEQ ID NO: 195098 - protein, 15 aa, Artificial Sequence
  Description of Artificial Sequence: Synthetic peptide
  Seed: SPGMMMGMFNMLSTV
SPGCMMTMSNMFSTV

SEQ ID NO: 195099 - protein, 15 aa, Artificial Sequence
  Description of Artificial Sequence: Synthetic peptide
  Seed: SPGMMMGMFNMLSTV
SPGCMMTMSNMISTV

SEQ ID NO: 195100 - protein, 15 aa, Artificial Sequence
  Description of Artificial Sequence: Synthetic peptide
  Seed: SPGMMMGMFNMLSTV
SPGCMMTMSNMLSTV

SEQ ID NO: 195101 - protein, 15 aa, Artificial Sequence
  Description of Artificial Sequence: Synthetic peptide
  Seed: SPGMMMGMFNMLSTV
SPGCMMTMSNMMSTV

SEQ ID NO: 195102 - protein, 15 aa, Artificial Sequence
  Description of Artificial Sequence: Synthetic peptide
  Seed: SPGMMMGMFNMLSTV
SPGCMMTMSNMVSTV

SEQ ID NO: 195103 - protein, 15 aa, Artificial Sequence
  Description of Artificial Sequence: Synthetic peptide
  Seed: SPGMMMGMFNMLSTV
SPGCMMTMTNMISTV

SEQ ID NO: 195104 - protein, 15 aa, Artificial Sequence
  Description of Artificial Sequence: Synthetic peptide
  Seed: SPGMMMGMFNMLSTV
SPGCMMTMYNMLSTV

SEQ ID NO: 195105 - protein, 15 aa, Artificial Sequence
  Description of Artificial Sequence: Synthetic peptide
  Seed: SPGMMMGMFNMLSTV
SPGCMMVMANMISTV

SEQ ID NO: 195106 - protein, 15 aa, Artificial Sequence
  Description of Artificial Sequence: Synthetic peptide
  Seed: SPGMMMGMFNMLSTV
SPGCMMVMANMVSTV

SEQ ID NO: 195107 - protein, 15 aa, Artificial Sequence
  Description of Artificial Sequence: Synthetic peptide
  Seed: SPGMMMGMFNMLSTV
SPGCMMVMFNMLSTV

SEQ ID NO: 195108 - protein, 15 aa, Artificial Sequence
  Description of Artificial Sequence: Synthetic peptide
  Seed: SPGMMMGMFNMLSTV
SPGCMMVMSNMISTV

SEQ ID NO: 195109 - protein, 15 aa, Artificial Sequence
  Description of Artificial Sequence: Synthetic peptide
  Seed: SPGMMMGMFNMLSTV
SPGCMMVMSNMLSTV

SEQ ID NO: 195110 - protein, 15 aa, Artificial Sequence
  Description of Artificial Sequence: Synthetic peptide
  Seed: SPGMMMGMFNMLSTV
SPGCMMVMSNMVSTV

SEQ ID NO: 195111 - protein, 15 aa, Artificial Sequence
  Description of Artificial Sequence: Synthetic peptide
  Seed: SPGMMMGMFNMLSTV
SPGDMMIMFNMLSTV

SEQ ID NO: 195112 - protein, 15 aa, Artificial Sequence
  Description of Artificial Sequence: Synthetic peptide
  Seed: SPGMMMGMFNMLSTV
SPGEMMFMFNMVSTV

SEQ ID NO: 195113 - protein, 15 aa, Artificial Sequence
  Description of Artificial Sequence: Synthetic peptide
  Seed: SPGMMMGMFNMLSTV
SPGEMMIMFNMLSTV

SEQ ID NO: 195114 - protein, 15 aa, Artificial Sequence
  Description of Artificial Sequence: Synthetic peptide
  Seed: SPGMMMGMFNMLSTV
SPGEMMTMFNMLSTV

SEQ ID NO: 195115 - protein, 15 aa, Artificial Sequence
  Description of Artificial Sequence: Synthetic peptide
  Seed: SPGMMMGMFNMLSTV
SPGEMMTMSNMISTV

SEQ ID NO: 195116 - protein, 15 aa, Artificial Sequence
  Description of Artificial Sequence: Synthetic peptide
  Seed: SPGMMMGMFNMLSTV
SPGEMMVMFNMLSTV

SEQ ID NO: 195117 - protein, 15 aa, Artificial Sequence
  Description of Artificial Sequence: Synthetic peptide
  Seed: SPGMMMGMFNMLSTV
SPGFMMAMANMASTV

SEQ ID NO: 195118 - protein, 15 aa, Artificial Sequence
  Description of Artificial Sequence: Synthetic peptide
  Seed: SPGMMMGMFNMLSTV
SPGFMMAMANMDSTV

SEQ ID NO: 195119 - protein, 15 aa, Artificial Sequence
  Description of Artificial Sequence: Synthetic peptide
  Seed: SPGMMMGMFNMLSTV
SPGFMMAMANMESTV

SEQ ID NO: 195120 - protein, 15 aa, Artificial Sequence
  Description of Artificial Sequence: Synthetic peptide
  Seed: SPGMMMGMFNMLSTV
SPGFMMAMANMFSTV

SEQ ID NO: 195121 - protein, 15 aa, Artificial Sequence
  Description of Artificial Sequence: Synthetic peptide
  Seed: SPGMMMGMFNMLSTV
SPGFMMAMANMGSTV

SEQ ID NO: 195122 - protein, 15 aa, Artificial Sequence
  Description of Artificial Sequence: Synthetic peptide
  Seed: SPGMMMGMFNMLSTV
SPGFMMAMANMHSTV

SEQ ID NO: 195123 - protein, 15 aa, Artificial Sequence
  Description of Artificial Sequence: Synthetic peptide
  Seed: SPGMMMGMFNMLSTV
SPGFMMAMANMISTV

SEQ ID NO: 195124 - protein, 15 aa, Artificial Sequence
  Description of Artificial Sequence: Synthetic peptide
  Seed: SPGMMMGMFNMLSTV
SPGFMMAMANMKSTV

SEQ ID NO: 195125 - protein, 15 aa, Artificial Sequence
  Description of Artificial Sequence: Synthetic peptide
  Seed: SPGMMMGMFNMLSTV
SPGFMMAMANMLSTV

SEQ ID NO: 195126 - protein, 15 aa, Artificial Sequence
  Description of Artificial Sequence: Synthetic peptide
  Seed: SPGMMMGMFNMLSTV
SPGFMMAMANMMSTV

SEQ ID NO: 195127 - protein, 15 aa, Artificial Sequence
  Description of Artificial Sequence: Synthetic peptide
  Seed: SPGMMMGMFNMLSTV
SPGFMMAMANMNSTV

SEQ ID NO: 195128 - protein, 15 aa, Artificial Sequence
  Description of Artificial Sequence: Synthetic peptide
  Seed: SPGMMMGMFNMLSTV
SPGFMMAMANMPSTV

SEQ ID NO: 195129 - protein, 15 aa, Artificial Sequence
  Description of Artificial Sequence: Synthetic peptide
  Seed: SPGMMMGMFNMLSTV
SPGFMMAMANMQSTV

SEQ ID NO: 195130 - protein, 15 aa, Artificial Sequence
  Description of Artificial Sequence: Synthetic peptide
  Seed: SPGMMMGMFNMLSTV
SPGFMMAMANMRSTV

SEQ ID NO: 195131 - protein, 15 aa, Artificial Sequence
  Description of Artificial Sequence: Synthetic peptide
  Seed: SPGMMMGMFNMLSTV
SPGFMMAMANMSSTV

SEQ ID NO: 195132 - protein, 15 aa, Artificial Sequence
  Description of Artificial Sequence: Synthetic peptide
  Seed: SPGMMMGMFNMLSTV
SPGFMMAMANMTSTV

SEQ ID NO: 195133 - protein, 15 aa, Artificial Sequence
  Description of Artificial Sequence: Synthetic peptide
  Seed: SPGMMMGMFNMLSTV
SPGFMMAMANMVSTV

SEQ ID NO: 195134 - protein, 15 aa, Artificial Sequence
  Description of Artificial Sequence: Synthetic peptide
  Seed: SPGMMMGMFNMLSTV
SPGFMMAMANMYSTV

SEQ ID NO: 195135 - protein, 15 aa, Artificial Sequence
  Description of Artificial Sequence: Synthetic peptide
  Seed: SPGMMMGMFNMLSTV
SPGFMMAMDNMISTV

SEQ ID NO: 195136 - protein, 15 aa, Artificial Sequence
  Description of Artificial Sequence: Synthetic peptide
  Seed: SPGMMMGMFNMLSTV
SPGFMMAMDNMLSTV

SEQ ID NO: 195137 - protein, 15 aa, Artificial Sequence
  Description of Artificial Sequence: Synthetic peptide
  Seed: SPGMMMGMFNMLSTV
SPGFMMAMDNMVSTV

SEQ ID NO: 195138 - protein, 15 aa, Artificial Sequence
  Description of Artificial Sequence: Synthetic peptide
  Seed: SPGMMMGMFNMLSTV
SPGFMMAMENMASTV

SEQ ID NO: 195139 - protein, 15 aa, Artificial Sequence
  Description of Artificial Sequence: Synthetic peptide
  Seed: SPGMMMGMFNMLSTV
SPGFMMAMENMISTV

SEQ ID NO: 195140 - protein, 15 aa, Artificial Sequence
  Description of Artificial Sequence: Synthetic peptide
  Seed: SPGMMMGMFNMLSTV
SPGFMMAMENMLSTV

SEQ ID NO: 195141 - protein, 15 aa, Artificial Sequence
  Description of Artificial Sequence: Synthetic peptide
  Seed: SPGMMMGMFNMLSTV
SPGFMMAMENMMSTV

SEQ ID NO: 195142 - protein, 15 aa, Artificial Sequence
  Description of Artificial Sequence: Synthetic peptide
  Seed: SPGMMMGMFNMLSTV
SPGFMMAMENMVSTV

SEQ ID NO: 195143 - protein, 15 aa, Artificial Sequence
  Description of Artificial Sequence: Synthetic peptide
  Seed: SPGMMMGMFNMLSTV
SPGFMMAMFNMASTV

SEQ ID NO: 195144 - protein, 15 aa, Artificial Sequence
  Description of Artificial Sequence: Synthetic peptide
  Seed: SPGMMMGMFNMLSTV
SPGFMMAMFNMDSTV

SEQ ID NO: 195145 - protein, 15 aa, Artificial Sequence
  Description of Artificial Sequence: Synthetic peptide
  Seed: SPGMMMGMFNMLSTV
SPGFMMAMFNMESTV

SEQ ID NO: 195146 - protein, 15 aa, Artificial Sequence
  Description of Artificial Sequence: Synthetic peptide
  Seed: SPGMMMGMFNMLSTV
SPGFMMAMFNMFSTV

SEQ ID NO: 195147 - protein, 15 aa, Artificial Sequence
  Description of Artificial Sequence: Synthetic peptide
  Seed: SPGMMMGMFNMLSTV
SPGFMMAMFNMHSTV

SEQ ID NO: 195148 - protein, 15 aa, Artificial Sequence
  Description of Artificial Sequence: Synthetic peptide
  Seed: SPGMMMGMFNMLSTV
SPGFMMAMFNMISTV

SEQ ID NO: 195149 - protein, 15 aa, Artificial Sequence
  Description of Artificial Sequence: Synthetic peptide
  Seed: SPGMMMGMFNMLSTV
SPGFMMAMFNMLSTV

SEQ ID NO: 195150 - protein, 15 aa, Artificial Sequence
  Description of Artificial Sequence: Synthetic peptide
  Seed: SPGMMMGMFNMLSTV
SPGFMMAMFNMMSTV

SEQ ID NO: 195151 - protein, 15 aa, Artificial Sequence
  Description of Artificial Sequence: Synthetic peptide
  Seed: SPGMMMGMFNMLSTV
SPGFMMAMFNMNSTV

SEQ ID NO: 195152 - protein, 15 aa, Artificial Sequence
  Description of Artificial Sequence: Synthetic peptide
  Seed: SPGMMMGMFNMLSTV
SPGFMMAMFNMPSTV

SEQ ID NO: 195153 - protein, 15 aa, Artificial Sequence
  Description of Artificial Sequence: Synthetic peptide
  Seed: SPGMMMGMFNMLSTV
SPGFMMAMFNMQSTV

SEQ ID NO: 195154 - protein, 15 aa, Artificial Sequence
  Description of Artificial Sequence: Synthetic peptide
  Seed: SPGMMMGMFNMLSTV
SPGFMMAMFNMRSTV

SEQ ID NO: 195155 - protein, 15 aa, Artificial Sequence
  Description of Artificial Sequence: Synthetic peptide
  Seed: SPGMMMGMFNMLSTV
SPGFMMAMFNMSSTV

SEQ ID NO: 195156 - protein, 15 aa, Artificial Sequence
  Description of Artificial Sequence: Synthetic peptide
  Seed: SPGMMMGMFNMLSTV
SPGFMMAMFNMTSTV

SEQ ID NO: 195157 - protein, 15 aa, Artificial Sequence
  Description of Artificial Sequence: Synthetic peptide
  Seed: SPGMMMGMFNMLSTV
SPGFMMAMFNMVSTV

SEQ ID NO: 195158 - protein, 15 aa, Artificial Sequence
  Description of Artificial Sequence: Synthetic peptide
  Seed: SPGMMMGMFNMLSTV
SPGFMMAMFNMYSTV

SEQ ID NO: 195159 - protein, 15 aa, Artificial Sequence
  Description of Artificial Sequence: Synthetic peptide
  Seed: SPGMMMGMFNMLSTV
SPGFMMAMGNMASTV

SEQ ID NO: 195160 - protein, 15 aa, Artificial Sequence
  Description of Artificial Sequence: Synthetic peptide
  Seed: SPGMMMGMFNMLSTV
SPGFMMAMGNMDSTV

SEQ ID NO: 195161 - protein, 15 aa, Artificial Sequence
  Description of Artificial Sequence: Synthetic peptide
  Seed: SPGMMMGMFNMLSTV
SPGFMMAMGNMESTV

SEQ ID NO: 195162 - protein, 15 aa, Artificial Sequence
  Description of Artificial Sequence: Synthetic peptide
  Seed: SPGMMMGMFNMLSTV
SPGFMMAMGNMFSTV

SEQ ID NO: 195163 - protein, 15 aa, Artificial Sequence
  Description of Artificial Sequence: Synthetic peptide
  Seed: SPGMMMGMFNMLSTV
SPGFMMAMGNMGSTV

SEQ ID NO: 195164 - protein, 15 aa, Artificial Sequence
  Description of Artificial Sequence: Synthetic peptide
  Seed: SPGMMMGMFNMLSTV
SPGFMMAMGNMHSTV

SEQ ID NO: 195165 - protein, 15 aa, Artificial Sequence
  Description of Artificial Sequence: Synthetic peptide
  Seed: SPGMMMGMFNMLSTV
SPGFMMAMGNMISTV

SEQ ID NO: 195166 - protein, 15 aa, Artificial Sequence
  Description of Artificial Sequence: Synthetic peptide
  Seed: SPGMMMGMFNMLSTV
SPGFMMAMGNMLSTV

SEQ ID NO: 195167 - protein, 15 aa, Artificial Sequence
  Description of Artificial Sequence: Synthetic peptide
  Seed: SPGMMMGMFNMLSTV
SPGFMMAMGNMMSTV

SEQ ID NO: 195168 - protein, 15 aa, Artificial Sequence
  Description of Artificial Sequence: Synthetic peptide
  Seed: SPGMMMGMFNMLSTV
SPGFMMAMGNMNSTV

SEQ ID NO: 195169 - protein, 15 aa, Artificial Sequence
  Description of Artificial Sequence: Synthetic peptide
  Seed: SPGMMMGMFNMLSTV
SPGFMMAMGNMPSTV

SEQ ID NO: 195170 - protein, 15 aa, Artificial Sequence
  Description of Artificial Sequence: Synthetic peptide
  Seed: SPGMMMGMFNMLSTV
SPGFMMAMGNMQSTV

SEQ ID NO: 195171 - protein, 15 aa, Artificial Sequence
  Description of Artificial Sequence: Synthetic peptide
  Seed: SPGMMMGMFNMLSTV
SPGFMMAMGNMSSTV

SEQ ID NO: 195172 - protein, 15 aa, Artificial Sequence
  Description of Artificial Sequence: Synthetic peptide
  Seed: SPGMMMGMFNMLSTV
SPGFMMAMGNMTSTV

SEQ ID NO: 195173 - protein, 15 aa, Artificial Sequence
  Description of Artificial Sequence: Synthetic peptide
  Seed: SPGMMMGMFNMLSTV
SPGFMMAMGNMVSTV

SEQ ID NO: 195174 - protein, 15 aa, Artificial Sequence
  Description of Artificial Sequence: Synthetic peptide
  Seed: SPGMMMGMFNMLSTV
SPGFMMAMGNMYSTV

SEQ ID NO: 195175 - protein, 15 aa, Artificial Sequence
  Description of Artificial Sequence: Synthetic peptide
  Seed: SPGMMMGMFNMLSTV
SPGFMMAMHNMISTV

SEQ ID NO: 195176 - protein, 15 aa, Artificial Sequence
  Description of Artificial Sequence: Synthetic peptide
  Seed: SPGMMMGMFNMLSTV
SPGFMMAMHNMLSTV

SEQ ID NO: 195177 - protein, 15 aa, Artificial Sequence
  Description of Artificial Sequence: Synthetic peptide
  Seed: SPGMMMGMFNMLSTV
SPGFMMAMHNMVSTV

SEQ ID NO: 195178 - protein, 15 aa, Artificial Sequence
  Description of Artificial Sequence: Synthetic peptide
  Seed: SPGMMMGMFNMLSTV
SPGFMMAMINMASTV

SEQ ID NO: 195179 - protein, 15 aa, Artificial Sequence
  Description of Artificial Sequence: Synthetic peptide
  Seed: SPGMMMGMFNMLSTV
SPGFMMAMINMISTV

SEQ ID NO: 195180 - protein, 15 aa, Artificial Sequence
  Description of Artificial Sequence: Synthetic peptide
  Seed: SPGMMMGMFNMLSTV
SPGFMMAMINMLSTV

SEQ ID NO: 195181 - protein, 15 aa, Artificial Sequence
  Description of Artificial Sequence: Synthetic peptide
  Seed: SPGMMMGMFNMLSTV
SPGFMMAMINMVSTV

SEQ ID NO: 195182 - protein, 15 aa, Artificial Sequence
  Description of Artificial Sequence: Synthetic peptide
  Seed: SPGMMMGMFNMLSTV
SPGFMMAMLNMISTV

SEQ ID NO: 195183 - protein, 15 aa, Artificial Sequence
  Description of Artificial Sequence: Synthetic peptide
  Seed: SPGMMMGMFNMLSTV
SPGFMMAMLNMLSTV

SEQ ID NO: 195184 - protein, 15 aa, Artificial Sequence
  Description of Artificial Sequence: Synthetic peptide
  Seed: SPGMMMGMFNMLSTV
SPGFMMAMLNMVSTV

SEQ ID NO: 195185 - protein, 15 aa, Artificial Sequence
  Description of Artificial Sequence: Synthetic peptide
  Seed: SPGMMMGMFNMLSTV
SPGFMMAMMNMLSTV

SEQ ID NO: 195186 - protein, 15 aa, Artificial Sequence
  Description of Artificial Sequence: Synthetic peptide
  Seed: SPGMMMGMFNMLSTV
SPGFMMAMNNMASTV

SEQ ID NO: 195187 - protein, 15 aa, Artificial Sequence
  Description of Artificial Sequence: Synthetic peptide
  Seed: SPGMMMGMFNMLSTV
SPGFMMAMNNMFSTV

SEQ ID NO: 195188 - protein, 15 aa, Artificial Sequence
  Description of Artificial Sequence: Synthetic peptide
  Seed: SPGMMMGMFNMLSTV
SPGFMMAMNNMISTV

SEQ ID NO: 195189 - protein, 15 aa, Artificial Sequence
  Description of Artificial Sequence: Synthetic peptide
  Seed: SPGMMMGMFNMLSTV
SPGFMMAMNNMLSTV

SEQ ID NO: 195190 - protein, 15 aa, Artificial Sequence
  Description of Artificial Sequence: Synthetic peptide
  Seed: SPGMMMGMFNMLSTV
SPGFMMAMNNMMSTV

SEQ ID NO: 195191 - protein, 15 aa, Artificial Sequence
  Description of Artificial Sequence: Synthetic peptide
  Seed: SPGMMMGMFNMLSTV
SPGFMMAMNNMSSTV

SEQ ID NO: 195192 - protein, 15 aa, Artificial Sequence
  Description of Artificial Sequence: Synthetic peptide
  Seed: SPGMMMGMFNMLSTV
SPGFMMAMNNMTSTV

SEQ ID NO: 195193 - protein, 15 aa, Artificial Sequence
  Description of Artificial Sequence: Synthetic peptide
  Seed: SPGMMMGMFNMLSTV
SPGFMMAMNNMVSTV

SEQ ID NO: 195194 - protein, 15 aa, Artificial Sequence
  Description of Artificial Sequence: Synthetic peptide
  Seed: SPGMMMGMFNMLSTV
SPGFMMAMNNMYSTV

SEQ ID NO: 195195 - protein, 15 aa, Artificial Sequence
  Description of Artificial Sequence: Synthetic peptide
  Seed: SPGMMMGMFNMLSTV
SPGFMMAMPNMASTV

SEQ ID NO: 195196 - protein, 15 aa, Artificial Sequence
  Description of Artificial Sequence: Synthetic peptide
  Seed: SPGMMMGMFNMLSTV
SPGFMMAMPNMDSTV

SEQ ID NO: 195197 - protein, 15 aa, Artificial Sequence
  Description of Artificial Sequence: Synthetic peptide
  Seed: SPGMMMGMFNMLSTV
SPGFMMAMPNMESTV

SEQ ID NO: 195198 - protein, 15 aa, Artificial Sequence
  Description of Artificial Sequence: Synthetic peptide
  Seed: SPGMMMGMFNMLSTV
SPGFMMAMPNMFSTV

SEQ ID NO: 195199 - protein, 15 aa, Artificial Sequence
  Description of Artificial Sequence: Synthetic peptide
  Seed: SPGMMMGMFNMLSTV
SPGFMMAMPNMGSTV

SEQ ID NO: 195200 - protein, 15 aa, Artificial Sequence
  Description of Artificial Sequence: Synthetic peptide
  Seed: SPGMMMGMFNMLSTV
SPGFMMAMPNMHSTV

SEQ ID NO: 195201 - protein, 15 aa, Artificial Sequence
  Description of Artificial Sequence: Synthetic peptide
  Seed: SPGMMMGMFNMLSTV
SPGFMMAMPNMISTV

SEQ ID NO: 195202 - protein, 15 aa, Artificial Sequence
  Description of Artificial Sequence: Synthetic peptide
  Seed: SPGMMMGMFNMLSTV
SPGFMMAMPNMLSTV

SEQ ID NO: 195203 - protein, 15 aa, Artificial Sequence
  Description of Artificial Sequence: Synthetic peptide
  Seed: SPGMMMGMFNMLSTV
SPGFMMAMPNMMSTV

SEQ ID NO: 195204 - protein, 15 aa, Artificial Sequence
  Description of Artificial Sequence: Synthetic peptide
  Seed: SPGMMMGMFNMLSTV
SPGFMMAMPNMNSTV

SEQ ID NO: 195205 - protein, 15 aa, Artificial Sequence
  Description of Artificial Sequence: Synthetic peptide
  Seed: SPGMMMGMFNMLSTV
SPGFMMAMPNMPSTV

SEQ ID NO: 195206 - protein, 15 aa, Artificial Sequence
  Description of Artificial Sequence: Synthetic peptide
  Seed: SPGMMMGMFNMLSTV
SPGFMMAMPNMQSTV

SEQ ID NO: 195207 - protein, 15 aa, Artificial Sequence
  Description of Artificial Sequence: Synthetic peptide
  Seed: SPGMMMGMFNMLSTV
SPGFMMAMPNMSSTV

SEQ ID NO: 195208 - protein, 15 aa, Artificial Sequence
  Description of Artificial Sequence: Synthetic peptide
  Seed: SPGMMMGMFNMLSTV
SPGFMMAMPNMTSTV

SEQ ID NO: 195209 - protein, 15 aa, Artificial Sequence
  Description of Artificial Sequence: Synthetic peptide
  Seed: SPGMMMGMFNMLSTV
SPGFMMAMPNMVSTV

SEQ ID NO: 195210 - protein, 15 aa, Artificial Sequence
  Description of Artificial Sequence: Synthetic peptide
  Seed: SPGMMMGMFNMLSTV
SPGFMMAMPNMWSTV

SEQ ID NO: 195211 - protein, 15 aa, Artificial Sequence
  Description of Artificial Sequence: Synthetic peptide
  Seed: SPGMMMGMFNMLSTV
SPGFMMAMPNMYSTV

SEQ ID NO: 195212 - protein, 15 aa, Artificial Sequence
  Description of Artificial Sequence: Synthetic peptide
  Seed: SPGMMMGMFNMLSTV
SPGFMMAMQNMASTV

SEQ ID NO: 195213 - protein, 15 aa, Artificial Sequence
  Description of Artificial Sequence: Synthetic peptide
  Seed: SPGMMMGMFNMLSTV
SPGFMMAMQNMISTV

SEQ ID NO: 195214 - protein, 15 aa, Artificial Sequence
  Description of Artificial Sequence: Synthetic peptide
  Seed: SPGMMMGMFNMLSTV
SPGFMMAMQNMLSTV

SEQ ID NO: 195215 - protein, 15 aa, Artificial Sequence
  Description of Artificial Sequence: Synthetic peptide
  Seed: SPGMMMGMFNMLSTV
SPGFMMAMQNMMSTV

SEQ ID NO: 195216 - protein, 15 aa, Artificial Sequence
  Description of Artificial Sequence: Synthetic peptide
  Seed: SPGMMMGMFNMLSTV
SPGFMMAMQNMVSTV

SEQ ID NO: 195217 - protein, 15 aa, Artificial Sequence
  Description of Artificial Sequence: Synthetic peptide
  Seed: SPGMMMGMFNMLSTV
SPGFMMAMSNMASTV

SEQ ID NO: 195218 - protein, 15 aa, Artificial Sequence
  Description of Artificial Sequence: Synthetic peptide
  Seed: SPGMMMGMFNMLSTV
SPGFMMAMSNMDSTV

SEQ ID NO: 195219 - protein, 15 aa, Artificial Sequence
  Description of Artificial Sequence: Synthetic peptide
  Seed: SPGMMMGMFNMLSTV
SPGFMMAMSNMESTV

SEQ ID NO: 195220 - protein, 15 aa, Artificial Sequence
  Description of Artificial Sequence: Synthetic peptide
  Seed: SPGMMMGMFNMLSTV
SPGFMMAMSNMFSTV

SEQ ID NO: 195221 - protein, 15 aa, Artificial Sequence
  Description of Artificial Sequence: Synthetic peptide
  Seed: SPGMMMGMFNMLSTV
SPGFMMAMSNMGSTV

SEQ ID NO: 195222 - protein, 15 aa, Artificial Sequence
  Description of Artificial Sequence: Synthetic peptide
  Seed: SPGMMMGMFNMLSTV
SPGFMMAMSNMHSTV

SEQ ID NO: 195223 - protein, 15 aa, Artificial Sequence
  Description of Artificial Sequence: Synthetic peptide
  Seed: SPGMMMGMFNMLSTV
SPGFMMAMSNMISTV

SEQ ID NO: 195224 - protein, 15 aa, Artificial Sequence
  Description of Artificial Sequence: Synthetic peptide
  Seed: SPGMMMGMFNMLSTV
SPGFMMAMSNMLSTV

SEQ ID NO: 195225 - protein, 15 aa, Artificial Sequence
  Description of Artificial Sequence: Synthetic peptide
  Seed: SPGMMMGMFNMLSTV
SPGFMMAMSNMMSTV

SEQ ID NO: 195226 - protein, 15 aa, Artificial Sequence
  Description of Artificial Sequence: Synthetic peptide
  Seed: SPGMMMGMFNMLSTV
SPGFMMAMSNMNSTV

SEQ ID NO: 195227 - protein, 15 aa, Artificial Sequence
  Description of Artificial Sequence: Synthetic peptide
  Seed: SPGMMMGMFNMLSTV
SPGFMMAMSNMPSTV

SEQ ID NO: 195228 - protein, 15 aa, Artificial Sequence
  Description of Artificial Sequence: Synthetic peptide
  Seed: SPGMMMGMFNMLSTV
SPGFMMAMSNMQSTV

SEQ ID NO: 195229 - protein, 15 aa, Artificial Sequence
  Description of Artificial Sequence: Synthetic peptide
  Seed: SPGMMMGMFNMLSTV
SPGFMMAMSNMSSTV

SEQ ID NO: 195230 - protein, 15 aa, Artificial Sequence
  Description of Artificial Sequence: Synthetic peptide
  Seed: SPGMMMGMFNMLSTV
SPGFMMAMSNMTSTV

SEQ ID NO: 195231 - protein, 15 aa, Artificial Sequence
  Description of Artificial Sequence: Synthetic peptide
  Seed: SPGMMMGMFNMLSTV
SPGFMMAMSNMVSTV

SEQ ID NO: 195232 - protein, 15 aa, Artificial Sequence
  Description of Artificial Sequence: Synthetic peptide
  Seed: SPGMMMGMFNMLSTV
SPGFMMAMSNMYSTV

SEQ ID NO: 195233 - protein, 15 aa, Artificial Sequence
  Description of Artificial Sequence: Synthetic peptide
  Seed: SPGMMMGMFNMLSTV
SPGFMMAMTNMASTV

SEQ ID NO: 195234 - protein, 15 aa, Artificial Sequence
  Description of Artificial Sequence: Synthetic peptide
  Seed: SPGMMMGMFNMLSTV
SPGFMMAMTNMFSTV

SEQ ID NO: 195235 - protein, 15 aa, Artificial Sequence
  Description of Artificial Sequence: Synthetic peptide
  Seed: SPGMMMGMFNMLSTV
SPGFMMAMTNMGSTV

SEQ ID NO: 195236 - protein, 15 aa, Artificial Sequence
  Description of Artificial Sequence: Synthetic peptide
  Seed: SPGMMMGMFNMLSTV
SPGFMMAMTNMHSTV

SEQ ID NO: 195237 - protein, 15 aa, Artificial Sequence
  Description of Artificial Sequence: Synthetic peptide
  Seed: SPGMMMGMFNMLSTV
SPGFMMAMTNMISTV

SEQ ID NO: 195238 - protein, 15 aa, Artificial Sequence
  Description of Artificial Sequence: Synthetic peptide
  Seed: SPGMMMGMFNMLSTV
SPGFMMAMTNMLSTV

SEQ ID NO: 195239 - protein, 15 aa, Artificial Sequence
  Description of Artificial Sequence: Synthetic peptide
  Seed: SPGMMMGMFNMLSTV
SPGFMMAMTNMMSTV

SEQ ID NO: 195240 - protein, 15 aa, Artificial Sequence
  Description of Artificial Sequence: Synthetic peptide
  Seed: SPGMMMGMFNMLSTV
SPGFMMAMTNMNSTV

SEQ ID NO: 195241 - protein, 15 aa, Artificial Sequence
  Description of Artificial Sequence: Synthetic peptide
  Seed: SPGMMMGMFNMLSTV
SPGFMMAMTNMPSTV

SEQ ID NO: 195242 - protein, 15 aa, Artificial Sequence
  Description of Artificial Sequence: Synthetic peptide
  Seed: SPGMMMGMFNMLSTV
SPGFMMAMTNMSSTV

SEQ ID NO: 195243 - protein, 15 aa, Artificial Sequence
  Description of Artificial Sequence: Synthetic peptide
  Seed: SPGMMMGMFNMLSTV
SPGFMMAMTNMTSTV

SEQ ID NO: 195244 - protein, 15 aa, Artificial Sequence
  Description of Artificial Sequence: Synthetic peptide
  Seed: SPGMMMGMFNMLSTV
SPGFMMAMTNMVSTV

SEQ ID NO: 195245 - protein, 15 aa, Artificial Sequence
  Description of Artificial Sequence: Synthetic peptide
  Seed: SPGMMMGMFNMLSTV
SPGFMMAMTNMYSTV

SEQ ID NO: 195246 - protein, 15 aa, Artificial Sequence
  Description of Artificial Sequence: Synthetic peptide
  Seed: SPGMMMGMFNMLSTV
SPGFMMAMVNMASTV

SEQ ID NO: 195247 - protein, 15 aa, Artificial Sequence
  Description of Artificial Sequence: Synthetic peptide
  Seed: SPGMMMGMFNMLSTV
SPGFMMAMVNMHSTV

SEQ ID NO: 195248 - protein, 15 aa, Artificial Sequence
  Description of Artificial Sequence: Synthetic peptide
  Seed: SPGMMMGMFNMLSTV
SPGFMMAMVNMISTV

SEQ ID NO: 195249 - protein, 15 aa, Artificial Sequence
  Description of Artificial Sequence: Synthetic peptide
  Seed: SPGMMMGMFNMLSTV
SPGFMMAMVNMLSTV

SEQ ID NO: 195250 - protein, 15 aa, Artificial Sequence
  Description of Artificial Sequence: Synthetic peptide
  Seed: SPGMMMGMFNMLSTV
SPGFMMAMVNMMSTV

SEQ ID NO: 195251 - protein, 15 aa, Artificial Sequence
  Description of Artificial Sequence: Synthetic peptide
  Seed: SPGMMMGMFNMLSTV
SPGFMMAMVNMNSTV

SEQ ID NO: 195252 - protein, 15 aa, Artificial Sequence
  Description of Artificial Sequence: Synthetic peptide
  Seed: SPGMMMGMFNMLSTV
SPGFMMAMVNMSSTV

SEQ ID NO: 195253 - protein, 15 aa, Artificial Sequence
  Description of Artificial Sequence: Synthetic peptide
  Seed: SPGMMMGMFNMLSTV
SPGFMMAMVNMTSTV

SEQ ID NO: 195254 - protein, 15 aa, Artificial Sequence
  Description of Artificial Sequence: Synthetic peptide
  Seed: SPGMMMGMFNMLSTV
SPGFMMAMVNMVSTV

SEQ ID NO: 195255 - protein, 15 aa, Artificial Sequence
  Description of Artificial Sequence: Synthetic peptide
  Seed: SPGMMMGMFNMLSTV
SPGFMMAMVNMYSTV

SEQ ID NO: 195256 - protein, 15 aa, Artificial Sequence
  Description of Artificial Sequence: Synthetic peptide
  Seed: SPGMMMGMFNMLSTV
SPGFMMAMWNMFSTV

SEQ ID NO: 195257 - protein, 15 aa, Artificial Sequence
  Description of Artificial Sequence: Synthetic peptide
  Seed: SPGMMMGMFNMLSTV
SPGFMMAMWNMISTV

SEQ ID NO: 195258 - protein, 15 aa, Artificial Sequence
  Description of Artificial Sequence: Synthetic peptide
  Seed: SPGMMMGMFNMLSTV
SPGFMMAMWNMLSTV

SEQ ID NO: 195259 - protein, 15 aa, Artificial Sequence
  Description of Artificial Sequence: Synthetic peptide
  Seed: SPGMMMGMFNMLSTV
SPGFMMAMWNMMSTV

SEQ ID NO: 195260 - protein, 15 aa, Artificial Sequence
  Description of Artificial Sequence: Synthetic peptide
  Seed: SPGMMMGMFNMLSTV
SPGFMMAMWNMVSTV

SEQ ID NO: 195261 - protein, 15 aa, Artificial Sequence
  Description of Artificial Sequence: Synthetic peptide
  Seed: SPGMMMGMFNMLSTV
SPGFMMAMYNMFSTV

SEQ ID NO: 195262 - protein, 15 aa, Artificial Sequence
  Description of Artificial Sequence: Synthetic peptide
  Seed: SPGMMMGMFNMLSTV
SPGFMMAMYNMISTV

SEQ ID NO: 195263 - protein, 15 aa, Artificial Sequence
  Description of Artificial Sequence: Synthetic peptide
  Seed: SPGMMMGMFNMLSTV
SPGFMMAMYNMLSTV

SEQ ID NO: 195264 - protein, 15 aa, Artificial Sequence
  Description of Artificial Sequence: Synthetic peptide
  Seed: SPGMMMGMFNMLSTV
SPGFMMAMYNMMSTV

SEQ ID NO: 195265 - protein, 15 aa, Artificial Sequence
  Description of Artificial Sequence: Synthetic peptide
  Seed: SPGMMMGMFNMLSTV
SPGFMMAMYNMTSTV

SEQ ID NO: 195266 - protein, 15 aa, Artificial Sequence
  Description of Artificial Sequence: Synthetic peptide
  Seed: SPGMMMGMFNMLSTV
SPGFMMAMYNMVSTV

SEQ ID NO: 195267 - protein, 15 aa, Artificial Sequence
  Description of Artificial Sequence: Synthetic peptide
  Seed: SPGMMMGMFNMLSTV
SPGFMMAMYNMYSTV

SEQ ID NO: 195268 - protein, 15 aa, Artificial Sequence
  Description of Artificial Sequence: Synthetic peptide
  Seed: SPGMMMGMFNMLSTV
SPGFMMCMANMISTV

SEQ ID NO: 195269 - protein, 15 aa, Artificial Sequence
  Description of Artificial Sequence: Synthetic peptide
  Seed: SPGMMMGMFNMLSTV
SPGFMMCMANMLSTV

SEQ ID NO: 195270 - protein, 15 aa, Artificial Sequence
  Description of Artificial Sequence: Synthetic peptide
  Seed: SPGMMMGMFNMLSTV
SPGFMMCMANMVSTV

SEQ ID NO: 195271 - protein, 15 aa, Artificial Sequence
  Description of Artificial Sequence: Synthetic peptide
  Seed: SPGMMMGMFNMLSTV
SPGFMMCMFNMESTV

SEQ ID NO: 195272 - protein, 15 aa, Artificial Sequence
  Description of Artificial Sequence: Synthetic peptide
  Seed: SPGMMMGMFNMLSTV
SPGFMMCMFNMFSTV

SEQ ID NO: 195273 - protein, 15 aa, Artificial Sequence
  Description of Artificial Sequence: Synthetic peptide
  Seed: SPGMMMGMFNMLSTV
SPGFMMCMFNMISTV

SEQ ID NO: 195274 - protein, 15 aa, Artificial Sequence
  Description of Artificial Sequence: Synthetic peptide
  Seed: SPGMMMGMFNMLSTV
SPGFMMCMFNMLSTV

SEQ ID NO: 195275 - protein, 15 aa, Artificial Sequence
  Description of Artificial Sequence: Synthetic peptide
  Seed: SPGMMMGMFNMLSTV
SPGFMMCMFNMMSTV

SEQ ID NO: 195276 - protein, 15 aa, Artificial Sequence
  Description of Artificial Sequence: Synthetic peptide
  Seed: SPGMMMGMFNMLSTV
SPGFMMCMFNMVSTV

SEQ ID NO: 195277 - protein, 15 aa, Artificial Sequence
  Description of Artificial Sequence: Synthetic peptide
  Seed: SPGMMMGMFNMLSTV
SPGFMMCMFNMYSTV

SEQ ID NO: 195278 - protein, 15 aa, Artificial Sequence
  Description of Artificial Sequence: Synthetic peptide
  Seed: SPGMMMGMFNMLSTV
SPGFMMCMPNMISTV

SEQ ID NO: 195279 - protein, 15 aa, Artificial Sequence
  Description of Artificial Sequence: Synthetic peptide
  Seed: SPGMMMGMFNMLSTV
SPGFMMCMPNMVSTV

SEQ ID NO: 195280 - protein, 15 aa, Artificial Sequence
  Description of Artificial Sequence: Synthetic peptide
  Seed: SPGMMMGMFNMLSTV
SPGFMMCMSNMISTV

SEQ ID NO: 195281 - protein, 15 aa, Artificial Sequence
  Description of Artificial Sequence: Synthetic peptide
  Seed: SPGMMMGMFNMLSTV
SPGFMMCMSNMLSTV

SEQ ID NO: 195282 - protein, 15 aa, Artificial Sequence
  Description of Artificial Sequence: Synthetic peptide
  Seed: SPGMMMGMFNMLSTV
SPGFMMCMSNMVSTV

SEQ ID NO: 195283 - protein, 15 aa, Artificial Sequence
  Description of Artificial Sequence: Synthetic peptide
  Seed: SPGMMMGMFNMLSTV
SPGFMMCMYNMFSTV

SEQ ID NO: 195284 - protein, 15 aa, Artificial Sequence
  Description of Artificial Sequence: Synthetic peptide
  Seed: SPGMMMGMFNMLSTV
SPGFMMCMYNMLSTV

SEQ ID NO: 195285 - protein, 15 aa, Artificial Sequence
  Description of Artificial Sequence: Synthetic peptide
  Seed: SPGMMMGMFNMLSTV
SPGFMMDMANMASTV

SEQ ID NO: 195286 - protein, 15 aa, Artificial Sequence
  Description of Artificial Sequence: Synthetic peptide
  Seed: SPGMMMGMFNMLSTV
SPGFMMDMANMFSTV

SEQ ID NO: 195287 - protein, 15 aa, Artificial Sequence
  Description of Artificial Sequence: Synthetic peptide
  Seed: SPGMMMGMFNMLSTV
SPGFMMDMANMISTV

SEQ ID NO: 195288 - protein, 15 aa, Artificial Sequence
  Description of Artificial Sequence: Synthetic peptide
  Seed: SPGMMMGMFNMLSTV
SPGFMMDMANMLSTV

SEQ ID NO: 195289 - protein, 15 aa, Artificial Sequence
  Description of Artificial Sequence: Synthetic peptide
  Seed: SPGMMMGMFNMLSTV
SPGFMMDMANMMSTV

SEQ ID NO: 195290 - protein, 15 aa, Artificial Sequence
  Description of Artificial Sequence: Synthetic peptide
  Seed: SPGMMMGMFNMLSTV
SPGFMMDMANMSSTV

SEQ ID NO: 195291 - protein, 15 aa, Artificial Sequence
  Description of Artificial Sequence: Synthetic peptide
  Seed: SPGMMMGMFNMLSTV
SPGFMMDMANMTSTV

SEQ ID NO: 195292 - protein, 15 aa, Artificial Sequence
  Description of Artificial Sequence: Synthetic peptide
  Seed: SPGMMMGMFNMLSTV
SPGFMMDMANMVSTV

SEQ ID NO: 195293 - protein, 15 aa, Artificial Sequence
  Description of Artificial Sequence: Synthetic peptide
  Seed: SPGMMMGMFNMLSTV
SPGFMMDMANMYSTV

SEQ ID NO: 195294 - protein, 15 aa, Artificial Sequence
  Description of Artificial Sequence: Synthetic peptide
  Seed: SPGMMMGMFNMLSTV
SPGFMMDMFNMASTV

SEQ ID NO: 195295 - protein, 15 aa, Artificial Sequence
  Description of Artificial Sequence: Synthetic peptide
  Seed: SPGMMMGMFNMLSTV
SPGFMMDMFNMDSTV

SEQ ID NO: 195296 - protein, 15 aa, Artificial Sequence
  Description of Artificial Sequence: Synthetic peptide
  Seed: SPGMMMGMFNMLSTV
SPGFMMDMFNMESTV

SEQ ID NO: 195297 - protein, 15 aa, Artificial Sequence
  Description of Artificial Sequence: Synthetic peptide
  Seed: SPGMMMGMFNMLSTV
SPGFMMDMFNMFSTV

SEQ ID NO: 195298 - protein, 15 aa, Artificial Sequence
  Description of Artificial Sequence: Synthetic peptide
  Seed: SPGMMMGMFNMLSTV
SPGFMMDMFNMISTV

SEQ ID NO: 195299 - protein, 15 aa, Artificial Sequence
  Description of Artificial Sequence: Synthetic peptide
  Seed: SPGMMMGMFNMLSTV
SPGFMMDMFNMLSTV

SEQ ID NO: 195300 - protein, 15 aa, Artificial Sequence
  Description of Artificial Sequence: Synthetic peptide
  Seed: SPGMMMGMFNMLSTV
SPGFMMDMFNMMSTV

SEQ ID NO: 195301 - protein, 15 aa, Artificial Sequence
  Description of Artificial Sequence: Synthetic peptide
  Seed: SPGMMMGMFNMLSTV
SPGFMMDMFNMTSTV

SEQ ID NO: 195302 - protein, 15 aa, Artificial Sequence
  Description of Artificial Sequence: Synthetic peptide
  Seed: SPGMMMGMFNMLSTV
SPGFMMDMFNMVSTV

SEQ ID NO: 195303 - protein, 15 aa, Artificial Sequence
  Description of Artificial Sequence: Synthetic peptide
  Seed: SPGMMMGMFNMLSTV
SPGFMMDMFNMYSTV

SEQ ID NO: 195304 - protein, 15 aa, Artificial Sequence
  Description of Artificial Sequence: Synthetic peptide
  Seed: SPGMMMGMFNMLSTV
SPGFMMDMGNMFSTV

SEQ ID NO: 195305 - protein, 15 aa, Artificial Sequence
  Description of Artificial Sequence: Synthetic peptide
  Seed: SPGMMMGMFNMLSTV
SPGFMMDMGNMISTV

SEQ ID NO: 195306 - protein, 15 aa, Artificial Sequence
  Description of Artificial Sequence: Synthetic peptide
  Seed: SPGMMMGMFNMLSTV
SPGFMMDMGNMLSTV

SEQ ID NO: 195307 - protein, 15 aa, Artificial Sequence
  Description of Artificial Sequence: Synthetic peptide
  Seed: SPGMMMGMFNMLSTV
SPGFMMDMGNMMSTV

SEQ ID NO: 195308 - protein, 15 aa, Artificial Sequence
  Description of Artificial Sequence: Synthetic peptide
  Seed: SPGMMMGMFNMLSTV
SPGFMMDMGNMVSTV

SEQ ID NO: 195309 - protein, 15 aa, Artificial Sequence
  Description of Artificial Sequence: Synthetic peptide
  Seed: SPGMMMGMFNMLSTV
SPGFMMDMGNMYSTV

SEQ ID NO: 195310 - protein, 15 aa, Artificial Sequence
  Description of Artificial Sequence: Synthetic peptide
  Seed: SPGMMMGMFNMLSTV
SPGFMMDMINMISTV

SEQ ID NO: 195311 - protein, 15 aa, Artificial Sequence
  Description of Artificial Sequence: Synthetic peptide
  Seed: SPGMMMGMFNMLSTV
SPGFMMDMINMVSTV

SEQ ID NO: 195312 - protein, 15 aa, Artificial Sequence
  Description of Artificial Sequence: Synthetic peptide
  Seed: SPGMMMGMFNMLSTV
SPGFMMDMINMYSTV

SEQ ID NO: 195313 - protein, 15 aa, Artificial Sequence
  Description of Artificial Sequence: Synthetic peptide
  Seed: SPGMMMGMFNMLSTV
SPGFMMDMLNMLSTV

SEQ ID NO: 195314 - protein, 15 aa, Artificial Sequence
  Description of Artificial Sequence: Synthetic peptide
  Seed: SPGMMMGMFNMLSTV
SPGFMMDMNNMASTV

SEQ ID NO: 195315 - protein, 15 aa, Artificial Sequence
  Description of Artificial Sequence: Synthetic peptide
  Seed: SPGMMMGMFNMLSTV
SPGFMMDMNNMFSTV

SEQ ID NO: 195316 - protein, 15 aa, Artificial Sequence
  Description of Artificial Sequence: Synthetic peptide
  Seed: SPGMMMGMFNMLSTV
SPGFMMDMNNMISTV

SEQ ID NO: 195317 - protein, 15 aa, Artificial Sequence
  Description of Artificial Sequence: Synthetic peptide
  Seed: SPGMMMGMFNMLSTV
SPGFMMDMNNMLSTV

SEQ ID NO: 195318 - protein, 15 aa, Artificial Sequence
  Description of Artificial Sequence: Synthetic peptide
  Seed: SPGMMMGMFNMLSTV
SPGFMMDMNNMMSTV

SEQ ID NO: 195319 - protein, 15 aa, Artificial Sequence
  Description of Artificial Sequence: Synthetic peptide
  Seed: SPGMMMGMFNMLSTV
SPGFMMDMNNMVSTV

SEQ ID NO: 195320 - protein, 15 aa, Artificial Sequence
  Description of Artificial Sequence: Synthetic peptide
  Seed: SPGMMMGMFNMLSTV
SPGFMMDMNNMYSTV

SEQ ID NO: 195321 - protein, 15 aa, Artificial Sequence
  Description of Artificial Sequence: Synthetic peptide
  Seed: SPGMMMGMFNMLSTV
SPGFMMDMPNMFSTV

SEQ ID NO: 195322 - protein, 15 aa, Artificial Sequence
  Description of Artificial Sequence: Synthetic peptide
  Seed: SPGMMMGMFNMLSTV
SPGFMMDMPNMISTV

SEQ ID NO: 195323 - protein, 15 aa, Artificial Sequence
  Description of Artificial Sequence: Synthetic peptide
  Seed: SPGMMMGMFNMLSTV
SPGFMMDMPNMLSTV

SEQ ID NO: 195324 - protein, 15 aa, Artificial Sequence
  Description of Artificial Sequence: Synthetic peptide
  Seed: SPGMMMGMFNMLSTV
SPGFMMDMPNMMSTV

SEQ ID NO: 195325 - protein, 15 aa, Artificial Sequence
  Description of Artificial Sequence: Synthetic peptide
  Seed: SPGMMMGMFNMLSTV
SPGFMMDMPNMVSTV

SEQ ID NO: 195326 - protein, 15 aa, Artificial Sequence
  Description of Artificial Sequence: Synthetic peptide
  Seed: SPGMMMGMFNMLSTV
SPGFMMDMPNMYSTV

SEQ ID NO: 195327 - protein, 15 aa, Artificial Sequence
  Description of Artificial Sequence: Synthetic peptide
  Seed: SPGMMMGMFNMLSTV
SPGFMMDMSNMASTV

SEQ ID NO: 195328 - protein, 15 aa, Artificial Sequence
  Description of Artificial Sequence: Synthetic peptide
  Seed: SPGMMMGMFNMLSTV
SPGFMMDMSNMFSTV

SEQ ID NO: 195329 - protein, 15 aa, Artificial Sequence
  Description of Artificial Sequence: Synthetic peptide
  Seed: SPGMMMGMFNMLSTV
SPGFMMDMSNMISTV

SEQ ID NO: 195330 - protein, 15 aa, Artificial Sequence
  Description of Artificial Sequence: Synthetic peptide
  Seed: SPGMMMGMFNMLSTV
SPGFMMDMSNMLSTV

SEQ ID NO: 195331 - protein, 15 aa, Artificial Sequence
  Description of Artificial Sequence: Synthetic peptide
  Seed: SPGMMMGMFNMLSTV
SPGFMMDMSNMMSTV

SEQ ID NO: 195332 - protein, 15 aa, Artificial Sequence
  Description of Artificial Sequence: Synthetic peptide
  Seed: SPGMMMGMFNMLSTV
SPGFMMDMSNMVSTV

SEQ ID NO: 195333 - protein, 15 aa, Artificial Sequence
  Description of Artificial Sequence: Synthetic peptide
  Seed: SPGMMMGMFNMLSTV
SPGFMMDMSNMYSTV

SEQ ID NO: 195334 - protein, 15 aa, Artificial Sequence
  Description of Artificial Sequence: Synthetic peptide
  Seed: SPGMMMGMFNMLSTV
SPGFMMDMTNMFSTV

SEQ ID NO: 195335 - protein, 15 aa, Artificial Sequence
  Description of Artificial Sequence: Synthetic peptide
  Seed: SPGMMMGMFNMLSTV
SPGFMMDMTNMISTV

SEQ ID NO: 195336 - protein, 15 aa, Artificial Sequence
  Description of Artificial Sequence: Synthetic peptide
  Seed: SPGMMMGMFNMLSTV
SPGFMMDMTNMLSTV

SEQ ID NO: 195337 - protein, 15 aa, Artificial Sequence
  Description of Artificial Sequence: Synthetic peptide
  Seed: SPGMMMGMFNMLSTV
SPGFMMDMTNMMSTV

SEQ ID NO: 195338 - protein, 15 aa, Artificial Sequence
  Description of Artificial Sequence: Synthetic peptide
  Seed: SPGMMMGMFNMLSTV
SPGFMMDMTNMVSTV

SEQ ID NO: 195339 - protein, 15 aa, Artificial Sequence
  Description of Artificial Sequence: Synthetic peptide
  Seed: SPGMMMGMFNMLSTV
SPGFMMDMTNMYSTV

SEQ ID NO: 195340 - protein, 15 aa, Artificial Sequence
  Description of Artificial Sequence: Synthetic peptide
  Seed: SPGMMMGMFNMLSTV
SPGFMMDMVNMISTV

SEQ ID NO: 195341 - protein, 15 aa, Artificial Sequence
  Description of Artificial Sequence: Synthetic peptide
  Seed: SPGMMMGMFNMLSTV
SPGFMMDMVNMLSTV

SEQ ID NO: 195342 - protein, 15 aa, Artificial Sequence
  Description of Artificial Sequence: Synthetic peptide
  Seed: SPGMMMGMFNMLSTV
SPGFMMDMVNMVSTV

SEQ ID NO: 195343 - protein, 15 aa, Artificial Sequence
  Description of Artificial Sequence: Synthetic peptide
  Seed: SPGMMMGMFNMLSTV
SPGFMMDMVNMYSTV

SEQ ID NO: 195344 - protein, 15 aa, Artificial Sequence
  Description of Artificial Sequence: Synthetic peptide
  Seed: SPGMMMGMFNMLSTV
SPGFMMDMWNMLSTV

SEQ ID NO: 195345 - protein, 15 aa, Artificial Sequence
  Description of Artificial Sequence: Synthetic peptide
  Seed: SPGMMMGMFNMLSTV
SPGFMMDMYNMFSTV

SEQ ID NO: 195346 - protein, 15 aa, Artificial Sequence
  Description of Artificial Sequence: Synthetic peptide
  Seed: SPGMMMGMFNMLSTV
SPGFMMDMYNMISTV

SEQ ID NO: 195347 - protein, 15 aa, Artificial Sequence
  Description of Artificial Sequence: Synthetic peptide
  Seed: SPGMMMGMFNMLSTV
SPGFMMDMYNMLSTV

SEQ ID NO: 195348 - protein, 15 aa, Artificial Sequence
  Description of Artificial Sequence: Synthetic peptide
  Seed: SPGMMMGMFNMLSTV
SPGFMMDMYNMVSTV

SEQ ID NO: 195349 - protein, 15 aa, Artificial Sequence
  Description of Artificial Sequence: Synthetic peptide
  Seed: SPGMMMGMFNMLSTV
SPGFMMEMANMISTV

SEQ ID NO: 195350 - protein, 15 aa, Artificial Sequence
  Description of Artificial Sequence: Synthetic peptide
  Seed: SPGMMMGMFNMLSTV
SPGFMMEMANMLSTV

SEQ ID NO: 195351 - protein, 15 aa, Artificial Sequence
  Description of Artificial Sequence: Synthetic peptide
  Seed: SPGMMMGMFNMLSTV
SPGFMMEMANMVSTV

SEQ ID NO: 195352 - protein, 15 aa, Artificial Sequence
  Description of Artificial Sequence: Synthetic peptide
  Seed: SPGMMMGMFNMLSTV
SPGFMMEMFNMASTV

SEQ ID NO: 195353 - protein, 15 aa, Artificial Sequence
  Description of Artificial Sequence: Synthetic peptide
  Seed: SPGMMMGMFNMLSTV
SPGFMMEMFNMDSTV

SEQ ID NO: 195354 - protein, 15 aa, Artificial Sequence
  Description of Artificial Sequence: Synthetic peptide
  Seed: SPGMMMGMFNMLSTV
SPGFMMEMFNMESTV

SEQ ID NO: 195355 - protein, 15 aa, Artificial Sequence
  Description of Artificial Sequence: Synthetic peptide
  Seed: SPGMMMGMFNMLSTV
SPGFMMEMFNMFSTV

SEQ ID NO: 195356 - protein, 15 aa, Artificial Sequence
  Description of Artificial Sequence: Synthetic peptide
  Seed: SPGMMMGMFNMLSTV
SPGFMMEMFNMHSTV

SEQ ID NO: 195357 - protein, 15 aa, Artificial Sequence
  Description of Artificial Sequence: Synthetic peptide
  Seed: SPGMMMGMFNMLSTV
SPGFMMEMFNMISTV

SEQ ID NO: 195358 - protein, 15 aa, Artificial Sequence
  Description of Artificial Sequence: Synthetic peptide
  Seed: SPGMMMGMFNMLSTV
SPGFMMEMFNMLSTV

SEQ ID NO: 195359 - protein, 15 aa, Artificial Sequence
  Description of Artificial Sequence: Synthetic peptide
  Seed: SPGMMMGMFNMLSTV
SPGFMMEMFNMMSTV

SEQ ID NO: 195360 - protein, 15 aa, Artificial Sequence
  Description of Artificial Sequence: Synthetic peptide
  Seed: SPGMMMGMFNMLSTV
SPGFMMEMFNMNSTV

SEQ ID NO: 195361 - protein, 15 aa, Artificial Sequence
  Description of Artificial Sequence: Synthetic peptide
  Seed: SPGMMMGMFNMLSTV
SPGFMMEMFNMPSTV

SEQ ID NO: 195362 - protein, 15 aa, Artificial Sequence
  Description of Artificial Sequence: Synthetic peptide
  Seed: SPGMMMGMFNMLSTV
SPGFMMEMFNMQSTV

SEQ ID NO: 195363 - protein, 15 aa, Artificial Sequence
  Description of Artificial Sequence: Synthetic peptide
  Seed: SPGMMMGMFNMLSTV
SPGFMMEMFNMSSTV

SEQ ID NO: 195364 - protein, 15 aa, Artificial Sequence
  Description of Artificial Sequence: Synthetic peptide
  Seed: SPGMMMGMFNMLSTV
SPGFMMEMFNMTSTV

SEQ ID NO: 195365 - protein, 15 aa, Artificial Sequence
  Description of Artificial Sequence: Synthetic peptide
  Seed: SPGMMMGMFNMLSTV
SPGFMMEMFNMVSTV

SEQ ID NO: 195366 - protein, 15 aa, Artificial Sequence
  Description of Artificial Sequence: Synthetic peptide
  Seed: SPGMMMGMFNMLSTV
SPGFMMEMFNMYSTV

SEQ ID NO: 195367 - protein, 15 aa, Artificial Sequence
  Description of Artificial Sequence: Synthetic peptide
  Seed: SPGMMMGMFNMLSTV
SPGFMMEMINMFSTV

SEQ ID NO: 195368 - protein, 15 aa, Artificial Sequence
  Description of Artificial Sequence: Synthetic peptide
  Seed: SPGMMMGMFNMLSTV
SPGFMMEMINMISTV

SEQ ID NO: 195369 - protein, 15 aa, Artificial Sequence
  Description of Artificial Sequence: Synthetic peptide
  Seed: SPGMMMGMFNMLSTV
SPGFMMEMINMLSTV

SEQ ID NO: 195370 - protein, 15 aa, Artificial Sequence
  Description of Artificial Sequence: Synthetic peptide
  Seed: SPGMMMGMFNMLSTV
SPGFMMEMINMVSTV

SEQ ID NO: 195371 - protein, 15 aa, Artificial Sequence
  Description of Artificial Sequence: Synthetic peptide
  Seed: SPGMMMGMFNMLSTV
SPGFMMEMLNMFSTV

SEQ ID NO: 195372 - protein, 15 aa, Artificial Sequence
  Description of Artificial Sequence: Synthetic peptide
  Seed: SPGMMMGMFNMLSTV
SPGFMMEMLNMISTV

SEQ ID NO: 195373 - protein, 15 aa, Artificial Sequence
  Description of Artificial Sequence: Synthetic peptide
  Seed: SPGMMMGMFNMLSTV
SPGFMMEMLNMLSTV

SEQ ID NO: 195374 - protein, 15 aa, Artificial Sequence
  Description of Artificial Sequence: Synthetic peptide
  Seed: SPGMMMGMFNMLSTV
SPGFMMEMLNMMSTV

SEQ ID NO: 195375 - protein, 15 aa, Artificial Sequence
  Description of Artificial Sequence: Synthetic peptide
  Seed: SPGMMMGMFNMLSTV
SPGFMMEMLNMVSTV

SEQ ID NO: 195376 - protein, 15 aa, Artificial Sequence
  Description of Artificial Sequence: Synthetic peptide
  Seed: SPGMMMGMFNMLSTV
SPGFMMEMMNMFSTV

SEQ ID NO: 195377 - protein, 15 aa, Artificial Sequence
  Description of Artificial Sequence: Synthetic peptide
  Seed: SPGMMMGMFNMLSTV
SPGFMMEMMNMISTV

SEQ ID NO: 195378 - protein, 15 aa, Artificial Sequence
  Description of Artificial Sequence: Synthetic peptide
  Seed: SPGMMMGMFNMLSTV
SPGFMMEMMNMLSTV

SEQ ID NO: 195379 - protein, 15 aa, Artificial Sequence
  Description of Artificial Sequence: Synthetic peptide
  Seed: SPGMMMGMFNMLSTV
SPGFMMEMMNMVSTV

SEQ ID NO: 195380 - protein, 15 aa, Artificial Sequence
  Description of Artificial Sequence: Synthetic peptide
  Seed: SPGMMMGMFNMLSTV
SPGFMMEMNNMFSTV

SEQ ID NO: 195381 - protein, 15 aa, Artificial Sequence
  Description of Artificial Sequence: Synthetic peptide
  Seed: SPGMMMGMFNMLSTV
SPGFMMEMNNMISTV

SEQ ID NO: 195382 - protein, 15 aa, Artificial Sequence
  Description of Artificial Sequence: Synthetic peptide
  Seed: SPGMMMGMFNMLSTV
SPGFMMEMNNMLSTV

SEQ ID NO: 195383 - protein, 15 aa, Artificial Sequence
  Description of Artificial Sequence: Synthetic peptide
  Seed: SPGMMMGMFNMLSTV
SPGFMMEMNNMVSTV

SEQ ID NO: 195384 - protein, 15 aa, Artificial Sequence
  Description of Artificial Sequence: Synthetic peptide
  Seed: SPGMMMGMFNMLSTV
SPGFMMEMNNMYSTV

SEQ ID NO: 195385 - protein, 15 aa, Artificial Sequence
  Description of Artificial Sequence: Synthetic peptide
  Seed: SPGMMMGMFNMLSTV
SPGFMMEMSNMISTV

SEQ ID NO: 195386 - protein, 15 aa, Artificial Sequence
  Description of Artificial Sequence: Synthetic peptide
  Seed: SPGMMMGMFNMLSTV
SPGFMMEMSNMVSTV

SEQ ID NO: 195387 - protein, 15 aa, Artificial Sequence
  Description of Artificial Sequence: Synthetic peptide
  Seed: SPGMMMGMFNMLSTV
SPGFMMEMVNMLSTV

SEQ ID NO: 195388 - protein, 15 aa, Artificial Sequence
  Description of Artificial Sequence: Synthetic peptide
  Seed: SPGMMMGMFNMLSTV
SPGFMMEMWNMFSTV

SEQ ID NO: 195389 - protein, 15 aa, Artificial Sequence
  Description of Artificial Sequence: Synthetic peptide
  Seed: SPGMMMGMFNMLSTV
SPGFMMEMWNMISTV

SEQ ID NO: 195390 - protein, 15 aa, Artificial Sequence
  Description of Artificial Sequence: Synthetic peptide
  Seed: SPGMMMGMFNMLSTV
SPGFMMEMWNMLSTV

SEQ ID NO: 195391 - protein, 15 aa, Artificial Sequence
  Description of Artificial Sequence: Synthetic peptide
  Seed: SPGMMMGMFNMLSTV
SPGFMMEMWNMMSTV

SEQ ID NO: 195392 - protein, 15 aa, Artificial Sequence
  Description of Artificial Sequence: Synthetic peptide
  Seed: SPGMMMGMFNMLSTV
SPGFMMEMWNMVSTV

SEQ ID NO: 195393 - protein, 15 aa, Artificial Sequence
  Description of Artificial Sequence: Synthetic peptide
  Seed: SPGMMMGMFNMLSTV
SPGFMMEMYNMFSTV

SEQ ID NO: 195394 - protein, 15 aa, Artificial Sequence
  Description of Artificial Sequence: Synthetic peptide
  Seed: SPGMMMGMFNMLSTV
SPGFMMEMYNMISTV

SEQ ID NO: 195395 - protein, 15 aa, Artificial Sequence
  Description of Artificial Sequence: Synthetic peptide
  Seed: SPGMMMGMFNMLSTV
SPGFMMEMYNMLSTV

SEQ ID NO: 195396 - protein, 15 aa, Artificial Sequence
  Description of Artificial Sequence: Synthetic peptide
  Seed: SPGMMMGMFNMLSTV
SPGFMMEMYNMMSTV

SEQ ID NO: 195397 - protein, 15 aa, Artificial Sequence
  Description of Artificial Sequence: Synthetic peptide
  Seed: SPGMMMGMFNMLSTV
SPGFMMEMYNMVSTV

SEQ ID NO: 195398 - protein, 15 aa, Artificial Sequence
  Description of Artificial Sequence: Synthetic peptide
  Seed: SPGMMMGMFNMLSTV
SPGFMMEMYNMYSTV

SEQ ID NO: 195399 - protein, 15 aa, Artificial Sequence
  Description of Artificial Sequence: Synthetic peptide
  Seed: SPGMMMGMFNMLSTV
SPGFMMFMANMASTV

SEQ ID NO: 195400 - protein, 15 aa, Artificial Sequence
  Description of Artificial Sequence: Synthetic peptide
  Seed: SPGMMMGMFNMLSTV
SPGFMMFMANMFSTV

SEQ ID NO: 195401 - protein, 15 aa, Artificial Sequence
  Description of Artificial Sequence: Synthetic peptide
  Seed: SPGMMMGMFNMLSTV
SPGFMMFMANMGSTV

SEQ ID NO: 195402 - protein, 15 aa, Artificial Sequence
  Description of Artificial Sequence: Synthetic peptide
  Seed: SPGMMMGMFNMLSTV
SPGFMMFMANMISTV

SEQ ID NO: 195403 - protein, 15 aa, Artificial Sequence
  Description of Artificial Sequence: Synthetic peptide
  Seed: SPGMMMGMFNMLSTV
SPGFMMFMANMLSTV

SEQ ID NO: 195404 - protein, 15 aa, Artificial Sequence
  Description of Artificial Sequence: Synthetic peptide
  Seed: SPGMMMGMFNMLSTV
SPGFMMFMANMMSTV

SEQ ID NO: 195405 - protein, 15 aa, Artificial Sequence
  Description of Artificial Sequence: Synthetic peptide
  Seed: SPGMMMGMFNMLSTV
SPGFMMFMANMSSTV

SEQ ID NO: 195406 - protein, 15 aa, Artificial Sequence
  Description of Artificial Sequence: Synthetic peptide
  Seed: SPGMMMGMFNMLSTV
SPGFMMFMANMTSTV

SEQ ID NO: 195407 - protein, 15 aa, Artificial Sequence
  Description of Artificial Sequence: Synthetic peptide
  Seed: SPGMMMGMFNMLSTV
SPGFMMFMANMVSTV

SEQ ID NO: 195408 - protein, 15 aa, Artificial Sequence
  Description of Artificial Sequence: Synthetic peptide
  Seed: SPGMMMGMFNMLSTV
SPGFMMFMANMYSTV

SEQ ID NO: 195409 - protein, 15 aa, Artificial Sequence
  Description of Artificial Sequence: Synthetic peptide
  Seed: SPGMMMGMFNMLSTV
SPGFMMFMDNMLSTV

SEQ ID NO: 195410 - protein, 15 aa, Artificial Sequence
  Description of Artificial Sequence: Synthetic peptide
  Seed: SPGMMMGMFNMLSTV
SPGFMMFMFNMASTV

SEQ ID NO: 195411 - protein, 15 aa, Artificial Sequence
  Description of Artificial Sequence: Synthetic peptide
  Seed: SPGMMMGMFNMLSTV
SPGFMMFMFNMDSTV

SEQ ID NO: 195412 - protein, 15 aa, Artificial Sequence
  Description of Artificial Sequence: Synthetic peptide
  Seed: SPGMMMGMFNMLSTV
SPGFMMFMFNMESTV

SEQ ID NO: 195413 - protein, 15 aa, Artificial Sequence
  Description of Artificial Sequence: Synthetic peptide
  Seed: SPGMMMGMFNMLSTV
SPGFMMFMFNMFSTV

SEQ ID NO: 195414 - protein, 15 aa, Artificial Sequence
  Description of Artificial Sequence: Synthetic peptide
  Seed: SPGMMMGMFNMLSTV
SPGFMMFMFNMHSTV

SEQ ID NO: 195415 - protein, 15 aa, Artificial Sequence
  Description of Artificial Sequence: Synthetic peptide
  Seed: SPGMMMGMFNMLSTV
SPGFMMFMFNMISTV

SEQ ID NO: 195416 - protein, 15 aa, Artificial Sequence
  Description of Artificial Sequence: Synthetic peptide
  Seed: SPGMMMGMFNMLSTV
SPGFMMFMFNMLSTV

SEQ ID NO: 195417 - protein, 15 aa, Artificial Sequence
  Description of Artificial Sequence: Synthetic peptide
  Seed: SPGMMMGMFNMLSTV
SPGFMMFMFNMMSTV

SEQ ID NO: 195418 - protein, 15 aa, Artificial Sequence
  Description of Artificial Sequence: Synthetic peptide
  Seed: SPGMMMGMFNMLSTV
SPGFMMFMFNMNSTV

SEQ ID NO: 195419 - protein, 15 aa, Artificial Sequence
  Description of Artificial Sequence: Synthetic peptide
  Seed: SPGMMMGMFNMLSTV
SPGFMMFMFNMPSTV

SEQ ID NO: 195420 - protein, 15 aa, Artificial Sequence
  Description of Artificial Sequence: Synthetic peptide
  Seed: SPGMMMGMFNMLSTV
SPGFMMFMFNMQSTV

SEQ ID NO: 195421 - protein, 15 aa, Artificial Sequence
  Description of Artificial Sequence: Synthetic peptide
  Seed: SPGMMMGMFNMLSTV
SPGFMMFMFNMRSTV

SEQ ID NO: 195422 - protein, 15 aa, Artificial Sequence
  Description of Artificial Sequence: Synthetic peptide
  Seed: SPGMMMGMFNMLSTV
SPGFMMFMFNMVSTV

SEQ ID NO: 195423 - protein, 15 aa, Artificial Sequence
  Description of Artificial Sequence: Synthetic peptide
  Seed: SPGMMMGMFNMLSTV
SPGFMMFMFNMYSTV

SEQ ID NO: 195424 - protein, 15 aa, Artificial Sequence
  Description of Artificial Sequence: Synthetic peptide
  Seed: SPGMMMGMFNMLSTV
SPGFMMFMGNMASTV

SEQ ID NO: 195425 - protein, 15 aa, Artificial Sequence
  Description of Artificial Sequence: Synthetic peptide
  Seed: SPGMMMGMFNMLSTV
SPGFMMFMGNMISTV

SEQ ID NO: 195426 - protein, 15 aa, Artificial Sequence
  Description of Artificial Sequence: Synthetic peptide
  Seed: SPGMMMGMFNMLSTV
SPGFMMFMGNMLSTV

SEQ ID NO: 195427 - protein, 15 aa, Artificial Sequence
  Description of Artificial Sequence: Synthetic peptide
  Seed: SPGMMMGMFNMLSTV
SPGFMMFMGNMVSTV

SEQ ID NO: 195428 - protein, 15 aa, Artificial Sequence
  Description of Artificial Sequence: Synthetic peptide
  Seed: SPGMMMGMFNMLSTV
SPGFMMFMHNMASTV

SEQ ID NO: 195429 - protein, 15 aa, Artificial Sequence
  Description of Artificial Sequence: Synthetic peptide
  Seed: SPGMMMGMFNMLSTV
SPGFMMFMHNMSSTV

SEQ ID NO: 195430 - protein, 15 aa, Artificial Sequence
  Description of Artificial Sequence: Synthetic peptide
  Seed: SPGMMMGMFNMLSTV
SPGFMMFMHNMVSTV

SEQ ID NO: 195431 - protein, 15 aa, Artificial Sequence
  Description of Artificial Sequence: Synthetic peptide
  Seed: SPGMMMGMFNMLSTV
SPGFMMFMINMLSTV

SEQ ID NO: 195432 - protein, 15 aa, Artificial Sequence
  Description of Artificial Sequence: Synthetic peptide
  Seed: SPGMMMGMFNMLSTV
SPGFMMFMINMYSTV

SEQ ID NO: 195433 - protein, 15 aa, Artificial Sequence
  Description of Artificial Sequence: Synthetic peptide
  Seed: SPGMMMGMFNMLSTV
SPGFMMFMKNMASTV

SEQ ID NO: 195434 - protein, 15 aa, Artificial Sequence
  Description of Artificial Sequence: Synthetic peptide
  Seed: SPGMMMGMFNMLSTV
SPGFMMFMKNMNSTV

SEQ ID NO: 195435 - protein, 15 aa, Artificial Sequence
  Description of Artificial Sequence: Synthetic peptide
  Seed: SPGMMMGMFNMLSTV
SPGFMMFMKNMPSTV

SEQ ID NO: 195436 - protein, 15 aa, Artificial Sequence
  Description of Artificial Sequence: Synthetic peptide
  Seed: SPGMMMGMFNMLSTV
SPGFMMFMKNMSSTV

SEQ ID NO: 195437 - protein, 15 aa, Artificial Sequence
  Description of Artificial Sequence: Synthetic peptide
  Seed: SPGMMMGMFNMLSTV
SPGFMMFMKNMVSTV

SEQ ID NO: 195438 - protein, 15 aa, Artificial Sequence
  Description of Artificial Sequence: Synthetic peptide
  Seed: SPGMMMGMFNMLSTV
SPGFMMFMLNMESTV

SEQ ID NO: 195439 - protein, 15 aa, Artificial Sequence
  Description of Artificial Sequence: Synthetic peptide
  Seed: SPGMMMGMFNMLSTV
SPGFMMFMLNMISTV

SEQ ID NO: 195440 - protein, 15 aa, Artificial Sequence
  Description of Artificial Sequence: Synthetic peptide
  Seed: SPGMMMGMFNMLSTV
SPGFMMFMLNMLSTV

SEQ ID NO: 195441 - protein, 15 aa, Artificial Sequence
  Description of Artificial Sequence: Synthetic peptide
  Seed: SPGMMMGMFNMLSTV
SPGFMMFMLNMYSTV

SEQ ID NO: 195442 - protein, 15 aa, Artificial Sequence
  Description of Artificial Sequence: Synthetic peptide
  Seed: SPGMMMGMFNMLSTV
SPGFMMFMMNMISTV

SEQ ID NO: 195443 - protein, 15 aa, Artificial Sequence
  Description of Artificial Sequence: Synthetic peptide
  Seed: SPGMMMGMFNMLSTV
SPGFMMFMMNMLSTV

SEQ ID NO: 195444 - protein, 15 aa, Artificial Sequence
  Description of Artificial Sequence: Synthetic peptide
  Seed: SPGMMMGMFNMLSTV
SPGFMMFMMNMYSTV

SEQ ID NO: 195445 - protein, 15 aa, Artificial Sequence
  Description of Artificial Sequence: Synthetic peptide
  Seed: SPGMMMGMFNMLSTV
SPGFMMFMNNMASTV

SEQ ID NO: 195446 - protein, 15 aa, Artificial Sequence
  Description of Artificial Sequence: Synthetic peptide
  Seed: SPGMMMGMFNMLSTV
SPGFMMFMNNMFSTV

SEQ ID NO: 195447 - protein, 15 aa, Artificial Sequence
  Description of Artificial Sequence: Synthetic peptide
  Seed: SPGMMMGMFNMLSTV
SPGFMMFMNNMGSTV

SEQ ID NO: 195448 - protein, 15 aa, Artificial Sequence
  Description of Artificial Sequence: Synthetic peptide
  Seed: SPGMMMGMFNMLSTV
SPGFMMFMNNMISTV

SEQ ID NO: 195449 - protein, 15 aa, Artificial Sequence
  Description of Artificial Sequence: Synthetic peptide
  Seed: SPGMMMGMFNMLSTV
SPGFMMFMNNMLSTV

SEQ ID NO: 195450 - protein, 15 aa, Artificial Sequence
  Description of Artificial Sequence: Synthetic peptide
  Seed: SPGMMMGMFNMLSTV
SPGFMMFMNNMMSTV

SEQ ID NO: 195451 - protein, 15 aa, Artificial Sequence
  Description of Artificial Sequence: Synthetic peptide
  Seed: SPGMMMGMFNMLSTV
SPGFMMFMNNMNSTV

SEQ ID NO: 195452 - protein, 15 aa, Artificial Sequence
  Description of Artificial Sequence: Synthetic peptide
  Seed: SPGMMMGMFNMLSTV
SPGFMMFMNNMSSTV

SEQ ID NO: 195453 - protein, 15 aa, Artificial Sequence
  Description of Artificial Sequence: Synthetic peptide
  Seed: SPGMMMGMFNMLSTV
SPGFMMFMNNMTSTV

SEQ ID NO: 195454 - protein, 15 aa, Artificial Sequence
  Description of Artificial Sequence: Synthetic peptide
  Seed: SPGMMMGMFNMLSTV
SPGFMMFMNNMVSTV

SEQ ID NO: 195455 - protein, 15 aa, Artificial Sequence
  Description of Artificial Sequence: Synthetic peptide
  Seed: SPGMMMGMFNMLSTV
SPGFMMFMNNMYSTV

SEQ ID NO: 195456 - protein, 15 aa, Artificial Sequence
  Description of Artificial Sequence: Synthetic peptide
  Seed: SPGMMMGMFNMLSTV
SPGFMMFMPNMASTV

SEQ ID NO: 195457 - protein, 15 aa, Artificial Sequence
  Description of Artificial Sequence: Synthetic peptide
  Seed: SPGMMMGMFNMLSTV
SPGFMMFMPNMFSTV

SEQ ID NO: 195458 - protein, 15 aa, Artificial Sequence
  Description of Artificial Sequence: Synthetic peptide
  Seed: SPGMMMGMFNMLSTV
SPGFMMFMPNMISTV

SEQ ID NO: 195459 - protein, 15 aa, Artificial Sequence
  Description of Artificial Sequence: Synthetic peptide
  Seed: SPGMMMGMFNMLSTV
SPGFMMFMPNMLSTV

SEQ ID NO: 195460 - protein, 15 aa, Artificial Sequence
  Description of Artificial Sequence: Synthetic peptide
  Seed: SPGMMMGMFNMLSTV
SPGFMMFMPNMMSTV

SEQ ID NO: 195461 - protein, 15 aa, Artificial Sequence
  Description of Artificial Sequence: Synthetic peptide
  Seed: SPGMMMGMFNMLSTV
SPGFMMFMPNMSSTV

SEQ ID NO: 195462 - protein, 15 aa, Artificial Sequence
  Description of Artificial Sequence: Synthetic peptide
  Seed: SPGMMMGMFNMLSTV
SPGFMMFMPNMTSTV

SEQ ID NO: 195463 - protein, 15 aa, Artificial Sequence
  Description of Artificial Sequence: Synthetic peptide
  Seed: SPGMMMGMFNMLSTV
SPGFMMFMPNMVSTV

SEQ ID NO: 195464 - protein, 15 aa, Artificial Sequence
  Description of Artificial Sequence: Synthetic peptide
  Seed: SPGMMMGMFNMLSTV
SPGFMMFMRNMASTV

SEQ ID NO: 195465 - protein, 15 aa, Artificial Sequence
  Description of Artificial Sequence: Synthetic peptide
  Seed: SPGMMMGMFNMLSTV
SPGFMMFMRNMGSTV

SEQ ID NO: 195466 - protein, 15 aa, Artificial Sequence
  Description of Artificial Sequence: Synthetic peptide
  Seed: SPGMMMGMFNMLSTV
SPGFMMFMRNMISTV

SEQ ID NO: 195467 - protein, 15 aa, Artificial Sequence
  Description of Artificial Sequence: Synthetic peptide
  Seed: SPGMMMGMFNMLSTV
SPGFMMFMRNMNSTV

SEQ ID NO: 195468 - protein, 15 aa, Artificial Sequence
  Description of Artificial Sequence: Synthetic peptide
  Seed: SPGMMMGMFNMLSTV
SPGFMMFMRNMPSTV

SEQ ID NO: 195469 - protein, 15 aa, Artificial Sequence
  Description of Artificial Sequence: Synthetic peptide
  Seed: SPGMMMGMFNMLSTV
SPGFMMFMRNMSSTV

SEQ ID NO: 195470 - protein, 15 aa, Artificial Sequence
  Description of Artificial Sequence: Synthetic peptide
  Seed: SPGMMMGMFNMLSTV
SPGFMMFMRNMTSTV

SEQ ID NO: 195471 - protein, 15 aa, Artificial Sequence
  Description of Artificial Sequence: Synthetic peptide
  Seed: SPGMMMGMFNMLSTV
SPGFMMFMRNMVSTV

SEQ ID NO: 195472 - protein, 15 aa, Artificial Sequence
  Description of Artificial Sequence: Synthetic peptide
  Seed: SPGMMMGMFNMLSTV
SPGFMMFMSNMASTV

SEQ ID NO: 195473 - protein, 15 aa, Artificial Sequence
  Description of Artificial Sequence: Synthetic peptide
  Seed: SPGMMMGMFNMLSTV
SPGFMMFMSNMFSTV

SEQ ID NO: 195474 - protein, 15 aa, Artificial Sequence
  Description of Artificial Sequence: Synthetic peptide
  Seed: SPGMMMGMFNMLSTV
SPGFMMFMSNMGSTV

SEQ ID NO: 195475 - protein, 15 aa, Artificial Sequence
  Description of Artificial Sequence: Synthetic peptide
  Seed: SPGMMMGMFNMLSTV
SPGFMMFMSNMISTV

SEQ ID NO: 195476 - protein, 15 aa, Artificial Sequence
  Description of Artificial Sequence: Synthetic peptide
  Seed: SPGMMMGMFNMLSTV
SPGFMMFMSNMLSTV

SEQ ID NO: 195477 - protein, 15 aa, Artificial Sequence
  Description of Artificial Sequence: Synthetic peptide
  Seed: SPGMMMGMFNMLSTV
SPGFMMFMSNMMSTV

SEQ ID NO: 195478 - protein, 15 aa, Artificial Sequence
  Description of Artificial Sequence: Synthetic peptide
  Seed: SPGMMMGMFNMLSTV
SPGFMMFMSNMSSTV

SEQ ID NO: 195479 - protein, 15 aa, Artificial Sequence
  Description of Artificial Sequence: Synthetic peptide
  Seed: SPGMMMGMFNMLSTV
SPGFMMFMSNMTSTV

SEQ ID NO: 195480 - protein, 15 aa, Artificial Sequence
  Description of Artificial Sequence: Synthetic peptide
  Seed: SPGMMMGMFNMLSTV
SPGFMMFMSNMVSTV

SEQ ID NO: 195481 - protein, 15 aa, Artificial Sequence
  Description of Artificial Sequence: Synthetic peptide
  Seed: SPGMMMGMFNMLSTV
SPGFMMFMTNMASTV

SEQ ID NO: 195482 - protein, 15 aa, Artificial Sequence
  Description of Artificial Sequence: Synthetic peptide
  Seed: SPGMMMGMFNMLSTV
SPGFMMFMTNMISTV

SEQ ID NO: 195483 - protein, 15 aa, Artificial Sequence
  Description of Artificial Sequence: Synthetic peptide
  Seed: SPGMMMGMFNMLSTV
SPGFMMFMTNMLSTV

SEQ ID NO: 195484 - protein, 15 aa, Artificial Sequence
  Description of Artificial Sequence: Synthetic peptide
  Seed: SPGMMMGMFNMLSTV
SPGFMMFMTNMSSTV

SEQ ID NO: 195485 - protein, 15 aa, Artificial Sequence
  Description of Artificial Sequence: Synthetic peptide
  Seed: SPGMMMGMFNMLSTV
SPGFMMFMTNMVSTV

SEQ ID NO: 195486 - protein, 15 aa, Artificial Sequence
  Description of Artificial Sequence: Synthetic peptide
  Seed: SPGMMMGMFNMLSTV
SPGFMMFMVNMYSTV

SEQ ID NO: 195487 - protein, 15 aa, Artificial Sequence
  Description of Artificial Sequence: Synthetic peptide
  Seed: SPGMMMGMFNMLSTV
SPGFMMFMWNMASTV

SEQ ID NO: 195488 - protein, 15 aa, Artificial Sequence
  Description of Artificial Sequence: Synthetic peptide
  Seed: SPGMMMGMFNMLSTV
SPGFMMFMWNMESTV

SEQ ID NO: 195489 - protein, 15 aa, Artificial Sequence
  Description of Artificial Sequence: Synthetic peptide
  Seed: SPGMMMGMFNMLSTV
SPGFMMFMWNMFSTV

SEQ ID NO: 195490 - protein, 15 aa, Artificial Sequence
  Description of Artificial Sequence: Synthetic peptide
  Seed: SPGMMMGMFNMLSTV
SPGFMMFMWNMISTV

SEQ ID NO: 195491 - protein, 15 aa, Artificial Sequence
  Description of Artificial Sequence: Synthetic peptide
  Seed: SPGMMMGMFNMLSTV
SPGFMMFMWNMLSTV

SEQ ID NO: 195492 - protein, 15 aa, Artificial Sequence
  Description of Artificial Sequence: Synthetic peptide
  Seed: SPGMMMGMFNMLSTV
SPGFMMFMWNMMSTV

SEQ ID NO: 195493 - protein, 15 aa, Artificial Sequence
  Description of Artificial Sequence: Synthetic peptide
  Seed: SPGMMMGMFNMLSTV
SPGFMMFMWNMVSTV

SEQ ID NO: 195494 - protein, 15 aa, Artificial Sequence
  Description of Artificial Sequence: Synthetic peptide
  Seed: SPGMMMGMFNMLSTV
SPGFMMFMWNMYSTV

SEQ ID NO: 195495 - protein, 15 aa, Artificial Sequence
  Description of Artificial Sequence: Synthetic peptide
  Seed: SPGMMMGMFNMLSTV
SPGFMMFMYNMASTV

SEQ ID NO: 195496 - protein, 15 aa, Artificial Sequence
  Description of Artificial Sequence: Synthetic peptide
  Seed: SPGMMMGMFNMLSTV
SPGFMMFMYNMESTV

SEQ ID NO: 195497 - protein, 15 aa, Artificial Sequence
  Description of Artificial Sequence: Synthetic peptide
  Seed: SPGMMMGMFNMLSTV
SPGFMMFMYNMFSTV

SEQ ID NO: 195498 - protein, 15 aa, Artificial Sequence
  Description of Artificial Sequence: Synthetic peptide
  Seed: SPGMMMGMFNMLSTV
SPGFMMFMYNMISTV

SEQ ID NO: 195499 - protein, 15 aa, Artificial Sequence
  Description of Artificial Sequence: Synthetic peptide
  Seed: SPGMMMGMFNMLSTV
SPGFMMFMYNMLSTV

SEQ ID NO: 195500 - protein, 15 aa, Artificial Sequence
  Description of Artificial Sequence: Synthetic peptide
  Seed: SPGMMMGMFNMLSTV
SPGFMMFMYNMMSTV

SEQ ID NO: 195501 - protein, 15 aa, Artificial Sequence
  Description of Artificial Sequence: Synthetic peptide
  Seed: SPGMMMGMFNMLSTV
SPGFMMFMYNMPSTV

SEQ ID NO: 195502 - protein, 15 aa, Artificial Sequence
  Description of Artificial Sequence: Synthetic peptide
  Seed: SPGMMMGMFNMLSTV
SPGFMMFMYNMTSTV

SEQ ID NO: 195503 - protein, 15 aa, Artificial Sequence
  Description of Artificial Sequence: Synthetic peptide
  Seed: SPGMMMGMFNMLSTV
SPGFMMFMYNMVSTV

SEQ ID NO: 195504 - protein, 15 aa, Artificial Sequence
  Description of Artificial Sequence: Synthetic peptide
  Seed: SPGMMMGMFNMLSTV
SPGFMMFMYNMYSTV

SEQ ID NO: 195505 - protein, 15 aa, Artificial Sequence
  Description of Artificial Sequence: Synthetic peptide
  Seed: SPGMMMGMFNMLSTV
SPGFMMGMANMASTV

SEQ ID NO: 195506 - protein, 15 aa, Artificial Sequence
  Description of Artificial Sequence: Synthetic peptide
  Seed: SPGMMMGMFNMLSTV
SPGFMMGMANMFSTV

SEQ ID NO: 195507 - protein, 15 aa, Artificial Sequence
  Description of Artificial Sequence: Synthetic peptide
  Seed: SPGMMMGMFNMLSTV
SPGFMMGMANMISTV

SEQ ID NO: 195508 - protein, 15 aa, Artificial Sequence
  Description of Artificial Sequence: Synthetic peptide
  Seed: SPGMMMGMFNMLSTV
SPGFMMGMANMLSTV

SEQ ID NO: 195509 - protein, 15 aa, Artificial Sequence
  Description of Artificial Sequence: Synthetic peptide
  Seed: SPGMMMGMFNMLSTV
SPGFMMGMANMMSTV

SEQ ID NO: 195510 - protein, 15 aa, Artificial Sequence
  Description of Artificial Sequence: Synthetic peptide
  Seed: SPGMMMGMFNMLSTV
SPGFMMGMANMNSTV

SEQ ID NO: 195511 - protein, 15 aa, Artificial Sequence
  Description of Artificial Sequence: Synthetic peptide
  Seed: SPGMMMGMFNMLSTV
SPGFMMGMANMSSTV

SEQ ID NO: 195512 - protein, 15 aa, Artificial Sequence
  Description of Artificial Sequence: Synthetic peptide
  Seed: SPGMMMGMFNMLSTV
SPGFMMGMANMTSTV

SEQ ID NO: 195513 - protein, 15 aa, Artificial Sequence
  Description of Artificial Sequence: Synthetic peptide
  Seed: SPGMMMGMFNMLSTV
SPGFMMGMANMVSTV

SEQ ID NO: 195514 - protein, 15 aa, Artificial Sequence
  Description of Artificial Sequence: Synthetic peptide
  Seed: SPGMMMGMFNMLSTV
SPGFMMGMANMYSTV

SEQ ID NO: 195515 - protein, 15 aa, Artificial Sequence
  Description of Artificial Sequence: Synthetic peptide
  Seed: SPGMMMGMFNMLSTV
SPGFMMGMFNMASTV

SEQ ID NO: 195516 - protein, 15 aa, Artificial Sequence
  Description of Artificial Sequence: Synthetic peptide
  Seed: SPGMMMGMFNMLSTV
SPGFMMGMFNMFSTV

SEQ ID NO: 195517 - protein, 15 aa, Artificial Sequence
  Description of Artificial Sequence: Synthetic peptide
  Seed: SPGMMMGMFNMLSTV
SPGFMMGMFNMISTV

SEQ ID NO: 195518 - protein, 15 aa, Artificial Sequence
  Description of Artificial Sequence: Synthetic peptide
  Seed: SPGMMMGMFNMLSTV
SPGFMMGMFNMLSTV

SEQ ID NO: 195519 - protein, 15 aa, Artificial Sequence
  Description of Artificial Sequence: Synthetic peptide
  Seed: SPGMMMGMFNMLSTV
SPGFMMGMFNMMSTV

SEQ ID NO: 195520 - protein, 15 aa, Artificial Sequence
  Description of Artificial Sequence: Synthetic peptide
  Seed: SPGMMMGMFNMLSTV
SPGFMMGMFNMVSTV

SEQ ID NO: 195521 - protein, 15 aa, Artificial Sequence
  Description of Artificial Sequence: Synthetic peptide
  Seed: SPGMMMGMFNMLSTV
SPGFMMGMFNMYSTV

SEQ ID NO: 195522 - protein, 15 aa, Artificial Sequence
  Description of Artificial Sequence: Synthetic peptide
  Seed: SPGMMMGMFNMLSTV
SPGFMMGMGNMASTV

SEQ ID NO: 195523 - protein, 15 aa, Artificial Sequence
  Description of Artificial Sequence: Synthetic peptide
  Seed: SPGMMMGMFNMLSTV
SPGFMMGMGNMFSTV

SEQ ID NO: 195524 - protein, 15 aa, Artificial Sequence
  Description of Artificial Sequence: Synthetic peptide
  Seed: SPGMMMGMFNMLSTV
SPGFMMGMGNMISTV

SEQ ID NO: 195525 - protein, 15 aa, Artificial Sequence
  Description of Artificial Sequence: Synthetic peptide
  Seed: SPGMMMGMFNMLSTV
SPGFMMGMGNMLSTV

SEQ ID NO: 195526 - protein, 15 aa, Artificial Sequence
  Description of Artificial Sequence: Synthetic peptide
  Seed: SPGMMMGMFNMLSTV
SPGFMMGMGNMMSTV

SEQ ID NO: 195527 - protein, 15 aa, Artificial Sequence
  Description of Artificial Sequence: Synthetic peptide
  Seed: SPGMMMGMFNMLSTV
SPGFMMGMGNMTSTV

SEQ ID NO: 195528 - protein, 15 aa, Artificial Sequence
  Description of Artificial Sequence: Synthetic peptide
  Seed: SPGMMMGMFNMLSTV
SPGFMMGMGNMVSTV

SEQ ID NO: 195529 - protein, 15 aa, Artificial Sequence
  Description of Artificial Sequence: Synthetic peptide
  Seed: SPGMMMGMFNMLSTV
SPGFMMGMGNMYSTV

SEQ ID NO: 195530 - protein, 15 aa, Artificial Sequence
  Description of Artificial Sequence: Synthetic peptide
  Seed: SPGMMMGMFNMLSTV
SPGFMMGMINMMSTV

SEQ ID NO: 195531 - protein, 15 aa, Artificial Sequence
  Description of Artificial Sequence: Synthetic peptide
  Seed: SPGMMMGMFNMLSTV
SPGFMMGMNNMFSTV

SEQ ID NO: 195532 - protein, 15 aa, Artificial Sequence
  Description of Artificial Sequence: Synthetic peptide
  Seed: SPGMMMGMFNMLSTV
SPGFMMGMNNMISTV

SEQ ID NO: 195533 - protein, 15 aa, Artificial Sequence
  Description of Artificial Sequence: Synthetic peptide
  Seed: SPGMMMGMFNMLSTV
SPGFMMGMNNMLSTV

SEQ ID NO: 195534 - protein, 15 aa, Artificial Sequence
  Description of Artificial Sequence: Synthetic peptide
  Seed: SPGMMMGMFNMLSTV
SPGFMMGMNNMMSTV

SEQ ID NO: 195535 - protein, 15 aa, Artificial Sequence
  Description of Artificial Sequence: Synthetic peptide
  Seed: SPGMMMGMFNMLSTV
SPGFMMGMNNMVSTV

SEQ ID NO: 195536 - protein, 15 aa, Artificial Sequence
  Description of Artificial Sequence: Synthetic peptide
  Seed: SPGMMMGMFNMLSTV
SPGFMMGMPNMASTV

SEQ ID NO: 195537 - protein, 15 aa, Artificial Sequence
  Description of Artificial Sequence: Synthetic peptide
  Seed: SPGMMMGMFNMLSTV
SPGFMMGMPNMFSTV

SEQ ID NO: 195538 - protein, 15 aa, Artificial Sequence
  Description of Artificial Sequence: Synthetic peptide
  Seed: SPGMMMGMFNMLSTV
SPGFMMGMPNMISTV

SEQ ID NO: 195539 - protein, 15 aa, Artificial Sequence
  Description of Artificial Sequence: Synthetic peptide
  Seed: SPGMMMGMFNMLSTV
SPGFMMGMPNMLSTV

SEQ ID NO: 195540 - protein, 15 aa, Artificial Sequence
  Description of Artificial Sequence: Synthetic peptide
  Seed: SPGMMMGMFNMLSTV
SPGFMMGMPNMMSTV

SEQ ID NO: 195541 - protein, 15 aa, Artificial Sequence
  Description of Artificial Sequence: Synthetic peptide
  Seed: SPGMMMGMFNMLSTV
SPGFMMGMPNMTSTV

SEQ ID NO: 195542 - protein, 15 aa, Artificial Sequence
  Description of Artificial Sequence: Synthetic peptide
  Seed: SPGMMMGMFNMLSTV
SPGFMMGMPNMVSTV

SEQ ID NO: 195543 - protein, 15 aa, Artificial Sequence
  Description of Artificial Sequence: Synthetic peptide
  Seed: SPGMMMGMFNMLSTV
SPGFMMGMPNMYSTV

SEQ ID NO: 195544 - protein, 15 aa, Artificial Sequence
  Description of Artificial Sequence: Synthetic peptide
  Seed: SPGMMMGMFNMLSTV
SPGFMMGMSNMASTV

SEQ ID NO: 195545 - protein, 15 aa, Artificial Sequence
  Description of Artificial Sequence: Synthetic peptide
  Seed: SPGMMMGMFNMLSTV
SPGFMMGMSNMFSTV

SEQ ID NO: 195546 - protein, 15 aa, Artificial Sequence
  Description of Artificial Sequence: Synthetic peptide
  Seed: SPGMMMGMFNMLSTV
SPGFMMGMSNMISTV

SEQ ID NO: 195547 - protein, 15 aa, Artificial Sequence
  Description of Artificial Sequence: Synthetic peptide
  Seed: SPGMMMGMFNMLSTV
SPGFMMGMSNMLSTV

SEQ ID NO: 195548 - protein, 15 aa, Artificial Sequence
  Description of Artificial Sequence: Synthetic peptide
  Seed: SPGMMMGMFNMLSTV
SPGFMMGMSNMMSTV

SEQ ID NO: 195549 - protein, 15 aa, Artificial Sequence
  Description of Artificial Sequence: Synthetic peptide
  Seed: SPGMMMGMFNMLSTV
SPGFMMGMSNMSSTV

SEQ ID NO: 195550 - protein, 15 aa, Artificial Sequence
  Description of Artificial Sequence: Synthetic peptide
  Seed: SPGMMMGMFNMLSTV
SPGFMMGMSNMTSTV

SEQ ID NO: 195551 - protein, 15 aa, Artificial Sequence
  Description of Artificial Sequence: Synthetic peptide
  Seed: SPGMMMGMFNMLSTV
SPGFMMGMSNMVSTV

SEQ ID NO: 195552 - protein, 15 aa, Artificial Sequence
  Description of Artificial Sequence: Synthetic peptide
  Seed: SPGMMMGMFNMLSTV
SPGFMMGMSNMYSTV

SEQ ID NO: 195553 - protein, 15 aa, Artificial Sequence
  Description of Artificial Sequence: Synthetic peptide
  Seed: SPGMMMGMFNMLSTV
SPGFMMGMTNMASTV

SEQ ID NO: 195554 - protein, 15 aa, Artificial Sequence
  Description of Artificial Sequence: Synthetic peptide
  Seed: SPGMMMGMFNMLSTV
SPGFMMGMTNMFSTV

SEQ ID NO: 195555 - protein, 15 aa, Artificial Sequence
  Description of Artificial Sequence: Synthetic peptide
  Seed: SPGMMMGMFNMLSTV
SPGFMMGMTNMISTV

SEQ ID NO: 195556 - protein, 15 aa, Artificial Sequence
  Description of Artificial Sequence: Synthetic peptide
  Seed: SPGMMMGMFNMLSTV
SPGFMMGMTNMLSTV

SEQ ID NO: 195557 - protein, 15 aa, Artificial Sequence
  Description of Artificial Sequence: Synthetic peptide
  Seed: SPGMMMGMFNMLSTV
SPGFMMGMTNMMSTV

SEQ ID NO: 195558 - protein, 15 aa, Artificial Sequence
  Description of Artificial Sequence: Synthetic peptide
  Seed: SPGMMMGMFNMLSTV
SPGFMMGMTNMVSTV

SEQ ID NO: 195559 - protein, 15 aa, Artificial Sequence
  Description of Artificial Sequence: Synthetic peptide
  Seed: SPGMMMGMFNMLSTV
SPGFMMGMVNMASTV

SEQ ID NO: 195560 - protein, 15 aa, Artificial Sequence
  Description of Artificial Sequence: Synthetic peptide
  Seed: SPGMMMGMFNMLSTV
SPGFMMGMVNMISTV

SEQ ID NO: 195561 - protein, 15 aa, Artificial Sequence
  Description of Artificial Sequence: Synthetic peptide
  Seed: SPGMMMGMFNMLSTV
SPGFMMGMVNMLSTV

SEQ ID NO: 195562 - protein, 15 aa, Artificial Sequence
  Description of Artificial Sequence: Synthetic peptide
  Seed: SPGMMMGMFNMLSTV
SPGFMMGMVNMMSTV

SEQ ID NO: 195563 - protein, 15 aa, Artificial Sequence
  Description of Artificial Sequence: Synthetic peptide
  Seed: SPGMMMGMFNMLSTV
SPGFMMGMVNMVSTV

SEQ ID NO: 195564 - protein, 15 aa, Artificial Sequence
  Description of Artificial Sequence: Synthetic peptide
  Seed: SPGMMMGMFNMLSTV
SPGFMMGMYNMISTV

SEQ ID NO: 195565 - protein, 15 aa, Artificial Sequence
  Description of Artificial Sequence: Synthetic peptide
  Seed: SPGMMMGMFNMLSTV
SPGFMMGMYNMLSTV

SEQ ID NO: 195566 - protein, 15 aa, Artificial Sequence
  Description of Artificial Sequence: Synthetic peptide
  Seed: SPGMMMGMFNMLSTV
SPGFMMGMYNMVSTV

SEQ ID NO: 195567 - protein, 15 aa, Artificial Sequence
  Description of Artificial Sequence: Synthetic peptide
  Seed: SPGMMMGMFNMLSTV
SPGFMMHMANMASTV

SEQ ID NO: 195568 - protein, 15 aa, Artificial Sequence
  Description of Artificial Sequence: Synthetic peptide
  Seed: SPGMMMGMFNMLSTV
SPGFMMHMANMFSTV

SEQ ID NO: 195569 - protein, 15 aa, Artificial Sequence
  Description of Artificial Sequence: Synthetic peptide
  Seed: SPGMMMGMFNMLSTV
SPGFMMHMANMISTV

SEQ ID NO: 195570 - protein, 15 aa, Artificial Sequence
  Description of Artificial Sequence: Synthetic peptide
  Seed: SPGMMMGMFNMLSTV
SPGFMMHMANMLSTV

SEQ ID NO: 195571 - protein, 15 aa, Artificial Sequence
  Description of Artificial Sequence: Synthetic peptide
  Seed: SPGMMMGMFNMLSTV
SPGFMMHMANMMSTV

SEQ ID NO: 195572 - protein, 15 aa, Artificial Sequence
  Description of Artificial Sequence: Synthetic peptide
  Seed: SPGMMMGMFNMLSTV
SPGFMMHMANMSSTV

SEQ ID NO: 195573 - protein, 15 aa, Artificial Sequence
  Description of Artificial Sequence: Synthetic peptide
  Seed: SPGMMMGMFNMLSTV
SPGFMMHMANMTSTV

SEQ ID NO: 195574 - protein, 15 aa, Artificial Sequence
  Description of Artificial Sequence: Synthetic peptide
  Seed: SPGMMMGMFNMLSTV
SPGFMMHMANMVSTV

SEQ ID NO: 195575 - protein, 15 aa, Artificial Sequence
  Description of Artificial Sequence: Synthetic peptide
  Seed: SPGMMMGMFNMLSTV
SPGFMMHMANMWSTV

SEQ ID NO: 195576 - protein, 15 aa, Artificial Sequence
  Description of Artificial Sequence: Synthetic peptide
  Seed: SPGMMMGMFNMLSTV
SPGFMMHMANMYSTV

SEQ ID NO: 195577 - protein, 15 aa, Artificial Sequence
  Description of Artificial Sequence: Synthetic peptide
  Seed: SPGMMMGMFNMLSTV
SPGFMMHMFNMASTV

SEQ ID NO: 195578 - protein, 15 aa, Artificial Sequence
  Description of Artificial Sequence: Synthetic peptide
  Seed: SPGMMMGMFNMLSTV
SPGFMMHMFNMCSTV

SEQ ID NO: 195579 - protein, 15 aa, Artificial Sequence
  Description of Artificial Sequence: Synthetic peptide
  Seed: SPGMMMGMFNMLSTV
SPGFMMHMFNMDSTV

SEQ ID NO: 195580 - protein, 15 aa, Artificial Sequence
  Description of Artificial Sequence: Synthetic peptide
  Seed: SPGMMMGMFNMLSTV
SPGFMMHMFNMESTV

SEQ ID NO: 195581 - protein, 15 aa, Artificial Sequence
  Description of Artificial Sequence: Synthetic peptide
  Seed: SPGMMMGMFNMLSTV
SPGFMMHMFNMFSTV

SEQ ID NO: 195582 - protein, 15 aa, Artificial Sequence
  Description of Artificial Sequence: Synthetic peptide
  Seed: SPGMMMGMFNMLSTV
SPGFMMHMFNMGSTV

SEQ ID NO: 195583 - protein, 15 aa, Artificial Sequence
  Description of Artificial Sequence: Synthetic peptide
  Seed: SPGMMMGMFNMLSTV
SPGFMMHMFNMHSTV

SEQ ID NO: 195584 - protein, 15 aa, Artificial Sequence
  Description of Artificial Sequence: Synthetic peptide
  Seed: SPGMMMGMFNMLSTV
SPGFMMHMFNMISTV

SEQ ID NO: 195585 - protein, 15 aa, Artificial Sequence
  Description of Artificial Sequence: Synthetic peptide
  Seed: SPGMMMGMFNMLSTV
SPGFMMHMFNMMSTV

SEQ ID NO: 195586 - protein, 15 aa, Artificial Sequence
  Description of Artificial Sequence: Synthetic peptide
  Seed: SPGMMMGMFNMLSTV
SPGFMMHMFNMNSTV

SEQ ID NO: 195587 - protein, 15 aa, Artificial Sequence
  Description of Artificial Sequence: Synthetic peptide
  Seed: SPGMMMGMFNMLSTV
SPGFMMHMFNMPSTV

SEQ ID NO: 195588 - protein, 15 aa, Artificial Sequence
  Description of Artificial Sequence: Synthetic peptide
  Seed: SPGMMMGMFNMLSTV
SPGFMMHMFNMQSTV

SEQ ID NO: 195589 - protein, 15 aa, Artificial Sequence
  Description of Artificial Sequence: Synthetic peptide
  Seed: SPGMMMGMFNMLSTV
SPGFMMHMFNMRSTV

SEQ ID NO: 195590 - protein, 15 aa, Artificial Sequence
  Description of Artificial Sequence: Synthetic peptide
  Seed: SPGMMMGMFNMLSTV
SPGFMMHMFNMSSTV

SEQ ID NO: 195591 - protein, 15 aa, Artificial Sequence
  Description of Artificial Sequence: Synthetic peptide
  Seed: SPGMMMGMFNMLSTV
SPGFMMHMFNMTSTV

SEQ ID NO: 195592 - protein, 15 aa, Artificial Sequence
  Description of Artificial Sequence: Synthetic peptide
  Seed: SPGMMMGMFNMLSTV
SPGFMMHMFNMWSTV

SEQ ID NO: 195593 - protein, 15 aa, Artificial Sequence
  Description of Artificial Sequence: Synthetic peptide
  Seed: SPGMMMGMFNMLSTV
SPGFMMHMFNMYSTV

SEQ ID NO: 195594 - protein, 15 aa, Artificial Sequence
  Description of Artificial Sequence: Synthetic peptide
  Seed: SPGMMMGMFNMLSTV
SPGFMMHMGNMASTV

SEQ ID NO: 195595 - protein, 15 aa, Artificial Sequence
  Description of Artificial Sequence: Synthetic peptide
  Seed: SPGMMMGMFNMLSTV
SPGFMMHMGNMFSTV

SEQ ID NO: 195596 - protein, 15 aa, Artificial Sequence
  Description of Artificial Sequence: Synthetic peptide
  Seed: SPGMMMGMFNMLSTV
SPGFMMHMGNMISTV

SEQ ID NO: 195597 - protein, 15 aa, Artificial Sequence
  Description of Artificial Sequence: Synthetic peptide
  Seed: SPGMMMGMFNMLSTV
SPGFMMHMGNMLSTV

SEQ ID NO: 195598 - protein, 15 aa, Artificial Sequence
  Description of Artificial Sequence: Synthetic peptide
  Seed: SPGMMMGMFNMLSTV
SPGFMMHMGNMMSTV

SEQ ID NO: 195599 - protein, 15 aa, Artificial Sequence
  Description of Artificial Sequence: Synthetic peptide
  Seed: SPGMMMGMFNMLSTV
SPGFMMHMGNMVSTV

SEQ ID NO: 195600 - protein, 15 aa, Artificial Sequence
  Description of Artificial Sequence: Synthetic peptide
  Seed: SPGMMMGMFNMLSTV
SPGFMMHMGNMYSTV

SEQ ID NO: 195601 - protein, 15 aa, Artificial Sequence
  Description of Artificial Sequence: Synthetic peptide
  Seed: SPGMMMGMFNMLSTV
SPGFMMHMINMFSTV

SEQ ID NO: 195602 - protein, 15 aa, Artificial Sequence
  Description of Artificial Sequence: Synthetic peptide
  Seed: SPGMMMGMFNMLSTV
SPGFMMHMINMISTV

SEQ ID NO: 195603 - protein, 15 aa, Artificial Sequence
  Description of Artificial Sequence: Synthetic peptide
  Seed: SPGMMMGMFNMLSTV
SPGFMMHMINMLSTV

SEQ ID NO: 195604 - protein, 15 aa, Artificial Sequence
  Description of Artificial Sequence: Synthetic peptide
  Seed: SPGMMMGMFNMLSTV
SPGFMMHMINMMSTV

SEQ ID NO: 195605 - protein, 15 aa, Artificial Sequence
  Description of Artificial Sequence: Synthetic peptide
  Seed: SPGMMMGMFNMLSTV
SPGFMMHMINMVSTV

SEQ ID NO: 195606 - protein, 15 aa, Artificial Sequence
  Description of Artificial Sequence: Synthetic peptide
  Seed: SPGMMMGMFNMLSTV
SPGFMMHMINMYSTV

SEQ ID NO: 195607 - protein, 15 aa, Artificial Sequence
  Description of Artificial Sequence: Synthetic peptide
  Seed: SPGMMMGMFNMLSTV
SPGFMMHMLNMASTV

SEQ ID NO: 195608 - protein, 15 aa, Artificial Sequence
  Description of Artificial Sequence: Synthetic peptide
  Seed: SPGMMMGMFNMLSTV
SPGFMMHMLNMESTV

SEQ ID NO: 195609 - protein, 15 aa, Artificial Sequence
  Description of Artificial Sequence: Synthetic peptide
  Seed: SPGMMMGMFNMLSTV
SPGFMMHMLNMFSTV

SEQ ID NO: 195610 - protein, 15 aa, Artificial Sequence
  Description of Artificial Sequence: Synthetic peptide
  Seed: SPGMMMGMFNMLSTV
SPGFMMHMLNMISTV

SEQ ID NO: 195611 - protein, 15 aa, Artificial Sequence
  Description of Artificial Sequence: Synthetic peptide
  Seed: SPGMMMGMFNMLSTV
SPGFMMHMLNMLSTV

SEQ ID NO: 195612 - protein, 15 aa, Artificial Sequence
  Description of Artificial Sequence: Synthetic peptide
  Seed: SPGMMMGMFNMLSTV
SPGFMMHMLNMMSTV

SEQ ID NO: 195613 - protein, 15 aa, Artificial Sequence
  Description of Artificial Sequence: Synthetic peptide
  Seed: SPGMMMGMFNMLSTV
SPGFMMHMLNMNSTV

SEQ ID NO: 195614 - protein, 15 aa, Artificial Sequence
  Description of Artificial Sequence: Synthetic peptide
  Seed: SPGMMMGMFNMLSTV
SPGFMMHMLNMTSTV

SEQ ID NO: 195615 - protein, 15 aa, Artificial Sequence
  Description of Artificial Sequence: Synthetic peptide
  Seed: SPGMMMGMFNMLSTV
SPGFMMHMLNMVSTV

SEQ ID NO: 195616 - protein, 15 aa, Artificial Sequence
  Description of Artificial Sequence: Synthetic peptide
  Seed: SPGMMMGMFNMLSTV
SPGFMMHMLNMYSTV

SEQ ID NO: 195617 - protein, 15 aa, Artificial Sequence
  Description of Artificial Sequence: Synthetic peptide
  Seed: SPGMMMGMFNMLSTV
SPGFMMHMMNMFSTV

SEQ ID NO: 195618 - protein, 15 aa, Artificial Sequence
  Description of Artificial Sequence: Synthetic peptide
  Seed: SPGMMMGMFNMLSTV
SPGFMMHMMNMISTV

SEQ ID NO: 195619 - protein, 15 aa, Artificial Sequence
  Description of Artificial Sequence: Synthetic peptide
  Seed: SPGMMMGMFNMLSTV
SPGFMMHMMNMLSTV

SEQ ID NO: 195620 - protein, 15 aa, Artificial Sequence
  Description of Artificial Sequence: Synthetic peptide
  Seed: SPGMMMGMFNMLSTV
SPGFMMHMMNMMSTV

SEQ ID NO: 195621 - protein, 15 aa, Artificial Sequence
  Description of Artificial Sequence: Synthetic peptide
  Seed: SPGMMMGMFNMLSTV
SPGFMMHMMNMVSTV

SEQ ID NO: 195622 - protein, 15 aa, Artificial Sequence
  Description of Artificial Sequence: Synthetic peptide
  Seed: SPGMMMGMFNMLSTV
SPGFMMHMMNMYSTV

SEQ ID NO: 195623 - protein, 15 aa, Artificial Sequence
  Description of Artificial Sequence: Synthetic peptide
  Seed: SPGMMMGMFNMLSTV
SPGFMMHMNNMASTV

SEQ ID NO: 195624 - protein, 15 aa, Artificial Sequence
  Description of Artificial Sequence: Synthetic peptide
  Seed: SPGMMMGMFNMLSTV
SPGFMMHMNNMFSTV

SEQ ID NO: 195625 - protein, 15 aa, Artificial Sequence
  Description of Artificial Sequence: Synthetic peptide
  Seed: SPGMMMGMFNMLSTV
SPGFMMHMNNMISTV

SEQ ID NO: 195626 - protein, 15 aa, Artificial Sequence
  Description of Artificial Sequence: Synthetic peptide
  Seed: SPGMMMGMFNMLSTV
SPGFMMHMNNMLSTV

SEQ ID NO: 195627 - protein, 15 aa, Artificial Sequence
  Description of Artificial Sequence: Synthetic peptide
  Seed: SPGMMMGMFNMLSTV
SPGFMMHMNNMMSTV

SEQ ID NO: 195628 - protein, 15 aa, Artificial Sequence
  Description of Artificial Sequence: Synthetic peptide
  Seed: SPGMMMGMFNMLSTV
SPGFMMHMNNMVSTV

SEQ ID NO: 195629 - protein, 15 aa, Artificial Sequence
  Description of Artificial Sequence: Synthetic peptide
  Seed: SPGMMMGMFNMLSTV
SPGFMMHMNNMYSTV

SEQ ID NO: 195630 - protein, 15 aa, Artificial Sequence
  Description of Artificial Sequence: Synthetic peptide
  Seed: SPGMMMGMFNMLSTV
SPGFMMHMPNMFSTV

SEQ ID NO: 195631 - protein, 15 aa, Artificial Sequence
  Description of Artificial Sequence: Synthetic peptide
  Seed: SPGMMMGMFNMLSTV
SPGFMMHMPNMISTV

SEQ ID NO: 195632 - protein, 15 aa, Artificial Sequence
  Description of Artificial Sequence: Synthetic peptide
  Seed: SPGMMMGMFNMLSTV
SPGFMMHMPNMLSTV

SEQ ID NO: 195633 - protein, 15 aa, Artificial Sequence
  Description of Artificial Sequence: Synthetic peptide
  Seed: SPGMMMGMFNMLSTV
SPGFMMHMPNMMSTV

SEQ ID NO: 195634 - protein, 15 aa, Artificial Sequence
  Description of Artificial Sequence: Synthetic peptide
  Seed: SPGMMMGMFNMLSTV
SPGFMMHMPNMVSTV

SEQ ID NO: 195635 - protein, 15 aa, Artificial Sequence
  Description of Artificial Sequence: Synthetic peptide
  Seed: SPGMMMGMFNMLSTV
SPGFMMHMPNMYSTV

SEQ ID NO: 195636 - protein, 15 aa, Artificial Sequence
  Description of Artificial Sequence: Synthetic peptide
  Seed: SPGMMMGMFNMLSTV
SPGFMMHMSNMASTV

SEQ ID NO: 195637 - protein, 15 aa, Artificial Sequence
  Description of Artificial Sequence: Synthetic peptide
  Seed: SPGMMMGMFNMLSTV
SPGFMMHMSNMFSTV

SEQ ID NO: 195638 - protein, 15 aa, Artificial Sequence
  Description of Artificial Sequence: Synthetic peptide
  Seed: SPGMMMGMFNMLSTV
SPGFMMHMSNMISTV

SEQ ID NO: 195639 - protein, 15 aa, Artificial Sequence
  Description of Artificial Sequence: Synthetic peptide
  Seed: SPGMMMGMFNMLSTV
SPGFMMHMSNMLSTV

SEQ ID NO: 195640 - protein, 15 aa, Artificial Sequence
  Description of Artificial Sequence: Synthetic peptide
  Seed: SPGMMMGMFNMLSTV
SPGFMMHMSNMMSTV

SEQ ID NO: 195641 - protein, 15 aa, Artificial Sequence
  Description of Artificial Sequence: Synthetic peptide
  Seed: SPGMMMGMFNMLSTV
SPGFMMHMSNMSSTV

SEQ ID NO: 195642 - protein, 15 aa, Artificial Sequence
  Description of Artificial Sequence: Synthetic peptide
  Seed: SPGMMMGMFNMLSTV
SPGFMMHMSNMTSTV

SEQ ID NO: 195643 - protein, 15 aa, Artificial Sequence
  Description of Artificial Sequence: Synthetic peptide
  Seed: SPGMMMGMFNMLSTV
SPGFMMHMSNMVSTV

SEQ ID NO: 195644 - protein, 15 aa, Artificial Sequence
  Description of Artificial Sequence: Synthetic peptide
  Seed: SPGMMMGMFNMLSTV
SPGFMMHMSNMYSTV

SEQ ID NO: 195645 - protein, 15 aa, Artificial Sequence
  Description of Artificial Sequence: Synthetic peptide
  Seed: SPGMMMGMFNMLSTV
SPGFMMHMTNMFSTV

SEQ ID NO: 195646 - protein, 15 aa, Artificial Sequence
  Description of Artificial Sequence: Synthetic peptide
  Seed: SPGMMMGMFNMLSTV
SPGFMMHMTNMISTV

SEQ ID NO: 195647 - protein, 15 aa, Artificial Sequence
  Description of Artificial Sequence: Synthetic peptide
  Seed: SPGMMMGMFNMLSTV
SPGFMMHMTNMLSTV

SEQ ID NO: 195648 - protein, 15 aa, Artificial Sequence
  Description of Artificial Sequence: Synthetic peptide
  Seed: SPGMMMGMFNMLSTV
SPGFMMHMTNMMSTV

SEQ ID NO: 195649 - protein, 15 aa, Artificial Sequence
  Description of Artificial Sequence: Synthetic peptide
  Seed: SPGMMMGMFNMLSTV
SPGFMMHMTNMVSTV

SEQ ID NO: 195650 - protein, 15 aa, Artificial Sequence
  Description of Artificial Sequence: Synthetic peptide
  Seed: SPGMMMGMFNMLSTV
SPGFMMHMTNMYSTV

SEQ ID NO: 195651 - protein, 15 aa, Artificial Sequence
  Description of Artificial Sequence: Synthetic peptide
  Seed: SPGMMMGMFNMLSTV
SPGFMMHMVNMFSTV

SEQ ID NO: 195652 - protein, 15 aa, Artificial Sequence
  Description of Artificial Sequence: Synthetic peptide
  Seed: SPGMMMGMFNMLSTV
SPGFMMHMVNMISTV

SEQ ID NO: 195653 - protein, 15 aa, Artificial Sequence
  Description of Artificial Sequence: Synthetic peptide
  Seed: SPGMMMGMFNMLSTV
SPGFMMHMVNMLSTV

SEQ ID NO: 195654 - protein, 15 aa, Artificial Sequence
  Description of Artificial Sequence: Synthetic peptide
  Seed: SPGMMMGMFNMLSTV
SPGFMMHMVNMMSTV

SEQ ID NO: 195655 - protein, 15 aa, Artificial Sequence
  Description of Artificial Sequence: Synthetic peptide
  Seed: SPGMMMGMFNMLSTV
SPGFMMHMVNMVSTV

SEQ ID NO: 195656 - protein, 15 aa, Artificial Sequence
  Description of Artificial Sequence: Synthetic peptide
  Seed: SPGMMMGMFNMLSTV
SPGFMMHMVNMYSTV

SEQ ID NO: 195657 - protein, 15 aa, Artificial Sequence
  Description of Artificial Sequence: Synthetic peptide
  Seed: SPGMMMGMFNMLSTV
SPGFMMHMWNMASTV

SEQ ID NO: 195658 - protein, 15 aa, Artificial Sequence
  Description of Artificial Sequence: Synthetic peptide
  Seed: SPGMMMGMFNMLSTV
SPGFMMHMWNMESTV

SEQ ID NO: 195659 - protein, 15 aa, Artificial Sequence
  Description of Artificial Sequence: Synthetic peptide
  Seed: SPGMMMGMFNMLSTV
SPGFMMHMWNMFSTV

SEQ ID NO: 195660 - protein, 15 aa, Artificial Sequence
  Description of Artificial Sequence: Synthetic peptide
  Seed: SPGMMMGMFNMLSTV
SPGFMMHMWNMISTV

SEQ ID NO: 195661 - protein, 15 aa, Artificial Sequence
  Description of Artificial Sequence: Synthetic peptide
  Seed: SPGMMMGMFNMLSTV
SPGFMMHMWNMLSTV

SEQ ID NO: 195662 - protein, 15 aa, Artificial Sequence
  Description of Artificial Sequence: Synthetic peptide
  Seed: SPGMMMGMFNMLSTV
SPGFMMHMWNMMSTV

SEQ ID NO: 195663 - protein, 15 aa, Artificial Sequence
  Description of Artificial Sequence: Synthetic peptide
  Seed: SPGMMMGMFNMLSTV
SPGFMMHMWNMTSTV

SEQ ID NO: 195664 - protein, 15 aa, Artificial Sequence
  Description of Artificial Sequence: Synthetic peptide
  Seed: SPGMMMGMFNMLSTV
SPGFMMHMWNMVSTV

SEQ ID NO: 195665 - protein, 15 aa, Artificial Sequence
  Description of Artificial Sequence: Synthetic peptide
  Seed: SPGMMMGMFNMLSTV
SPGFMMHMWNMYSTV

SEQ ID NO: 195666 - protein, 15 aa, Artificial Sequence
  Description of Artificial Sequence: Synthetic peptide
  Seed: SPGMMMGMFNMLSTV
SPGFMMHMYNMASTV

SEQ ID NO: 195667 - protein, 15 aa, Artificial Sequence
  Description of Artificial Sequence: Synthetic peptide
  Seed: SPGMMMGMFNMLSTV
SPGFMMHMYNMESTV

SEQ ID NO: 195668 - protein, 15 aa, Artificial Sequence
  Description of Artificial Sequence: Synthetic peptide
  Seed: SPGMMMGMFNMLSTV
SPGFMMHMYNMFSTV

SEQ ID NO: 195669 - protein, 15 aa, Artificial Sequence
  Description of Artificial Sequence: Synthetic peptide
  Seed: SPGMMMGMFNMLSTV
SPGFMMHMYNMISTV

SEQ ID NO: 195670 - protein, 15 aa, Artificial Sequence
  Description of Artificial Sequence: Synthetic peptide
  Seed: SPGMMMGMFNMLSTV
SPGFMMHMYNMLSTV

SEQ ID NO: 195671 - protein, 15 aa, Artificial Sequence
  Description of Artificial Sequence: Synthetic peptide
  Seed: SPGMMMGMFNMLSTV
SPGFMMHMYNMMSTV

SEQ ID NO: 195672 - protein, 15 aa, Artificial Sequence
  Description of Artificial Sequence: Synthetic peptide
  Seed: SPGMMMGMFNMLSTV
SPGFMMHMYNMVSTV

SEQ ID NO: 195673 - protein, 15 aa, Artificial Sequence
  Description of Artificial Sequence: Synthetic peptide
  Seed: SPGMMMGMFNMLSTV
SPGFMMHMYNMYSTV

SEQ ID NO: 195674 - protein, 15 aa, Artificial Sequence
  Description of Artificial Sequence: Synthetic peptide
  Seed: SPGMMMGMFNMLSTV
SPGFMMIMANMASTV

SEQ ID NO: 195675 - protein, 15 aa, Artificial Sequence
  Description of Artificial Sequence: Synthetic peptide
  Seed: SPGMMMGMFNMLSTV
SPGFMMIMANMFSTV

SEQ ID NO: 195676 - protein, 15 aa, Artificial Sequence
  Description of Artificial Sequence: Synthetic peptide
  Seed: SPGMMMGMFNMLSTV
SPGFMMIMANMGSTV

SEQ ID NO: 195677 - protein, 15 aa, Artificial Sequence
  Description of Artificial Sequence: Synthetic peptide
  Seed: SPGMMMGMFNMLSTV
SPGFMMIMANMHSTV

SEQ ID NO: 195678 - protein, 15 aa, Artificial Sequence
  Description of Artificial Sequence: Synthetic peptide
  Seed: SPGMMMGMFNMLSTV
SPGFMMIMANMISTV

SEQ ID NO: 195679 - protein, 15 aa, Artificial Sequence
  Description of Artificial Sequence: Synthetic peptide
  Seed: SPGMMMGMFNMLSTV
SPGFMMIMANMLSTV

SEQ ID NO: 195680 - protein, 15 aa, Artificial Sequence
  Description of Artificial Sequence: Synthetic peptide
  Seed: SPGMMMGMFNMLSTV
SPGFMMIMANMMSTV

SEQ ID NO: 195681 - protein, 15 aa, Artificial Sequence
  Description of Artificial Sequence: Synthetic peptide
  Seed: SPGMMMGMFNMLSTV
SPGFMMIMANMNSTV

SEQ ID NO: 195682 - protein, 15 aa, Artificial Sequence
  Description of Artificial Sequence: Synthetic peptide
  Seed: SPGMMMGMFNMLSTV
SPGFMMIMANMRSTV

SEQ ID NO: 195683 - protein, 15 aa, Artificial Sequence
  Description of Artificial Sequence: Synthetic peptide
  Seed: SPGMMMGMFNMLSTV
SPGFMMIMANMSSTV

SEQ ID NO: 195684 - protein, 15 aa, Artificial Sequence
  Description of Artificial Sequence: Synthetic peptide
  Seed: SPGMMMGMFNMLSTV
SPGFMMIMANMTSTV

SEQ ID NO: 195685 - protein, 15 aa, Artificial Sequence
  Description of Artificial Sequence: Synthetic peptide
  Seed: SPGMMMGMFNMLSTV
SPGFMMIMANMVSTV

SEQ ID NO: 195686 - protein, 15 aa, Artificial Sequence
  Description of Artificial Sequence: Synthetic peptide
  Seed: SPGMMMGMFNMLSTV
SPGFMMIMANMYSTV

SEQ ID NO: 195687 - protein, 15 aa, Artificial Sequence
  Description of Artificial Sequence: Synthetic peptide
  Seed: SPGMMMGMFNMLSTV
SPGFMMIMDNMASTV

SEQ ID NO: 195688 - protein, 15 aa, Artificial Sequence
  Description of Artificial Sequence: Synthetic peptide
  Seed: SPGMMMGMFNMLSTV
SPGFMMIMDNMISTV

SEQ ID NO: 195689 - protein, 15 aa, Artificial Sequence
  Description of Artificial Sequence: Synthetic peptide
  Seed: SPGMMMGMFNMLSTV
SPGFMMIMDNMVSTV

SEQ ID NO: 195690 - protein, 15 aa, Artificial Sequence
  Description of Artificial Sequence: Synthetic peptide
  Seed: SPGMMMGMFNMLSTV
SPGFMMIMFNMASTV

SEQ ID NO: 195691 - protein, 15 aa, Artificial Sequence
  Description of Artificial Sequence: Synthetic peptide
  Seed: SPGMMMGMFNMLSTV
SPGFMMIMFNMDSTV

SEQ ID NO: 195692 - protein, 15 aa, Artificial Sequence
  Description of Artificial Sequence: Synthetic peptide
  Seed: SPGMMMGMFNMLSTV
SPGFMMIMFNMESTV

SEQ ID NO: 195693 - protein, 15 aa, Artificial Sequence
  Description of Artificial Sequence: Synthetic peptide
  Seed: SPGMMMGMFNMLSTV
SPGFMMIMFNMFSTV

SEQ ID NO: 195694 - protein, 15 aa, Artificial Sequence
  Description of Artificial Sequence: Synthetic peptide
  Seed: SPGMMMGMFNMLSTV
SPGFMMIMFNMHSTV

SEQ ID NO: 195695 - protein, 15 aa, Artificial Sequence
  Description of Artificial Sequence: Synthetic peptide
  Seed: SPGMMMGMFNMLSTV
SPGFMMIMFNMISTV

SEQ ID NO: 195696 - protein, 15 aa, Artificial Sequence
  Description of Artificial Sequence: Synthetic peptide
  Seed: SPGMMMGMFNMLSTV
SPGFMMIMFNMLSTV

SEQ ID NO: 195697 - protein, 15 aa, Artificial Sequence
  Description of Artificial Sequence: Synthetic peptide
  Seed: SPGMMMGMFNMLSTV
SPGFMMIMFNMMSTV

SEQ ID NO: 195698 - protein, 15 aa, Artificial Sequence
  Description of Artificial Sequence: Synthetic peptide
  Seed: SPGMMMGMFNMLSTV
SPGFMMIMFNMNSTV

SEQ ID NO: 195699 - protein, 15 aa, Artificial Sequence
  Description of Artificial Sequence: Synthetic peptide
  Seed: SPGMMMGMFNMLSTV
SPGFMMIMFNMPSTV

SEQ ID NO: 195700 - protein, 15 aa, Artificial Sequence
  Description of Artificial Sequence: Synthetic peptide
  Seed: SPGMMMGMFNMLSTV
SPGFMMIMFNMQSTV

SEQ ID NO: 195701 - protein, 15 aa, Artificial Sequence
  Description of Artificial Sequence: Synthetic peptide
  Seed: SPGMMMGMFNMLSTV
SPGFMMIMFNMSSTV

SEQ ID NO: 195702 - protein, 15 aa, Artificial Sequence
  Description of Artificial Sequence: Synthetic peptide
  Seed: SPGMMMGMFNMLSTV
SPGFMMIMFNMTSTV

SEQ ID NO: 195703 - protein, 15 aa, Artificial Sequence
  Description of Artificial Sequence: Synthetic peptide
  Seed: SPGMMMGMFNMLSTV
SPGFMMIMFNMVSTV

SEQ ID NO: 195704 - protein, 15 aa, Artificial Sequence
  Description of Artificial Sequence: Synthetic peptide
  Seed: SPGMMMGMFNMLSTV
SPGFMMIMFNMYSTV

SEQ ID NO: 195705 - protein, 15 aa, Artificial Sequence
  Description of Artificial Sequence: Synthetic peptide
  Seed: SPGMMMGMFNMLSTV
SPGFMMIMGNMASTV

SEQ ID NO: 195706 - protein, 15 aa, Artificial Sequence
  Description of Artificial Sequence: Synthetic peptide
  Seed: SPGMMMGMFNMLSTV
SPGFMMIMGNMFSTV

SEQ ID NO: 195707 - protein, 15 aa, Artificial Sequence
  Description of Artificial Sequence: Synthetic peptide
  Seed: SPGMMMGMFNMLSTV
SPGFMMIMGNMISTV

SEQ ID NO: 195708 - protein, 15 aa, Artificial Sequence
  Description of Artificial Sequence: Synthetic peptide
  Seed: SPGMMMGMFNMLSTV
SPGFMMIMGNMLSTV

SEQ ID NO: 195709 - protein, 15 aa, Artificial Sequence
  Description of Artificial Sequence: Synthetic peptide
  Seed: SPGMMMGMFNMLSTV
SPGFMMIMGNMMSTV

SEQ ID NO: 195710 - protein, 15 aa, Artificial Sequence
  Description of Artificial Sequence: Synthetic peptide
  Seed: SPGMMMGMFNMLSTV
SPGFMMIMGNMSSTV

SEQ ID NO: 195711 - protein, 15 aa, Artificial Sequence
  Description of Artificial Sequence: Synthetic peptide
  Seed: SPGMMMGMFNMLSTV
SPGFMMIMGNMTSTV

SEQ ID NO: 195712 - protein, 15 aa, Artificial Sequence
  Description of Artificial Sequence: Synthetic peptide
  Seed: SPGMMMGMFNMLSTV
SPGFMMIMGNMVSTV

SEQ ID NO: 195713 - protein, 15 aa, Artificial Sequence
  Description of Artificial Sequence: Synthetic peptide
  Seed: SPGMMMGMFNMLSTV
SPGFMMIMGNMYSTV

SEQ ID NO: 195714 - protein, 15 aa, Artificial Sequence
  Description of Artificial Sequence: Synthetic peptide
  Seed: SPGMMMGMFNMLSTV
SPGFMMIMHNMASTV

SEQ ID NO: 195715 - protein, 15 aa, Artificial Sequence
  Description of Artificial Sequence: Synthetic peptide
  Seed: SPGMMMGMFNMLSTV
SPGFMMIMHNMGSTV

SEQ ID NO: 195716 - protein, 15 aa, Artificial Sequence
  Description of Artificial Sequence: Synthetic peptide
  Seed: SPGMMMGMFNMLSTV
SPGFMMIMHNMHSTV

SEQ ID NO: 195717 - protein, 15 aa, Artificial Sequence
  Description of Artificial Sequence: Synthetic peptide
  Seed: SPGMMMGMFNMLSTV
SPGFMMIMHNMISTV

SEQ ID NO: 195718 - protein, 15 aa, Artificial Sequence
  Description of Artificial Sequence: Synthetic peptide
  Seed: SPGMMMGMFNMLSTV
SPGFMMIMHNMLSTV

SEQ ID NO: 195719 - protein, 15 aa, Artificial Sequence
  Description of Artificial Sequence: Synthetic peptide
  Seed: SPGMMMGMFNMLSTV
SPGFMMIMHNMMSTV

SEQ ID NO: 195720 - protein, 15 aa, Artificial Sequence
  Description of Artificial Sequence: Synthetic peptide
  Seed: SPGMMMGMFNMLSTV
SPGFMMIMHNMSSTV

SEQ ID NO: 195721 - protein, 15 aa, Artificial Sequence
  Description of Artificial Sequence: Synthetic peptide
  Seed: SPGMMMGMFNMLSTV
SPGFMMIMHNMTSTV

SEQ ID NO: 195722 - protein, 15 aa, Artificial Sequence
  Description of Artificial Sequence: Synthetic peptide
  Seed: SPGMMMGMFNMLSTV
SPGFMMIMHNMVSTV

SEQ ID NO: 195723 - protein, 15 aa, Artificial Sequence
  Description of Artificial Sequence: Synthetic peptide
  Seed: SPGMMMGMFNMLSTV
SPGFMMIMHNMYSTV

SEQ ID NO: 195724 - protein, 15 aa, Artificial Sequence
  Description of Artificial Sequence: Synthetic peptide
  Seed: SPGMMMGMFNMLSTV
SPGFMMIMINMVSTV

SEQ ID NO: 195725 - protein, 15 aa, Artificial Sequence
  Description of Artificial Sequence: Synthetic peptide
  Seed: SPGMMMGMFNMLSTV
SPGFMMIMINMYSTV

SEQ ID NO: 195726 - protein, 15 aa, Artificial Sequence
  Description of Artificial Sequence: Synthetic peptide
  Seed: SPGMMMGMFNMLSTV
SPGFMMIMKNMASTV

SEQ ID NO: 195727 - protein, 15 aa, Artificial Sequence
  Description of Artificial Sequence: Synthetic peptide
  Seed: SPGMMMGMFNMLSTV
SPGFMMIMKNMGSTV

SEQ ID NO: 195728 - protein, 15 aa, Artificial Sequence
  Description of Artificial Sequence: Synthetic peptide
  Seed: SPGMMMGMFNMLSTV
SPGFMMIMKNMISTV

SEQ ID NO: 195729 - protein, 15 aa, Artificial Sequence
  Description of Artificial Sequence: Synthetic peptide
  Seed: SPGMMMGMFNMLSTV
SPGFMMIMKNMLSTV

SEQ ID NO: 195730 - protein, 15 aa, Artificial Sequence
  Description of Artificial Sequence: Synthetic peptide
  Seed: SPGMMMGMFNMLSTV
SPGFMMIMKNMMSTV

SEQ ID NO: 195731 - protein, 15 aa, Artificial Sequence
  Description of Artificial Sequence: Synthetic peptide
  Seed: SPGMMMGMFNMLSTV
SPGFMMIMKNMNSTV

SEQ ID NO: 195732 - protein, 15 aa, Artificial Sequence
  Description of Artificial Sequence: Synthetic peptide
  Seed: SPGMMMGMFNMLSTV
SPGFMMIMKNMSSTV

SEQ ID NO: 195733 - protein, 15 aa, Artificial Sequence
  Description of Artificial Sequence: Synthetic peptide
  Seed: SPGMMMGMFNMLSTV
SPGFMMIMKNMTSTV

SEQ ID NO: 195734 - protein, 15 aa, Artificial Sequence
  Description of Artificial Sequence: Synthetic peptide
  Seed: SPGMMMGMFNMLSTV
SPGFMMIMKNMVSTV

SEQ ID NO: 195735 - protein, 15 aa, Artificial Sequence
  Description of Artificial Sequence: Synthetic peptide
  Seed: SPGMMMGMFNMLSTV
SPGFMMIMLNMFSTV

SEQ ID NO: 195736 - protein, 15 aa, Artificial Sequence
  Description of Artificial Sequence: Synthetic peptide
  Seed: SPGMMMGMFNMLSTV
SPGFMMIMLNMYSTV

SEQ ID NO: 195737 - protein, 15 aa, Artificial Sequence
  Description of Artificial Sequence: Synthetic peptide
  Seed: SPGMMMGMFNMLSTV
SPGFMMIMMNMYSTV

SEQ ID NO: 195738 - protein, 15 aa, Artificial Sequence
  Description of Artificial Sequence: Synthetic peptide
  Seed: SPGMMMGMFNMLSTV
SPGFMMIMNNMASTV

SEQ ID NO: 195739 - protein, 15 aa, Artificial Sequence
  Description of Artificial Sequence: Synthetic peptide
  Seed: SPGMMMGMFNMLSTV
SPGFMMIMNNMFSTV

SEQ ID NO: 195740 - protein, 15 aa, Artificial Sequence
  Description of Artificial Sequence: Synthetic peptide
  Seed: SPGMMMGMFNMLSTV
SPGFMMIMNNMGSTV

SEQ ID NO: 195741 - protein, 15 aa, Artificial Sequence
  Description of Artificial Sequence: Synthetic peptide
  Seed: SPGMMMGMFNMLSTV
SPGFMMIMNNMISTV

SEQ ID NO: 195742 - protein, 15 aa, Artificial Sequence
  Description of Artificial Sequence: Synthetic peptide
  Seed: SPGMMMGMFNMLSTV
SPGFMMIMNNMLSTV

SEQ ID NO: 195743 - protein, 15 aa, Artificial Sequence
  Description of Artificial Sequence: Synthetic peptide
  Seed: SPGMMMGMFNMLSTV
SPGFMMIMNNMMSTV

SEQ ID NO: 195744 - protein, 15 aa, Artificial Sequence
  Description of Artificial Sequence: Synthetic peptide
  Seed: SPGMMMGMFNMLSTV
SPGFMMIMNNMNSTV

SEQ ID NO: 195745 - protein, 15 aa, Artificial Sequence
  Description of Artificial Sequence: Synthetic peptide
  Seed: SPGMMMGMFNMLSTV
SPGFMMIMNNMQSTV

SEQ ID NO: 195746 - protein, 15 aa, Artificial Sequence
  Description of Artificial Sequence: Synthetic peptide
  Seed: SPGMMMGMFNMLSTV
SPGFMMIMNNMRSTV

SEQ ID NO: 195747 - protein, 15 aa, Artificial Sequence
  Description of Artificial Sequence: Synthetic peptide
  Seed: SPGMMMGMFNMLSTV
SPGFMMIMNNMSSTV

SEQ ID NO: 195748 - protein, 15 aa, Artificial Sequence
  Description of Artificial Sequence: Synthetic peptide
  Seed: SPGMMMGMFNMLSTV
SPGFMMIMNNMTSTV

SEQ ID NO: 195749 - protein, 15 aa, Artificial Sequence
  Description of Artificial Sequence: Synthetic peptide
  Seed: SPGMMMGMFNMLSTV
SPGFMMIMNNMVSTV

SEQ ID NO: 195750 - protein, 15 aa, Artificial Sequence
  Description of Artificial Sequence: Synthetic peptide
  Seed: SPGMMMGMFNMLSTV
SPGFMMIMNNMYSTV

SEQ ID NO: 195751 - protein, 15 aa, Artificial Sequence
  Description of Artificial Sequence: Synthetic peptide
  Seed: SPGMMMGMFNMLSTV
SPGFMMIMPNMASTV

SEQ ID NO: 195752 - protein, 15 aa, Artificial Sequence
  Description of Artificial Sequence: Synthetic peptide
  Seed: SPGMMMGMFNMLSTV
SPGFMMIMPNMFSTV

SEQ ID NO: 195753 - protein, 15 aa, Artificial Sequence
  Description of Artificial Sequence: Synthetic peptide
  Seed: SPGMMMGMFNMLSTV
SPGFMMIMPNMGSTV

SEQ ID NO: 195754 - protein, 15 aa, Artificial Sequence
  Description of Artificial Sequence: Synthetic peptide
  Seed: SPGMMMGMFNMLSTV
SPGFMMIMPNMISTV

SEQ ID NO: 195755 - protein, 15 aa, Artificial Sequence
  Description of Artificial Sequence: Synthetic peptide
  Seed: SPGMMMGMFNMLSTV
SPGFMMIMPNMLSTV

SEQ ID NO: 195756 - protein, 15 aa, Artificial Sequence
  Description of Artificial Sequence: Synthetic peptide
  Seed: SPGMMMGMFNMLSTV
SPGFMMIMPNMMSTV

SEQ ID NO: 195757 - protein, 15 aa, Artificial Sequence
  Description of Artificial Sequence: Synthetic peptide
  Seed: SPGMMMGMFNMLSTV
SPGFMMIMPNMRSTV

SEQ ID NO: 195758 - protein, 15 aa, Artificial Sequence
  Description of Artificial Sequence: Synthetic peptide
  Seed: SPGMMMGMFNMLSTV
SPGFMMIMPNMSSTV

SEQ ID NO: 195759 - protein, 15 aa, Artificial Sequence
  Description of Artificial Sequence: Synthetic peptide
  Seed: SPGMMMGMFNMLSTV
SPGFMMIMPNMTSTV

SEQ ID NO: 195760 - protein, 15 aa, Artificial Sequence
  Description of Artificial Sequence: Synthetic peptide
  Seed: SPGMMMGMFNMLSTV
SPGFMMIMPNMVSTV

SEQ ID NO: 195761 - protein, 15 aa, Artificial Sequence
  Description of Artificial Sequence: Synthetic peptide
  Seed: SPGMMMGMFNMLSTV
SPGFMMIMPNMYSTV

SEQ ID NO: 195762 - protein, 15 aa, Artificial Sequence
  Description of Artificial Sequence: Synthetic peptide
  Seed: SPGMMMGMFNMLSTV
SPGFMMIMQNMISTV

SEQ ID NO: 195763 - protein, 15 aa, Artificial Sequence
  Description of Artificial Sequence: Synthetic peptide
  Seed: SPGMMMGMFNMLSTV
SPGFMMIMQNMVSTV

SEQ ID NO: 195764 - protein, 15 aa, Artificial Sequence
  Description of Artificial Sequence: Synthetic peptide
  Seed: SPGMMMGMFNMLSTV
SPGFMMIMRNMASTV

SEQ ID NO: 195765 - protein, 15 aa, Artificial Sequence
  Description of Artificial Sequence: Synthetic peptide
  Seed: SPGMMMGMFNMLSTV
SPGFMMIMRNMGSTV

SEQ ID NO: 195766 - protein, 15 aa, Artificial Sequence
  Description of Artificial Sequence: Synthetic peptide
  Seed: SPGMMMGMFNMLSTV
SPGFMMIMRNMHSTV

SEQ ID NO: 195767 - protein, 15 aa, Artificial Sequence
  Description of Artificial Sequence: Synthetic peptide
  Seed: SPGMMMGMFNMLSTV
SPGFMMIMRNMISTV

SEQ ID NO: 195768 - protein, 15 aa, Artificial Sequence
  Description of Artificial Sequence: Synthetic peptide
  Seed: SPGMMMGMFNMLSTV
SPGFMMIMRNMLSTV

SEQ ID NO: 195769 - protein, 15 aa, Artificial Sequence
  Description of Artificial Sequence: Synthetic peptide
  Seed: SPGMMMGMFNMLSTV
SPGFMMIMRNMMSTV

SEQ ID NO: 195770 - protein, 15 aa, Artificial Sequence
  Description of Artificial Sequence: Synthetic peptide
  Seed: SPGMMMGMFNMLSTV
SPGFMMIMRNMNSTV

SEQ ID NO: 195771 - protein, 15 aa, Artificial Sequence
  Description of Artificial Sequence: Synthetic peptide
  Seed: SPGMMMGMFNMLSTV
SPGFMMIMRNMPSTV

SEQ ID NO: 195772 - protein, 15 aa, Artificial Sequence
  Description of Artificial Sequence: Synthetic peptide
  Seed: SPGMMMGMFNMLSTV
SPGFMMIMRNMSSTV

SEQ ID NO: 195773 - protein, 15 aa, Artificial Sequence
  Description of Artificial Sequence: Synthetic peptide
  Seed: SPGMMMGMFNMLSTV
SPGFMMIMRNMTSTV

SEQ ID NO: 195774 - protein, 15 aa, Artificial Sequence
  Description of Artificial Sequence: Synthetic peptide
  Seed: SPGMMMGMFNMLSTV
SPGFMMIMRNMVSTV

SEQ ID NO: 195775 - protein, 15 aa, Artificial Sequence
  Description of Artificial Sequence: Synthetic peptide
  Seed: SPGMMMGMFNMLSTV
SPGFMMIMRNMYSTV

SEQ ID NO: 195776 - protein, 15 aa, Artificial Sequence
  Description of Artificial Sequence: Synthetic peptide
  Seed: SPGMMMGMFNMLSTV
SPGFMMIMSNMASTV

SEQ ID NO: 195777 - protein, 15 aa, Artificial Sequence
  Description of Artificial Sequence: Synthetic peptide
  Seed: SPGMMMGMFNMLSTV
SPGFMMIMSNMFSTV

SEQ ID NO: 195778 - protein, 15 aa, Artificial Sequence
  Description of Artificial Sequence: Synthetic peptide
  Seed: SPGMMMGMFNMLSTV
SPGFMMIMSNMGSTV

SEQ ID NO: 195779 - protein, 15 aa, Artificial Sequence
  Description of Artificial Sequence: Synthetic peptide
  Seed: SPGMMMGMFNMLSTV
SPGFMMIMSNMHSTV

SEQ ID NO: 195780 - protein, 15 aa, Artificial Sequence
  Description of Artificial Sequence: Synthetic peptide
  Seed: SPGMMMGMFNMLSTV
SPGFMMIMSNMISTV

SEQ ID NO: 195781 - protein, 15 aa, Artificial Sequence
  Description of Artificial Sequence: Synthetic peptide
  Seed: SPGMMMGMFNMLSTV
SPGFMMIMSNMLSTV

SEQ ID NO: 195782 - protein, 15 aa, Artificial Sequence
  Description of Artificial Sequence: Synthetic peptide
  Seed: SPGMMMGMFNMLSTV
SPGFMMIMSNMMSTV

SEQ ID NO: 195783 - protein, 15 aa, Artificial Sequence
  Description of Artificial Sequence: Synthetic peptide
  Seed: SPGMMMGMFNMLSTV
SPGFMMIMSNMNSTV

SEQ ID NO: 195784 - protein, 15 aa, Artificial Sequence
  Description of Artificial Sequence: Synthetic peptide
  Seed: SPGMMMGMFNMLSTV
SPGFMMIMSNMRSTV

SEQ ID NO: 195785 - protein, 15 aa, Artificial Sequence
  Description of Artificial Sequence: Synthetic peptide
  Seed: SPGMMMGMFNMLSTV
SPGFMMIMSNMSSTV

SEQ ID NO: 195786 - protein, 15 aa, Artificial Sequence
  Description of Artificial Sequence: Synthetic peptide
  Seed: SPGMMMGMFNMLSTV
SPGFMMIMSNMTSTV

SEQ ID NO: 195787 - protein, 15 aa, Artificial Sequence
  Description of Artificial Sequence: Synthetic peptide
  Seed: SPGMMMGMFNMLSTV
SPGFMMIMSNMVSTV

SEQ ID NO: 195788 - protein, 15 aa, Artificial Sequence
  Description of Artificial Sequence: Synthetic peptide
  Seed: SPGMMMGMFNMLSTV
SPGFMMIMSNMYSTV

SEQ ID NO: 195789 - protein, 15 aa, Artificial Sequence
  Description of Artificial Sequence: Synthetic peptide
  Seed: SPGMMMGMFNMLSTV
SPGFMMIMTNMASTV

SEQ ID NO: 195790 - protein, 15 aa, Artificial Sequence
  Description of Artificial Sequence: Synthetic peptide
  Seed: SPGMMMGMFNMLSTV
SPGFMMIMTNMGSTV

SEQ ID NO: 195791 - protein, 15 aa, Artificial Sequence
  Description of Artificial Sequence: Synthetic peptide
  Seed: SPGMMMGMFNMLSTV
SPGFMMIMTNMHSTV

SEQ ID NO: 195792 - protein, 15 aa, Artificial Sequence
  Description of Artificial Sequence: Synthetic peptide
  Seed: SPGMMMGMFNMLSTV
SPGFMMIMTNMISTV

SEQ ID NO: 195793 - protein, 15 aa, Artificial Sequence
  Description of Artificial Sequence: Synthetic peptide
  Seed: SPGMMMGMFNMLSTV
SPGFMMIMTNMLSTV

SEQ ID NO: 195794 - protein, 15 aa, Artificial Sequence
  Description of Artificial Sequence: Synthetic peptide
  Seed: SPGMMMGMFNMLSTV
SPGFMMIMTNMMSTV

SEQ ID NO: 195795 - protein, 15 aa, Artificial Sequence
  Description of Artificial Sequence: Synthetic peptide
  Seed: SPGMMMGMFNMLSTV
SPGFMMIMTNMNSTV

SEQ ID NO: 195796 - protein, 15 aa, Artificial Sequence
  Description of Artificial Sequence: Synthetic peptide
  Seed: SPGMMMGMFNMLSTV
SPGFMMIMTNMRSTV

SEQ ID NO: 195797 - protein, 15 aa, Artificial Sequence
  Description of Artificial Sequence: Synthetic peptide
  Seed: SPGMMMGMFNMLSTV
SPGFMMIMTNMSSTV

SEQ ID NO: 195798 - protein, 15 aa, Artificial Sequence
  Description of Artificial Sequence: Synthetic peptide
  Seed: SPGMMMGMFNMLSTV
SPGFMMIMTNMTSTV

SEQ ID NO: 195799 - protein, 15 aa, Artificial Sequence
  Description of Artificial Sequence: Synthetic peptide
  Seed: SPGMMMGMFNMLSTV
SPGFMMIMTNMVSTV

SEQ ID NO: 195800 - protein, 15 aa, Artificial Sequence
  Description of Artificial Sequence: Synthetic peptide
  Seed: SPGMMMGMFNMLSTV
SPGFMMIMTNMYSTV

SEQ ID NO: 195801 - protein, 15 aa, Artificial Sequence
  Description of Artificial Sequence: Synthetic peptide
  Seed: SPGMMMGMFNMLSTV
SPGFMMIMVNMVSTV

SEQ ID NO: 195802 - protein, 15 aa, Artificial Sequence
  Description of Artificial Sequence: Synthetic peptide
  Seed: SPGMMMGMFNMLSTV
SPGFMMIMWNMFSTV

SEQ ID NO: 195803 - protein, 15 aa, Artificial Sequence
  Description of Artificial Sequence: Synthetic peptide
  Seed: SPGMMMGMFNMLSTV
SPGFMMIMWNMISTV

SEQ ID NO: 195804 - protein, 15 aa, Artificial Sequence
  Description of Artificial Sequence: Synthetic peptide
  Seed: SPGMMMGMFNMLSTV
SPGFMMIMWNMLSTV

SEQ ID NO: 195805 - protein, 15 aa, Artificial Sequence
  Description of Artificial Sequence: Synthetic peptide
  Seed: SPGMMMGMFNMLSTV
SPGFMMIMWNMMSTV

SEQ ID NO: 195806 - protein, 15 aa, Artificial Sequence
  Description of Artificial Sequence: Synthetic peptide
  Seed: SPGMMMGMFNMLSTV
SPGFMMIMWNMVSTV

SEQ ID NO: 195807 - protein, 15 aa, Artificial Sequence
  Description of Artificial Sequence: Synthetic peptide
  Seed: SPGMMMGMFNMLSTV
SPGFMMIMWNMYSTV

SEQ ID NO: 195808 - protein, 15 aa, Artificial Sequence
  Description of Artificial Sequence: Synthetic peptide
  Seed: SPGMMMGMFNMLSTV
SPGFMMIMYNMASTV

SEQ ID NO: 195809 - protein, 15 aa, Artificial Sequence
  Description of Artificial Sequence: Synthetic peptide
  Seed: SPGMMMGMFNMLSTV
SPGFMMIMYNMDSTV

SEQ ID NO: 195810 - protein, 15 aa, Artificial Sequence
  Description of Artificial Sequence: Synthetic peptide
  Seed: SPGMMMGMFNMLSTV
SPGFMMIMYNMESTV

SEQ ID NO: 195811 - protein, 15 aa, Artificial Sequence
  Description of Artificial Sequence: Synthetic peptide
  Seed: SPGMMMGMFNMLSTV
SPGFMMIMYNMFSTV

SEQ ID NO: 195812 - protein, 15 aa, Artificial Sequence
  Description of Artificial Sequence: Synthetic peptide
  Seed: SPGMMMGMFNMLSTV
SPGFMMIMYNMISTV

SEQ ID NO: 195813 - protein, 15 aa, Artificial Sequence
  Description of Artificial Sequence: Synthetic peptide
  Seed: SPGMMMGMFNMLSTV
SPGFMMIMYNMLSTV

SEQ ID NO: 195814 - protein, 15 aa, Artificial Sequence
  Description of Artificial Sequence: Synthetic peptide
  Seed: SPGMMMGMFNMLSTV
SPGFMMIMYNMMSTV

SEQ ID NO: 195815 - protein, 15 aa, Artificial Sequence
  Description of Artificial Sequence: Synthetic peptide
  Seed: SPGMMMGMFNMLSTV
SPGFMMIMYNMNSTV

SEQ ID NO: 195816 - protein, 15 aa, Artificial Sequence
  Description of Artificial Sequence: Synthetic peptide
  Seed: SPGMMMGMFNMLSTV
SPGFMMIMYNMVSTV

SEQ ID NO: 195817 - protein, 15 aa, Artificial Sequence
  Description of Artificial Sequence: Synthetic peptide
  Seed: SPGMMMGMFNMLSTV
SPGFMMIMYNMYSTV

SEQ ID NO: 195818 - protein, 15 aa, Artificial Sequence
  Description of Artificial Sequence: Synthetic peptide
  Seed: SPGMMMGMFNMLSTV
SPGFMMKMANMISTV

SEQ ID NO: 195819 - protein, 15 aa, Artificial Sequence
  Description of Artificial Sequence: Synthetic peptide
  Seed: SPGMMMGMFNMLSTV
SPGFMMKMANMLSTV

SEQ ID NO: 195820 - protein, 15 aa, Artificial Sequence
  Description of Artificial Sequence: Synthetic peptide
  Seed: SPGMMMGMFNMLSTV
SPGFMMKMANMVSTV

SEQ ID NO: 195821 - protein, 15 aa, Artificial Sequence
  Description of Artificial Sequence: Synthetic peptide
  Seed: SPGMMMGMFNMLSTV
SPGFMMKMFNMASTV

SEQ ID NO: 195822 - protein, 15 aa, Artificial Sequence
  Description of Artificial Sequence: Synthetic peptide
  Seed: SPGMMMGMFNMLSTV
SPGFMMKMFNMDSTV

SEQ ID NO: 195823 - protein, 15 aa, Artificial Sequence
  Description of Artificial Sequence: Synthetic peptide
  Seed: SPGMMMGMFNMLSTV
SPGFMMKMFNMESTV

SEQ ID NO: 195824 - protein, 15 aa, Artificial Sequence
  Description of Artificial Sequence: Synthetic peptide
  Seed: SPGMMMGMFNMLSTV
SPGFMMKMFNMFSTV

SEQ ID NO: 195825 - protein, 15 aa, Artificial Sequence
  Description of Artificial Sequence: Synthetic peptide
  Seed: SPGMMMGMFNMLSTV
SPGFMMKMFNMISTV

SEQ ID NO: 195826 - protein, 15 aa, Artificial Sequence
  Description of Artificial Sequence: Synthetic peptide
  Seed: SPGMMMGMFNMLSTV
SPGFMMKMFNMLSTV

SEQ ID NO: 195827 - protein, 15 aa, Artificial Sequence
  Description of Artificial Sequence: Synthetic peptide
  Seed: SPGMMMGMFNMLSTV
SPGFMMKMFNMMSTV

SEQ ID NO: 195828 - protein, 15 aa, Artificial Sequence
  Description of Artificial Sequence: Synthetic peptide
  Seed: SPGMMMGMFNMLSTV
SPGFMMKMFNMNSTV

SEQ ID NO: 195829 - protein, 15 aa, Artificial Sequence
  Description of Artificial Sequence: Synthetic peptide
  Seed: SPGMMMGMFNMLSTV
SPGFMMKMFNMSSTV

SEQ ID NO: 195830 - protein, 15 aa, Artificial Sequence
  Description of Artificial Sequence: Synthetic peptide
  Seed: SPGMMMGMFNMLSTV
SPGFMMKMFNMTSTV

SEQ ID NO: 195831 - protein, 15 aa, Artificial Sequence
  Description of Artificial Sequence: Synthetic peptide
  Seed: SPGMMMGMFNMLSTV
SPGFMMKMFNMVSTV

SEQ ID NO: 195832 - protein, 15 aa, Artificial Sequence
  Description of Artificial Sequence: Synthetic peptide
  Seed: SPGMMMGMFNMLSTV
SPGFMMKMFNMYSTV

SEQ ID NO: 195833 - protein, 15 aa, Artificial Sequence
  Description of Artificial Sequence: Synthetic peptide
  Seed: SPGMMMGMFNMLSTV
SPGFMMKMGNMISTV

SEQ ID NO: 195834 - protein, 15 aa, Artificial Sequence
  Description of Artificial Sequence: Synthetic peptide
  Seed: SPGMMMGMFNMLSTV
SPGFMMKMINMFSTV

SEQ ID NO: 195835 - protein, 15 aa, Artificial Sequence
  Description of Artificial Sequence: Synthetic peptide
  Seed: SPGMMMGMFNMLSTV
SPGFMMKMINMLSTV

SEQ ID NO: 195836 - protein, 15 aa, Artificial Sequence
  Description of Artificial Sequence: Synthetic peptide
  Seed: SPGMMMGMFNMLSTV
SPGFMMKMLNMFSTV

SEQ ID NO: 195837 - protein, 15 aa, Artificial Sequence
  Description of Artificial Sequence: Synthetic peptide
  Seed: SPGMMMGMFNMLSTV
SPGFMMKMLNMISTV

SEQ ID NO: 195838 - protein, 15 aa, Artificial Sequence
  Description of Artificial Sequence: Synthetic peptide
  Seed: SPGMMMGMFNMLSTV
SPGFMMKMLNMLSTV

SEQ ID NO: 195839 - protein, 15 aa, Artificial Sequence
  Description of Artificial Sequence: Synthetic peptide
  Seed: SPGMMMGMFNMLSTV
SPGFMMKMLNMVSTV

SEQ ID NO: 195840 - protein, 15 aa, Artificial Sequence
  Description of Artificial Sequence: Synthetic peptide
  Seed: SPGMMMGMFNMLSTV
SPGFMMKMMNMLSTV

SEQ ID NO: 195841 - protein, 15 aa, Artificial Sequence
  Description of Artificial Sequence: Synthetic peptide
  Seed: SPGMMMGMFNMLSTV
SPGFMMKMNNMASTV

SEQ ID NO: 195842 - protein, 15 aa, Artificial Sequence
  Description of Artificial Sequence: Synthetic peptide
  Seed: SPGMMMGMFNMLSTV
SPGFMMKMNNMFSTV

SEQ ID NO: 195843 - protein, 15 aa, Artificial Sequence
  Description of Artificial Sequence: Synthetic peptide
  Seed: SPGMMMGMFNMLSTV
SPGFMMKMNNMISTV

SEQ ID NO: 195844 - protein, 15 aa, Artificial Sequence
  Description of Artificial Sequence: Synthetic peptide
  Seed: SPGMMMGMFNMLSTV
SPGFMMKMNNMLSTV

SEQ ID NO: 195845 - protein, 15 aa, Artificial Sequence
  Description of Artificial Sequence: Synthetic peptide
  Seed: SPGMMMGMFNMLSTV
SPGFMMKMNNMMSTV

SEQ ID NO: 195846 - protein, 15 aa, Artificial Sequence
  Description of Artificial Sequence: Synthetic peptide
  Seed: SPGMMMGMFNMLSTV
SPGFMMKMNNMVSTV

SEQ ID NO: 195847 - protein, 15 aa, Artificial Sequence
  Description of Artificial Sequence: Synthetic peptide
  Seed: SPGMMMGMFNMLSTV
SPGFMMKMNNMYSTV

SEQ ID NO: 195848 - protein, 15 aa, Artificial Sequence
  Description of Artificial Sequence: Synthetic peptide
  Seed: SPGMMMGMFNMLSTV
SPGFMMKMPNMISTV

SEQ ID NO: 195849 - protein, 15 aa, Artificial Sequence
  Description of Artificial Sequence: Synthetic peptide
  Seed: SPGMMMGMFNMLSTV
SPGFMMKMSNMFSTV

SEQ ID NO: 195850 - protein, 15 aa, Artificial Sequence
  Description of Artificial Sequence: Synthetic peptide
  Seed: SPGMMMGMFNMLSTV
SPGFMMKMSNMISTV

SEQ ID NO: 195851 - protein, 15 aa, Artificial Sequence
  Description of Artificial Sequence: Synthetic peptide
  Seed: SPGMMMGMFNMLSTV
SPGFMMKMSNMLSTV

SEQ ID NO: 195852 - protein, 15 aa, Artificial Sequence
  Description of Artificial Sequence: Synthetic peptide
  Seed: SPGMMMGMFNMLSTV
SPGFMMKMSNMMSTV

SEQ ID NO: 195853 - protein, 15 aa, Artificial Sequence
  Description of Artificial Sequence: Synthetic peptide
  Seed: SPGMMMGMFNMLSTV
SPGFMMKMSNMVSTV

SEQ ID NO: 195854 - protein, 15 aa, Artificial Sequence
  Description of Artificial Sequence: Synthetic peptide
  Seed: SPGMMMGMFNMLSTV
SPGFMMKMTNMISTV

SEQ ID NO: 195855 - protein, 15 aa, Artificial Sequence
  Description of Artificial Sequence: Synthetic peptide
  Seed: SPGMMMGMFNMLSTV
SPGFMMKMTNMLSTV

SEQ ID NO: 195856 - protein, 15 aa, Artificial Sequence
  Description of Artificial Sequence: Synthetic peptide
  Seed: SPGMMMGMFNMLSTV
SPGFMMKMWNMFSTV

SEQ ID NO: 195857 - protein, 15 aa, Artificial Sequence
  Description of Artificial Sequence: Synthetic peptide
  Seed: SPGMMMGMFNMLSTV
SPGFMMKMWNMLSTV

SEQ ID NO: 195858 - protein, 15 aa, Artificial Sequence
  Description of Artificial Sequence: Synthetic peptide
  Seed: SPGMMMGMFNMLSTV
SPGFMMKMWNMVSTV

SEQ ID NO: 195859 - protein, 15 aa, Artificial Sequence
  Description of Artificial Sequence: Synthetic peptide
  Seed: SPGMMMGMFNMLSTV
SPGFMMKMYNMFSTV

SEQ ID NO: 195860 - protein, 15 aa, Artificial Sequence
  Description of Artificial Sequence: Synthetic peptide
  Seed: SPGMMMGMFNMLSTV
SPGFMMKMYNMISTV

SEQ ID NO: 195861 - protein, 15 aa, Artificial Sequence
  Description of Artificial Sequence: Synthetic peptide
  Seed: SPGMMMGMFNMLSTV
SPGFMMKMYNMLSTV

SEQ ID NO: 195862 - protein, 15 aa, Artificial Sequence
  Description of Artificial Sequence: Synthetic peptide
  Seed: SPGMMMGMFNMLSTV
SPGFMMKMYNMVSTV

SEQ ID NO: 195863 - protein, 15 aa, Artificial Sequence
  Description of Artificial Sequence: Synthetic peptide
  Seed: SPGMMMGMFNMLSTV
SPGFMMLMANMASTV

SEQ ID NO: 195864 - protein, 15 aa, Artificial Sequence
  Description of Artificial Sequence: Synthetic peptide
  Seed: SPGMMMGMFNMLSTV
SPGFMMLMANMFSTV

SEQ ID NO: 195865 - protein, 15 aa, Artificial Sequence
  Description of Artificial Sequence: Synthetic peptide
  Seed: SPGMMMGMFNMLSTV
SPGFMMLMANMGSTV

SEQ ID NO: 195866 - protein, 15 aa, Artificial Sequence
  Description of Artificial Sequence: Synthetic peptide
  Seed: SPGMMMGMFNMLSTV
SPGFMMLMANMISTV

SEQ ID NO: 195867 - protein, 15 aa, Artificial Sequence
  Description of Artificial Sequence: Synthetic peptide
  Seed: SPGMMMGMFNMLSTV
SPGFMMLMANMLSTV

SEQ ID NO: 195868 - protein, 15 aa, Artificial Sequence
  Description of Artificial Sequence: Synthetic peptide
  Seed: SPGMMMGMFNMLSTV
SPGFMMLMANMVSTV

SEQ ID NO: 195869 - protein, 15 aa, Artificial Sequence
  Description of Artificial Sequence: Synthetic peptide
  Seed: SPGMMMGMFNMLSTV
SPGFMMLMANMYSTV

SEQ ID NO: 195870 - protein, 15 aa, Artificial Sequence
  Description of Artificial Sequence: Synthetic peptide
  Seed: SPGMMMGMFNMLSTV
SPGFMMLMFNMDSTV

SEQ ID NO: 195871 - protein, 15 aa, Artificial Sequence
  Description of Artificial Sequence: Synthetic peptide
  Seed: SPGMMMGMFNMLSTV
SPGFMMLMFNMESTV

SEQ ID NO: 195872 - protein, 15 aa, Artificial Sequence
  Description of Artificial Sequence: Synthetic peptide
  Seed: SPGMMMGMFNMLSTV
SPGFMMLMFNMFSTV

SEQ ID NO: 195873 - protein, 15 aa, Artificial Sequence
  Description of Artificial Sequence: Synthetic peptide
  Seed: SPGMMMGMFNMLSTV
SPGFMMLMFNMHSTV

SEQ ID NO: 195874 - protein, 15 aa, Artificial Sequence
  Description of Artificial Sequence: Synthetic peptide
  Seed: SPGMMMGMFNMLSTV
SPGFMMLMFNMISTV

SEQ ID NO: 195875 - protein, 15 aa, Artificial Sequence
  Description of Artificial Sequence: Synthetic peptide
  Seed: SPGMMMGMFNMLSTV
SPGFMMLMFNMLSTV

SEQ ID NO: 195876 - protein, 15 aa, Artificial Sequence
  Description of Artificial Sequence: Synthetic peptide
  Seed: SPGMMMGMFNMLSTV
SPGFMMLMFNMMSTV

SEQ ID NO: 195877 - protein, 15 aa, Artificial Sequence
  Description of Artificial Sequence: Synthetic peptide
  Seed: SPGMMMGMFNMLSTV
SPGFMMLMFNMNSTV

SEQ ID NO: 195878 - protein, 15 aa, Artificial Sequence
  Description of Artificial Sequence: Synthetic peptide
  Seed: SPGMMMGMFNMLSTV
SPGFMMLMFNMVSTV

SEQ ID NO: 195879 - protein, 15 aa, Artificial Sequence
  Description of Artificial Sequence: Synthetic peptide
  Seed: SPGMMMGMFNMLSTV
SPGFMMLMFNMYSTV

SEQ ID NO: 195880 - protein, 15 aa, Artificial Sequence
  Description of Artificial Sequence: Synthetic peptide
  Seed: SPGMMMGMFNMLSTV
SPGFMMLMGNMASTV

SEQ ID NO: 195881 - protein, 15 aa, Artificial Sequence
  Description of Artificial Sequence: Synthetic peptide
  Seed: SPGMMMGMFNMLSTV
SPGFMMLMGNMVSTV

SEQ ID NO: 195882 - protein, 15 aa, Artificial Sequence
  Description of Artificial Sequence: Synthetic peptide
  Seed: SPGMMMGMFNMLSTV
SPGFMMLMHNMASTV

SEQ ID NO: 195883 - protein, 15 aa, Artificial Sequence
  Description of Artificial Sequence: Synthetic peptide
  Seed: SPGMMMGMFNMLSTV
SPGFMMLMHNMGSTV

SEQ ID NO: 195884 - protein, 15 aa, Artificial Sequence
  Description of Artificial Sequence: Synthetic peptide
  Seed: SPGMMMGMFNMLSTV
SPGFMMLMHNMISTV

SEQ ID NO: 195885 - protein, 15 aa, Artificial Sequence
  Description of Artificial Sequence: Synthetic peptide
  Seed: SPGMMMGMFNMLSTV
SPGFMMLMHNMTSTV

SEQ ID NO: 195886 - protein, 15 aa, Artificial Sequence
  Description of Artificial Sequence: Synthetic peptide
  Seed: SPGMMMGMFNMLSTV
SPGFMMLMHNMVSTV

SEQ ID NO: 195887 - protein, 15 aa, Artificial Sequence
  Description of Artificial Sequence: Synthetic peptide
  Seed: SPGMMMGMFNMLSTV
SPGFMMLMKNMASTV

SEQ ID NO: 195888 - protein, 15 aa, Artificial Sequence
  Description of Artificial Sequence: Synthetic peptide
  Seed: SPGMMMGMFNMLSTV
SPGFMMLMKNMISTV

SEQ ID NO: 195889 - protein, 15 aa, Artificial Sequence
  Description of Artificial Sequence: Synthetic peptide
  Seed: SPGMMMGMFNMLSTV
SPGFMMLMKNMNSTV

SEQ ID NO: 195890 - protein, 15 aa, Artificial Sequence
  Description of Artificial Sequence: Synthetic peptide
  Seed: SPGMMMGMFNMLSTV
SPGFMMLMKNMPSTV

SEQ ID NO: 195891 - protein, 15 aa, Artificial Sequence
  Description of Artificial Sequence: Synthetic peptide
  Seed: SPGMMMGMFNMLSTV
SPGFMMLMKNMSSTV

SEQ ID NO: 195892 - protein, 15 aa, Artificial Sequence
  Description of Artificial Sequence: Synthetic peptide
  Seed: SPGMMMGMFNMLSTV
SPGFMMLMKNMVSTV

SEQ ID NO: 195893 - protein, 15 aa, Artificial Sequence
  Description of Artificial Sequence: Synthetic peptide
  Seed: SPGMMMGMFNMLSTV
SPGFMMLMLNMFSTV

SEQ ID NO: 195894 - protein, 15 aa, Artificial Sequence
  Description of Artificial Sequence: Synthetic peptide
  Seed: SPGMMMGMFNMLSTV
SPGFMMLMLNMYSTV

SEQ ID NO: 195895 - protein, 15 aa, Artificial Sequence
  Description of Artificial Sequence: Synthetic peptide
  Seed: SPGMMMGMFNMLSTV
SPGFMMLMNNMASTV

SEQ ID NO: 195896 - protein, 15 aa, Artificial Sequence
  Description of Artificial Sequence: Synthetic peptide
  Seed: SPGMMMGMFNMLSTV
SPGFMMLMNNMFSTV

SEQ ID NO: 195897 - protein, 15 aa, Artificial Sequence
  Description of Artificial Sequence: Synthetic peptide
  Seed: SPGMMMGMFNMLSTV
SPGFMMLMNNMGSTV

SEQ ID NO: 195898 - protein, 15 aa, Artificial Sequence
  Description of Artificial Sequence: Synthetic peptide
  Seed: SPGMMMGMFNMLSTV
SPGFMMLMNNMISTV

SEQ ID NO: 195899 - protein, 15 aa, Artificial Sequence
  Description of Artificial Sequence: Synthetic peptide
  Seed: SPGMMMGMFNMLSTV
SPGFMMLMNNMLSTV

SEQ ID NO: 195900 - protein, 15 aa, Artificial Sequence
  Description of Artificial Sequence: Synthetic peptide
  Seed: SPGMMMGMFNMLSTV
SPGFMMLMNNMMSTV

SEQ ID NO: 195901 - protein, 15 aa, Artificial Sequence
  Description of Artificial Sequence: Synthetic peptide
  Seed: SPGMMMGMFNMLSTV
SPGFMMLMNNMRSTV

SEQ ID NO: 195902 - protein, 15 aa, Artificial Sequence
  Description of Artificial Sequence: Synthetic peptide
  Seed: SPGMMMGMFNMLSTV
SPGFMMLMNNMSSTV

SEQ ID NO: 195903 - protein, 15 aa, Artificial Sequence
  Description of Artificial Sequence: Synthetic peptide
  Seed: SPGMMMGMFNMLSTV
SPGFMMLMNNMTSTV

SEQ ID NO: 195904 - protein, 15 aa, Artificial Sequence
  Description of Artificial Sequence: Synthetic peptide
  Seed: SPGMMMGMFNMLSTV
SPGFMMLMNNMVSTV

SEQ ID NO: 195905 - protein, 15 aa, Artificial Sequence
  Description of Artificial Sequence: Synthetic peptide
  Seed: SPGMMMGMFNMLSTV
SPGFMMLMNNMYSTV

SEQ ID NO: 195906 - protein, 15 aa, Artificial Sequence
  Description of Artificial Sequence: Synthetic peptide
  Seed: SPGMMMGMFNMLSTV
SPGFMMLMPNMASTV

SEQ ID NO: 195907 - protein, 15 aa, Artificial Sequence
  Description of Artificial Sequence: Synthetic peptide
  Seed: SPGMMMGMFNMLSTV
SPGFMMLMPNMFSTV

SEQ ID NO: 195908 - protein, 15 aa, Artificial Sequence
  Description of Artificial Sequence: Synthetic peptide
  Seed: SPGMMMGMFNMLSTV
SPGFMMLMPNMISTV

SEQ ID NO: 195909 - protein, 15 aa, Artificial Sequence
  Description of Artificial Sequence: Synthetic peptide
  Seed: SPGMMMGMFNMLSTV
SPGFMMLMPNMLSTV

SEQ ID NO: 195910 - protein, 15 aa, Artificial Sequence
  Description of Artificial Sequence: Synthetic peptide
  Seed: SPGMMMGMFNMLSTV
SPGFMMLMPNMMSTV

SEQ ID NO: 195911 - protein, 15 aa, Artificial Sequence
  Description of Artificial Sequence: Synthetic peptide
  Seed: SPGMMMGMFNMLSTV
SPGFMMLMPNMSSTV

SEQ ID NO: 195912 - protein, 15 aa, Artificial Sequence
  Description of Artificial Sequence: Synthetic peptide
  Seed: SPGMMMGMFNMLSTV
SPGFMMLMPNMTSTV

SEQ ID NO: 195913 - protein, 15 aa, Artificial Sequence
  Description of Artificial Sequence: Synthetic peptide
  Seed: SPGMMMGMFNMLSTV
SPGFMMLMPNMVSTV

SEQ ID NO: 195914 - protein, 15 aa, Artificial Sequence
  Description of Artificial Sequence: Synthetic peptide
  Seed: SPGMMMGMFNMLSTV
SPGFMMLMRNMASTV

SEQ ID NO: 195915 - protein, 15 aa, Artificial Sequence
  Description of Artificial Sequence: Synthetic peptide
  Seed: SPGMMMGMFNMLSTV
SPGFMMLMRNMGSTV

SEQ ID NO: 195916 - protein, 15 aa, Artificial Sequence
  Description of Artificial Sequence: Synthetic peptide
  Seed: SPGMMMGMFNMLSTV
SPGFMMLMRNMISTV

SEQ ID NO: 195917 - protein, 15 aa, Artificial Sequence
  Description of Artificial Sequence: Synthetic peptide
  Seed: SPGMMMGMFNMLSTV
SPGFMMLMRNMNSTV

SEQ ID NO: 195918 - protein, 15 aa, Artificial Sequence
  Description of Artificial Sequence: Synthetic peptide
  Seed: SPGMMMGMFNMLSTV
SPGFMMLMRNMPSTV

SEQ ID NO: 195919 - protein, 15 aa, Artificial Sequence
  Description of Artificial Sequence: Synthetic peptide
  Seed: SPGMMMGMFNMLSTV
SPGFMMLMRNMSSTV

SEQ ID NO: 195920 - protein, 15 aa, Artificial Sequence
  Description of Artificial Sequence: Synthetic peptide
  Seed: SPGMMMGMFNMLSTV
SPGFMMLMRNMTSTV

SEQ ID NO: 195921 - protein, 15 aa, Artificial Sequence
  Description of Artificial Sequence: Synthetic peptide
  Seed: SPGMMMGMFNMLSTV
SPGFMMLMRNMVSTV

SEQ ID NO: 195922 - protein, 15 aa, Artificial Sequence
  Description of Artificial Sequence: Synthetic peptide
  Seed: SPGMMMGMFNMLSTV
SPGFMMLMSNMASTV

SEQ ID NO: 195923 - protein, 15 aa, Artificial Sequence
  Description of Artificial Sequence: Synthetic peptide
  Seed: SPGMMMGMFNMLSTV
SPGFMMLMSNMFSTV

SEQ ID NO: 195924 - protein, 15 aa, Artificial Sequence
  Description of Artificial Sequence: Synthetic peptide
  Seed: SPGMMMGMFNMLSTV
SPGFMMLMSNMISTV

SEQ ID NO: 195925 - protein, 15 aa, Artificial Sequence
  Description of Artificial Sequence: Synthetic peptide
  Seed: SPGMMMGMFNMLSTV
SPGFMMLMSNMLSTV

SEQ ID NO: 195926 - protein, 15 aa, Artificial Sequence
  Description of Artificial Sequence: Synthetic peptide
  Seed: SPGMMMGMFNMLSTV
SPGFMMLMSNMMSTV

SEQ ID NO: 195927 - protein, 15 aa, Artificial Sequence
  Description of Artificial Sequence: Synthetic peptide
  Seed: SPGMMMGMFNMLSTV
SPGFMMLMSNMSSTV

SEQ ID NO: 195928 - protein, 15 aa, Artificial Sequence
  Description of Artificial Sequence: Synthetic peptide
  Seed: SPGMMMGMFNMLSTV
SPGFMMLMSNMTSTV

SEQ ID NO: 195929 - protein, 15 aa, Artificial Sequence
  Description of Artificial Sequence: Synthetic peptide
  Seed: SPGMMMGMFNMLSTV
SPGFMMLMSNMVSTV

SEQ ID NO: 195930 - protein, 15 aa, Artificial Sequence
  Description of Artificial Sequence: Synthetic peptide
  Seed: SPGMMMGMFNMLSTV
SPGFMMLMTNMASTV

SEQ ID NO: 195931 - protein, 15 aa, Artificial Sequence
  Description of Artificial Sequence: Synthetic peptide
  Seed: SPGMMMGMFNMLSTV
SPGFMMLMTNMFSTV

SEQ ID NO: 195932 - protein, 15 aa, Artificial Sequence
  Description of Artificial Sequence: Synthetic peptide
  Seed: SPGMMMGMFNMLSTV
SPGFMMLMTNMISTV

SEQ ID NO: 195933 - protein, 15 aa, Artificial Sequence
  Description of Artificial Sequence: Synthetic peptide
  Seed: SPGMMMGMFNMLSTV
SPGFMMLMTNMLSTV

SEQ ID NO: 195934 - protein, 15 aa, Artificial Sequence
  Description of Artificial Sequence: Synthetic peptide
  Seed: SPGMMMGMFNMLSTV
SPGFMMLMTNMSSTV

SEQ ID NO: 195935 - protein, 15 aa, Artificial Sequence
  Description of Artificial Sequence: Synthetic peptide
  Seed: SPGMMMGMFNMLSTV
SPGFMMLMTNMVSTV

SEQ ID NO: 195936 - protein, 15 aa, Artificial Sequence
  Description of Artificial Sequence: Synthetic peptide
  Seed: SPGMMMGMFNMLSTV
SPGFMMLMWNMFSTV

SEQ ID NO: 195937 - protein, 15 aa, Artificial Sequence
  Description of Artificial Sequence: Synthetic peptide
  Seed: SPGMMMGMFNMLSTV
SPGFMMLMWNMISTV

SEQ ID NO: 195938 - protein, 15 aa, Artificial Sequence
  Description of Artificial Sequence: Synthetic peptide
  Seed: SPGMMMGMFNMLSTV
SPGFMMLMWNMLSTV

SEQ ID NO: 195939 - protein, 15 aa, Artificial Sequence
  Description of Artificial Sequence: Synthetic peptide
  Seed: SPGMMMGMFNMLSTV
SPGFMMLMWNMMSTV

SEQ ID NO: 195940 - protein, 15 aa, Artificial Sequence
  Description of Artificial Sequence: Synthetic peptide
  Seed: SPGMMMGMFNMLSTV
SPGFMMLMWNMVSTV

SEQ ID NO: 195941 - protein, 15 aa, Artificial Sequence
  Description of Artificial Sequence: Synthetic peptide
  Seed: SPGMMMGMFNMLSTV
SPGFMMLMWNMYSTV

SEQ ID NO: 195942 - protein, 15 aa, Artificial Sequence
  Description of Artificial Sequence: Synthetic peptide
  Seed: SPGMMMGMFNMLSTV
SPGFMMLMYNMFSTV

SEQ ID NO: 195943 - protein, 15 aa, Artificial Sequence
  Description of Artificial Sequence: Synthetic peptide
  Seed: SPGMMMGMFNMLSTV
SPGFMMLMYNMISTV

SEQ ID NO: 195944 - protein, 15 aa, Artificial Sequence
  Description of Artificial Sequence: Synthetic peptide
  Seed: SPGMMMGMFNMLSTV
SPGFMMLMYNMLSTV

SEQ ID NO: 195945 - protein, 15 aa, Artificial Sequence
  Description of Artificial Sequence: Synthetic peptide
  Seed: SPGMMMGMFNMLSTV
SPGFMMLMYNMMSTV

SEQ ID NO: 195946 - protein, 15 aa, Artificial Sequence
  Description of Artificial Sequence: Synthetic peptide
  Seed: SPGMMMGMFNMLSTV
SPGFMMLMYNMVSTV

SEQ ID NO: 195947 - protein, 15 aa, Artificial Sequence
  Description of Artificial Sequence: Synthetic peptide
  Seed: SPGMMMGMFNMLSTV
SPGFMMLMYNMYSTV

SEQ ID NO: 195948 - protein, 15 aa, Artificial Sequence
  Description of Artificial Sequence: Synthetic peptide
  Seed: SPGMMMGMFNMLSTV
SPGFMMMMANMASTV

SEQ ID NO: 195949 - protein, 15 aa, Artificial Sequence
  Description of Artificial Sequence: Synthetic peptide
  Seed: SPGMMMGMFNMLSTV
SPGFMMMMANMFSTV

SEQ ID NO: 195950 - protein, 15 aa, Artificial Sequence
  Description of Artificial Sequence: Synthetic peptide
  Seed: SPGMMMGMFNMLSTV
SPGFMMMMANMISTV

SEQ ID NO: 195951 - protein, 15 aa, Artificial Sequence
  Description of Artificial Sequence: Synthetic peptide
  Seed: SPGMMMGMFNMLSTV
SPGFMMMMANMLSTV

SEQ ID NO: 195952 - protein, 15 aa, Artificial Sequence
  Description of Artificial Sequence: Synthetic peptide
  Seed: SPGMMMGMFNMLSTV
SPGFMMMMANMMSTV

SEQ ID NO: 195953 - protein, 15 aa, Artificial Sequence
  Description of Artificial Sequence: Synthetic peptide
  Seed: SPGMMMGMFNMLSTV
SPGFMMMMANMNSTV

SEQ ID NO: 195954 - protein, 15 aa, Artificial Sequence
  Description of Artificial Sequence: Synthetic peptide
  Seed: SPGMMMGMFNMLSTV
SPGFMMMMANMSSTV

SEQ ID NO: 195955 - protein, 15 aa, Artificial Sequence
  Description of Artificial Sequence: Synthetic peptide
  Seed: SPGMMMGMFNMLSTV
SPGFMMMMANMVSTV

SEQ ID NO: 195956 - protein, 15 aa, Artificial Sequence
  Description of Artificial Sequence: Synthetic peptide
  Seed: SPGMMMGMFNMLSTV
SPGFMMMMANMYSTV

SEQ ID NO: 195957 - protein, 15 aa, Artificial Sequence
  Description of Artificial Sequence: Synthetic peptide
  Seed: SPGMMMGMFNMLSTV
SPGFMMMMFNMDSTV

SEQ ID NO: 195958 - protein, 15 aa, Artificial Sequence
  Description of Artificial Sequence: Synthetic peptide
  Seed: SPGMMMGMFNMLSTV
SPGFMMMMFNMESTV

SEQ ID NO: 195959 - protein, 15 aa, Artificial Sequence
  Description of Artificial Sequence: Synthetic peptide
  Seed: SPGMMMGMFNMLSTV
SPGFMMMMFNMFSTV

SEQ ID NO: 195960 - protein, 15 aa, Artificial Sequence
  Description of Artificial Sequence: Synthetic peptide
  Seed: SPGMMMGMFNMLSTV
SPGFMMMMFNMISTV

SEQ ID NO: 195961 - protein, 15 aa, Artificial Sequence
  Description of Artificial Sequence: Synthetic peptide
  Seed: SPGMMMGMFNMLSTV
SPGFMMMMFNMLSTV

SEQ ID NO: 195962 - protein, 15 aa, Artificial Sequence
  Description of Artificial Sequence: Synthetic peptide
  Seed: SPGMMMGMFNMLSTV
SPGFMMMMFNMMSTV

SEQ ID NO: 195963 - protein, 15 aa, Artificial Sequence
  Description of Artificial Sequence: Synthetic peptide
  Seed: SPGMMMGMFNMLSTV
SPGFMMMMFNMNSTV

SEQ ID NO: 195964 - protein, 15 aa, Artificial Sequence
  Description of Artificial Sequence: Synthetic peptide
  Seed: SPGMMMGMFNMLSTV
SPGFMMMMFNMVSTV

SEQ ID NO: 195965 - protein, 15 aa, Artificial Sequence
  Description of Artificial Sequence: Synthetic peptide
  Seed: SPGMMMGMFNMLSTV
SPGFMMMMFNMYSTV

SEQ ID NO: 195966 - protein, 15 aa, Artificial Sequence
  Description of Artificial Sequence: Synthetic peptide
  Seed: SPGMMMGMFNMLSTV
SPGFMMMMGNMASTV

SEQ ID NO: 195967 - protein, 15 aa, Artificial Sequence
  Description of Artificial Sequence: Synthetic peptide
  Seed: SPGMMMGMFNMLSTV
SPGFMMMMGNMISTV

SEQ ID NO: 195968 - protein, 15 aa, Artificial Sequence
  Description of Artificial Sequence: Synthetic peptide
  Seed: SPGMMMGMFNMLSTV
SPGFMMMMGNMVSTV

SEQ ID NO: 195969 - protein, 15 aa, Artificial Sequence
  Description of Artificial Sequence: Synthetic peptide
  Seed: SPGMMMGMFNMLSTV
SPGFMMMMHNMASTV

SEQ ID NO: 195970 - protein, 15 aa, Artificial Sequence
  Description of Artificial Sequence: Synthetic peptide
  Seed: SPGMMMGMFNMLSTV
SPGFMMMMKNMASTV

SEQ ID NO: 195971 - protein, 15 aa, Artificial Sequence
  Description of Artificial Sequence: Synthetic peptide
  Seed: SPGMMMGMFNMLSTV
SPGFMMMMNNMASTV

SEQ ID NO: 195972 - protein, 15 aa, Artificial Sequence
  Description of Artificial Sequence: Synthetic peptide
  Seed: SPGMMMGMFNMLSTV
SPGFMMMMNNMFSTV

SEQ ID NO: 195973 - protein, 15 aa, Artificial Sequence
  Description of Artificial Sequence: Synthetic peptide
  Seed: SPGMMMGMFNMLSTV
SPGFMMMMNNMISTV

SEQ ID NO: 195974 - protein, 15 aa, Artificial Sequence
  Description of Artificial Sequence: Synthetic peptide
  Seed: SPGMMMGMFNMLSTV
SPGFMMMMNNMLSTV

SEQ ID NO: 195975 - protein, 15 aa, Artificial Sequence
  Description of Artificial Sequence: Synthetic peptide
  Seed: SPGMMMGMFNMLSTV
SPGFMMMMNNMMSTV

SEQ ID NO: 195976 - protein, 15 aa, Artificial Sequence
  Description of Artificial Sequence: Synthetic peptide
  Seed: SPGMMMGMFNMLSTV
SPGFMMMMNNMNSTV

SEQ ID NO: 195977 - protein, 15 aa, Artificial Sequence
  Description of Artificial Sequence: Synthetic peptide
  Seed: SPGMMMGMFNMLSTV
SPGFMMMMNNMRSTV

SEQ ID NO: 195978 - protein, 15 aa, Artificial Sequence
  Description of Artificial Sequence: Synthetic peptide
  Seed: SPGMMMGMFNMLSTV
SPGFMMMMNNMSSTV

SEQ ID NO: 195979 - protein, 15 aa, Artificial Sequence
  Description of Artificial Sequence: Synthetic peptide
  Seed: SPGMMMGMFNMLSTV
SPGFMMMMNNMTSTV

SEQ ID NO: 195980 - protein, 15 aa, Artificial Sequence
  Description of Artificial Sequence: Synthetic peptide
  Seed: SPGMMMGMFNMLSTV
SPGFMMMMNNMVSTV

SEQ ID NO: 195981 - protein, 15 aa, Artificial Sequence
  Description of Artificial Sequence: Synthetic peptide
  Seed: SPGMMMGMFNMLSTV
SPGFMMMMNNMYSTV

SEQ ID NO: 195982 - protein, 15 aa, Artificial Sequence
  Description of Artificial Sequence: Synthetic peptide
  Seed: SPGMMMGMFNMLSTV
SPGFMMMMPNMASTV

SEQ ID NO: 195983 - protein, 15 aa, Artificial Sequence
  Description of Artificial Sequence: Synthetic peptide
  Seed: SPGMMMGMFNMLSTV
SPGFMMMMPNMFSTV

SEQ ID NO: 195984 - protein, 15 aa, Artificial Sequence
  Description of Artificial Sequence: Synthetic peptide
  Seed: SPGMMMGMFNMLSTV
SPGFMMMMPNMISTV

SEQ ID NO: 195985 - protein, 15 aa, Artificial Sequence
  Description of Artificial Sequence: Synthetic peptide
  Seed: SPGMMMGMFNMLSTV
SPGFMMMMPNMLSTV

SEQ ID NO: 195986 - protein, 15 aa, Artificial Sequence
  Description of Artificial Sequence: Synthetic peptide
  Seed: SPGMMMGMFNMLSTV
SPGFMMMMPNMMSTV

SEQ ID NO: 195987 - protein, 15 aa, Artificial Sequence
  Description of Artificial Sequence: Synthetic peptide
  Seed: SPGMMMGMFNMLSTV
SPGFMMMMPNMSSTV

SEQ ID NO: 195988 - protein, 15 aa, Artificial Sequence
  Description of Artificial Sequence: Synthetic peptide
  Seed: SPGMMMGMFNMLSTV
SPGFMMMMPNMTSTV

SEQ ID NO: 195989 - protein, 15 aa, Artificial Sequence
  Description of Artificial Sequence: Synthetic peptide
  Seed: SPGMMMGMFNMLSTV
SPGFMMMMPNMVSTV

SEQ ID NO: 195990 - protein, 15 aa, Artificial Sequence
  Description of Artificial Sequence: Synthetic peptide
  Seed: SPGMMMGMFNMLSTV
SPGFMMMMPNMYSTV

SEQ ID NO: 195991 - protein, 15 aa, Artificial Sequence
  Description of Artificial Sequence: Synthetic peptide
  Seed: SPGMMMGMFNMLSTV
SPGFMMMMRNMASTV

SEQ ID NO: 195992 - protein, 15 aa, Artificial Sequence
  Description of Artificial Sequence: Synthetic peptide
  Seed: SPGMMMGMFNMLSTV
SPGFMMMMSNMASTV

SEQ ID NO: 195993 - protein, 15 aa, Artificial Sequence
  Description of Artificial Sequence: Synthetic peptide
  Seed: SPGMMMGMFNMLSTV
SPGFMMMMSNMFSTV

SEQ ID NO: 195994 - protein, 15 aa, Artificial Sequence
  Description of Artificial Sequence: Synthetic peptide
  Seed: SPGMMMGMFNMLSTV
SPGFMMMMSNMISTV

SEQ ID NO: 195995 - protein, 15 aa, Artificial Sequence
  Description of Artificial Sequence: Synthetic peptide
  Seed: SPGMMMGMFNMLSTV
SPGFMMMMSNMLSTV

SEQ ID NO: 195996 - protein, 15 aa, Artificial Sequence
  Description of Artificial Sequence: Synthetic peptide
  Seed: SPGMMMGMFNMLSTV
SPGFMMMMSNMMSTV

SEQ ID NO: 195997 - protein, 15 aa, Artificial Sequence
  Description of Artificial Sequence: Synthetic peptide
  Seed: SPGMMMGMFNMLSTV
SPGFMMMMSNMTSTV

SEQ ID NO: 195998 - protein, 15 aa, Artificial Sequence
  Description of Artificial Sequence: Synthetic peptide
  Seed: SPGMMMGMFNMLSTV
SPGFMMMMSNMVSTV

SEQ ID NO: 195999 - protein, 15 aa, Artificial Sequence
  Description of Artificial Sequence: Synthetic peptide
  Seed: SPGMMMGMFNMLSTV
SPGFMMMMSNMYSTV

SEQ ID NO: 196000 - protein, 15 aa, Artificial Sequence
  Description of Artificial Sequence: Synthetic peptide
  Seed: SPGMMMGMFNMLSTV
SPGFMMMMTNMASTV

SEQ ID NO: 196001 - protein, 15 aa, Artificial Sequence
  Description of Artificial Sequence: Synthetic peptide
  Seed: SPGMMMGMFNMLSTV
SPGFMMMMTNMISTV

SEQ ID NO: 196002 - protein, 15 aa, Artificial Sequence
  Description of Artificial Sequence: Synthetic peptide
  Seed: SPGMMMGMFNMLSTV
SPGFMMMMTNMVSTV

SEQ ID NO: 196003 - protein, 15 aa, Artificial Sequence
  Description of Artificial Sequence: Synthetic peptide
  Seed: SPGMMMGMFNMLSTV
SPGFMMMMVNMASTV

SEQ ID NO: 196004 - protein, 15 aa, Artificial Sequence
  Description of Artificial Sequence: Synthetic peptide
  Seed: SPGMMMGMFNMLSTV
SPGFMMMMVNMSSTV

SEQ ID NO: 196005 - protein, 15 aa, Artificial Sequence
  Description of Artificial Sequence: Synthetic peptide
  Seed: SPGMMMGMFNMLSTV
SPGFMMMMWNMFSTV

SEQ ID NO: 196006 - protein, 15 aa, Artificial Sequence
  Description of Artificial Sequence: Synthetic peptide
  Seed: SPGMMMGMFNMLSTV
SPGFMMMMWNMISTV

SEQ ID NO: 196007 - protein, 15 aa, Artificial Sequence
  Description of Artificial Sequence: Synthetic peptide
  Seed: SPGMMMGMFNMLSTV
SPGFMMMMWNMLSTV

SEQ ID NO: 196008 - protein, 15 aa, Artificial Sequence
  Description of Artificial Sequence: Synthetic peptide
  Seed: SPGMMMGMFNMLSTV
SPGFMMMMYNMFSTV

SEQ ID NO: 196009 - protein, 15 aa, Artificial Sequence
  Description of Artificial Sequence: Synthetic peptide
  Seed: SPGMMMGMFNMLSTV
SPGFMMMMYNMISTV

SEQ ID NO: 196010 - protein, 15 aa, Artificial Sequence
  Description of Artificial Sequence: Synthetic peptide
  Seed: SPGMMMGMFNMLSTV
SPGFMMMMYNMLSTV

SEQ ID NO: 196011 - protein, 15 aa, Artificial Sequence
  Description of Artificial Sequence: Synthetic peptide
  Seed: SPGMMMGMFNMLSTV
SPGFMMMMYNMMSTV

SEQ ID NO: 196012 - protein, 15 aa, Artificial Sequence
  Description of Artificial Sequence: Synthetic peptide
  Seed: SPGMMMGMFNMLSTV
SPGFMMMMYNMVSTV

SEQ ID NO: 196013 - protein, 15 aa, Artificial Sequence
  Description of Artificial Sequence: Synthetic peptide
  Seed: SPGMMMGMFNMLSTV
SPGFMMMMYNMYSTV

SEQ ID NO: 196014 - protein, 15 aa, Artificial Sequence
  Description of Artificial Sequence: Synthetic peptide
  Seed: SPGMMMGMFNMLSTV
SPGFMMNMANMASTV

SEQ ID NO: 196015 - protein, 15 aa, Artificial Sequence
  Description of Artificial Sequence: Synthetic peptide
  Seed: SPGMMMGMFNMLSTV
SPGFMMNMANMCSTV

SEQ ID NO: 196016 - protein, 15 aa, Artificial Sequence
  Description of Artificial Sequence: Synthetic peptide
  Seed: SPGMMMGMFNMLSTV
SPGFMMNMANMDSTV

SEQ ID NO: 196017 - protein, 15 aa, Artificial Sequence
  Description of Artificial Sequence: Synthetic peptide
  Seed: SPGMMMGMFNMLSTV
SPGFMMNMANMESTV

SEQ ID NO: 196018 - protein, 15 aa, Artificial Sequence
  Description of Artificial Sequence: Synthetic peptide
  Seed: SPGMMMGMFNMLSTV
SPGFMMNMANMFSTV

SEQ ID NO: 196019 - protein, 15 aa, Artificial Sequence
  Description of Artificial Sequence: Synthetic peptide
  Seed: SPGMMMGMFNMLSTV
SPGFMMNMANMGSTV

SEQ ID NO: 196020 - protein, 15 aa, Artificial Sequence
  Description of Artificial Sequence: Synthetic peptide
  Seed: SPGMMMGMFNMLSTV
SPGFMMNMANMHSTV

SEQ ID NO: 196021 - protein, 15 aa, Artificial Sequence
  Description of Artificial Sequence: Synthetic peptide
  Seed: SPGMMMGMFNMLSTV
SPGFMMNMANMISTV

SEQ ID NO: 196022 - protein, 15 aa, Artificial Sequence
  Description of Artificial Sequence: Synthetic peptide
  Seed: SPGMMMGMFNMLSTV
SPGFMMNMANMKSTV

SEQ ID NO: 196023 - protein, 15 aa, Artificial Sequence
  Description of Artificial Sequence: Synthetic peptide
  Seed: SPGMMMGMFNMLSTV
SPGFMMNMANMLSTV

SEQ ID NO: 196024 - protein, 15 aa, Artificial Sequence
  Description of Artificial Sequence: Synthetic peptide
  Seed: SPGMMMGMFNMLSTV
SPGFMMNMANMMSTV

SEQ ID NO: 196025 - protein, 15 aa, Artificial Sequence
  Description of Artificial Sequence: Synthetic peptide
  Seed: SPGMMMGMFNMLSTV
SPGFMMNMANMNSTV

SEQ ID NO: 196026 - protein, 15 aa, Artificial Sequence
  Description of Artificial Sequence: Synthetic peptide
  Seed: SPGMMMGMFNMLSTV
SPGFMMNMANMPSTV

SEQ ID NO: 196027 - protein, 15 aa, Artificial Sequence
  Description of Artificial Sequence: Synthetic peptide
  Seed: SPGMMMGMFNMLSTV
SPGFMMNMANMQSTV

SEQ ID NO: 196028 - protein, 15 aa, Artificial Sequence
  Description of Artificial Sequence: Synthetic peptide
  Seed: SPGMMMGMFNMLSTV
SPGFMMNMANMRSTV

SEQ ID NO: 196029 - protein, 15 aa, Artificial Sequence
  Description of Artificial Sequence: Synthetic peptide
  Seed: SPGMMMGMFNMLSTV
SPGFMMNMANMSSTV

SEQ ID NO: 196030 - protein, 15 aa, Artificial Sequence
  Description of Artificial Sequence: Synthetic peptide
  Seed: SPGMMMGMFNMLSTV
SPGFMMNMANMTSTV

SEQ ID NO: 196031 - protein, 15 aa, Artificial Sequence
  Description of Artificial Sequence: Synthetic peptide
  Seed: SPGMMMGMFNMLSTV
SPGFMMNMANMVSTV

SEQ ID NO: 196032 - protein, 15 aa, Artificial Sequence
  Description of Artificial Sequence: Synthetic peptide
  Seed: SPGMMMGMFNMLSTV
SPGFMMNMANMWSTV

SEQ ID NO: 196033 - protein, 15 aa, Artificial Sequence
  Description of Artificial Sequence: Synthetic peptide
  Seed: SPGMMMGMFNMLSTV
SPGFMMNMANMYSTV

SEQ ID NO: 196034 - protein, 15 aa, Artificial Sequence
  Description of Artificial Sequence: Synthetic peptide
  Seed: SPGMMMGMFNMLSTV
SPGFMMNMCNMFSTV

SEQ ID NO: 196035 - protein, 15 aa, Artificial Sequence
  Description of Artificial Sequence: Synthetic peptide
  Seed: SPGMMMGMFNMLSTV
SPGFMMNMCNMISTV

SEQ ID NO: 196036 - protein, 15 aa, Artificial Sequence
  Description of Artificial Sequence: Synthetic peptide
  Seed: SPGMMMGMFNMLSTV
SPGFMMNMCNMLSTV

SEQ ID NO: 196037 - protein, 15 aa, Artificial Sequence
  Description of Artificial Sequence: Synthetic peptide
  Seed: SPGMMMGMFNMLSTV
SPGFMMNMCNMMSTV

SEQ ID NO: 196038 - protein, 15 aa, Artificial Sequence
  Description of Artificial Sequence: Synthetic peptide
  Seed: SPGMMMGMFNMLSTV
SPGFMMNMCNMVSTV

SEQ ID NO: 196039 - protein, 15 aa, Artificial Sequence
  Description of Artificial Sequence: Synthetic peptide
  Seed: SPGMMMGMFNMLSTV
SPGFMMNMCNMYSTV

SEQ ID NO: 196040 - protein, 15 aa, Artificial Sequence
  Description of Artificial Sequence: Synthetic peptide
  Seed: SPGMMMGMFNMLSTV
SPGFMMNMDNMFSTV

SEQ ID NO: 196041 - protein, 15 aa, Artificial Sequence
  Description of Artificial Sequence: Synthetic peptide
  Seed: SPGMMMGMFNMLSTV
SPGFMMNMDNMISTV

SEQ ID NO: 196042 - protein, 15 aa, Artificial Sequence
  Description of Artificial Sequence: Synthetic peptide
  Seed: SPGMMMGMFNMLSTV
SPGFMMNMDNMLSTV

SEQ ID NO: 196043 - protein, 15 aa, Artificial Sequence
  Description of Artificial Sequence: Synthetic peptide
  Seed: SPGMMMGMFNMLSTV
SPGFMMNMDNMMSTV

SEQ ID NO: 196044 - protein, 15 aa, Artificial Sequence
  Description of Artificial Sequence: Synthetic peptide
  Seed: SPGMMMGMFNMLSTV
SPGFMMNMDNMVSTV

SEQ ID NO: 196045 - protein, 15 aa, Artificial Sequence
  Description of Artificial Sequence: Synthetic peptide
  Seed: SPGMMMGMFNMLSTV
SPGFMMNMDNMYSTV

SEQ ID NO: 196046 - protein, 15 aa, Artificial Sequence
  Description of Artificial Sequence: Synthetic peptide
  Seed: SPGMMMGMFNMLSTV
SPGFMMNMENMASTV

SEQ ID NO: 196047 - protein, 15 aa, Artificial Sequence
  Description of Artificial Sequence: Synthetic peptide
  Seed: SPGMMMGMFNMLSTV
SPGFMMNMENMFSTV

SEQ ID NO: 196048 - protein, 15 aa, Artificial Sequence
  Description of Artificial Sequence: Synthetic peptide
  Seed: SPGMMMGMFNMLSTV
SPGFMMNMENMISTV

SEQ ID NO: 196049 - protein, 15 aa, Artificial Sequence
  Description of Artificial Sequence: Synthetic peptide
  Seed: SPGMMMGMFNMLSTV
SPGFMMNMENMLSTV

SEQ ID NO: 196050 - protein, 15 aa, Artificial Sequence
  Description of Artificial Sequence: Synthetic peptide
  Seed: SPGMMMGMFNMLSTV
SPGFMMNMENMMSTV

SEQ ID NO: 196051 - protein, 15 aa, Artificial Sequence
  Description of Artificial Sequence: Synthetic peptide
  Seed: SPGMMMGMFNMLSTV
SPGFMMNMENMVSTV

SEQ ID NO: 196052 - protein, 15 aa, Artificial Sequence
  Description of Artificial Sequence: Synthetic peptide
  Seed: SPGMMMGMFNMLSTV
SPGFMMNMENMYSTV

SEQ ID NO: 196053 - protein, 15 aa, Artificial Sequence
  Description of Artificial Sequence: Synthetic peptide
  Seed: SPGMMMGMFNMLSTV
SPGFMMNMFNMASTV

SEQ ID NO: 196054 - protein, 15 aa, Artificial Sequence
  Description of Artificial Sequence: Synthetic peptide
  Seed: SPGMMMGMFNMLSTV
SPGFMMNMFNMCSTV

SEQ ID NO: 196055 - protein, 15 aa, Artificial Sequence
  Description of Artificial Sequence: Synthetic peptide
  Seed: SPGMMMGMFNMLSTV
SPGFMMNMFNMDSTV

SEQ ID NO: 196056 - protein, 15 aa, Artificial Sequence
  Description of Artificial Sequence: Synthetic peptide
  Seed: SPGMMMGMFNMLSTV
SPGFMMNMFNMESTV

SEQ ID NO: 196057 - protein, 15 aa, Artificial Sequence
  Description of Artificial Sequence: Synthetic peptide
  Seed: SPGMMMGMFNMLSTV
SPGFMMNMFNMFSTV

SEQ ID NO: 196058 - protein, 15 aa, Artificial Sequence
  Description of Artificial Sequence: Synthetic peptide
  Seed: SPGMMMGMFNMLSTV
SPGFMMNMFNMISTV

SEQ ID NO: 196059 - protein, 15 aa, Artificial Sequence
  Description of Artificial Sequence: Synthetic peptide
  Seed: SPGMMMGMFNMLSTV
SPGFMMNMFNMLSTV

SEQ ID NO: 196060 - protein, 15 aa, Artificial Sequence
  Description of Artificial Sequence: Synthetic peptide
  Seed: SPGMMMGMFNMLSTV
SPGFMMNMFNMMSTV

SEQ ID NO: 196061 - protein, 15 aa, Artificial Sequence
  Description of Artificial Sequence: Synthetic peptide
  Seed: SPGMMMGMFNMLSTV
SPGFMMNMFNMNSTV

SEQ ID NO: 196062 - protein, 15 aa, Artificial Sequence
  Description of Artificial Sequence: Synthetic peptide
  Seed: SPGMMMGMFNMLSTV
SPGFMMNMFNMQSTV

SEQ ID NO: 196063 - protein, 15 aa, Artificial Sequence
  Description of Artificial Sequence: Synthetic peptide
  Seed: SPGMMMGMFNMLSTV
SPGFMMNMFNMSSTV

SEQ ID NO: 196064 - protein, 15 aa, Artificial Sequence
  Description of Artificial Sequence: Synthetic peptide
  Seed: SPGMMMGMFNMLSTV
SPGFMMNMFNMTSTV

SEQ ID NO: 196065 - protein, 15 aa, Artificial Sequence
  Description of Artificial Sequence: Synthetic peptide
  Seed: SPGMMMGMFNMLSTV
SPGFMMNMFNMVSTV

SEQ ID NO: 196066 - protein, 15 aa, Artificial Sequence
  Description of Artificial Sequence: Synthetic peptide
  Seed: SPGMMMGMFNMLSTV
SPGFMMNMFNMYSTV

SEQ ID NO: 196067 - protein, 15 aa, Artificial Sequence
  Description of Artificial Sequence: Synthetic peptide
  Seed: SPGMMMGMFNMLSTV
SPGFMMNMGNMASTV

SEQ ID NO: 196068 - protein, 15 aa, Artificial Sequence
  Description of Artificial Sequence: Synthetic peptide
  Seed: SPGMMMGMFNMLSTV
SPGFMMNMGNMESTV

SEQ ID NO: 196069 - protein, 15 aa, Artificial Sequence
  Description of Artificial Sequence: Synthetic peptide
  Seed: SPGMMMGMFNMLSTV
SPGFMMNMGNMFSTV

SEQ ID NO: 196070 - protein, 15 aa, Artificial Sequence
  Description of Artificial Sequence: Synthetic peptide
  Seed: SPGMMMGMFNMLSTV
SPGFMMNMGNMGSTV

SEQ ID NO: 196071 - protein, 15 aa, Artificial Sequence
  Description of Artificial Sequence: Synthetic peptide
  Seed: SPGMMMGMFNMLSTV
SPGFMMNMGNMHSTV

SEQ ID NO: 196072 - protein, 15 aa, Artificial Sequence
  Description of Artificial Sequence: Synthetic peptide
  Seed: SPGMMMGMFNMLSTV
SPGFMMNMGNMISTV

SEQ ID NO: 196073 - protein, 15 aa, Artificial Sequence
  Description of Artificial Sequence: Synthetic peptide
  Seed: SPGMMMGMFNMLSTV
SPGFMMNMGNMLSTV

SEQ ID NO: 196074 - protein, 15 aa, Artificial Sequence
  Description of Artificial Sequence: Synthetic peptide
  Seed: SPGMMMGMFNMLSTV
SPGFMMNMGNMMSTV

SEQ ID NO: 196075 - protein, 15 aa, Artificial Sequence
  Description of Artificial Sequence: Synthetic peptide
  Seed: SPGMMMGMFNMLSTV
SPGFMMNMGNMNSTV

SEQ ID NO: 196076 - protein, 15 aa, Artificial Sequence
  Description of Artificial Sequence: Synthetic peptide
  Seed: SPGMMMGMFNMLSTV
SPGFMMNMGNMPSTV

SEQ ID NO: 196077 - protein, 15 aa, Artificial Sequence
  Description of Artificial Sequence: Synthetic peptide
  Seed: SPGMMMGMFNMLSTV
SPGFMMNMGNMQSTV

SEQ ID NO: 196078 - protein, 15 aa, Artificial Sequence
  Description of Artificial Sequence: Synthetic peptide
  Seed: SPGMMMGMFNMLSTV
SPGFMMNMGNMRSTV

SEQ ID NO: 196079 - protein, 15 aa, Artificial Sequence
  Description of Artificial Sequence: Synthetic peptide
  Seed: SPGMMMGMFNMLSTV
SPGFMMNMGNMSSTV

SEQ ID NO: 196080 - protein, 15 aa, Artificial Sequence
  Description of Artificial Sequence: Synthetic peptide
  Seed: SPGMMMGMFNMLSTV
SPGFMMNMGNMTSTV

SEQ ID NO: 196081 - protein, 15 aa, Artificial Sequence
  Description of Artificial Sequence: Synthetic peptide
  Seed: SPGMMMGMFNMLSTV
SPGFMMNMGNMVSTV

SEQ ID NO: 196082 - protein, 15 aa, Artificial Sequence
  Description of Artificial Sequence: Synthetic peptide
  Seed: SPGMMMGMFNMLSTV
SPGFMMNMGNMWSTV

SEQ ID NO: 196083 - protein, 15 aa, Artificial Sequence
  Description of Artificial Sequence: Synthetic peptide
  Seed: SPGMMMGMFNMLSTV
SPGFMMNMGNMYSTV

SEQ ID NO: 196084 - protein, 15 aa, Artificial Sequence
  Description of Artificial Sequence: Synthetic peptide
  Seed: SPGMMMGMFNMLSTV
SPGFMMNMHNMASTV

SEQ ID NO: 196085 - protein, 15 aa, Artificial Sequence
  Description of Artificial Sequence: Synthetic peptide
  Seed: SPGMMMGMFNMLSTV
SPGFMMNMHNMFSTV

SEQ ID NO: 196086 - protein, 15 aa, Artificial Sequence
  Description of Artificial Sequence: Synthetic peptide
  Seed: SPGMMMGMFNMLSTV
SPGFMMNMHNMISTV

SEQ ID NO: 196087 - protein, 15 aa, Artificial Sequence
  Description of Artificial Sequence: Synthetic peptide
  Seed: SPGMMMGMFNMLSTV
SPGFMMNMHNMLSTV

SEQ ID NO: 196088 - protein, 15 aa, Artificial Sequence
  Description of Artificial Sequence: Synthetic peptide
  Seed: SPGMMMGMFNMLSTV
SPGFMMNMHNMMSTV

SEQ ID NO: 196089 - protein, 15 aa, Artificial Sequence
  Description of Artificial Sequence: Synthetic peptide
  Seed: SPGMMMGMFNMLSTV
SPGFMMNMHNMSSTV

SEQ ID NO: 196090 - protein, 15 aa, Artificial Sequence
  Description of Artificial Sequence: Synthetic peptide
  Seed: SPGMMMGMFNMLSTV
SPGFMMNMHNMTSTV

SEQ ID NO: 196091 - protein, 15 aa, Artificial Sequence
  Description of Artificial Sequence: Synthetic peptide
  Seed: SPGMMMGMFNMLSTV
SPGFMMNMHNMVSTV

SEQ ID NO: 196092 - protein, 15 aa, Artificial Sequence
  Description of Artificial Sequence: Synthetic peptide
  Seed: SPGMMMGMFNMLSTV
SPGFMMNMHNMYSTV

SEQ ID NO: 196093 - protein, 15 aa, Artificial Sequence
  Description of Artificial Sequence: Synthetic peptide
  Seed: SPGMMMGMFNMLSTV
SPGFMMNMINMASTV

SEQ ID NO: 196094 - protein, 15 aa, Artificial Sequence
  Description of Artificial Sequence: Synthetic peptide
  Seed: SPGMMMGMFNMLSTV
SPGFMMNMINMESTV

SEQ ID NO: 196095 - protein, 15 aa, Artificial Sequence
  Description of Artificial Sequence: Synthetic peptide
  Seed: SPGMMMGMFNMLSTV
SPGFMMNMINMFSTV

SEQ ID NO: 196096 - protein, 15 aa, Artificial Sequence
  Description of Artificial Sequence: Synthetic peptide
  Seed: SPGMMMGMFNMLSTV
SPGFMMNMINMGSTV

SEQ ID NO: 196097 - protein, 15 aa, Artificial Sequence
  Description of Artificial Sequence: Synthetic peptide
  Seed: SPGMMMGMFNMLSTV
SPGFMMNMINMHSTV

SEQ ID NO: 196098 - protein, 15 aa, Artificial Sequence
  Description of Artificial Sequence: Synthetic peptide
  Seed: SPGMMMGMFNMLSTV
SPGFMMNMINMISTV

SEQ ID NO: 196099 - protein, 15 aa, Artificial Sequence
  Description of Artificial Sequence: Synthetic peptide
  Seed: SPGMMMGMFNMLSTV
SPGFMMNMINMKSTV

SEQ ID NO: 196100 - protein, 15 aa, Artificial Sequence
  Description of Artificial Sequence: Synthetic peptide
  Seed: SPGMMMGMFNMLSTV
SPGFMMNMINMLSTV

SEQ ID NO: 196101 - protein, 15 aa, Artificial Sequence
  Description of Artificial Sequence: Synthetic peptide
  Seed: SPGMMMGMFNMLSTV
SPGFMMNMINMMSTV

SEQ ID NO: 196102 - protein, 15 aa, Artificial Sequence
  Description of Artificial Sequence: Synthetic peptide
  Seed: SPGMMMGMFNMLSTV
SPGFMMNMINMNSTV

SEQ ID NO: 196103 - protein, 15 aa, Artificial Sequence
  Description of Artificial Sequence: Synthetic peptide
  Seed: SPGMMMGMFNMLSTV
SPGFMMNMINMPSTV

SEQ ID NO: 196104 - protein, 15 aa, Artificial Sequence
  Description of Artificial Sequence: Synthetic peptide
  Seed: SPGMMMGMFNMLSTV
SPGFMMNMINMQSTV

SEQ ID NO: 196105 - protein, 15 aa, Artificial Sequence
  Description of Artificial Sequence: Synthetic peptide
  Seed: SPGMMMGMFNMLSTV
SPGFMMNMINMRSTV

SEQ ID NO: 196106 - protein, 15 aa, Artificial Sequence
  Description of Artificial Sequence: Synthetic peptide
  Seed: SPGMMMGMFNMLSTV
SPGFMMNMINMSSTV

SEQ ID NO: 196107 - protein, 15 aa, Artificial Sequence
  Description of Artificial Sequence: Synthetic peptide
  Seed: SPGMMMGMFNMLSTV
SPGFMMNMINMTSTV

SEQ ID NO: 196108 - protein, 15 aa, Artificial Sequence
  Description of Artificial Sequence: Synthetic peptide
  Seed: SPGMMMGMFNMLSTV
SPGFMMNMINMVSTV

SEQ ID NO: 196109 - protein, 15 aa, Artificial Sequence
  Description of Artificial Sequence: Synthetic peptide
  Seed: SPGMMMGMFNMLSTV
SPGFMMNMINMWSTV

SEQ ID NO: 196110 - protein, 15 aa, Artificial Sequence
  Description of Artificial Sequence: Synthetic peptide
  Seed: SPGMMMGMFNMLSTV
SPGFMMNMINMYSTV

SEQ ID NO: 196111 - protein, 15 aa, Artificial Sequence
  Description of Artificial Sequence: Synthetic peptide
  Seed: SPGMMMGMFNMLSTV
SPGFMMNMKNMASTV

SEQ ID NO: 196112 - protein, 15 aa, Artificial Sequence
  Description of Artificial Sequence: Synthetic peptide
  Seed: SPGMMMGMFNMLSTV
SPGFMMNMKNMFSTV

SEQ ID NO: 196113 - protein, 15 aa, Artificial Sequence
  Description of Artificial Sequence: Synthetic peptide
  Seed: SPGMMMGMFNMLSTV
SPGFMMNMKNMISTV

SEQ ID NO: 196114 - protein, 15 aa, Artificial Sequence
  Description of Artificial Sequence: Synthetic peptide
  Seed: SPGMMMGMFNMLSTV
SPGFMMNMKNMLSTV

SEQ ID NO: 196115 - protein, 15 aa, Artificial Sequence
  Description of Artificial Sequence: Synthetic peptide
  Seed: SPGMMMGMFNMLSTV
SPGFMMNMKNMMSTV

SEQ ID NO: 196116 - protein, 15 aa, Artificial Sequence
  Description of Artificial Sequence: Synthetic peptide
  Seed: SPGMMMGMFNMLSTV
SPGFMMNMKNMVSTV

SEQ ID NO: 196117 - protein, 15 aa, Artificial Sequence
  Description of Artificial Sequence: Synthetic peptide
  Seed: SPGMMMGMFNMLSTV
SPGFMMNMKNMYSTV

SEQ ID NO: 196118 - protein, 15 aa, Artificial Sequence
  Description of Artificial Sequence: Synthetic peptide
  Seed: SPGMMMGMFNMLSTV
SPGFMMNMLNMASTV

SEQ ID NO: 196119 - protein, 15 aa, Artificial Sequence
  Description of Artificial Sequence: Synthetic peptide
  Seed: SPGMMMGMFNMLSTV
SPGFMMNMLNMFSTV

SEQ ID NO: 196120 - protein, 15 aa, Artificial Sequence
  Description of Artificial Sequence: Synthetic peptide
  Seed: SPGMMMGMFNMLSTV
SPGFMMNMLNMGSTV

SEQ ID NO: 196121 - protein, 15 aa, Artificial Sequence
  Description of Artificial Sequence: Synthetic peptide
  Seed: SPGMMMGMFNMLSTV
SPGFMMNMLNMISTV

SEQ ID NO: 196122 - protein, 15 aa, Artificial Sequence
  Description of Artificial Sequence: Synthetic peptide
  Seed: SPGMMMGMFNMLSTV
SPGFMMNMLNMLSTV

SEQ ID NO: 196123 - protein, 15 aa, Artificial Sequence
  Description of Artificial Sequence: Synthetic peptide
  Seed: SPGMMMGMFNMLSTV
SPGFMMNMLNMMSTV

SEQ ID NO: 196124 - protein, 15 aa, Artificial Sequence
  Description of Artificial Sequence: Synthetic peptide
  Seed: SPGMMMGMFNMLSTV
SPGFMMNMLNMNSTV

SEQ ID NO: 196125 - protein, 15 aa, Artificial Sequence
  Description of Artificial Sequence: Synthetic peptide
  Seed: SPGMMMGMFNMLSTV
SPGFMMNMLNMSSTV

SEQ ID NO: 196126 - protein, 15 aa, Artificial Sequence
  Description of Artificial Sequence: Synthetic peptide
  Seed: SPGMMMGMFNMLSTV
SPGFMMNMLNMTSTV

SEQ ID NO: 196127 - protein, 15 aa, Artificial Sequence
  Description of Artificial Sequence: Synthetic peptide
  Seed: SPGMMMGMFNMLSTV
SPGFMMNMLNMVSTV

SEQ ID NO: 196128 - protein, 15 aa, Artificial Sequence
  Description of Artificial Sequence: Synthetic peptide
  Seed: SPGMMMGMFNMLSTV
SPGFMMNMLNMYSTV

SEQ ID NO: 196129 - protein, 15 aa, Artificial Sequence
  Description of Artificial Sequence: Synthetic peptide
  Seed: SPGMMMGMFNMLSTV
SPGFMMNMMNMASTV

SEQ ID NO: 196130 - protein, 15 aa, Artificial Sequence
  Description of Artificial Sequence: Synthetic peptide
  Seed: SPGMMMGMFNMLSTV
SPGFMMNMMNMFSTV

SEQ ID NO: 196131 - protein, 15 aa, Artificial Sequence
  Description of Artificial Sequence: Synthetic peptide
  Seed: SPGMMMGMFNMLSTV
SPGFMMNMMNMGSTV

SEQ ID NO: 196132 - protein, 15 aa, Artificial Sequence
  Description of Artificial Sequence: Synthetic peptide
  Seed: SPGMMMGMFNMLSTV
SPGFMMNMMNMHSTV

SEQ ID NO: 196133 - protein, 15 aa, Artificial Sequence
  Description of Artificial Sequence: Synthetic peptide
  Seed: SPGMMMGMFNMLSTV
SPGFMMNMMNMISTV

SEQ ID NO: 196134 - protein, 15 aa, Artificial Sequence
  Description of Artificial Sequence: Synthetic peptide
  Seed: SPGMMMGMFNMLSTV
SPGFMMNMMNMLSTV

SEQ ID NO: 196135 - protein, 15 aa, Artificial Sequence
  Description of Artificial Sequence: Synthetic peptide
  Seed: SPGMMMGMFNMLSTV
SPGFMMNMMNMMSTV

SEQ ID NO: 196136 - protein, 15 aa, Artificial Sequence
  Description of Artificial Sequence: Synthetic peptide
  Seed: SPGMMMGMFNMLSTV
SPGFMMNMMNMNSTV

SEQ ID NO: 196137 - protein, 15 aa, Artificial Sequence
  Description of Artificial Sequence: Synthetic peptide
  Seed: SPGMMMGMFNMLSTV
SPGFMMNMMNMRSTV

SEQ ID NO: 196138 - protein, 15 aa, Artificial Sequence
  Description of Artificial Sequence: Synthetic peptide
  Seed: SPGMMMGMFNMLSTV
SPGFMMNMMNMSSTV

SEQ ID NO: 196139 - protein, 15 aa, Artificial Sequence
  Description of Artificial Sequence: Synthetic peptide
  Seed: SPGMMMGMFNMLSTV
SPGFMMNMMNMTSTV

SEQ ID NO: 196140 - protein, 15 aa, Artificial Sequence
  Description of Artificial Sequence: Synthetic peptide
  Seed: SPGMMMGMFNMLSTV
SPGFMMNMMNMVSTV

SEQ ID NO: 196141 - protein, 15 aa, Artificial Sequence
  Description of Artificial Sequence: Synthetic peptide
  Seed: SPGMMMGMFNMLSTV
SPGFMMNMMNMYSTV

SEQ ID NO: 196142 - protein, 15 aa, Artificial Sequence
  Description of Artificial Sequence: Synthetic peptide
  Seed: SPGMMMGMFNMLSTV
SPGFMMNMNNMASTV

SEQ ID NO: 196143 - protein, 15 aa, Artificial Sequence
  Description of Artificial Sequence: Synthetic peptide
  Seed: SPGMMMGMFNMLSTV
SPGFMMNMNNMCSTV

SEQ ID NO: 196144 - protein, 15 aa, Artificial Sequence
  Description of Artificial Sequence: Synthetic peptide
  Seed: SPGMMMGMFNMLSTV
SPGFMMNMNNMDSTV

SEQ ID NO: 196145 - protein, 15 aa, Artificial Sequence
  Description of Artificial Sequence: Synthetic peptide
  Seed: SPGMMMGMFNMLSTV
SPGFMMNMNNMESTV

SEQ ID NO: 196146 - protein, 15 aa, Artificial Sequence
  Description of Artificial Sequence: Synthetic peptide
  Seed: SPGMMMGMFNMLSTV
SPGFMMNMNNMFSTV

SEQ ID NO: 196147 - protein, 15 aa, Artificial Sequence
  Description of Artificial Sequence: Synthetic peptide
  Seed: SPGMMMGMFNMLSTV
SPGFMMNMNNMGSTV

SEQ ID NO: 196148 - protein, 15 aa, Artificial Sequence
  Description of Artificial Sequence: Synthetic peptide
  Seed: SPGMMMGMFNMLSTV
SPGFMMNMNNMHSTV

SEQ ID NO: 196149 - protein, 15 aa, Artificial Sequence
  Description of Artificial Sequence: Synthetic peptide
  Seed: SPGMMMGMFNMLSTV
SPGFMMNMNNMISTV

SEQ ID NO: 196150 - protein, 15 aa, Artificial Sequence
  Description of Artificial Sequence: Synthetic peptide
  Seed: SPGMMMGMFNMLSTV
SPGFMMNMNNMKSTV

SEQ ID NO: 196151 - protein, 15 aa, Artificial Sequence
  Description of Artificial Sequence: Synthetic peptide
  Seed: SPGMMMGMFNMLSTV
SPGFMMNMNNMLSTV

SEQ ID NO: 196152 - protein, 15 aa, Artificial Sequence
  Description of Artificial Sequence: Synthetic peptide
  Seed: SPGMMMGMFNMLSTV
SPGFMMNMNNMMSTV

SEQ ID NO: 196153 - protein, 15 aa, Artificial Sequence
  Description of Artificial Sequence: Synthetic peptide
  Seed: SPGMMMGMFNMLSTV
SPGFMMNMNNMNSTV

SEQ ID NO: 196154 - protein, 15 aa, Artificial Sequence
  Description of Artificial Sequence: Synthetic peptide
  Seed: SPGMMMGMFNMLSTV
SPGFMMNMNNMPSTV

SEQ ID NO: 196155 - protein, 15 aa, Artificial Sequence
  Description of Artificial Sequence: Synthetic peptide
  Seed: SPGMMMGMFNMLSTV
SPGFMMNMNNMQSTV

SEQ ID NO: 196156 - protein, 15 aa, Artificial Sequence
  Description of Artificial Sequence: Synthetic peptide
  Seed: SPGMMMGMFNMLSTV
SPGFMMNMNNMRSTV

SEQ ID NO: 196157 - protein, 15 aa, Artificial Sequence
  Description of Artificial Sequence: Synthetic peptide
  Seed: SPGMMMGMFNMLSTV
SPGFMMNMNNMSSTV

SEQ ID NO: 196158 - protein, 15 aa, Artificial Sequence
  Description of Artificial Sequence: Synthetic peptide
  Seed: SPGMMMGMFNMLSTV
SPGFMMNMNNMTSTV

SEQ ID NO: 196159 - protein, 15 aa, Artificial Sequence
  Description of Artificial Sequence: Synthetic peptide
  Seed: SPGMMMGMFNMLSTV
SPGFMMNMNNMVSTV

SEQ ID NO: 196160 - protein, 15 aa, Artificial Sequence
  Description of Artificial Sequence: Synthetic peptide
  Seed: SPGMMMGMFNMLSTV
SPGFMMNMNNMWSTV

SEQ ID NO: 196161 - protein, 15 aa, Artificial Sequence
  Description of Artificial Sequence: Synthetic peptide
  Seed: SPGMMMGMFNMLSTV
SPGFMMNMNNMYSTV

SEQ ID NO: 196162 - protein, 15 aa, Artificial Sequence
  Description of Artificial Sequence: Synthetic peptide
  Seed: SPGMMMGMFNMLSTV
SPGFMMNMPNMASTV

SEQ ID NO: 196163 - protein, 15 aa, Artificial Sequence
  Description of Artificial Sequence: Synthetic peptide
  Seed: SPGMMMGMFNMLSTV
SPGFMMNMPNMFSTV

SEQ ID NO: 196164 - protein, 15 aa, Artificial Sequence
  Description of Artificial Sequence: Synthetic peptide
  Seed: SPGMMMGMFNMLSTV
SPGFMMNMPNMGSTV

SEQ ID NO: 196165 - protein, 15 aa, Artificial Sequence
  Description of Artificial Sequence: Synthetic peptide
  Seed: SPGMMMGMFNMLSTV
SPGFMMNMPNMHSTV

SEQ ID NO: 196166 - protein, 15 aa, Artificial Sequence
  Description of Artificial Sequence: Synthetic peptide
  Seed: SPGMMMGMFNMLSTV
SPGFMMNMPNMISTV

SEQ ID NO: 196167 - protein, 15 aa, Artificial Sequence
  Description of Artificial Sequence: Synthetic peptide
  Seed: SPGMMMGMFNMLSTV
SPGFMMNMPNMLSTV

SEQ ID NO: 196168 - protein, 15 aa, Artificial Sequence
  Description of Artificial Sequence: Synthetic peptide
  Seed: SPGMMMGMFNMLSTV
SPGFMMNMPNMMSTV

SEQ ID NO: 196169 - protein, 15 aa, Artificial Sequence
  Description of Artificial Sequence: Synthetic peptide
  Seed: SPGMMMGMFNMLSTV
SPGFMMNMPNMNSTV

SEQ ID NO: 196170 - protein, 15 aa, Artificial Sequence
  Description of Artificial Sequence: Synthetic peptide
  Seed: SPGMMMGMFNMLSTV
SPGFMMNMPNMPSTV

SEQ ID NO: 196171 - protein, 15 aa, Artificial Sequence
  Description of Artificial Sequence: Synthetic peptide
  Seed: SPGMMMGMFNMLSTV
SPGFMMNMPNMQSTV

SEQ ID NO: 196172 - protein, 15 aa, Artificial Sequence
  Description of Artificial Sequence: Synthetic peptide
  Seed: SPGMMMGMFNMLSTV
SPGFMMNMPNMRSTV

SEQ ID NO: 196173 - protein, 15 aa, Artificial Sequence
  Description of Artificial Sequence: Synthetic peptide
  Seed: SPGMMMGMFNMLSTV
SPGFMMNMPNMSSTV

SEQ ID NO: 196174 - protein, 15 aa, Artificial Sequence
  Description of Artificial Sequence: Synthetic peptide
  Seed: SPGMMMGMFNMLSTV
SPGFMMNMPNMTSTV

SEQ ID NO: 196175 - protein, 15 aa, Artificial Sequence
  Description of Artificial Sequence: Synthetic peptide
  Seed: SPGMMMGMFNMLSTV
SPGFMMNMPNMVSTV

SEQ ID NO: 196176 - protein, 15 aa, Artificial Sequence
  Description of Artificial Sequence: Synthetic peptide
  Seed: SPGMMMGMFNMLSTV
SPGFMMNMPNMWSTV

SEQ ID NO: 196177 - protein, 15 aa, Artificial Sequence
  Description of Artificial Sequence: Synthetic peptide
  Seed: SPGMMMGMFNMLSTV
SPGFMMNMPNMYSTV

SEQ ID NO: 196178 - protein, 15 aa, Artificial Sequence
  Description of Artificial Sequence: Synthetic peptide
  Seed: SPGMMMGMFNMLSTV
SPGFMMNMQNMASTV

SEQ ID NO: 196179 - protein, 15 aa, Artificial Sequence
  Description of Artificial Sequence: Synthetic peptide
  Seed: SPGMMMGMFNMLSTV
SPGFMMNMQNMFSTV

SEQ ID NO: 196180 - protein, 15 aa, Artificial Sequence
  Description of Artificial Sequence: Synthetic peptide
  Seed: SPGMMMGMFNMLSTV
SPGFMMNMQNMISTV

SEQ ID NO: 196181 - protein, 15 aa, Artificial Sequence
  Description of Artificial Sequence: Synthetic peptide
  Seed: SPGMMMGMFNMLSTV
SPGFMMNMQNMLSTV

SEQ ID NO: 196182 - protein, 15 aa, Artificial Sequence
  Description of Artificial Sequence: Synthetic peptide
  Seed: SPGMMMGMFNMLSTV
SPGFMMNMQNMMSTV

SEQ ID NO: 196183 - protein, 15 aa, Artificial Sequence
  Description of Artificial Sequence: Synthetic peptide
  Seed: SPGMMMGMFNMLSTV
SPGFMMNMQNMTSTV

SEQ ID NO: 196184 - protein, 15 aa, Artificial Sequence
  Description of Artificial Sequence: Synthetic peptide
  Seed: SPGMMMGMFNMLSTV
SPGFMMNMQNMVSTV

SEQ ID NO: 196185 - protein, 15 aa, Artificial Sequence
  Description of Artificial Sequence: Synthetic peptide
  Seed: SPGMMMGMFNMLSTV
SPGFMMNMQNMYSTV

SEQ ID NO: 196186 - protein, 15 aa, Artificial Sequence
  Description of Artificial Sequence: Synthetic peptide
  Seed: SPGMMMGMFNMLSTV
SPGFMMNMRNMASTV

SEQ ID NO: 196187 - protein, 15 aa, Artificial Sequence
  Description of Artificial Sequence: Synthetic peptide
  Seed: SPGMMMGMFNMLSTV
SPGFMMNMRNMFSTV

SEQ ID NO: 196188 - protein, 15 aa, Artificial Sequence
  Description of Artificial Sequence: Synthetic peptide
  Seed: SPGMMMGMFNMLSTV
SPGFMMNMRNMISTV

SEQ ID NO: 196189 - protein, 15 aa, Artificial Sequence
  Description of Artificial Sequence: Synthetic peptide
  Seed: SPGMMMGMFNMLSTV
SPGFMMNMRNMLSTV

SEQ ID NO: 196190 - protein, 15 aa, Artificial Sequence
  Description of Artificial Sequence: Synthetic peptide
  Seed: SPGMMMGMFNMLSTV
SPGFMMNMRNMMSTV

SEQ ID NO: 196191 - protein, 15 aa, Artificial Sequence
  Description of Artificial Sequence: Synthetic peptide
  Seed: SPGMMMGMFNMLSTV
SPGFMMNMRNMVSTV

SEQ ID NO: 196192 - protein, 15 aa, Artificial Sequence
  Description of Artificial Sequence: Synthetic peptide
  Seed: SPGMMMGMFNMLSTV
SPGFMMNMRNMYSTV

SEQ ID NO: 196193 - protein, 15 aa, Artificial Sequence
  Description of Artificial Sequence: Synthetic peptide
  Seed: SPGMMMGMFNMLSTV
SPGFMMNMSNMASTV

SEQ ID NO: 196194 - protein, 15 aa, Artificial Sequence
  Description of Artificial Sequence: Synthetic peptide
  Seed: SPGMMMGMFNMLSTV
SPGFMMNMSNMCSTV

SEQ ID NO: 196195 - protein, 15 aa, Artificial Sequence
  Description of Artificial Sequence: Synthetic peptide
  Seed: SPGMMMGMFNMLSTV
SPGFMMNMSNMDSTV

SEQ ID NO: 196196 - protein, 15 aa, Artificial Sequence
  Description of Artificial Sequence: Synthetic peptide
  Seed: SPGMMMGMFNMLSTV
SPGFMMNMSNMESTV

SEQ ID NO: 196197 - protein, 15 aa, Artificial Sequence
  Description of Artificial Sequence: Synthetic peptide
  Seed: SPGMMMGMFNMLSTV
SPGFMMNMSNMFSTV

SEQ ID NO: 196198 - protein, 15 aa, Artificial Sequence
  Description of Artificial Sequence: Synthetic peptide
  Seed: SPGMMMGMFNMLSTV
SPGFMMNMSNMGSTV

SEQ ID NO: 196199 - protein, 15 aa, Artificial Sequence
  Description of Artificial Sequence: Synthetic peptide
  Seed: SPGMMMGMFNMLSTV
SPGFMMNMSNMHSTV

SEQ ID NO: 196200 - protein, 15 aa, Artificial Sequence
  Description of Artificial Sequence: Synthetic peptide
  Seed: SPGMMMGMFNMLSTV
SPGFMMNMSNMISTV

SEQ ID NO: 196201 - protein, 15 aa, Artificial Sequence
  Description of Artificial Sequence: Synthetic peptide
  Seed: SPGMMMGMFNMLSTV
SPGFMMNMSNMKSTV

SEQ ID NO: 196202 - protein, 15 aa, Artificial Sequence
  Description of Artificial Sequence: Synthetic peptide
  Seed: SPGMMMGMFNMLSTV
SPGFMMNMSNMLSTV

SEQ ID NO: 196203 - protein, 15 aa, Artificial Sequence
  Description of Artificial Sequence: Synthetic peptide
  Seed: SPGMMMGMFNMLSTV
SPGFMMNMSNMMSTV

SEQ ID NO: 196204 - protein, 15 aa, Artificial Sequence
  Description of Artificial Sequence: Synthetic peptide
  Seed: SPGMMMGMFNMLSTV
SPGFMMNMSNMNSTV

SEQ ID NO: 196205 - protein, 15 aa, Artificial Sequence
  Description of Artificial Sequence: Synthetic peptide
  Seed: SPGMMMGMFNMLSTV
SPGFMMNMSNMPSTV

SEQ ID NO: 196206 - protein, 15 aa, Artificial Sequence
  Description of Artificial Sequence: Synthetic peptide
  Seed: SPGMMMGMFNMLSTV
SPGFMMNMSNMQSTV

SEQ ID NO: 196207 - protein, 15 aa, Artificial Sequence
  Description of Artificial Sequence: Synthetic peptide
  Seed: SPGMMMGMFNMLSTV
SPGFMMNMSNMRSTV

SEQ ID NO: 196208 - protein, 15 aa, Artificial Sequence
  Description of Artificial Sequence: Synthetic peptide
  Seed: SPGMMMGMFNMLSTV
SPGFMMNMSNMSSTV

SEQ ID NO: 196209 - protein, 15 aa, Artificial Sequence
  Description of Artificial Sequence: Synthetic peptide
  Seed: SPGMMMGMFNMLSTV
SPGFMMNMSNMTSTV

SEQ ID NO: 196210 - protein, 15 aa, Artificial Sequence
  Description of Artificial Sequence: Synthetic peptide
  Seed: SPGMMMGMFNMLSTV
SPGFMMNMSNMVSTV

SEQ ID NO: 196211 - protein, 15 aa, Artificial Sequence
  Description of Artificial Sequence: Synthetic peptide
  Seed: SPGMMMGMFNMLSTV
SPGFMMNMSNMWSTV

SEQ ID NO: 196212 - protein, 15 aa, Artificial Sequence
  Description of Artificial Sequence: Synthetic peptide
  Seed: SPGMMMGMFNMLSTV
SPGFMMNMSNMYSTV

SEQ ID NO: 196213 - protein, 15 aa, Artificial Sequence
  Description of Artificial Sequence: Synthetic peptide
  Seed: SPGMMMGMFNMLSTV
SPGFMMNMTNMASTV

SEQ ID NO: 196214 - protein, 15 aa, Artificial Sequence
  Description of Artificial Sequence: Synthetic peptide
  Seed: SPGMMMGMFNMLSTV
SPGFMMNMTNMFSTV

SEQ ID NO: 196215 - protein, 15 aa, Artificial Sequence
  Description of Artificial Sequence: Synthetic peptide
  Seed: SPGMMMGMFNMLSTV
SPGFMMNMTNMGSTV

SEQ ID NO: 196216 - protein, 15 aa, Artificial Sequence
  Description of Artificial Sequence: Synthetic peptide
  Seed: SPGMMMGMFNMLSTV
SPGFMMNMTNMHSTV

SEQ ID NO: 196217 - protein, 15 aa, Artificial Sequence
  Description of Artificial Sequence: Synthetic peptide
  Seed: SPGMMMGMFNMLSTV
SPGFMMNMTNMISTV

SEQ ID NO: 196218 - protein, 15 aa, Artificial Sequence
  Description of Artificial Sequence: Synthetic peptide
  Seed: SPGMMMGMFNMLSTV
SPGFMMNMTNMLSTV

SEQ ID NO: 196219 - protein, 15 aa, Artificial Sequence
  Description of Artificial Sequence: Synthetic peptide
  Seed: SPGMMMGMFNMLSTV
SPGFMMNMTNMMSTV

SEQ ID NO: 196220 - protein, 15 aa, Artificial Sequence
  Description of Artificial Sequence: Synthetic peptide
  Seed: SPGMMMGMFNMLSTV
SPGFMMNMTNMNSTV

SEQ ID NO: 196221 - protein, 15 aa, Artificial Sequence
  Description of Artificial Sequence: Synthetic peptide
  Seed: SPGMMMGMFNMLSTV
SPGFMMNMTNMPSTV

SEQ ID NO: 196222 - protein, 15 aa, Artificial Sequence
  Description of Artificial Sequence: Synthetic peptide
  Seed: SPGMMMGMFNMLSTV
SPGFMMNMTNMQSTV

SEQ ID NO: 196223 - protein, 15 aa, Artificial Sequence
  Description of Artificial Sequence: Synthetic peptide
  Seed: SPGMMMGMFNMLSTV
SPGFMMNMTNMRSTV

SEQ ID NO: 196224 - protein, 15 aa, Artificial Sequence
  Description of Artificial Sequence: Synthetic peptide
  Seed: SPGMMMGMFNMLSTV
SPGFMMNMTNMSSTV

SEQ ID NO: 196225 - protein, 15 aa, Artificial Sequence
  Description of Artificial Sequence: Synthetic peptide
  Seed: SPGMMMGMFNMLSTV
SPGFMMNMTNMTSTV

SEQ ID NO: 196226 - protein, 15 aa, Artificial Sequence
  Description of Artificial Sequence: Synthetic peptide
  Seed: SPGMMMGMFNMLSTV
SPGFMMNMTNMVSTV

SEQ ID NO: 196227 - protein, 15 aa, Artificial Sequence
  Description of Artificial Sequence: Synthetic peptide
  Seed: SPGMMMGMFNMLSTV
SPGFMMNMTNMWSTV

SEQ ID NO: 196228 - protein, 15 aa, Artificial Sequence
  Description of Artificial Sequence: Synthetic peptide
  Seed: SPGMMMGMFNMLSTV
SPGFMMNMTNMYSTV

SEQ ID NO: 196229 - protein, 15 aa, Artificial Sequence
  Description of Artificial Sequence: Synthetic peptide
  Seed: SPGMMMGMFNMLSTV
SPGFMMNMVNMASTV

SEQ ID NO: 196230 - protein, 15 aa, Artificial Sequence
  Description of Artificial Sequence: Synthetic peptide
  Seed: SPGMMMGMFNMLSTV
SPGFMMNMVNMDSTV

SEQ ID NO: 196231 - protein, 15 aa, Artificial Sequence
  Description of Artificial Sequence: Synthetic peptide
  Seed: SPGMMMGMFNMLSTV
SPGFMMNMVNMESTV

SEQ ID NO: 196232 - protein, 15 aa, Artificial Sequence
  Description of Artificial Sequence: Synthetic peptide
  Seed: SPGMMMGMFNMLSTV
SPGFMMNMVNMFSTV

SEQ ID NO: 196233 - protein, 15 aa, Artificial Sequence
  Description of Artificial Sequence: Synthetic peptide
  Seed: SPGMMMGMFNMLSTV
SPGFMMNMVNMGSTV

SEQ ID NO: 196234 - protein, 15 aa, Artificial Sequence
  Description of Artificial Sequence: Synthetic peptide
  Seed: SPGMMMGMFNMLSTV
SPGFMMNMVNMHSTV

SEQ ID NO: 196235 - protein, 15 aa, Artificial Sequence
  Description of Artificial Sequence: Synthetic peptide
  Seed: SPGMMMGMFNMLSTV
SPGFMMNMVNMISTV

SEQ ID NO: 196236 - protein, 15 aa, Artificial Sequence
  Description of Artificial Sequence: Synthetic peptide
  Seed: SPGMMMGMFNMLSTV
SPGFMMNMVNMKSTV

SEQ ID NO: 196237 - protein, 15 aa, Artificial Sequence
  Description of Artificial Sequence: Synthetic peptide
  Seed: SPGMMMGMFNMLSTV
SPGFMMNMVNMLSTV

SEQ ID NO: 196238 - protein, 15 aa, Artificial Sequence
  Description of Artificial Sequence: Synthetic peptide
  Seed: SPGMMMGMFNMLSTV
SPGFMMNMVNMMSTV

SEQ ID NO: 196239 - protein, 15 aa, Artificial Sequence
  Description of Artificial Sequence: Synthetic peptide
  Seed: SPGMMMGMFNMLSTV
SPGFMMNMVNMNSTV

SEQ ID NO: 196240 - protein, 15 aa, Artificial Sequence
  Description of Artificial Sequence: Synthetic peptide
  Seed: SPGMMMGMFNMLSTV
SPGFMMNMVNMPSTV

SEQ ID NO: 196241 - protein, 15 aa, Artificial Sequence
  Description of Artificial Sequence: Synthetic peptide
  Seed: SPGMMMGMFNMLSTV
SPGFMMNMVNMQSTV

SEQ ID NO: 196242 - protein, 15 aa, Artificial Sequence
  Description of Artificial Sequence: Synthetic peptide
  Seed: SPGMMMGMFNMLSTV
SPGFMMNMVNMRSTV

SEQ ID NO: 196243 - protein, 15 aa, Artificial Sequence
  Description of Artificial Sequence: Synthetic peptide
  Seed: SPGMMMGMFNMLSTV
SPGFMMNMVNMSSTV

SEQ ID NO: 196244 - protein, 15 aa, Artificial Sequence
  Description of Artificial Sequence: Synthetic peptide
  Seed: SPGMMMGMFNMLSTV
SPGFMMNMVNMTSTV

SEQ ID NO: 196245 - protein, 15 aa, Artificial Sequence
  Description of Artificial Sequence: Synthetic peptide
  Seed: SPGMMMGMFNMLSTV
SPGFMMNMVNMVSTV

SEQ ID NO: 196246 - protein, 15 aa, Artificial Sequence
  Description of Artificial Sequence: Synthetic peptide
  Seed: SPGMMMGMFNMLSTV
SPGFMMNMVNMWSTV

SEQ ID NO: 196247 - protein, 15 aa, Artificial Sequence
  Description of Artificial Sequence: Synthetic peptide
  Seed: SPGMMMGMFNMLSTV
SPGFMMNMVNMYSTV

SEQ ID NO: 196248 - protein, 15 aa, Artificial Sequence
  Description of Artificial Sequence: Synthetic peptide
  Seed: SPGMMMGMFNMLSTV
SPGFMMNMWNMASTV

SEQ ID NO: 196249 - protein, 15 aa, Artificial Sequence
  Description of Artificial Sequence: Synthetic peptide
  Seed: SPGMMMGMFNMLSTV
SPGFMMNMWNMFSTV

SEQ ID NO: 196250 - protein, 15 aa, Artificial Sequence
  Description of Artificial Sequence: Synthetic peptide
  Seed: SPGMMMGMFNMLSTV
SPGFMMNMWNMISTV

SEQ ID NO: 196251 - protein, 15 aa, Artificial Sequence
  Description of Artificial Sequence: Synthetic peptide
  Seed: SPGMMMGMFNMLSTV
SPGFMMNMWNMLSTV

SEQ ID NO: 196252 - protein, 15 aa, Artificial Sequence
  Description of Artificial Sequence: Synthetic peptide
  Seed: SPGMMMGMFNMLSTV
SPGFMMNMWNMMSTV

SEQ ID NO: 196253 - protein, 15 aa, Artificial Sequence
  Description of Artificial Sequence: Synthetic peptide
  Seed: SPGMMMGMFNMLSTV
SPGFMMNMWNMVSTV

SEQ ID NO: 196254 - protein, 15 aa, Artificial Sequence
  Description of Artificial Sequence: Synthetic peptide
  Seed: SPGMMMGMFNMLSTV
SPGFMMNMWNMYSTV

SEQ ID NO: 196255 - protein, 15 aa, Artificial Sequence
  Description of Artificial Sequence: Synthetic peptide
  Seed: SPGMMMGMFNMLSTV
SPGFMMNMYNMASTV

SEQ ID NO: 196256 - protein, 15 aa, Artificial Sequence
  Description of Artificial Sequence: Synthetic peptide
  Seed: SPGMMMGMFNMLSTV
SPGFMMNMYNMFSTV

SEQ ID NO: 196257 - protein, 15 aa, Artificial Sequence
  Description of Artificial Sequence: Synthetic peptide
  Seed: SPGMMMGMFNMLSTV
SPGFMMNMYNMISTV

SEQ ID NO: 196258 - protein, 15 aa, Artificial Sequence
  Description of Artificial Sequence: Synthetic peptide
  Seed: SPGMMMGMFNMLSTV
SPGFMMNMYNMLSTV

SEQ ID NO: 196259 - protein, 15 aa, Artificial Sequence
  Description of Artificial Sequence: Synthetic peptide
  Seed: SPGMMMGMFNMLSTV
SPGFMMNMYNMMSTV

SEQ ID NO: 196260 - protein, 15 aa, Artificial Sequence
  Description of Artificial Sequence: Synthetic peptide
  Seed: SPGMMMGMFNMLSTV
SPGFMMNMYNMVSTV

SEQ ID NO: 196261 - protein, 15 aa, Artificial Sequence
  Description of Artificial Sequence: Synthetic peptide
  Seed: SPGMMMGMFNMLSTV
SPGFMMNMYNMYSTV

SEQ ID NO: 196262 - protein, 15 aa, Artificial Sequence
  Description of Artificial Sequence: Synthetic peptide
  Seed: SPGMMMGMFNMLSTV
SPGFMMPMANMISTV

SEQ ID NO: 196263 - protein, 15 aa, Artificial Sequence
  Description of Artificial Sequence: Synthetic peptide
  Seed: SPGMMMGMFNMLSTV
SPGFMMPMANMLSTV

SEQ ID NO: 196264 - protein, 15 aa, Artificial Sequence
  Description of Artificial Sequence: Synthetic peptide
  Seed: SPGMMMGMFNMLSTV
SPGFMMPMANMVSTV

SEQ ID NO: 196265 - protein, 15 aa, Artificial Sequence
  Description of Artificial Sequence: Synthetic peptide
  Seed: SPGMMMGMFNMLSTV
SPGFMMPMFNMFSTV

SEQ ID NO: 196266 - protein, 15 aa, Artificial Sequence
  Description of Artificial Sequence: Synthetic peptide
  Seed: SPGMMMGMFNMLSTV
SPGFMMPMFNMISTV

SEQ ID NO: 196267 - protein, 15 aa, Artificial Sequence
  Description of Artificial Sequence: Synthetic peptide
  Seed: SPGMMMGMFNMLSTV
SPGFMMPMFNMLSTV

SEQ ID NO: 196268 - protein, 15 aa, Artificial Sequence
  Description of Artificial Sequence: Synthetic peptide
  Seed: SPGMMMGMFNMLSTV
SPGFMMPMFNMMSTV

SEQ ID NO: 196269 - protein, 15 aa, Artificial Sequence
  Description of Artificial Sequence: Synthetic peptide
  Seed: SPGMMMGMFNMLSTV
SPGFMMPMFNMVSTV

SEQ ID NO: 196270 - protein, 15 aa, Artificial Sequence
  Description of Artificial Sequence: Synthetic peptide
  Seed: SPGMMMGMFNMLSTV
SPGFMMPMSNMISTV

SEQ ID NO: 196271 - protein, 15 aa, Artificial Sequence
  Description of Artificial Sequence: Synthetic peptide
  Seed: SPGMMMGMFNMLSTV
SPGFMMPMSNMLSTV

SEQ ID NO: 196272 - protein, 15 aa, Artificial Sequence
  Description of Artificial Sequence: Synthetic peptide
  Seed: SPGMMMGMFNMLSTV
SPGFMMQMANMASTV

SEQ ID NO: 196273 - protein, 15 aa, Artificial Sequence
  Description of Artificial Sequence: Synthetic peptide
  Seed: SPGMMMGMFNMLSTV
SPGFMMQMANMFSTV

SEQ ID NO: 196274 - protein, 15 aa, Artificial Sequence
  Description of Artificial Sequence: Synthetic peptide
  Seed: SPGMMMGMFNMLSTV
SPGFMMQMANMISTV

SEQ ID NO: 196275 - protein, 15 aa, Artificial Sequence
  Description of Artificial Sequence: Synthetic peptide
  Seed: SPGMMMGMFNMLSTV
SPGFMMQMANMLSTV

SEQ ID NO: 196276 - protein, 15 aa, Artificial Sequence
  Description of Artificial Sequence: Synthetic peptide
  Seed: SPGMMMGMFNMLSTV
SPGFMMQMANMMSTV

SEQ ID NO: 196277 - protein, 15 aa, Artificial Sequence
  Description of Artificial Sequence: Synthetic peptide
  Seed: SPGMMMGMFNMLSTV
SPGFMMQMANMVSTV

SEQ ID NO: 196278 - protein, 15 aa, Artificial Sequence
  Description of Artificial Sequence: Synthetic peptide
  Seed: SPGMMMGMFNMLSTV
SPGFMMQMANMYSTV

SEQ ID NO: 196279 - protein, 15 aa, Artificial Sequence
  Description of Artificial Sequence: Synthetic peptide
  Seed: SPGMMMGMFNMLSTV
SPGFMMQMFNMASTV

SEQ ID NO: 196280 - protein, 15 aa, Artificial Sequence
  Description of Artificial Sequence: Synthetic peptide
  Seed: SPGMMMGMFNMLSTV
SPGFMMQMFNMDSTV

SEQ ID NO: 196281 - protein, 15 aa, Artificial Sequence
  Description of Artificial Sequence: Synthetic peptide
  Seed: SPGMMMGMFNMLSTV
SPGFMMQMFNMESTV

SEQ ID NO: 196282 - protein, 15 aa, Artificial Sequence
  Description of Artificial Sequence: Synthetic peptide
  Seed: SPGMMMGMFNMLSTV
SPGFMMQMFNMFSTV

SEQ ID NO: 196283 - protein, 15 aa, Artificial Sequence
  Description of Artificial Sequence: Synthetic peptide
  Seed: SPGMMMGMFNMLSTV
SPGFMMQMFNMHSTV

SEQ ID NO: 196284 - protein, 15 aa, Artificial Sequence
  Description of Artificial Sequence: Synthetic peptide
  Seed: SPGMMMGMFNMLSTV
SPGFMMQMFNMISTV

SEQ ID NO: 196285 - protein, 15 aa, Artificial Sequence
  Description of Artificial Sequence: Synthetic peptide
  Seed: SPGMMMGMFNMLSTV
SPGFMMQMFNMLSTV

SEQ ID NO: 196286 - protein, 15 aa, Artificial Sequence
  Description of Artificial Sequence: Synthetic peptide
  Seed: SPGMMMGMFNMLSTV
SPGFMMQMFNMMSTV

SEQ ID NO: 196287 - protein, 15 aa, Artificial Sequence
  Description of Artificial Sequence: Synthetic peptide
  Seed: SPGMMMGMFNMLSTV
SPGFMMQMFNMNSTV

SEQ ID NO: 196288 - protein, 15 aa, Artificial Sequence
  Description of Artificial Sequence: Synthetic peptide
  Seed: SPGMMMGMFNMLSTV
SPGFMMQMFNMPSTV

SEQ ID NO: 196289 - protein, 15 aa, Artificial Sequence
  Description of Artificial Sequence: Synthetic peptide
  Seed: SPGMMMGMFNMLSTV
SPGFMMQMFNMQSTV

SEQ ID NO: 196290 - protein, 15 aa, Artificial Sequence
  Description of Artificial Sequence: Synthetic peptide
  Seed: SPGMMMGMFNMLSTV
SPGFMMQMFNMSSTV

SEQ ID NO: 196291 - protein, 15 aa, Artificial Sequence
  Description of Artificial Sequence: Synthetic peptide
  Seed: SPGMMMGMFNMLSTV
SPGFMMQMFNMTSTV

SEQ ID NO: 196292 - protein, 15 aa, Artificial Sequence
  Description of Artificial Sequence: Synthetic peptide
  Seed: SPGMMMGMFNMLSTV
SPGFMMQMFNMVSTV

SEQ ID NO: 196293 - protein, 15 aa, Artificial Sequence
  Description of Artificial Sequence: Synthetic peptide
  Seed: SPGMMMGMFNMLSTV
SPGFMMQMFNMYSTV

SEQ ID NO: 196294 - protein, 15 aa, Artificial Sequence
  Description of Artificial Sequence: Synthetic peptide
  Seed: SPGMMMGMFNMLSTV
SPGFMMQMGNMISTV

SEQ ID NO: 196295 - protein, 15 aa, Artificial Sequence
  Description of Artificial Sequence: Synthetic peptide
  Seed: SPGMMMGMFNMLSTV
SPGFMMQMGNMLSTV

SEQ ID NO: 196296 - protein, 15 aa, Artificial Sequence
  Description of Artificial Sequence: Synthetic peptide
  Seed: SPGMMMGMFNMLSTV
SPGFMMQMGNMVSTV

SEQ ID NO: 196297 - protein, 15 aa, Artificial Sequence
  Description of Artificial Sequence: Synthetic peptide
  Seed: SPGMMMGMFNMLSTV
SPGFMMQMINMFSTV

SEQ ID NO: 196298 - protein, 15 aa, Artificial Sequence
  Description of Artificial Sequence: Synthetic peptide
  Seed: SPGMMMGMFNMLSTV
SPGFMMQMINMISTV

SEQ ID NO: 196299 - protein, 15 aa, Artificial Sequence
  Description of Artificial Sequence: Synthetic peptide
  Seed: SPGMMMGMFNMLSTV
SPGFMMQMINMLSTV

SEQ ID NO: 196300 - protein, 15 aa, Artificial Sequence
  Description of Artificial Sequence: Synthetic peptide
  Seed: SPGMMMGMFNMLSTV
SPGFMMQMINMVSTV

SEQ ID NO: 196301 - protein, 15 aa, Artificial Sequence
  Description of Artificial Sequence: Synthetic peptide
  Seed: SPGMMMGMFNMLSTV
SPGFMMQMLNMFSTV

SEQ ID NO: 196302 - protein, 15 aa, Artificial Sequence
  Description of Artificial Sequence: Synthetic peptide
  Seed: SPGMMMGMFNMLSTV
SPGFMMQMLNMISTV

SEQ ID NO: 196303 - protein, 15 aa, Artificial Sequence
  Description of Artificial Sequence: Synthetic peptide
  Seed: SPGMMMGMFNMLSTV
SPGFMMQMLNMLSTV

SEQ ID NO: 196304 - protein, 15 aa, Artificial Sequence
  Description of Artificial Sequence: Synthetic peptide
  Seed: SPGMMMGMFNMLSTV
SPGFMMQMLNMMSTV

SEQ ID NO: 196305 - protein, 15 aa, Artificial Sequence
  Description of Artificial Sequence: Synthetic peptide
  Seed: SPGMMMGMFNMLSTV
SPGFMMQMLNMVSTV

SEQ ID NO: 196306 - protein, 15 aa, Artificial Sequence
  Description of Artificial Sequence: Synthetic peptide
  Seed: SPGMMMGMFNMLSTV
SPGFMMQMMNMISTV

SEQ ID NO: 196307 - protein, 15 aa, Artificial Sequence
  Description of Artificial Sequence: Synthetic peptide
  Seed: SPGMMMGMFNMLSTV
SPGFMMQMMNMLSTV

SEQ ID NO: 196308 - protein, 15 aa, Artificial Sequence
  Description of Artificial Sequence: Synthetic peptide
  Seed: SPGMMMGMFNMLSTV
SPGFMMQMMNMVSTV

SEQ ID NO: 196309 - protein, 15 aa, Artificial Sequence
  Description of Artificial Sequence: Synthetic peptide
  Seed: SPGMMMGMFNMLSTV
SPGFMMQMNNMASTV

SEQ ID NO: 196310 - protein, 15 aa, Artificial Sequence
  Description of Artificial Sequence: Synthetic peptide
  Seed: SPGMMMGMFNMLSTV
SPGFMMQMNNMFSTV

SEQ ID NO: 196311 - protein, 15 aa, Artificial Sequence
  Description of Artificial Sequence: Synthetic peptide
  Seed: SPGMMMGMFNMLSTV
SPGFMMQMNNMISTV

SEQ ID NO: 196312 - protein, 15 aa, Artificial Sequence
  Description of Artificial Sequence: Synthetic peptide
  Seed: SPGMMMGMFNMLSTV
SPGFMMQMNNMLSTV

SEQ ID NO: 196313 - protein, 15 aa, Artificial Sequence
  Description of Artificial Sequence: Synthetic peptide
  Seed: SPGMMMGMFNMLSTV
SPGFMMQMNNMMSTV

SEQ ID NO: 196314 - protein, 15 aa, Artificial Sequence
  Description of Artificial Sequence: Synthetic peptide
  Seed: SPGMMMGMFNMLSTV
SPGFMMQMNNMVSTV

SEQ ID NO: 196315 - protein, 15 aa, Artificial Sequence
  Description of Artificial Sequence: Synthetic peptide
  Seed: SPGMMMGMFNMLSTV
SPGFMMQMNNMYSTV

SEQ ID NO: 196316 - protein, 15 aa, Artificial Sequence
  Description of Artificial Sequence: Synthetic peptide
  Seed: SPGMMMGMFNMLSTV
SPGFMMQMPNMFSTV

SEQ ID NO: 196317 - protein, 15 aa, Artificial Sequence
  Description of Artificial Sequence: Synthetic peptide
  Seed: SPGMMMGMFNMLSTV
SPGFMMQMPNMISTV

SEQ ID NO: 196318 - protein, 15 aa, Artificial Sequence
  Description of Artificial Sequence: Synthetic peptide
  Seed: SPGMMMGMFNMLSTV
SPGFMMQMPNMLSTV

SEQ ID NO: 196319 - protein, 15 aa, Artificial Sequence
  Description of Artificial Sequence: Synthetic peptide
  Seed: SPGMMMGMFNMLSTV
SPGFMMQMPNMMSTV

SEQ ID NO: 196320 - protein, 15 aa, Artificial Sequence
  Description of Artificial Sequence: Synthetic peptide
  Seed: SPGMMMGMFNMLSTV
SPGFMMQMPNMVSTV

SEQ ID NO: 196321 - protein, 15 aa, Artificial Sequence
  Description of Artificial Sequence: Synthetic peptide
  Seed: SPGMMMGMFNMLSTV
SPGFMMQMSNMFSTV

SEQ ID NO: 196322 - protein, 15 aa, Artificial Sequence
  Description of Artificial Sequence: Synthetic peptide
  Seed: SPGMMMGMFNMLSTV
SPGFMMQMSNMISTV

SEQ ID NO: 196323 - protein, 15 aa, Artificial Sequence
  Description of Artificial Sequence: Synthetic peptide
  Seed: SPGMMMGMFNMLSTV
SPGFMMQMSNMLSTV

SEQ ID NO: 196324 - protein, 15 aa, Artificial Sequence
  Description of Artificial Sequence: Synthetic peptide
  Seed: SPGMMMGMFNMLSTV
SPGFMMQMSNMMSTV

SEQ ID NO: 196325 - protein, 15 aa, Artificial Sequence
  Description of Artificial Sequence: Synthetic peptide
  Seed: SPGMMMGMFNMLSTV
SPGFMMQMSNMVSTV

SEQ ID NO: 196326 - protein, 15 aa, Artificial Sequence
  Description of Artificial Sequence: Synthetic peptide
  Seed: SPGMMMGMFNMLSTV
SPGFMMQMSNMYSTV

SEQ ID NO: 196327 - protein, 15 aa, Artificial Sequence
  Description of Artificial Sequence: Synthetic peptide
  Seed: SPGMMMGMFNMLSTV
SPGFMMQMTNMISTV

SEQ ID NO: 196328 - protein, 15 aa, Artificial Sequence
  Description of Artificial Sequence: Synthetic peptide
  Seed: SPGMMMGMFNMLSTV
SPGFMMQMTNMLSTV

SEQ ID NO: 196329 - protein, 15 aa, Artificial Sequence
  Description of Artificial Sequence: Synthetic peptide
  Seed: SPGMMMGMFNMLSTV
SPGFMMQMTNMVSTV

SEQ ID NO: 196330 - protein, 15 aa, Artificial Sequence
  Description of Artificial Sequence: Synthetic peptide
  Seed: SPGMMMGMFNMLSTV
SPGFMMQMVNMISTV

SEQ ID NO: 196331 - protein, 15 aa, Artificial Sequence
  Description of Artificial Sequence: Synthetic peptide
  Seed: SPGMMMGMFNMLSTV
SPGFMMQMVNMLSTV

SEQ ID NO: 196332 - protein, 15 aa, Artificial Sequence
  Description of Artificial Sequence: Synthetic peptide
  Seed: SPGMMMGMFNMLSTV
SPGFMMQMVNMVSTV

SEQ ID NO: 196333 - protein, 15 aa, Artificial Sequence
  Description of Artificial Sequence: Synthetic peptide
  Seed: SPGMMMGMFNMLSTV
SPGFMMQMWNMFSTV

SEQ ID NO: 196334 - protein, 15 aa, Artificial Sequence
  Description of Artificial Sequence: Synthetic peptide
  Seed: SPGMMMGMFNMLSTV
SPGFMMQMWNMISTV

SEQ ID NO: 196335 - protein, 15 aa, Artificial Sequence
  Description of Artificial Sequence: Synthetic peptide
  Seed: SPGMMMGMFNMLSTV
SPGFMMQMWNMLSTV

SEQ ID NO: 196336 - protein, 15 aa, Artificial Sequence
  Description of Artificial Sequence: Synthetic peptide
  Seed: SPGMMMGMFNMLSTV
SPGFMMQMWNMMSTV

SEQ ID NO: 196337 - protein, 15 aa, Artificial Sequence
  Description of Artificial Sequence: Synthetic peptide
  Seed: SPGMMMGMFNMLSTV
SPGFMMQMWNMVSTV

SEQ ID NO: 196338 - protein, 15 aa, Artificial Sequence
  Description of Artificial Sequence: Synthetic peptide
  Seed: SPGMMMGMFNMLSTV
SPGFMMQMYNMFSTV

SEQ ID NO: 196339 - protein, 15 aa, Artificial Sequence
  Description of Artificial Sequence: Synthetic peptide
  Seed: SPGMMMGMFNMLSTV
SPGFMMQMYNMISTV

SEQ ID NO: 196340 - protein, 15 aa, Artificial Sequence
  Description of Artificial Sequence: Synthetic peptide
  Seed: SPGMMMGMFNMLSTV
SPGFMMQMYNMLSTV

SEQ ID NO: 196341 - protein, 15 aa, Artificial Sequence
  Description of Artificial Sequence: Synthetic peptide
  Seed: SPGMMMGMFNMLSTV
SPGFMMQMYNMMSTV

SEQ ID NO: 196342 - protein, 15 aa, Artificial Sequence
  Description of Artificial Sequence: Synthetic peptide
  Seed: SPGMMMGMFNMLSTV
SPGFMMQMYNMVSTV

SEQ ID NO: 196343 - protein, 15 aa, Artificial Sequence
  Description of Artificial Sequence: Synthetic peptide
  Seed: SPGMMMGMFNMLSTV
SPGFMMRMANMISTV

SEQ ID NO: 196344 - protein, 15 aa, Artificial Sequence
  Description of Artificial Sequence: Synthetic peptide
  Seed: SPGMMMGMFNMLSTV
SPGFMMRMANMLSTV

SEQ ID NO: 196345 - protein, 15 aa, Artificial Sequence
  Description of Artificial Sequence: Synthetic peptide
  Seed: SPGMMMGMFNMLSTV
SPGFMMRMANMVSTV

SEQ ID NO: 196346 - protein, 15 aa, Artificial Sequence
  Description of Artificial Sequence: Synthetic peptide
  Seed: SPGMMMGMFNMLSTV
SPGFMMRMFNMESTV

SEQ ID NO: 196347 - protein, 15 aa, Artificial Sequence
  Description of Artificial Sequence: Synthetic peptide
  Seed: SPGMMMGMFNMLSTV
SPGFMMRMFNMFSTV

SEQ ID NO: 196348 - protein, 15 aa, Artificial Sequence
  Description of Artificial Sequence: Synthetic peptide
  Seed: SPGMMMGMFNMLSTV
SPGFMMRMFNMISTV

SEQ ID NO: 196349 - protein, 15 aa, Artificial Sequence
  Description of Artificial Sequence: Synthetic peptide
  Seed: SPGMMMGMFNMLSTV
SPGFMMRMFNMLSTV

SEQ ID NO: 196350 - protein, 15 aa, Artificial Sequence
  Description of Artificial Sequence: Synthetic peptide
  Seed: SPGMMMGMFNMLSTV
SPGFMMRMFNMMSTV

SEQ ID NO: 196351 - protein, 15 aa, Artificial Sequence
  Description of Artificial Sequence: Synthetic peptide
  Seed: SPGMMMGMFNMLSTV
SPGFMMRMFNMVSTV

SEQ ID NO: 196352 - protein, 15 aa, Artificial Sequence
  Description of Artificial Sequence: Synthetic peptide
  Seed: SPGMMMGMFNMLSTV
SPGFMMRMFNMYSTV

SEQ ID NO: 196353 - protein, 15 aa, Artificial Sequence
  Description of Artificial Sequence: Synthetic peptide
  Seed: SPGMMMGMFNMLSTV
SPGFMMRMINMLSTV

SEQ ID NO: 196354 - protein, 15 aa, Artificial Sequence
  Description of Artificial Sequence: Synthetic peptide
  Seed: SPGMMMGMFNMLSTV
SPGFMMRMLNMFSTV

SEQ ID NO: 196355 - protein, 15 aa, Artificial Sequence
  Description of Artificial Sequence: Synthetic peptide
  Seed: SPGMMMGMFNMLSTV
SPGFMMRMLNMLSTV

SEQ ID NO: 196356 - protein, 15 aa, Artificial Sequence
  Description of Artificial Sequence: Synthetic peptide
  Seed: SPGMMMGMFNMLSTV
SPGFMMRMNNMASTV

SEQ ID NO: 196357 - protein, 15 aa, Artificial Sequence
  Description of Artificial Sequence: Synthetic peptide
  Seed: SPGMMMGMFNMLSTV
SPGFMMRMNNMFSTV

SEQ ID NO: 196358 - protein, 15 aa, Artificial Sequence
  Description of Artificial Sequence: Synthetic peptide
  Seed: SPGMMMGMFNMLSTV
SPGFMMRMNNMISTV

SEQ ID NO: 196359 - protein, 15 aa, Artificial Sequence
  Description of Artificial Sequence: Synthetic peptide
  Seed: SPGMMMGMFNMLSTV
SPGFMMRMNNMLSTV

SEQ ID NO: 196360 - protein, 15 aa, Artificial Sequence
  Description of Artificial Sequence: Synthetic peptide
  Seed: SPGMMMGMFNMLSTV
SPGFMMRMNNMMSTV

SEQ ID NO: 196361 - protein, 15 aa, Artificial Sequence
  Description of Artificial Sequence: Synthetic peptide
  Seed: SPGMMMGMFNMLSTV
SPGFMMRMNNMVSTV

SEQ ID NO: 196362 - protein, 15 aa, Artificial Sequence
  Description of Artificial Sequence: Synthetic peptide
  Seed: SPGMMMGMFNMLSTV
SPGFMMRMNNMYSTV

SEQ ID NO: 196363 - protein, 15 aa, Artificial Sequence
  Description of Artificial Sequence: Synthetic peptide
  Seed: SPGMMMGMFNMLSTV
SPGFMMRMSNMISTV

SEQ ID NO: 196364 - protein, 15 aa, Artificial Sequence
  Description of Artificial Sequence: Synthetic peptide
  Seed: SPGMMMGMFNMLSTV
SPGFMMRMSNMLSTV

SEQ ID NO: 196365 - protein, 15 aa, Artificial Sequence
  Description of Artificial Sequence: Synthetic peptide
  Seed: SPGMMMGMFNMLSTV
SPGFMMRMSNMVSTV

SEQ ID NO: 196366 - protein, 15 aa, Artificial Sequence
  Description of Artificial Sequence: Synthetic peptide
  Seed: SPGMMMGMFNMLSTV
SPGFMMRMWNMFSTV

SEQ ID NO: 196367 - protein, 15 aa, Artificial Sequence
  Description of Artificial Sequence: Synthetic peptide
  Seed: SPGMMMGMFNMLSTV
SPGFMMRMWNMLSTV

SEQ ID NO: 196368 - protein, 15 aa, Artificial Sequence
  Description of Artificial Sequence: Synthetic peptide
  Seed: SPGMMMGMFNMLSTV
SPGFMMRMYNMFSTV

SEQ ID NO: 196369 - protein, 15 aa, Artificial Sequence
  Description of Artificial Sequence: Synthetic peptide
  Seed: SPGMMMGMFNMLSTV
SPGFMMRMYNMLSTV

SEQ ID NO: 196370 - protein, 15 aa, Artificial Sequence
  Description of Artificial Sequence: Synthetic peptide
  Seed: SPGMMMGMFNMLSTV
SPGFMMSMANMASTV

SEQ ID NO: 196371 - protein, 15 aa, Artificial Sequence
  Description of Artificial Sequence: Synthetic peptide
  Seed: SPGMMMGMFNMLSTV
SPGFMMSMANMCSTV

SEQ ID NO: 196372 - protein, 15 aa, Artificial Sequence
  Description of Artificial Sequence: Synthetic peptide
  Seed: SPGMMMGMFNMLSTV
SPGFMMSMANMDSTV

SEQ ID NO: 196373 - protein, 15 aa, Artificial Sequence
  Description of Artificial Sequence: Synthetic peptide
  Seed: SPGMMMGMFNMLSTV
SPGFMMSMANMESTV

SEQ ID NO: 196374 - protein, 15 aa, Artificial Sequence
  Description of Artificial Sequence: Synthetic peptide
  Seed: SPGMMMGMFNMLSTV
SPGFMMSMANMFSTV

SEQ ID NO: 196375 - protein, 15 aa, Artificial Sequence
  Description of Artificial Sequence: Synthetic peptide
  Seed: SPGMMMGMFNMLSTV
SPGFMMSMANMGSTV

SEQ ID NO: 196376 - protein, 15 aa, Artificial Sequence
  Description of Artificial Sequence: Synthetic peptide
  Seed: SPGMMMGMFNMLSTV
SPGFMMSMANMHSTV

SEQ ID NO: 196377 - protein, 15 aa, Artificial Sequence
  Description of Artificial Sequence: Synthetic peptide
  Seed: SPGMMMGMFNMLSTV
SPGFMMSMANMISTV

SEQ ID NO: 196378 - protein, 15 aa, Artificial Sequence
  Description of Artificial Sequence: Synthetic peptide
  Seed: SPGMMMGMFNMLSTV
SPGFMMSMANMKSTV

SEQ ID NO: 196379 - protein, 15 aa, Artificial Sequence
  Description of Artificial Sequence: Synthetic peptide
  Seed: SPGMMMGMFNMLSTV
SPGFMMSMANMLSTV

SEQ ID NO: 196380 - protein, 15 aa, Artificial Sequence
  Description of Artificial Sequence: Synthetic peptide
  Seed: SPGMMMGMFNMLSTV
SPGFMMSMANMMSTV

SEQ ID NO: 196381 - protein, 15 aa, Artificial Sequence
  Description of Artificial Sequence: Synthetic peptide
  Seed: SPGMMMGMFNMLSTV
SPGFMMSMANMNSTV

SEQ ID NO: 196382 - protein, 15 aa, Artificial Sequence
  Description of Artificial Sequence: Synthetic peptide
  Seed: SPGMMMGMFNMLSTV
SPGFMMSMANMPSTV

SEQ ID NO: 196383 - protein, 15 aa, Artificial Sequence
  Description of Artificial Sequence: Synthetic peptide
  Seed: SPGMMMGMFNMLSTV
SPGFMMSMANMQSTV

SEQ ID NO: 196384 - protein, 15 aa, Artificial Sequence
  Description of Artificial Sequence: Synthetic peptide
  Seed: SPGMMMGMFNMLSTV
SPGFMMSMANMRSTV

SEQ ID NO: 196385 - protein, 15 aa, Artificial Sequence
  Description of Artificial Sequence: Synthetic peptide
  Seed: SPGMMMGMFNMLSTV
SPGFMMSMANMSSTV

SEQ ID NO: 196386 - protein, 15 aa, Artificial Sequence
  Description of Artificial Sequence: Synthetic peptide
  Seed: SPGMMMGMFNMLSTV
SPGFMMSMANMTSTV

SEQ ID NO: 196387 - protein, 15 aa, Artificial Sequence
  Description of Artificial Sequence: Synthetic peptide
  Seed: SPGMMMGMFNMLSTV
SPGFMMSMANMVSTV

SEQ ID NO: 196388 - protein, 15 aa, Artificial Sequence
  Description of Artificial Sequence: Synthetic peptide
  Seed: SPGMMMGMFNMLSTV
SPGFMMSMANMWSTV

SEQ ID NO: 196389 - protein, 15 aa, Artificial Sequence
  Description of Artificial Sequence: Synthetic peptide
  Seed: SPGMMMGMFNMLSTV
SPGFMMSMANMYSTV

SEQ ID NO: 196390 - protein, 15 aa, Artificial Sequence
  Description of Artificial Sequence: Synthetic peptide
  Seed: SPGMMMGMFNMLSTV
SPGFMMSMCNMISTV

SEQ ID NO: 196391 - protein, 15 aa, Artificial Sequence
  Description of Artificial Sequence: Synthetic peptide
  Seed: SPGMMMGMFNMLSTV
SPGFMMSMCNMVSTV

SEQ ID NO: 196392 - protein, 15 aa, Artificial Sequence
  Description of Artificial Sequence: Synthetic peptide
  Seed: SPGMMMGMFNMLSTV
SPGFMMSMDNMFSTV

SEQ ID NO: 196393 - protein, 15 aa, Artificial Sequence
  Description of Artificial Sequence: Synthetic peptide
  Seed: SPGMMMGMFNMLSTV
SPGFMMSMDNMISTV

SEQ ID NO: 196394 - protein, 15 aa, Artificial Sequence
  Description of Artificial Sequence: Synthetic peptide
  Seed: SPGMMMGMFNMLSTV
SPGFMMSMDNMLSTV

SEQ ID NO: 196395 - protein, 15 aa, Artificial Sequence
  Description of Artificial Sequence: Synthetic peptide
  Seed: SPGMMMGMFNMLSTV
SPGFMMSMDNMMSTV

SEQ ID NO: 196396 - protein, 15 aa, Artificial Sequence
  Description of Artificial Sequence: Synthetic peptide
  Seed: SPGMMMGMFNMLSTV
SPGFMMSMDNMVSTV

SEQ ID NO: 196397 - protein, 15 aa, Artificial Sequence
  Description of Artificial Sequence: Synthetic peptide
  Seed: SPGMMMGMFNMLSTV
SPGFMMSMENMISTV

SEQ ID NO: 196398 - protein, 15 aa, Artificial Sequence
  Description of Artificial Sequence: Synthetic peptide
  Seed: SPGMMMGMFNMLSTV
SPGFMMSMENMLSTV

SEQ ID NO: 196399 - protein, 15 aa, Artificial Sequence
  Description of Artificial Sequence: Synthetic peptide
  Seed: SPGMMMGMFNMLSTV
SPGFMMSMENMMSTV

SEQ ID NO: 196400 - protein, 15 aa, Artificial Sequence
  Description of Artificial Sequence: Synthetic peptide
  Seed: SPGMMMGMFNMLSTV
SPGFMMSMENMVSTV

SEQ ID NO: 196401 - protein, 15 aa, Artificial Sequence
  Description of Artificial Sequence: Synthetic peptide
  Seed: SPGMMMGMFNMLSTV
SPGFMMSMFNMASTV

SEQ ID NO: 196402 - protein, 15 aa, Artificial Sequence
  Description of Artificial Sequence: Synthetic peptide
  Seed: SPGMMMGMFNMLSTV
SPGFMMSMFNMCSTV

SEQ ID NO: 196403 - protein, 15 aa, Artificial Sequence
  Description of Artificial Sequence: Synthetic peptide
  Seed: SPGMMMGMFNMLSTV
SPGFMMSMFNMDSTV

SEQ ID NO: 196404 - protein, 15 aa, Artificial Sequence
  Description of Artificial Sequence: Synthetic peptide
  Seed: SPGMMMGMFNMLSTV
SPGFMMSMFNMESTV

SEQ ID NO: 196405 - protein, 15 aa, Artificial Sequence
  Description of Artificial Sequence: Synthetic peptide
  Seed: SPGMMMGMFNMLSTV
SPGFMMSMFNMFSTV

SEQ ID NO: 196406 - protein, 15 aa, Artificial Sequence
  Description of Artificial Sequence: Synthetic peptide
  Seed: SPGMMMGMFNMLSTV
SPGFMMSMFNMGSTV

SEQ ID NO: 196407 - protein, 15 aa, Artificial Sequence
  Description of Artificial Sequence: Synthetic peptide
  Seed: SPGMMMGMFNMLSTV
SPGFMMSMFNMHSTV

SEQ ID NO: 196408 - protein, 15 aa, Artificial Sequence
  Description of Artificial Sequence: Synthetic peptide
  Seed: SPGMMMGMFNMLSTV
SPGFMMSMFNMISTV

SEQ ID NO: 196409 - protein, 15 aa, Artificial Sequence
  Description of Artificial Sequence: Synthetic peptide
  Seed: SPGMMMGMFNMLSTV
SPGFMMSMFNMLSTV

SEQ ID NO: 196410 - protein, 15 aa, Artificial Sequence
  Description of Artificial Sequence: Synthetic peptide
  Seed: SPGMMMGMFNMLSTV
SPGFMMSMFNMMSTV

SEQ ID NO: 196411 - protein, 15 aa, Artificial Sequence
  Description of Artificial Sequence: Synthetic peptide
  Seed: SPGMMMGMFNMLSTV
SPGFMMSMFNMNSTV

SEQ ID NO: 196412 - protein, 15 aa, Artificial Sequence
  Description of Artificial Sequence: Synthetic peptide
  Seed: SPGMMMGMFNMLSTV
SPGFMMSMFNMPSTV

SEQ ID NO: 196413 - protein, 15 aa, Artificial Sequence
  Description of Artificial Sequence: Synthetic peptide
  Seed: SPGMMMGMFNMLSTV
SPGFMMSMFNMQSTV

SEQ ID NO: 196414 - protein, 15 aa, Artificial Sequence
  Description of Artificial Sequence: Synthetic peptide
  Seed: SPGMMMGMFNMLSTV
SPGFMMSMFNMRSTV

SEQ ID NO: 196415 - protein, 15 aa, Artificial Sequence
  Description of Artificial Sequence: Synthetic peptide
  Seed: SPGMMMGMFNMLSTV
SPGFMMSMFNMSSTV

SEQ ID NO: 196416 - protein, 15 aa, Artificial Sequence
  Description of Artificial Sequence: Synthetic peptide
  Seed: SPGMMMGMFNMLSTV
SPGFMMSMFNMTSTV

SEQ ID NO: 196417 - protein, 15 aa, Artificial Sequence
  Description of Artificial Sequence: Synthetic peptide
  Seed: SPGMMMGMFNMLSTV
SPGFMMSMFNMYSTV

SEQ ID NO: 196418 - protein, 15 aa, Artificial Sequence
  Description of Artificial Sequence: Synthetic peptide
  Seed: SPGMMMGMFNMLSTV
SPGFMMSMGNMASTV

SEQ ID NO: 196419 - protein, 15 aa, Artificial Sequence
  Description of Artificial Sequence: Synthetic peptide
  Seed: SPGMMMGMFNMLSTV
SPGFMMSMGNMFSTV

SEQ ID NO: 196420 - protein, 15 aa, Artificial Sequence
  Description of Artificial Sequence: Synthetic peptide
  Seed: SPGMMMGMFNMLSTV
SPGFMMSMGNMGSTV

SEQ ID NO: 196421 - protein, 15 aa, Artificial Sequence
  Description of Artificial Sequence: Synthetic peptide
  Seed: SPGMMMGMFNMLSTV
SPGFMMSMGNMHSTV

SEQ ID NO: 196422 - protein, 15 aa, Artificial Sequence
  Description of Artificial Sequence: Synthetic peptide
  Seed: SPGMMMGMFNMLSTV
SPGFMMSMGNMISTV

SEQ ID NO: 196423 - protein, 15 aa, Artificial Sequence
  Description of Artificial Sequence: Synthetic peptide
  Seed: SPGMMMGMFNMLSTV
SPGFMMSMGNMLSTV

SEQ ID NO: 196424 - protein, 15 aa, Artificial Sequence
  Description of Artificial Sequence: Synthetic peptide
  Seed: SPGMMMGMFNMLSTV
SPGFMMSMGNMMSTV

SEQ ID NO: 196425 - protein, 15 aa, Artificial Sequence
  Description of Artificial Sequence: Synthetic peptide
  Seed: SPGMMMGMFNMLSTV
SPGFMMSMGNMNSTV

SEQ ID NO: 196426 - protein, 15 aa, Artificial Sequence
  Description of Artificial Sequence: Synthetic peptide
  Seed: SPGMMMGMFNMLSTV
SPGFMMSMGNMPSTV

SEQ ID NO: 196427 - protein, 15 aa, Artificial Sequence
  Description of Artificial Sequence: Synthetic peptide
  Seed: SPGMMMGMFNMLSTV
SPGFMMSMGNMSSTV

SEQ ID NO: 196428 - protein, 15 aa, Artificial Sequence
  Description of Artificial Sequence: Synthetic peptide
  Seed: SPGMMMGMFNMLSTV
SPGFMMSMGNMTSTV

SEQ ID NO: 196429 - protein, 15 aa, Artificial Sequence
  Description of Artificial Sequence: Synthetic peptide
  Seed: SPGMMMGMFNMLSTV
SPGFMMSMGNMVSTV

SEQ ID NO: 196430 - protein, 15 aa, Artificial Sequence
  Description of Artificial Sequence: Synthetic peptide
  Seed: SPGMMMGMFNMLSTV
SPGFMMSMGNMYSTV

SEQ ID NO: 196431 - protein, 15 aa, Artificial Sequence
  Description of Artificial Sequence: Synthetic peptide
  Seed: SPGMMMGMFNMLSTV
SPGFMMSMHNMISTV

SEQ ID NO: 196432 - protein, 15 aa, Artificial Sequence
  Description of Artificial Sequence: Synthetic peptide
  Seed: SPGMMMGMFNMLSTV
SPGFMMSMHNMLSTV

SEQ ID NO: 196433 - protein, 15 aa, Artificial Sequence
  Description of Artificial Sequence: Synthetic peptide
  Seed: SPGMMMGMFNMLSTV
SPGFMMSMHNMVSTV

SEQ ID NO: 196434 - protein, 15 aa, Artificial Sequence
  Description of Artificial Sequence: Synthetic peptide
  Seed: SPGMMMGMFNMLSTV
SPGFMMSMINMASTV

SEQ ID NO: 196435 - protein, 15 aa, Artificial Sequence
  Description of Artificial Sequence: Synthetic peptide
  Seed: SPGMMMGMFNMLSTV
SPGFMMSMINMFSTV

SEQ ID NO: 196436 - protein, 15 aa, Artificial Sequence
  Description of Artificial Sequence: Synthetic peptide
  Seed: SPGMMMGMFNMLSTV
SPGFMMSMINMISTV

SEQ ID NO: 196437 - protein, 15 aa, Artificial Sequence
  Description of Artificial Sequence: Synthetic peptide
  Seed: SPGMMMGMFNMLSTV
SPGFMMSMINMLSTV

SEQ ID NO: 196438 - protein, 15 aa, Artificial Sequence
  Description of Artificial Sequence: Synthetic peptide
  Seed: SPGMMMGMFNMLSTV
SPGFMMSMINMMSTV

SEQ ID NO: 196439 - protein, 15 aa, Artificial Sequence
  Description of Artificial Sequence: Synthetic peptide
  Seed: SPGMMMGMFNMLSTV
SPGFMMSMINMTSTV

SEQ ID NO: 196440 - protein, 15 aa, Artificial Sequence
  Description of Artificial Sequence: Synthetic peptide
  Seed: SPGMMMGMFNMLSTV
SPGFMMSMINMVSTV

SEQ ID NO: 196441 - protein, 15 aa, Artificial Sequence
  Description of Artificial Sequence: Synthetic peptide
  Seed: SPGMMMGMFNMLSTV
SPGFMMSMINMYSTV

SEQ ID NO: 196442 - protein, 15 aa, Artificial Sequence
  Description of Artificial Sequence: Synthetic peptide
  Seed: SPGMMMGMFNMLSTV
SPGFMMSMLNMFSTV

SEQ ID NO: 196443 - protein, 15 aa, Artificial Sequence
  Description of Artificial Sequence: Synthetic peptide
  Seed: SPGMMMGMFNMLSTV
SPGFMMSMLNMISTV

SEQ ID NO: 196444 - protein, 15 aa, Artificial Sequence
  Description of Artificial Sequence: Synthetic peptide
  Seed: SPGMMMGMFNMLSTV
SPGFMMSMLNMLSTV

SEQ ID NO: 196445 - protein, 15 aa, Artificial Sequence
  Description of Artificial Sequence: Synthetic peptide
  Seed: SPGMMMGMFNMLSTV
SPGFMMSMLNMMSTV

SEQ ID NO: 196446 - protein, 15 aa, Artificial Sequence
  Description of Artificial Sequence: Synthetic peptide
  Seed: SPGMMMGMFNMLSTV
SPGFMMSMLNMTSTV

SEQ ID NO: 196447 - protein, 15 aa, Artificial Sequence
  Description of Artificial Sequence: Synthetic peptide
  Seed: SPGMMMGMFNMLSTV
SPGFMMSMLNMVSTV

SEQ ID NO: 196448 - protein, 15 aa, Artificial Sequence
  Description of Artificial Sequence: Synthetic peptide
  Seed: SPGMMMGMFNMLSTV
SPGFMMSMLNMYSTV

SEQ ID NO: 196449 - protein, 15 aa, Artificial Sequence
  Description of Artificial Sequence: Synthetic peptide
  Seed: SPGMMMGMFNMLSTV
SPGFMMSMMNMFSTV

SEQ ID NO: 196450 - protein, 15 aa, Artificial Sequence
  Description of Artificial Sequence: Synthetic peptide
  Seed: SPGMMMGMFNMLSTV
SPGFMMSMMNMISTV

SEQ ID NO: 196451 - protein, 15 aa, Artificial Sequence
  Description of Artificial Sequence: Synthetic peptide
  Seed: SPGMMMGMFNMLSTV
SPGFMMSMMNMLSTV

SEQ ID NO: 196452 - protein, 15 aa, Artificial Sequence
  Description of Artificial Sequence: Synthetic peptide
  Seed: SPGMMMGMFNMLSTV
SPGFMMSMMNMMSTV

SEQ ID NO: 196453 - protein, 15 aa, Artificial Sequence
  Description of Artificial Sequence: Synthetic peptide
  Seed: SPGMMMGMFNMLSTV
SPGFMMSMMNMVSTV

SEQ ID NO: 196454 - protein, 15 aa, Artificial Sequence
  Description of Artificial Sequence: Synthetic peptide
  Seed: SPGMMMGMFNMLSTV
SPGFMMSMMNMYSTV

SEQ ID NO: 196455 - protein, 15 aa, Artificial Sequence
  Description of Artificial Sequence: Synthetic peptide
  Seed: SPGMMMGMFNMLSTV
SPGFMMSMNNMASTV

SEQ ID NO: 196456 - protein, 15 aa, Artificial Sequence
  Description of Artificial Sequence: Synthetic peptide
  Seed: SPGMMMGMFNMLSTV
SPGFMMSMNNMFSTV

SEQ ID NO: 196457 - protein, 15 aa, Artificial Sequence
  Description of Artificial Sequence: Synthetic peptide
  Seed: SPGMMMGMFNMLSTV
SPGFMMSMNNMISTV

SEQ ID NO: 196458 - protein, 15 aa, Artificial Sequence
  Description of Artificial Sequence: Synthetic peptide
  Seed: SPGMMMGMFNMLSTV
SPGFMMSMNNMLSTV

SEQ ID NO: 196459 - protein, 15 aa, Artificial Sequence
  Description of Artificial Sequence: Synthetic peptide
  Seed: SPGMMMGMFNMLSTV
SPGFMMSMNNMMSTV

SEQ ID NO: 196460 - protein, 15 aa, Artificial Sequence
  Description of Artificial Sequence: Synthetic peptide
  Seed: SPGMMMGMFNMLSTV
SPGFMMSMNNMNSTV

SEQ ID NO: 196461 - protein, 15 aa, Artificial Sequence
  Description of Artificial Sequence: Synthetic peptide
  Seed: SPGMMMGMFNMLSTV
SPGFMMSMNNMSSTV

SEQ ID NO: 196462 - protein, 15 aa, Artificial Sequence
  Description of Artificial Sequence: Synthetic peptide
  Seed: SPGMMMGMFNMLSTV
SPGFMMSMNNMTSTV

SEQ ID NO: 196463 - protein, 15 aa, Artificial Sequence
  Description of Artificial Sequence: Synthetic peptide
  Seed: SPGMMMGMFNMLSTV
SPGFMMSMNNMVSTV

SEQ ID NO: 196464 - protein, 15 aa, Artificial Sequence
  Description of Artificial Sequence: Synthetic peptide
  Seed: SPGMMMGMFNMLSTV
SPGFMMSMNNMYSTV

SEQ ID NO: 196465 - protein, 15 aa, Artificial Sequence
  Description of Artificial Sequence: Synthetic peptide
  Seed: SPGMMMGMFNMLSTV
SPGFMMSMPNMASTV

SEQ ID NO: 196466 - protein, 15 aa, Artificial Sequence
  Description of Artificial Sequence: Synthetic peptide
  Seed: SPGMMMGMFNMLSTV
SPGFMMSMPNMFSTV

SEQ ID NO: 196467 - protein, 15 aa, Artificial Sequence
  Description of Artificial Sequence: Synthetic peptide
  Seed: SPGMMMGMFNMLSTV
SPGFMMSMPNMGSTV

SEQ ID NO: 196468 - protein, 15 aa, Artificial Sequence
  Description of Artificial Sequence: Synthetic peptide
  Seed: SPGMMMGMFNMLSTV
SPGFMMSMPNMHSTV

SEQ ID NO: 196469 - protein, 15 aa, Artificial Sequence
  Description of Artificial Sequence: Synthetic peptide
  Seed: SPGMMMGMFNMLSTV
SPGFMMSMPNMISTV

SEQ ID NO: 196470 - protein, 15 aa, Artificial Sequence
  Description of Artificial Sequence: Synthetic peptide
  Seed: SPGMMMGMFNMLSTV
SPGFMMSMPNMLSTV

SEQ ID NO: 196471 - protein, 15 aa, Artificial Sequence
  Description of Artificial Sequence: Synthetic peptide
  Seed: SPGMMMGMFNMLSTV
SPGFMMSMPNMMSTV

SEQ ID NO: 196472 - protein, 15 aa, Artificial Sequence
  Description of Artificial Sequence: Synthetic peptide
  Seed: SPGMMMGMFNMLSTV
SPGFMMSMPNMNSTV

SEQ ID NO: 196473 - protein, 15 aa, Artificial Sequence
  Description of Artificial Sequence: Synthetic peptide
  Seed: SPGMMMGMFNMLSTV
SPGFMMSMPNMPSTV

SEQ ID NO: 196474 - protein, 15 aa, Artificial Sequence
  Description of Artificial Sequence: Synthetic peptide
  Seed: SPGMMMGMFNMLSTV
SPGFMMSMPNMQSTV

SEQ ID NO: 196475 - protein, 15 aa, Artificial Sequence
  Description of Artificial Sequence: Synthetic peptide
  Seed: SPGMMMGMFNMLSTV
SPGFMMSMPNMSSTV

SEQ ID NO: 196476 - protein, 15 aa, Artificial Sequence
  Description of Artificial Sequence: Synthetic peptide
  Seed: SPGMMMGMFNMLSTV
SPGFMMSMPNMTSTV

SEQ ID NO: 196477 - protein, 15 aa, Artificial Sequence
  Description of Artificial Sequence: Synthetic peptide
  Seed: SPGMMMGMFNMLSTV
SPGFMMSMPNMVSTV

SEQ ID NO: 196478 - protein, 15 aa, Artificial Sequence
  Description of Artificial Sequence: Synthetic peptide
  Seed: SPGMMMGMFNMLSTV
SPGFMMSMPNMWSTV

SEQ ID NO: 196479 - protein, 15 aa, Artificial Sequence
  Description of Artificial Sequence: Synthetic peptide
  Seed: SPGMMMGMFNMLSTV
SPGFMMSMPNMYSTV

SEQ ID NO: 196480 - protein, 15 aa, Artificial Sequence
  Description of Artificial Sequence: Synthetic peptide
  Seed: SPGMMMGMFNMLSTV
SPGFMMSMQNMFSTV

SEQ ID NO: 196481 - protein, 15 aa, Artificial Sequence
  Description of Artificial Sequence: Synthetic peptide
  Seed: SPGMMMGMFNMLSTV
SPGFMMSMQNMISTV

SEQ ID NO: 196482 - protein, 15 aa, Artificial Sequence
  Description of Artificial Sequence: Synthetic peptide
  Seed: SPGMMMGMFNMLSTV
SPGFMMSMQNMLSTV

SEQ ID NO: 196483 - protein, 15 aa, Artificial Sequence
  Description of Artificial Sequence: Synthetic peptide
  Seed: SPGMMMGMFNMLSTV
SPGFMMSMQNMMSTV

SEQ ID NO: 196484 - protein, 15 aa, Artificial Sequence
  Description of Artificial Sequence: Synthetic peptide
  Seed: SPGMMMGMFNMLSTV
SPGFMMSMQNMVSTV

SEQ ID NO: 196485 - protein, 15 aa, Artificial Sequence
  Description of Artificial Sequence: Synthetic peptide
  Seed: SPGMMMGMFNMLSTV
SPGFMMSMSNMASTV

SEQ ID NO: 196486 - protein, 15 aa, Artificial Sequence
  Description of Artificial Sequence: Synthetic peptide
  Seed: SPGMMMGMFNMLSTV
SPGFMMSMSNMCSTV

SEQ ID NO: 196487 - protein, 15 aa, Artificial Sequence
  Description of Artificial Sequence: Synthetic peptide
  Seed: SPGMMMGMFNMLSTV
SPGFMMSMSNMDSTV

SEQ ID NO: 196488 - protein, 15 aa, Artificial Sequence
  Description of Artificial Sequence: Synthetic peptide
  Seed: SPGMMMGMFNMLSTV
SPGFMMSMSNMESTV

SEQ ID NO: 196489 - protein, 15 aa, Artificial Sequence
  Description of Artificial Sequence: Synthetic peptide
  Seed: SPGMMMGMFNMLSTV
SPGFMMSMSNMFSTV

SEQ ID NO: 196490 - protein, 15 aa, Artificial Sequence
  Description of Artificial Sequence: Synthetic peptide
  Seed: SPGMMMGMFNMLSTV
SPGFMMSMSNMGSTV

SEQ ID NO: 196491 - protein, 15 aa, Artificial Sequence
  Description of Artificial Sequence: Synthetic peptide
  Seed: SPGMMMGMFNMLSTV
SPGFMMSMSNMHSTV

SEQ ID NO: 196492 - protein, 15 aa, Artificial Sequence
  Description of Artificial Sequence: Synthetic peptide
  Seed: SPGMMMGMFNMLSTV
SPGFMMSMSNMISTV

SEQ ID NO: 196493 - protein, 15 aa, Artificial Sequence
  Description of Artificial Sequence: Synthetic peptide
  Seed: SPGMMMGMFNMLSTV
SPGFMMSMSNMKSTV

SEQ ID NO: 196494 - protein, 15 aa, Artificial Sequence
  Description of Artificial Sequence: Synthetic peptide
  Seed: SPGMMMGMFNMLSTV
SPGFMMSMSNMLSTV

SEQ ID NO: 196495 - protein, 15 aa, Artificial Sequence
  Description of Artificial Sequence: Synthetic peptide
  Seed: SPGMMMGMFNMLSTV
SPGFMMSMSNMMSTV

SEQ ID NO: 196496 - protein, 15 aa, Artificial Sequence
  Description of Artificial Sequence: Synthetic peptide
  Seed: SPGMMMGMFNMLSTV
SPGFMMSMSNMNSTV

SEQ ID NO: 196497 - protein, 15 aa, Artificial Sequence
  Description of Artificial Sequence: Synthetic peptide
  Seed: SPGMMMGMFNMLSTV
SPGFMMSMSNMPSTV

SEQ ID NO: 196498 - protein, 15 aa, Artificial Sequence
  Description of Artificial Sequence: Synthetic peptide
  Seed: SPGMMMGMFNMLSTV
SPGFMMSMSNMQSTV

SEQ ID NO: 196499 - protein, 15 aa, Artificial Sequence
  Description of Artificial Sequence: Synthetic peptide
  Seed: SPGMMMGMFNMLSTV
SPGFMMSMSNMRSTV

SEQ ID NO: 196500 - protein, 15 aa, Artificial Sequence
  Description of Artificial Sequence: Synthetic peptide
  Seed: SPGMMMGMFNMLSTV
SPGFMMSMSNMSSTV

SEQ ID NO: 196501 - protein, 15 aa, Artificial Sequence
  Description of Artificial Sequence: Synthetic peptide
  Seed: SPGMMMGMFNMLSTV
SPGFMMSMSNMTSTV

SEQ ID NO: 196502 - protein, 15 aa, Artificial Sequence
  Description of Artificial Sequence: Synthetic peptide
  Seed: SPGMMMGMFNMLSTV
SPGFMMSMSNMVSTV

SEQ ID NO: 196503 - protein, 15 aa, Artificial Sequence
  Description of Artificial Sequence: Synthetic peptide
  Seed: SPGMMMGMFNMLSTV
SPGFMMSMSNMWSTV

SEQ ID NO: 196504 - protein, 15 aa, Artificial Sequence
  Description of Artificial Sequence: Synthetic peptide
  Seed: SPGMMMGMFNMLSTV
SPGFMMSMSNMYSTV

SEQ ID NO: 196505 - protein, 15 aa, Artificial Sequence
  Description of Artificial Sequence: Synthetic peptide
  Seed: SPGMMMGMFNMLSTV
SPGFMMSMTNMASTV

SEQ ID NO: 196506 - protein, 15 aa, Artificial Sequence
  Description of Artificial Sequence: Synthetic peptide
  Seed: SPGMMMGMFNMLSTV
SPGFMMSMTNMFSTV

SEQ ID NO: 196507 - protein, 15 aa, Artificial Sequence
  Description of Artificial Sequence: Synthetic peptide
  Seed: SPGMMMGMFNMLSTV
SPGFMMSMTNMGSTV

SEQ ID NO: 196508 - protein, 15 aa, Artificial Sequence
  Description of Artificial Sequence: Synthetic peptide
  Seed: SPGMMMGMFNMLSTV
SPGFMMSMTNMISTV

SEQ ID NO: 196509 - protein, 15 aa, Artificial Sequence
  Description of Artificial Sequence: Synthetic peptide
  Seed: SPGMMMGMFNMLSTV
SPGFMMSMTNMLSTV

SEQ ID NO: 196510 - protein, 15 aa, Artificial Sequence
  Description of Artificial Sequence: Synthetic peptide
  Seed: SPGMMMGMFNMLSTV
SPGFMMSMTNMMSTV

SEQ ID NO: 196511 - protein, 15 aa, Artificial Sequence
  Description of Artificial Sequence: Synthetic peptide
  Seed: SPGMMMGMFNMLSTV
SPGFMMSMTNMNSTV

SEQ ID NO: 196512 - protein, 15 aa, Artificial Sequence
  Description of Artificial Sequence: Synthetic peptide
  Seed: SPGMMMGMFNMLSTV
SPGFMMSMTNMSSTV

SEQ ID NO: 196513 - protein, 15 aa, Artificial Sequence
  Description of Artificial Sequence: Synthetic peptide
  Seed: SPGMMMGMFNMLSTV
SPGFMMSMTNMTSTV

SEQ ID NO: 196514 - protein, 15 aa, Artificial Sequence
  Description of Artificial Sequence: Synthetic peptide
  Seed: SPGMMMGMFNMLSTV
SPGFMMSMTNMVSTV

SEQ ID NO: 196515 - protein, 15 aa, Artificial Sequence
  Description of Artificial Sequence: Synthetic peptide
  Seed: SPGMMMGMFNMLSTV
SPGFMMSMTNMYSTV

SEQ ID NO: 196516 - protein, 15 aa, Artificial Sequence
  Description of Artificial Sequence: Synthetic peptide
  Seed: SPGMMMGMFNMLSTV
SPGFMMSMVNMASTV

SEQ ID NO: 196517 - protein, 15 aa, Artificial Sequence
  Description of Artificial Sequence: Synthetic peptide
  Seed: SPGMMMGMFNMLSTV
SPGFMMSMVNMFSTV

SEQ ID NO: 196518 - protein, 15 aa, Artificial Sequence
  Description of Artificial Sequence: Synthetic peptide
  Seed: SPGMMMGMFNMLSTV
SPGFMMSMVNMISTV

SEQ ID NO: 196519 - protein, 15 aa, Artificial Sequence
  Description of Artificial Sequence: Synthetic peptide
  Seed: SPGMMMGMFNMLSTV
SPGFMMSMVNMLSTV

SEQ ID NO: 196520 - protein, 15 aa, Artificial Sequence
  Description of Artificial Sequence: Synthetic peptide
  Seed: SPGMMMGMFNMLSTV
SPGFMMSMVNMMSTV

SEQ ID NO: 196521 - protein, 15 aa, Artificial Sequence
  Description of Artificial Sequence: Synthetic peptide
  Seed: SPGMMMGMFNMLSTV
SPGFMMSMVNMNSTV

SEQ ID NO: 196522 - protein, 15 aa, Artificial Sequence
  Description of Artificial Sequence: Synthetic peptide
  Seed: SPGMMMGMFNMLSTV
SPGFMMSMVNMSSTV

SEQ ID NO: 196523 - protein, 15 aa, Artificial Sequence
  Description of Artificial Sequence: Synthetic peptide
  Seed: SPGMMMGMFNMLSTV
SPGFMMSMVNMTSTV

SEQ ID NO: 196524 - protein, 15 aa, Artificial Sequence
  Description of Artificial Sequence: Synthetic peptide
  Seed: SPGMMMGMFNMLSTV
SPGFMMSMVNMVSTV

SEQ ID NO: 196525 - protein, 15 aa, Artificial Sequence
  Description of Artificial Sequence: Synthetic peptide
  Seed: SPGMMMGMFNMLSTV
SPGFMMSMVNMYSTV

SEQ ID NO: 196526 - protein, 15 aa, Artificial Sequence
  Description of Artificial Sequence: Synthetic peptide
  Seed: SPGMMMGMFNMLSTV
SPGFMMSMWNMASTV

SEQ ID NO: 196527 - protein, 15 aa, Artificial Sequence
  Description of Artificial Sequence: Synthetic peptide
  Seed: SPGMMMGMFNMLSTV
SPGFMMSMWNMFSTV

SEQ ID NO: 196528 - protein, 15 aa, Artificial Sequence
  Description of Artificial Sequence: Synthetic peptide
  Seed: SPGMMMGMFNMLSTV
SPGFMMSMWNMISTV

SEQ ID NO: 196529 - protein, 15 aa, Artificial Sequence
  Description of Artificial Sequence: Synthetic peptide
  Seed: SPGMMMGMFNMLSTV
SPGFMMSMWNMLSTV

SEQ ID NO: 196530 - protein, 15 aa, Artificial Sequence
  Description of Artificial Sequence: Synthetic peptide
  Seed: SPGMMMGMFNMLSTV
SPGFMMSMWNMMSTV

SEQ ID NO: 196531 - protein, 15 aa, Artificial Sequence
  Description of Artificial Sequence: Synthetic peptide
  Seed: SPGMMMGMFNMLSTV
SPGFMMSMWNMNSTV

SEQ ID NO: 196532 - protein, 15 aa, Artificial Sequence
  Description of Artificial Sequence: Synthetic peptide
  Seed: SPGMMMGMFNMLSTV
SPGFMMSMWNMTSTV

SEQ ID NO: 196533 - protein, 15 aa, Artificial Sequence
  Description of Artificial Sequence: Synthetic peptide
  Seed: SPGMMMGMFNMLSTV
SPGFMMSMWNMVSTV

SEQ ID NO: 196534 - protein, 15 aa, Artificial Sequence
  Description of Artificial Sequence: Synthetic peptide
  Seed: SPGMMMGMFNMLSTV
SPGFMMSMWNMYSTV

SEQ ID NO: 196535 - protein, 15 aa, Artificial Sequence
  Description of Artificial Sequence: Synthetic peptide
  Seed: SPGMMMGMFNMLSTV
SPGFMMSMYNMASTV

SEQ ID NO: 196536 - protein, 15 aa, Artificial Sequence
  Description of Artificial Sequence: Synthetic peptide
  Seed: SPGMMMGMFNMLSTV
SPGFMMSMYNMESTV

SEQ ID NO: 196537 - protein, 15 aa, Artificial Sequence
  Description of Artificial Sequence: Synthetic peptide
  Seed: SPGMMMGMFNMLSTV
SPGFMMSMYNMFSTV

SEQ ID NO: 196538 - protein, 15 aa, Artificial Sequence
  Description of Artificial Sequence: Synthetic peptide
  Seed: SPGMMMGMFNMLSTV
SPGFMMSMYNMISTV

SEQ ID NO: 196539 - protein, 15 aa, Artificial Sequence
  Description of Artificial Sequence: Synthetic peptide
  Seed: SPGMMMGMFNMLSTV
SPGFMMSMYNMMSTV

SEQ ID NO: 196540 - protein, 15 aa, Artificial Sequence
  Description of Artificial Sequence: Synthetic peptide
  Seed: SPGMMMGMFNMLSTV
SPGFMMSMYNMNSTV

SEQ ID NO: 196541 - protein, 15 aa, Artificial Sequence
  Description of Artificial Sequence: Synthetic peptide
  Seed: SPGMMMGMFNMLSTV
SPGFMMSMYNMSSTV

SEQ ID NO: 196542 - protein, 15 aa, Artificial Sequence
  Description of Artificial Sequence: Synthetic peptide
  Seed: SPGMMMGMFNMLSTV
SPGFMMSMYNMTSTV

SEQ ID NO: 196543 - protein, 15 aa, Artificial Sequence
  Description of Artificial Sequence: Synthetic peptide
  Seed: SPGMMMGMFNMLSTV
SPGFMMSMYNMYSTV

SEQ ID NO: 196544 - protein, 15 aa, Artificial Sequence
  Description of Artificial Sequence: Synthetic peptide
  Seed: SPGMMMGMFNMLSTV
SPGFMMTMANMASTV

SEQ ID NO: 196545 - protein, 15 aa, Artificial Sequence
  Description of Artificial Sequence: Synthetic peptide
  Seed: SPGMMMGMFNMLSTV
SPGFMMTMANMDSTV

SEQ ID NO: 196546 - protein, 15 aa, Artificial Sequence
  Description of Artificial Sequence: Synthetic peptide
  Seed: SPGMMMGMFNMLSTV
SPGFMMTMANMESTV

SEQ ID NO: 196547 - protein, 15 aa, Artificial Sequence
  Description of Artificial Sequence: Synthetic peptide
  Seed: SPGMMMGMFNMLSTV
SPGFMMTMANMFSTV

SEQ ID NO: 196548 - protein, 15 aa, Artificial Sequence
  Description of Artificial Sequence: Synthetic peptide
  Seed: SPGMMMGMFNMLSTV
SPGFMMTMANMGSTV

SEQ ID NO: 196549 - protein, 15 aa, Artificial Sequence
  Description of Artificial Sequence: Synthetic peptide
  Seed: SPGMMMGMFNMLSTV
SPGFMMTMANMHSTV

SEQ ID NO: 196550 - protein, 15 aa, Artificial Sequence
  Description of Artificial Sequence: Synthetic peptide
  Seed: SPGMMMGMFNMLSTV
SPGFMMTMANMISTV

SEQ ID NO: 196551 - protein, 15 aa, Artificial Sequence
  Description of Artificial Sequence: Synthetic peptide
  Seed: SPGMMMGMFNMLSTV
SPGFMMTMANMKSTV

SEQ ID NO: 196552 - protein, 15 aa, Artificial Sequence
  Description of Artificial Sequence: Synthetic peptide
  Seed: SPGMMMGMFNMLSTV
SPGFMMTMANMLSTV

SEQ ID NO: 196553 - protein, 15 aa, Artificial Sequence
  Description of Artificial Sequence: Synthetic peptide
  Seed: SPGMMMGMFNMLSTV
SPGFMMTMANMMSTV

SEQ ID NO: 196554 - protein, 15 aa, Artificial Sequence
  Description of Artificial Sequence: Synthetic peptide
  Seed: SPGMMMGMFNMLSTV
SPGFMMTMANMNSTV

SEQ ID NO: 196555 - protein, 15 aa, Artificial Sequence
  Description of Artificial Sequence: Synthetic peptide
  Seed: SPGMMMGMFNMLSTV
SPGFMMTMANMPSTV

SEQ ID NO: 196556 - protein, 15 aa, Artificial Sequence
  Description of Artificial Sequence: Synthetic peptide
  Seed: SPGMMMGMFNMLSTV
SPGFMMTMANMQSTV

SEQ ID NO: 196557 - protein, 15 aa, Artificial Sequence
  Description of Artificial Sequence: Synthetic peptide
  Seed: SPGMMMGMFNMLSTV
SPGFMMTMANMRSTV

SEQ ID NO: 196558 - protein, 15 aa, Artificial Sequence
  Description of Artificial Sequence: Synthetic peptide
  Seed: SPGMMMGMFNMLSTV
SPGFMMTMANMSSTV

SEQ ID NO: 196559 - protein, 15 aa, Artificial Sequence
  Description of Artificial Sequence: Synthetic peptide
  Seed: SPGMMMGMFNMLSTV
SPGFMMTMANMTSTV

SEQ ID NO: 196560 - protein, 15 aa, Artificial Sequence
  Description of Artificial Sequence: Synthetic peptide
  Seed: SPGMMMGMFNMLSTV
SPGFMMTMANMVSTV

SEQ ID NO: 196561 - protein, 15 aa, Artificial Sequence
  Description of Artificial Sequence: Synthetic peptide
  Seed: SPGMMMGMFNMLSTV
SPGFMMTMANMWSTV

SEQ ID NO: 196562 - protein, 15 aa, Artificial Sequence
  Description of Artificial Sequence: Synthetic peptide
  Seed: SPGMMMGMFNMLSTV
SPGFMMTMANMYSTV

SEQ ID NO: 196563 - protein, 15 aa, Artificial Sequence
  Description of Artificial Sequence: Synthetic peptide
  Seed: SPGMMMGMFNMLSTV
SPGFMMTMDNMFSTV

SEQ ID NO: 196564 - protein, 15 aa, Artificial Sequence
  Description of Artificial Sequence: Synthetic peptide
  Seed: SPGMMMGMFNMLSTV
SPGFMMTMDNMISTV

SEQ ID NO: 196565 - protein, 15 aa, Artificial Sequence
  Description of Artificial Sequence: Synthetic peptide
  Seed: SPGMMMGMFNMLSTV
SPGFMMTMDNMLSTV

SEQ ID NO: 196566 - protein, 15 aa, Artificial Sequence
  Description of Artificial Sequence: Synthetic peptide
  Seed: SPGMMMGMFNMLSTV
SPGFMMTMDNMVSTV

SEQ ID NO: 196567 - protein, 15 aa, Artificial Sequence
  Description of Artificial Sequence: Synthetic peptide
  Seed: SPGMMMGMFNMLSTV
SPGFMMTMENMISTV

SEQ ID NO: 196568 - protein, 15 aa, Artificial Sequence
  Description of Artificial Sequence: Synthetic peptide
  Seed: SPGMMMGMFNMLSTV
SPGFMMTMENMLSTV

SEQ ID NO: 196569 - protein, 15 aa, Artificial Sequence
  Description of Artificial Sequence: Synthetic peptide
  Seed: SPGMMMGMFNMLSTV
SPGFMMTMENMMSTV

SEQ ID NO: 196570 - protein, 15 aa, Artificial Sequence
  Description of Artificial Sequence: Synthetic peptide
  Seed: SPGMMMGMFNMLSTV
SPGFMMTMENMVSTV

SEQ ID NO: 196571 - protein, 15 aa, Artificial Sequence
  Description of Artificial Sequence: Synthetic peptide
  Seed: SPGMMMGMFNMLSTV
SPGFMMTMFNMASTV

SEQ ID NO: 196572 - protein, 15 aa, Artificial Sequence
  Description of Artificial Sequence: Synthetic peptide
  Seed: SPGMMMGMFNMLSTV
SPGFMMTMFNMDSTV

SEQ ID NO: 196573 - protein, 15 aa, Artificial Sequence
  Description of Artificial Sequence: Synthetic peptide
  Seed: SPGMMMGMFNMLSTV
SPGFMMTMFNMESTV

SEQ ID NO: 196574 - protein, 15 aa, Artificial Sequence
  Description of Artificial Sequence: Synthetic peptide
  Seed: SPGMMMGMFNMLSTV
SPGFMMTMFNMFSTV

SEQ ID NO: 196575 - protein, 15 aa, Artificial Sequence
  Description of Artificial Sequence: Synthetic peptide
  Seed: SPGMMMGMFNMLSTV
SPGFMMTMFNMGSTV

SEQ ID NO: 196576 - protein, 15 aa, Artificial Sequence
  Description of Artificial Sequence: Synthetic peptide
  Seed: SPGMMMGMFNMLSTV
SPGFMMTMFNMHSTV

SEQ ID NO: 196577 - protein, 15 aa, Artificial Sequence
  Description of Artificial Sequence: Synthetic peptide
  Seed: SPGMMMGMFNMLSTV
SPGFMMTMFNMISTV

SEQ ID NO: 196578 - protein, 15 aa, Artificial Sequence
  Description of Artificial Sequence: Synthetic peptide
  Seed: SPGMMMGMFNMLSTV
SPGFMMTMFNMKSTV

SEQ ID NO: 196579 - protein, 15 aa, Artificial Sequence
  Description of Artificial Sequence: Synthetic peptide
  Seed: SPGMMMGMFNMLSTV
SPGFMMTMFNMLSTV

SEQ ID NO: 196580 - protein, 15 aa, Artificial Sequence
  Description of Artificial Sequence: Synthetic peptide
  Seed: SPGMMMGMFNMLSTV
SPGFMMTMFNMMSTV

SEQ ID NO: 196581 - protein, 15 aa, Artificial Sequence
  Description of Artificial Sequence: Synthetic peptide
  Seed: SPGMMMGMFNMLSTV
SPGFMMTMFNMNSTV

SEQ ID NO: 196582 - protein, 15 aa, Artificial Sequence
  Description of Artificial Sequence: Synthetic peptide
  Seed: SPGMMMGMFNMLSTV
SPGFMMTMFNMPSTV

SEQ ID NO: 196583 - protein, 15 aa, Artificial Sequence
  Description of Artificial Sequence: Synthetic peptide
  Seed: SPGMMMGMFNMLSTV
SPGFMMTMFNMQSTV

SEQ ID NO: 196584 - protein, 15 aa, Artificial Sequence
  Description of Artificial Sequence: Synthetic peptide
  Seed: SPGMMMGMFNMLSTV
SPGFMMTMFNMRSTV

SEQ ID NO: 196585 - protein, 15 aa, Artificial Sequence
  Description of Artificial Sequence: Synthetic peptide
  Seed: SPGMMMGMFNMLSTV
SPGFMMTMFNMSSTV

SEQ ID NO: 196586 - protein, 15 aa, Artificial Sequence
  Description of Artificial Sequence: Synthetic peptide
  Seed: SPGMMMGMFNMLSTV
SPGFMMTMFNMTSTV

SEQ ID NO: 196587 - protein, 15 aa, Artificial Sequence
  Description of Artificial Sequence: Synthetic peptide
  Seed: SPGMMMGMFNMLSTV
SPGFMMTMFNMVSTV

SEQ ID NO: 196588 - protein, 15 aa, Artificial Sequence
  Description of Artificial Sequence: Synthetic peptide
  Seed: SPGMMMGMFNMLSTV
SPGFMMTMFNMYSTV

SEQ ID NO: 196589 - protein, 15 aa, Artificial Sequence
  Description of Artificial Sequence: Synthetic peptide
  Seed: SPGMMMGMFNMLSTV
SPGFMMTMGNMASTV

SEQ ID NO: 196590 - protein, 15 aa, Artificial Sequence
  Description of Artificial Sequence: Synthetic peptide
  Seed: SPGMMMGMFNMLSTV
SPGFMMTMGNMDSTV

SEQ ID NO: 196591 - protein, 15 aa, Artificial Sequence
  Description of Artificial Sequence: Synthetic peptide
  Seed: SPGMMMGMFNMLSTV
SPGFMMTMGNMFSTV

SEQ ID NO: 196592 - protein, 15 aa, Artificial Sequence
  Description of Artificial Sequence: Synthetic peptide
  Seed: SPGMMMGMFNMLSTV
SPGFMMTMGNMGSTV

SEQ ID NO: 196593 - protein, 15 aa, Artificial Sequence
  Description of Artificial Sequence: Synthetic peptide
  Seed: SPGMMMGMFNMLSTV
SPGFMMTMGNMHSTV

SEQ ID NO: 196594 - protein, 15 aa, Artificial Sequence
  Description of Artificial Sequence: Synthetic peptide
  Seed: SPGMMMGMFNMLSTV
SPGFMMTMGNMISTV

SEQ ID NO: 196595 - protein, 15 aa, Artificial Sequence
  Description of Artificial Sequence: Synthetic peptide
  Seed: SPGMMMGMFNMLSTV
SPGFMMTMGNMLSTV

SEQ ID NO: 196596 - protein, 15 aa, Artificial Sequence
  Description of Artificial Sequence: Synthetic peptide
  Seed: SPGMMMGMFNMLSTV
SPGFMMTMGNMMSTV

SEQ ID NO: 196597 - protein, 15 aa, Artificial Sequence
  Description of Artificial Sequence: Synthetic peptide
  Seed: SPGMMMGMFNMLSTV
SPGFMMTMGNMNSTV

SEQ ID NO: 196598 - protein, 15 aa, Artificial Sequence
  Description of Artificial Sequence: Synthetic peptide
  Seed: SPGMMMGMFNMLSTV
SPGFMMTMGNMPSTV

SEQ ID NO: 196599 - protein, 15 aa, Artificial Sequence
  Description of Artificial Sequence: Synthetic peptide
  Seed: SPGMMMGMFNMLSTV
SPGFMMTMGNMSSTV

SEQ ID NO: 196600 - protein, 15 aa, Artificial Sequence
  Description of Artificial Sequence: Synthetic peptide
  Seed: SPGMMMGMFNMLSTV
SPGFMMTMGNMTSTV

SEQ ID NO: 196601 - protein, 15 aa, Artificial Sequence
  Description of Artificial Sequence: Synthetic peptide
  Seed: SPGMMMGMFNMLSTV
SPGFMMTMGNMVSTV

SEQ ID NO: 196602 - protein, 15 aa, Artificial Sequence
  Description of Artificial Sequence: Synthetic peptide
  Seed: SPGMMMGMFNMLSTV
SPGFMMTMGNMYSTV

SEQ ID NO: 196603 - protein, 15 aa, Artificial Sequence
  Description of Artificial Sequence: Synthetic peptide
  Seed: SPGMMMGMFNMLSTV
SPGFMMTMHNMISTV

SEQ ID NO: 196604 - protein, 15 aa, Artificial Sequence
  Description of Artificial Sequence: Synthetic peptide
  Seed: SPGMMMGMFNMLSTV
SPGFMMTMHNMLSTV

SEQ ID NO: 196605 - protein, 15 aa, Artificial Sequence
  Description of Artificial Sequence: Synthetic peptide
  Seed: SPGMMMGMFNMLSTV
SPGFMMTMHNMVSTV

SEQ ID NO: 196606 - protein, 15 aa, Artificial Sequence
  Description of Artificial Sequence: Synthetic peptide
  Seed: SPGMMMGMFNMLSTV
SPGFMMTMINMASTV

SEQ ID NO: 196607 - protein, 15 aa, Artificial Sequence
  Description of Artificial Sequence: Synthetic peptide
  Seed: SPGMMMGMFNMLSTV
SPGFMMTMINMFSTV

SEQ ID NO: 196608 - protein, 15 aa, Artificial Sequence
  Description of Artificial Sequence: Synthetic peptide
  Seed: SPGMMMGMFNMLSTV
SPGFMMTMINMISTV

SEQ ID NO: 196609 - protein, 15 aa, Artificial Sequence
  Description of Artificial Sequence: Synthetic peptide
  Seed: SPGMMMGMFNMLSTV
SPGFMMTMINMLSTV

SEQ ID NO: 196610 - protein, 15 aa, Artificial Sequence
  Description of Artificial Sequence: Synthetic peptide
  Seed: SPGMMMGMFNMLSTV
SPGFMMTMINMMSTV

SEQ ID NO: 196611 - protein, 15 aa, Artificial Sequence
  Description of Artificial Sequence: Synthetic peptide
  Seed: SPGMMMGMFNMLSTV
SPGFMMTMINMTSTV

SEQ ID NO: 196612 - protein, 15 aa, Artificial Sequence
  Description of Artificial Sequence: Synthetic peptide
  Seed: SPGMMMGMFNMLSTV
SPGFMMTMINMVSTV

SEQ ID NO: 196613 - protein, 15 aa, Artificial Sequence
  Description of Artificial Sequence: Synthetic peptide
  Seed: SPGMMMGMFNMLSTV
SPGFMMTMINMYSTV

SEQ ID NO: 196614 - protein, 15 aa, Artificial Sequence
  Description of Artificial Sequence: Synthetic peptide
  Seed: SPGMMMGMFNMLSTV
SPGFMMTMLNMASTV

SEQ ID NO: 196615 - protein, 15 aa, Artificial Sequence
  Description of Artificial Sequence: Synthetic peptide
  Seed: SPGMMMGMFNMLSTV
SPGFMMTMLNMDSTV

SEQ ID NO: 196616 - protein, 15 aa, Artificial Sequence
  Description of Artificial Sequence: Synthetic peptide
  Seed: SPGMMMGMFNMLSTV
SPGFMMTMLNMESTV

SEQ ID NO: 196617 - protein, 15 aa, Artificial Sequence
  Description of Artificial Sequence: Synthetic peptide
  Seed: SPGMMMGMFNMLSTV
SPGFMMTMLNMFSTV

SEQ ID NO: 196618 - protein, 15 aa, Artificial Sequence
  Description of Artificial Sequence: Synthetic peptide
  Seed: SPGMMMGMFNMLSTV
SPGFMMTMLNMISTV

SEQ ID NO: 196619 - protein, 15 aa, Artificial Sequence
  Description of Artificial Sequence: Synthetic peptide
  Seed: SPGMMMGMFNMLSTV
SPGFMMTMLNMLSTV

SEQ ID NO: 196620 - protein, 15 aa, Artificial Sequence
  Description of Artificial Sequence: Synthetic peptide
  Seed: SPGMMMGMFNMLSTV
SPGFMMTMLNMMSTV

SEQ ID NO: 196621 - protein, 15 aa, Artificial Sequence
  Description of Artificial Sequence: Synthetic peptide
  Seed: SPGMMMGMFNMLSTV
SPGFMMTMLNMNSTV

SEQ ID NO: 196622 - protein, 15 aa, Artificial Sequence
  Description of Artificial Sequence: Synthetic peptide
  Seed: SPGMMMGMFNMLSTV
SPGFMMTMLNMTSTV

SEQ ID NO: 196623 - protein, 15 aa, Artificial Sequence
  Description of Artificial Sequence: Synthetic peptide
  Seed: SPGMMMGMFNMLSTV
SPGFMMTMLNMVSTV

SEQ ID NO: 196624 - protein, 15 aa, Artificial Sequence
  Description of Artificial Sequence: Synthetic peptide
  Seed: SPGMMMGMFNMLSTV
SPGFMMTMLNMYSTV

SEQ ID NO: 196625 - protein, 15 aa, Artificial Sequence
  Description of Artificial Sequence: Synthetic peptide
  Seed: SPGMMMGMFNMLSTV
SPGFMMTMMNMFSTV

SEQ ID NO: 196626 - protein, 15 aa, Artificial Sequence
  Description of Artificial Sequence: Synthetic peptide
  Seed: SPGMMMGMFNMLSTV
SPGFMMTMMNMISTV

SEQ ID NO: 196627 - protein, 15 aa, Artificial Sequence
  Description of Artificial Sequence: Synthetic peptide
  Seed: SPGMMMGMFNMLSTV
SPGFMMTMMNMLSTV

SEQ ID NO: 196628 - protein, 15 aa, Artificial Sequence
  Description of Artificial Sequence: Synthetic peptide
  Seed: SPGMMMGMFNMLSTV
SPGFMMTMMNMMSTV

SEQ ID NO: 196629 - protein, 15 aa, Artificial Sequence
  Description of Artificial Sequence: Synthetic peptide
  Seed: SPGMMMGMFNMLSTV
SPGFMMTMMNMVSTV

SEQ ID NO: 196630 - protein, 15 aa, Artificial Sequence
  Description of Artificial Sequence: Synthetic peptide
  Seed: SPGMMMGMFNMLSTV
SPGFMMTMMNMYSTV

SEQ ID NO: 196631 - protein, 15 aa, Artificial Sequence
  Description of Artificial Sequence: Synthetic peptide
  Seed: SPGMMMGMFNMLSTV
SPGFMMTMNNMASTV

SEQ ID NO: 196632 - protein, 15 aa, Artificial Sequence
  Description of Artificial Sequence: Synthetic peptide
  Seed: SPGMMMGMFNMLSTV
SPGFMMTMNNMFSTV

SEQ ID NO: 196633 - protein, 15 aa, Artificial Sequence
  Description of Artificial Sequence: Synthetic peptide
  Seed: SPGMMMGMFNMLSTV
SPGFMMTMNNMISTV

SEQ ID NO: 196634 - protein, 15 aa, Artificial Sequence
  Description of Artificial Sequence: Synthetic peptide
  Seed: SPGMMMGMFNMLSTV
SPGFMMTMNNMLSTV

SEQ ID NO: 196635 - protein, 15 aa, Artificial Sequence
  Description of Artificial Sequence: Synthetic peptide
  Seed: SPGMMMGMFNMLSTV
SPGFMMTMNNMMSTV

SEQ ID NO: 196636 - protein, 15 aa, Artificial Sequence
  Description of Artificial Sequence: Synthetic peptide
  Seed: SPGMMMGMFNMLSTV
SPGFMMTMNNMSSTV

SEQ ID NO: 196637 - protein, 15 aa, Artificial Sequence
  Description of Artificial Sequence: Synthetic peptide
  Seed: SPGMMMGMFNMLSTV
SPGFMMTMNNMTSTV

SEQ ID NO: 196638 - protein, 15 aa, Artificial Sequence
  Description of Artificial Sequence: Synthetic peptide
  Seed: SPGMMMGMFNMLSTV
SPGFMMTMNNMVSTV

SEQ ID NO: 196639 - protein, 15 aa, Artificial Sequence
  Description of Artificial Sequence: Synthetic peptide
  Seed: SPGMMMGMFNMLSTV
SPGFMMTMNNMYSTV

SEQ ID NO: 196640 - protein, 15 aa, Artificial Sequence
  Description of Artificial Sequence: Synthetic peptide
  Seed: SPGMMMGMFNMLSTV
SPGFMMTMPNMASTV

SEQ ID NO: 196641 - protein, 15 aa, Artificial Sequence
  Description of Artificial Sequence: Synthetic peptide
  Seed: SPGMMMGMFNMLSTV
SPGFMMTMPNMFSTV

SEQ ID NO: 196642 - protein, 15 aa, Artificial Sequence
  Description of Artificial Sequence: Synthetic peptide
  Seed: SPGMMMGMFNMLSTV
SPGFMMTMPNMGSTV

SEQ ID NO: 196643 - protein, 15 aa, Artificial Sequence
  Description of Artificial Sequence: Synthetic peptide
  Seed: SPGMMMGMFNMLSTV
SPGFMMTMPNMHSTV

SEQ ID NO: 196644 - protein, 15 aa, Artificial Sequence
  Description of Artificial Sequence: Synthetic peptide
  Seed: SPGMMMGMFNMLSTV
SPGFMMTMPNMISTV

SEQ ID NO: 196645 - protein, 15 aa, Artificial Sequence
  Description of Artificial Sequence: Synthetic peptide
  Seed: SPGMMMGMFNMLSTV
SPGFMMTMPNMLSTV

SEQ ID NO: 196646 - protein, 15 aa, Artificial Sequence
  Description of Artificial Sequence: Synthetic peptide
  Seed: SPGMMMGMFNMLSTV
SPGFMMTMPNMMSTV

SEQ ID NO: 196647 - protein, 15 aa, Artificial Sequence
  Description of Artificial Sequence: Synthetic peptide
  Seed: SPGMMMGMFNMLSTV
SPGFMMTMPNMNSTV

SEQ ID NO: 196648 - protein, 15 aa, Artificial Sequence
  Description of Artificial Sequence: Synthetic peptide
  Seed: SPGMMMGMFNMLSTV
SPGFMMTMPNMPSTV

SEQ ID NO: 196649 - protein, 15 aa, Artificial Sequence
  Description of Artificial Sequence: Synthetic peptide
  Seed: SPGMMMGMFNMLSTV
SPGFMMTMPNMSSTV

SEQ ID NO: 196650 - protein, 15 aa, Artificial Sequence
  Description of Artificial Sequence: Synthetic peptide
  Seed: SPGMMMGMFNMLSTV
SPGFMMTMPNMTSTV

SEQ ID NO: 196651 - protein, 15 aa, Artificial Sequence
  Description of Artificial Sequence: Synthetic peptide
  Seed: SPGMMMGMFNMLSTV
SPGFMMTMPNMVSTV

SEQ ID NO: 196652 - protein, 15 aa, Artificial Sequence
  Description of Artificial Sequence: Synthetic peptide
  Seed: SPGMMMGMFNMLSTV
SPGFMMTMPNMWSTV

SEQ ID NO: 196653 - protein, 15 aa, Artificial Sequence
  Description of Artificial Sequence: Synthetic peptide
  Seed: SPGMMMGMFNMLSTV
SPGFMMTMPNMYSTV

SEQ ID NO: 196654 - protein, 15 aa, Artificial Sequence
  Description of Artificial Sequence: Synthetic peptide
  Seed: SPGMMMGMFNMLSTV
SPGFMMTMQNMISTV

SEQ ID NO: 196655 - protein, 15 aa, Artificial Sequence
  Description of Artificial Sequence: Synthetic peptide
  Seed: SPGMMMGMFNMLSTV
SPGFMMTMQNMLSTV

SEQ ID NO: 196656 - protein, 15 aa, Artificial Sequence
  Description of Artificial Sequence: Synthetic peptide
  Seed: SPGMMMGMFNMLSTV
SPGFMMTMQNMMSTV

SEQ ID NO: 196657 - protein, 15 aa, Artificial Sequence
  Description of Artificial Sequence: Synthetic peptide
  Seed: SPGMMMGMFNMLSTV
SPGFMMTMQNMVSTV

SEQ ID NO: 196658 - protein, 15 aa, Artificial Sequence
  Description of Artificial Sequence: Synthetic peptide
  Seed: SPGMMMGMFNMLSTV
SPGFMMTMSNMASTV

SEQ ID NO: 196659 - protein, 15 aa, Artificial Sequence
  Description of Artificial Sequence: Synthetic peptide
  Seed: SPGMMMGMFNMLSTV
SPGFMMTMSNMDSTV

SEQ ID NO: 196660 - protein, 15 aa, Artificial Sequence
  Description of Artificial Sequence: Synthetic peptide
  Seed: SPGMMMGMFNMLSTV
SPGFMMTMSNMESTV

SEQ ID NO: 196661 - protein, 15 aa, Artificial Sequence
  Description of Artificial Sequence: Synthetic peptide
  Seed: SPGMMMGMFNMLSTV
SPGFMMTMSNMFSTV

SEQ ID NO: 196662 - protein, 15 aa, Artificial Sequence
  Description of Artificial Sequence: Synthetic peptide
  Seed: SPGMMMGMFNMLSTV
SPGFMMTMSNMGSTV

SEQ ID NO: 196663 - protein, 15 aa, Artificial Sequence
  Description of Artificial Sequence: Synthetic peptide
  Seed: SPGMMMGMFNMLSTV
SPGFMMTMSNMHSTV

SEQ ID NO: 196664 - protein, 15 aa, Artificial Sequence
  Description of Artificial Sequence: Synthetic peptide
  Seed: SPGMMMGMFNMLSTV
SPGFMMTMSNMISTV

SEQ ID NO: 196665 - protein, 15 aa, Artificial Sequence
  Description of Artificial Sequence: Synthetic peptide
  Seed: SPGMMMGMFNMLSTV
SPGFMMTMSNMKSTV

SEQ ID NO: 196666 - protein, 15 aa, Artificial Sequence
  Description of Artificial Sequence: Synthetic peptide
  Seed: SPGMMMGMFNMLSTV
SPGFMMTMSNMLSTV

SEQ ID NO: 196667 - protein, 15 aa, Artificial Sequence
  Description of Artificial Sequence: Synthetic peptide
  Seed: SPGMMMGMFNMLSTV
SPGFMMTMSNMMSTV

SEQ ID NO: 196668 - protein, 15 aa, Artificial Sequence
  Description of Artificial Sequence: Synthetic peptide
  Seed: SPGMMMGMFNMLSTV
SPGFMMTMSNMNSTV

SEQ ID NO: 196669 - protein, 15 aa, Artificial Sequence
  Description of Artificial Sequence: Synthetic peptide
  Seed: SPGMMMGMFNMLSTV
SPGFMMTMSNMPSTV

SEQ ID NO: 196670 - protein, 15 aa, Artificial Sequence
  Description of Artificial Sequence: Synthetic peptide
  Seed: SPGMMMGMFNMLSTV
SPGFMMTMSNMQSTV

SEQ ID NO: 196671 - protein, 15 aa, Artificial Sequence
  Description of Artificial Sequence: Synthetic peptide
  Seed: SPGMMMGMFNMLSTV
SPGFMMTMSNMRSTV

SEQ ID NO: 196672 - protein, 15 aa, Artificial Sequence
  Description of Artificial Sequence: Synthetic peptide
  Seed: SPGMMMGMFNMLSTV
SPGFMMTMSNMSSTV

SEQ ID NO: 196673 - protein, 15 aa, Artificial Sequence
  Description of Artificial Sequence: Synthetic peptide
  Seed: SPGMMMGMFNMLSTV
SPGFMMTMSNMTSTV

SEQ ID NO: 196674 - protein, 15 aa, Artificial Sequence
  Description of Artificial Sequence: Synthetic peptide
  Seed: SPGMMMGMFNMLSTV
SPGFMMTMSNMVSTV

SEQ ID NO: 196675 - protein, 15 aa, Artificial Sequence
  Description of Artificial Sequence: Synthetic peptide
  Seed: SPGMMMGMFNMLSTV
SPGFMMTMSNMWSTV

SEQ ID NO: 196676 - protein, 15 aa, Artificial Sequence
  Description of Artificial Sequence: Synthetic peptide
  Seed: SPGMMMGMFNMLSTV
SPGFMMTMSNMYSTV

SEQ ID NO: 196677 - protein, 15 aa, Artificial Sequence
  Description of Artificial Sequence: Synthetic peptide
  Seed: SPGMMMGMFNMLSTV
SPGFMMTMTNMASTV

SEQ ID NO: 196678 - protein, 15 aa, Artificial Sequence
  Description of Artificial Sequence: Synthetic peptide
  Seed: SPGMMMGMFNMLSTV
SPGFMMTMTNMFSTV

SEQ ID NO: 196679 - protein, 15 aa, Artificial Sequence
  Description of Artificial Sequence: Synthetic peptide
  Seed: SPGMMMGMFNMLSTV
SPGFMMTMTNMHSTV

SEQ ID NO: 196680 - protein, 15 aa, Artificial Sequence
  Description of Artificial Sequence: Synthetic peptide
  Seed: SPGMMMGMFNMLSTV
SPGFMMTMTNMISTV

SEQ ID NO: 196681 - protein, 15 aa, Artificial Sequence
  Description of Artificial Sequence: Synthetic peptide
  Seed: SPGMMMGMFNMLSTV
SPGFMMTMTNMLSTV

SEQ ID NO: 196682 - protein, 15 aa, Artificial Sequence
  Description of Artificial Sequence: Synthetic peptide
  Seed: SPGMMMGMFNMLSTV
SPGFMMTMTNMMSTV

SEQ ID NO: 196683 - protein, 15 aa, Artificial Sequence
  Description of Artificial Sequence: Synthetic peptide
  Seed: SPGMMMGMFNMLSTV
SPGFMMTMTNMNSTV

SEQ ID NO: 196684 - protein, 15 aa, Artificial Sequence
  Description of Artificial Sequence: Synthetic peptide
  Seed: SPGMMMGMFNMLSTV
SPGFMMTMTNMSSTV

SEQ ID NO: 196685 - protein, 15 aa, Artificial Sequence
  Description of Artificial Sequence: Synthetic peptide
  Seed: SPGMMMGMFNMLSTV
SPGFMMTMTNMTSTV

SEQ ID NO: 196686 - protein, 15 aa, Artificial Sequence
  Description of Artificial Sequence: Synthetic peptide
  Seed: SPGMMMGMFNMLSTV
SPGFMMTMTNMVSTV

SEQ ID NO: 196687 - protein, 15 aa, Artificial Sequence
  Description of Artificial Sequence: Synthetic peptide
  Seed: SPGMMMGMFNMLSTV
SPGFMMTMTNMYSTV

SEQ ID NO: 196688 - protein, 15 aa, Artificial Sequence
  Description of Artificial Sequence: Synthetic peptide
  Seed: SPGMMMGMFNMLSTV
SPGFMMTMVNMASTV

SEQ ID NO: 196689 - protein, 15 aa, Artificial Sequence
  Description of Artificial Sequence: Synthetic peptide
  Seed: SPGMMMGMFNMLSTV
SPGFMMTMVNMFSTV

SEQ ID NO: 196690 - protein, 15 aa, Artificial Sequence
  Description of Artificial Sequence: Synthetic peptide
  Seed: SPGMMMGMFNMLSTV
SPGFMMTMVNMHSTV

SEQ ID NO: 196691 - protein, 15 aa, Artificial Sequence
  Description of Artificial Sequence: Synthetic peptide
  Seed: SPGMMMGMFNMLSTV
SPGFMMTMVNMISTV

SEQ ID NO: 196692 - protein, 15 aa, Artificial Sequence
  Description of Artificial Sequence: Synthetic peptide
  Seed: SPGMMMGMFNMLSTV
SPGFMMTMVNMLSTV

SEQ ID NO: 196693 - protein, 15 aa, Artificial Sequence
  Description of Artificial Sequence: Synthetic peptide
  Seed: SPGMMMGMFNMLSTV
SPGFMMTMVNMMSTV

SEQ ID NO: 196694 - protein, 15 aa, Artificial Sequence
  Description of Artificial Sequence: Synthetic peptide
  Seed: SPGMMMGMFNMLSTV
SPGFMMTMVNMNSTV

SEQ ID NO: 196695 - protein, 15 aa, Artificial Sequence
  Description of Artificial Sequence: Synthetic peptide
  Seed: SPGMMMGMFNMLSTV
SPGFMMTMVNMSSTV

SEQ ID NO: 196696 - protein, 15 aa, Artificial Sequence
  Description of Artificial Sequence: Synthetic peptide
  Seed: SPGMMMGMFNMLSTV
SPGFMMTMVNMTSTV

SEQ ID NO: 196697 - protein, 15 aa, Artificial Sequence
  Description of Artificial Sequence: Synthetic peptide
  Seed: SPGMMMGMFNMLSTV
SPGFMMTMVNMVSTV

SEQ ID NO: 196698 - protein, 15 aa, Artificial Sequence
  Description of Artificial Sequence: Synthetic peptide
  Seed: SPGMMMGMFNMLSTV
SPGFMMTMVNMYSTV

SEQ ID NO: 196699 - protein, 15 aa, Artificial Sequence
  Description of Artificial Sequence: Synthetic peptide
  Seed: SPGMMMGMFNMLSTV
SPGFMMTMWNMASTV

SEQ ID NO: 196700 - protein, 15 aa, Artificial Sequence
  Description of Artificial Sequence: Synthetic peptide
  Seed: SPGMMMGMFNMLSTV
SPGFMMTMWNMESTV

SEQ ID NO: 196701 - protein, 15 aa, Artificial Sequence
  Description of Artificial Sequence: Synthetic peptide
  Seed: SPGMMMGMFNMLSTV
SPGFMMTMWNMFSTV

SEQ ID NO: 196702 - protein, 15 aa, Artificial Sequence
  Description of Artificial Sequence: Synthetic peptide
  Seed: SPGMMMGMFNMLSTV
SPGFMMTMWNMISTV

SEQ ID NO: 196703 - protein, 15 aa, Artificial Sequence
  Description of Artificial Sequence: Synthetic peptide
  Seed: SPGMMMGMFNMLSTV
SPGFMMTMWNMLSTV

SEQ ID NO: 196704 - protein, 15 aa, Artificial Sequence
  Description of Artificial Sequence: Synthetic peptide
  Seed: SPGMMMGMFNMLSTV
SPGFMMTMWNMMSTV

SEQ ID NO: 196705 - protein, 15 aa, Artificial Sequence
  Description of Artificial Sequence: Synthetic peptide
  Seed: SPGMMMGMFNMLSTV
SPGFMMTMWNMNSTV

SEQ ID NO: 196706 - protein, 15 aa, Artificial Sequence
  Description of Artificial Sequence: Synthetic peptide
  Seed: SPGMMMGMFNMLSTV
SPGFMMTMWNMSSTV

SEQ ID NO: 196707 - protein, 15 aa, Artificial Sequence
  Description of Artificial Sequence: Synthetic peptide
  Seed: SPGMMMGMFNMLSTV
SPGFMMTMWNMTSTV

SEQ ID NO: 196708 - protein, 15 aa, Artificial Sequence
  Description of Artificial Sequence: Synthetic peptide
  Seed: SPGMMMGMFNMLSTV
SPGFMMTMWNMVSTV

SEQ ID NO: 196709 - protein, 15 aa, Artificial Sequence
  Description of Artificial Sequence: Synthetic peptide
  Seed: SPGMMMGMFNMLSTV
SPGFMMTMWNMYSTV

SEQ ID NO: 196710 - protein, 15 aa, Artificial Sequence
  Description of Artificial Sequence: Synthetic peptide
  Seed: SPGMMMGMFNMLSTV
SPGFMMTMYNMASTV

SEQ ID NO: 196711 - protein, 15 aa, Artificial Sequence
  Description of Artificial Sequence: Synthetic peptide
  Seed: SPGMMMGMFNMLSTV
SPGFMMTMYNMDSTV

SEQ ID NO: 196712 - protein, 15 aa, Artificial Sequence
  Description of Artificial Sequence: Synthetic peptide
  Seed: SPGMMMGMFNMLSTV
SPGFMMTMYNMESTV

SEQ ID NO: 196713 - protein, 15 aa, Artificial Sequence
  Description of Artificial Sequence: Synthetic peptide
  Seed: SPGMMMGMFNMLSTV
SPGFMMTMYNMFSTV

SEQ ID NO: 196714 - protein, 15 aa, Artificial Sequence
  Description of Artificial Sequence: Synthetic peptide
  Seed: SPGMMMGMFNMLSTV
SPGFMMTMYNMISTV

SEQ ID NO: 196715 - protein, 15 aa, Artificial Sequence
  Description of Artificial Sequence: Synthetic peptide
  Seed: SPGMMMGMFNMLSTV
SPGFMMTMYNMLSTV

SEQ ID NO: 196716 - protein, 15 aa, Artificial Sequence
  Description of Artificial Sequence: Synthetic peptide
  Seed: SPGMMMGMFNMLSTV
SPGFMMTMYNMMSTV

SEQ ID NO: 196717 - protein, 15 aa, Artificial Sequence
  Description of Artificial Sequence: Synthetic peptide
  Seed: SPGMMMGMFNMLSTV
SPGFMMTMYNMNSTV

SEQ ID NO: 196718 - protein, 15 aa, Artificial Sequence
  Description of Artificial Sequence: Synthetic peptide
  Seed: SPGMMMGMFNMLSTV
SPGFMMTMYNMSSTV

SEQ ID NO: 196719 - protein, 15 aa, Artificial Sequence
  Description of Artificial Sequence: Synthetic peptide
  Seed: SPGMMMGMFNMLSTV
SPGFMMTMYNMTSTV

SEQ ID NO: 196720 - protein, 15 aa, Artificial Sequence
  Description of Artificial Sequence: Synthetic peptide
  Seed: SPGMMMGMFNMLSTV
SPGFMMTMYNMVSTV

SEQ ID NO: 196721 - protein, 15 aa, Artificial Sequence
  Description of Artificial Sequence: Synthetic peptide
  Seed: SPGMMMGMFNMLSTV
SPGFMMTMYNMYSTV

SEQ ID NO: 196722 - protein, 15 aa, Artificial Sequence
  Description of Artificial Sequence: Synthetic peptide
  Seed: SPGMMMGMFNMLSTV
SPGFMMVMANMASTV

SEQ ID NO: 196723 - protein, 15 aa, Artificial Sequence
  Description of Artificial Sequence: Synthetic peptide
  Seed: SPGMMMGMFNMLSTV
SPGFMMVMANMDSTV

SEQ ID NO: 196724 - protein, 15 aa, Artificial Sequence
  Description of Artificial Sequence: Synthetic peptide
  Seed: SPGMMMGMFNMLSTV
SPGFMMVMANMFSTV

SEQ ID NO: 196725 - protein, 15 aa, Artificial Sequence
  Description of Artificial Sequence: Synthetic peptide
  Seed: SPGMMMGMFNMLSTV
SPGFMMVMANMGSTV

SEQ ID NO: 196726 - protein, 15 aa, Artificial Sequence
  Description of Artificial Sequence: Synthetic peptide
  Seed: SPGMMMGMFNMLSTV
SPGFMMVMANMHSTV

SEQ ID NO: 196727 - protein, 15 aa, Artificial Sequence
  Description of Artificial Sequence: Synthetic peptide
  Seed: SPGMMMGMFNMLSTV
SPGFMMVMANMISTV

SEQ ID NO: 196728 - protein, 15 aa, Artificial Sequence
  Description of Artificial Sequence: Synthetic peptide
  Seed: SPGMMMGMFNMLSTV
SPGFMMVMANMLSTV

SEQ ID NO: 196729 - protein, 15 aa, Artificial Sequence
  Description of Artificial Sequence: Synthetic peptide
  Seed: SPGMMMGMFNMLSTV
SPGFMMVMANMMSTV

SEQ ID NO: 196730 - protein, 15 aa, Artificial Sequence
  Description of Artificial Sequence: Synthetic peptide
  Seed: SPGMMMGMFNMLSTV
SPGFMMVMANMNSTV

SEQ ID NO: 196731 - protein, 15 aa, Artificial Sequence
  Description of Artificial Sequence: Synthetic peptide
  Seed: SPGMMMGMFNMLSTV
SPGFMMVMANMPSTV

SEQ ID NO: 196732 - protein, 15 aa, Artificial Sequence
  Description of Artificial Sequence: Synthetic peptide
  Seed: SPGMMMGMFNMLSTV
SPGFMMVMANMSSTV

SEQ ID NO: 196733 - protein, 15 aa, Artificial Sequence
  Description of Artificial Sequence: Synthetic peptide
  Seed: SPGMMMGMFNMLSTV
SPGFMMVMANMTSTV

SEQ ID NO: 196734 - protein, 15 aa, Artificial Sequence
  Description of Artificial Sequence: Synthetic peptide
  Seed: SPGMMMGMFNMLSTV
SPGFMMVMANMVSTV

SEQ ID NO: 196735 - protein, 15 aa, Artificial Sequence
  Description of Artificial Sequence: Synthetic peptide
  Seed: SPGMMMGMFNMLSTV
SPGFMMVMANMYSTV

SEQ ID NO: 196736 - protein, 15 aa, Artificial Sequence
  Description of Artificial Sequence: Synthetic peptide
  Seed: SPGMMMGMFNMLSTV
SPGFMMVMDNMISTV

SEQ ID NO: 196737 - protein, 15 aa, Artificial Sequence
  Description of Artificial Sequence: Synthetic peptide
  Seed: SPGMMMGMFNMLSTV
SPGFMMVMFNMASTV

SEQ ID NO: 196738 - protein, 15 aa, Artificial Sequence
  Description of Artificial Sequence: Synthetic peptide
  Seed: SPGMMMGMFNMLSTV
SPGFMMVMFNMDSTV

SEQ ID NO: 196739 - protein, 15 aa, Artificial Sequence
  Description of Artificial Sequence: Synthetic peptide
  Seed: SPGMMMGMFNMLSTV
SPGFMMVMFNMESTV

SEQ ID NO: 196740 - protein, 15 aa, Artificial Sequence
  Description of Artificial Sequence: Synthetic peptide
  Seed: SPGMMMGMFNMLSTV
SPGFMMVMFNMFSTV

SEQ ID NO: 196741 - protein, 15 aa, Artificial Sequence
  Description of Artificial Sequence: Synthetic peptide
  Seed: SPGMMMGMFNMLSTV
SPGFMMVMFNMHSTV

SEQ ID NO: 196742 - protein, 15 aa, Artificial Sequence
  Description of Artificial Sequence: Synthetic peptide
  Seed: SPGMMMGMFNMLSTV
SPGFMMVMFNMISTV

SEQ ID NO: 196743 - protein, 15 aa, Artificial Sequence
  Description of Artificial Sequence: Synthetic peptide
  Seed: SPGMMMGMFNMLSTV
SPGFMMVMFNMLSTV

SEQ ID NO: 196744 - protein, 15 aa, Artificial Sequence
  Description of Artificial Sequence: Synthetic peptide
  Seed: SPGMMMGMFNMLSTV
SPGFMMVMFNMMSTV

SEQ ID NO: 196745 - protein, 15 aa, Artificial Sequence
  Description of Artificial Sequence: Synthetic peptide
  Seed: SPGMMMGMFNMLSTV
SPGFMMVMFNMNSTV

SEQ ID NO: 196746 - protein, 15 aa, Artificial Sequence
  Description of Artificial Sequence: Synthetic peptide
  Seed: SPGMMMGMFNMLSTV
SPGFMMVMFNMPSTV

SEQ ID NO: 196747 - protein, 15 aa, Artificial Sequence
  Description of Artificial Sequence: Synthetic peptide
  Seed: SPGMMMGMFNMLSTV
SPGFMMVMFNMQSTV

SEQ ID NO: 196748 - protein, 15 aa, Artificial Sequence
  Description of Artificial Sequence: Synthetic peptide
  Seed: SPGMMMGMFNMLSTV
SPGFMMVMFNMSSTV

SEQ ID NO: 196749 - protein, 15 aa, Artificial Sequence
  Description of Artificial Sequence: Synthetic peptide
  Seed: SPGMMMGMFNMLSTV
SPGFMMVMFNMTSTV

SEQ ID NO: 196750 - protein, 15 aa, Artificial Sequence
  Description of Artificial Sequence: Synthetic peptide
  Seed: SPGMMMGMFNMLSTV
SPGFMMVMFNMVSTV

SEQ ID NO: 196751 - protein, 15 aa, Artificial Sequence
  Description of Artificial Sequence: Synthetic peptide
  Seed: SPGMMMGMFNMLSTV
SPGFMMVMFNMYSTV

SEQ ID NO: 196752 - protein, 15 aa, Artificial Sequence
  Description of Artificial Sequence: Synthetic peptide
  Seed: SPGMMMGMFNMLSTV
SPGFMMVMGNMASTV

SEQ ID NO: 196753 - protein, 15 aa, Artificial Sequence
  Description of Artificial Sequence: Synthetic peptide
  Seed: SPGMMMGMFNMLSTV
SPGFMMVMGNMFSTV

SEQ ID NO: 196754 - protein, 15 aa, Artificial Sequence
  Description of Artificial Sequence: Synthetic peptide
  Seed: SPGMMMGMFNMLSTV
SPGFMMVMGNMISTV

SEQ ID NO: 196755 - protein, 15 aa, Artificial Sequence
  Description of Artificial Sequence: Synthetic peptide
  Seed: SPGMMMGMFNMLSTV
SPGFMMVMGNMLSTV

SEQ ID NO: 196756 - protein, 15 aa, Artificial Sequence
  Description of Artificial Sequence: Synthetic peptide
  Seed: SPGMMMGMFNMLSTV
SPGFMMVMGNMMSTV

SEQ ID NO: 196757 - protein, 15 aa, Artificial Sequence
  Description of Artificial Sequence: Synthetic peptide
  Seed: SPGMMMGMFNMLSTV
SPGFMMVMGNMSSTV

SEQ ID NO: 196758 - protein, 15 aa, Artificial Sequence
  Description of Artificial Sequence: Synthetic peptide
  Seed: SPGMMMGMFNMLSTV
SPGFMMVMGNMTSTV

SEQ ID NO: 196759 - protein, 15 aa, Artificial Sequence
  Description of Artificial Sequence: Synthetic peptide
  Seed: SPGMMMGMFNMLSTV
SPGFMMVMGNMVSTV

SEQ ID NO: 196760 - protein, 15 aa, Artificial Sequence
  Description of Artificial Sequence: Synthetic peptide
  Seed: SPGMMMGMFNMLSTV
SPGFMMVMGNMYSTV

SEQ ID NO: 196761 - protein, 15 aa, Artificial Sequence
  Description of Artificial Sequence: Synthetic peptide
  Seed: SPGMMMGMFNMLSTV
SPGFMMVMHNMASTV

SEQ ID NO: 196762 - protein, 15 aa, Artificial Sequence
  Description of Artificial Sequence: Synthetic peptide
  Seed: SPGMMMGMFNMLSTV
SPGFMMVMHNMISTV

SEQ ID NO: 196763 - protein, 15 aa, Artificial Sequence
  Description of Artificial Sequence: Synthetic peptide
  Seed: SPGMMMGMFNMLSTV
SPGFMMVMHNMNSTV

SEQ ID NO: 196764 - protein, 15 aa, Artificial Sequence
  Description of Artificial Sequence: Synthetic peptide
  Seed: SPGMMMGMFNMLSTV
SPGFMMVMHNMSSTV

SEQ ID NO: 196765 - protein, 15 aa, Artificial Sequence
  Description of Artificial Sequence: Synthetic peptide
  Seed: SPGMMMGMFNMLSTV
SPGFMMVMHNMVSTV

SEQ ID NO: 196766 - protein, 15 aa, Artificial Sequence
  Description of Artificial Sequence: Synthetic peptide
  Seed: SPGMMMGMFNMLSTV
SPGFMMVMKNMASTV

SEQ ID NO: 196767 - protein, 15 aa, Artificial Sequence
  Description of Artificial Sequence: Synthetic peptide
  Seed: SPGMMMGMFNMLSTV
SPGFMMVMKNMSSTV

SEQ ID NO: 196768 - protein, 15 aa, Artificial Sequence
  Description of Artificial Sequence: Synthetic peptide
  Seed: SPGMMMGMFNMLSTV
SPGFMMVMKNMVSTV

SEQ ID NO: 196769 - protein, 15 aa, Artificial Sequence
  Description of Artificial Sequence: Synthetic peptide
  Seed: SPGMMMGMFNMLSTV
SPGFMMVMNNMASTV

SEQ ID NO: 196770 - protein, 15 aa, Artificial Sequence
  Description of Artificial Sequence: Synthetic peptide
  Seed: SPGMMMGMFNMLSTV
SPGFMMVMNNMFSTV

SEQ ID NO: 196771 - protein, 15 aa, Artificial Sequence
  Description of Artificial Sequence: Synthetic peptide
  Seed: SPGMMMGMFNMLSTV
SPGFMMVMNNMGSTV

SEQ ID NO: 196772 - protein, 15 aa, Artificial Sequence
  Description of Artificial Sequence: Synthetic peptide
  Seed: SPGMMMGMFNMLSTV
SPGFMMVMNNMISTV

SEQ ID NO: 196773 - protein, 15 aa, Artificial Sequence
  Description of Artificial Sequence: Synthetic peptide
  Seed: SPGMMMGMFNMLSTV
SPGFMMVMNNMLSTV

SEQ ID NO: 196774 - protein, 15 aa, Artificial Sequence
  Description of Artificial Sequence: Synthetic peptide
  Seed: SPGMMMGMFNMLSTV
SPGFMMVMNNMMSTV

SEQ ID NO: 196775 - protein, 15 aa, Artificial Sequence
  Description of Artificial Sequence: Synthetic peptide
  Seed: SPGMMMGMFNMLSTV
SPGFMMVMNNMRSTV

SEQ ID NO: 196776 - protein, 15 aa, Artificial Sequence
  Description of Artificial Sequence: Synthetic peptide
  Seed: SPGMMMGMFNMLSTV
SPGFMMVMNNMSSTV

SEQ ID NO: 196777 - protein, 15 aa, Artificial Sequence
  Description of Artificial Sequence: Synthetic peptide
  Seed: SPGMMMGMFNMLSTV
SPGFMMVMNNMTSTV

SEQ ID NO: 196778 - protein, 15 aa, Artificial Sequence
  Description of Artificial Sequence: Synthetic peptide
  Seed: SPGMMMGMFNMLSTV
SPGFMMVMNNMVSTV

SEQ ID NO: 196779 - protein, 15 aa, Artificial Sequence
  Description of Artificial Sequence: Synthetic peptide
  Seed: SPGMMMGMFNMLSTV
SPGFMMVMNNMYSTV

SEQ ID NO: 196780 - protein, 15 aa, Artificial Sequence
  Description of Artificial Sequence: Synthetic peptide
  Seed: SPGMMMGMFNMLSTV
SPGFMMVMPNMASTV

SEQ ID NO: 196781 - protein, 15 aa, Artificial Sequence
  Description of Artificial Sequence: Synthetic peptide
  Seed: SPGMMMGMFNMLSTV
SPGFMMVMPNMFSTV

SEQ ID NO: 196782 - protein, 15 aa, Artificial Sequence
  Description of Artificial Sequence: Synthetic peptide
  Seed: SPGMMMGMFNMLSTV
SPGFMMVMPNMISTV

SEQ ID NO: 196783 - protein, 15 aa, Artificial Sequence
  Description of Artificial Sequence: Synthetic peptide
  Seed: SPGMMMGMFNMLSTV
SPGFMMVMPNMLSTV

SEQ ID NO: 196784 - protein, 15 aa, Artificial Sequence
  Description of Artificial Sequence: Synthetic peptide
  Seed: SPGMMMGMFNMLSTV
SPGFMMVMPNMMSTV

SEQ ID NO: 196785 - protein, 15 aa, Artificial Sequence
  Description of Artificial Sequence: Synthetic peptide
  Seed: SPGMMMGMFNMLSTV
SPGFMMVMPNMNSTV

SEQ ID NO: 196786 - protein, 15 aa, Artificial Sequence
  Description of Artificial Sequence: Synthetic peptide
  Seed: SPGMMMGMFNMLSTV
SPGFMMVMPNMSSTV

SEQ ID NO: 196787 - protein, 15 aa, Artificial Sequence
  Description of Artificial Sequence: Synthetic peptide
  Seed: SPGMMMGMFNMLSTV
SPGFMMVMPNMTSTV

SEQ ID NO: 196788 - protein, 15 aa, Artificial Sequence
  Description of Artificial Sequence: Synthetic peptide
  Seed: SPGMMMGMFNMLSTV
SPGFMMVMPNMVSTV

SEQ ID NO: 196789 - protein, 15 aa, Artificial Sequence
  Description of Artificial Sequence: Synthetic peptide
  Seed: SPGMMMGMFNMLSTV
SPGFMMVMPNMYSTV

SEQ ID NO: 196790 - protein, 15 aa, Artificial Sequence
  Description of Artificial Sequence: Synthetic peptide
  Seed: SPGMMMGMFNMLSTV
SPGFMMVMRNMASTV

SEQ ID NO: 196791 - protein, 15 aa, Artificial Sequence
  Description of Artificial Sequence: Synthetic peptide
  Seed: SPGMMMGMFNMLSTV
SPGFMMVMRNMNSTV

SEQ ID NO: 196792 - protein, 15 aa, Artificial Sequence
  Description of Artificial Sequence: Synthetic peptide
  Seed: SPGMMMGMFNMLSTV
SPGFMMVMRNMPSTV

SEQ ID NO: 196793 - protein, 15 aa, Artificial Sequence
  Description of Artificial Sequence: Synthetic peptide
  Seed: SPGMMMGMFNMLSTV
SPGFMMVMRNMSSTV

SEQ ID NO: 196794 - protein, 15 aa, Artificial Sequence
  Description of Artificial Sequence: Synthetic peptide
  Seed: SPGMMMGMFNMLSTV
SPGFMMVMRNMVSTV

SEQ ID NO: 196795 - protein, 15 aa, Artificial Sequence
  Description of Artificial Sequence: Synthetic peptide
  Seed: SPGMMMGMFNMLSTV
SPGFMMVMSNMASTV

SEQ ID NO: 196796 - protein, 15 aa, Artificial Sequence
  Description of Artificial Sequence: Synthetic peptide
  Seed: SPGMMMGMFNMLSTV
SPGFMMVMSNMFSTV

SEQ ID NO: 196797 - protein, 15 aa, Artificial Sequence
  Description of Artificial Sequence: Synthetic peptide
  Seed: SPGMMMGMFNMLSTV
SPGFMMVMSNMGSTV

SEQ ID NO: 196798 - protein, 15 aa, Artificial Sequence
  Description of Artificial Sequence: Synthetic peptide
  Seed: SPGMMMGMFNMLSTV
SPGFMMVMSNMHSTV

SEQ ID NO: 196799 - protein, 15 aa, Artificial Sequence
  Description of Artificial Sequence: Synthetic peptide
  Seed: SPGMMMGMFNMLSTV
SPGFMMVMSNMISTV

SEQ ID NO: 196800 - protein, 15 aa, Artificial Sequence
  Description of Artificial Sequence: Synthetic peptide
  Seed: SPGMMMGMFNMLSTV
SPGFMMVMSNMLSTV

SEQ ID NO: 196801 - protein, 15 aa, Artificial Sequence
  Description of Artificial Sequence: Synthetic peptide
  Seed: SPGMMMGMFNMLSTV
SPGFMMVMSNMMSTV

SEQ ID NO: 196802 - protein, 15 aa, Artificial Sequence
  Description of Artificial Sequence: Synthetic peptide
  Seed: SPGMMMGMFNMLSTV
SPGFMMVMSNMNSTV

SEQ ID NO: 196803 - protein, 15 aa, Artificial Sequence
  Description of Artificial Sequence: Synthetic peptide
  Seed: SPGMMMGMFNMLSTV
SPGFMMVMSNMPSTV

SEQ ID NO: 196804 - protein, 15 aa, Artificial Sequence
  Description of Artificial Sequence: Synthetic peptide
  Seed: SPGMMMGMFNMLSTV
SPGFMMVMSNMSSTV

SEQ ID NO: 196805 - protein, 15 aa, Artificial Sequence
  Description of Artificial Sequence: Synthetic peptide
  Seed: SPGMMMGMFNMLSTV
SPGFMMVMSNMTSTV

SEQ ID NO: 196806 - protein, 15 aa, Artificial Sequence
  Description of Artificial Sequence: Synthetic peptide
  Seed: SPGMMMGMFNMLSTV
SPGFMMVMSNMVSTV

SEQ ID NO: 196807 - protein, 15 aa, Artificial Sequence
  Description of Artificial Sequence: Synthetic peptide
  Seed: SPGMMMGMFNMLSTV
SPGFMMVMSNMYSTV

SEQ ID NO: 196808 - protein, 15 aa, Artificial Sequence
  Description of Artificial Sequence: Synthetic peptide
  Seed: SPGMMMGMFNMLSTV
SPGFMMVMTNMASTV

SEQ ID NO: 196809 - protein, 15 aa, Artificial Sequence
  Description of Artificial Sequence: Synthetic peptide
  Seed: SPGMMMGMFNMLSTV
SPGFMMVMTNMFSTV

SEQ ID NO: 196810 - protein, 15 aa, Artificial Sequence
  Description of Artificial Sequence: Synthetic peptide
  Seed: SPGMMMGMFNMLSTV
SPGFMMVMTNMISTV

SEQ ID NO: 196811 - protein, 15 aa, Artificial Sequence
  Description of Artificial Sequence: Synthetic peptide
  Seed: SPGMMMGMFNMLSTV
SPGFMMVMTNMLSTV

SEQ ID NO: 196812 - protein, 15 aa, Artificial Sequence
  Description of Artificial Sequence: Synthetic peptide
  Seed: SPGMMMGMFNMLSTV
SPGFMMVMTNMMSTV

SEQ ID NO: 196813 - protein, 15 aa, Artificial Sequence
  Description of Artificial Sequence: Synthetic peptide
  Seed: SPGMMMGMFNMLSTV
SPGFMMVMTNMSSTV

SEQ ID NO: 196814 - protein, 15 aa, Artificial Sequence
  Description of Artificial Sequence: Synthetic peptide
  Seed: SPGMMMGMFNMLSTV
SPGFMMVMTNMTSTV

SEQ ID NO: 196815 - protein, 15 aa, Artificial Sequence
  Description of Artificial Sequence: Synthetic peptide
  Seed: SPGMMMGMFNMLSTV
SPGFMMVMTNMVSTV

SEQ ID NO: 196816 - protein, 15 aa, Artificial Sequence
  Description of Artificial Sequence: Synthetic peptide
  Seed: SPGMMMGMFNMLSTV
SPGFMMVMTNMYSTV

SEQ ID NO: 196817 - protein, 15 aa, Artificial Sequence
  Description of Artificial Sequence: Synthetic peptide
  Seed: SPGMMMGMFNMLSTV
SPGFMMVMWNMESTV

SEQ ID NO: 196818 - protein, 15 aa, Artificial Sequence
  Description of Artificial Sequence: Synthetic peptide
  Seed: SPGMMMGMFNMLSTV
SPGFMMVMWNMFSTV

SEQ ID NO: 196819 - protein, 15 aa, Artificial Sequence
  Description of Artificial Sequence: Synthetic peptide
  Seed: SPGMMMGMFNMLSTV
SPGFMMVMWNMISTV

SEQ ID NO: 196820 - protein, 15 aa, Artificial Sequence
  Description of Artificial Sequence: Synthetic peptide
  Seed: SPGMMMGMFNMLSTV
SPGFMMVMWNMLSTV

SEQ ID NO: 196821 - protein, 15 aa, Artificial Sequence
  Description of Artificial Sequence: Synthetic peptide
  Seed: SPGMMMGMFNMLSTV
SPGFMMVMWNMMSTV

SEQ ID NO: 196822 - protein, 15 aa, Artificial Sequence
  Description of Artificial Sequence: Synthetic peptide
  Seed: SPGMMMGMFNMLSTV
SPGFMMVMWNMYSTV

SEQ ID NO: 196823 - protein, 15 aa, Artificial Sequence
  Description of Artificial Sequence: Synthetic peptide
  Seed: SPGMMMGMFNMLSTV
SPGFMMVMYNMDSTV

SEQ ID NO: 196824 - protein, 15 aa, Artificial Sequence
  Description of Artificial Sequence: Synthetic peptide
  Seed: SPGMMMGMFNMLSTV
SPGFMMVMYNMESTV

SEQ ID NO: 196825 - protein, 15 aa, Artificial Sequence
  Description of Artificial Sequence: Synthetic peptide
  Seed: SPGMMMGMFNMLSTV
SPGFMMVMYNMFSTV

SEQ ID NO: 196826 - protein, 15 aa, Artificial Sequence
  Description of Artificial Sequence: Synthetic peptide
  Seed: SPGMMMGMFNMLSTV
SPGFMMVMYNMISTV

SEQ ID NO: 196827 - protein, 15 aa, Artificial Sequence
  Description of Artificial Sequence: Synthetic peptide
  Seed: SPGMMMGMFNMLSTV
SPGFMMVMYNMLSTV

SEQ ID NO: 196828 - protein, 15 aa, Artificial Sequence
  Description of Artificial Sequence: Synthetic peptide
  Seed: SPGMMMGMFNMLSTV
SPGFMMVMYNMMSTV

SEQ ID NO: 196829 - protein, 15 aa, Artificial Sequence
  Description of Artificial Sequence: Synthetic peptide
  Seed: SPGMMMGMFNMLSTV
SPGFMMVMYNMNSTV

SEQ ID NO: 196830 - protein, 15 aa, Artificial Sequence
  Description of Artificial Sequence: Synthetic peptide
  Seed: SPGMMMGMFNMLSTV
SPGFMMVMYNMVSTV

SEQ ID NO: 196831 - protein, 15 aa, Artificial Sequence
  Description of Artificial Sequence: Synthetic peptide
  Seed: SPGMMMGMFNMLSTV
SPGFMMVMYNMYSTV

SEQ ID NO: 196832 - protein, 15 aa, Artificial Sequence
  Description of Artificial Sequence: Synthetic peptide
  Seed: SPGMMMGMFNMLSTV
SPGFMMWMANMASTV

SEQ ID NO: 196833 - protein, 15 aa, Artificial Sequence
  Description of Artificial Sequence: Synthetic peptide
  Seed: SPGMMMGMFNMLSTV
SPGFMMWMANMFSTV

SEQ ID NO: 196834 - protein, 15 aa, Artificial Sequence
  Description of Artificial Sequence: Synthetic peptide
  Seed: SPGMMMGMFNMLSTV
SPGFMMWMANMISTV

SEQ ID NO: 196835 - protein, 15 aa, Artificial Sequence
  Description of Artificial Sequence: Synthetic peptide
  Seed: SPGMMMGMFNMLSTV
SPGFMMWMANMLSTV

SEQ ID NO: 196836 - protein, 15 aa, Artificial Sequence
  Description of Artificial Sequence: Synthetic peptide
  Seed: SPGMMMGMFNMLSTV
SPGFMMWMANMMSTV

SEQ ID NO: 196837 - protein, 15 aa, Artificial Sequence
  Description of Artificial Sequence: Synthetic peptide
  Seed: SPGMMMGMFNMLSTV
SPGFMMWMANMVSTV

SEQ ID NO: 196838 - protein, 15 aa, Artificial Sequence
  Description of Artificial Sequence: Synthetic peptide
  Seed: SPGMMMGMFNMLSTV
SPGFMMWMFNMASTV

SEQ ID NO: 196839 - protein, 15 aa, Artificial Sequence
  Description of Artificial Sequence: Synthetic peptide
  Seed: SPGMMMGMFNMLSTV
SPGFMMWMFNMESTV

SEQ ID NO: 196840 - protein, 15 aa, Artificial Sequence
  Description of Artificial Sequence: Synthetic peptide
  Seed: SPGMMMGMFNMLSTV
SPGFMMWMFNMFSTV

SEQ ID NO: 196841 - protein, 15 aa, Artificial Sequence
  Description of Artificial Sequence: Synthetic peptide
  Seed: SPGMMMGMFNMLSTV
SPGFMMWMFNMISTV

SEQ ID NO: 196842 - protein, 15 aa, Artificial Sequence
  Description of Artificial Sequence: Synthetic peptide
  Seed: SPGMMMGMFNMLSTV
SPGFMMWMFNMLSTV

SEQ ID NO: 196843 - protein, 15 aa, Artificial Sequence
  Description of Artificial Sequence: Synthetic peptide
  Seed: SPGMMMGMFNMLSTV
SPGFMMWMFNMMSTV

SEQ ID NO: 196844 - protein, 15 aa, Artificial Sequence
  Description of Artificial Sequence: Synthetic peptide
  Seed: SPGMMMGMFNMLSTV
SPGFMMWMFNMNSTV

SEQ ID NO: 196845 - protein, 15 aa, Artificial Sequence
  Description of Artificial Sequence: Synthetic peptide
  Seed: SPGMMMGMFNMLSTV
SPGFMMWMFNMVSTV

SEQ ID NO: 196846 - protein, 15 aa, Artificial Sequence
  Description of Artificial Sequence: Synthetic peptide
  Seed: SPGMMMGMFNMLSTV
SPGFMMWMFNMYSTV

SEQ ID NO: 196847 - protein, 15 aa, Artificial Sequence
  Description of Artificial Sequence: Synthetic peptide
  Seed: SPGMMMGMFNMLSTV
SPGFMMWMINMFSTV

SEQ ID NO: 196848 - protein, 15 aa, Artificial Sequence
  Description of Artificial Sequence: Synthetic peptide
  Seed: SPGMMMGMFNMLSTV
SPGFMMWMINMLSTV

SEQ ID NO: 196849 - protein, 15 aa, Artificial Sequence
  Description of Artificial Sequence: Synthetic peptide
  Seed: SPGMMMGMFNMLSTV
SPGFMMWMINMYSTV

SEQ ID NO: 196850 - protein, 15 aa, Artificial Sequence
  Description of Artificial Sequence: Synthetic peptide
  Seed: SPGMMMGMFNMLSTV
SPGFMMWMLNMFSTV

SEQ ID NO: 196851 - protein, 15 aa, Artificial Sequence
  Description of Artificial Sequence: Synthetic peptide
  Seed: SPGMMMGMFNMLSTV
SPGFMMWMLNMISTV

SEQ ID NO: 196852 - protein, 15 aa, Artificial Sequence
  Description of Artificial Sequence: Synthetic peptide
  Seed: SPGMMMGMFNMLSTV
SPGFMMWMLNMLSTV

SEQ ID NO: 196853 - protein, 15 aa, Artificial Sequence
  Description of Artificial Sequence: Synthetic peptide
  Seed: SPGMMMGMFNMLSTV
SPGFMMWMLNMMSTV

SEQ ID NO: 196854 - protein, 15 aa, Artificial Sequence
  Description of Artificial Sequence: Synthetic peptide
  Seed: SPGMMMGMFNMLSTV
SPGFMMWMLNMYSTV

SEQ ID NO: 196855 - protein, 15 aa, Artificial Sequence
  Description of Artificial Sequence: Synthetic peptide
  Seed: SPGMMMGMFNMLSTV
SPGFMMWMMNMFSTV

SEQ ID NO: 196856 - protein, 15 aa, Artificial Sequence
  Description of Artificial Sequence: Synthetic peptide
  Seed: SPGMMMGMFNMLSTV
SPGFMMWMMNMLSTV

SEQ ID NO: 196857 - protein, 15 aa, Artificial Sequence
  Description of Artificial Sequence: Synthetic peptide
  Seed: SPGMMMGMFNMLSTV
SPGFMMWMMNMYSTV

SEQ ID NO: 196858 - protein, 15 aa, Artificial Sequence
  Description of Artificial Sequence: Synthetic peptide
  Seed: SPGMMMGMFNMLSTV
SPGFMMWMNNMASTV

SEQ ID NO: 196859 - protein, 15 aa, Artificial Sequence
  Description of Artificial Sequence: Synthetic peptide
  Seed: SPGMMMGMFNMLSTV
SPGFMMWMNNMFSTV

SEQ ID NO: 196860 - protein, 15 aa, Artificial Sequence
  Description of Artificial Sequence: Synthetic peptide
  Seed: SPGMMMGMFNMLSTV
SPGFMMWMNNMISTV

SEQ ID NO: 196861 - protein, 15 aa, Artificial Sequence
  Description of Artificial Sequence: Synthetic peptide
  Seed: SPGMMMGMFNMLSTV
SPGFMMWMNNMLSTV

SEQ ID NO: 196862 - protein, 15 aa, Artificial Sequence
  Description of Artificial Sequence: Synthetic peptide
  Seed: SPGMMMGMFNMLSTV
SPGFMMWMNNMMSTV

SEQ ID NO: 196863 - protein, 15 aa, Artificial Sequence
  Description of Artificial Sequence: Synthetic peptide
  Seed: SPGMMMGMFNMLSTV
SPGFMMWMNNMVSTV

SEQ ID NO: 196864 - protein, 15 aa, Artificial Sequence
  Description of Artificial Sequence: Synthetic peptide
  Seed: SPGMMMGMFNMLSTV
SPGFMMWMNNMYSTV

SEQ ID NO: 196865 - protein, 15 aa, Artificial Sequence
  Description of Artificial Sequence: Synthetic peptide
  Seed: SPGMMMGMFNMLSTV
SPGFMMWMPNMFSTV

SEQ ID NO: 196866 - protein, 15 aa, Artificial Sequence
  Description of Artificial Sequence: Synthetic peptide
  Seed: SPGMMMGMFNMLSTV
SPGFMMWMPNMISTV

SEQ ID NO: 196867 - protein, 15 aa, Artificial Sequence
  Description of Artificial Sequence: Synthetic peptide
  Seed: SPGMMMGMFNMLSTV
SPGFMMWMPNMLSTV

SEQ ID NO: 196868 - protein, 15 aa, Artificial Sequence
  Description of Artificial Sequence: Synthetic peptide
  Seed: SPGMMMGMFNMLSTV
SPGFMMWMPNMVSTV

SEQ ID NO: 196869 - protein, 15 aa, Artificial Sequence
  Description of Artificial Sequence: Synthetic peptide
  Seed: SPGMMMGMFNMLSTV
SPGFMMWMSNMISTV

SEQ ID NO: 196870 - protein, 15 aa, Artificial Sequence
  Description of Artificial Sequence: Synthetic peptide
  Seed: SPGMMMGMFNMLSTV
SPGFMMWMSNMLSTV

SEQ ID NO: 196871 - protein, 15 aa, Artificial Sequence
  Description of Artificial Sequence: Synthetic peptide
  Seed: SPGMMMGMFNMLSTV
SPGFMMWMSNMVSTV

SEQ ID NO: 196872 - protein, 15 aa, Artificial Sequence
  Description of Artificial Sequence: Synthetic peptide
  Seed: SPGMMMGMFNMLSTV
SPGFMMWMTNMLSTV

SEQ ID NO: 196873 - protein, 15 aa, Artificial Sequence
  Description of Artificial Sequence: Synthetic peptide
  Seed: SPGMMMGMFNMLSTV
SPGFMMWMVNMFSTV

SEQ ID NO: 196874 - protein, 15 aa, Artificial Sequence
  Description of Artificial Sequence: Synthetic peptide
  Seed: SPGMMMGMFNMLSTV
SPGFMMWMVNMLSTV

SEQ ID NO: 196875 - protein, 15 aa, Artificial Sequence
  Description of Artificial Sequence: Synthetic peptide
  Seed: SPGMMMGMFNMLSTV
SPGFMMWMWNMFSTV

SEQ ID NO: 196876 - protein, 15 aa, Artificial Sequence
  Description of Artificial Sequence: Synthetic peptide
  Seed: SPGMMMGMFNMLSTV
SPGFMMWMWNMISTV

SEQ ID NO: 196877 - protein, 15 aa, Artificial Sequence
  Description of Artificial Sequence: Synthetic peptide
  Seed: SPGMMMGMFNMLSTV
SPGFMMWMWNMLSTV

SEQ ID NO: 196878 - protein, 15 aa, Artificial Sequence
  Description of Artificial Sequence: Synthetic peptide
  Seed: SPGMMMGMFNMLSTV
SPGFMMWMWNMMSTV

SEQ ID NO: 196879 - protein, 15 aa, Artificial Sequence
  Description of Artificial Sequence: Synthetic peptide
  Seed: SPGMMMGMFNMLSTV
SPGFMMWMWNMVSTV

SEQ ID NO: 196880 - protein, 15 aa, Artificial Sequence
  Description of Artificial Sequence: Synthetic peptide
  Seed: SPGMMMGMFNMLSTV
SPGFMMWMWNMYSTV

SEQ ID NO: 196881 - protein, 15 aa, Artificial Sequence
  Description of Artificial Sequence: Synthetic peptide
  Seed: SPGMMMGMFNMLSTV
SPGFMMWMYNMFSTV

SEQ ID NO: 196882 - protein, 15 aa, Artificial Sequence
  Description of Artificial Sequence: Synthetic peptide
  Seed: SPGMMMGMFNMLSTV
SPGFMMWMYNMISTV

SEQ ID NO: 196883 - protein, 15 aa, Artificial Sequence
  Description of Artificial Sequence: Synthetic peptide
  Seed: SPGMMMGMFNMLSTV
SPGFMMWMYNMLSTV

SEQ ID NO: 196884 - protein, 15 aa, Artificial Sequence
  Description of Artificial Sequence: Synthetic peptide
  Seed: SPGMMMGMFNMLSTV
SPGFMMWMYNMMSTV

SEQ ID NO: 196885 - protein, 15 aa, Artificial Sequence
  Description of Artificial Sequence: Synthetic peptide
  Seed: SPGMMMGMFNMLSTV
SPGFMMWMYNMVSTV

SEQ ID NO: 196886 - protein, 15 aa, Artificial Sequence
  Description of Artificial Sequence: Synthetic peptide
  Seed: SPGMMMGMFNMLSTV
SPGFMMWMYNMYSTV

SEQ ID NO: 196887 - protein, 15 aa, Artificial Sequence
  Description of Artificial Sequence: Synthetic peptide
  Seed: SPGMMMGMFNMLSTV
SPGFMMYMANMASTV

SEQ ID NO: 196888 - protein, 15 aa, Artificial Sequence
  Description of Artificial Sequence: Synthetic peptide
  Seed: SPGMMMGMFNMLSTV
SPGFMMYMANMISTV

SEQ ID NO: 196889 - protein, 15 aa, Artificial Sequence
  Description of Artificial Sequence: Synthetic peptide
  Seed: SPGMMMGMFNMLSTV
SPGFMMYMANMLSTV

SEQ ID NO: 196890 - protein, 15 aa, Artificial Sequence
  Description of Artificial Sequence: Synthetic peptide
  Seed: SPGMMMGMFNMLSTV
SPGFMMYMANMMSTV

SEQ ID NO: 196891 - protein, 15 aa, Artificial Sequence
  Description of Artificial Sequence: Synthetic peptide
  Seed: SPGMMMGMFNMLSTV
SPGFMMYMANMSSTV

SEQ ID NO: 196892 - protein, 15 aa, Artificial Sequence
  Description of Artificial Sequence: Synthetic peptide
  Seed: SPGMMMGMFNMLSTV
SPGFMMYMANMVSTV

SEQ ID NO: 196893 - protein, 15 aa, Artificial Sequence
  Description of Artificial Sequence: Synthetic peptide
  Seed: SPGMMMGMFNMLSTV
SPGFMMYMANMYSTV

SEQ ID NO: 196894 - protein, 15 aa, Artificial Sequence
  Description of Artificial Sequence: Synthetic peptide
  Seed: SPGMMMGMFNMLSTV
SPGFMMYMFNMASTV

SEQ ID NO: 196895 - protein, 15 aa, Artificial Sequence
  Description of Artificial Sequence: Synthetic peptide
  Seed: SPGMMMGMFNMLSTV
SPGFMMYMFNMDSTV

SEQ ID NO: 196896 - protein, 15 aa, Artificial Sequence
  Description of Artificial Sequence: Synthetic peptide
  Seed: SPGMMMGMFNMLSTV
SPGFMMYMFNMESTV

SEQ ID NO: 196897 - protein, 15 aa, Artificial Sequence
  Description of Artificial Sequence: Synthetic peptide
  Seed: SPGMMMGMFNMLSTV
SPGFMMYMFNMFSTV

SEQ ID NO: 196898 - protein, 15 aa, Artificial Sequence
  Description of Artificial Sequence: Synthetic peptide
  Seed: SPGMMMGMFNMLSTV
SPGFMMYMFNMHSTV

SEQ ID NO: 196899 - protein, 15 aa, Artificial Sequence
  Description of Artificial Sequence: Synthetic peptide
  Seed: SPGMMMGMFNMLSTV
SPGFMMYMFNMISTV

SEQ ID NO: 196900 - protein, 15 aa, Artificial Sequence
  Description of Artificial Sequence: Synthetic peptide
  Seed: SPGMMMGMFNMLSTV
SPGFMMYMFNMLSTV

SEQ ID NO: 196901 - protein, 15 aa, Artificial Sequence
  Description of Artificial Sequence: Synthetic peptide
  Seed: SPGMMMGMFNMLSTV
SPGFMMYMFNMMSTV

SEQ ID NO: 196902 - protein, 15 aa, Artificial Sequence
  Description of Artificial Sequence: Synthetic peptide
  Seed: SPGMMMGMFNMLSTV
SPGFMMYMFNMNSTV

SEQ ID NO: 196903 - protein, 15 aa, Artificial Sequence
  Description of Artificial Sequence: Synthetic peptide
  Seed: SPGMMMGMFNMLSTV
SPGFMMYMFNMVSTV

SEQ ID NO: 196904 - protein, 15 aa, Artificial Sequence
  Description of Artificial Sequence: Synthetic peptide
  Seed: SPGMMMGMFNMLSTV
SPGFMMYMFNMYSTV

SEQ ID NO: 196905 - protein, 15 aa, Artificial Sequence
  Description of Artificial Sequence: Synthetic peptide
  Seed: SPGMMMGMFNMLSTV
SPGFMMYMHNMASTV

SEQ ID NO: 196906 - protein, 15 aa, Artificial Sequence
  Description of Artificial Sequence: Synthetic peptide
  Seed: SPGMMMGMFNMLSTV
SPGFMMYMINMLSTV

SEQ ID NO: 196907 - protein, 15 aa, Artificial Sequence
  Description of Artificial Sequence: Synthetic peptide
  Seed: SPGMMMGMFNMLSTV
SPGFMMYMINMYSTV

SEQ ID NO: 196908 - protein, 15 aa, Artificial Sequence
  Description of Artificial Sequence: Synthetic peptide
  Seed: SPGMMMGMFNMLSTV
SPGFMMYMLNMLSTV

SEQ ID NO: 196909 - protein, 15 aa, Artificial Sequence
  Description of Artificial Sequence: Synthetic peptide
  Seed: SPGMMMGMFNMLSTV
SPGFMMYMLNMYSTV

SEQ ID NO: 196910 - protein, 15 aa, Artificial Sequence
  Description of Artificial Sequence: Synthetic peptide
  Seed: SPGMMMGMFNMLSTV
SPGFMMYMMNMLSTV

SEQ ID NO: 196911 - protein, 15 aa, Artificial Sequence
  Description of Artificial Sequence: Synthetic peptide
  Seed: SPGMMMGMFNMLSTV
SPGFMMYMMNMYSTV

SEQ ID NO: 196912 - protein, 15 aa, Artificial Sequence
  Description of Artificial Sequence: Synthetic peptide
  Seed: SPGMMMGMFNMLSTV
SPGFMMYMNNMASTV

SEQ ID NO: 196913 - protein, 15 aa, Artificial Sequence
  Description of Artificial Sequence: Synthetic peptide
  Seed: SPGMMMGMFNMLSTV
SPGFMMYMNNMFSTV

SEQ ID NO: 196914 - protein, 15 aa, Artificial Sequence
  Description of Artificial Sequence: Synthetic peptide
  Seed: SPGMMMGMFNMLSTV
SPGFMMYMNNMISTV

SEQ ID NO: 196915 - protein, 15 aa, Artificial Sequence
  Description of Artificial Sequence: Synthetic peptide
  Seed: SPGMMMGMFNMLSTV
SPGFMMYMNNMLSTV

SEQ ID NO: 196916 - protein, 15 aa, Artificial Sequence
  Description of Artificial Sequence: Synthetic peptide
  Seed: SPGMMMGMFNMLSTV
SPGFMMYMNNMMSTV

SEQ ID NO: 196917 - protein, 15 aa, Artificial Sequence
  Description of Artificial Sequence: Synthetic peptide
  Seed: SPGMMMGMFNMLSTV
SPGFMMYMNNMNSTV

SEQ ID NO: 196918 - protein, 15 aa, Artificial Sequence
  Description of Artificial Sequence: Synthetic peptide
  Seed: SPGMMMGMFNMLSTV
SPGFMMYMNNMVSTV

SEQ ID NO: 196919 - protein, 15 aa, Artificial Sequence
  Description of Artificial Sequence: Synthetic peptide
  Seed: SPGMMMGMFNMLSTV
SPGFMMYMNNMYSTV

SEQ ID NO: 196920 - protein, 15 aa, Artificial Sequence
  Description of Artificial Sequence: Synthetic peptide
  Seed: SPGMMMGMFNMLSTV
SPGFMMYMPNMFSTV

SEQ ID NO: 196921 - protein, 15 aa, Artificial Sequence
  Description of Artificial Sequence: Synthetic peptide
  Seed: SPGMMMGMFNMLSTV
SPGFMMYMPNMISTV

SEQ ID NO: 196922 - protein, 15 aa, Artificial Sequence
  Description of Artificial Sequence: Synthetic peptide
  Seed: SPGMMMGMFNMLSTV
SPGFMMYMPNMLSTV

SEQ ID NO: 196923 - protein, 15 aa, Artificial Sequence
  Description of Artificial Sequence: Synthetic peptide
  Seed: SPGMMMGMFNMLSTV
SPGFMMYMPNMVSTV

SEQ ID NO: 196924 - protein, 15 aa, Artificial Sequence
  Description of Artificial Sequence: Synthetic peptide
  Seed: SPGMMMGMFNMLSTV
SPGFMMYMRNMASTV

SEQ ID NO: 196925 - protein, 15 aa, Artificial Sequence
  Description of Artificial Sequence: Synthetic peptide
  Seed: SPGMMMGMFNMLSTV
SPGFMMYMSNMASTV

SEQ ID NO: 196926 - protein, 15 aa, Artificial Sequence
  Description of Artificial Sequence: Synthetic peptide
  Seed: SPGMMMGMFNMLSTV
SPGFMMYMSNMISTV

SEQ ID NO: 196927 - protein, 15 aa, Artificial Sequence
  Description of Artificial Sequence: Synthetic peptide
  Seed: SPGMMMGMFNMLSTV
SPGFMMYMSNMLSTV

SEQ ID NO: 196928 - protein, 15 aa, Artificial Sequence
  Description of Artificial Sequence: Synthetic peptide
  Seed: SPGMMMGMFNMLSTV
SPGFMMYMSNMVSTV

SEQ ID NO: 196929 - protein, 15 aa, Artificial Sequence
  Description of Artificial Sequence: Synthetic peptide
  Seed: SPGMMMGMFNMLSTV
SPGFMMYMTNMASTV

SEQ ID NO: 196930 - protein, 15 aa, Artificial Sequence
  Description of Artificial Sequence: Synthetic peptide
  Seed: SPGMMMGMFNMLSTV
SPGFMMYMVNMASTV

SEQ ID NO: 196931 - protein, 15 aa, Artificial Sequence
  Description of Artificial Sequence: Synthetic peptide
  Seed: SPGMMMGMFNMLSTV
SPGFMMYMVNMLSTV

SEQ ID NO: 196932 - protein, 15 aa, Artificial Sequence
  Description of Artificial Sequence: Synthetic peptide
  Seed: SPGMMMGMFNMLSTV
SPGFMMYMVNMYSTV

SEQ ID NO: 196933 - protein, 15 aa, Artificial Sequence
  Description of Artificial Sequence: Synthetic peptide
  Seed: SPGMMMGMFNMLSTV
SPGFMMYMWNMISTV

SEQ ID NO: 196934 - protein, 15 aa, Artificial Sequence
  Description of Artificial Sequence: Synthetic peptide
  Seed: SPGMMMGMFNMLSTV
SPGFMMYMWNMLSTV

SEQ ID NO: 196935 - protein, 15 aa, Artificial Sequence
  Description of Artificial Sequence: Synthetic peptide
  Seed: SPGMMMGMFNMLSTV
SPGFMMYMWNMMSTV

SEQ ID NO: 196936 - protein, 15 aa, Artificial Sequence
  Description of Artificial Sequence: Synthetic peptide
  Seed: SPGMMMGMFNMLSTV
SPGFMMYMWNMVSTV

SEQ ID NO: 196937 - protein, 15 aa, Artificial Sequence
  Description of Artificial Sequence: Synthetic peptide
  Seed: SPGMMMGMFNMLSTV
SPGFMMYMWNMYSTV

SEQ ID NO: 196938 - protein, 15 aa, Artificial Sequence
  Description of Artificial Sequence: Synthetic peptide
  Seed: SPGMMMGMFNMLSTV
SPGFMMYMYNMISTV

SEQ ID NO: 196939 - protein, 15 aa, Artificial Sequence
  Description of Artificial Sequence: Synthetic peptide
  Seed: SPGMMMGMFNMLSTV
SPGFMMYMYNMLSTV

SEQ ID NO: 196940 - protein, 15 aa, Artificial Sequence
  Description of Artificial Sequence: Synthetic peptide
  Seed: SPGMMMGMFNMLSTV
SPGFMMYMYNMMSTV

SEQ ID NO: 196941 - protein, 15 aa, Artificial Sequence
  Description of Artificial Sequence: Synthetic peptide
  Seed: SPGMMMGMFNMLSTV
SPGFMMYMYNMVSTV

SEQ ID NO: 196942 - protein, 15 aa, Artificial Sequence
  Description of Artificial Sequence: Synthetic peptide
  Seed: SPGMMMGMFNMLSTV
SPGFMMYMYNMYSTV

SEQ ID NO: 196943 - protein, 15 aa, Artificial Sequence
  Description of Artificial Sequence: Synthetic peptide
  Seed: SPGMMMGMFNMLSTV
SPGHMMAMANMASTV

SEQ ID NO: 196944 - protein, 15 aa, Artificial Sequence
  Description of Artificial Sequence: Synthetic peptide
  Seed: SPGMMMGMFNMLSTV
SPGHMMAMFNMLSTV

SEQ ID NO: 196945 - protein, 15 aa, Artificial Sequence
  Description of Artificial Sequence: Synthetic peptide
  Seed: SPGMMMGMFNMLSTV
SPGHMMFMFNMISTV

SEQ ID NO: 196946 - protein, 15 aa, Artificial Sequence
  Description of Artificial Sequence: Synthetic peptide
  Seed: SPGMMMGMFNMLSTV
SPGHMMFMFNMLSTV

SEQ ID NO: 196947 - protein, 15 aa, Artificial Sequence
  Description of Artificial Sequence: Synthetic peptide
  Seed: SPGMMMGMFNMLSTV
SPGHMMFMFNMMSTV

SEQ ID NO: 196948 - protein, 15 aa, Artificial Sequence
  Description of Artificial Sequence: Synthetic peptide
  Seed: SPGMMMGMFNMLSTV
SPGHMMFMFNMVSTV

SEQ ID NO: 196949 - protein, 15 aa, Artificial Sequence
  Description of Artificial Sequence: Synthetic peptide
  Seed: SPGMMMGMFNMLSTV
SPGHMMFMYNMVSTV

SEQ ID NO: 196950 - protein, 15 aa, Artificial Sequence
  Description of Artificial Sequence: Synthetic peptide
  Seed: SPGMMMGMFNMLSTV
SPGHMMHMFNMLSTV

SEQ ID NO: 196951 - protein, 15 aa, Artificial Sequence
  Description of Artificial Sequence: Synthetic peptide
  Seed: SPGMMMGMFNMLSTV
SPGHMMIMFNMISTV

SEQ ID NO: 196952 - protein, 15 aa, Artificial Sequence
  Description of Artificial Sequence: Synthetic peptide
  Seed: SPGMMMGMFNMLSTV
SPGHMMIMFNMLSTV

SEQ ID NO: 196953 - protein, 15 aa, Artificial Sequence
  Description of Artificial Sequence: Synthetic peptide
  Seed: SPGMMMGMFNMLSTV
SPGHMMIMYNMLSTV

SEQ ID NO: 196954 - protein, 15 aa, Artificial Sequence
  Description of Artificial Sequence: Synthetic peptide
  Seed: SPGMMMGMFNMLSTV
SPGHMMLMFNMLSTV

SEQ ID NO: 196955 - protein, 15 aa, Artificial Sequence
  Description of Artificial Sequence: Synthetic peptide
  Seed: SPGMMMGMFNMLSTV
SPGHMMLMYNMLSTV

SEQ ID NO: 196956 - protein, 15 aa, Artificial Sequence
  Description of Artificial Sequence: Synthetic peptide
  Seed: SPGMMMGMFNMLSTV
SPGHMMMMFNMLSTV

SEQ ID NO: 196957 - protein, 15 aa, Artificial Sequence
  Description of Artificial Sequence: Synthetic peptide
  Seed: SPGMMMGMFNMLSTV
SPGHMMNMANMISTV

SEQ ID NO: 196958 - protein, 15 aa, Artificial Sequence
  Description of Artificial Sequence: Synthetic peptide
  Seed: SPGMMMGMFNMLSTV
SPGHMMNMNNMISTV

SEQ ID NO: 196959 - protein, 15 aa, Artificial Sequence
  Description of Artificial Sequence: Synthetic peptide
  Seed: SPGMMMGMFNMLSTV
SPGHMMSMANMISTV

SEQ ID NO: 196960 - protein, 15 aa, Artificial Sequence
  Description of Artificial Sequence: Synthetic peptide
  Seed: SPGMMMGMFNMLSTV
SPGHMMSMANMLSTV

SEQ ID NO: 196961 - protein, 15 aa, Artificial Sequence
  Description of Artificial Sequence: Synthetic peptide
  Seed: SPGMMMGMFNMLSTV
SPGHMMSMFNMLSTV

SEQ ID NO: 196962 - protein, 15 aa, Artificial Sequence
  Description of Artificial Sequence: Synthetic peptide
  Seed: SPGMMMGMFNMLSTV
SPGHMMSMSNMISTV

SEQ ID NO: 196963 - protein, 15 aa, Artificial Sequence
  Description of Artificial Sequence: Synthetic peptide
  Seed: SPGMMMGMFNMLSTV
SPGHMMSMSNMLSTV

SEQ ID NO: 196964 - protein, 15 aa, Artificial Sequence
  Description of Artificial Sequence: Synthetic peptide
  Seed: SPGMMMGMFNMLSTV
SPGHMMSMSNMVSTV

SEQ ID NO: 196965 - protein, 15 aa, Artificial Sequence
  Description of Artificial Sequence: Synthetic peptide
  Seed: SPGMMMGMFNMLSTV
SPGHMMTMANMISTV

SEQ ID NO: 196966 - protein, 15 aa, Artificial Sequence
  Description of Artificial Sequence: Synthetic peptide
  Seed: SPGMMMGMFNMLSTV
SPGHMMTMANMLSTV

SEQ ID NO: 196967 - protein, 15 aa, Artificial Sequence
  Description of Artificial Sequence: Synthetic peptide
  Seed: SPGMMMGMFNMLSTV
SPGHMMTMANMVSTV

SEQ ID NO: 196968 - protein, 15 aa, Artificial Sequence
  Description of Artificial Sequence: Synthetic peptide
  Seed: SPGMMMGMFNMLSTV
SPGHMMTMFNMISTV

SEQ ID NO: 196969 - protein, 15 aa, Artificial Sequence
  Description of Artificial Sequence: Synthetic peptide
  Seed: SPGMMMGMFNMLSTV
SPGHMMTMFNMLSTV

SEQ ID NO: 196970 - protein, 15 aa, Artificial Sequence
  Description of Artificial Sequence: Synthetic peptide
  Seed: SPGMMMGMFNMLSTV
SPGHMMTMFNMVSTV

SEQ ID NO: 196971 - protein, 15 aa, Artificial Sequence
  Description of Artificial Sequence: Synthetic peptide
  Seed: SPGMMMGMFNMLSTV
SPGHMMTMGNMISTV

SEQ ID NO: 196972 - protein, 15 aa, Artificial Sequence
  Description of Artificial Sequence: Synthetic peptide
  Seed: SPGMMMGMFNMLSTV
SPGHMMTMSNMISTV

SEQ ID NO: 196973 - protein, 15 aa, Artificial Sequence
  Description of Artificial Sequence: Synthetic peptide
  Seed: SPGMMMGMFNMLSTV
SPGHMMTMSNMLSTV

SEQ ID NO: 196974 - protein, 15 aa, Artificial Sequence
  Description of Artificial Sequence: Synthetic peptide
  Seed: SPGMMMGMFNMLSTV
SPGHMMTMSNMVSTV

SEQ ID NO: 196975 - protein, 15 aa, Artificial Sequence
  Description of Artificial Sequence: Synthetic peptide
  Seed: SPGMMMGMFNMLSTV
SPGHMMVMFNMLSTV

SEQ ID NO: 196976 - protein, 15 aa, Artificial Sequence
  Description of Artificial Sequence: Synthetic peptide
  Seed: SPGMMMGMFNMLSTV
SPGHMMVMSNMISTV

SEQ ID NO: 196977 - protein, 15 aa, Artificial Sequence
  Description of Artificial Sequence: Synthetic peptide
  Seed: SPGMMMGMFNMLSTV
SPGHMMWMFNMLSTV

SEQ ID NO: 196978 - protein, 15 aa, Artificial Sequence
  Description of Artificial Sequence: Synthetic peptide
  Seed: SPGMMMGMFNMLSTV
SPGHMMYMFNMLSTV

SEQ ID NO: 196979 - protein, 15 aa, Artificial Sequence
  Description of Artificial Sequence: Synthetic peptide
  Seed: SPGMMMGMFNMLSTV
SPGIMMAMANMASTV

SEQ ID NO: 196980 - protein, 15 aa, Artificial Sequence
  Description of Artificial Sequence: Synthetic peptide
  Seed: SPGMMMGMFNMLSTV
SPGIMMAMANMFSTV

SEQ ID NO: 196981 - protein, 15 aa, Artificial Sequence
  Description of Artificial Sequence: Synthetic peptide
  Seed: SPGMMMGMFNMLSTV
SPGIMMAMANMISTV

SEQ ID NO: 196982 - protein, 15 aa, Artificial Sequence
  Description of Artificial Sequence: Synthetic peptide
  Seed: SPGMMMGMFNMLSTV
SPGIMMAMANMLSTV

SEQ ID NO: 196983 - protein, 15 aa, Artificial Sequence
  Description of Artificial Sequence: Synthetic peptide
  Seed: SPGMMMGMFNMLSTV
SPGIMMAMANMMSTV

SEQ ID NO: 196984 - protein, 15 aa, Artificial Sequence
  Description of Artificial Sequence: Synthetic peptide
  Seed: SPGMMMGMFNMLSTV
SPGIMMAMANMSSTV

SEQ ID NO: 196985 - protein, 15 aa, Artificial Sequence
  Description of Artificial Sequence: Synthetic peptide
  Seed: SPGMMMGMFNMLSTV
SPGIMMAMANMTSTV

SEQ ID NO: 196986 - protein, 15 aa, Artificial Sequence
  Description of Artificial Sequence: Synthetic peptide
  Seed: SPGMMMGMFNMLSTV
SPGIMMAMANMVSTV

SEQ ID NO: 196987 - protein, 15 aa, Artificial Sequence
  Description of Artificial Sequence: Synthetic peptide
  Seed: SPGMMMGMFNMLSTV
SPGIMMAMANMYSTV

SEQ ID NO: 196988 - protein, 15 aa, Artificial Sequence
  Description of Artificial Sequence: Synthetic peptide
  Seed: SPGMMMGMFNMLSTV
SPGIMMAMDNMISTV

SEQ ID NO: 196989 - protein, 15 aa, Artificial Sequence
  Description of Artificial Sequence: Synthetic peptide
  Seed: SPGMMMGMFNMLSTV
SPGIMMAMFNMDSTV

SEQ ID NO: 196990 - protein, 15 aa, Artificial Sequence
  Description of Artificial Sequence: Synthetic peptide
  Seed: SPGMMMGMFNMLSTV
SPGIMMAMFNMESTV

SEQ ID NO: 196991 - protein, 15 aa, Artificial Sequence
  Description of Artificial Sequence: Synthetic peptide
  Seed: SPGMMMGMFNMLSTV
SPGIMMAMFNMFSTV

SEQ ID NO: 196992 - protein, 15 aa, Artificial Sequence
  Description of Artificial Sequence: Synthetic peptide
  Seed: SPGMMMGMFNMLSTV
SPGIMMAMFNMISTV

SEQ ID NO: 196993 - protein, 15 aa, Artificial Sequence
  Description of Artificial Sequence: Synthetic peptide
  Seed: SPGMMMGMFNMLSTV
SPGIMMAMFNMLSTV

SEQ ID NO: 196994 - protein, 15 aa, Artificial Sequence
  Description of Artificial Sequence: Synthetic peptide
  Seed: SPGMMMGMFNMLSTV
SPGIMMAMFNMMSTV

SEQ ID NO: 196995 - protein, 15 aa, Artificial Sequence
  Description of Artificial Sequence: Synthetic peptide
  Seed: SPGMMMGMFNMLSTV
SPGIMMAMFNMNSTV

SEQ ID NO: 196996 - protein, 15 aa, Artificial Sequence
  Description of Artificial Sequence: Synthetic peptide
  Seed: SPGMMMGMFNMLSTV
SPGIMMAMFNMVSTV

SEQ ID NO: 196997 - protein, 15 aa, Artificial Sequence
  Description of Artificial Sequence: Synthetic peptide
  Seed: SPGMMMGMFNMLSTV
SPGIMMAMFNMYSTV

SEQ ID NO: 196998 - protein, 15 aa, Artificial Sequence
  Description of Artificial Sequence: Synthetic peptide
  Seed: SPGMMMGMFNMLSTV
SPGIMMAMGNMASTV

SEQ ID NO: 196999 - protein, 15 aa, Artificial Sequence
  Description of Artificial Sequence: Synthetic peptide
  Seed: SPGMMMGMFNMLSTV
SPGIMMAMGNMFSTV

SEQ ID NO: 197000 - protein, 15 aa, Artificial Sequence
  Description of Artificial Sequence: Synthetic peptide
  Seed: SPGMMMGMFNMLSTV
SPGIMMAMGNMISTV

SEQ ID NO: 197001 - protein, 15 aa, Artificial Sequence
  Description of Artificial Sequence: Synthetic peptide
  Seed: SPGMMMGMFNMLSTV
SPGIMMAMGNMLSTV

SEQ ID NO: 197002 - protein, 15 aa, Artificial Sequence
  Description of Artificial Sequence: Synthetic peptide
  Seed: SPGMMMGMFNMLSTV
SPGIMMAMGNMMSTV

SEQ ID NO: 197003 - protein, 15 aa, Artificial Sequence
  Description of Artificial Sequence: Synthetic peptide
  Seed: SPGMMMGMFNMLSTV
SPGIMMAMGNMTSTV

SEQ ID NO: 197004 - protein, 15 aa, Artificial Sequence
  Description of Artificial Sequence: Synthetic peptide
  Seed: SPGMMMGMFNMLSTV
SPGIMMAMGNMVSTV

SEQ ID NO: 197005 - protein, 15 aa, Artificial Sequence
  Description of Artificial Sequence: Synthetic peptide
  Seed: SPGMMMGMFNMLSTV
SPGIMMAMGNMYSTV

SEQ ID NO: 197006 - protein, 15 aa, Artificial Sequence
  Description of Artificial Sequence: Synthetic peptide
  Seed: SPGMMMGMFNMLSTV
SPGIMMAMHNMISTV

SEQ ID NO: 197007 - protein, 15 aa, Artificial Sequence
  Description of Artificial Sequence: Synthetic peptide
  Seed: SPGMMMGMFNMLSTV
SPGIMMAMHNMVSTV

SEQ ID NO: 197008 - protein, 15 aa, Artificial Sequence
  Description of Artificial Sequence: Synthetic peptide
  Seed: SPGMMMGMFNMLSTV
SPGIMMAMNNMASTV

SEQ ID NO: 197009 - protein, 15 aa, Artificial Sequence
  Description of Artificial Sequence: Synthetic peptide
  Seed: SPGMMMGMFNMLSTV
SPGIMMAMNNMFSTV

SEQ ID NO: 197010 - protein, 15 aa, Artificial Sequence
  Description of Artificial Sequence: Synthetic peptide
  Seed: SPGMMMGMFNMLSTV
SPGIMMAMNNMISTV

SEQ ID NO: 197011 - protein, 15 aa, Artificial Sequence
  Description of Artificial Sequence: Synthetic peptide
  Seed: SPGMMMGMFNMLSTV
SPGIMMAMNNMLSTV

SEQ ID NO: 197012 - protein, 15 aa, Artificial Sequence
  Description of Artificial Sequence: Synthetic peptide
  Seed: SPGMMMGMFNMLSTV
SPGIMMAMNNMMSTV

SEQ ID NO: 197013 - protein, 15 aa, Artificial Sequence
  Description of Artificial Sequence: Synthetic peptide
  Seed: SPGMMMGMFNMLSTV
SPGIMMAMNNMNSTV

SEQ ID NO: 197014 - protein, 15 aa, Artificial Sequence
  Description of Artificial Sequence: Synthetic peptide
  Seed: SPGMMMGMFNMLSTV
SPGIMMAMNNMSSTV

SEQ ID NO: 197015 - protein, 15 aa, Artificial Sequence
  Description of Artificial Sequence: Synthetic peptide
  Seed: SPGMMMGMFNMLSTV
SPGIMMAMNNMTSTV

SEQ ID NO: 197016 - protein, 15 aa, Artificial Sequence
  Description of Artificial Sequence: Synthetic peptide
  Seed: SPGMMMGMFNMLSTV
SPGIMMAMNNMVSTV

SEQ ID NO: 197017 - protein, 15 aa, Artificial Sequence
  Description of Artificial Sequence: Synthetic peptide
  Seed: SPGMMMGMFNMLSTV
SPGIMMAMNNMYSTV

SEQ ID NO: 197018 - protein, 15 aa, Artificial Sequence
  Description of Artificial Sequence: Synthetic peptide
  Seed: SPGMMMGMFNMLSTV
SPGIMMAMPNMASTV

SEQ ID NO: 197019 - protein, 15 aa, Artificial Sequence
  Description of Artificial Sequence: Synthetic peptide
  Seed: SPGMMMGMFNMLSTV
SPGIMMAMPNMFSTV

SEQ ID NO: 197020 - protein, 15 aa, Artificial Sequence
  Description of Artificial Sequence: Synthetic peptide
  Seed: SPGMMMGMFNMLSTV
SPGIMMAMPNMISTV

SEQ ID NO: 197021 - protein, 15 aa, Artificial Sequence
  Description of Artificial Sequence: Synthetic peptide
  Seed: SPGMMMGMFNMLSTV
SPGIMMAMPNMLSTV

SEQ ID NO: 197022 - protein, 15 aa, Artificial Sequence
  Description of Artificial Sequence: Synthetic peptide
  Seed: SPGMMMGMFNMLSTV
SPGIMMAMPNMMSTV

SEQ ID NO: 197023 - protein, 15 aa, Artificial Sequence
  Description of Artificial Sequence: Synthetic peptide
  Seed: SPGMMMGMFNMLSTV
SPGIMMAMPNMSSTV

SEQ ID NO: 197024 - protein, 15 aa, Artificial Sequence
  Description of Artificial Sequence: Synthetic peptide
  Seed: SPGMMMGMFNMLSTV
SPGIMMAMPNMTSTV

SEQ ID NO: 197025 - protein, 15 aa, Artificial Sequence
  Description of Artificial Sequence: Synthetic peptide
  Seed: SPGMMMGMFNMLSTV
SPGIMMAMPNMVSTV

SEQ ID NO: 197026 - protein, 15 aa, Artificial Sequence
  Description of Artificial Sequence: Synthetic peptide
  Seed: SPGMMMGMFNMLSTV
SPGIMMAMPNMYSTV

SEQ ID NO: 197027 - protein, 15 aa, Artificial Sequence
  Description of Artificial Sequence: Synthetic peptide
  Seed: SPGMMMGMFNMLSTV
SPGIMMAMSNMASTV

SEQ ID NO: 197028 - protein, 15 aa, Artificial Sequence
  Description of Artificial Sequence: Synthetic peptide
  Seed: SPGMMMGMFNMLSTV
SPGIMMAMSNMFSTV

SEQ ID NO: 197029 - protein, 15 aa, Artificial Sequence
  Description of Artificial Sequence: Synthetic peptide
  Seed: SPGMMMGMFNMLSTV
SPGIMMAMSNMISTV

SEQ ID NO: 197030 - protein, 15 aa, Artificial Sequence
  Description of Artificial Sequence: Synthetic peptide
  Seed: SPGMMMGMFNMLSTV
SPGIMMAMSNMLSTV

SEQ ID NO: 197031 - protein, 15 aa, Artificial Sequence
  Description of Artificial Sequence: Synthetic peptide
  Seed: SPGMMMGMFNMLSTV
SPGIMMAMSNMMSTV

SEQ ID NO: 197032 - protein, 15 aa, Artificial Sequence
  Description of Artificial Sequence: Synthetic peptide
  Seed: SPGMMMGMFNMLSTV
SPGIMMAMSNMSSTV

SEQ ID NO: 197033 - protein, 15 aa, Artificial Sequence
  Description of Artificial Sequence: Synthetic peptide
  Seed: SPGMMMGMFNMLSTV
SPGIMMAMSNMTSTV

SEQ ID NO: 197034 - protein, 15 aa, Artificial Sequence
  Description of Artificial Sequence: Synthetic peptide
  Seed: SPGMMMGMFNMLSTV
SPGIMMAMSNMVSTV

SEQ ID NO: 197035 - protein, 15 aa, Artificial Sequence
  Description of Artificial Sequence: Synthetic peptide
  Seed: SPGMMMGMFNMLSTV
SPGIMMAMSNMYSTV

SEQ ID NO: 197036 - protein, 15 aa, Artificial Sequence
  Description of Artificial Sequence: Synthetic peptide
  Seed: SPGMMMGMFNMLSTV
SPGIMMAMTNMFSTV

SEQ ID NO: 197037 - protein, 15 aa, Artificial Sequence
  Description of Artificial Sequence: Synthetic peptide
  Seed: SPGMMMGMFNMLSTV
SPGIMMAMTNMISTV

SEQ ID NO: 197038 - protein, 15 aa, Artificial Sequence
  Description of Artificial Sequence: Synthetic peptide
  Seed: SPGMMMGMFNMLSTV
SPGIMMAMTNMLSTV

SEQ ID NO: 197039 - protein, 15 aa, Artificial Sequence
  Description of Artificial Sequence: Synthetic peptide
  Seed: SPGMMMGMFNMLSTV
SPGIMMAMTNMMSTV

SEQ ID NO: 197040 - protein, 15 aa, Artificial Sequence
  Description of Artificial Sequence: Synthetic peptide
  Seed: SPGMMMGMFNMLSTV
SPGIMMAMTNMVSTV

SEQ ID NO: 197041 - protein, 15 aa, Artificial Sequence
  Description of Artificial Sequence: Synthetic peptide
  Seed: SPGMMMGMFNMLSTV
SPGIMMAMTNMYSTV

SEQ ID NO: 197042 - protein, 15 aa, Artificial Sequence
  Description of Artificial Sequence: Synthetic peptide
  Seed: SPGMMMGMFNMLSTV
SPGIMMAMYNMFSTV

SEQ ID NO: 197043 - protein, 15 aa, Artificial Sequence
  Description of Artificial Sequence: Synthetic peptide
  Seed: SPGMMMGMFNMLSTV
SPGIMMAMYNMISTV

SEQ ID NO: 197044 - protein, 15 aa, Artificial Sequence
  Description of Artificial Sequence: Synthetic peptide
  Seed: SPGMMMGMFNMLSTV
SPGIMMAMYNMLSTV

SEQ ID NO: 197045 - protein, 15 aa, Artificial Sequence
  Description of Artificial Sequence: Synthetic peptide
  Seed: SPGMMMGMFNMLSTV
SPGIMMAMYNMVSTV

SEQ ID NO: 197046 - protein, 15 aa, Artificial Sequence
  Description of Artificial Sequence: Synthetic peptide
  Seed: SPGMMMGMFNMLSTV
SPGIMMCMANMISTV

SEQ ID NO: 197047 - protein, 15 aa, Artificial Sequence
  Description of Artificial Sequence: Synthetic peptide
  Seed: SPGMMMGMFNMLSTV
SPGIMMCMANMVSTV

SEQ ID NO: 197048 - protein, 15 aa, Artificial Sequence
  Description of Artificial Sequence: Synthetic peptide
  Seed: SPGMMMGMFNMLSTV
SPGIMMCMNNMISTV

SEQ ID NO: 197049 - protein, 15 aa, Artificial Sequence
  Description of Artificial Sequence: Synthetic peptide
  Seed: SPGMMMGMFNMLSTV
SPGIMMCMNNMLSTV

SEQ ID NO: 197050 - protein, 15 aa, Artificial Sequence
  Description of Artificial Sequence: Synthetic peptide
  Seed: SPGMMMGMFNMLSTV
SPGIMMCMNNMVSTV

SEQ ID NO: 197051 - protein, 15 aa, Artificial Sequence
  Description of Artificial Sequence: Synthetic peptide
  Seed: SPGMMMGMFNMLSTV
SPGIMMCMNNMYSTV

SEQ ID NO: 197052 - protein, 15 aa, Artificial Sequence
  Description of Artificial Sequence: Synthetic peptide
  Seed: SPGMMMGMFNMLSTV
SPGIMMCMPNMISTV

SEQ ID NO: 197053 - protein, 15 aa, Artificial Sequence
  Description of Artificial Sequence: Synthetic peptide
  Seed: SPGMMMGMFNMLSTV
SPGIMMCMPNMVSTV

SEQ ID NO: 197054 - protein, 15 aa, Artificial Sequence
  Description of Artificial Sequence: Synthetic peptide
  Seed: SPGMMMGMFNMLSTV
SPGIMMCMSNMISTV

SEQ ID NO: 197055 - protein, 15 aa, Artificial Sequence
  Description of Artificial Sequence: Synthetic peptide
  Seed: SPGMMMGMFNMLSTV
SPGIMMCMSNMVSTV

SEQ ID NO: 197056 - protein, 15 aa, Artificial Sequence
  Description of Artificial Sequence: Synthetic peptide
  Seed: SPGMMMGMFNMLSTV
SPGIMMCMYNMFSTV

SEQ ID NO: 197057 - protein, 15 aa, Artificial Sequence
  Description of Artificial Sequence: Synthetic peptide
  Seed: SPGMMMGMFNMLSTV
SPGIMMDMANMASTV

SEQ ID NO: 197058 - protein, 15 aa, Artificial Sequence
  Description of Artificial Sequence: Synthetic peptide
  Seed: SPGMMMGMFNMLSTV
SPGIMMDMANMFSTV

SEQ ID NO: 197059 - protein, 15 aa, Artificial Sequence
  Description of Artificial Sequence: Synthetic peptide
  Seed: SPGMMMGMFNMLSTV
SPGIMMDMANMGSTV

SEQ ID NO: 197060 - protein, 15 aa, Artificial Sequence
  Description of Artificial Sequence: Synthetic peptide
  Seed: SPGMMMGMFNMLSTV
SPGIMMDMANMISTV

SEQ ID NO: 197061 - protein, 15 aa, Artificial Sequence
  Description of Artificial Sequence: Synthetic peptide
  Seed: SPGMMMGMFNMLSTV
SPGIMMDMANMLSTV

SEQ ID NO: 197062 - protein, 15 aa, Artificial Sequence
  Description of Artificial Sequence: Synthetic peptide
  Seed: SPGMMMGMFNMLSTV
SPGIMMDMANMMSTV

SEQ ID NO: 197063 - protein, 15 aa, Artificial Sequence
  Description of Artificial Sequence: Synthetic peptide
  Seed: SPGMMMGMFNMLSTV
SPGIMMDMANMNSTV

SEQ ID NO: 197064 - protein, 15 aa, Artificial Sequence
  Description of Artificial Sequence: Synthetic peptide
  Seed: SPGMMMGMFNMLSTV
SPGIMMDMANMSSTV

SEQ ID NO: 197065 - protein, 15 aa, Artificial Sequence
  Description of Artificial Sequence: Synthetic peptide
  Seed: SPGMMMGMFNMLSTV
SPGIMMDMANMTSTV

SEQ ID NO: 197066 - protein, 15 aa, Artificial Sequence
  Description of Artificial Sequence: Synthetic peptide
  Seed: SPGMMMGMFNMLSTV
SPGIMMDMANMVSTV

SEQ ID NO: 197067 - protein, 15 aa, Artificial Sequence
  Description of Artificial Sequence: Synthetic peptide
  Seed: SPGMMMGMFNMLSTV
SPGIMMDMANMYSTV

SEQ ID NO: 197068 - protein, 15 aa, Artificial Sequence
  Description of Artificial Sequence: Synthetic peptide
  Seed: SPGMMMGMFNMLSTV
SPGIMMDMFNMISTV

SEQ ID NO: 197069 - protein, 15 aa, Artificial Sequence
  Description of Artificial Sequence: Synthetic peptide
  Seed: SPGMMMGMFNMLSTV
SPGIMMDMFNMLSTV

SEQ ID NO: 197070 - protein, 15 aa, Artificial Sequence
  Description of Artificial Sequence: Synthetic peptide
  Seed: SPGMMMGMFNMLSTV
SPGIMMDMFNMVSTV

SEQ ID NO: 197071 - protein, 15 aa, Artificial Sequence
  Description of Artificial Sequence: Synthetic peptide
  Seed: SPGMMMGMFNMLSTV
SPGIMMDMGNMASTV

SEQ ID NO: 197072 - protein, 15 aa, Artificial Sequence
  Description of Artificial Sequence: Synthetic peptide
  Seed: SPGMMMGMFNMLSTV
SPGIMMDMGNMFSTV

SEQ ID NO: 197073 - protein, 15 aa, Artificial Sequence
  Description of Artificial Sequence: Synthetic peptide
  Seed: SPGMMMGMFNMLSTV
SPGIMMDMGNMISTV

SEQ ID NO: 197074 - protein, 15 aa, Artificial Sequence
  Description of Artificial Sequence: Synthetic peptide
  Seed: SPGMMMGMFNMLSTV
SPGIMMDMGNMLSTV

SEQ ID NO: 197075 - protein, 15 aa, Artificial Sequence
  Description of Artificial Sequence: Synthetic peptide
  Seed: SPGMMMGMFNMLSTV
SPGIMMDMGNMMSTV

SEQ ID NO: 197076 - protein, 15 aa, Artificial Sequence
  Description of Artificial Sequence: Synthetic peptide
  Seed: SPGMMMGMFNMLSTV
SPGIMMDMGNMVSTV

SEQ ID NO: 197077 - protein, 15 aa, Artificial Sequence
  Description of Artificial Sequence: Synthetic peptide
  Seed: SPGMMMGMFNMLSTV
SPGIMMDMGNMYSTV

SEQ ID NO: 197078 - protein, 15 aa, Artificial Sequence
  Description of Artificial Sequence: Synthetic peptide
  Seed: SPGMMMGMFNMLSTV
SPGIMMDMHNMISTV

SEQ ID NO: 197079 - protein, 15 aa, Artificial Sequence
  Description of Artificial Sequence: Synthetic peptide
  Seed: SPGMMMGMFNMLSTV
SPGIMMDMHNMVSTV

SEQ ID NO: 197080 - protein, 15 aa, Artificial Sequence
  Description of Artificial Sequence: Synthetic peptide
  Seed: SPGMMMGMFNMLSTV
SPGIMMDMINMASTV

SEQ ID NO: 197081 - protein, 15 aa, Artificial Sequence
  Description of Artificial Sequence: Synthetic peptide
  Seed: SPGMMMGMFNMLSTV
SPGIMMDMINMISTV

SEQ ID NO: 197082 - protein, 15 aa, Artificial Sequence
  Description of Artificial Sequence: Synthetic peptide
  Seed: SPGMMMGMFNMLSTV
SPGIMMDMINMLSTV

SEQ ID NO: 197083 - protein, 15 aa, Artificial Sequence
  Description of Artificial Sequence: Synthetic peptide
  Seed: SPGMMMGMFNMLSTV
SPGIMMDMINMMSTV

SEQ ID NO: 197084 - protein, 15 aa, Artificial Sequence
  Description of Artificial Sequence: Synthetic peptide
  Seed: SPGMMMGMFNMLSTV
SPGIMMDMINMVSTV

SEQ ID NO: 197085 - protein, 15 aa, Artificial Sequence
  Description of Artificial Sequence: Synthetic peptide
  Seed: SPGMMMGMFNMLSTV
SPGIMMDMINMYSTV

SEQ ID NO: 197086 - protein, 15 aa, Artificial Sequence
  Description of Artificial Sequence: Synthetic peptide
  Seed: SPGMMMGMFNMLSTV
SPGIMMDMNNMASTV

SEQ ID NO: 197087 - protein, 15 aa, Artificial Sequence
  Description of Artificial Sequence: Synthetic peptide
  Seed: SPGMMMGMFNMLSTV
SPGIMMDMNNMFSTV

SEQ ID NO: 197088 - protein, 15 aa, Artificial Sequence
  Description of Artificial Sequence: Synthetic peptide
  Seed: SPGMMMGMFNMLSTV
SPGIMMDMNNMISTV

SEQ ID NO: 197089 - protein, 15 aa, Artificial Sequence
  Description of Artificial Sequence: Synthetic peptide
  Seed: SPGMMMGMFNMLSTV
SPGIMMDMNNMLSTV

SEQ ID NO: 197090 - protein, 15 aa, Artificial Sequence
  Description of Artificial Sequence: Synthetic peptide
  Seed: SPGMMMGMFNMLSTV
SPGIMMDMNNMMSTV

SEQ ID NO: 197091 - protein, 15 aa, Artificial Sequence
  Description of Artificial Sequence: Synthetic peptide
  Seed: SPGMMMGMFNMLSTV
SPGIMMDMNNMSSTV

SEQ ID NO: 197092 - protein, 15 aa, Artificial Sequence
  Description of Artificial Sequence: Synthetic peptide
  Seed: SPGMMMGMFNMLSTV
SPGIMMDMNNMTSTV

SEQ ID NO: 197093 - protein, 15 aa, Artificial Sequence
  Description of Artificial Sequence: Synthetic peptide
  Seed: SPGMMMGMFNMLSTV
SPGIMMDMNNMVSTV

SEQ ID NO: 197094 - protein, 15 aa, Artificial Sequence
  Description of Artificial Sequence: Synthetic peptide
  Seed: SPGMMMGMFNMLSTV
SPGIMMDMNNMYSTV

SEQ ID NO: 197095 - protein, 15 aa, Artificial Sequence
  Description of Artificial Sequence: Synthetic peptide
  Seed: SPGMMMGMFNMLSTV
SPGIMMDMPNMASTV

SEQ ID NO: 197096 - protein, 15 aa, Artificial Sequence
  Description of Artificial Sequence: Synthetic peptide
  Seed: SPGMMMGMFNMLSTV
SPGIMMDMPNMFSTV

SEQ ID NO: 197097 - protein, 15 aa, Artificial Sequence
  Description of Artificial Sequence: Synthetic peptide
  Seed: SPGMMMGMFNMLSTV
SPGIMMDMPNMISTV

SEQ ID NO: 197098 - protein, 15 aa, Artificial Sequence
  Description of Artificial Sequence: Synthetic peptide
  Seed: SPGMMMGMFNMLSTV
SPGIMMDMPNMLSTV

SEQ ID NO: 197099 - protein, 15 aa, Artificial Sequence
  Description of Artificial Sequence: Synthetic peptide
  Seed: SPGMMMGMFNMLSTV
SPGIMMDMPNMMSTV

SEQ ID NO: 197100 - protein, 15 aa, Artificial Sequence
  Description of Artificial Sequence: Synthetic peptide
  Seed: SPGMMMGMFNMLSTV
SPGIMMDMPNMVSTV

SEQ ID NO: 197101 - protein, 15 aa, Artificial Sequence
  Description of Artificial Sequence: Synthetic peptide
  Seed: SPGMMMGMFNMLSTV
SPGIMMDMPNMYSTV

SEQ ID NO: 197102 - protein, 15 aa, Artificial Sequence
  Description of Artificial Sequence: Synthetic peptide
  Seed: SPGMMMGMFNMLSTV
SPGIMMDMSNMASTV

SEQ ID NO: 197103 - protein, 15 aa, Artificial Sequence
  Description of Artificial Sequence: Synthetic peptide
  Seed: SPGMMMGMFNMLSTV
SPGIMMDMSNMFSTV

SEQ ID NO: 197104 - protein, 15 aa, Artificial Sequence
  Description of Artificial Sequence: Synthetic peptide
  Seed: SPGMMMGMFNMLSTV
SPGIMMDMSNMISTV

SEQ ID NO: 197105 - protein, 15 aa, Artificial Sequence
  Description of Artificial Sequence: Synthetic peptide
  Seed: SPGMMMGMFNMLSTV
SPGIMMDMSNMLSTV

SEQ ID NO: 197106 - protein, 15 aa, Artificial Sequence
  Description of Artificial Sequence: Synthetic peptide
  Seed: SPGMMMGMFNMLSTV
SPGIMMDMSNMMSTV

SEQ ID NO: 197107 - protein, 15 aa, Artificial Sequence
  Description of Artificial Sequence: Synthetic peptide
  Seed: SPGMMMGMFNMLSTV
SPGIMMDMSNMSSTV

SEQ ID NO: 197108 - protein, 15 aa, Artificial Sequence
  Description of Artificial Sequence: Synthetic peptide
  Seed: SPGMMMGMFNMLSTV
SPGIMMDMSNMTSTV

SEQ ID NO: 197109 - protein, 15 aa, Artificial Sequence
  Description of Artificial Sequence: Synthetic peptide
  Seed: SPGMMMGMFNMLSTV
SPGIMMDMSNMVSTV

SEQ ID NO: 197110 - protein, 15 aa, Artificial Sequence
  Description of Artificial Sequence: Synthetic peptide
  Seed: SPGMMMGMFNMLSTV
SPGIMMDMSNMYSTV

SEQ ID NO: 197111 - protein, 15 aa, Artificial Sequence
  Description of Artificial Sequence: Synthetic peptide
  Seed: SPGMMMGMFNMLSTV
SPGIMMDMTNMASTV

SEQ ID NO: 197112 - protein, 15 aa, Artificial Sequence
  Description of Artificial Sequence: Synthetic peptide
  Seed: SPGMMMGMFNMLSTV
SPGIMMDMTNMFSTV

SEQ ID NO: 197113 - protein, 15 aa, Artificial Sequence
  Description of Artificial Sequence: Synthetic peptide
  Seed: SPGMMMGMFNMLSTV
SPGIMMDMTNMISTV

SEQ ID NO: 197114 - protein, 15 aa, Artificial Sequence
  Description of Artificial Sequence: Synthetic peptide
  Seed: SPGMMMGMFNMLSTV
SPGIMMDMTNMLSTV

SEQ ID NO: 197115 - protein, 15 aa, Artificial Sequence
  Description of Artificial Sequence: Synthetic peptide
  Seed: SPGMMMGMFNMLSTV
SPGIMMDMTNMMSTV

SEQ ID NO: 197116 - protein, 15 aa, Artificial Sequence
  Description of Artificial Sequence: Synthetic peptide
  Seed: SPGMMMGMFNMLSTV
SPGIMMDMTNMVSTV

SEQ ID NO: 197117 - protein, 15 aa, Artificial Sequence
  Description of Artificial Sequence: Synthetic peptide
  Seed: SPGMMMGMFNMLSTV
SPGIMMDMTNMYSTV

SEQ ID NO: 197118 - protein, 15 aa, Artificial Sequence
  Description of Artificial Sequence: Synthetic peptide
  Seed: SPGMMMGMFNMLSTV
SPGIMMDMVNMASTV

SEQ ID NO: 197119 - protein, 15 aa, Artificial Sequence
  Description of Artificial Sequence: Synthetic peptide
  Seed: SPGMMMGMFNMLSTV
SPGIMMDMVNMISTV

SEQ ID NO: 197120 - protein, 15 aa, Artificial Sequence
  Description of Artificial Sequence: Synthetic peptide
  Seed: SPGMMMGMFNMLSTV
SPGIMMDMVNMLSTV

SEQ ID NO: 197121 - protein, 15 aa, Artificial Sequence
  Description of Artificial Sequence: Synthetic peptide
  Seed: SPGMMMGMFNMLSTV
SPGIMMDMVNMMSTV

SEQ ID NO: 197122 - protein, 15 aa, Artificial Sequence
  Description of Artificial Sequence: Synthetic peptide
  Seed: SPGMMMGMFNMLSTV
SPGIMMDMVNMVSTV

SEQ ID NO: 197123 - protein, 15 aa, Artificial Sequence
  Description of Artificial Sequence: Synthetic peptide
  Seed: SPGMMMGMFNMLSTV
SPGIMMDMVNMYSTV

SEQ ID NO: 197124 - protein, 15 aa, Artificial Sequence
  Description of Artificial Sequence: Synthetic peptide
  Seed: SPGMMMGMFNMLSTV
SPGIMMEMANMFSTV

SEQ ID NO: 197125 - protein, 15 aa, Artificial Sequence
  Description of Artificial Sequence: Synthetic peptide
  Seed: SPGMMMGMFNMLSTV
SPGIMMEMANMISTV

SEQ ID NO: 197126 - protein, 15 aa, Artificial Sequence
  Description of Artificial Sequence: Synthetic peptide
  Seed: SPGMMMGMFNMLSTV
SPGIMMEMANMLSTV

SEQ ID NO: 197127 - protein, 15 aa, Artificial Sequence
  Description of Artificial Sequence: Synthetic peptide
  Seed: SPGMMMGMFNMLSTV
SPGIMMEMANMMSTV

SEQ ID NO: 197128 - protein, 15 aa, Artificial Sequence
  Description of Artificial Sequence: Synthetic peptide
  Seed: SPGMMMGMFNMLSTV
SPGIMMEMANMVSTV

SEQ ID NO: 197129 - protein, 15 aa, Artificial Sequence
  Description of Artificial Sequence: Synthetic peptide
  Seed: SPGMMMGMFNMLSTV
SPGIMMEMANMYSTV

SEQ ID NO: 197130 - protein, 15 aa, Artificial Sequence
  Description of Artificial Sequence: Synthetic peptide
  Seed: SPGMMMGMFNMLSTV
SPGIMMEMFNMASTV

SEQ ID NO: 197131 - protein, 15 aa, Artificial Sequence
  Description of Artificial Sequence: Synthetic peptide
  Seed: SPGMMMGMFNMLSTV
SPGIMMEMFNMESTV

SEQ ID NO: 197132 - protein, 15 aa, Artificial Sequence
  Description of Artificial Sequence: Synthetic peptide
  Seed: SPGMMMGMFNMLSTV
SPGIMMEMFNMFSTV

SEQ ID NO: 197133 - protein, 15 aa, Artificial Sequence
  Description of Artificial Sequence: Synthetic peptide
  Seed: SPGMMMGMFNMLSTV
SPGIMMEMFNMISTV

SEQ ID NO: 197134 - protein, 15 aa, Artificial Sequence
  Description of Artificial Sequence: Synthetic peptide
  Seed: SPGMMMGMFNMLSTV
SPGIMMEMFNMLSTV

SEQ ID NO: 197135 - protein, 15 aa, Artificial Sequence
  Description of Artificial Sequence: Synthetic peptide
  Seed: SPGMMMGMFNMLSTV
SPGIMMEMFNMMSTV

SEQ ID NO: 197136 - protein, 15 aa, Artificial Sequence
  Description of Artificial Sequence: Synthetic peptide
  Seed: SPGMMMGMFNMLSTV
SPGIMMEMFNMNSTV

SEQ ID NO: 197137 - protein, 15 aa, Artificial Sequence
  Description of Artificial Sequence: Synthetic peptide
  Seed: SPGMMMGMFNMLSTV
SPGIMMEMFNMSSTV

SEQ ID NO: 197138 - protein, 15 aa, Artificial Sequence
  Description of Artificial Sequence: Synthetic peptide
  Seed: SPGMMMGMFNMLSTV
SPGIMMEMFNMTSTV

SEQ ID NO: 197139 - protein, 15 aa, Artificial Sequence
  Description of Artificial Sequence: Synthetic peptide
  Seed: SPGMMMGMFNMLSTV
SPGIMMEMFNMVSTV

SEQ ID NO: 197140 - protein, 15 aa, Artificial Sequence
  Description of Artificial Sequence: Synthetic peptide
  Seed: SPGMMMGMFNMLSTV
SPGIMMEMFNMYSTV

SEQ ID NO: 197141 - protein, 15 aa, Artificial Sequence
  Description of Artificial Sequence: Synthetic peptide
  Seed: SPGMMMGMFNMLSTV
SPGIMMEMGNMISTV

SEQ ID NO: 197142 - protein, 15 aa, Artificial Sequence
  Description of Artificial Sequence: Synthetic peptide
  Seed: SPGMMMGMFNMLSTV
SPGIMMEMGNMVSTV

SEQ ID NO: 197143 - protein, 15 aa, Artificial Sequence
  Description of Artificial Sequence: Synthetic peptide
  Seed: SPGMMMGMFNMLSTV
SPGIMMEMNNMFSTV

SEQ ID NO: 197144 - protein, 15 aa, Artificial Sequence
  Description of Artificial Sequence: Synthetic peptide
  Seed: SPGMMMGMFNMLSTV
SPGIMMEMNNMISTV

SEQ ID NO: 197145 - protein, 15 aa, Artificial Sequence
  Description of Artificial Sequence: Synthetic peptide
  Seed: SPGMMMGMFNMLSTV
SPGIMMEMNNMLSTV

SEQ ID NO: 197146 - protein, 15 aa, Artificial Sequence
  Description of Artificial Sequence: Synthetic peptide
  Seed: SPGMMMGMFNMLSTV
SPGIMMEMNNMMSTV

SEQ ID NO: 197147 - protein, 15 aa, Artificial Sequence
  Description of Artificial Sequence: Synthetic peptide
  Seed: SPGMMMGMFNMLSTV
SPGIMMEMNNMVSTV

SEQ ID NO: 197148 - protein, 15 aa, Artificial Sequence
  Description of Artificial Sequence: Synthetic peptide
  Seed: SPGMMMGMFNMLSTV
SPGIMMEMNNMYSTV

SEQ ID NO: 197149 - protein, 15 aa, Artificial Sequence
  Description of Artificial Sequence: Synthetic peptide
  Seed: SPGMMMGMFNMLSTV
SPGIMMEMPNMISTV

SEQ ID NO: 197150 - protein, 15 aa, Artificial Sequence
  Description of Artificial Sequence: Synthetic peptide
  Seed: SPGMMMGMFNMLSTV
SPGIMMEMPNMLSTV

SEQ ID NO: 197151 - protein, 15 aa, Artificial Sequence
  Description of Artificial Sequence: Synthetic peptide
  Seed: SPGMMMGMFNMLSTV
SPGIMMEMPNMVSTV

SEQ ID NO: 197152 - protein, 15 aa, Artificial Sequence
  Description of Artificial Sequence: Synthetic peptide
  Seed: SPGMMMGMFNMLSTV
SPGIMMEMSNMISTV

SEQ ID NO: 197153 - protein, 15 aa, Artificial Sequence
  Description of Artificial Sequence: Synthetic peptide
  Seed: SPGMMMGMFNMLSTV
SPGIMMEMSNMLSTV

SEQ ID NO: 197154 - protein, 15 aa, Artificial Sequence
  Description of Artificial Sequence: Synthetic peptide
  Seed: SPGMMMGMFNMLSTV
SPGIMMEMSNMVSTV

SEQ ID NO: 197155 - protein, 15 aa, Artificial Sequence
  Description of Artificial Sequence: Synthetic peptide
  Seed: SPGMMMGMFNMLSTV
SPGIMMEMTNMISTV

SEQ ID NO: 197156 - protein, 15 aa, Artificial Sequence
  Description of Artificial Sequence: Synthetic peptide
  Seed: SPGMMMGMFNMLSTV
SPGIMMEMTNMVSTV

SEQ ID NO: 197157 - protein, 15 aa, Artificial Sequence
  Description of Artificial Sequence: Synthetic peptide
  Seed: SPGMMMGMFNMLSTV
SPGIMMEMWNMLSTV

SEQ ID NO: 197158 - protein, 15 aa, Artificial Sequence
  Description of Artificial Sequence: Synthetic peptide
  Seed: SPGMMMGMFNMLSTV
SPGIMMEMYNMFSTV

SEQ ID NO: 197159 - protein, 15 aa, Artificial Sequence
  Description of Artificial Sequence: Synthetic peptide
  Seed: SPGMMMGMFNMLSTV
SPGIMMEMYNMISTV

SEQ ID NO: 197160 - protein, 15 aa, Artificial Sequence
  Description of Artificial Sequence: Synthetic peptide
  Seed: SPGMMMGMFNMLSTV
SPGIMMEMYNMLSTV

SEQ ID NO: 197161 - protein, 15 aa, Artificial Sequence
  Description of Artificial Sequence: Synthetic peptide
  Seed: SPGMMMGMFNMLSTV
SPGIMMEMYNMVSTV

SEQ ID NO: 197162 - protein, 15 aa, Artificial Sequence
  Description of Artificial Sequence: Synthetic peptide
  Seed: SPGMMMGMFNMLSTV
SPGIMMFMANMASTV

SEQ ID NO: 197163 - protein, 15 aa, Artificial Sequence
  Description of Artificial Sequence: Synthetic peptide
  Seed: SPGMMMGMFNMLSTV
SPGIMMFMANMGSTV

SEQ ID NO: 197164 - protein, 15 aa, Artificial Sequence
  Description of Artificial Sequence: Synthetic peptide
  Seed: SPGMMMGMFNMLSTV
SPGIMMFMANMISTV

SEQ ID NO: 197165 - protein, 15 aa, Artificial Sequence
  Description of Artificial Sequence: Synthetic peptide
  Seed: SPGMMMGMFNMLSTV
SPGIMMFMANMLSTV

SEQ ID NO: 197166 - protein, 15 aa, Artificial Sequence
  Description of Artificial Sequence: Synthetic peptide
  Seed: SPGMMMGMFNMLSTV
SPGIMMFMANMMSTV

SEQ ID NO: 197167 - protein, 15 aa, Artificial Sequence
  Description of Artificial Sequence: Synthetic peptide
  Seed: SPGMMMGMFNMLSTV
SPGIMMFMANMSSTV

SEQ ID NO: 197168 - protein, 15 aa, Artificial Sequence
  Description of Artificial Sequence: Synthetic peptide
  Seed: SPGMMMGMFNMLSTV
SPGIMMFMANMTSTV

SEQ ID NO: 197169 - protein, 15 aa, Artificial Sequence
  Description of Artificial Sequence: Synthetic peptide
  Seed: SPGMMMGMFNMLSTV
SPGIMMFMANMVSTV

SEQ ID NO: 197170 - protein, 15 aa, Artificial Sequence
  Description of Artificial Sequence: Synthetic peptide
  Seed: SPGMMMGMFNMLSTV
SPGIMMFMANMYSTV

SEQ ID NO: 197171 - protein, 15 aa, Artificial Sequence
  Description of Artificial Sequence: Synthetic peptide
  Seed: SPGMMMGMFNMLSTV
SPGIMMFMFNMESTV

SEQ ID NO: 197172 - protein, 15 aa, Artificial Sequence
  Description of Artificial Sequence: Synthetic peptide
  Seed: SPGMMMGMFNMLSTV
SPGIMMFMFNMISTV

SEQ ID NO: 197173 - protein, 15 aa, Artificial Sequence
  Description of Artificial Sequence: Synthetic peptide
  Seed: SPGMMMGMFNMLSTV
SPGIMMFMFNMLSTV

SEQ ID NO: 197174 - protein, 15 aa, Artificial Sequence
  Description of Artificial Sequence: Synthetic peptide
  Seed: SPGMMMGMFNMLSTV
SPGIMMFMFNMMSTV

SEQ ID NO: 197175 - protein, 15 aa, Artificial Sequence
  Description of Artificial Sequence: Synthetic peptide
  Seed: SPGMMMGMFNMLSTV
SPGIMMFMFNMYSTV

SEQ ID NO: 197176 - protein, 15 aa, Artificial Sequence
  Description of Artificial Sequence: Synthetic peptide
  Seed: SPGMMMGMFNMLSTV
SPGIMMFMGNMASTV

SEQ ID NO: 197177 - protein, 15 aa, Artificial Sequence
  Description of Artificial Sequence: Synthetic peptide
  Seed: SPGMMMGMFNMLSTV
SPGIMMFMHNMASTV

SEQ ID NO: 197178 - protein, 15 aa, Artificial Sequence
  Description of Artificial Sequence: Synthetic peptide
  Seed: SPGMMMGMFNMLSTV
SPGIMMFMHNMISTV

SEQ ID NO: 197179 - protein, 15 aa, Artificial Sequence
  Description of Artificial Sequence: Synthetic peptide
  Seed: SPGMMMGMFNMLSTV
SPGIMMFMHNMSSTV

SEQ ID NO: 197180 - protein, 15 aa, Artificial Sequence
  Description of Artificial Sequence: Synthetic peptide
  Seed: SPGMMMGMFNMLSTV
SPGIMMFMHNMVSTV

SEQ ID NO: 197181 - protein, 15 aa, Artificial Sequence
  Description of Artificial Sequence: Synthetic peptide
  Seed: SPGMMMGMFNMLSTV
SPGIMMFMINMYSTV

SEQ ID NO: 197182 - protein, 15 aa, Artificial Sequence
  Description of Artificial Sequence: Synthetic peptide
  Seed: SPGMMMGMFNMLSTV
SPGIMMFMKNMASTV

SEQ ID NO: 197183 - protein, 15 aa, Artificial Sequence
  Description of Artificial Sequence: Synthetic peptide
  Seed: SPGMMMGMFNMLSTV
SPGIMMFMKNMISTV

SEQ ID NO: 197184 - protein, 15 aa, Artificial Sequence
  Description of Artificial Sequence: Synthetic peptide
  Seed: SPGMMMGMFNMLSTV
SPGIMMFMKNMNSTV

SEQ ID NO: 197185 - protein, 15 aa, Artificial Sequence
  Description of Artificial Sequence: Synthetic peptide
  Seed: SPGMMMGMFNMLSTV
SPGIMMFMKNMPSTV

SEQ ID NO: 197186 - protein, 15 aa, Artificial Sequence
  Description of Artificial Sequence: Synthetic peptide
  Seed: SPGMMMGMFNMLSTV
SPGIMMFMKNMSSTV

SEQ ID NO: 197187 - protein, 15 aa, Artificial Sequence
  Description of Artificial Sequence: Synthetic peptide
  Seed: SPGMMMGMFNMLSTV
SPGIMMFMKNMVSTV

SEQ ID NO: 197188 - protein, 15 aa, Artificial Sequence
  Description of Artificial Sequence: Synthetic peptide
  Seed: SPGMMMGMFNMLSTV
SPGIMMFMLNMYSTV

SEQ ID NO: 197189 - protein, 15 aa, Artificial Sequence
  Description of Artificial Sequence: Synthetic peptide
  Seed: SPGMMMGMFNMLSTV
SPGIMMFMNNMASTV

SEQ ID NO: 197190 - protein, 15 aa, Artificial Sequence
  Description of Artificial Sequence: Synthetic peptide
  Seed: SPGMMMGMFNMLSTV
SPGIMMFMNNMFSTV

SEQ ID NO: 197191 - protein, 15 aa, Artificial Sequence
  Description of Artificial Sequence: Synthetic peptide
  Seed: SPGMMMGMFNMLSTV
SPGIMMFMNNMGSTV

SEQ ID NO: 197192 - protein, 15 aa, Artificial Sequence
  Description of Artificial Sequence: Synthetic peptide
  Seed: SPGMMMGMFNMLSTV
SPGIMMFMNNMHSTV

SEQ ID NO: 197193 - protein, 15 aa, Artificial Sequence
  Description of Artificial Sequence: Synthetic peptide
  Seed: SPGMMMGMFNMLSTV
SPGIMMFMNNMISTV

SEQ ID NO: 197194 - protein, 15 aa, Artificial Sequence
  Description of Artificial Sequence: Synthetic peptide
  Seed: SPGMMMGMFNMLSTV
SPGIMMFMNNMLSTV

SEQ ID NO: 197195 - protein, 15 aa, Artificial Sequence
  Description of Artificial Sequence: Synthetic peptide
  Seed: SPGMMMGMFNMLSTV
SPGIMMFMNNMMSTV

SEQ ID NO: 197196 - protein, 15 aa, Artificial Sequence
  Description of Artificial Sequence: Synthetic peptide
  Seed: SPGMMMGMFNMLSTV
SPGIMMFMNNMNSTV

SEQ ID NO: 197197 - protein, 15 aa, Artificial Sequence
  Description of Artificial Sequence: Synthetic peptide
  Seed: SPGMMMGMFNMLSTV
SPGIMMFMNNMSSTV

SEQ ID NO: 197198 - protein, 15 aa, Artificial Sequence
  Description of Artificial Sequence: Synthetic peptide
  Seed: SPGMMMGMFNMLSTV
SPGIMMFMNNMTSTV

SEQ ID NO: 197199 - protein, 15 aa, Artificial Sequence
  Description of Artificial Sequence: Synthetic peptide
  Seed: SPGMMMGMFNMLSTV
SPGIMMFMNNMVSTV

SEQ ID NO: 197200 - protein, 15 aa, Artificial Sequence
  Description of Artificial Sequence: Synthetic peptide
  Seed: SPGMMMGMFNMLSTV
SPGIMMFMNNMYSTV

SEQ ID NO: 197201 - protein, 15 aa, Artificial Sequence
  Description of Artificial Sequence: Synthetic peptide
  Seed: SPGMMMGMFNMLSTV
SPGIMMFMPNMASTV

SEQ ID NO: 197202 - protein, 15 aa, Artificial Sequence
  Description of Artificial Sequence: Synthetic peptide
  Seed: SPGMMMGMFNMLSTV
SPGIMMFMPNMISTV

SEQ ID NO: 197203 - protein, 15 aa, Artificial Sequence
  Description of Artificial Sequence: Synthetic peptide
  Seed: SPGMMMGMFNMLSTV
SPGIMMFMPNMLSTV

SEQ ID NO: 197204 - protein, 15 aa, Artificial Sequence
  Description of Artificial Sequence: Synthetic peptide
  Seed: SPGMMMGMFNMLSTV
SPGIMMFMPNMMSTV

SEQ ID NO: 197205 - protein, 15 aa, Artificial Sequence
  Description of Artificial Sequence: Synthetic peptide
  Seed: SPGMMMGMFNMLSTV
SPGIMMFMPNMSSTV

SEQ ID NO: 197206 - protein, 15 aa, Artificial Sequence
  Description of Artificial Sequence: Synthetic peptide
  Seed: SPGMMMGMFNMLSTV
SPGIMMFMPNMTSTV

SEQ ID NO: 197207 - protein, 15 aa, Artificial Sequence
  Description of Artificial Sequence: Synthetic peptide
  Seed: SPGMMMGMFNMLSTV
SPGIMMFMPNMVSTV

SEQ ID NO: 197208 - protein, 15 aa, Artificial Sequence
  Description of Artificial Sequence: Synthetic peptide
  Seed: SPGMMMGMFNMLSTV
SPGIMMFMRNMASTV

SEQ ID NO: 197209 - protein, 15 aa, Artificial Sequence
  Description of Artificial Sequence: Synthetic peptide
  Seed: SPGMMMGMFNMLSTV
SPGIMMFMRNMGSTV

SEQ ID NO: 197210 - protein, 15 aa, Artificial Sequence
  Description of Artificial Sequence: Synthetic peptide
  Seed: SPGMMMGMFNMLSTV
SPGIMMFMRNMISTV

SEQ ID NO: 197211 - protein, 15 aa, Artificial Sequence
  Description of Artificial Sequence: Synthetic peptide
  Seed: SPGMMMGMFNMLSTV
SPGIMMFMRNMNSTV

SEQ ID NO: 197212 - protein, 15 aa, Artificial Sequence
  Description of Artificial Sequence: Synthetic peptide
  Seed: SPGMMMGMFNMLSTV
SPGIMMFMRNMPSTV

SEQ ID NO: 197213 - protein, 15 aa, Artificial Sequence
  Description of Artificial Sequence: Synthetic peptide
  Seed: SPGMMMGMFNMLSTV
SPGIMMFMRNMSSTV

SEQ ID NO: 197214 - protein, 15 aa, Artificial Sequence
  Description of Artificial Sequence: Synthetic peptide
  Seed: SPGMMMGMFNMLSTV
SPGIMMFMRNMTSTV

SEQ ID NO: 197215 - protein, 15 aa, Artificial Sequence
  Description of Artificial Sequence: Synthetic peptide
  Seed: SPGMMMGMFNMLSTV
SPGIMMFMRNMVSTV

SEQ ID NO: 197216 - protein, 15 aa, Artificial Sequence
  Description of Artificial Sequence: Synthetic peptide
  Seed: SPGMMMGMFNMLSTV
SPGIMMFMSNMASTV

SEQ ID NO: 197217 - protein, 15 aa, Artificial Sequence
  Description of Artificial Sequence: Synthetic peptide
  Seed: SPGMMMGMFNMLSTV
SPGIMMFMSNMGSTV

SEQ ID NO: 197218 - protein, 15 aa, Artificial Sequence
  Description of Artificial Sequence: Synthetic peptide
  Seed: SPGMMMGMFNMLSTV
SPGIMMFMSNMISTV

SEQ ID NO: 197219 - protein, 15 aa, Artificial Sequence
  Description of Artificial Sequence: Synthetic peptide
  Seed: SPGMMMGMFNMLSTV
SPGIMMFMSNMSSTV

SEQ ID NO: 197220 - protein, 15 aa, Artificial Sequence
  Description of Artificial Sequence: Synthetic peptide
  Seed: SPGMMMGMFNMLSTV
SPGIMMFMSNMTSTV

SEQ ID NO: 197221 - protein, 15 aa, Artificial Sequence
  Description of Artificial Sequence: Synthetic peptide
  Seed: SPGMMMGMFNMLSTV
SPGIMMFMSNMVSTV

SEQ ID NO: 197222 - protein, 15 aa, Artificial Sequence
  Description of Artificial Sequence: Synthetic peptide
  Seed: SPGMMMGMFNMLSTV
SPGIMMFMTNMASTV

SEQ ID NO: 197223 - protein, 15 aa, Artificial Sequence
  Description of Artificial Sequence: Synthetic peptide
  Seed: SPGMMMGMFNMLSTV
SPGIMMFMTNMNSTV

SEQ ID NO: 197224 - protein, 15 aa, Artificial Sequence
  Description of Artificial Sequence: Synthetic peptide
  Seed: SPGMMMGMFNMLSTV
SPGIMMFMTNMSSTV

SEQ ID NO: 197225 - protein, 15 aa, Artificial Sequence
  Description of Artificial Sequence: Synthetic peptide
  Seed: SPGMMMGMFNMLSTV
SPGIMMFMTNMVSTV

SEQ ID NO: 197226 - protein, 15 aa, Artificial Sequence
  Description of Artificial Sequence: Synthetic peptide
  Seed: SPGMMMGMFNMLSTV
SPGIMMFMWNMISTV

SEQ ID NO: 197227 - protein, 15 aa, Artificial Sequence
  Description of Artificial Sequence: Synthetic peptide
  Seed: SPGMMMGMFNMLSTV
SPGIMMFMWNMLSTV

SEQ ID NO: 197228 - protein, 15 aa, Artificial Sequence
  Description of Artificial Sequence: Synthetic peptide
  Seed: SPGMMMGMFNMLSTV
SPGIMMFMWNMMSTV

SEQ ID NO: 197229 - protein, 15 aa, Artificial Sequence
  Description of Artificial Sequence: Synthetic peptide
  Seed: SPGMMMGMFNMLSTV
SPGIMMFMWNMVSTV

SEQ ID NO: 197230 - protein, 15 aa, Artificial Sequence
  Description of Artificial Sequence: Synthetic peptide
  Seed: SPGMMMGMFNMLSTV
SPGIMMFMYNMFSTV

SEQ ID NO: 197231 - protein, 15 aa, Artificial Sequence
  Description of Artificial Sequence: Synthetic peptide
  Seed: SPGMMMGMFNMLSTV
SPGIMMFMYNMISTV

SEQ ID NO: 197232 - protein, 15 aa, Artificial Sequence
  Description of Artificial Sequence: Synthetic peptide
  Seed: SPGMMMGMFNMLSTV
SPGIMMFMYNMLSTV

SEQ ID NO: 197233 - protein, 15 aa, Artificial Sequence
  Description of Artificial Sequence: Synthetic peptide
  Seed: SPGMMMGMFNMLSTV
SPGIMMFMYNMMSTV

SEQ ID NO: 197234 - protein, 15 aa, Artificial Sequence
  Description of Artificial Sequence: Synthetic peptide
  Seed: SPGMMMGMFNMLSTV
SPGIMMFMYNMVSTV

SEQ ID NO: 197235 - protein, 15 aa, Artificial Sequence
  Description of Artificial Sequence: Synthetic peptide
  Seed: SPGMMMGMFNMLSTV
SPGIMMGMANMASTV

SEQ ID NO: 197236 - protein, 15 aa, Artificial Sequence
  Description of Artificial Sequence: Synthetic peptide
  Seed: SPGMMMGMFNMLSTV
SPGIMMGMANMFSTV

SEQ ID NO: 197237 - protein, 15 aa, Artificial Sequence
  Description of Artificial Sequence: Synthetic peptide
  Seed: SPGMMMGMFNMLSTV
SPGIMMGMANMISTV

SEQ ID NO: 197238 - protein, 15 aa, Artificial Sequence
  Description of Artificial Sequence: Synthetic peptide
  Seed: SPGMMMGMFNMLSTV
SPGIMMGMANMLSTV

SEQ ID NO: 197239 - protein, 15 aa, Artificial Sequence
  Description of Artificial Sequence: Synthetic peptide
  Seed: SPGMMMGMFNMLSTV
SPGIMMGMANMMSTV

SEQ ID NO: 197240 - protein, 15 aa, Artificial Sequence
  Description of Artificial Sequence: Synthetic peptide
  Seed: SPGMMMGMFNMLSTV
SPGIMMGMANMSSTV

SEQ ID NO: 197241 - protein, 15 aa, Artificial Sequence
  Description of Artificial Sequence: Synthetic peptide
  Seed: SPGMMMGMFNMLSTV
SPGIMMGMANMTSTV

SEQ ID NO: 197242 - protein, 15 aa, Artificial Sequence
  Description of Artificial Sequence: Synthetic peptide
  Seed: SPGMMMGMFNMLSTV
SPGIMMGMANMVSTV

SEQ ID NO: 197243 - protein, 15 aa, Artificial Sequence
  Description of Artificial Sequence: Synthetic peptide
  Seed: SPGMMMGMFNMLSTV
SPGIMMGMANMYSTV

SEQ ID NO: 197244 - protein, 15 aa, Artificial Sequence
  Description of Artificial Sequence: Synthetic peptide
  Seed: SPGMMMGMFNMLSTV
SPGIMMGMFNMLSTV

SEQ ID NO: 197245 - protein, 15 aa, Artificial Sequence
  Description of Artificial Sequence: Synthetic peptide
  Seed: SPGMMMGMFNMLSTV
SPGIMMGMGNMISTV

SEQ ID NO: 197246 - protein, 15 aa, Artificial Sequence
  Description of Artificial Sequence: Synthetic peptide
  Seed: SPGMMMGMFNMLSTV
SPGIMMGMGNMLSTV

SEQ ID NO: 197247 - protein, 15 aa, Artificial Sequence
  Description of Artificial Sequence: Synthetic peptide
  Seed: SPGMMMGMFNMLSTV
SPGIMMGMGNMVSTV

SEQ ID NO: 197248 - protein, 15 aa, Artificial Sequence
  Description of Artificial Sequence: Synthetic peptide
  Seed: SPGMMMGMFNMLSTV
SPGIMMGMNNMFSTV

SEQ ID NO: 197249 - protein, 15 aa, Artificial Sequence
  Description of Artificial Sequence: Synthetic peptide
  Seed: SPGMMMGMFNMLSTV
SPGIMMGMNNMISTV

SEQ ID NO: 197250 - protein, 15 aa, Artificial Sequence
  Description of Artificial Sequence: Synthetic peptide
  Seed: SPGMMMGMFNMLSTV
SPGIMMGMNNMLSTV

SEQ ID NO: 197251 - protein, 15 aa, Artificial Sequence
  Description of Artificial Sequence: Synthetic peptide
  Seed: SPGMMMGMFNMLSTV
SPGIMMGMNNMMSTV

SEQ ID NO: 197252 - protein, 15 aa, Artificial Sequence
  Description of Artificial Sequence: Synthetic peptide
  Seed: SPGMMMGMFNMLSTV
SPGIMMGMNNMVSTV

SEQ ID NO: 197253 - protein, 15 aa, Artificial Sequence
  Description of Artificial Sequence: Synthetic peptide
  Seed: SPGMMMGMFNMLSTV
SPGIMMGMNNMYSTV

SEQ ID NO: 197254 - protein, 15 aa, Artificial Sequence
  Description of Artificial Sequence: Synthetic peptide
  Seed: SPGMMMGMFNMLSTV
SPGIMMGMPNMASTV

SEQ ID NO: 197255 - protein, 15 aa, Artificial Sequence
  Description of Artificial Sequence: Synthetic peptide
  Seed: SPGMMMGMFNMLSTV
SPGIMMGMPNMISTV

SEQ ID NO: 197256 - protein, 15 aa, Artificial Sequence
  Description of Artificial Sequence: Synthetic peptide
  Seed: SPGMMMGMFNMLSTV
SPGIMMGMPNMLSTV

SEQ ID NO: 197257 - protein, 15 aa, Artificial Sequence
  Description of Artificial Sequence: Synthetic peptide
  Seed: SPGMMMGMFNMLSTV
SPGIMMGMPNMMSTV

SEQ ID NO: 197258 - protein, 15 aa, Artificial Sequence
  Description of Artificial Sequence: Synthetic peptide
  Seed: SPGMMMGMFNMLSTV
SPGIMMGMPNMSSTV

SEQ ID NO: 197259 - protein, 15 aa, Artificial Sequence
  Description of Artificial Sequence: Synthetic peptide
  Seed: SPGMMMGMFNMLSTV
SPGIMMGMPNMVSTV

SEQ ID NO: 197260 - protein, 15 aa, Artificial Sequence
  Description of Artificial Sequence: Synthetic peptide
  Seed: SPGMMMGMFNMLSTV
SPGIMMGMSNMISTV

SEQ ID NO: 197261 - protein, 15 aa, Artificial Sequence
  Description of Artificial Sequence: Synthetic peptide
  Seed: SPGMMMGMFNMLSTV
SPGIMMGMSNMLSTV

SEQ ID NO: 197262 - protein, 15 aa, Artificial Sequence
  Description of Artificial Sequence: Synthetic peptide
  Seed: SPGMMMGMFNMLSTV
SPGIMMGMSNMMSTV

SEQ ID NO: 197263 - protein, 15 aa, Artificial Sequence
  Description of Artificial Sequence: Synthetic peptide
  Seed: SPGMMMGMFNMLSTV
SPGIMMGMSNMVSTV

SEQ ID NO: 197264 - protein, 15 aa, Artificial Sequence
  Description of Artificial Sequence: Synthetic peptide
  Seed: SPGMMMGMFNMLSTV
SPGIMMGMTNMISTV

SEQ ID NO: 197265 - protein, 15 aa, Artificial Sequence
  Description of Artificial Sequence: Synthetic peptide
  Seed: SPGMMMGMFNMLSTV
SPGIMMGMTNMVSTV

SEQ ID NO: 197266 - protein, 15 aa, Artificial Sequence
  Description of Artificial Sequence: Synthetic peptide
  Seed: SPGMMMGMFNMLSTV
SPGIMMGMVNMASTV

SEQ ID NO: 197267 - protein, 15 aa, Artificial Sequence
  Description of Artificial Sequence: Synthetic peptide
  Seed: SPGMMMGMFNMLSTV
SPGIMMHMANMASTV

SEQ ID NO: 197268 - protein, 15 aa, Artificial Sequence
  Description of Artificial Sequence: Synthetic peptide
  Seed: SPGMMMGMFNMLSTV
SPGIMMHMANMFSTV

SEQ ID NO: 197269 - protein, 15 aa, Artificial Sequence
  Description of Artificial Sequence: Synthetic peptide
  Seed: SPGMMMGMFNMLSTV
SPGIMMHMANMISTV

SEQ ID NO: 197270 - protein, 15 aa, Artificial Sequence
  Description of Artificial Sequence: Synthetic peptide
  Seed: SPGMMMGMFNMLSTV
SPGIMMHMANMLSTV

SEQ ID NO: 197271 - protein, 15 aa, Artificial Sequence
  Description of Artificial Sequence: Synthetic peptide
  Seed: SPGMMMGMFNMLSTV
SPGIMMHMANMMSTV

SEQ ID NO: 197272 - protein, 15 aa, Artificial Sequence
  Description of Artificial Sequence: Synthetic peptide
  Seed: SPGMMMGMFNMLSTV
SPGIMMHMANMSSTV

SEQ ID NO: 197273 - protein, 15 aa, Artificial Sequence
  Description of Artificial Sequence: Synthetic peptide
  Seed: SPGMMMGMFNMLSTV
SPGIMMHMANMTSTV

SEQ ID NO: 197274 - protein, 15 aa, Artificial Sequence
  Description of Artificial Sequence: Synthetic peptide
  Seed: SPGMMMGMFNMLSTV
SPGIMMHMANMVSTV

SEQ ID NO: 197275 - protein, 15 aa, Artificial Sequence
  Description of Artificial Sequence: Synthetic peptide
  Seed: SPGMMMGMFNMLSTV
SPGIMMHMANMYSTV

SEQ ID NO: 197276 - protein, 15 aa, Artificial Sequence
  Description of Artificial Sequence: Synthetic peptide
  Seed: SPGMMMGMFNMLSTV
SPGIMMHMFNMASTV

SEQ ID NO: 197277 - protein, 15 aa, Artificial Sequence
  Description of Artificial Sequence: Synthetic peptide
  Seed: SPGMMMGMFNMLSTV
SPGIMMHMFNMDSTV

SEQ ID NO: 197278 - protein, 15 aa, Artificial Sequence
  Description of Artificial Sequence: Synthetic peptide
  Seed: SPGMMMGMFNMLSTV
SPGIMMHMFNMESTV

SEQ ID NO: 197279 - protein, 15 aa, Artificial Sequence
  Description of Artificial Sequence: Synthetic peptide
  Seed: SPGMMMGMFNMLSTV
SPGIMMHMFNMFSTV

SEQ ID NO: 197280 - protein, 15 aa, Artificial Sequence
  Description of Artificial Sequence: Synthetic peptide
  Seed: SPGMMMGMFNMLSTV
SPGIMMHMFNMISTV

SEQ ID NO: 197281 - protein, 15 aa, Artificial Sequence
  Description of Artificial Sequence: Synthetic peptide
  Seed: SPGMMMGMFNMLSTV
SPGIMMHMFNMLSTV

SEQ ID NO: 197282 - protein, 15 aa, Artificial Sequence
  Description of Artificial Sequence: Synthetic peptide
  Seed: SPGMMMGMFNMLSTV
SPGIMMHMFNMMSTV

SEQ ID NO: 197283 - protein, 15 aa, Artificial Sequence
  Description of Artificial Sequence: Synthetic peptide
  Seed: SPGMMMGMFNMLSTV
SPGIMMHMFNMNSTV

SEQ ID NO: 197284 - protein, 15 aa, Artificial Sequence
  Description of Artificial Sequence: Synthetic peptide
  Seed: SPGMMMGMFNMLSTV
SPGIMMHMFNMSSTV

SEQ ID NO: 197285 - protein, 15 aa, Artificial Sequence
  Description of Artificial Sequence: Synthetic peptide
  Seed: SPGMMMGMFNMLSTV
SPGIMMHMFNMTSTV

SEQ ID NO: 197286 - protein, 15 aa, Artificial Sequence
  Description of Artificial Sequence: Synthetic peptide
  Seed: SPGMMMGMFNMLSTV
SPGIMMHMFNMVSTV

SEQ ID NO: 197287 - protein, 15 aa, Artificial Sequence
  Description of Artificial Sequence: Synthetic peptide
  Seed: SPGMMMGMFNMLSTV
SPGIMMHMFNMYSTV

SEQ ID NO: 197288 - protein, 15 aa, Artificial Sequence
  Description of Artificial Sequence: Synthetic peptide
  Seed: SPGMMMGMFNMLSTV
SPGIMMHMGNMFSTV

SEQ ID NO: 197289 - protein, 15 aa, Artificial Sequence
  Description of Artificial Sequence: Synthetic peptide
  Seed: SPGMMMGMFNMLSTV
SPGIMMHMGNMISTV

SEQ ID NO: 197290 - protein, 15 aa, Artificial Sequence
  Description of Artificial Sequence: Synthetic peptide
  Seed: SPGMMMGMFNMLSTV
SPGIMMHMGNMLSTV

SEQ ID NO: 197291 - protein, 15 aa, Artificial Sequence
  Description of Artificial Sequence: Synthetic peptide
  Seed: SPGMMMGMFNMLSTV
SPGIMMHMGNMMSTV

SEQ ID NO: 197292 - protein, 15 aa, Artificial Sequence
  Description of Artificial Sequence: Synthetic peptide
  Seed: SPGMMMGMFNMLSTV
SPGIMMHMGNMVSTV

SEQ ID NO: 197293 - protein, 15 aa, Artificial Sequence
  Description of Artificial Sequence: Synthetic peptide
  Seed: SPGMMMGMFNMLSTV
SPGIMMHMGNMYSTV

SEQ ID NO: 197294 - protein, 15 aa, Artificial Sequence
  Description of Artificial Sequence: Synthetic peptide
  Seed: SPGMMMGMFNMLSTV
SPGIMMHMHNMISTV

SEQ ID NO: 197295 - protein, 15 aa, Artificial Sequence
  Description of Artificial Sequence: Synthetic peptide
  Seed: SPGMMMGMFNMLSTV
SPGIMMHMHNMVSTV

SEQ ID NO: 197296 - protein, 15 aa, Artificial Sequence
  Description of Artificial Sequence: Synthetic peptide
  Seed: SPGMMMGMFNMLSTV
SPGIMMHMINMFSTV

SEQ ID NO: 197297 - protein, 15 aa, Artificial Sequence
  Description of Artificial Sequence: Synthetic peptide
  Seed: SPGMMMGMFNMLSTV
SPGIMMHMINMISTV

SEQ ID NO: 197298 - protein, 15 aa, Artificial Sequence
  Description of Artificial Sequence: Synthetic peptide
  Seed: SPGMMMGMFNMLSTV
SPGIMMHMINMLSTV

SEQ ID NO: 197299 - protein, 15 aa, Artificial Sequence
  Description of Artificial Sequence: Synthetic peptide
  Seed: SPGMMMGMFNMLSTV
SPGIMMHMINMMSTV

SEQ ID NO: 197300 - protein, 15 aa, Artificial Sequence
  Description of Artificial Sequence: Synthetic peptide
  Seed: SPGMMMGMFNMLSTV
SPGIMMHMINMVSTV

SEQ ID NO: 197301 - protein, 15 aa, Artificial Sequence
  Description of Artificial Sequence: Synthetic peptide
  Seed: SPGMMMGMFNMLSTV
SPGIMMHMLNMFSTV

SEQ ID NO: 197302 - protein, 15 aa, Artificial Sequence
  Description of Artificial Sequence: Synthetic peptide
  Seed: SPGMMMGMFNMLSTV
SPGIMMHMLNMISTV

SEQ ID NO: 197303 - protein, 15 aa, Artificial Sequence
  Description of Artificial Sequence: Synthetic peptide
  Seed: SPGMMMGMFNMLSTV
SPGIMMHMLNMLSTV

SEQ ID NO: 197304 - protein, 15 aa, Artificial Sequence
  Description of Artificial Sequence: Synthetic peptide
  Seed: SPGMMMGMFNMLSTV
SPGIMMHMLNMVSTV

SEQ ID NO: 197305 - protein, 15 aa, Artificial Sequence
  Description of Artificial Sequence: Synthetic peptide
  Seed: SPGMMMGMFNMLSTV
SPGIMMHMMNMISTV

SEQ ID NO: 197306 - protein, 15 aa, Artificial Sequence
  Description of Artificial Sequence: Synthetic peptide
  Seed: SPGMMMGMFNMLSTV
SPGIMMHMNNMASTV

SEQ ID NO: 197307 - protein, 15 aa, Artificial Sequence
  Description of Artificial Sequence: Synthetic peptide
  Seed: SPGMMMGMFNMLSTV
SPGIMMHMNNMFSTV

SEQ ID NO: 197308 - protein, 15 aa, Artificial Sequence
  Description of Artificial Sequence: Synthetic peptide
  Seed: SPGMMMGMFNMLSTV
SPGIMMHMNNMISTV

SEQ ID NO: 197309 - protein, 15 aa, Artificial Sequence
  Description of Artificial Sequence: Synthetic peptide
  Seed: SPGMMMGMFNMLSTV
SPGIMMHMNNMLSTV

SEQ ID NO: 197310 - protein, 15 aa, Artificial Sequence
  Description of Artificial Sequence: Synthetic peptide
  Seed: SPGMMMGMFNMLSTV
SPGIMMHMNNMMSTV

SEQ ID NO: 197311 - protein, 15 aa, Artificial Sequence
  Description of Artificial Sequence: Synthetic peptide
  Seed: SPGMMMGMFNMLSTV
SPGIMMHMNNMSSTV

SEQ ID NO: 197312 - protein, 15 aa, Artificial Sequence
  Description of Artificial Sequence: Synthetic peptide
  Seed: SPGMMMGMFNMLSTV
SPGIMMHMNNMTSTV

SEQ ID NO: 197313 - protein, 15 aa, Artificial Sequence
  Description of Artificial Sequence: Synthetic peptide
  Seed: SPGMMMGMFNMLSTV
SPGIMMHMNNMVSTV

SEQ ID NO: 197314 - protein, 15 aa, Artificial Sequence
  Description of Artificial Sequence: Synthetic peptide
  Seed: SPGMMMGMFNMLSTV
SPGIMMHMNNMYSTV

SEQ ID NO: 197315 - protein, 15 aa, Artificial Sequence
  Description of Artificial Sequence: Synthetic peptide
  Seed: SPGMMMGMFNMLSTV
SPGIMMHMPNMASTV

SEQ ID NO: 197316 - protein, 15 aa, Artificial Sequence
  Description of Artificial Sequence: Synthetic peptide
  Seed: SPGMMMGMFNMLSTV
SPGIMMHMPNMFSTV

SEQ ID NO: 197317 - protein, 15 aa, Artificial Sequence
  Description of Artificial Sequence: Synthetic peptide
  Seed: SPGMMMGMFNMLSTV
SPGIMMHMPNMISTV

SEQ ID NO: 197318 - protein, 15 aa, Artificial Sequence
  Description of Artificial Sequence: Synthetic peptide
  Seed: SPGMMMGMFNMLSTV
SPGIMMHMPNMLSTV

SEQ ID NO: 197319 - protein, 15 aa, Artificial Sequence
  Description of Artificial Sequence: Synthetic peptide
  Seed: SPGMMMGMFNMLSTV
SPGIMMHMPNMMSTV

SEQ ID NO: 197320 - protein, 15 aa, Artificial Sequence
  Description of Artificial Sequence: Synthetic peptide
  Seed: SPGMMMGMFNMLSTV
SPGIMMHMPNMVSTV

SEQ ID NO: 197321 - protein, 15 aa, Artificial Sequence
  Description of Artificial Sequence: Synthetic peptide
  Seed: SPGMMMGMFNMLSTV
SPGIMMHMPNMYSTV

SEQ ID NO: 197322 - protein, 15 aa, Artificial Sequence
  Description of Artificial Sequence: Synthetic peptide
  Seed: SPGMMMGMFNMLSTV
SPGIMMHMSNMASTV

SEQ ID NO: 197323 - protein, 15 aa, Artificial Sequence
  Description of Artificial Sequence: Synthetic peptide
  Seed: SPGMMMGMFNMLSTV
SPGIMMHMSNMFSTV

SEQ ID NO: 197324 - protein, 15 aa, Artificial Sequence
  Description of Artificial Sequence: Synthetic peptide
  Seed: SPGMMMGMFNMLSTV
SPGIMMHMSNMISTV

SEQ ID NO: 197325 - protein, 15 aa, Artificial Sequence
  Description of Artificial Sequence: Synthetic peptide
  Seed: SPGMMMGMFNMLSTV
SPGIMMHMSNMLSTV

SEQ ID NO: 197326 - protein, 15 aa, Artificial Sequence
  Description of Artificial Sequence: Synthetic peptide
  Seed: SPGMMMGMFNMLSTV
SPGIMMHMSNMMSTV

SEQ ID NO: 197327 - protein, 15 aa, Artificial Sequence
  Description of Artificial Sequence: Synthetic peptide
  Seed: SPGMMMGMFNMLSTV
SPGIMMHMSNMVSTV

SEQ ID NO: 197328 - protein, 15 aa, Artificial Sequence
  Description of Artificial Sequence: Synthetic peptide
  Seed: SPGMMMGMFNMLSTV
SPGIMMHMSNMYSTV

SEQ ID NO: 197329 - protein, 15 aa, Artificial Sequence
  Description of Artificial Sequence: Synthetic peptide
  Seed: SPGMMMGMFNMLSTV
SPGIMMHMTNMFSTV

SEQ ID NO: 197330 - protein, 15 aa, Artificial Sequence
  Description of Artificial Sequence: Synthetic peptide
  Seed: SPGMMMGMFNMLSTV
SPGIMMHMTNMISTV

SEQ ID NO: 197331 - protein, 15 aa, Artificial Sequence
  Description of Artificial Sequence: Synthetic peptide
  Seed: SPGMMMGMFNMLSTV
SPGIMMHMTNMLSTV

SEQ ID NO: 197332 - protein, 15 aa, Artificial Sequence
  Description of Artificial Sequence: Synthetic peptide
  Seed: SPGMMMGMFNMLSTV
SPGIMMHMTNMMSTV

SEQ ID NO: 197333 - protein, 15 aa, Artificial Sequence
  Description of Artificial Sequence: Synthetic peptide
  Seed: SPGMMMGMFNMLSTV
SPGIMMHMTNMVSTV

SEQ ID NO: 197334 - protein, 15 aa, Artificial Sequence
  Description of Artificial Sequence: Synthetic peptide
  Seed: SPGMMMGMFNMLSTV
SPGIMMHMTNMYSTV

SEQ ID NO: 197335 - protein, 15 aa, Artificial Sequence
  Description of Artificial Sequence: Synthetic peptide
  Seed: SPGMMMGMFNMLSTV
SPGIMMHMVNMFSTV

SEQ ID NO: 197336 - protein, 15 aa, Artificial Sequence
  Description of Artificial Sequence: Synthetic peptide
  Seed: SPGMMMGMFNMLSTV
SPGIMMHMVNMISTV

SEQ ID NO: 197337 - protein, 15 aa, Artificial Sequence
  Description of Artificial Sequence: Synthetic peptide
  Seed: SPGMMMGMFNMLSTV
SPGIMMHMVNMLSTV

SEQ ID NO: 197338 - protein, 15 aa, Artificial Sequence
  Description of Artificial Sequence: Synthetic peptide
  Seed: SPGMMMGMFNMLSTV
SPGIMMHMVNMMSTV

SEQ ID NO: 197339 - protein, 15 aa, Artificial Sequence
  Description of Artificial Sequence: Synthetic peptide
  Seed: SPGMMMGMFNMLSTV
SPGIMMHMVNMVSTV

SEQ ID NO: 197340 - protein, 15 aa, Artificial Sequence
  Description of Artificial Sequence: Synthetic peptide
  Seed: SPGMMMGMFNMLSTV
SPGIMMHMVNMYSTV

SEQ ID NO: 197341 - protein, 15 aa, Artificial Sequence
  Description of Artificial Sequence: Synthetic peptide
  Seed: SPGMMMGMFNMLSTV
SPGIMMHMWNMFSTV

SEQ ID NO: 197342 - protein, 15 aa, Artificial Sequence
  Description of Artificial Sequence: Synthetic peptide
  Seed: SPGMMMGMFNMLSTV
SPGIMMHMWNMISTV

SEQ ID NO: 197343 - protein, 15 aa, Artificial Sequence
  Description of Artificial Sequence: Synthetic peptide
  Seed: SPGMMMGMFNMLSTV
SPGIMMHMWNMLSTV

SEQ ID NO: 197344 - protein, 15 aa, Artificial Sequence
  Description of Artificial Sequence: Synthetic peptide
  Seed: SPGMMMGMFNMLSTV
SPGIMMHMWNMVSTV

SEQ ID NO: 197345 - protein, 15 aa, Artificial Sequence
  Description of Artificial Sequence: Synthetic peptide
  Seed: SPGMMMGMFNMLSTV
SPGIMMHMYNMFSTV

SEQ ID NO: 197346 - protein, 15 aa, Artificial Sequence
  Description of Artificial Sequence: Synthetic peptide
  Seed: SPGMMMGMFNMLSTV
SPGIMMHMYNMISTV

SEQ ID NO: 197347 - protein, 15 aa, Artificial Sequence
  Description of Artificial Sequence: Synthetic peptide
  Seed: SPGMMMGMFNMLSTV
SPGIMMHMYNMLSTV

SEQ ID NO: 197348 - protein, 15 aa, Artificial Sequence
  Description of Artificial Sequence: Synthetic peptide
  Seed: SPGMMMGMFNMLSTV
SPGIMMHMYNMVSTV

SEQ ID NO: 197349 - protein, 15 aa, Artificial Sequence
  Description of Artificial Sequence: Synthetic peptide
  Seed: SPGMMMGMFNMLSTV
SPGIMMIMANMASTV

SEQ ID NO: 197350 - protein, 15 aa, Artificial Sequence
  Description of Artificial Sequence: Synthetic peptide
  Seed: SPGMMMGMFNMLSTV
SPGIMMIMANMFSTV

SEQ ID NO: 197351 - protein, 15 aa, Artificial Sequence
  Description of Artificial Sequence: Synthetic peptide
  Seed: SPGMMMGMFNMLSTV
SPGIMMIMANMGSTV

SEQ ID NO: 197352 - protein, 15 aa, Artificial Sequence
  Description of Artificial Sequence: Synthetic peptide
  Seed: SPGMMMGMFNMLSTV
SPGIMMIMANMHSTV

SEQ ID NO: 197353 - protein, 15 aa, Artificial Sequence
  Description of Artificial Sequence: Synthetic peptide
  Seed: SPGMMMGMFNMLSTV
SPGIMMIMANMISTV

SEQ ID NO: 197354 - protein, 15 aa, Artificial Sequence
  Description of Artificial Sequence: Synthetic peptide
  Seed: SPGMMMGMFNMLSTV
SPGIMMIMANMKSTV

SEQ ID NO: 197355 - protein, 15 aa, Artificial Sequence
  Description of Artificial Sequence: Synthetic peptide
  Seed: SPGMMMGMFNMLSTV
SPGIMMIMANMLSTV

SEQ ID NO: 197356 - protein, 15 aa, Artificial Sequence
  Description of Artificial Sequence: Synthetic peptide
  Seed: SPGMMMGMFNMLSTV
SPGIMMIMANMMSTV

SEQ ID NO: 197357 - protein, 15 aa, Artificial Sequence
  Description of Artificial Sequence: Synthetic peptide
  Seed: SPGMMMGMFNMLSTV
SPGIMMIMANMNSTV

SEQ ID NO: 197358 - protein, 15 aa, Artificial Sequence
  Description of Artificial Sequence: Synthetic peptide
  Seed: SPGMMMGMFNMLSTV
SPGIMMIMANMRSTV

SEQ ID NO: 197359 - protein, 15 aa, Artificial Sequence
  Description of Artificial Sequence: Synthetic peptide
  Seed: SPGMMMGMFNMLSTV
SPGIMMIMANMSSTV

SEQ ID NO: 197360 - protein, 15 aa, Artificial Sequence
  Description of Artificial Sequence: Synthetic peptide
  Seed: SPGMMMGMFNMLSTV
SPGIMMIMANMTSTV

SEQ ID NO: 197361 - protein, 15 aa, Artificial Sequence
  Description of Artificial Sequence: Synthetic peptide
  Seed: SPGMMMGMFNMLSTV
SPGIMMIMANMVSTV

SEQ ID NO: 197362 - protein, 15 aa, Artificial Sequence
  Description of Artificial Sequence: Synthetic peptide
  Seed: SPGMMMGMFNMLSTV
SPGIMMIMANMYSTV

SEQ ID NO: 197363 - protein, 15 aa, Artificial Sequence
  Description of Artificial Sequence: Synthetic peptide
  Seed: SPGMMMGMFNMLSTV
SPGIMMIMDNMASTV

SEQ ID NO: 197364 - protein, 15 aa, Artificial Sequence
  Description of Artificial Sequence: Synthetic peptide
  Seed: SPGMMMGMFNMLSTV
SPGIMMIMDNMISTV

SEQ ID NO: 197365 - protein, 15 aa, Artificial Sequence
  Description of Artificial Sequence: Synthetic peptide
  Seed: SPGMMMGMFNMLSTV
SPGIMMIMDNMVSTV

SEQ ID NO: 197366 - protein, 15 aa, Artificial Sequence
  Description of Artificial Sequence: Synthetic peptide
  Seed: SPGMMMGMFNMLSTV
SPGIMMIMENMASTV

SEQ ID NO: 197367 - protein, 15 aa, Artificial Sequence
  Description of Artificial Sequence: Synthetic peptide
  Seed: SPGMMMGMFNMLSTV
SPGIMMIMENMSSTV

SEQ ID NO: 197368 - protein, 15 aa, Artificial Sequence
  Description of Artificial Sequence: Synthetic peptide
  Seed: SPGMMMGMFNMLSTV
SPGIMMIMFNMESTV

SEQ ID NO: 197369 - protein, 15 aa, Artificial Sequence
  Description of Artificial Sequence: Synthetic peptide
  Seed: SPGMMMGMFNMLSTV
SPGIMMIMFNMFSTV

SEQ ID NO: 197370 - protein, 15 aa, Artificial Sequence
  Description of Artificial Sequence: Synthetic peptide
  Seed: SPGMMMGMFNMLSTV
SPGIMMIMFNMYSTV

SEQ ID NO: 197371 - protein, 15 aa, Artificial Sequence
  Description of Artificial Sequence: Synthetic peptide
  Seed: SPGMMMGMFNMLSTV
SPGIMMIMGNMASTV

SEQ ID NO: 197372 - protein, 15 aa, Artificial Sequence
  Description of Artificial Sequence: Synthetic peptide
  Seed: SPGMMMGMFNMLSTV
SPGIMMIMGNMISTV

SEQ ID NO: 197373 - protein, 15 aa, Artificial Sequence
  Description of Artificial Sequence: Synthetic peptide
  Seed: SPGMMMGMFNMLSTV
SPGIMMIMGNMLSTV

SEQ ID NO: 197374 - protein, 15 aa, Artificial Sequence
  Description of Artificial Sequence: Synthetic peptide
  Seed: SPGMMMGMFNMLSTV
SPGIMMIMGNMMSTV

SEQ ID NO: 197375 - protein, 15 aa, Artificial Sequence
  Description of Artificial Sequence: Synthetic peptide
  Seed: SPGMMMGMFNMLSTV
SPGIMMIMGNMNSTV

SEQ ID NO: 197376 - protein, 15 aa, Artificial Sequence
  Description of Artificial Sequence: Synthetic peptide
  Seed: SPGMMMGMFNMLSTV
SPGIMMIMGNMSSTV

SEQ ID NO: 197377 - protein, 15 aa, Artificial Sequence
  Description of Artificial Sequence: Synthetic peptide
  Seed: SPGMMMGMFNMLSTV
SPGIMMIMGNMTSTV

SEQ ID NO: 197378 - protein, 15 aa, Artificial Sequence
  Description of Artificial Sequence: Synthetic peptide
  Seed: SPGMMMGMFNMLSTV
SPGIMMIMGNMVSTV

SEQ ID NO: 197379 - protein, 15 aa, Artificial Sequence
  Description of Artificial Sequence: Synthetic peptide
  Seed: SPGMMMGMFNMLSTV
SPGIMMIMGNMYSTV

SEQ ID NO: 197380 - protein, 15 aa, Artificial Sequence
  Description of Artificial Sequence: Synthetic peptide
  Seed: SPGMMMGMFNMLSTV
SPGIMMIMHNMASTV

SEQ ID NO: 197381 - protein, 15 aa, Artificial Sequence
  Description of Artificial Sequence: Synthetic peptide
  Seed: SPGMMMGMFNMLSTV
SPGIMMIMHNMGSTV

SEQ ID NO: 197382 - protein, 15 aa, Artificial Sequence
  Description of Artificial Sequence: Synthetic peptide
  Seed: SPGMMMGMFNMLSTV
SPGIMMIMHNMHSTV

SEQ ID NO: 197383 - protein, 15 aa, Artificial Sequence
  Description of Artificial Sequence: Synthetic peptide
  Seed: SPGMMMGMFNMLSTV
SPGIMMIMHNMISTV

SEQ ID NO: 197384 - protein, 15 aa, Artificial Sequence
  Description of Artificial Sequence: Synthetic peptide
  Seed: SPGMMMGMFNMLSTV
SPGIMMIMHNMLSTV

SEQ ID NO: 197385 - protein, 15 aa, Artificial Sequence
  Description of Artificial Sequence: Synthetic peptide
  Seed: SPGMMMGMFNMLSTV
SPGIMMIMHNMMSTV

SEQ ID NO: 197386 - protein, 15 aa, Artificial Sequence
  Description of Artificial Sequence: Synthetic peptide
  Seed: SPGMMMGMFNMLSTV
SPGIMMIMHNMNSTV

SEQ ID NO: 197387 - protein, 15 aa, Artificial Sequence
  Description of Artificial Sequence: Synthetic peptide
  Seed: SPGMMMGMFNMLSTV
SPGIMMIMHNMSSTV

SEQ ID NO: 197388 - protein, 15 aa, Artificial Sequence
  Description of Artificial Sequence: Synthetic peptide
  Seed: SPGMMMGMFNMLSTV
SPGIMMIMHNMTSTV

SEQ ID NO: 197389 - protein, 15 aa, Artificial Sequence
  Description of Artificial Sequence: Synthetic peptide
  Seed: SPGMMMGMFNMLSTV
SPGIMMIMHNMVSTV

SEQ ID NO: 197390 - protein, 15 aa, Artificial Sequence
  Description of Artificial Sequence: Synthetic peptide
  Seed: SPGMMMGMFNMLSTV
SPGIMMIMHNMYSTV

SEQ ID NO: 197391 - protein, 15 aa, Artificial Sequence
  Description of Artificial Sequence: Synthetic peptide
  Seed: SPGMMMGMFNMLSTV
SPGIMMIMINMVSTV

SEQ ID NO: 197392 - protein, 15 aa, Artificial Sequence
  Description of Artificial Sequence: Synthetic peptide
  Seed: SPGMMMGMFNMLSTV
SPGIMMIMKNMASTV

SEQ ID NO: 197393 - protein, 15 aa, Artificial Sequence
  Description of Artificial Sequence: Synthetic peptide
  Seed: SPGMMMGMFNMLSTV
SPGIMMIMKNMGSTV

SEQ ID NO: 197394 - protein, 15 aa, Artificial Sequence
  Description of Artificial Sequence: Synthetic peptide
  Seed: SPGMMMGMFNMLSTV
SPGIMMIMKNMISTV

SEQ ID NO: 197395 - protein, 15 aa, Artificial Sequence
  Description of Artificial Sequence: Synthetic peptide
  Seed: SPGMMMGMFNMLSTV
SPGIMMIMKNMLSTV

SEQ ID NO: 197396 - protein, 15 aa, Artificial Sequence
  Description of Artificial Sequence: Synthetic peptide
  Seed: SPGMMMGMFNMLSTV
SPGIMMIMKNMMSTV

SEQ ID NO: 197397 - protein, 15 aa, Artificial Sequence
  Description of Artificial Sequence: Synthetic peptide
  Seed: SPGMMMGMFNMLSTV
SPGIMMIMKNMNSTV

SEQ ID NO: 197398 - protein, 15 aa, Artificial Sequence
  Description of Artificial Sequence: Synthetic peptide
  Seed: SPGMMMGMFNMLSTV
SPGIMMIMKNMSSTV

SEQ ID NO: 197399 - protein, 15 aa, Artificial Sequence
  Description of Artificial Sequence: Synthetic peptide
  Seed: SPGMMMGMFNMLSTV
SPGIMMIMKNMTSTV

SEQ ID NO: 197400 - protein, 15 aa, Artificial Sequence
  Description of Artificial Sequence: Synthetic peptide
  Seed: SPGMMMGMFNMLSTV
SPGIMMIMKNMVSTV

SEQ ID NO: 197401 - protein, 15 aa, Artificial Sequence
  Description of Artificial Sequence: Synthetic peptide
  Seed: SPGMMMGMFNMLSTV
SPGIMMIMKNMYSTV

SEQ ID NO: 197402 - protein, 15 aa, Artificial Sequence
  Description of Artificial Sequence: Synthetic peptide
  Seed: SPGMMMGMFNMLSTV
SPGIMMIMNNMASTV

SEQ ID NO: 197403 - protein, 15 aa, Artificial Sequence
  Description of Artificial Sequence: Synthetic peptide
  Seed: SPGMMMGMFNMLSTV
SPGIMMIMNNMFSTV

SEQ ID NO: 197404 - protein, 15 aa, Artificial Sequence
  Description of Artificial Sequence: Synthetic peptide
  Seed: SPGMMMGMFNMLSTV
SPGIMMIMNNMGSTV

SEQ ID NO: 197405 - protein, 15 aa, Artificial Sequence
  Description of Artificial Sequence: Synthetic peptide
  Seed: SPGMMMGMFNMLSTV
SPGIMMIMNNMHSTV

SEQ ID NO: 197406 - protein, 15 aa, Artificial Sequence
  Description of Artificial Sequence: Synthetic peptide
  Seed: SPGMMMGMFNMLSTV
SPGIMMIMNNMISTV

SEQ ID NO: 197407 - protein, 15 aa, Artificial Sequence
  Description of Artificial Sequence: Synthetic peptide
  Seed: SPGMMMGMFNMLSTV
SPGIMMIMNNMLSTV

SEQ ID NO: 197408 - protein, 15 aa, Artificial Sequence
  Description of Artificial Sequence: Synthetic peptide
  Seed: SPGMMMGMFNMLSTV
SPGIMMIMNNMMSTV

SEQ ID NO: 197409 - protein, 15 aa, Artificial Sequence
  Description of Artificial Sequence: Synthetic peptide
  Seed: SPGMMMGMFNMLSTV
SPGIMMIMNNMNSTV

SEQ ID NO: 197410 - protein, 15 aa, Artificial Sequence
  Description of Artificial Sequence: Synthetic peptide
  Seed: SPGMMMGMFNMLSTV
SPGIMMIMNNMQSTV

SEQ ID NO: 197411 - protein, 15 aa, Artificial Sequence
  Description of Artificial Sequence: Synthetic peptide
  Seed: SPGMMMGMFNMLSTV
SPGIMMIMNNMRSTV

SEQ ID NO: 197412 - protein, 15 aa, Artificial Sequence
  Description of Artificial Sequence: Synthetic peptide
  Seed: SPGMMMGMFNMLSTV
SPGIMMIMNNMSSTV

SEQ ID NO: 197413 - protein, 15 aa, Artificial Sequence
  Description of Artificial Sequence: Synthetic peptide
  Seed: SPGMMMGMFNMLSTV
SPGIMMIMNNMTSTV

SEQ ID NO: 197414 - protein, 15 aa, Artificial Sequence
  Description of Artificial Sequence: Synthetic peptide
  Seed: SPGMMMGMFNMLSTV
SPGIMMIMNNMVSTV

SEQ ID NO: 197415 - protein, 15 aa, Artificial Sequence
  Description of Artificial Sequence: Synthetic peptide
  Seed: SPGMMMGMFNMLSTV
SPGIMMIMNNMYSTV

SEQ ID NO: 197416 - protein, 15 aa, Artificial Sequence
  Description of Artificial Sequence: Synthetic peptide
  Seed: SPGMMMGMFNMLSTV
SPGIMMIMPNMASTV

SEQ ID NO: 197417 - protein, 15 aa, Artificial Sequence
  Description of Artificial Sequence: Synthetic peptide
  Seed: SPGMMMGMFNMLSTV
SPGIMMIMPNMFSTV

SEQ ID NO: 197418 - protein, 15 aa, Artificial Sequence
  Description of Artificial Sequence: Synthetic peptide
  Seed: SPGMMMGMFNMLSTV
SPGIMMIMPNMGSTV

SEQ ID NO: 197419 - protein, 15 aa, Artificial Sequence
  Description of Artificial Sequence: Synthetic peptide
  Seed: SPGMMMGMFNMLSTV
SPGIMMIMPNMISTV

SEQ ID NO: 197420 - protein, 15 aa, Artificial Sequence
  Description of Artificial Sequence: Synthetic peptide
  Seed: SPGMMMGMFNMLSTV
SPGIMMIMPNMLSTV

SEQ ID NO: 197421 - protein, 15 aa, Artificial Sequence
  Description of Artificial Sequence: Synthetic peptide
  Seed: SPGMMMGMFNMLSTV
SPGIMMIMPNMMSTV

SEQ ID NO: 197422 - protein, 15 aa, Artificial Sequence
  Description of Artificial Sequence: Synthetic peptide
  Seed: SPGMMMGMFNMLSTV
SPGIMMIMPNMRSTV

SEQ ID NO: 197423 - protein, 15 aa, Artificial Sequence
  Description of Artificial Sequence: Synthetic peptide
  Seed: SPGMMMGMFNMLSTV
SPGIMMIMPNMSSTV

SEQ ID NO: 197424 - protein, 15 aa, Artificial Sequence
  Description of Artificial Sequence: Synthetic peptide
  Seed: SPGMMMGMFNMLSTV
SPGIMMIMPNMTSTV

SEQ ID NO: 197425 - protein, 15 aa, Artificial Sequence
  Description of Artificial Sequence: Synthetic peptide
  Seed: SPGMMMGMFNMLSTV
SPGIMMIMPNMVSTV

SEQ ID NO: 197426 - protein, 15 aa, Artificial Sequence
  Description of Artificial Sequence: Synthetic peptide
  Seed: SPGMMMGMFNMLSTV
SPGIMMIMPNMYSTV

SEQ ID NO: 197427 - protein, 15 aa, Artificial Sequence
  Description of Artificial Sequence: Synthetic peptide
  Seed: SPGMMMGMFNMLSTV
SPGIMMIMQNMGSTV

SEQ ID NO: 197428 - protein, 15 aa, Artificial Sequence
  Description of Artificial Sequence: Synthetic peptide
  Seed: SPGMMMGMFNMLSTV
SPGIMMIMQNMVSTV

SEQ ID NO: 197429 - protein, 15 aa, Artificial Sequence
  Description of Artificial Sequence: Synthetic peptide
  Seed: SPGMMMGMFNMLSTV
SPGIMMIMRNMASTV

SEQ ID NO: 197430 - protein, 15 aa, Artificial Sequence
  Description of Artificial Sequence: Synthetic peptide
  Seed: SPGMMMGMFNMLSTV
SPGIMMIMRNMGSTV

SEQ ID NO: 197431 - protein, 15 aa, Artificial Sequence
  Description of Artificial Sequence: Synthetic peptide
  Seed: SPGMMMGMFNMLSTV
SPGIMMIMRNMHSTV

SEQ ID NO: 197432 - protein, 15 aa, Artificial Sequence
  Description of Artificial Sequence: Synthetic peptide
  Seed: SPGMMMGMFNMLSTV
SPGIMMIMRNMISTV

SEQ ID NO: 197433 - protein, 15 aa, Artificial Sequence
  Description of Artificial Sequence: Synthetic peptide
  Seed: SPGMMMGMFNMLSTV
SPGIMMIMRNMLSTV

SEQ ID NO: 197434 - protein, 15 aa, Artificial Sequence
  Description of Artificial Sequence: Synthetic peptide
  Seed: SPGMMMGMFNMLSTV
SPGIMMIMRNMMSTV

SEQ ID NO: 197435 - protein, 15 aa, Artificial Sequence
  Description of Artificial Sequence: Synthetic peptide
  Seed: SPGMMMGMFNMLSTV
SPGIMMIMRNMNSTV

SEQ ID NO: 197436 - protein, 15 aa, Artificial Sequence
  Description of Artificial Sequence: Synthetic peptide
  Seed: SPGMMMGMFNMLSTV
SPGIMMIMRNMPSTV

SEQ ID NO: 197437 - protein, 15 aa, Artificial Sequence
  Description of Artificial Sequence: Synthetic peptide
  Seed: SPGMMMGMFNMLSTV
SPGIMMIMRNMSSTV

SEQ ID NO: 197438 - protein, 15 aa, Artificial Sequence
  Description of Artificial Sequence: Synthetic peptide
  Seed: SPGMMMGMFNMLSTV
SPGIMMIMRNMTSTV

SEQ ID NO: 197439 - protein, 15 aa, Artificial Sequence
  Description of Artificial Sequence: Synthetic peptide
  Seed: SPGMMMGMFNMLSTV
SPGIMMIMRNMVSTV

SEQ ID NO: 197440 - protein, 15 aa, Artificial Sequence
  Description of Artificial Sequence: Synthetic peptide
  Seed: SPGMMMGMFNMLSTV
SPGIMMIMRNMYSTV

SEQ ID NO: 197441 - protein, 15 aa, Artificial Sequence
  Description of Artificial Sequence: Synthetic peptide
  Seed: SPGMMMGMFNMLSTV
SPGIMMIMSNMASTV

SEQ ID NO: 197442 - protein, 15 aa, Artificial Sequence
  Description of Artificial Sequence: Synthetic peptide
  Seed: SPGMMMGMFNMLSTV
SPGIMMIMSNMFSTV

SEQ ID NO: 197443 - protein, 15 aa, Artificial Sequence
  Description of Artificial Sequence: Synthetic peptide
  Seed: SPGMMMGMFNMLSTV
SPGIMMIMSNMGSTV

SEQ ID NO: 197444 - protein, 15 aa, Artificial Sequence
  Description of Artificial Sequence: Synthetic peptide
  Seed: SPGMMMGMFNMLSTV
SPGIMMIMSNMHSTV

SEQ ID NO: 197445 - protein, 15 aa, Artificial Sequence
  Description of Artificial Sequence: Synthetic peptide
  Seed: SPGMMMGMFNMLSTV
SPGIMMIMSNMISTV

SEQ ID NO: 197446 - protein, 15 aa, Artificial Sequence
  Description of Artificial Sequence: Synthetic peptide
  Seed: SPGMMMGMFNMLSTV
SPGIMMIMSNMLSTV

SEQ ID NO: 197447 - protein, 15 aa, Artificial Sequence
  Description of Artificial Sequence: Synthetic peptide
  Seed: SPGMMMGMFNMLSTV
SPGIMMIMSNMMSTV

SEQ ID NO: 197448 - protein, 15 aa, Artificial Sequence
  Description of Artificial Sequence: Synthetic peptide
  Seed: SPGMMMGMFNMLSTV
SPGIMMIMSNMNSTV

SEQ ID NO: 197449 - protein, 15 aa, Artificial Sequence
  Description of Artificial Sequence: Synthetic peptide
  Seed: SPGMMMGMFNMLSTV
SPGIMMIMSNMRSTV

SEQ ID NO: 197450 - protein, 15 aa, Artificial Sequence
  Description of Artificial Sequence: Synthetic peptide
  Seed: SPGMMMGMFNMLSTV
SPGIMMIMSNMSSTV

SEQ ID NO: 197451 - protein, 15 aa, Artificial Sequence
  Description of Artificial Sequence: Synthetic peptide
  Seed: SPGMMMGMFNMLSTV
SPGIMMIMSNMTSTV

SEQ ID NO: 197452 - protein, 15 aa, Artificial Sequence
  Description of Artificial Sequence: Synthetic peptide
  Seed: SPGMMMGMFNMLSTV
SPGIMMIMSNMVSTV

SEQ ID NO: 197453 - protein, 15 aa, Artificial Sequence
  Description of Artificial Sequence: Synthetic peptide
  Seed: SPGMMMGMFNMLSTV
SPGIMMIMSNMYSTV

SEQ ID NO: 197454 - protein, 15 aa, Artificial Sequence
  Description of Artificial Sequence: Synthetic peptide
  Seed: SPGMMMGMFNMLSTV
SPGIMMIMTNMASTV

SEQ ID NO: 197455 - protein, 15 aa, Artificial Sequence
  Description of Artificial Sequence: Synthetic peptide
  Seed: SPGMMMGMFNMLSTV
SPGIMMIMTNMGSTV

SEQ ID NO: 197456 - protein, 15 aa, Artificial Sequence
  Description of Artificial Sequence: Synthetic peptide
  Seed: SPGMMMGMFNMLSTV
SPGIMMIMTNMHSTV

SEQ ID NO: 197457 - protein, 15 aa, Artificial Sequence
  Description of Artificial Sequence: Synthetic peptide
  Seed: SPGMMMGMFNMLSTV
SPGIMMIMTNMISTV

SEQ ID NO: 197458 - protein, 15 aa, Artificial Sequence
  Description of Artificial Sequence: Synthetic peptide
  Seed: SPGMMMGMFNMLSTV
SPGIMMIMTNMLSTV

SEQ ID NO: 197459 - protein, 15 aa, Artificial Sequence
  Description of Artificial Sequence: Synthetic peptide
  Seed: SPGMMMGMFNMLSTV
SPGIMMIMTNMMSTV

SEQ ID NO: 197460 - protein, 15 aa, Artificial Sequence
  Description of Artificial Sequence: Synthetic peptide
  Seed: SPGMMMGMFNMLSTV
SPGIMMIMTNMNSTV

SEQ ID NO: 197461 - protein, 15 aa, Artificial Sequence
  Description of Artificial Sequence: Synthetic peptide
  Seed: SPGMMMGMFNMLSTV
SPGIMMIMTNMSSTV

SEQ ID NO: 197462 - protein, 15 aa, Artificial Sequence
  Description of Artificial Sequence: Synthetic peptide
  Seed: SPGMMMGMFNMLSTV
SPGIMMIMTNMTSTV

SEQ ID NO: 197463 - protein, 15 aa, Artificial Sequence
  Description of Artificial Sequence: Synthetic peptide
  Seed: SPGMMMGMFNMLSTV
SPGIMMIMTNMVSTV

SEQ ID NO: 197464 - protein, 15 aa, Artificial Sequence
  Description of Artificial Sequence: Synthetic peptide
  Seed: SPGMMMGMFNMLSTV
SPGIMMIMTNMYSTV

SEQ ID NO: 197465 - protein, 15 aa, Artificial Sequence
  Description of Artificial Sequence: Synthetic peptide
  Seed: SPGMMMGMFNMLSTV
SPGIMMIMVNMVSTV

SEQ ID NO: 197466 - protein, 15 aa, Artificial Sequence
  Description of Artificial Sequence: Synthetic peptide
  Seed: SPGMMMGMFNMLSTV
SPGIMMIMWNMLSTV

SEQ ID NO: 197467 - protein, 15 aa, Artificial Sequence
  Description of Artificial Sequence: Synthetic peptide
  Seed: SPGMMMGMFNMLSTV
SPGIMMIMWNMYSTV

SEQ ID NO: 197468 - protein, 15 aa, Artificial Sequence
  Description of Artificial Sequence: Synthetic peptide
  Seed: SPGMMMGMFNMLSTV
SPGIMMIMYNMLSTV

SEQ ID NO: 197469 - protein, 15 aa, Artificial Sequence
  Description of Artificial Sequence: Synthetic peptide
  Seed: SPGMMMGMFNMLSTV
SPGIMMIMYNMYSTV

SEQ ID NO: 197470 - protein, 15 aa, Artificial Sequence
  Description of Artificial Sequence: Synthetic peptide
  Seed: SPGMMMGMFNMLSTV
SPGIMMKMANMFSTV

SEQ ID NO: 197471 - protein, 15 aa, Artificial Sequence
  Description of Artificial Sequence: Synthetic peptide
  Seed: SPGMMMGMFNMLSTV
SPGIMMKMANMISTV

SEQ ID NO: 197472 - protein, 15 aa, Artificial Sequence
  Description of Artificial Sequence: Synthetic peptide
  Seed: SPGMMMGMFNMLSTV
SPGIMMKMANMLSTV

SEQ ID NO: 197473 - protein, 15 aa, Artificial Sequence
  Description of Artificial Sequence: Synthetic peptide
  Seed: SPGMMMGMFNMLSTV
SPGIMMKMANMVSTV

SEQ ID NO: 197474 - protein, 15 aa, Artificial Sequence
  Description of Artificial Sequence: Synthetic peptide
  Seed: SPGMMMGMFNMLSTV
SPGIMMKMANMYSTV

SEQ ID NO: 197475 - protein, 15 aa, Artificial Sequence
  Description of Artificial Sequence: Synthetic peptide
  Seed: SPGMMMGMFNMLSTV
SPGIMMKMFNMFSTV

SEQ ID NO: 197476 - protein, 15 aa, Artificial Sequence
  Description of Artificial Sequence: Synthetic peptide
  Seed: SPGMMMGMFNMLSTV
SPGIMMKMFNMISTV

SEQ ID NO: 197477 - protein, 15 aa, Artificial Sequence
  Description of Artificial Sequence: Synthetic peptide
  Seed: SPGMMMGMFNMLSTV
SPGIMMKMFNMLSTV

SEQ ID NO: 197478 - protein, 15 aa, Artificial Sequence
  Description of Artificial Sequence: Synthetic peptide
  Seed: SPGMMMGMFNMLSTV
SPGIMMKMFNMMSTV

SEQ ID NO: 197479 - protein, 15 aa, Artificial Sequence
  Description of Artificial Sequence: Synthetic peptide
  Seed: SPGMMMGMFNMLSTV
SPGIMMKMFNMVSTV

SEQ ID NO: 197480 - protein, 15 aa, Artificial Sequence
  Description of Artificial Sequence: Synthetic peptide
  Seed: SPGMMMGMFNMLSTV
SPGIMMKMGNMISTV

SEQ ID NO: 197481 - protein, 15 aa, Artificial Sequence
  Description of Artificial Sequence: Synthetic peptide
  Seed: SPGMMMGMFNMLSTV
SPGIMMKMGNMVSTV

SEQ ID NO: 197482 - protein, 15 aa, Artificial Sequence
  Description of Artificial Sequence: Synthetic peptide
  Seed: SPGMMMGMFNMLSTV
SPGIMMKMNNMASTV

SEQ ID NO: 197483 - protein, 15 aa, Artificial Sequence
  Description of Artificial Sequence: Synthetic peptide
  Seed: SPGMMMGMFNMLSTV
SPGIMMKMNNMFSTV

SEQ ID NO: 197484 - protein, 15 aa, Artificial Sequence
  Description of Artificial Sequence: Synthetic peptide
  Seed: SPGMMMGMFNMLSTV
SPGIMMKMNNMISTV

SEQ ID NO: 197485 - protein, 15 aa, Artificial Sequence
  Description of Artificial Sequence: Synthetic peptide
  Seed: SPGMMMGMFNMLSTV
SPGIMMKMNNMLSTV

SEQ ID NO: 197486 - protein, 15 aa, Artificial Sequence
  Description of Artificial Sequence: Synthetic peptide
  Seed: SPGMMMGMFNMLSTV
SPGIMMKMNNMMSTV

SEQ ID NO: 197487 - protein, 15 aa, Artificial Sequence
  Description of Artificial Sequence: Synthetic peptide
  Seed: SPGMMMGMFNMLSTV
SPGIMMKMNNMVSTV

SEQ ID NO: 197488 - protein, 15 aa, Artificial Sequence
  Description of Artificial Sequence: Synthetic peptide
  Seed: SPGMMMGMFNMLSTV
SPGIMMKMNNMYSTV

SEQ ID NO: 197489 - protein, 15 aa, Artificial Sequence
  Description of Artificial Sequence: Synthetic peptide
  Seed: SPGMMMGMFNMLSTV
SPGIMMKMPNMISTV

SEQ ID NO: 197490 - protein, 15 aa, Artificial Sequence
  Description of Artificial Sequence: Synthetic peptide
  Seed: SPGMMMGMFNMLSTV
SPGIMMKMPNMVSTV

SEQ ID NO: 197491 - protein, 15 aa, Artificial Sequence
  Description of Artificial Sequence: Synthetic peptide
  Seed: SPGMMMGMFNMLSTV
SPGIMMKMSNMFSTV

SEQ ID NO: 197492 - protein, 15 aa, Artificial Sequence
  Description of Artificial Sequence: Synthetic peptide
  Seed: SPGMMMGMFNMLSTV
SPGIMMKMSNMISTV

SEQ ID NO: 197493 - protein, 15 aa, Artificial Sequence
  Description of Artificial Sequence: Synthetic peptide
  Seed: SPGMMMGMFNMLSTV
SPGIMMKMSNMLSTV

SEQ ID NO: 197494 - protein, 15 aa, Artificial Sequence
  Description of Artificial Sequence: Synthetic peptide
  Seed: SPGMMMGMFNMLSTV
SPGIMMKMSNMVSTV

SEQ ID NO: 197495 - protein, 15 aa, Artificial Sequence
  Description of Artificial Sequence: Synthetic peptide
  Seed: SPGMMMGMFNMLSTV
SPGIMMKMTNMISTV

SEQ ID NO: 197496 - protein, 15 aa, Artificial Sequence
  Description of Artificial Sequence: Synthetic peptide
  Seed: SPGMMMGMFNMLSTV
SPGIMMKMTNMVSTV

SEQ ID NO: 197497 - protein, 15 aa, Artificial Sequence
  Description of Artificial Sequence: Synthetic peptide
  Seed: SPGMMMGMFNMLSTV
SPGIMMLMANMASTV

SEQ ID NO: 197498 - protein, 15 aa, Artificial Sequence
  Description of Artificial Sequence: Synthetic peptide
  Seed: SPGMMMGMFNMLSTV
SPGIMMLMANMGSTV

SEQ ID NO: 197499 - protein, 15 aa, Artificial Sequence
  Description of Artificial Sequence: Synthetic peptide
  Seed: SPGMMMGMFNMLSTV
SPGIMMLMANMISTV

SEQ ID NO: 197500 - protein, 15 aa, Artificial Sequence
  Description of Artificial Sequence: Synthetic peptide
  Seed: SPGMMMGMFNMLSTV
SPGIMMLMANMLSTV

SEQ ID NO: 197501 - protein, 15 aa, Artificial Sequence
  Description of Artificial Sequence: Synthetic peptide
  Seed: SPGMMMGMFNMLSTV
SPGIMMLMANMMSTV

SEQ ID NO: 197502 - protein, 15 aa, Artificial Sequence
  Description of Artificial Sequence: Synthetic peptide
  Seed: SPGMMMGMFNMLSTV
SPGIMMLMANMSSTV

SEQ ID NO: 197503 - protein, 15 aa, Artificial Sequence
  Description of Artificial Sequence: Synthetic peptide
  Seed: SPGMMMGMFNMLSTV
SPGIMMLMANMTSTV

SEQ ID NO: 197504 - protein, 15 aa, Artificial Sequence
  Description of Artificial Sequence: Synthetic peptide
  Seed: SPGMMMGMFNMLSTV
SPGIMMLMANMVSTV

SEQ ID NO: 197505 - protein, 15 aa, Artificial Sequence
  Description of Artificial Sequence: Synthetic peptide
  Seed: SPGMMMGMFNMLSTV
SPGIMMLMANMYSTV

SEQ ID NO: 197506 - protein, 15 aa, Artificial Sequence
  Description of Artificial Sequence: Synthetic peptide
  Seed: SPGMMMGMFNMLSTV
SPGIMMLMFNMFSTV

SEQ ID NO: 197507 - protein, 15 aa, Artificial Sequence
  Description of Artificial Sequence: Synthetic peptide
  Seed: SPGMMMGMFNMLSTV
SPGIMMLMFNMYSTV

SEQ ID NO: 197508 - protein, 15 aa, Artificial Sequence
  Description of Artificial Sequence: Synthetic peptide
  Seed: SPGMMMGMFNMLSTV
SPGIMMLMGNMASTV

SEQ ID NO: 197509 - protein, 15 aa, Artificial Sequence
  Description of Artificial Sequence: Synthetic peptide
  Seed: SPGMMMGMFNMLSTV
SPGIMMLMGNMISTV

SEQ ID NO: 197510 - protein, 15 aa, Artificial Sequence
  Description of Artificial Sequence: Synthetic peptide
  Seed: SPGMMMGMFNMLSTV
SPGIMMLMGNMVSTV

SEQ ID NO: 197511 - protein, 15 aa, Artificial Sequence
  Description of Artificial Sequence: Synthetic peptide
  Seed: SPGMMMGMFNMLSTV
SPGIMMLMHNMASTV

SEQ ID NO: 197512 - protein, 15 aa, Artificial Sequence
  Description of Artificial Sequence: Synthetic peptide
  Seed: SPGMMMGMFNMLSTV
SPGIMMLMHNMGSTV

SEQ ID NO: 197513 - protein, 15 aa, Artificial Sequence
  Description of Artificial Sequence: Synthetic peptide
  Seed: SPGMMMGMFNMLSTV
SPGIMMLMHNMISTV

SEQ ID NO: 197514 - protein, 15 aa, Artificial Sequence
  Description of Artificial Sequence: Synthetic peptide
  Seed: SPGMMMGMFNMLSTV
SPGIMMLMHNMSSTV

SEQ ID NO: 197515 - protein, 15 aa, Artificial Sequence
  Description of Artificial Sequence: Synthetic peptide
  Seed: SPGMMMGMFNMLSTV
SPGIMMLMHNMTSTV

SEQ ID NO: 197516 - protein, 15 aa, Artificial Sequence
  Description of Artificial Sequence: Synthetic peptide
  Seed: SPGMMMGMFNMLSTV
SPGIMMLMHNMVSTV

SEQ ID NO: 197517 - protein, 15 aa, Artificial Sequence
  Description of Artificial Sequence: Synthetic peptide
  Seed: SPGMMMGMFNMLSTV
SPGIMMLMKNMASTV

SEQ ID NO: 197518 - protein, 15 aa, Artificial Sequence
  Description of Artificial Sequence: Synthetic peptide
  Seed: SPGMMMGMFNMLSTV
SPGIMMLMKNMISTV

SEQ ID NO: 197519 - protein, 15 aa, Artificial Sequence
  Description of Artificial Sequence: Synthetic peptide
  Seed: SPGMMMGMFNMLSTV
SPGIMMLMKNMNSTV

SEQ ID NO: 197520 - protein, 15 aa, Artificial Sequence
  Description of Artificial Sequence: Synthetic peptide
  Seed: SPGMMMGMFNMLSTV
SPGIMMLMKNMPSTV

SEQ ID NO: 197521 - protein, 15 aa, Artificial Sequence
  Description of Artificial Sequence: Synthetic peptide
  Seed: SPGMMMGMFNMLSTV
SPGIMMLMKNMSSTV

SEQ ID NO: 197522 - protein, 15 aa, Artificial Sequence
  Description of Artificial Sequence: Synthetic peptide
  Seed: SPGMMMGMFNMLSTV
SPGIMMLMKNMVSTV

SEQ ID NO: 197523 - protein, 15 aa, Artificial Sequence
  Description of Artificial Sequence: Synthetic peptide
  Seed: SPGMMMGMFNMLSTV
SPGIMMLMNNMASTV

SEQ ID NO: 197524 - protein, 15 aa, Artificial Sequence
  Description of Artificial Sequence: Synthetic peptide
  Seed: SPGMMMGMFNMLSTV
SPGIMMLMNNMFSTV

SEQ ID NO: 197525 - protein, 15 aa, Artificial Sequence
  Description of Artificial Sequence: Synthetic peptide
  Seed: SPGMMMGMFNMLSTV
SPGIMMLMNNMGSTV

SEQ ID NO: 197526 - protein, 15 aa, Artificial Sequence
  Description of Artificial Sequence: Synthetic peptide
  Seed: SPGMMMGMFNMLSTV
SPGIMMLMNNMHSTV

SEQ ID NO: 197527 - protein, 15 aa, Artificial Sequence
  Description of Artificial Sequence: Synthetic peptide
  Seed: SPGMMMGMFNMLSTV
SPGIMMLMNNMISTV

SEQ ID NO: 197528 - protein, 15 aa, Artificial Sequence
  Description of Artificial Sequence: Synthetic peptide
  Seed: SPGMMMGMFNMLSTV
SPGIMMLMNNMLSTV

SEQ ID NO: 197529 - protein, 15 aa, Artificial Sequence
  Description of Artificial Sequence: Synthetic peptide
  Seed: SPGMMMGMFNMLSTV
SPGIMMLMNNMMSTV

SEQ ID NO: 197530 - protein, 15 aa, Artificial Sequence
  Description of Artificial Sequence: Synthetic peptide
  Seed: SPGMMMGMFNMLSTV
SPGIMMLMNNMNSTV

SEQ ID NO: 197531 - protein, 15 aa, Artificial Sequence
  Description of Artificial Sequence: Synthetic peptide
  Seed: SPGMMMGMFNMLSTV
SPGIMMLMNNMRSTV

SEQ ID NO: 197532 - protein, 15 aa, Artificial Sequence
  Description of Artificial Sequence: Synthetic peptide
  Seed: SPGMMMGMFNMLSTV
SPGIMMLMNNMSSTV

SEQ ID NO: 197533 - protein, 15 aa, Artificial Sequence
  Description of Artificial Sequence: Synthetic peptide
  Seed: SPGMMMGMFNMLSTV
SPGIMMLMNNMTSTV

SEQ ID NO: 197534 - protein, 15 aa, Artificial Sequence
  Description of Artificial Sequence: Synthetic peptide
  Seed: SPGMMMGMFNMLSTV
SPGIMMLMNNMVSTV

SEQ ID NO: 197535 - protein, 15 aa, Artificial Sequence
  Description of Artificial Sequence: Synthetic peptide
  Seed: SPGMMMGMFNMLSTV
SPGIMMLMNNMYSTV

SEQ ID NO: 197536 - protein, 15 aa, Artificial Sequence
  Description of Artificial Sequence: Synthetic peptide
  Seed: SPGMMMGMFNMLSTV
SPGIMMLMPNMASTV

SEQ ID NO: 197537 - protein, 15 aa, Artificial Sequence
  Description of Artificial Sequence: Synthetic peptide
  Seed: SPGMMMGMFNMLSTV
SPGIMMLMPNMISTV

SEQ ID NO: 197538 - protein, 15 aa, Artificial Sequence
  Description of Artificial Sequence: Synthetic peptide
  Seed: SPGMMMGMFNMLSTV
SPGIMMLMPNMLSTV

SEQ ID NO: 197539 - protein, 15 aa, Artificial Sequence
  Description of Artificial Sequence: Synthetic peptide
  Seed: SPGMMMGMFNMLSTV
SPGIMMLMPNMMSTV

SEQ ID NO: 197540 - protein, 15 aa, Artificial Sequence
  Description of Artificial Sequence: Synthetic peptide
  Seed: SPGMMMGMFNMLSTV
SPGIMMLMPNMSSTV

SEQ ID NO: 197541 - protein, 15 aa, Artificial Sequence
  Description of Artificial Sequence: Synthetic peptide
  Seed: SPGMMMGMFNMLSTV
SPGIMMLMPNMTSTV

SEQ ID NO: 197542 - protein, 15 aa, Artificial Sequence
  Description of Artificial Sequence: Synthetic peptide
  Seed: SPGMMMGMFNMLSTV
SPGIMMLMPNMVSTV

SEQ ID NO: 197543 - protein, 15 aa, Artificial Sequence
  Description of Artificial Sequence: Synthetic peptide
  Seed: SPGMMMGMFNMLSTV
SPGIMMLMPNMYSTV

SEQ ID NO: 197544 - protein, 15 aa, Artificial Sequence
  Description of Artificial Sequence: Synthetic peptide
  Seed: SPGMMMGMFNMLSTV
SPGIMMLMRNMASTV

SEQ ID NO: 197545 - protein, 15 aa, Artificial Sequence
  Description of Artificial Sequence: Synthetic peptide
  Seed: SPGMMMGMFNMLSTV
SPGIMMLMRNMGSTV

SEQ ID NO: 197546 - protein, 15 aa, Artificial Sequence
  Description of Artificial Sequence: Synthetic peptide
  Seed: SPGMMMGMFNMLSTV
SPGIMMLMRNMISTV

SEQ ID NO: 197547 - protein, 15 aa, Artificial Sequence
  Description of Artificial Sequence: Synthetic peptide
  Seed: SPGMMMGMFNMLSTV
SPGIMMLMRNMNSTV

SEQ ID NO: 197548 - protein, 15 aa, Artificial Sequence
  Description of Artificial Sequence: Synthetic peptide
  Seed: SPGMMMGMFNMLSTV
SPGIMMLMRNMPSTV

SEQ ID NO: 197549 - protein, 15 aa, Artificial Sequence
  Description of Artificial Sequence: Synthetic peptide
  Seed: SPGMMMGMFNMLSTV
SPGIMMLMRNMSSTV

SEQ ID NO: 197550 - protein, 15 aa, Artificial Sequence
  Description of Artificial Sequence: Synthetic peptide
  Seed: SPGMMMGMFNMLSTV
SPGIMMLMRNMTSTV

SEQ ID NO: 197551 - protein, 15 aa, Artificial Sequence
  Description of Artificial Sequence: Synthetic peptide
  Seed: SPGMMMGMFNMLSTV
SPGIMMLMRNMVSTV

SEQ ID NO: 197552 - protein, 15 aa, Artificial Sequence
  Description of Artificial Sequence: Synthetic peptide
  Seed: SPGMMMGMFNMLSTV
SPGIMMLMSNMASTV

SEQ ID NO: 197553 - protein, 15 aa, Artificial Sequence
  Description of Artificial Sequence: Synthetic peptide
  Seed: SPGMMMGMFNMLSTV
SPGIMMLMSNMGSTV

SEQ ID NO: 197554 - protein, 15 aa, Artificial Sequence
  Description of Artificial Sequence: Synthetic peptide
  Seed: SPGMMMGMFNMLSTV
SPGIMMLMSNMISTV

SEQ ID NO: 197555 - protein, 15 aa, Artificial Sequence
  Description of Artificial Sequence: Synthetic peptide
  Seed: SPGMMMGMFNMLSTV
SPGIMMLMSNMSSTV

SEQ ID NO: 197556 - protein, 15 aa, Artificial Sequence
  Description of Artificial Sequence: Synthetic peptide
  Seed: SPGMMMGMFNMLSTV
SPGIMMLMSNMTSTV

SEQ ID NO: 197557 - protein, 15 aa, Artificial Sequence
  Description of Artificial Sequence: Synthetic peptide
  Seed: SPGMMMGMFNMLSTV
SPGIMMLMSNMVSTV

SEQ ID NO: 197558 - protein, 15 aa, Artificial Sequence
  Description of Artificial Sequence: Synthetic peptide
  Seed: SPGMMMGMFNMLSTV
SPGIMMLMTNMASTV

SEQ ID NO: 197559 - protein, 15 aa, Artificial Sequence
  Description of Artificial Sequence: Synthetic peptide
  Seed: SPGMMMGMFNMLSTV
SPGIMMLMTNMISTV

SEQ ID NO: 197560 - protein, 15 aa, Artificial Sequence
  Description of Artificial Sequence: Synthetic peptide
  Seed: SPGMMMGMFNMLSTV
SPGIMMLMTNMSSTV

SEQ ID NO: 197561 - protein, 15 aa, Artificial Sequence
  Description of Artificial Sequence: Synthetic peptide
  Seed: SPGMMMGMFNMLSTV
SPGIMMLMTNMVSTV

SEQ ID NO: 197562 - protein, 15 aa, Artificial Sequence
  Description of Artificial Sequence: Synthetic peptide
  Seed: SPGMMMGMFNMLSTV
SPGIMMLMWNMLSTV

SEQ ID NO: 197563 - protein, 15 aa, Artificial Sequence
  Description of Artificial Sequence: Synthetic peptide
  Seed: SPGMMMGMFNMLSTV
SPGIMMLMYNMLSTV

SEQ ID NO: 197564 - protein, 15 aa, Artificial Sequence
  Description of Artificial Sequence: Synthetic peptide
  Seed: SPGMMMGMFNMLSTV
SPGIMMLMYNMYSTV

SEQ ID NO: 197565 - protein, 15 aa, Artificial Sequence
  Description of Artificial Sequence: Synthetic peptide
  Seed: SPGMMMGMFNMLSTV
SPGIMMMMANMASTV

SEQ ID NO: 197566 - protein, 15 aa, Artificial Sequence
  Description of Artificial Sequence: Synthetic peptide
  Seed: SPGMMMGMFNMLSTV
SPGIMMMMANMISTV

SEQ ID NO: 197567 - protein, 15 aa, Artificial Sequence
  Description of Artificial Sequence: Synthetic peptide
  Seed: SPGMMMGMFNMLSTV
SPGIMMMMANMLSTV

SEQ ID NO: 197568 - protein, 15 aa, Artificial Sequence
  Description of Artificial Sequence: Synthetic peptide
  Seed: SPGMMMGMFNMLSTV
SPGIMMMMANMMSTV

SEQ ID NO: 197569 - protein, 15 aa, Artificial Sequence
  Description of Artificial Sequence: Synthetic peptide
  Seed: SPGMMMGMFNMLSTV
SPGIMMMMANMNSTV

SEQ ID NO: 197570 - protein, 15 aa, Artificial Sequence
  Description of Artificial Sequence: Synthetic peptide
  Seed: SPGMMMGMFNMLSTV
SPGIMMMMANMSSTV

SEQ ID NO: 197571 - protein, 15 aa, Artificial Sequence
  Description of Artificial Sequence: Synthetic peptide
  Seed: SPGMMMGMFNMLSTV
SPGIMMMMANMTSTV

SEQ ID NO: 197572 - protein, 15 aa, Artificial Sequence
  Description of Artificial Sequence: Synthetic peptide
  Seed: SPGMMMGMFNMLSTV
SPGIMMMMANMVSTV

SEQ ID NO: 197573 - protein, 15 aa, Artificial Sequence
  Description of Artificial Sequence: Synthetic peptide
  Seed: SPGMMMGMFNMLSTV
SPGIMMMMANMYSTV

SEQ ID NO: 197574 - protein, 15 aa, Artificial Sequence
  Description of Artificial Sequence: Synthetic peptide
  Seed: SPGMMMGMFNMLSTV
SPGIMMMMFNMFSTV

SEQ ID NO: 197575 - protein, 15 aa, Artificial Sequence
  Description of Artificial Sequence: Synthetic peptide
  Seed: SPGMMMGMFNMLSTV
SPGIMMMMGNMISTV

SEQ ID NO: 197576 - protein, 15 aa, Artificial Sequence
  Description of Artificial Sequence: Synthetic peptide
  Seed: SPGMMMGMFNMLSTV
SPGIMMMMGNMVSTV

SEQ ID NO: 197577 - protein, 15 aa, Artificial Sequence
  Description of Artificial Sequence: Synthetic peptide
  Seed: SPGMMMGMFNMLSTV
SPGIMMMMHNMASTV

SEQ ID NO: 197578 - protein, 15 aa, Artificial Sequence
  Description of Artificial Sequence: Synthetic peptide
  Seed: SPGMMMGMFNMLSTV
SPGIMMMMHNMISTV

SEQ ID NO: 197579 - protein, 15 aa, Artificial Sequence
  Description of Artificial Sequence: Synthetic peptide
  Seed: SPGMMMGMFNMLSTV
SPGIMMMMHNMVSTV

SEQ ID NO: 197580 - protein, 15 aa, Artificial Sequence
  Description of Artificial Sequence: Synthetic peptide
  Seed: SPGMMMGMFNMLSTV
SPGIMMMMKNMASTV

SEQ ID NO: 197581 - protein, 15 aa, Artificial Sequence
  Description of Artificial Sequence: Synthetic peptide
  Seed: SPGMMMGMFNMLSTV
SPGIMMMMKNMVSTV

SEQ ID NO: 197582 - protein, 15 aa, Artificial Sequence
  Description of Artificial Sequence: Synthetic peptide
  Seed: SPGMMMGMFNMLSTV
SPGIMMMMNNMASTV

SEQ ID NO: 197583 - protein, 15 aa, Artificial Sequence
  Description of Artificial Sequence: Synthetic peptide
  Seed: SPGMMMGMFNMLSTV
SPGIMMMMNNMFSTV

SEQ ID NO: 197584 - protein, 15 aa, Artificial Sequence
  Description of Artificial Sequence: Synthetic peptide
  Seed: SPGMMMGMFNMLSTV
SPGIMMMMNNMHSTV

SEQ ID NO: 197585 - protein, 15 aa, Artificial Sequence
  Description of Artificial Sequence: Synthetic peptide
  Seed: SPGMMMGMFNMLSTV
SPGIMMMMNNMISTV

SEQ ID NO: 197586 - protein, 15 aa, Artificial Sequence
  Description of Artificial Sequence: Synthetic peptide
  Seed: SPGMMMGMFNMLSTV
SPGIMMMMNNMLSTV

SEQ ID NO: 197587 - protein, 15 aa, Artificial Sequence
  Description of Artificial Sequence: Synthetic peptide
  Seed: SPGMMMGMFNMLSTV
SPGIMMMMNNMMSTV

SEQ ID NO: 197588 - protein, 15 aa, Artificial Sequence
  Description of Artificial Sequence: Synthetic peptide
  Seed: SPGMMMGMFNMLSTV
SPGIMMMMNNMNSTV

SEQ ID NO: 197589 - protein, 15 aa, Artificial Sequence
  Description of Artificial Sequence: Synthetic peptide
  Seed: SPGMMMGMFNMLSTV
SPGIMMMMNNMSSTV

SEQ ID NO: 197590 - protein, 15 aa, Artificial Sequence
  Description of Artificial Sequence: Synthetic peptide
  Seed: SPGMMMGMFNMLSTV
SPGIMMMMNNMTSTV

SEQ ID NO: 197591 - protein, 15 aa, Artificial Sequence
  Description of Artificial Sequence: Synthetic peptide
  Seed: SPGMMMGMFNMLSTV
SPGIMMMMNNMVSTV

SEQ ID NO: 197592 - protein, 15 aa, Artificial Sequence
  Description of Artificial Sequence: Synthetic peptide
  Seed: SPGMMMGMFNMLSTV
SPGIMMMMNNMYSTV

SEQ ID NO: 197593 - protein, 15 aa, Artificial Sequence
  Description of Artificial Sequence: Synthetic peptide
  Seed: SPGMMMGMFNMLSTV
SPGIMMMMPNMASTV

SEQ ID NO: 197594 - protein, 15 aa, Artificial Sequence
  Description of Artificial Sequence: Synthetic peptide
  Seed: SPGMMMGMFNMLSTV
SPGIMMMMPNMFSTV

SEQ ID NO: 197595 - protein, 15 aa, Artificial Sequence
  Description of Artificial Sequence: Synthetic peptide
  Seed: SPGMMMGMFNMLSTV
SPGIMMMMPNMISTV

SEQ ID NO: 197596 - protein, 15 aa, Artificial Sequence
  Description of Artificial Sequence: Synthetic peptide
  Seed: SPGMMMGMFNMLSTV
SPGIMMMMPNMLSTV

SEQ ID NO: 197597 - protein, 15 aa, Artificial Sequence
  Description of Artificial Sequence: Synthetic peptide
  Seed: SPGMMMGMFNMLSTV
SPGIMMMMPNMMSTV

SEQ ID NO: 197598 - protein, 15 aa, Artificial Sequence
  Description of Artificial Sequence: Synthetic peptide
  Seed: SPGMMMGMFNMLSTV
SPGIMMMMPNMSSTV

SEQ ID NO: 197599 - protein, 15 aa, Artificial Sequence
  Description of Artificial Sequence: Synthetic peptide
  Seed: SPGMMMGMFNMLSTV
SPGIMMMMPNMVSTV

SEQ ID NO: 197600 - protein, 15 aa, Artificial Sequence
  Description of Artificial Sequence: Synthetic peptide
  Seed: SPGMMMGMFNMLSTV
SPGIMMMMPNMYSTV

SEQ ID NO: 197601 - protein, 15 aa, Artificial Sequence
  Description of Artificial Sequence: Synthetic peptide
  Seed: SPGMMMGMFNMLSTV
SPGIMMMMRNMASTV

SEQ ID NO: 197602 - protein, 15 aa, Artificial Sequence
  Description of Artificial Sequence: Synthetic peptide
  Seed: SPGMMMGMFNMLSTV
SPGIMMMMSNMASTV

SEQ ID NO: 197603 - protein, 15 aa, Artificial Sequence
  Description of Artificial Sequence: Synthetic peptide
  Seed: SPGMMMGMFNMLSTV
SPGIMMMMSNMISTV

SEQ ID NO: 197604 - protein, 15 aa, Artificial Sequence
  Description of Artificial Sequence: Synthetic peptide
  Seed: SPGMMMGMFNMLSTV
SPGIMMMMSNMLSTV

SEQ ID NO: 197605 - protein, 15 aa, Artificial Sequence
  Description of Artificial Sequence: Synthetic peptide
  Seed: SPGMMMGMFNMLSTV
SPGIMMMMSNMMSTV

SEQ ID NO: 197606 - protein, 15 aa, Artificial Sequence
  Description of Artificial Sequence: Synthetic peptide
  Seed: SPGMMMGMFNMLSTV
SPGIMMMMSNMSSTV

SEQ ID NO: 197607 - protein, 15 aa, Artificial Sequence
  Description of Artificial Sequence: Synthetic peptide
  Seed: SPGMMMGMFNMLSTV
SPGIMMMMSNMVSTV

SEQ ID NO: 197608 - protein, 15 aa, Artificial Sequence
  Description of Artificial Sequence: Synthetic peptide
  Seed: SPGMMMGMFNMLSTV
SPGIMMMMSNMYSTV

SEQ ID NO: 197609 - protein, 15 aa, Artificial Sequence
  Description of Artificial Sequence: Synthetic peptide
  Seed: SPGMMMGMFNMLSTV
SPGIMMMMTNMASTV

SEQ ID NO: 197610 - protein, 15 aa, Artificial Sequence
  Description of Artificial Sequence: Synthetic peptide
  Seed: SPGMMMGMFNMLSTV
SPGIMMMMTNMISTV

SEQ ID NO: 197611 - protein, 15 aa, Artificial Sequence
  Description of Artificial Sequence: Synthetic peptide
  Seed: SPGMMMGMFNMLSTV
SPGIMMMMTNMVSTV

SEQ ID NO: 197612 - protein, 15 aa, Artificial Sequence
  Description of Artificial Sequence: Synthetic peptide
  Seed: SPGMMMGMFNMLSTV
SPGIMMMMVNMASTV

SEQ ID NO: 197613 - protein, 15 aa, Artificial Sequence
  Description of Artificial Sequence: Synthetic peptide
  Seed: SPGMMMGMFNMLSTV
SPGIMMMMVNMSSTV

SEQ ID NO: 197614 - protein, 15 aa, Artificial Sequence
  Description of Artificial Sequence: Synthetic peptide
  Seed: SPGMMMGMFNMLSTV
SPGIMMMMWNMFSTV

SEQ ID NO: 197615 - protein, 15 aa, Artificial Sequence
  Description of Artificial Sequence: Synthetic peptide
  Seed: SPGMMMGMFNMLSTV
SPGIMMMMYNMFSTV

SEQ ID NO: 197616 - protein, 15 aa, Artificial Sequence
  Description of Artificial Sequence: Synthetic peptide
  Seed: SPGMMMGMFNMLSTV
SPGIMMMMYNMLSTV

SEQ ID NO: 197617 - protein, 15 aa, Artificial Sequence
  Description of Artificial Sequence: Synthetic peptide
  Seed: SPGMMMGMFNMLSTV
SPGIMMNMANMASTV

SEQ ID NO: 197618 - protein, 15 aa, Artificial Sequence
  Description of Artificial Sequence: Synthetic peptide
  Seed: SPGMMMGMFNMLSTV
SPGIMMNMANMCSTV

SEQ ID NO: 197619 - protein, 15 aa, Artificial Sequence
  Description of Artificial Sequence: Synthetic peptide
  Seed: SPGMMMGMFNMLSTV
SPGIMMNMANMDSTV

SEQ ID NO: 197620 - protein, 15 aa, Artificial Sequence
  Description of Artificial Sequence: Synthetic peptide
  Seed: SPGMMMGMFNMLSTV
SPGIMMNMANMESTV

SEQ ID NO: 197621 - protein, 15 aa, Artificial Sequence
  Description of Artificial Sequence: Synthetic peptide
  Seed: SPGMMMGMFNMLSTV
SPGIMMNMANMFSTV

SEQ ID NO: 197622 - protein, 15 aa, Artificial Sequence
  Description of Artificial Sequence: Synthetic peptide
  Seed: SPGMMMGMFNMLSTV
SPGIMMNMANMGSTV

SEQ ID NO: 197623 - protein, 15 aa, Artificial Sequence
  Description of Artificial Sequence: Synthetic peptide
  Seed: SPGMMMGMFNMLSTV
SPGIMMNMANMHSTV

SEQ ID NO: 197624 - protein, 15 aa, Artificial Sequence
  Description of Artificial Sequence: Synthetic peptide
  Seed: SPGMMMGMFNMLSTV
SPGIMMNMANMISTV

SEQ ID NO: 197625 - protein, 15 aa, Artificial Sequence
  Description of Artificial Sequence: Synthetic peptide
  Seed: SPGMMMGMFNMLSTV
SPGIMMNMANMKSTV

SEQ ID NO: 197626 - protein, 15 aa, Artificial Sequence
  Description of Artificial Sequence: Synthetic peptide
  Seed: SPGMMMGMFNMLSTV
SPGIMMNMANMLSTV

SEQ ID NO: 197627 - protein, 15 aa, Artificial Sequence
  Description of Artificial Sequence: Synthetic peptide
  Seed: SPGMMMGMFNMLSTV
SPGIMMNMANMMSTV

SEQ ID NO: 197628 - protein, 15 aa, Artificial Sequence
  Description of Artificial Sequence: Synthetic peptide
  Seed: SPGMMMGMFNMLSTV
SPGIMMNMANMNSTV

SEQ ID NO: 197629 - protein, 15 aa, Artificial Sequence
  Description of Artificial Sequence: Synthetic peptide
  Seed: SPGMMMGMFNMLSTV
SPGIMMNMANMPSTV

SEQ ID NO: 197630 - protein, 15 aa, Artificial Sequence
  Description of Artificial Sequence: Synthetic peptide
  Seed: SPGMMMGMFNMLSTV
SPGIMMNMANMQSTV

SEQ ID NO: 197631 - protein, 15 aa, Artificial Sequence
  Description of Artificial Sequence: Synthetic peptide
  Seed: SPGMMMGMFNMLSTV
SPGIMMNMANMRSTV

SEQ ID NO: 197632 - protein, 15 aa, Artificial Sequence
  Description of Artificial Sequence: Synthetic peptide
  Seed: SPGMMMGMFNMLSTV
SPGIMMNMANMSSTV

SEQ ID NO: 197633 - protein, 15 aa, Artificial Sequence
  Description of Artificial Sequence: Synthetic peptide
  Seed: SPGMMMGMFNMLSTV
SPGIMMNMANMTSTV

SEQ ID NO: 197634 - protein, 15 aa, Artificial Sequence
  Description of Artificial Sequence: Synthetic peptide
  Seed: SPGMMMGMFNMLSTV
SPGIMMNMANMVSTV

SEQ ID NO: 197635 - protein, 15 aa, Artificial Sequence
  Description of Artificial Sequence: Synthetic peptide
  Seed: SPGMMMGMFNMLSTV
SPGIMMNMANMWSTV

SEQ ID NO: 197636 - protein, 15 aa, Artificial Sequence
  Description of Artificial Sequence: Synthetic peptide
  Seed: SPGMMMGMFNMLSTV
SPGIMMNMANMYSTV

SEQ ID NO: 197637 - protein, 15 aa, Artificial Sequence
  Description of Artificial Sequence: Synthetic peptide
  Seed: SPGMMMGMFNMLSTV
SPGIMMNMCNMASTV

SEQ ID NO: 197638 - protein, 15 aa, Artificial Sequence
  Description of Artificial Sequence: Synthetic peptide
  Seed: SPGMMMGMFNMLSTV
SPGIMMNMCNMFSTV

SEQ ID NO: 197639 - protein, 15 aa, Artificial Sequence
  Description of Artificial Sequence: Synthetic peptide
  Seed: SPGMMMGMFNMLSTV
SPGIMMNMCNMISTV

SEQ ID NO: 197640 - protein, 15 aa, Artificial Sequence
  Description of Artificial Sequence: Synthetic peptide
  Seed: SPGMMMGMFNMLSTV
SPGIMMNMCNMLSTV

SEQ ID NO: 197641 - protein, 15 aa, Artificial Sequence
  Description of Artificial Sequence: Synthetic peptide
  Seed: SPGMMMGMFNMLSTV
SPGIMMNMCNMMSTV

SEQ ID NO: 197642 - protein, 15 aa, Artificial Sequence
  Description of Artificial Sequence: Synthetic peptide
  Seed: SPGMMMGMFNMLSTV
SPGIMMNMCNMVSTV

SEQ ID NO: 197643 - protein, 15 aa, Artificial Sequence
  Description of Artificial Sequence: Synthetic peptide
  Seed: SPGMMMGMFNMLSTV
SPGIMMNMCNMYSTV

SEQ ID NO: 197644 - protein, 15 aa, Artificial Sequence
  Description of Artificial Sequence: Synthetic peptide
  Seed: SPGMMMGMFNMLSTV
SPGIMMNMDNMASTV

SEQ ID NO: 197645 - protein, 15 aa, Artificial Sequence
  Description of Artificial Sequence: Synthetic peptide
  Seed: SPGMMMGMFNMLSTV
SPGIMMNMDNMFSTV

SEQ ID NO: 197646 - protein, 15 aa, Artificial Sequence
  Description of Artificial Sequence: Synthetic peptide
  Seed: SPGMMMGMFNMLSTV
SPGIMMNMDNMISTV

SEQ ID NO: 197647 - protein, 15 aa, Artificial Sequence
  Description of Artificial Sequence: Synthetic peptide
  Seed: SPGMMMGMFNMLSTV
SPGIMMNMDNMLSTV

SEQ ID NO: 197648 - protein, 15 aa, Artificial Sequence
  Description of Artificial Sequence: Synthetic peptide
  Seed: SPGMMMGMFNMLSTV
SPGIMMNMDNMMSTV

SEQ ID NO: 197649 - protein, 15 aa, Artificial Sequence
  Description of Artificial Sequence: Synthetic peptide
  Seed: SPGMMMGMFNMLSTV
SPGIMMNMDNMTSTV

SEQ ID NO: 197650 - protein, 15 aa, Artificial Sequence
  Description of Artificial Sequence: Synthetic peptide
  Seed: SPGMMMGMFNMLSTV
SPGIMMNMDNMVSTV

SEQ ID NO: 197651 - protein, 15 aa, Artificial Sequence
  Description of Artificial Sequence: Synthetic peptide
  Seed: SPGMMMGMFNMLSTV
SPGIMMNMDNMYSTV

SEQ ID NO: 197652 - protein, 15 aa, Artificial Sequence
  Description of Artificial Sequence: Synthetic peptide
  Seed: SPGMMMGMFNMLSTV
SPGIMMNMENMASTV

SEQ ID NO: 197653 - protein, 15 aa, Artificial Sequence
  Description of Artificial Sequence: Synthetic peptide
  Seed: SPGMMMGMFNMLSTV
SPGIMMNMENMFSTV

SEQ ID NO: 197654 - protein, 15 aa, Artificial Sequence
  Description of Artificial Sequence: Synthetic peptide
  Seed: SPGMMMGMFNMLSTV
SPGIMMNMENMISTV

SEQ ID NO: 197655 - protein, 15 aa, Artificial Sequence
  Description of Artificial Sequence: Synthetic peptide
  Seed: SPGMMMGMFNMLSTV
SPGIMMNMENMLSTV

SEQ ID NO: 197656 - protein, 15 aa, Artificial Sequence
  Description of Artificial Sequence: Synthetic peptide
  Seed: SPGMMMGMFNMLSTV
SPGIMMNMENMMSTV

SEQ ID NO: 197657 - protein, 15 aa, Artificial Sequence
  Description of Artificial Sequence: Synthetic peptide
  Seed: SPGMMMGMFNMLSTV
SPGIMMNMENMSSTV

SEQ ID NO: 197658 - protein, 15 aa, Artificial Sequence
  Description of Artificial Sequence: Synthetic peptide
  Seed: SPGMMMGMFNMLSTV
SPGIMMNMENMTSTV

SEQ ID NO: 197659 - protein, 15 aa, Artificial Sequence
  Description of Artificial Sequence: Synthetic peptide
  Seed: SPGMMMGMFNMLSTV
SPGIMMNMENMVSTV

SEQ ID NO: 197660 - protein, 15 aa, Artificial Sequence
  Description of Artificial Sequence: Synthetic peptide
  Seed: SPGMMMGMFNMLSTV
SPGIMMNMENMYSTV

SEQ ID NO: 197661 - protein, 15 aa, Artificial Sequence
  Description of Artificial Sequence: Synthetic peptide
  Seed: SPGMMMGMFNMLSTV
SPGIMMNMFNMASTV

SEQ ID NO: 197662 - protein, 15 aa, Artificial Sequence
  Description of Artificial Sequence: Synthetic peptide
  Seed: SPGMMMGMFNMLSTV
SPGIMMNMFNMFSTV

SEQ ID NO: 197663 - protein, 15 aa, Artificial Sequence
  Description of Artificial Sequence: Synthetic peptide
  Seed: SPGMMMGMFNMLSTV
SPGIMMNMFNMISTV

SEQ ID NO: 197664 - protein, 15 aa, Artificial Sequence
  Description of Artificial Sequence: Synthetic peptide
  Seed: SPGMMMGMFNMLSTV
SPGIMMNMFNMLSTV

SEQ ID NO: 197665 - protein, 15 aa, Artificial Sequence
  Description of Artificial Sequence: Synthetic peptide
  Seed: SPGMMMGMFNMLSTV
SPGIMMNMFNMMSTV

SEQ ID NO: 197666 - protein, 15 aa, Artificial Sequence
  Description of Artificial Sequence: Synthetic peptide
  Seed: SPGMMMGMFNMLSTV
SPGIMMNMFNMSSTV

SEQ ID NO: 197667 - protein, 15 aa, Artificial Sequence
  Description of Artificial Sequence: Synthetic peptide
  Seed: SPGMMMGMFNMLSTV
SPGIMMNMFNMTSTV

SEQ ID NO: 197668 - protein, 15 aa, Artificial Sequence
  Description of Artificial Sequence: Synthetic peptide
  Seed: SPGMMMGMFNMLSTV
SPGIMMNMFNMVSTV

SEQ ID NO: 197669 - protein, 15 aa, Artificial Sequence
  Description of Artificial Sequence: Synthetic peptide
  Seed: SPGMMMGMFNMLSTV
SPGIMMNMFNMYSTV

SEQ ID NO: 197670 - protein, 15 aa, Artificial Sequence
  Description of Artificial Sequence: Synthetic peptide
  Seed: SPGMMMGMFNMLSTV
SPGIMMNMGNMASTV

SEQ ID NO: 197671 - protein, 15 aa, Artificial Sequence
  Description of Artificial Sequence: Synthetic peptide
  Seed: SPGMMMGMFNMLSTV
SPGIMMNMGNMCSTV

SEQ ID NO: 197672 - protein, 15 aa, Artificial Sequence
  Description of Artificial Sequence: Synthetic peptide
  Seed: SPGMMMGMFNMLSTV
SPGIMMNMGNMDSTV

SEQ ID NO: 197673 - protein, 15 aa, Artificial Sequence
  Description of Artificial Sequence: Synthetic peptide
  Seed: SPGMMMGMFNMLSTV
SPGIMMNMGNMESTV

SEQ ID NO: 197674 - protein, 15 aa, Artificial Sequence
  Description of Artificial Sequence: Synthetic peptide
  Seed: SPGMMMGMFNMLSTV
SPGIMMNMGNMFSTV

SEQ ID NO: 197675 - protein, 15 aa, Artificial Sequence
  Description of Artificial Sequence: Synthetic peptide
  Seed: SPGMMMGMFNMLSTV
SPGIMMNMGNMGSTV

SEQ ID NO: 197676 - protein, 15 aa, Artificial Sequence
  Description of Artificial Sequence: Synthetic peptide
  Seed: SPGMMMGMFNMLSTV
SPGIMMNMGNMHSTV

SEQ ID NO: 197677 - protein, 15 aa, Artificial Sequence
  Description of Artificial Sequence: Synthetic peptide
  Seed: SPGMMMGMFNMLSTV
SPGIMMNMGNMISTV

SEQ ID NO: 197678 - protein, 15 aa, Artificial Sequence
  Description of Artificial Sequence: Synthetic peptide
  Seed: SPGMMMGMFNMLSTV
SPGIMMNMGNMKSTV

SEQ ID NO: 197679 - protein, 15 aa, Artificial Sequence
  Description of Artificial Sequence: Synthetic peptide
  Seed: SPGMMMGMFNMLSTV
SPGIMMNMGNMLSTV

SEQ ID NO: 197680 - protein, 15 aa, Artificial Sequence
  Description of Artificial Sequence: Synthetic peptide
  Seed: SPGMMMGMFNMLSTV
SPGIMMNMGNMMSTV

SEQ ID NO: 197681 - protein, 15 aa, Artificial Sequence
  Description of Artificial Sequence: Synthetic peptide
  Seed: SPGMMMGMFNMLSTV
SPGIMMNMGNMNSTV

SEQ ID NO: 197682 - protein, 15 aa, Artificial Sequence
  Description of Artificial Sequence: Synthetic peptide
  Seed: SPGMMMGMFNMLSTV
SPGIMMNMGNMPSTV

SEQ ID NO: 197683 - protein, 15 aa, Artificial Sequence
  Description of Artificial Sequence: Synthetic peptide
  Seed: SPGMMMGMFNMLSTV
SPGIMMNMGNMQSTV

SEQ ID NO: 197684 - protein, 15 aa, Artificial Sequence
  Description of Artificial Sequence: Synthetic peptide
  Seed: SPGMMMGMFNMLSTV
SPGIMMNMGNMRSTV

SEQ ID NO: 197685 - protein, 15 aa, Artificial Sequence
  Description of Artificial Sequence: Synthetic peptide
  Seed: SPGMMMGMFNMLSTV
SPGIMMNMGNMSSTV

SEQ ID NO: 197686 - protein, 15 aa, Artificial Sequence
  Description of Artificial Sequence: Synthetic peptide
  Seed: SPGMMMGMFNMLSTV
SPGIMMNMGNMTSTV

SEQ ID NO: 197687 - protein, 15 aa, Artificial Sequence
  Description of Artificial Sequence: Synthetic peptide
  Seed: SPGMMMGMFNMLSTV
SPGIMMNMGNMVSTV

SEQ ID NO: 197688 - protein, 15 aa, Artificial Sequence
  Description of Artificial Sequence: Synthetic peptide
  Seed: SPGMMMGMFNMLSTV
SPGIMMNMGNMWSTV

SEQ ID NO: 197689 - protein, 15 aa, Artificial Sequence
  Description of Artificial Sequence: Synthetic peptide
  Seed: SPGMMMGMFNMLSTV
SPGIMMNMGNMYSTV

SEQ ID NO: 197690 - protein, 15 aa, Artificial Sequence
  Description of Artificial Sequence: Synthetic peptide
  Seed: SPGMMMGMFNMLSTV
SPGIMMNMHNMASTV

SEQ ID NO: 197691 - protein, 15 aa, Artificial Sequence
  Description of Artificial Sequence: Synthetic peptide
  Seed: SPGMMMGMFNMLSTV
SPGIMMNMHNMFSTV

SEQ ID NO: 197692 - protein, 15 aa, Artificial Sequence
  Description of Artificial Sequence: Synthetic peptide
  Seed: SPGMMMGMFNMLSTV
SPGIMMNMHNMGSTV

SEQ ID NO: 197693 - protein, 15 aa, Artificial Sequence
  Description of Artificial Sequence: Synthetic peptide
  Seed: SPGMMMGMFNMLSTV
SPGIMMNMHNMISTV

SEQ ID NO: 197694 - protein, 15 aa, Artificial Sequence
  Description of Artificial Sequence: Synthetic peptide
  Seed: SPGMMMGMFNMLSTV
SPGIMMNMHNMLSTV

SEQ ID NO: 197695 - protein, 15 aa, Artificial Sequence
  Description of Artificial Sequence: Synthetic peptide
  Seed: SPGMMMGMFNMLSTV
SPGIMMNMHNMMSTV

SEQ ID NO: 197696 - protein, 15 aa, Artificial Sequence
  Description of Artificial Sequence: Synthetic peptide
  Seed: SPGMMMGMFNMLSTV
SPGIMMNMHNMNSTV

SEQ ID NO: 197697 - protein, 15 aa, Artificial Sequence
  Description of Artificial Sequence: Synthetic peptide
  Seed: SPGMMMGMFNMLSTV
SPGIMMNMHNMQSTV

SEQ ID NO: 197698 - protein, 15 aa, Artificial Sequence
  Description of Artificial Sequence: Synthetic peptide
  Seed: SPGMMMGMFNMLSTV
SPGIMMNMHNMSSTV

SEQ ID NO: 197699 - protein, 15 aa, Artificial Sequence
  Description of Artificial Sequence: Synthetic peptide
  Seed: SPGMMMGMFNMLSTV
SPGIMMNMHNMTSTV

SEQ ID NO: 197700 - protein, 15 aa, Artificial Sequence
  Description of Artificial Sequence: Synthetic peptide
  Seed: SPGMMMGMFNMLSTV
SPGIMMNMHNMVSTV

SEQ ID NO: 197701 - protein, 15 aa, Artificial Sequence
  Description of Artificial Sequence: Synthetic peptide
  Seed: SPGMMMGMFNMLSTV
SPGIMMNMHNMWSTV

SEQ ID NO: 197702 - protein, 15 aa, Artificial Sequence
  Description of Artificial Sequence: Synthetic peptide
  Seed: SPGMMMGMFNMLSTV
SPGIMMNMHNMYSTV

SEQ ID NO: 197703 - protein, 15 aa, Artificial Sequence
  Description of Artificial Sequence: Synthetic peptide
  Seed: SPGMMMGMFNMLSTV
SPGIMMNMINMASTV

SEQ ID NO: 197704 - protein, 15 aa, Artificial Sequence
  Description of Artificial Sequence: Synthetic peptide
  Seed: SPGMMMGMFNMLSTV
SPGIMMNMINMCSTV

SEQ ID NO: 197705 - protein, 15 aa, Artificial Sequence
  Description of Artificial Sequence: Synthetic peptide
  Seed: SPGMMMGMFNMLSTV
SPGIMMNMINMDSTV

SEQ ID NO: 197706 - protein, 15 aa, Artificial Sequence
  Description of Artificial Sequence: Synthetic peptide
  Seed: SPGMMMGMFNMLSTV
SPGIMMNMINMESTV

SEQ ID NO: 197707 - protein, 15 aa, Artificial Sequence
  Description of Artificial Sequence: Synthetic peptide
  Seed: SPGMMMGMFNMLSTV
SPGIMMNMINMFSTV

SEQ ID NO: 197708 - protein, 15 aa, Artificial Sequence
  Description of Artificial Sequence: Synthetic peptide
  Seed: SPGMMMGMFNMLSTV
SPGIMMNMINMGSTV

SEQ ID NO: 197709 - protein, 15 aa, Artificial Sequence
  Description of Artificial Sequence: Synthetic peptide
  Seed: SPGMMMGMFNMLSTV
SPGIMMNMINMHSTV

SEQ ID NO: 197710 - protein, 15 aa, Artificial Sequence
  Description of Artificial Sequence: Synthetic peptide
  Seed: SPGMMMGMFNMLSTV
SPGIMMNMINMISTV

SEQ ID NO: 197711 - protein, 15 aa, Artificial Sequence
  Description of Artificial Sequence: Synthetic peptide
  Seed: SPGMMMGMFNMLSTV
SPGIMMNMINMKSTV

SEQ ID NO: 197712 - protein, 15 aa, Artificial Sequence
  Description of Artificial Sequence: Synthetic peptide
  Seed: SPGMMMGMFNMLSTV
SPGIMMNMINMLSTV

SEQ ID NO: 197713 - protein, 15 aa, Artificial Sequence
  Description of Artificial Sequence: Synthetic peptide
  Seed: SPGMMMGMFNMLSTV
SPGIMMNMINMMSTV

SEQ ID NO: 197714 - protein, 15 aa, Artificial Sequence
  Description of Artificial Sequence: Synthetic peptide
  Seed: SPGMMMGMFNMLSTV
SPGIMMNMINMNSTV

SEQ ID NO: 197715 - protein, 15 aa, Artificial Sequence
  Description of Artificial Sequence: Synthetic peptide
  Seed: SPGMMMGMFNMLSTV
SPGIMMNMINMPSTV

SEQ ID NO: 197716 - protein, 15 aa, Artificial Sequence
  Description of Artificial Sequence: Synthetic peptide
  Seed: SPGMMMGMFNMLSTV
SPGIMMNMINMQSTV

SEQ ID NO: 197717 - protein, 15 aa, Artificial Sequence
  Description of Artificial Sequence: Synthetic peptide
  Seed: SPGMMMGMFNMLSTV
SPGIMMNMINMRSTV

SEQ ID NO: 197718 - protein, 15 aa, Artificial Sequence
  Description of Artificial Sequence: Synthetic peptide
  Seed: SPGMMMGMFNMLSTV
SPGIMMNMINMSSTV

SEQ ID NO: 197719 - protein, 15 aa, Artificial Sequence
  Description of Artificial Sequence: Synthetic peptide
  Seed: SPGMMMGMFNMLSTV
SPGIMMNMINMTSTV

SEQ ID NO: 197720 - protein, 15 aa, Artificial Sequence
  Description of Artificial Sequence: Synthetic peptide
  Seed: SPGMMMGMFNMLSTV
SPGIMMNMINMVSTV

SEQ ID NO: 197721 - protein, 15 aa, Artificial Sequence
  Description of Artificial Sequence: Synthetic peptide
  Seed: SPGMMMGMFNMLSTV
SPGIMMNMINMWSTV

SEQ ID NO: 197722 - protein, 15 aa, Artificial Sequence
  Description of Artificial Sequence: Synthetic peptide
  Seed: SPGMMMGMFNMLSTV
SPGIMMNMINMYSTV

SEQ ID NO: 197723 - protein, 15 aa, Artificial Sequence
  Description of Artificial Sequence: Synthetic peptide
  Seed: SPGMMMGMFNMLSTV
SPGIMMNMKNMASTV

SEQ ID NO: 197724 - protein, 15 aa, Artificial Sequence
  Description of Artificial Sequence: Synthetic peptide
  Seed: SPGMMMGMFNMLSTV
SPGIMMNMKNMFSTV

SEQ ID NO: 197725 - protein, 15 aa, Artificial Sequence
  Description of Artificial Sequence: Synthetic peptide
  Seed: SPGMMMGMFNMLSTV
SPGIMMNMKNMISTV

SEQ ID NO: 197726 - protein, 15 aa, Artificial Sequence
  Description of Artificial Sequence: Synthetic peptide
  Seed: SPGMMMGMFNMLSTV
SPGIMMNMKNMLSTV

SEQ ID NO: 197727 - protein, 15 aa, Artificial Sequence
  Description of Artificial Sequence: Synthetic peptide
  Seed: SPGMMMGMFNMLSTV
SPGIMMNMKNMMSTV

SEQ ID NO: 197728 - protein, 15 aa, Artificial Sequence
  Description of Artificial Sequence: Synthetic peptide
  Seed: SPGMMMGMFNMLSTV
SPGIMMNMKNMSSTV

SEQ ID NO: 197729 - protein, 15 aa, Artificial Sequence
  Description of Artificial Sequence: Synthetic peptide
  Seed: SPGMMMGMFNMLSTV
SPGIMMNMKNMTSTV

SEQ ID NO: 197730 - protein, 15 aa, Artificial Sequence
  Description of Artificial Sequence: Synthetic peptide
  Seed: SPGMMMGMFNMLSTV
SPGIMMNMKNMVSTV

SEQ ID NO: 197731 - protein, 15 aa, Artificial Sequence
  Description of Artificial Sequence: Synthetic peptide
  Seed: SPGMMMGMFNMLSTV
SPGIMMNMKNMWSTV

SEQ ID NO: 197732 - protein, 15 aa, Artificial Sequence
  Description of Artificial Sequence: Synthetic peptide
  Seed: SPGMMMGMFNMLSTV
SPGIMMNMKNMYSTV

SEQ ID NO: 197733 - protein, 15 aa, Artificial Sequence
  Description of Artificial Sequence: Synthetic peptide
  Seed: SPGMMMGMFNMLSTV
SPGIMMNMLNMASTV

SEQ ID NO: 197734 - protein, 15 aa, Artificial Sequence
  Description of Artificial Sequence: Synthetic peptide
  Seed: SPGMMMGMFNMLSTV
SPGIMMNMLNMFSTV

SEQ ID NO: 197735 - protein, 15 aa, Artificial Sequence
  Description of Artificial Sequence: Synthetic peptide
  Seed: SPGMMMGMFNMLSTV
SPGIMMNMLNMGSTV

SEQ ID NO: 197736 - protein, 15 aa, Artificial Sequence
  Description of Artificial Sequence: Synthetic peptide
  Seed: SPGMMMGMFNMLSTV
SPGIMMNMLNMHSTV

SEQ ID NO: 197737 - protein, 15 aa, Artificial Sequence
  Description of Artificial Sequence: Synthetic peptide
  Seed: SPGMMMGMFNMLSTV
SPGIMMNMLNMISTV

SEQ ID NO: 197738 - protein, 15 aa, Artificial Sequence
  Description of Artificial Sequence: Synthetic peptide
  Seed: SPGMMMGMFNMLSTV
SPGIMMNMLNMKSTV

SEQ ID NO: 197739 - protein, 15 aa, Artificial Sequence
  Description of Artificial Sequence: Synthetic peptide
  Seed: SPGMMMGMFNMLSTV
SPGIMMNMLNMLSTV

SEQ ID NO: 197740 - protein, 15 aa, Artificial Sequence
  Description of Artificial Sequence: Synthetic peptide
  Seed: SPGMMMGMFNMLSTV
SPGIMMNMLNMMSTV

SEQ ID NO: 197741 - protein, 15 aa, Artificial Sequence
  Description of Artificial Sequence: Synthetic peptide
  Seed: SPGMMMGMFNMLSTV
SPGIMMNMLNMNSTV

SEQ ID NO: 197742 - protein, 15 aa, Artificial Sequence
  Description of Artificial Sequence: Synthetic peptide
  Seed: SPGMMMGMFNMLSTV
SPGIMMNMLNMQSTV

SEQ ID NO: 197743 - protein, 15 aa, Artificial Sequence
  Description of Artificial Sequence: Synthetic peptide
  Seed: SPGMMMGMFNMLSTV
SPGIMMNMLNMRSTV

SEQ ID NO: 197744 - protein, 15 aa, Artificial Sequence
  Description of Artificial Sequence: Synthetic peptide
  Seed: SPGMMMGMFNMLSTV
SPGIMMNMLNMSSTV

SEQ ID NO: 197745 - protein, 15 aa, Artificial Sequence
  Description of Artificial Sequence: Synthetic peptide
  Seed: SPGMMMGMFNMLSTV
SPGIMMNMLNMTSTV

SEQ ID NO: 197746 - protein, 15 aa, Artificial Sequence
  Description of Artificial Sequence: Synthetic peptide
  Seed: SPGMMMGMFNMLSTV
SPGIMMNMLNMVSTV

SEQ ID NO: 197747 - protein, 15 aa, Artificial Sequence
  Description of Artificial Sequence: Synthetic peptide
  Seed: SPGMMMGMFNMLSTV
SPGIMMNMLNMYSTV

SEQ ID NO: 197748 - protein, 15 aa, Artificial Sequence
  Description of Artificial Sequence: Synthetic peptide
  Seed: SPGMMMGMFNMLSTV
SPGIMMNMMNMASTV

SEQ ID NO: 197749 - protein, 15 aa, Artificial Sequence
  Description of Artificial Sequence: Synthetic peptide
  Seed: SPGMMMGMFNMLSTV
SPGIMMNMMNMFSTV

SEQ ID NO: 197750 - protein, 15 aa, Artificial Sequence
  Description of Artificial Sequence: Synthetic peptide
  Seed: SPGMMMGMFNMLSTV
SPGIMMNMMNMGSTV

SEQ ID NO: 197751 - protein, 15 aa, Artificial Sequence
  Description of Artificial Sequence: Synthetic peptide
  Seed: SPGMMMGMFNMLSTV
SPGIMMNMMNMHSTV

SEQ ID NO: 197752 - protein, 15 aa, Artificial Sequence
  Description of Artificial Sequence: Synthetic peptide
  Seed: SPGMMMGMFNMLSTV
SPGIMMNMMNMISTV

SEQ ID NO: 197753 - protein, 15 aa, Artificial Sequence
  Description of Artificial Sequence: Synthetic peptide
  Seed: SPGMMMGMFNMLSTV
SPGIMMNMMNMKSTV

SEQ ID NO: 197754 - protein, 15 aa, Artificial Sequence
  Description of Artificial Sequence: Synthetic peptide
  Seed: SPGMMMGMFNMLSTV
SPGIMMNMMNMLSTV

SEQ ID NO: 197755 - protein, 15 aa, Artificial Sequence
  Description of Artificial Sequence: Synthetic peptide
  Seed: SPGMMMGMFNMLSTV
SPGIMMNMMNMMSTV

SEQ ID NO: 197756 - protein, 15 aa, Artificial Sequence
  Description of Artificial Sequence: Synthetic peptide
  Seed: SPGMMMGMFNMLSTV
SPGIMMNMMNMNSTV

SEQ ID NO: 197757 - protein, 15 aa, Artificial Sequence
  Description of Artificial Sequence: Synthetic peptide
  Seed: SPGMMMGMFNMLSTV
SPGIMMNMMNMQSTV

SEQ ID NO: 197758 - protein, 15 aa, Artificial Sequence
  Description of Artificial Sequence: Synthetic peptide
  Seed: SPGMMMGMFNMLSTV
SPGIMMNMMNMRSTV

SEQ ID NO: 197759 - protein, 15 aa, Artificial Sequence
  Description of Artificial Sequence: Synthetic peptide
  Seed: SPGMMMGMFNMLSTV
SPGIMMNMMNMSSTV

SEQ ID NO: 197760 - protein, 15 aa, Artificial Sequence
  Description of Artificial Sequence: Synthetic peptide
  Seed: SPGMMMGMFNMLSTV
SPGIMMNMMNMTSTV

SEQ ID NO: 197761 - protein, 15 aa, Artificial Sequence
  Description of Artificial Sequence: Synthetic peptide
  Seed: SPGMMMGMFNMLSTV
SPGIMMNMMNMVSTV

SEQ ID NO: 197762 - protein, 15 aa, Artificial Sequence
  Description of Artificial Sequence: Synthetic peptide
  Seed: SPGMMMGMFNMLSTV
SPGIMMNMMNMYSTV

SEQ ID NO: 197763 - protein, 15 aa, Artificial Sequence
  Description of Artificial Sequence: Synthetic peptide
  Seed: SPGMMMGMFNMLSTV
SPGIMMNMNNMASTV

SEQ ID NO: 197764 - protein, 15 aa, Artificial Sequence
  Description of Artificial Sequence: Synthetic peptide
  Seed: SPGMMMGMFNMLSTV
SPGIMMNMNNMCSTV

SEQ ID NO: 197765 - protein, 15 aa, Artificial Sequence
  Description of Artificial Sequence: Synthetic peptide
  Seed: SPGMMMGMFNMLSTV
SPGIMMNMNNMDSTV

SEQ ID NO: 197766 - protein, 15 aa, Artificial Sequence
  Description of Artificial Sequence: Synthetic peptide
  Seed: SPGMMMGMFNMLSTV
SPGIMMNMNNMESTV

SEQ ID NO: 197767 - protein, 15 aa, Artificial Sequence
  Description of Artificial Sequence: Synthetic peptide
  Seed: SPGMMMGMFNMLSTV
SPGIMMNMNNMFSTV

SEQ ID NO: 197768 - protein, 15 aa, Artificial Sequence
  Description of Artificial Sequence: Synthetic peptide
  Seed: SPGMMMGMFNMLSTV
SPGIMMNMNNMGSTV

SEQ ID NO: 197769 - protein, 15 aa, Artificial Sequence
  Description of Artificial Sequence: Synthetic peptide
  Seed: SPGMMMGMFNMLSTV
SPGIMMNMNNMHSTV

SEQ ID NO: 197770 - protein, 15 aa, Artificial Sequence
  Description of Artificial Sequence: Synthetic peptide
  Seed: SPGMMMGMFNMLSTV
SPGIMMNMNNMISTV

SEQ ID NO: 197771 - protein, 15 aa, Artificial Sequence
  Description of Artificial Sequence: Synthetic peptide
  Seed: SPGMMMGMFNMLSTV
SPGIMMNMNNMKSTV

SEQ ID NO: 197772 - protein, 15 aa, Artificial Sequence
  Description of Artificial Sequence: Synthetic peptide
  Seed: SPGMMMGMFNMLSTV
SPGIMMNMNNMLSTV

SEQ ID NO: 197773 - protein, 15 aa, Artificial Sequence
  Description of Artificial Sequence: Synthetic peptide
  Seed: SPGMMMGMFNMLSTV
SPGIMMNMNNMMSTV

SEQ ID NO: 197774 - protein, 15 aa, Artificial Sequence
  Description of Artificial Sequence: Synthetic peptide
  Seed: SPGMMMGMFNMLSTV
SPGIMMNMNNMNSTV

SEQ ID NO: 197775 - protein, 15 aa, Artificial Sequence
  Description of Artificial Sequence: Synthetic peptide
  Seed: SPGMMMGMFNMLSTV
SPGIMMNMNNMPSTV

SEQ ID NO: 197776 - protein, 15 aa, Artificial Sequence
  Description of Artificial Sequence: Synthetic peptide
  Seed: SPGMMMGMFNMLSTV
SPGIMMNMNNMQSTV

SEQ ID NO: 197777 - protein, 15 aa, Artificial Sequence
  Description of Artificial Sequence: Synthetic peptide
  Seed: SPGMMMGMFNMLSTV
SPGIMMNMNNMRSTV

SEQ ID NO: 197778 - protein, 15 aa, Artificial Sequence
  Description of Artificial Sequence: Synthetic peptide
  Seed: SPGMMMGMFNMLSTV
SPGIMMNMNNMSSTV

SEQ ID NO: 197779 - protein, 15 aa, Artificial Sequence
  Description of Artificial Sequence: Synthetic peptide
  Seed: SPGMMMGMFNMLSTV
SPGIMMNMNNMTSTV

SEQ ID NO: 197780 - protein, 15 aa, Artificial Sequence
  Description of Artificial Sequence: Synthetic peptide
  Seed: SPGMMMGMFNMLSTV
SPGIMMNMNNMVSTV

SEQ ID NO: 197781 - protein, 15 aa, Artificial Sequence
  Description of Artificial Sequence: Synthetic peptide
  Seed: SPGMMMGMFNMLSTV
SPGIMMNMNNMWSTV

SEQ ID NO: 197782 - protein, 15 aa, Artificial Sequence
  Description of Artificial Sequence: Synthetic peptide
  Seed: SPGMMMGMFNMLSTV
SPGIMMNMNNMYSTV

SEQ ID NO: 197783 - protein, 15 aa, Artificial Sequence
  Description of Artificial Sequence: Synthetic peptide
  Seed: SPGMMMGMFNMLSTV
SPGIMMNMPNMASTV

SEQ ID NO: 197784 - protein, 15 aa, Artificial Sequence
  Description of Artificial Sequence: Synthetic peptide
  Seed: SPGMMMGMFNMLSTV
SPGIMMNMPNMCSTV

SEQ ID NO: 197785 - protein, 15 aa, Artificial Sequence
  Description of Artificial Sequence: Synthetic peptide
  Seed: SPGMMMGMFNMLSTV
SPGIMMNMPNMDSTV

SEQ ID NO: 197786 - protein, 15 aa, Artificial Sequence
  Description of Artificial Sequence: Synthetic peptide
  Seed: SPGMMMGMFNMLSTV
SPGIMMNMPNMESTV

SEQ ID NO: 197787 - protein, 15 aa, Artificial Sequence
  Description of Artificial Sequence: Synthetic peptide
  Seed: SPGMMMGMFNMLSTV
SPGIMMNMPNMFSTV

SEQ ID NO: 197788 - protein, 15 aa, Artificial Sequence
  Description of Artificial Sequence: Synthetic peptide
  Seed: SPGMMMGMFNMLSTV
SPGIMMNMPNMGSTV

SEQ ID NO: 197789 - protein, 15 aa, Artificial Sequence
  Description of Artificial Sequence: Synthetic peptide
  Seed: SPGMMMGMFNMLSTV
SPGIMMNMPNMHSTV

SEQ ID NO: 197790 - protein, 15 aa, Artificial Sequence
  Description of Artificial Sequence: Synthetic peptide
  Seed: SPGMMMGMFNMLSTV
SPGIMMNMPNMISTV

SEQ ID NO: 197791 - protein, 15 aa, Artificial Sequence
  Description of Artificial Sequence: Synthetic peptide
  Seed: SPGMMMGMFNMLSTV
SPGIMMNMPNMKSTV

SEQ ID NO: 197792 - protein, 15 aa, Artificial Sequence
  Description of Artificial Sequence: Synthetic peptide
  Seed: SPGMMMGMFNMLSTV
SPGIMMNMPNMLSTV

SEQ ID NO: 197793 - protein, 15 aa, Artificial Sequence
  Description of Artificial Sequence: Synthetic peptide
  Seed: SPGMMMGMFNMLSTV
SPGIMMNMPNMMSTV

SEQ ID NO: 197794 - protein, 15 aa, Artificial Sequence
  Description of Artificial Sequence: Synthetic peptide
  Seed: SPGMMMGMFNMLSTV
SPGIMMNMPNMNSTV

SEQ ID NO: 197795 - protein, 15 aa, Artificial Sequence
  Description of Artificial Sequence: Synthetic peptide
  Seed: SPGMMMGMFNMLSTV
SPGIMMNMPNMPSTV

SEQ ID NO: 197796 - protein, 15 aa, Artificial Sequence
  Description of Artificial Sequence: Synthetic peptide
  Seed: SPGMMMGMFNMLSTV
SPGIMMNMPNMQSTV

SEQ ID NO: 197797 - protein, 15 aa, Artificial Sequence
  Description of Artificial Sequence: Synthetic peptide
  Seed: SPGMMMGMFNMLSTV
SPGIMMNMPNMRSTV

SEQ ID NO: 197798 - protein, 15 aa, Artificial Sequence
  Description of Artificial Sequence: Synthetic peptide
  Seed: SPGMMMGMFNMLSTV
SPGIMMNMPNMSSTV

SEQ ID NO: 197799 - protein, 15 aa, Artificial Sequence
  Description of Artificial Sequence: Synthetic peptide
  Seed: SPGMMMGMFNMLSTV
SPGIMMNMPNMTSTV

SEQ ID NO: 197800 - protein, 15 aa, Artificial Sequence
  Description of Artificial Sequence: Synthetic peptide
  Seed: SPGMMMGMFNMLSTV
SPGIMMNMPNMVSTV

SEQ ID NO: 197801 - protein, 15 aa, Artificial Sequence
  Description of Artificial Sequence: Synthetic peptide
  Seed: SPGMMMGMFNMLSTV
SPGIMMNMPNMWSTV

SEQ ID NO: 197802 - protein, 15 aa, Artificial Sequence
  Description of Artificial Sequence: Synthetic peptide
  Seed: SPGMMMGMFNMLSTV
SPGIMMNMPNMYSTV

SEQ ID NO: 197803 - protein, 15 aa, Artificial Sequence
  Description of Artificial Sequence: Synthetic peptide
  Seed: SPGMMMGMFNMLSTV
SPGIMMNMQNMASTV

SEQ ID NO: 197804 - protein, 15 aa, Artificial Sequence
  Description of Artificial Sequence: Synthetic peptide
  Seed: SPGMMMGMFNMLSTV
SPGIMMNMQNMFSTV

SEQ ID NO: 197805 - protein, 15 aa, Artificial Sequence
  Description of Artificial Sequence: Synthetic peptide
  Seed: SPGMMMGMFNMLSTV
SPGIMMNMQNMISTV

SEQ ID NO: 197806 - protein, 15 aa, Artificial Sequence
  Description of Artificial Sequence: Synthetic peptide
  Seed: SPGMMMGMFNMLSTV
SPGIMMNMQNMLSTV

SEQ ID NO: 197807 - protein, 15 aa, Artificial Sequence
  Description of Artificial Sequence: Synthetic peptide
  Seed: SPGMMMGMFNMLSTV
SPGIMMNMQNMMSTV

SEQ ID NO: 197808 - protein, 15 aa, Artificial Sequence
  Description of Artificial Sequence: Synthetic peptide
  Seed: SPGMMMGMFNMLSTV
SPGIMMNMQNMSSTV

SEQ ID NO: 197809 - protein, 15 aa, Artificial Sequence
  Description of Artificial Sequence: Synthetic peptide
  Seed: SPGMMMGMFNMLSTV
SPGIMMNMQNMTSTV

SEQ ID NO: 197810 - protein, 15 aa, Artificial Sequence
  Description of Artificial Sequence: Synthetic peptide
  Seed: SPGMMMGMFNMLSTV
SPGIMMNMQNMVSTV

SEQ ID NO: 197811 - protein, 15 aa, Artificial Sequence
  Description of Artificial Sequence: Synthetic peptide
  Seed: SPGMMMGMFNMLSTV
SPGIMMNMQNMYSTV

SEQ ID NO: 197812 - protein, 15 aa, Artificial Sequence
  Description of Artificial Sequence: Synthetic peptide
  Seed: SPGMMMGMFNMLSTV
SPGIMMNMRNMASTV

SEQ ID NO: 197813 - protein, 15 aa, Artificial Sequence
  Description of Artificial Sequence: Synthetic peptide
  Seed: SPGMMMGMFNMLSTV
SPGIMMNMRNMFSTV

SEQ ID NO: 197814 - protein, 15 aa, Artificial Sequence
  Description of Artificial Sequence: Synthetic peptide
  Seed: SPGMMMGMFNMLSTV
SPGIMMNMRNMISTV

SEQ ID NO: 197815 - protein, 15 aa, Artificial Sequence
  Description of Artificial Sequence: Synthetic peptide
  Seed: SPGMMMGMFNMLSTV
SPGIMMNMRNMLSTV

SEQ ID NO: 197816 - protein, 15 aa, Artificial Sequence
  Description of Artificial Sequence: Synthetic peptide
  Seed: SPGMMMGMFNMLSTV
SPGIMMNMRNMMSTV

SEQ ID NO: 197817 - protein, 15 aa, Artificial Sequence
  Description of Artificial Sequence: Synthetic peptide
  Seed: SPGMMMGMFNMLSTV
SPGIMMNMRNMSSTV

SEQ ID NO: 197818 - protein, 15 aa, Artificial Sequence
  Description of Artificial Sequence: Synthetic peptide
  Seed: SPGMMMGMFNMLSTV
SPGIMMNMRNMTSTV

SEQ ID NO: 197819 - protein, 15 aa, Artificial Sequence
  Description of Artificial Sequence: Synthetic peptide
  Seed: SPGMMMGMFNMLSTV
SPGIMMNMRNMVSTV

SEQ ID NO: 197820 - protein, 15 aa, Artificial Sequence
  Description of Artificial Sequence: Synthetic peptide
  Seed: SPGMMMGMFNMLSTV
SPGIMMNMRNMYSTV

SEQ ID NO: 197821 - protein, 15 aa, Artificial Sequence
  Description of Artificial Sequence: Synthetic peptide
  Seed: SPGMMMGMFNMLSTV
SPGIMMNMSNMASTV

SEQ ID NO: 197822 - protein, 15 aa, Artificial Sequence
  Description of Artificial Sequence: Synthetic peptide
  Seed: SPGMMMGMFNMLSTV
SPGIMMNMSNMCSTV

SEQ ID NO: 197823 - protein, 15 aa, Artificial Sequence
  Description of Artificial Sequence: Synthetic peptide
  Seed: SPGMMMGMFNMLSTV
SPGIMMNMSNMDSTV

SEQ ID NO: 197824 - protein, 15 aa, Artificial Sequence
  Description of Artificial Sequence: Synthetic peptide
  Seed: SPGMMMGMFNMLSTV
SPGIMMNMSNMESTV

SEQ ID NO: 197825 - protein, 15 aa, Artificial Sequence
  Description of Artificial Sequence: Synthetic peptide
  Seed: SPGMMMGMFNMLSTV
SPGIMMNMSNMFSTV

SEQ ID NO: 197826 - protein, 15 aa, Artificial Sequence
  Description of Artificial Sequence: Synthetic peptide
  Seed: SPGMMMGMFNMLSTV
SPGIMMNMSNMGSTV

SEQ ID NO: 197827 - protein, 15 aa, Artificial Sequence
  Description of Artificial Sequence: Synthetic peptide
  Seed: SPGMMMGMFNMLSTV
SPGIMMNMSNMHSTV

SEQ ID NO: 197828 - protein, 15 aa, Artificial Sequence
  Description of Artificial Sequence: Synthetic peptide
  Seed: SPGMMMGMFNMLSTV
SPGIMMNMSNMISTV

SEQ ID NO: 197829 - protein, 15 aa, Artificial Sequence
  Description of Artificial Sequence: Synthetic peptide
  Seed: SPGMMMGMFNMLSTV
SPGIMMNMSNMKSTV

SEQ ID NO: 197830 - protein, 15 aa, Artificial Sequence
  Description of Artificial Sequence: Synthetic peptide
  Seed: SPGMMMGMFNMLSTV
SPGIMMNMSNMLSTV

SEQ ID NO: 197831 - protein, 15 aa, Artificial Sequence
  Description of Artificial Sequence: Synthetic peptide
  Seed: SPGMMMGMFNMLSTV
SPGIMMNMSNMMSTV

SEQ ID NO: 197832 - protein, 15 aa, Artificial Sequence
  Description of Artificial Sequence: Synthetic peptide
  Seed: SPGMMMGMFNMLSTV
SPGIMMNMSNMNSTV

SEQ ID NO: 197833 - protein, 15 aa, Artificial Sequence
  Description of Artificial Sequence: Synthetic peptide
  Seed: SPGMMMGMFNMLSTV
SPGIMMNMSNMPSTV

SEQ ID NO: 197834 - protein, 15 aa, Artificial Sequence
  Description of Artificial Sequence: Synthetic peptide
  Seed: SPGMMMGMFNMLSTV
SPGIMMNMSNMQSTV

SEQ ID NO: 197835 - protein, 15 aa, Artificial Sequence
  Description of Artificial Sequence: Synthetic peptide
  Seed: SPGMMMGMFNMLSTV
SPGIMMNMSNMRSTV

SEQ ID NO: 197836 - protein, 15 aa, Artificial Sequence
  Description of Artificial Sequence: Synthetic peptide
  Seed: SPGMMMGMFNMLSTV
SPGIMMNMSNMSSTV

SEQ ID NO: 197837 - protein, 15 aa, Artificial Sequence
  Description of Artificial Sequence: Synthetic peptide
  Seed: SPGMMMGMFNMLSTV
SPGIMMNMSNMTSTV

SEQ ID NO: 197838 - protein, 15 aa, Artificial Sequence
  Description of Artificial Sequence: Synthetic peptide
  Seed: SPGMMMGMFNMLSTV
SPGIMMNMSNMVSTV

SEQ ID NO: 197839 - protein, 15 aa, Artificial Sequence
  Description of Artificial Sequence: Synthetic peptide
  Seed: SPGMMMGMFNMLSTV
SPGIMMNMSNMWSTV

SEQ ID NO: 197840 - protein, 15 aa, Artificial Sequence
  Description of Artificial Sequence: Synthetic peptide
  Seed: SPGMMMGMFNMLSTV
SPGIMMNMSNMYSTV

SEQ ID NO: 197841 - protein, 15 aa, Artificial Sequence
  Description of Artificial Sequence: Synthetic peptide
  Seed: SPGMMMGMFNMLSTV
SPGIMMNMTNMASTV

SEQ ID NO: 197842 - protein, 15 aa, Artificial Sequence
  Description of Artificial Sequence: Synthetic peptide
  Seed: SPGMMMGMFNMLSTV
SPGIMMNMTNMCSTV

SEQ ID NO: 197843 - protein, 15 aa, Artificial Sequence
  Description of Artificial Sequence: Synthetic peptide
  Seed: SPGMMMGMFNMLSTV
SPGIMMNMTNMDSTV

SEQ ID NO: 197844 - protein, 15 aa, Artificial Sequence
  Description of Artificial Sequence: Synthetic peptide
  Seed: SPGMMMGMFNMLSTV
SPGIMMNMTNMESTV

SEQ ID NO: 197845 - protein, 15 aa, Artificial Sequence
  Description of Artificial Sequence: Synthetic peptide
  Seed: SPGMMMGMFNMLSTV
SPGIMMNMTNMFSTV

SEQ ID NO: 197846 - protein, 15 aa, Artificial Sequence
  Description of Artificial Sequence: Synthetic peptide
  Seed: SPGMMMGMFNMLSTV
SPGIMMNMTNMGSTV

SEQ ID NO: 197847 - protein, 15 aa, Artificial Sequence
  Description of Artificial Sequence: Synthetic peptide
  Seed: SPGMMMGMFNMLSTV
SPGIMMNMTNMHSTV

SEQ ID NO: 197848 - protein, 15 aa, Artificial Sequence
  Description of Artificial Sequence: Synthetic peptide
  Seed: SPGMMMGMFNMLSTV
SPGIMMNMTNMISTV

SEQ ID NO: 197849 - protein, 15 aa, Artificial Sequence
  Description of Artificial Sequence: Synthetic peptide
  Seed: SPGMMMGMFNMLSTV
SPGIMMNMTNMKSTV

SEQ ID NO: 197850 - protein, 15 aa, Artificial Sequence
  Description of Artificial Sequence: Synthetic peptide
  Seed: SPGMMMGMFNMLSTV
SPGIMMNMTNMLSTV

SEQ ID NO: 197851 - protein, 15 aa, Artificial Sequence
  Description of Artificial Sequence: Synthetic peptide
  Seed: SPGMMMGMFNMLSTV
SPGIMMNMTNMMSTV

SEQ ID NO: 197852 - protein, 15 aa, Artificial Sequence
  Description of Artificial Sequence: Synthetic peptide
  Seed: SPGMMMGMFNMLSTV
SPGIMMNMTNMNSTV

SEQ ID NO: 197853 - protein, 15 aa, Artificial Sequence
  Description of Artificial Sequence: Synthetic peptide
  Seed: SPGMMMGMFNMLSTV
SPGIMMNMTNMPSTV

SEQ ID NO: 197854 - protein, 15 aa, Artificial Sequence
  Description of Artificial Sequence: Synthetic peptide
  Seed: SPGMMMGMFNMLSTV
SPGIMMNMTNMQSTV

SEQ ID NO: 197855 - protein, 15 aa, Artificial Sequence
  Description of Artificial Sequence: Synthetic peptide
  Seed: SPGMMMGMFNMLSTV
SPGIMMNMTNMRSTV

SEQ ID NO: 197856 - protein, 15 aa, Artificial Sequence
  Description of Artificial Sequence: Synthetic peptide
  Seed: SPGMMMGMFNMLSTV
SPGIMMNMTNMSSTV

SEQ ID NO: 197857 - protein, 15 aa, Artificial Sequence
  Description of Artificial Sequence: Synthetic peptide
  Seed: SPGMMMGMFNMLSTV
SPGIMMNMTNMTSTV

SEQ ID NO: 197858 - protein, 15 aa, Artificial Sequence
  Description of Artificial Sequence: Synthetic peptide
  Seed: SPGMMMGMFNMLSTV
SPGIMMNMTNMVSTV

SEQ ID NO: 197859 - protein, 15 aa, Artificial Sequence
  Description of Artificial Sequence: Synthetic peptide
  Seed: SPGMMMGMFNMLSTV
SPGIMMNMTNMWSTV

SEQ ID NO: 197860 - protein, 15 aa, Artificial Sequence
  Description of Artificial Sequence: Synthetic peptide
  Seed: SPGMMMGMFNMLSTV
SPGIMMNMTNMYSTV

SEQ ID NO: 197861 - protein, 15 aa, Artificial Sequence
  Description of Artificial Sequence: Synthetic peptide
  Seed: SPGMMMGMFNMLSTV
SPGIMMNMVNMASTV

SEQ ID NO: 197862 - protein, 15 aa, Artificial Sequence
  Description of Artificial Sequence: Synthetic peptide
  Seed: SPGMMMGMFNMLSTV
SPGIMMNMVNMCSTV

SEQ ID NO: 197863 - protein, 15 aa, Artificial Sequence
  Description of Artificial Sequence: Synthetic peptide
  Seed: SPGMMMGMFNMLSTV
SPGIMMNMVNMDSTV

SEQ ID NO: 197864 - protein, 15 aa, Artificial Sequence
  Description of Artificial Sequence: Synthetic peptide
  Seed: SPGMMMGMFNMLSTV
SPGIMMNMVNMESTV

SEQ ID NO: 197865 - protein, 15 aa, Artificial Sequence
  Description of Artificial Sequence: Synthetic peptide
  Seed: SPGMMMGMFNMLSTV
SPGIMMNMVNMFSTV

SEQ ID NO: 197866 - protein, 15 aa, Artificial Sequence
  Description of Artificial Sequence: Synthetic peptide
  Seed: SPGMMMGMFNMLSTV
SPGIMMNMVNMGSTV

SEQ ID NO: 197867 - protein, 15 aa, Artificial Sequence
  Description of Artificial Sequence: Synthetic peptide
  Seed: SPGMMMGMFNMLSTV
SPGIMMNMVNMHSTV

SEQ ID NO: 197868 - protein, 15 aa, Artificial Sequence
  Description of Artificial Sequence: Synthetic peptide
  Seed: SPGMMMGMFNMLSTV
SPGIMMNMVNMISTV

SEQ ID NO: 197869 - protein, 15 aa, Artificial Sequence
  Description of Artificial Sequence: Synthetic peptide
  Seed: SPGMMMGMFNMLSTV
SPGIMMNMVNMKSTV

SEQ ID NO: 197870 - protein, 15 aa, Artificial Sequence
  Description of Artificial Sequence: Synthetic peptide
  Seed: SPGMMMGMFNMLSTV
SPGIMMNMVNMLSTV

SEQ ID NO: 197871 - protein, 15 aa, Artificial Sequence
  Description of Artificial Sequence: Synthetic peptide
  Seed: SPGMMMGMFNMLSTV
SPGIMMNMVNMMSTV

SEQ ID NO: 197872 - protein, 15 aa, Artificial Sequence
  Description of Artificial Sequence: Synthetic peptide
  Seed: SPGMMMGMFNMLSTV
SPGIMMNMVNMNSTV

SEQ ID NO: 197873 - protein, 15 aa, Artificial Sequence
  Description of Artificial Sequence: Synthetic peptide
  Seed: SPGMMMGMFNMLSTV
SPGIMMNMVNMPSTV

SEQ ID NO: 197874 - protein, 15 aa, Artificial Sequence
  Description of Artificial Sequence: Synthetic peptide
  Seed: SPGMMMGMFNMLSTV
SPGIMMNMVNMQSTV

SEQ ID NO: 197875 - protein, 15 aa, Artificial Sequence
  Description of Artificial Sequence: Synthetic peptide
  Seed: SPGMMMGMFNMLSTV
SPGIMMNMVNMRSTV

SEQ ID NO: 197876 - protein, 15 aa, Artificial Sequence
  Description of Artificial Sequence: Synthetic peptide
  Seed: SPGMMMGMFNMLSTV
SPGIMMNMVNMSSTV

SEQ ID NO: 197877 - protein, 15 aa, Artificial Sequence
  Description of Artificial Sequence: Synthetic peptide
  Seed: SPGMMMGMFNMLSTV
SPGIMMNMVNMTSTV

SEQ ID NO: 197878 - protein, 15 aa, Artificial Sequence
  Description of Artificial Sequence: Synthetic peptide
  Seed: SPGMMMGMFNMLSTV
SPGIMMNMVNMVSTV

SEQ ID NO: 197879 - protein, 15 aa, Artificial Sequence
  Description of Artificial Sequence: Synthetic peptide
  Seed: SPGMMMGMFNMLSTV
SPGIMMNMVNMWSTV

SEQ ID NO: 197880 - protein, 15 aa, Artificial Sequence
  Description of Artificial Sequence: Synthetic peptide
  Seed: SPGMMMGMFNMLSTV
SPGIMMNMVNMYSTV

SEQ ID NO: 197881 - protein, 15 aa, Artificial Sequence
  Description of Artificial Sequence: Synthetic peptide
  Seed: SPGMMMGMFNMLSTV
SPGIMMNMWNMASTV

SEQ ID NO: 197882 - protein, 15 aa, Artificial Sequence
  Description of Artificial Sequence: Synthetic peptide
  Seed: SPGMMMGMFNMLSTV
SPGIMMNMWNMFSTV

SEQ ID NO: 197883 - protein, 15 aa, Artificial Sequence
  Description of Artificial Sequence: Synthetic peptide
  Seed: SPGMMMGMFNMLSTV
SPGIMMNMWNMISTV

SEQ ID NO: 197884 - protein, 15 aa, Artificial Sequence
  Description of Artificial Sequence: Synthetic peptide
  Seed: SPGMMMGMFNMLSTV
SPGIMMNMWNMLSTV

SEQ ID NO: 197885 - protein, 15 aa, Artificial Sequence
  Description of Artificial Sequence: Synthetic peptide
  Seed: SPGMMMGMFNMLSTV
SPGIMMNMWNMMSTV

SEQ ID NO: 197886 - protein, 15 aa, Artificial Sequence
  Description of Artificial Sequence: Synthetic peptide
  Seed: SPGMMMGMFNMLSTV
SPGIMMNMWNMSSTV

SEQ ID NO: 197887 - protein, 15 aa, Artificial Sequence
  Description of Artificial Sequence: Synthetic peptide
  Seed: SPGMMMGMFNMLSTV
SPGIMMNMWNMTSTV

SEQ ID NO: 197888 - protein, 15 aa, Artificial Sequence
  Description of Artificial Sequence: Synthetic peptide
  Seed: SPGMMMGMFNMLSTV
SPGIMMNMWNMVSTV

SEQ ID NO: 197889 - protein, 15 aa, Artificial Sequence
  Description of Artificial Sequence: Synthetic peptide
  Seed: SPGMMMGMFNMLSTV
SPGIMMNMWNMYSTV

SEQ ID NO: 197890 - protein, 15 aa, Artificial Sequence
  Description of Artificial Sequence: Synthetic peptide
  Seed: SPGMMMGMFNMLSTV
SPGIMMNMYNMASTV

SEQ ID NO: 197891 - protein, 15 aa, Artificial Sequence
  Description of Artificial Sequence: Synthetic peptide
  Seed: SPGMMMGMFNMLSTV
SPGIMMNMYNMFSTV

SEQ ID NO: 197892 - protein, 15 aa, Artificial Sequence
  Description of Artificial Sequence: Synthetic peptide
  Seed: SPGMMMGMFNMLSTV
SPGIMMNMYNMISTV

SEQ ID NO: 197893 - protein, 15 aa, Artificial Sequence
  Description of Artificial Sequence: Synthetic peptide
  Seed: SPGMMMGMFNMLSTV
SPGIMMNMYNMLSTV

SEQ ID NO: 197894 - protein, 15 aa, Artificial Sequence
  Description of Artificial Sequence: Synthetic peptide
  Seed: SPGMMMGMFNMLSTV
SPGIMMNMYNMMSTV

SEQ ID NO: 197895 - protein, 15 aa, Artificial Sequence
  Description of Artificial Sequence: Synthetic peptide
  Seed: SPGMMMGMFNMLSTV
SPGIMMNMYNMSSTV

SEQ ID NO: 197896 - protein, 15 aa, Artificial Sequence
  Description of Artificial Sequence: Synthetic peptide
  Seed: SPGMMMGMFNMLSTV
SPGIMMNMYNMTSTV

SEQ ID NO: 197897 - protein, 15 aa, Artificial Sequence
  Description of Artificial Sequence: Synthetic peptide
  Seed: SPGMMMGMFNMLSTV
SPGIMMNMYNMVSTV

SEQ ID NO: 197898 - protein, 15 aa, Artificial Sequence
  Description of Artificial Sequence: Synthetic peptide
  Seed: SPGMMMGMFNMLSTV
SPGIMMNMYNMYSTV

SEQ ID NO: 197899 - protein, 15 aa, Artificial Sequence
  Description of Artificial Sequence: Synthetic peptide
  Seed: SPGMMMGMFNMLSTV
SPGIMMQMANMASTV

SEQ ID NO: 197900 - protein, 15 aa, Artificial Sequence
  Description of Artificial Sequence: Synthetic peptide
  Seed: SPGMMMGMFNMLSTV
SPGIMMQMANMFSTV

SEQ ID NO: 197901 - protein, 15 aa, Artificial Sequence
  Description of Artificial Sequence: Synthetic peptide
  Seed: SPGMMMGMFNMLSTV
SPGIMMQMANMISTV

SEQ ID NO: 197902 - protein, 15 aa, Artificial Sequence
  Description of Artificial Sequence: Synthetic peptide
  Seed: SPGMMMGMFNMLSTV
SPGIMMQMANMLSTV

SEQ ID NO: 197903 - protein, 15 aa, Artificial Sequence
  Description of Artificial Sequence: Synthetic peptide
  Seed: SPGMMMGMFNMLSTV
SPGIMMQMANMMSTV

SEQ ID NO: 197904 - protein, 15 aa, Artificial Sequence
  Description of Artificial Sequence: Synthetic peptide
  Seed: SPGMMMGMFNMLSTV
SPGIMMQMANMTSTV

SEQ ID NO: 197905 - protein, 15 aa, Artificial Sequence
  Description of Artificial Sequence: Synthetic peptide
  Seed: SPGMMMGMFNMLSTV
SPGIMMQMANMVSTV

SEQ ID NO: 197906 - protein, 15 aa, Artificial Sequence
  Description of Artificial Sequence: Synthetic peptide
  Seed: SPGMMMGMFNMLSTV
SPGIMMQMANMYSTV

SEQ ID NO: 197907 - protein, 15 aa, Artificial Sequence
  Description of Artificial Sequence: Synthetic peptide
  Seed: SPGMMMGMFNMLSTV
SPGIMMQMFNMESTV

SEQ ID NO: 197908 - protein, 15 aa, Artificial Sequence
  Description of Artificial Sequence: Synthetic peptide
  Seed: SPGMMMGMFNMLSTV
SPGIMMQMFNMFSTV

SEQ ID NO: 197909 - protein, 15 aa, Artificial Sequence
  Description of Artificial Sequence: Synthetic peptide
  Seed: SPGMMMGMFNMLSTV
SPGIMMQMFNMISTV

SEQ ID NO: 197910 - protein, 15 aa, Artificial Sequence
  Description of Artificial Sequence: Synthetic peptide
  Seed: SPGMMMGMFNMLSTV
SPGIMMQMFNMLSTV

SEQ ID NO: 197911 - protein, 15 aa, Artificial Sequence
  Description of Artificial Sequence: Synthetic peptide
  Seed: SPGMMMGMFNMLSTV
SPGIMMQMFNMMSTV

SEQ ID NO: 197912 - protein, 15 aa, Artificial Sequence
  Description of Artificial Sequence: Synthetic peptide
  Seed: SPGMMMGMFNMLSTV
SPGIMMQMFNMVSTV

SEQ ID NO: 197913 - protein, 15 aa, Artificial Sequence
  Description of Artificial Sequence: Synthetic peptide
  Seed: SPGMMMGMFNMLSTV
SPGIMMQMFNMYSTV

SEQ ID NO: 197914 - protein, 15 aa, Artificial Sequence
  Description of Artificial Sequence: Synthetic peptide
  Seed: SPGMMMGMFNMLSTV
SPGIMMQMGNMFSTV

SEQ ID NO: 197915 - protein, 15 aa, Artificial Sequence
  Description of Artificial Sequence: Synthetic peptide
  Seed: SPGMMMGMFNMLSTV
SPGIMMQMGNMISTV

SEQ ID NO: 197916 - protein, 15 aa, Artificial Sequence
  Description of Artificial Sequence: Synthetic peptide
  Seed: SPGMMMGMFNMLSTV
SPGIMMQMGNMLSTV

SEQ ID NO: 197917 - protein, 15 aa, Artificial Sequence
  Description of Artificial Sequence: Synthetic peptide
  Seed: SPGMMMGMFNMLSTV
SPGIMMQMGNMMSTV

SEQ ID NO: 197918 - protein, 15 aa, Artificial Sequence
  Description of Artificial Sequence: Synthetic peptide
  Seed: SPGMMMGMFNMLSTV
SPGIMMQMGNMVSTV

SEQ ID NO: 197919 - protein, 15 aa, Artificial Sequence
  Description of Artificial Sequence: Synthetic peptide
  Seed: SPGMMMGMFNMLSTV
SPGIMMQMHNMISTV

SEQ ID NO: 197920 - protein, 15 aa, Artificial Sequence
  Description of Artificial Sequence: Synthetic peptide
  Seed: SPGMMMGMFNMLSTV
SPGIMMQMHNMVSTV

SEQ ID NO: 197921 - protein, 15 aa, Artificial Sequence
  Description of Artificial Sequence: Synthetic peptide
  Seed: SPGMMMGMFNMLSTV
SPGIMMQMINMISTV

SEQ ID NO: 197922 - protein, 15 aa, Artificial Sequence
  Description of Artificial Sequence: Synthetic peptide
  Seed: SPGMMMGMFNMLSTV
SPGIMMQMINMVSTV

SEQ ID NO: 197923 - protein, 15 aa, Artificial Sequence
  Description of Artificial Sequence: Synthetic peptide
  Seed: SPGMMMGMFNMLSTV
SPGIMMQMNNMASTV

SEQ ID NO: 197924 - protein, 15 aa, Artificial Sequence
  Description of Artificial Sequence: Synthetic peptide
  Seed: SPGMMMGMFNMLSTV
SPGIMMQMNNMFSTV

SEQ ID NO: 197925 - protein, 15 aa, Artificial Sequence
  Description of Artificial Sequence: Synthetic peptide
  Seed: SPGMMMGMFNMLSTV
SPGIMMQMNNMISTV

SEQ ID NO: 197926 - protein, 15 aa, Artificial Sequence
  Description of Artificial Sequence: Synthetic peptide
  Seed: SPGMMMGMFNMLSTV
SPGIMMQMNNMLSTV

SEQ ID NO: 197927 - protein, 15 aa, Artificial Sequence
  Description of Artificial Sequence: Synthetic peptide
  Seed: SPGMMMGMFNMLSTV
SPGIMMQMNNMMSTV

SEQ ID NO: 197928 - protein, 15 aa, Artificial Sequence
  Description of Artificial Sequence: Synthetic peptide
  Seed: SPGMMMGMFNMLSTV
SPGIMMQMNNMVSTV

SEQ ID NO: 197929 - protein, 15 aa, Artificial Sequence
  Description of Artificial Sequence: Synthetic peptide
  Seed: SPGMMMGMFNMLSTV
SPGIMMQMNNMYSTV

SEQ ID NO: 197930 - protein, 15 aa, Artificial Sequence
  Description of Artificial Sequence: Synthetic peptide
  Seed: SPGMMMGMFNMLSTV
SPGIMMQMPNMFSTV

SEQ ID NO: 197931 - protein, 15 aa, Artificial Sequence
  Description of Artificial Sequence: Synthetic peptide
  Seed: SPGMMMGMFNMLSTV
SPGIMMQMPNMISTV

SEQ ID NO: 197932 - protein, 15 aa, Artificial Sequence
  Description of Artificial Sequence: Synthetic peptide
  Seed: SPGMMMGMFNMLSTV
SPGIMMQMPNMLSTV

SEQ ID NO: 197933 - protein, 15 aa, Artificial Sequence
  Description of Artificial Sequence: Synthetic peptide
  Seed: SPGMMMGMFNMLSTV
SPGIMMQMPNMMSTV

SEQ ID NO: 197934 - protein, 15 aa, Artificial Sequence
  Description of Artificial Sequence: Synthetic peptide
  Seed: SPGMMMGMFNMLSTV
SPGIMMQMPNMVSTV

SEQ ID NO: 197935 - protein, 15 aa, Artificial Sequence
  Description of Artificial Sequence: Synthetic peptide
  Seed: SPGMMMGMFNMLSTV
SPGIMMQMPNMYSTV

SEQ ID NO: 197936 - protein, 15 aa, Artificial Sequence
  Description of Artificial Sequence: Synthetic peptide
  Seed: SPGMMMGMFNMLSTV
SPGIMMQMSNMFSTV

SEQ ID NO: 197937 - protein, 15 aa, Artificial Sequence
  Description of Artificial Sequence: Synthetic peptide
  Seed: SPGMMMGMFNMLSTV
SPGIMMQMSNMISTV

SEQ ID NO: 197938 - protein, 15 aa, Artificial Sequence
  Description of Artificial Sequence: Synthetic peptide
  Seed: SPGMMMGMFNMLSTV
SPGIMMQMSNMLSTV

SEQ ID NO: 197939 - protein, 15 aa, Artificial Sequence
  Description of Artificial Sequence: Synthetic peptide
  Seed: SPGMMMGMFNMLSTV
SPGIMMQMSNMMSTV

SEQ ID NO: 197940 - protein, 15 aa, Artificial Sequence
  Description of Artificial Sequence: Synthetic peptide
  Seed: SPGMMMGMFNMLSTV
SPGIMMQMSNMVSTV

SEQ ID NO: 197941 - protein, 15 aa, Artificial Sequence
  Description of Artificial Sequence: Synthetic peptide
  Seed: SPGMMMGMFNMLSTV
SPGIMMQMSNMYSTV

SEQ ID NO: 197942 - protein, 15 aa, Artificial Sequence
  Description of Artificial Sequence: Synthetic peptide
  Seed: SPGMMMGMFNMLSTV
SPGIMMQMTNMFSTV

SEQ ID NO: 197943 - protein, 15 aa, Artificial Sequence
  Description of Artificial Sequence: Synthetic peptide
  Seed: SPGMMMGMFNMLSTV
SPGIMMQMTNMISTV

SEQ ID NO: 197944 - protein, 15 aa, Artificial Sequence
  Description of Artificial Sequence: Synthetic peptide
  Seed: SPGMMMGMFNMLSTV
SPGIMMQMTNMLSTV

SEQ ID NO: 197945 - protein, 15 aa, Artificial Sequence
  Description of Artificial Sequence: Synthetic peptide
  Seed: SPGMMMGMFNMLSTV
SPGIMMQMTNMMSTV

SEQ ID NO: 197946 - protein, 15 aa, Artificial Sequence
  Description of Artificial Sequence: Synthetic peptide
  Seed: SPGMMMGMFNMLSTV
SPGIMMQMTNMVSTV

SEQ ID NO: 197947 - protein, 15 aa, Artificial Sequence
  Description of Artificial Sequence: Synthetic peptide
  Seed: SPGMMMGMFNMLSTV
SPGIMMQMTNMYSTV

SEQ ID NO: 197948 - protein, 15 aa, Artificial Sequence
  Description of Artificial Sequence: Synthetic peptide
  Seed: SPGMMMGMFNMLSTV
SPGIMMQMVNMISTV

SEQ ID NO: 197949 - protein, 15 aa, Artificial Sequence
  Description of Artificial Sequence: Synthetic peptide
  Seed: SPGMMMGMFNMLSTV
SPGIMMQMVNMVSTV

SEQ ID NO: 197950 - protein, 15 aa, Artificial Sequence
  Description of Artificial Sequence: Synthetic peptide
  Seed: SPGMMMGMFNMLSTV
SPGIMMQMYNMFSTV

SEQ ID NO: 197951 - protein, 15 aa, Artificial Sequence
  Description of Artificial Sequence: Synthetic peptide
  Seed: SPGMMMGMFNMLSTV
SPGIMMQMYNMISTV

SEQ ID NO: 197952 - protein, 15 aa, Artificial Sequence
  Description of Artificial Sequence: Synthetic peptide
  Seed: SPGMMMGMFNMLSTV
SPGIMMQMYNMLSTV

SEQ ID NO: 197953 - protein, 15 aa, Artificial Sequence
  Description of Artificial Sequence: Synthetic peptide
  Seed: SPGMMMGMFNMLSTV
SPGIMMRMANMISTV

SEQ ID NO: 197954 - protein, 15 aa, Artificial Sequence
  Description of Artificial Sequence: Synthetic peptide
  Seed: SPGMMMGMFNMLSTV
SPGIMMRMANMVSTV

SEQ ID NO: 197955 - protein, 15 aa, Artificial Sequence
  Description of Artificial Sequence: Synthetic peptide
  Seed: SPGMMMGMFNMLSTV
SPGIMMRMFNMFSTV

SEQ ID NO: 197956 - protein, 15 aa, Artificial Sequence
  Description of Artificial Sequence: Synthetic peptide
  Seed: SPGMMMGMFNMLSTV
SPGIMMRMFNMLSTV

SEQ ID NO: 197957 - protein, 15 aa, Artificial Sequence
  Description of Artificial Sequence: Synthetic peptide
  Seed: SPGMMMGMFNMLSTV
SPGIMMRMNNMASTV

SEQ ID NO: 197958 - protein, 15 aa, Artificial Sequence
  Description of Artificial Sequence: Synthetic peptide
  Seed: SPGMMMGMFNMLSTV
SPGIMMRMNNMFSTV

SEQ ID NO: 197959 - protein, 15 aa, Artificial Sequence
  Description of Artificial Sequence: Synthetic peptide
  Seed: SPGMMMGMFNMLSTV
SPGIMMRMNNMISTV

SEQ ID NO: 197960 - protein, 15 aa, Artificial Sequence
  Description of Artificial Sequence: Synthetic peptide
  Seed: SPGMMMGMFNMLSTV
SPGIMMRMNNMLSTV

SEQ ID NO: 197961 - protein, 15 aa, Artificial Sequence
  Description of Artificial Sequence: Synthetic peptide
  Seed: SPGMMMGMFNMLSTV
SPGIMMRMNNMMSTV

SEQ ID NO: 197962 - protein, 15 aa, Artificial Sequence
  Description of Artificial Sequence: Synthetic peptide
  Seed: SPGMMMGMFNMLSTV
SPGIMMRMNNMVSTV

SEQ ID NO: 197963 - protein, 15 aa, Artificial Sequence
  Description of Artificial Sequence: Synthetic peptide
  Seed: SPGMMMGMFNMLSTV
SPGIMMRMNNMYSTV

SEQ ID NO: 197964 - protein, 15 aa, Artificial Sequence
  Description of Artificial Sequence: Synthetic peptide
  Seed: SPGMMMGMFNMLSTV
SPGIMMRMSNMISTV

SEQ ID NO: 197965 - protein, 15 aa, Artificial Sequence
  Description of Artificial Sequence: Synthetic peptide
  Seed: SPGMMMGMFNMLSTV
SPGIMMRMSNMLSTV

SEQ ID NO: 197966 - protein, 15 aa, Artificial Sequence
  Description of Artificial Sequence: Synthetic peptide
  Seed: SPGMMMGMFNMLSTV
SPGIMMRMSNMVSTV

SEQ ID NO: 197967 - protein, 15 aa, Artificial Sequence
  Description of Artificial Sequence: Synthetic peptide
  Seed: SPGMMMGMFNMLSTV
SPGIMMSMANMASTV

SEQ ID NO: 197968 - protein, 15 aa, Artificial Sequence
  Description of Artificial Sequence: Synthetic peptide
  Seed: SPGMMMGMFNMLSTV
SPGIMMSMANMFSTV

SEQ ID NO: 197969 - protein, 15 aa, Artificial Sequence
  Description of Artificial Sequence: Synthetic peptide
  Seed: SPGMMMGMFNMLSTV
SPGIMMSMANMGSTV

SEQ ID NO: 197970 - protein, 15 aa, Artificial Sequence
  Description of Artificial Sequence: Synthetic peptide
  Seed: SPGMMMGMFNMLSTV
SPGIMMSMANMHSTV

SEQ ID NO: 197971 - protein, 15 aa, Artificial Sequence
  Description of Artificial Sequence: Synthetic peptide
  Seed: SPGMMMGMFNMLSTV
SPGIMMSMANMISTV

SEQ ID NO: 197972 - protein, 15 aa, Artificial Sequence
  Description of Artificial Sequence: Synthetic peptide
  Seed: SPGMMMGMFNMLSTV
SPGIMMSMANMKSTV

SEQ ID NO: 197973 - protein, 15 aa, Artificial Sequence
  Description of Artificial Sequence: Synthetic peptide
  Seed: SPGMMMGMFNMLSTV
SPGIMMSMANMLSTV

SEQ ID NO: 197974 - protein, 15 aa, Artificial Sequence
  Description of Artificial Sequence: Synthetic peptide
  Seed: SPGMMMGMFNMLSTV
SPGIMMSMANMMSTV

SEQ ID NO: 197975 - protein, 15 aa, Artificial Sequence
  Description of Artificial Sequence: Synthetic peptide
  Seed: SPGMMMGMFNMLSTV
SPGIMMSMANMNSTV

SEQ ID NO: 197976 - protein, 15 aa, Artificial Sequence
  Description of Artificial Sequence: Synthetic peptide
  Seed: SPGMMMGMFNMLSTV
SPGIMMSMANMQSTV

SEQ ID NO: 197977 - protein, 15 aa, Artificial Sequence
  Description of Artificial Sequence: Synthetic peptide
  Seed: SPGMMMGMFNMLSTV
SPGIMMSMANMRSTV

SEQ ID NO: 197978 - protein, 15 aa, Artificial Sequence
  Description of Artificial Sequence: Synthetic peptide
  Seed: SPGMMMGMFNMLSTV
SPGIMMSMANMSSTV

SEQ ID NO: 197979 - protein, 15 aa, Artificial Sequence
  Description of Artificial Sequence: Synthetic peptide
  Seed: SPGMMMGMFNMLSTV
SPGIMMSMANMTSTV

SEQ ID NO: 197980 - protein, 15 aa, Artificial Sequence
  Description of Artificial Sequence: Synthetic peptide
  Seed: SPGMMMGMFNMLSTV
SPGIMMSMANMVSTV

SEQ ID NO: 197981 - protein, 15 aa, Artificial Sequence
  Description of Artificial Sequence: Synthetic peptide
  Seed: SPGMMMGMFNMLSTV
SPGIMMSMANMYSTV

SEQ ID NO: 197982 - protein, 15 aa, Artificial Sequence
  Description of Artificial Sequence: Synthetic peptide
  Seed: SPGMMMGMFNMLSTV
SPGIMMSMDNMISTV

SEQ ID NO: 197983 - protein, 15 aa, Artificial Sequence
  Description of Artificial Sequence: Synthetic peptide
  Seed: SPGMMMGMFNMLSTV
SPGIMMSMDNMLSTV

SEQ ID NO: 197984 - protein, 15 aa, Artificial Sequence
  Description of Artificial Sequence: Synthetic peptide
  Seed: SPGMMMGMFNMLSTV
SPGIMMSMDNMVSTV

SEQ ID NO: 197985 - protein, 15 aa, Artificial Sequence
  Description of Artificial Sequence: Synthetic peptide
  Seed: SPGMMMGMFNMLSTV
SPGIMMSMENMISTV

SEQ ID NO: 197986 - protein, 15 aa, Artificial Sequence
  Description of Artificial Sequence: Synthetic peptide
  Seed: SPGMMMGMFNMLSTV
SPGIMMSMENMVSTV

SEQ ID NO: 197987 - protein, 15 aa, Artificial Sequence
  Description of Artificial Sequence: Synthetic peptide
  Seed: SPGMMMGMFNMLSTV
SPGIMMSMFNMASTV

SEQ ID NO: 197988 - protein, 15 aa, Artificial Sequence
  Description of Artificial Sequence: Synthetic peptide
  Seed: SPGMMMGMFNMLSTV
SPGIMMSMFNMDSTV

SEQ ID NO: 197989 - protein, 15 aa, Artificial Sequence
  Description of Artificial Sequence: Synthetic peptide
  Seed: SPGMMMGMFNMLSTV
SPGIMMSMFNMESTV

SEQ ID NO: 197990 - protein, 15 aa, Artificial Sequence
  Description of Artificial Sequence: Synthetic peptide
  Seed: SPGMMMGMFNMLSTV
SPGIMMSMFNMFSTV

SEQ ID NO: 197991 - protein, 15 aa, Artificial Sequence
  Description of Artificial Sequence: Synthetic peptide
  Seed: SPGMMMGMFNMLSTV
SPGIMMSMFNMISTV

SEQ ID NO: 197992 - protein, 15 aa, Artificial Sequence
  Description of Artificial Sequence: Synthetic peptide
  Seed: SPGMMMGMFNMLSTV
SPGIMMSMFNMLSTV

SEQ ID NO: 197993 - protein, 15 aa, Artificial Sequence
  Description of Artificial Sequence: Synthetic peptide
  Seed: SPGMMMGMFNMLSTV
SPGIMMSMFNMMSTV

SEQ ID NO: 197994 - protein, 15 aa, Artificial Sequence
  Description of Artificial Sequence: Synthetic peptide
  Seed: SPGMMMGMFNMLSTV
SPGIMMSMFNMNSTV

SEQ ID NO: 197995 - protein, 15 aa, Artificial Sequence
  Description of Artificial Sequence: Synthetic peptide
  Seed: SPGMMMGMFNMLSTV
SPGIMMSMFNMQSTV

SEQ ID NO: 197996 - protein, 15 aa, Artificial Sequence
  Description of Artificial Sequence: Synthetic peptide
  Seed: SPGMMMGMFNMLSTV
SPGIMMSMFNMSSTV

SEQ ID NO: 197997 - protein, 15 aa, Artificial Sequence
  Description of Artificial Sequence: Synthetic peptide
  Seed: SPGMMMGMFNMLSTV
SPGIMMSMFNMTSTV

SEQ ID NO: 197998 - protein, 15 aa, Artificial Sequence
  Description of Artificial Sequence: Synthetic peptide
  Seed: SPGMMMGMFNMLSTV
SPGIMMSMFNMVSTV

SEQ ID NO: 197999 - protein, 15 aa, Artificial Sequence
  Description of Artificial Sequence: Synthetic peptide
  Seed: SPGMMMGMFNMLSTV
SPGIMMSMFNMYSTV

SEQ ID NO: 198000 - protein, 15 aa, Artificial Sequence
  Description of Artificial Sequence: Synthetic peptide
  Seed: SPGMMMGMFNMLSTV
SPGIMMSMGNMASTV

SEQ ID NO: 198001 - protein, 15 aa, Artificial Sequence
  Description of Artificial Sequence: Synthetic peptide
  Seed: SPGMMMGMFNMLSTV
SPGIMMSMGNMFSTV

SEQ ID NO: 198002 - protein, 15 aa, Artificial Sequence
  Description of Artificial Sequence: Synthetic peptide
  Seed: SPGMMMGMFNMLSTV
SPGIMMSMGNMISTV

SEQ ID NO: 198003 - protein, 15 aa, Artificial Sequence
  Description of Artificial Sequence: Synthetic peptide
  Seed: SPGMMMGMFNMLSTV
SPGIMMSMGNMLSTV

SEQ ID NO: 198004 - protein, 15 aa, Artificial Sequence
  Description of Artificial Sequence: Synthetic peptide
  Seed: SPGMMMGMFNMLSTV
SPGIMMSMGNMMSTV

SEQ ID NO: 198005 - protein, 15 aa, Artificial Sequence
  Description of Artificial Sequence: Synthetic peptide
  Seed: SPGMMMGMFNMLSTV
SPGIMMSMGNMNSTV

SEQ ID NO: 198006 - protein, 15 aa, Artificial Sequence
  Description of Artificial Sequence: Synthetic peptide
  Seed: SPGMMMGMFNMLSTV
SPGIMMSMGNMSSTV

SEQ ID NO: 198007 - protein, 15 aa, Artificial Sequence
  Description of Artificial Sequence: Synthetic peptide
  Seed: SPGMMMGMFNMLSTV
SPGIMMSMGNMTSTV

SEQ ID NO: 198008 - protein, 15 aa, Artificial Sequence
  Description of Artificial Sequence: Synthetic peptide
  Seed: SPGMMMGMFNMLSTV
SPGIMMSMGNMVSTV

SEQ ID NO: 198009 - protein, 15 aa, Artificial Sequence
  Description of Artificial Sequence: Synthetic peptide
  Seed: SPGMMMGMFNMLSTV
SPGIMMSMGNMYSTV

SEQ ID NO: 198010 - protein, 15 aa, Artificial Sequence
  Description of Artificial Sequence: Synthetic peptide
  Seed: SPGMMMGMFNMLSTV
SPGIMMSMHNMFSTV

SEQ ID NO: 198011 - protein, 15 aa, Artificial Sequence
  Description of Artificial Sequence: Synthetic peptide
  Seed: SPGMMMGMFNMLSTV
SPGIMMSMHNMISTV

SEQ ID NO: 198012 - protein, 15 aa, Artificial Sequence
  Description of Artificial Sequence: Synthetic peptide
  Seed: SPGMMMGMFNMLSTV
SPGIMMSMHNMLSTV

SEQ ID NO: 198013 - protein, 15 aa, Artificial Sequence
  Description of Artificial Sequence: Synthetic peptide
  Seed: SPGMMMGMFNMLSTV
SPGIMMSMHNMMSTV

SEQ ID NO: 198014 - protein, 15 aa, Artificial Sequence
  Description of Artificial Sequence: Synthetic peptide
  Seed: SPGMMMGMFNMLSTV
SPGIMMSMHNMVSTV

SEQ ID NO: 198015 - protein, 15 aa, Artificial Sequence
  Description of Artificial Sequence: Synthetic peptide
  Seed: SPGMMMGMFNMLSTV
SPGIMMSMHNMYSTV

SEQ ID NO: 198016 - protein, 15 aa, Artificial Sequence
  Description of Artificial Sequence: Synthetic peptide
  Seed: SPGMMMGMFNMLSTV
SPGIMMSMINMASTV

SEQ ID NO: 198017 - protein, 15 aa, Artificial Sequence
  Description of Artificial Sequence: Synthetic peptide
  Seed: SPGMMMGMFNMLSTV
SPGIMMSMINMFSTV

SEQ ID NO: 198018 - protein, 15 aa, Artificial Sequence
  Description of Artificial Sequence: Synthetic peptide
  Seed: SPGMMMGMFNMLSTV
SPGIMMSMINMISTV

SEQ ID NO: 198019 - protein, 15 aa, Artificial Sequence
  Description of Artificial Sequence: Synthetic peptide
  Seed: SPGMMMGMFNMLSTV
SPGIMMSMINMLSTV

SEQ ID NO: 198020 - protein, 15 aa, Artificial Sequence
  Description of Artificial Sequence: Synthetic peptide
  Seed: SPGMMMGMFNMLSTV
SPGIMMSMINMMSTV

SEQ ID NO: 198021 - protein, 15 aa, Artificial Sequence
  Description of Artificial Sequence: Synthetic peptide
  Seed: SPGMMMGMFNMLSTV
SPGIMMSMINMVSTV

SEQ ID NO: 198022 - protein, 15 aa, Artificial Sequence
  Description of Artificial Sequence: Synthetic peptide
  Seed: SPGMMMGMFNMLSTV
SPGIMMSMINMYSTV

SEQ ID NO: 198023 - protein, 15 aa, Artificial Sequence
  Description of Artificial Sequence: Synthetic peptide
  Seed: SPGMMMGMFNMLSTV
SPGIMMSMKNMISTV

SEQ ID NO: 198024 - protein, 15 aa, Artificial Sequence
  Description of Artificial Sequence: Synthetic peptide
  Seed: SPGMMMGMFNMLSTV
SPGIMMSMKNMLSTV

SEQ ID NO: 198025 - protein, 15 aa, Artificial Sequence
  Description of Artificial Sequence: Synthetic peptide
  Seed: SPGMMMGMFNMLSTV
SPGIMMSMKNMVSTV

SEQ ID NO: 198026 - protein, 15 aa, Artificial Sequence
  Description of Artificial Sequence: Synthetic peptide
  Seed: SPGMMMGMFNMLSTV
SPGIMMSMLNMVSTV

SEQ ID NO: 198027 - protein, 15 aa, Artificial Sequence
  Description of Artificial Sequence: Synthetic peptide
  Seed: SPGMMMGMFNMLSTV
SPGIMMSMMNMISTV

SEQ ID NO: 198028 - protein, 15 aa, Artificial Sequence
  Description of Artificial Sequence: Synthetic peptide
  Seed: SPGMMMGMFNMLSTV
SPGIMMSMMNMVSTV

SEQ ID NO: 198029 - protein, 15 aa, Artificial Sequence
  Description of Artificial Sequence: Synthetic peptide
  Seed: SPGMMMGMFNMLSTV
SPGIMMSMMNMYSTV

SEQ ID NO: 198030 - protein, 15 aa, Artificial Sequence
  Description of Artificial Sequence: Synthetic peptide
  Seed: SPGMMMGMFNMLSTV
SPGIMMSMNNMASTV

SEQ ID NO: 198031 - protein, 15 aa, Artificial Sequence
  Description of Artificial Sequence: Synthetic peptide
  Seed: SPGMMMGMFNMLSTV
SPGIMMSMNNMFSTV

SEQ ID NO: 198032 - protein, 15 aa, Artificial Sequence
  Description of Artificial Sequence: Synthetic peptide
  Seed: SPGMMMGMFNMLSTV
SPGIMMSMNNMGSTV

SEQ ID NO: 198033 - protein, 15 aa, Artificial Sequence
  Description of Artificial Sequence: Synthetic peptide
  Seed: SPGMMMGMFNMLSTV
SPGIMMSMNNMHSTV

SEQ ID NO: 198034 - protein, 15 aa, Artificial Sequence
  Description of Artificial Sequence: Synthetic peptide
  Seed: SPGMMMGMFNMLSTV
SPGIMMSMNNMISTV

SEQ ID NO: 198035 - protein, 15 aa, Artificial Sequence
  Description of Artificial Sequence: Synthetic peptide
  Seed: SPGMMMGMFNMLSTV
SPGIMMSMNNMLSTV

SEQ ID NO: 198036 - protein, 15 aa, Artificial Sequence
  Description of Artificial Sequence: Synthetic peptide
  Seed: SPGMMMGMFNMLSTV
SPGIMMSMNNMMSTV

SEQ ID NO: 198037 - protein, 15 aa, Artificial Sequence
  Description of Artificial Sequence: Synthetic peptide
  Seed: SPGMMMGMFNMLSTV
SPGIMMSMNNMNSTV

SEQ ID NO: 198038 - protein, 15 aa, Artificial Sequence
  Description of Artificial Sequence: Synthetic peptide
  Seed: SPGMMMGMFNMLSTV
SPGIMMSMNNMPSTV

SEQ ID NO: 198039 - protein, 15 aa, Artificial Sequence
  Description of Artificial Sequence: Synthetic peptide
  Seed: SPGMMMGMFNMLSTV
SPGIMMSMNNMQSTV

SEQ ID NO: 198040 - protein, 15 aa, Artificial Sequence
  Description of Artificial Sequence: Synthetic peptide
  Seed: SPGMMMGMFNMLSTV
SPGIMMSMNNMRSTV

SEQ ID NO: 198041 - protein, 15 aa, Artificial Sequence
  Description of Artificial Sequence: Synthetic peptide
  Seed: SPGMMMGMFNMLSTV
SPGIMMSMNNMSSTV

SEQ ID NO: 198042 - protein, 15 aa, Artificial Sequence
  Description of Artificial Sequence: Synthetic peptide
  Seed: SPGMMMGMFNMLSTV
SPGIMMSMNNMTSTV

SEQ ID NO: 198043 - protein, 15 aa, Artificial Sequence
  Description of Artificial Sequence: Synthetic peptide
  Seed: SPGMMMGMFNMLSTV
SPGIMMSMNNMVSTV

SEQ ID NO: 198044 - protein, 15 aa, Artificial Sequence
  Description of Artificial Sequence: Synthetic peptide
  Seed: SPGMMMGMFNMLSTV
SPGIMMSMNNMWSTV

SEQ ID NO: 198045 - protein, 15 aa, Artificial Sequence
  Description of Artificial Sequence: Synthetic peptide
  Seed: SPGMMMGMFNMLSTV
SPGIMMSMNNMYSTV

SEQ ID NO: 198046 - protein, 15 aa, Artificial Sequence
  Description of Artificial Sequence: Synthetic peptide
  Seed: SPGMMMGMFNMLSTV
SPGIMMSMPNMASTV

SEQ ID NO: 198047 - protein, 15 aa, Artificial Sequence
  Description of Artificial Sequence: Synthetic peptide
  Seed: SPGMMMGMFNMLSTV
SPGIMMSMPNMFSTV

SEQ ID NO: 198048 - protein, 15 aa, Artificial Sequence
  Description of Artificial Sequence: Synthetic peptide
  Seed: SPGMMMGMFNMLSTV
SPGIMMSMPNMISTV

SEQ ID NO: 198049 - protein, 15 aa, Artificial Sequence
  Description of Artificial Sequence: Synthetic peptide
  Seed: SPGMMMGMFNMLSTV
SPGIMMSMPNMLSTV

SEQ ID NO: 198050 - protein, 15 aa, Artificial Sequence
  Description of Artificial Sequence: Synthetic peptide
  Seed: SPGMMMGMFNMLSTV
SPGIMMSMPNMMSTV

SEQ ID NO: 198051 - protein, 15 aa, Artificial Sequence
  Description of Artificial Sequence: Synthetic peptide
  Seed: SPGMMMGMFNMLSTV
SPGIMMSMPNMNSTV

SEQ ID NO: 198052 - protein, 15 aa, Artificial Sequence
  Description of Artificial Sequence: Synthetic peptide
  Seed: SPGMMMGMFNMLSTV
SPGIMMSMPNMSSTV

SEQ ID NO: 198053 - protein, 15 aa, Artificial Sequence
  Description of Artificial Sequence: Synthetic peptide
  Seed: SPGMMMGMFNMLSTV
SPGIMMSMPNMTSTV

SEQ ID NO: 198054 - protein, 15 aa, Artificial Sequence
  Description of Artificial Sequence: Synthetic peptide
  Seed: SPGMMMGMFNMLSTV
SPGIMMSMPNMVSTV

SEQ ID NO: 198055 - protein, 15 aa, Artificial Sequence
  Description of Artificial Sequence: Synthetic peptide
  Seed: SPGMMMGMFNMLSTV
SPGIMMSMPNMWSTV

SEQ ID NO: 198056 - protein, 15 aa, Artificial Sequence
  Description of Artificial Sequence: Synthetic peptide
  Seed: SPGMMMGMFNMLSTV
SPGIMMSMPNMYSTV

SEQ ID NO: 198057 - protein, 15 aa, Artificial Sequence
  Description of Artificial Sequence: Synthetic peptide
  Seed: SPGMMMGMFNMLSTV
SPGIMMSMQNMISTV

SEQ ID NO: 198058 - protein, 15 aa, Artificial Sequence
  Description of Artificial Sequence: Synthetic peptide
  Seed: SPGMMMGMFNMLSTV
SPGIMMSMQNMVSTV

SEQ ID NO: 198059 - protein, 15 aa, Artificial Sequence
  Description of Artificial Sequence: Synthetic peptide
  Seed: SPGMMMGMFNMLSTV
SPGIMMSMRNMISTV

SEQ ID NO: 198060 - protein, 15 aa, Artificial Sequence
  Description of Artificial Sequence: Synthetic peptide
  Seed: SPGMMMGMFNMLSTV
SPGIMMSMRNMVSTV

SEQ ID NO: 198061 - protein, 15 aa, Artificial Sequence
  Description of Artificial Sequence: Synthetic peptide
  Seed: SPGMMMGMFNMLSTV
SPGIMMSMSNMASTV

SEQ ID NO: 198062 - protein, 15 aa, Artificial Sequence
  Description of Artificial Sequence: Synthetic peptide
  Seed: SPGMMMGMFNMLSTV
SPGIMMSMSNMFSTV

SEQ ID NO: 198063 - protein, 15 aa, Artificial Sequence
  Description of Artificial Sequence: Synthetic peptide
  Seed: SPGMMMGMFNMLSTV
SPGIMMSMSNMHSTV

SEQ ID NO: 198064 - protein, 15 aa, Artificial Sequence
  Description of Artificial Sequence: Synthetic peptide
  Seed: SPGMMMGMFNMLSTV
SPGIMMSMSNMISTV

SEQ ID NO: 198065 - protein, 15 aa, Artificial Sequence
  Description of Artificial Sequence: Synthetic peptide
  Seed: SPGMMMGMFNMLSTV
SPGIMMSMSNMLSTV

SEQ ID NO: 198066 - protein, 15 aa, Artificial Sequence
  Description of Artificial Sequence: Synthetic peptide
  Seed: SPGMMMGMFNMLSTV
SPGIMMSMSNMMSTV

SEQ ID NO: 198067 - protein, 15 aa, Artificial Sequence
  Description of Artificial Sequence: Synthetic peptide
  Seed: SPGMMMGMFNMLSTV
SPGIMMSMSNMNSTV

SEQ ID NO: 198068 - protein, 15 aa, Artificial Sequence
  Description of Artificial Sequence: Synthetic peptide
  Seed: SPGMMMGMFNMLSTV
SPGIMMSMSNMSSTV

SEQ ID NO: 198069 - protein, 15 aa, Artificial Sequence
  Description of Artificial Sequence: Synthetic peptide
  Seed: SPGMMMGMFNMLSTV
SPGIMMSMSNMTSTV

SEQ ID NO: 198070 - protein, 15 aa, Artificial Sequence
  Description of Artificial Sequence: Synthetic peptide
  Seed: SPGMMMGMFNMLSTV
SPGIMMSMSNMVSTV

SEQ ID NO: 198071 - protein, 15 aa, Artificial Sequence
  Description of Artificial Sequence: Synthetic peptide
  Seed: SPGMMMGMFNMLSTV
SPGIMMSMSNMYSTV

SEQ ID NO: 198072 - protein, 15 aa, Artificial Sequence
  Description of Artificial Sequence: Synthetic peptide
  Seed: SPGMMMGMFNMLSTV
SPGIMMSMTNMASTV

SEQ ID NO: 198073 - protein, 15 aa, Artificial Sequence
  Description of Artificial Sequence: Synthetic peptide
  Seed: SPGMMMGMFNMLSTV
SPGIMMSMTNMFSTV

SEQ ID NO: 198074 - protein, 15 aa, Artificial Sequence
  Description of Artificial Sequence: Synthetic peptide
  Seed: SPGMMMGMFNMLSTV
SPGIMMSMTNMISTV

SEQ ID NO: 198075 - protein, 15 aa, Artificial Sequence
  Description of Artificial Sequence: Synthetic peptide
  Seed: SPGMMMGMFNMLSTV
SPGIMMSMTNMLSTV

SEQ ID NO: 198076 - protein, 15 aa, Artificial Sequence
  Description of Artificial Sequence: Synthetic peptide
  Seed: SPGMMMGMFNMLSTV
SPGIMMSMTNMMSTV

SEQ ID NO: 198077 - protein, 15 aa, Artificial Sequence
  Description of Artificial Sequence: Synthetic peptide
  Seed: SPGMMMGMFNMLSTV
SPGIMMSMTNMSSTV

SEQ ID NO: 198078 - protein, 15 aa, Artificial Sequence
  Description of Artificial Sequence: Synthetic peptide
  Seed: SPGMMMGMFNMLSTV
SPGIMMSMTNMTSTV

SEQ ID NO: 198079 - protein, 15 aa, Artificial Sequence
  Description of Artificial Sequence: Synthetic peptide
  Seed: SPGMMMGMFNMLSTV
SPGIMMSMTNMVSTV

SEQ ID NO: 198080 - protein, 15 aa, Artificial Sequence
  Description of Artificial Sequence: Synthetic peptide
  Seed: SPGMMMGMFNMLSTV
SPGIMMSMTNMYSTV

SEQ ID NO: 198081 - protein, 15 aa, Artificial Sequence
  Description of Artificial Sequence: Synthetic peptide
  Seed: SPGMMMGMFNMLSTV
SPGIMMSMVNMASTV

SEQ ID NO: 198082 - protein, 15 aa, Artificial Sequence
  Description of Artificial Sequence: Synthetic peptide
  Seed: SPGMMMGMFNMLSTV
SPGIMMSMVNMFSTV

SEQ ID NO: 198083 - protein, 15 aa, Artificial Sequence
  Description of Artificial Sequence: Synthetic peptide
  Seed: SPGMMMGMFNMLSTV
SPGIMMSMVNMISTV

SEQ ID NO: 198084 - protein, 15 aa, Artificial Sequence
  Description of Artificial Sequence: Synthetic peptide
  Seed: SPGMMMGMFNMLSTV
SPGIMMSMVNMLSTV

SEQ ID NO: 198085 - protein, 15 aa, Artificial Sequence
  Description of Artificial Sequence: Synthetic peptide
  Seed: SPGMMMGMFNMLSTV
SPGIMMSMVNMMSTV

SEQ ID NO: 198086 - protein, 15 aa, Artificial Sequence
  Description of Artificial Sequence: Synthetic peptide
  Seed: SPGMMMGMFNMLSTV
SPGIMMSMVNMSSTV

SEQ ID NO: 198087 - protein, 15 aa, Artificial Sequence
  Description of Artificial Sequence: Synthetic peptide
  Seed: SPGMMMGMFNMLSTV
SPGIMMSMVNMTSTV

SEQ ID NO: 198088 - protein, 15 aa, Artificial Sequence
  Description of Artificial Sequence: Synthetic peptide
  Seed: SPGMMMGMFNMLSTV
SPGIMMSMVNMVSTV

SEQ ID NO: 198089 - protein, 15 aa, Artificial Sequence
  Description of Artificial Sequence: Synthetic peptide
  Seed: SPGMMMGMFNMLSTV
SPGIMMSMVNMYSTV

SEQ ID NO: 198090 - protein, 15 aa, Artificial Sequence
  Description of Artificial Sequence: Synthetic peptide
  Seed: SPGMMMGMFNMLSTV
SPGIMMSMWNMFSTV

SEQ ID NO: 198091 - protein, 15 aa, Artificial Sequence
  Description of Artificial Sequence: Synthetic peptide
  Seed: SPGMMMGMFNMLSTV
SPGIMMSMWNMISTV

SEQ ID NO: 198092 - protein, 15 aa, Artificial Sequence
  Description of Artificial Sequence: Synthetic peptide
  Seed: SPGMMMGMFNMLSTV
SPGIMMSMWNMLSTV

SEQ ID NO: 198093 - protein, 15 aa, Artificial Sequence
  Description of Artificial Sequence: Synthetic peptide
  Seed: SPGMMMGMFNMLSTV
SPGIMMSMWNMVSTV

SEQ ID NO: 198094 - protein, 15 aa, Artificial Sequence
  Description of Artificial Sequence: Synthetic peptide
  Seed: SPGMMMGMFNMLSTV
SPGIMMSMYNMFSTV

SEQ ID NO: 198095 - protein, 15 aa, Artificial Sequence
  Description of Artificial Sequence: Synthetic peptide
  Seed: SPGMMMGMFNMLSTV
SPGIMMSMYNMISTV

SEQ ID NO: 198096 - protein, 15 aa, Artificial Sequence
  Description of Artificial Sequence: Synthetic peptide
  Seed: SPGMMMGMFNMLSTV
SPGIMMSMYNMLSTV

SEQ ID NO: 198097 - protein, 15 aa, Artificial Sequence
  Description of Artificial Sequence: Synthetic peptide
  Seed: SPGMMMGMFNMLSTV
SPGIMMSMYNMMSTV

SEQ ID NO: 198098 - protein, 15 aa, Artificial Sequence
  Description of Artificial Sequence: Synthetic peptide
  Seed: SPGMMMGMFNMLSTV
SPGIMMSMYNMVSTV

SEQ ID NO: 198099 - protein, 15 aa, Artificial Sequence
  Description of Artificial Sequence: Synthetic peptide
  Seed: SPGMMMGMFNMLSTV
SPGIMMTMANMASTV

SEQ ID NO: 198100 - protein, 15 aa, Artificial Sequence
  Description of Artificial Sequence: Synthetic peptide
  Seed: SPGMMMGMFNMLSTV
SPGIMMTMANMFSTV

SEQ ID NO: 198101 - protein, 15 aa, Artificial Sequence
  Description of Artificial Sequence: Synthetic peptide
  Seed: SPGMMMGMFNMLSTV
SPGIMMTMANMHSTV

SEQ ID NO: 198102 - protein, 15 aa, Artificial Sequence
  Description of Artificial Sequence: Synthetic peptide
  Seed: SPGMMMGMFNMLSTV
SPGIMMTMANMISTV

SEQ ID NO: 198103 - protein, 15 aa, Artificial Sequence
  Description of Artificial Sequence: Synthetic peptide
  Seed: SPGMMMGMFNMLSTV
SPGIMMTMANMLSTV

SEQ ID NO: 198104 - protein, 15 aa, Artificial Sequence
  Description of Artificial Sequence: Synthetic peptide
  Seed: SPGMMMGMFNMLSTV
SPGIMMTMANMMSTV

SEQ ID NO: 198105 - protein, 15 aa, Artificial Sequence
  Description of Artificial Sequence: Synthetic peptide
  Seed: SPGMMMGMFNMLSTV
SPGIMMTMANMNSTV

SEQ ID NO: 198106 - protein, 15 aa, Artificial Sequence
  Description of Artificial Sequence: Synthetic peptide
  Seed: SPGMMMGMFNMLSTV
SPGIMMTMANMSSTV

SEQ ID NO: 198107 - protein, 15 aa, Artificial Sequence
  Description of Artificial Sequence: Synthetic peptide
  Seed: SPGMMMGMFNMLSTV
SPGIMMTMANMTSTV

SEQ ID NO: 198108 - protein, 15 aa, Artificial Sequence
  Description of Artificial Sequence: Synthetic peptide
  Seed: SPGMMMGMFNMLSTV
SPGIMMTMANMVSTV

SEQ ID NO: 198109 - protein, 15 aa, Artificial Sequence
  Description of Artificial Sequence: Synthetic peptide
  Seed: SPGMMMGMFNMLSTV
SPGIMMTMANMYSTV

SEQ ID NO: 198110 - protein, 15 aa, Artificial Sequence
  Description of Artificial Sequence: Synthetic peptide
  Seed: SPGMMMGMFNMLSTV
SPGIMMTMDNMISTV

SEQ ID NO: 198111 - protein, 15 aa, Artificial Sequence
  Description of Artificial Sequence: Synthetic peptide
  Seed: SPGMMMGMFNMLSTV
SPGIMMTMFNMASTV

SEQ ID NO: 198112 - protein, 15 aa, Artificial Sequence
  Description of Artificial Sequence: Synthetic peptide
  Seed: SPGMMMGMFNMLSTV
SPGIMMTMFNMDSTV

SEQ ID NO: 198113 - protein, 15 aa, Artificial Sequence
  Description of Artificial Sequence: Synthetic peptide
  Seed: SPGMMMGMFNMLSTV
SPGIMMTMFNMESTV

SEQ ID NO: 198114 - protein, 15 aa, Artificial Sequence
  Description of Artificial Sequence: Synthetic peptide
  Seed: SPGMMMGMFNMLSTV
SPGIMMTMFNMFSTV

SEQ ID NO: 198115 - protein, 15 aa, Artificial Sequence
  Description of Artificial Sequence: Synthetic peptide
  Seed: SPGMMMGMFNMLSTV
SPGIMMTMFNMHSTV

SEQ ID NO: 198116 - protein, 15 aa, Artificial Sequence
  Description of Artificial Sequence: Synthetic peptide
  Seed: SPGMMMGMFNMLSTV
SPGIMMTMFNMISTV

SEQ ID NO: 198117 - protein, 15 aa, Artificial Sequence
  Description of Artificial Sequence: Synthetic peptide
  Seed: SPGMMMGMFNMLSTV
SPGIMMTMFNMLSTV

SEQ ID NO: 198118 - protein, 15 aa, Artificial Sequence
  Description of Artificial Sequence: Synthetic peptide
  Seed: SPGMMMGMFNMLSTV
SPGIMMTMFNMMSTV

SEQ ID NO: 198119 - protein, 15 aa, Artificial Sequence
  Description of Artificial Sequence: Synthetic peptide
  Seed: SPGMMMGMFNMLSTV
SPGIMMTMFNMNSTV

SEQ ID NO: 198120 - protein, 15 aa, Artificial Sequence
  Description of Artificial Sequence: Synthetic peptide
  Seed: SPGMMMGMFNMLSTV
SPGIMMTMFNMPSTV

SEQ ID NO: 198121 - protein, 15 aa, Artificial Sequence
  Description of Artificial Sequence: Synthetic peptide
  Seed: SPGMMMGMFNMLSTV
SPGIMMTMFNMQSTV

SEQ ID NO: 198122 - protein, 15 aa, Artificial Sequence
  Description of Artificial Sequence: Synthetic peptide
  Seed: SPGMMMGMFNMLSTV
SPGIMMTMFNMSSTV

SEQ ID NO: 198123 - protein, 15 aa, Artificial Sequence
  Description of Artificial Sequence: Synthetic peptide
  Seed: SPGMMMGMFNMLSTV
SPGIMMTMFNMTSTV

SEQ ID NO: 198124 - protein, 15 aa, Artificial Sequence
  Description of Artificial Sequence: Synthetic peptide
  Seed: SPGMMMGMFNMLSTV
SPGIMMTMFNMVSTV

SEQ ID NO: 198125 - protein, 15 aa, Artificial Sequence
  Description of Artificial Sequence: Synthetic peptide
  Seed: SPGMMMGMFNMLSTV
SPGIMMTMFNMYSTV

SEQ ID NO: 198126 - protein, 15 aa, Artificial Sequence
  Description of Artificial Sequence: Synthetic peptide
  Seed: SPGMMMGMFNMLSTV
SPGIMMTMGNMASTV

SEQ ID NO: 198127 - protein, 15 aa, Artificial Sequence
  Description of Artificial Sequence: Synthetic peptide
  Seed: SPGMMMGMFNMLSTV
SPGIMMTMGNMFSTV

SEQ ID NO: 198128 - protein, 15 aa, Artificial Sequence
  Description of Artificial Sequence: Synthetic peptide
  Seed: SPGMMMGMFNMLSTV
SPGIMMTMGNMISTV

SEQ ID NO: 198129 - protein, 15 aa, Artificial Sequence
  Description of Artificial Sequence: Synthetic peptide
  Seed: SPGMMMGMFNMLSTV
SPGIMMTMGNMLSTV

SEQ ID NO: 198130 - protein, 15 aa, Artificial Sequence
  Description of Artificial Sequence: Synthetic peptide
  Seed: SPGMMMGMFNMLSTV
SPGIMMTMGNMMSTV

SEQ ID NO: 198131 - protein, 15 aa, Artificial Sequence
  Description of Artificial Sequence: Synthetic peptide
  Seed: SPGMMMGMFNMLSTV
SPGIMMTMGNMSSTV

SEQ ID NO: 198132 - protein, 15 aa, Artificial Sequence
  Description of Artificial Sequence: Synthetic peptide
  Seed: SPGMMMGMFNMLSTV
SPGIMMTMGNMTSTV

SEQ ID NO: 198133 - protein, 15 aa, Artificial Sequence
  Description of Artificial Sequence: Synthetic peptide
  Seed: SPGMMMGMFNMLSTV
SPGIMMTMGNMVSTV

SEQ ID NO: 198134 - protein, 15 aa, Artificial Sequence
  Description of Artificial Sequence: Synthetic peptide
  Seed: SPGMMMGMFNMLSTV
SPGIMMTMGNMYSTV

SEQ ID NO: 198135 - protein, 15 aa, Artificial Sequence
  Description of Artificial Sequence: Synthetic peptide
  Seed: SPGMMMGMFNMLSTV
SPGIMMTMHNMISTV

SEQ ID NO: 198136 - protein, 15 aa, Artificial Sequence
  Description of Artificial Sequence: Synthetic peptide
  Seed: SPGMMMGMFNMLSTV
SPGIMMTMHNMVSTV

SEQ ID NO: 198137 - protein, 15 aa, Artificial Sequence
  Description of Artificial Sequence: Synthetic peptide
  Seed: SPGMMMGMFNMLSTV
SPGIMMTMINMVSTV

SEQ ID NO: 198138 - protein, 15 aa, Artificial Sequence
  Description of Artificial Sequence: Synthetic peptide
  Seed: SPGMMMGMFNMLSTV
SPGIMMTMNNMASTV

SEQ ID NO: 198139 - protein, 15 aa, Artificial Sequence
  Description of Artificial Sequence: Synthetic peptide
  Seed: SPGMMMGMFNMLSTV
SPGIMMTMNNMFSTV

SEQ ID NO: 198140 - protein, 15 aa, Artificial Sequence
  Description of Artificial Sequence: Synthetic peptide
  Seed: SPGMMMGMFNMLSTV
SPGIMMTMNNMISTV

SEQ ID NO: 198141 - protein, 15 aa, Artificial Sequence
  Description of Artificial Sequence: Synthetic peptide
  Seed: SPGMMMGMFNMLSTV
SPGIMMTMNNMLSTV

SEQ ID NO: 198142 - protein, 15 aa, Artificial Sequence
  Description of Artificial Sequence: Synthetic peptide
  Seed: SPGMMMGMFNMLSTV
SPGIMMTMNNMMSTV

SEQ ID NO: 198143 - protein, 15 aa, Artificial Sequence
  Description of Artificial Sequence: Synthetic peptide
  Seed: SPGMMMGMFNMLSTV
SPGIMMTMNNMNSTV

SEQ ID NO: 198144 - protein, 15 aa, Artificial Sequence
  Description of Artificial Sequence: Synthetic peptide
  Seed: SPGMMMGMFNMLSTV
SPGIMMTMNNMSSTV

SEQ ID NO: 198145 - protein, 15 aa, Artificial Sequence
  Description of Artificial Sequence: Synthetic peptide
  Seed: SPGMMMGMFNMLSTV
SPGIMMTMNNMTSTV

SEQ ID NO: 198146 - protein, 15 aa, Artificial Sequence
  Description of Artificial Sequence: Synthetic peptide
  Seed: SPGMMMGMFNMLSTV
SPGIMMTMNNMVSTV

SEQ ID NO: 198147 - protein, 15 aa, Artificial Sequence
  Description of Artificial Sequence: Synthetic peptide
  Seed: SPGMMMGMFNMLSTV
SPGIMMTMNNMYSTV

SEQ ID NO: 198148 - protein, 15 aa, Artificial Sequence
  Description of Artificial Sequence: Synthetic peptide
  Seed: SPGMMMGMFNMLSTV
SPGIMMTMPNMASTV

SEQ ID NO: 198149 - protein, 15 aa, Artificial Sequence
  Description of Artificial Sequence: Synthetic peptide
  Seed: SPGMMMGMFNMLSTV
SPGIMMTMPNMFSTV

SEQ ID NO: 198150 - protein, 15 aa, Artificial Sequence
  Description of Artificial Sequence: Synthetic peptide
  Seed: SPGMMMGMFNMLSTV
SPGIMMTMPNMISTV

SEQ ID NO: 198151 - protein, 15 aa, Artificial Sequence
  Description of Artificial Sequence: Synthetic peptide
  Seed: SPGMMMGMFNMLSTV
SPGIMMTMPNMLSTV

SEQ ID NO: 198152 - protein, 15 aa, Artificial Sequence
  Description of Artificial Sequence: Synthetic peptide
  Seed: SPGMMMGMFNMLSTV
SPGIMMTMPNMMSTV

SEQ ID NO: 198153 - protein, 15 aa, Artificial Sequence
  Description of Artificial Sequence: Synthetic peptide
  Seed: SPGMMMGMFNMLSTV
SPGIMMTMPNMTSTV

SEQ ID NO: 198154 - protein, 15 aa, Artificial Sequence
  Description of Artificial Sequence: Synthetic peptide
  Seed: SPGMMMGMFNMLSTV
SPGIMMTMPNMVSTV

SEQ ID NO: 198155 - protein, 15 aa, Artificial Sequence
  Description of Artificial Sequence: Synthetic peptide
  Seed: SPGMMMGMFNMLSTV
SPGIMMTMPNMYSTV

SEQ ID NO: 198156 - protein, 15 aa, Artificial Sequence
  Description of Artificial Sequence: Synthetic peptide
  Seed: SPGMMMGMFNMLSTV
SPGIMMTMSNMASTV

SEQ ID NO: 198157 - protein, 15 aa, Artificial Sequence
  Description of Artificial Sequence: Synthetic peptide
  Seed: SPGMMMGMFNMLSTV
SPGIMMTMSNMFSTV

SEQ ID NO: 198158 - protein, 15 aa, Artificial Sequence
  Description of Artificial Sequence: Synthetic peptide
  Seed: SPGMMMGMFNMLSTV
SPGIMMTMSNMHSTV

SEQ ID NO: 198159 - protein, 15 aa, Artificial Sequence
  Description of Artificial Sequence: Synthetic peptide
  Seed: SPGMMMGMFNMLSTV
SPGIMMTMSNMISTV

SEQ ID NO: 198160 - protein, 15 aa, Artificial Sequence
  Description of Artificial Sequence: Synthetic peptide
  Seed: SPGMMMGMFNMLSTV
SPGIMMTMSNMLSTV

SEQ ID NO: 198161 - protein, 15 aa, Artificial Sequence
  Description of Artificial Sequence: Synthetic peptide
  Seed: SPGMMMGMFNMLSTV
SPGIMMTMSNMMSTV

SEQ ID NO: 198162 - protein, 15 aa, Artificial Sequence
  Description of Artificial Sequence: Synthetic peptide
  Seed: SPGMMMGMFNMLSTV
SPGIMMTMSNMNSTV

SEQ ID NO: 198163 - protein, 15 aa, Artificial Sequence
  Description of Artificial Sequence: Synthetic peptide
  Seed: SPGMMMGMFNMLSTV
SPGIMMTMSNMSSTV

SEQ ID NO: 198164 - protein, 15 aa, Artificial Sequence
  Description of Artificial Sequence: Synthetic peptide
  Seed: SPGMMMGMFNMLSTV
SPGIMMTMSNMTSTV

SEQ ID NO: 198165 - protein, 15 aa, Artificial Sequence
  Description of Artificial Sequence: Synthetic peptide
  Seed: SPGMMMGMFNMLSTV
SPGIMMTMSNMVSTV

SEQ ID NO: 198166 - protein, 15 aa, Artificial Sequence
  Description of Artificial Sequence: Synthetic peptide
  Seed: SPGMMMGMFNMLSTV
SPGIMMTMSNMYSTV

SEQ ID NO: 198167 - protein, 15 aa, Artificial Sequence
  Description of Artificial Sequence: Synthetic peptide
  Seed: SPGMMMGMFNMLSTV
SPGIMMTMTNMASTV

SEQ ID NO: 198168 - protein, 15 aa, Artificial Sequence
  Description of Artificial Sequence: Synthetic peptide
  Seed: SPGMMMGMFNMLSTV
SPGIMMTMTNMFSTV

SEQ ID NO: 198169 - protein, 15 aa, Artificial Sequence
  Description of Artificial Sequence: Synthetic peptide
  Seed: SPGMMMGMFNMLSTV
SPGIMMTMTNMISTV

SEQ ID NO: 198170 - protein, 15 aa, Artificial Sequence
  Description of Artificial Sequence: Synthetic peptide
  Seed: SPGMMMGMFNMLSTV
SPGIMMTMTNMLSTV

SEQ ID NO: 198171 - protein, 15 aa, Artificial Sequence
  Description of Artificial Sequence: Synthetic peptide
  Seed: SPGMMMGMFNMLSTV
SPGIMMTMTNMMSTV

SEQ ID NO: 198172 - protein, 15 aa, Artificial Sequence
  Description of Artificial Sequence: Synthetic peptide
  Seed: SPGMMMGMFNMLSTV
SPGIMMTMTNMVSTV

SEQ ID NO: 198173 - protein, 15 aa, Artificial Sequence
  Description of Artificial Sequence: Synthetic peptide
  Seed: SPGMMMGMFNMLSTV
SPGIMMTMTNMYSTV

SEQ ID NO: 198174 - protein, 15 aa, Artificial Sequence
  Description of Artificial Sequence: Synthetic peptide
  Seed: SPGMMMGMFNMLSTV
SPGIMMTMVNMISTV

SEQ ID NO: 198175 - protein, 15 aa, Artificial Sequence
  Description of Artificial Sequence: Synthetic peptide
  Seed: SPGMMMGMFNMLSTV
SPGIMMTMVNMLSTV

SEQ ID NO: 198176 - protein, 15 aa, Artificial Sequence
  Description of Artificial Sequence: Synthetic peptide
  Seed: SPGMMMGMFNMLSTV
SPGIMMTMVNMVSTV

SEQ ID NO: 198177 - protein, 15 aa, Artificial Sequence
  Description of Artificial Sequence: Synthetic peptide
  Seed: SPGMMMGMFNMLSTV
SPGIMMTMVNMYSTV

SEQ ID NO: 198178 - protein, 15 aa, Artificial Sequence
  Description of Artificial Sequence: Synthetic peptide
  Seed: SPGMMMGMFNMLSTV
SPGIMMTMWNMISTV

SEQ ID NO: 198179 - protein, 15 aa, Artificial Sequence
  Description of Artificial Sequence: Synthetic peptide
  Seed: SPGMMMGMFNMLSTV
SPGIMMTMWNMLSTV

SEQ ID NO: 198180 - protein, 15 aa, Artificial Sequence
  Description of Artificial Sequence: Synthetic peptide
  Seed: SPGMMMGMFNMLSTV
SPGIMMTMWNMVSTV

SEQ ID NO: 198181 - protein, 15 aa, Artificial Sequence
  Description of Artificial Sequence: Synthetic peptide
  Seed: SPGMMMGMFNMLSTV
SPGIMMTMYNMFSTV

SEQ ID NO: 198182 - protein, 15 aa, Artificial Sequence
  Description of Artificial Sequence: Synthetic peptide
  Seed: SPGMMMGMFNMLSTV
SPGIMMTMYNMISTV

SEQ ID NO: 198183 - protein, 15 aa, Artificial Sequence
  Description of Artificial Sequence: Synthetic peptide
  Seed: SPGMMMGMFNMLSTV
SPGIMMTMYNMLSTV

SEQ ID NO: 198184 - protein, 15 aa, Artificial Sequence
  Description of Artificial Sequence: Synthetic peptide
  Seed: SPGMMMGMFNMLSTV
SPGIMMTMYNMMSTV

SEQ ID NO: 198185 - protein, 15 aa, Artificial Sequence
  Description of Artificial Sequence: Synthetic peptide
  Seed: SPGMMMGMFNMLSTV
SPGIMMTMYNMVSTV

SEQ ID NO: 198186 - protein, 15 aa, Artificial Sequence
  Description of Artificial Sequence: Synthetic peptide
  Seed: SPGMMMGMFNMLSTV
SPGIMMVMANMASTV

SEQ ID NO: 198187 - protein, 15 aa, Artificial Sequence
  Description of Artificial Sequence: Synthetic peptide
  Seed: SPGMMMGMFNMLSTV
SPGIMMVMANMGSTV

SEQ ID NO: 198188 - protein, 15 aa, Artificial Sequence
  Description of Artificial Sequence: Synthetic peptide
  Seed: SPGMMMGMFNMLSTV
SPGIMMVMANMHSTV

SEQ ID NO: 198189 - protein, 15 aa, Artificial Sequence
  Description of Artificial Sequence: Synthetic peptide
  Seed: SPGMMMGMFNMLSTV
SPGIMMVMANMISTV

SEQ ID NO: 198190 - protein, 15 aa, Artificial Sequence
  Description of Artificial Sequence: Synthetic peptide
  Seed: SPGMMMGMFNMLSTV
SPGIMMVMANMLSTV

SEQ ID NO: 198191 - protein, 15 aa, Artificial Sequence
  Description of Artificial Sequence: Synthetic peptide
  Seed: SPGMMMGMFNMLSTV
SPGIMMVMANMMSTV

SEQ ID NO: 198192 - protein, 15 aa, Artificial Sequence
  Description of Artificial Sequence: Synthetic peptide
  Seed: SPGMMMGMFNMLSTV
SPGIMMVMANMNSTV

SEQ ID NO: 198193 - protein, 15 aa, Artificial Sequence
  Description of Artificial Sequence: Synthetic peptide
  Seed: SPGMMMGMFNMLSTV
SPGIMMVMANMSSTV

SEQ ID NO: 198194 - protein, 15 aa, Artificial Sequence
  Description of Artificial Sequence: Synthetic peptide
  Seed: SPGMMMGMFNMLSTV
SPGIMMVMANMTSTV

SEQ ID NO: 198195 - protein, 15 aa, Artificial Sequence
  Description of Artificial Sequence: Synthetic peptide
  Seed: SPGMMMGMFNMLSTV
SPGIMMVMANMVSTV

SEQ ID NO: 198196 - protein, 15 aa, Artificial Sequence
  Description of Artificial Sequence: Synthetic peptide
  Seed: SPGMMMGMFNMLSTV
SPGIMMVMANMYSTV

SEQ ID NO: 198197 - protein, 15 aa, Artificial Sequence
  Description of Artificial Sequence: Synthetic peptide
  Seed: SPGMMMGMFNMLSTV
SPGIMMVMFNMESTV

SEQ ID NO: 198198 - protein, 15 aa, Artificial Sequence
  Description of Artificial Sequence: Synthetic peptide
  Seed: SPGMMMGMFNMLSTV
SPGIMMVMGNMASTV

SEQ ID NO: 198199 - protein, 15 aa, Artificial Sequence
  Description of Artificial Sequence: Synthetic peptide
  Seed: SPGMMMGMFNMLSTV
SPGIMMVMGNMISTV

SEQ ID NO: 198200 - protein, 15 aa, Artificial Sequence
  Description of Artificial Sequence: Synthetic peptide
  Seed: SPGMMMGMFNMLSTV
SPGIMMVMGNMVSTV

SEQ ID NO: 198201 - protein, 15 aa, Artificial Sequence
  Description of Artificial Sequence: Synthetic peptide
  Seed: SPGMMMGMFNMLSTV
SPGIMMVMHNMASTV

SEQ ID NO: 198202 - protein, 15 aa, Artificial Sequence
  Description of Artificial Sequence: Synthetic peptide
  Seed: SPGMMMGMFNMLSTV
SPGIMMVMHNMISTV

SEQ ID NO: 198203 - protein, 15 aa, Artificial Sequence
  Description of Artificial Sequence: Synthetic peptide
  Seed: SPGMMMGMFNMLSTV
SPGIMMVMHNMNSTV

SEQ ID NO: 198204 - protein, 15 aa, Artificial Sequence
  Description of Artificial Sequence: Synthetic peptide
  Seed: SPGMMMGMFNMLSTV
SPGIMMVMHNMSSTV

SEQ ID NO: 198205 - protein, 15 aa, Artificial Sequence
  Description of Artificial Sequence: Synthetic peptide
  Seed: SPGMMMGMFNMLSTV
SPGIMMVMHNMVSTV

SEQ ID NO: 198206 - protein, 15 aa, Artificial Sequence
  Description of Artificial Sequence: Synthetic peptide
  Seed: SPGMMMGMFNMLSTV
SPGIMMVMKNMASTV

SEQ ID NO: 198207 - protein, 15 aa, Artificial Sequence
  Description of Artificial Sequence: Synthetic peptide
  Seed: SPGMMMGMFNMLSTV
SPGIMMVMKNMISTV

SEQ ID NO: 198208 - protein, 15 aa, Artificial Sequence
  Description of Artificial Sequence: Synthetic peptide
  Seed: SPGMMMGMFNMLSTV
SPGIMMVMKNMSSTV

SEQ ID NO: 198209 - protein, 15 aa, Artificial Sequence
  Description of Artificial Sequence: Synthetic peptide
  Seed: SPGMMMGMFNMLSTV
SPGIMMVMKNMVSTV

SEQ ID NO: 198210 - protein, 15 aa, Artificial Sequence
  Description of Artificial Sequence: Synthetic peptide
  Seed: SPGMMMGMFNMLSTV
SPGIMMVMNNMASTV

SEQ ID NO: 198211 - protein, 15 aa, Artificial Sequence
  Description of Artificial Sequence: Synthetic peptide
  Seed: SPGMMMGMFNMLSTV
SPGIMMVMNNMFSTV

SEQ ID NO: 198212 - protein, 15 aa, Artificial Sequence
  Description of Artificial Sequence: Synthetic peptide
  Seed: SPGMMMGMFNMLSTV
SPGIMMVMNNMGSTV

SEQ ID NO: 198213 - protein, 15 aa, Artificial Sequence
  Description of Artificial Sequence: Synthetic peptide
  Seed: SPGMMMGMFNMLSTV
SPGIMMVMNNMISTV

SEQ ID NO: 198214 - protein, 15 aa, Artificial Sequence
  Description of Artificial Sequence: Synthetic peptide
  Seed: SPGMMMGMFNMLSTV
SPGIMMVMNNMLSTV

SEQ ID NO: 198215 - protein, 15 aa, Artificial Sequence
  Description of Artificial Sequence: Synthetic peptide
  Seed: SPGMMMGMFNMLSTV
SPGIMMVMNNMMSTV

SEQ ID NO: 198216 - protein, 15 aa, Artificial Sequence
  Description of Artificial Sequence: Synthetic peptide
  Seed: SPGMMMGMFNMLSTV
SPGIMMVMNNMNSTV

SEQ ID NO: 198217 - protein, 15 aa, Artificial Sequence
  Description of Artificial Sequence: Synthetic peptide
  Seed: SPGMMMGMFNMLSTV
SPGIMMVMNNMQSTV

SEQ ID NO: 198218 - protein, 15 aa, Artificial Sequence
  Description of Artificial Sequence: Synthetic peptide
  Seed: SPGMMMGMFNMLSTV
SPGIMMVMNNMRSTV

SEQ ID NO: 198219 - protein, 15 aa, Artificial Sequence
  Description of Artificial Sequence: Synthetic peptide
  Seed: SPGMMMGMFNMLSTV
SPGIMMVMNNMSSTV

SEQ ID NO: 198220 - protein, 15 aa, Artificial Sequence
  Description of Artificial Sequence: Synthetic peptide
  Seed: SPGMMMGMFNMLSTV
SPGIMMVMNNMTSTV

SEQ ID NO: 198221 - protein, 15 aa, Artificial Sequence
  Description of Artificial Sequence: Synthetic peptide
  Seed: SPGMMMGMFNMLSTV
SPGIMMVMNNMVSTV

SEQ ID NO: 198222 - protein, 15 aa, Artificial Sequence
  Description of Artificial Sequence: Synthetic peptide
  Seed: SPGMMMGMFNMLSTV
SPGIMMVMNNMYSTV

SEQ ID NO: 198223 - protein, 15 aa, Artificial Sequence
  Description of Artificial Sequence: Synthetic peptide
  Seed: SPGMMMGMFNMLSTV
SPGIMMVMPNMASTV

SEQ ID NO: 198224 - protein, 15 aa, Artificial Sequence
  Description of Artificial Sequence: Synthetic peptide
  Seed: SPGMMMGMFNMLSTV
SPGIMMVMPNMFSTV

SEQ ID NO: 198225 - protein, 15 aa, Artificial Sequence
  Description of Artificial Sequence: Synthetic peptide
  Seed: SPGMMMGMFNMLSTV
SPGIMMVMPNMISTV

SEQ ID NO: 198226 - protein, 15 aa, Artificial Sequence
  Description of Artificial Sequence: Synthetic peptide
  Seed: SPGMMMGMFNMLSTV
SPGIMMVMPNMLSTV

SEQ ID NO: 198227 - protein, 15 aa, Artificial Sequence
  Description of Artificial Sequence: Synthetic peptide
  Seed: SPGMMMGMFNMLSTV
SPGIMMVMPNMMSTV

SEQ ID NO: 198228 - protein, 15 aa, Artificial Sequence
  Description of Artificial Sequence: Synthetic peptide
  Seed: SPGMMMGMFNMLSTV
SPGIMMVMPNMSSTV

SEQ ID NO: 198229 - protein, 15 aa, Artificial Sequence
  Description of Artificial Sequence: Synthetic peptide
  Seed: SPGMMMGMFNMLSTV
SPGIMMVMPNMTSTV

SEQ ID NO: 198230 - protein, 15 aa, Artificial Sequence
  Description of Artificial Sequence: Synthetic peptide
  Seed: SPGMMMGMFNMLSTV
SPGIMMVMPNMVSTV

SEQ ID NO: 198231 - protein, 15 aa, Artificial Sequence
  Description of Artificial Sequence: Synthetic peptide
  Seed: SPGMMMGMFNMLSTV
SPGIMMVMPNMYSTV

SEQ ID NO: 198232 - protein, 15 aa, Artificial Sequence
  Description of Artificial Sequence: Synthetic peptide
  Seed: SPGMMMGMFNMLSTV
SPGIMMVMRNMASTV

SEQ ID NO: 198233 - protein, 15 aa, Artificial Sequence
  Description of Artificial Sequence: Synthetic peptide
  Seed: SPGMMMGMFNMLSTV
SPGIMMVMRNMISTV

SEQ ID NO: 198234 - protein, 15 aa, Artificial Sequence
  Description of Artificial Sequence: Synthetic peptide
  Seed: SPGMMMGMFNMLSTV
SPGIMMVMRNMNSTV

SEQ ID NO: 198235 - protein, 15 aa, Artificial Sequence
  Description of Artificial Sequence: Synthetic peptide
  Seed: SPGMMMGMFNMLSTV
SPGIMMVMRNMPSTV

SEQ ID NO: 198236 - protein, 15 aa, Artificial Sequence
  Description of Artificial Sequence: Synthetic peptide
  Seed: SPGMMMGMFNMLSTV
SPGIMMVMRNMSSTV

SEQ ID NO: 198237 - protein, 15 aa, Artificial Sequence
  Description of Artificial Sequence: Synthetic peptide
  Seed: SPGMMMGMFNMLSTV
SPGIMMVMRNMVSTV

SEQ ID NO: 198238 - protein, 15 aa, Artificial Sequence
  Description of Artificial Sequence: Synthetic peptide
  Seed: SPGMMMGMFNMLSTV
SPGIMMVMSNMASTV

SEQ ID NO: 198239 - protein, 15 aa, Artificial Sequence
  Description of Artificial Sequence: Synthetic peptide
  Seed: SPGMMMGMFNMLSTV
SPGIMMVMSNMISTV

SEQ ID NO: 198240 - protein, 15 aa, Artificial Sequence
  Description of Artificial Sequence: Synthetic peptide
  Seed: SPGMMMGMFNMLSTV
SPGIMMVMSNMLSTV

SEQ ID NO: 198241 - protein, 15 aa, Artificial Sequence
  Description of Artificial Sequence: Synthetic peptide
  Seed: SPGMMMGMFNMLSTV
SPGIMMVMSNMMSTV

SEQ ID NO: 198242 - protein, 15 aa, Artificial Sequence
  Description of Artificial Sequence: Synthetic peptide
  Seed: SPGMMMGMFNMLSTV
SPGIMMVMSNMNSTV

SEQ ID NO: 198243 - protein, 15 aa, Artificial Sequence
  Description of Artificial Sequence: Synthetic peptide
  Seed: SPGMMMGMFNMLSTV
SPGIMMVMSNMSSTV

SEQ ID NO: 198244 - protein, 15 aa, Artificial Sequence
  Description of Artificial Sequence: Synthetic peptide
  Seed: SPGMMMGMFNMLSTV
SPGIMMVMSNMTSTV

SEQ ID NO: 198245 - protein, 15 aa, Artificial Sequence
  Description of Artificial Sequence: Synthetic peptide
  Seed: SPGMMMGMFNMLSTV
SPGIMMVMSNMVSTV

SEQ ID NO: 198246 - protein, 15 aa, Artificial Sequence
  Description of Artificial Sequence: Synthetic peptide
  Seed: SPGMMMGMFNMLSTV
SPGIMMVMSNMYSTV

SEQ ID NO: 198247 - protein, 15 aa, Artificial Sequence
  Description of Artificial Sequence: Synthetic peptide
  Seed: SPGMMMGMFNMLSTV
SPGIMMVMTNMASTV

SEQ ID NO: 198248 - protein, 15 aa, Artificial Sequence
  Description of Artificial Sequence: Synthetic peptide
  Seed: SPGMMMGMFNMLSTV
SPGIMMVMTNMISTV

SEQ ID NO: 198249 - protein, 15 aa, Artificial Sequence
  Description of Artificial Sequence: Synthetic peptide
  Seed: SPGMMMGMFNMLSTV
SPGIMMVMTNMLSTV

SEQ ID NO: 198250 - protein, 15 aa, Artificial Sequence
  Description of Artificial Sequence: Synthetic peptide
  Seed: SPGMMMGMFNMLSTV
SPGIMMVMTNMMSTV

SEQ ID NO: 198251 - protein, 15 aa, Artificial Sequence
  Description of Artificial Sequence: Synthetic peptide
  Seed: SPGMMMGMFNMLSTV
SPGIMMVMTNMSSTV

SEQ ID NO: 198252 - protein, 15 aa, Artificial Sequence
  Description of Artificial Sequence: Synthetic peptide
  Seed: SPGMMMGMFNMLSTV
SPGIMMVMTNMVSTV

SEQ ID NO: 198253 - protein, 15 aa, Artificial Sequence
  Description of Artificial Sequence: Synthetic peptide
  Seed: SPGMMMGMFNMLSTV
SPGIMMVMTNMYSTV

SEQ ID NO: 198254 - protein, 15 aa, Artificial Sequence
  Description of Artificial Sequence: Synthetic peptide
  Seed: SPGMMMGMFNMLSTV
SPGIMMVMVNMASTV

SEQ ID NO: 198255 - protein, 15 aa, Artificial Sequence
  Description of Artificial Sequence: Synthetic peptide
  Seed: SPGMMMGMFNMLSTV
SPGIMMVMVNMSSTV

SEQ ID NO: 198256 - protein, 15 aa, Artificial Sequence
  Description of Artificial Sequence: Synthetic peptide
  Seed: SPGMMMGMFNMLSTV
SPGIMMVMYNMFSTV

SEQ ID NO: 198257 - protein, 15 aa, Artificial Sequence
  Description of Artificial Sequence: Synthetic peptide
  Seed: SPGMMMGMFNMLSTV
SPGIMMVMYNMLSTV

SEQ ID NO: 198258 - protein, 15 aa, Artificial Sequence
  Description of Artificial Sequence: Synthetic peptide
  Seed: SPGMMMGMFNMLSTV
SPGIMMVMYNMYSTV

SEQ ID NO: 198259 - protein, 15 aa, Artificial Sequence
  Description of Artificial Sequence: Synthetic peptide
  Seed: SPGMMMGMFNMLSTV
SPGIMMWMANMASTV

SEQ ID NO: 198260 - protein, 15 aa, Artificial Sequence
  Description of Artificial Sequence: Synthetic peptide
  Seed: SPGMMMGMFNMLSTV
SPGIMMWMANMISTV

SEQ ID NO: 198261 - protein, 15 aa, Artificial Sequence
  Description of Artificial Sequence: Synthetic peptide
  Seed: SPGMMMGMFNMLSTV
SPGIMMWMANMVSTV

SEQ ID NO: 198262 - protein, 15 aa, Artificial Sequence
  Description of Artificial Sequence: Synthetic peptide
  Seed: SPGMMMGMFNMLSTV
SPGIMMWMFNMFSTV

SEQ ID NO: 198263 - protein, 15 aa, Artificial Sequence
  Description of Artificial Sequence: Synthetic peptide
  Seed: SPGMMMGMFNMLSTV
SPGIMMWMFNMISTV

SEQ ID NO: 198264 - protein, 15 aa, Artificial Sequence
  Description of Artificial Sequence: Synthetic peptide
  Seed: SPGMMMGMFNMLSTV
SPGIMMWMFNMLSTV

SEQ ID NO: 198265 - protein, 15 aa, Artificial Sequence
  Description of Artificial Sequence: Synthetic peptide
  Seed: SPGMMMGMFNMLSTV
SPGIMMWMFNMMSTV

SEQ ID NO: 198266 - protein, 15 aa, Artificial Sequence
  Description of Artificial Sequence: Synthetic peptide
  Seed: SPGMMMGMFNMLSTV
SPGIMMWMFNMYSTV

SEQ ID NO: 198267 - protein, 15 aa, Artificial Sequence
  Description of Artificial Sequence: Synthetic peptide
  Seed: SPGMMMGMFNMLSTV
SPGIMMWMHNMASTV

SEQ ID NO: 198268 - protein, 15 aa, Artificial Sequence
  Description of Artificial Sequence: Synthetic peptide
  Seed: SPGMMMGMFNMLSTV
SPGIMMWMINMASTV

SEQ ID NO: 198269 - protein, 15 aa, Artificial Sequence
  Description of Artificial Sequence: Synthetic peptide
  Seed: SPGMMMGMFNMLSTV
SPGIMMWMINMFSTV

SEQ ID NO: 198270 - protein, 15 aa, Artificial Sequence
  Description of Artificial Sequence: Synthetic peptide
  Seed: SPGMMMGMFNMLSTV
SPGIMMWMLNMFSTV

SEQ ID NO: 198271 - protein, 15 aa, Artificial Sequence
  Description of Artificial Sequence: Synthetic peptide
  Seed: SPGMMMGMFNMLSTV
SPGIMMWMNNMASTV

SEQ ID NO: 198272 - protein, 15 aa, Artificial Sequence
  Description of Artificial Sequence: Synthetic peptide
  Seed: SPGMMMGMFNMLSTV
SPGIMMWMNNMFSTV

SEQ ID NO: 198273 - protein, 15 aa, Artificial Sequence
  Description of Artificial Sequence: Synthetic peptide
  Seed: SPGMMMGMFNMLSTV
SPGIMMWMNNMISTV

SEQ ID NO: 198274 - protein, 15 aa, Artificial Sequence
  Description of Artificial Sequence: Synthetic peptide
  Seed: SPGMMMGMFNMLSTV
SPGIMMWMNNMLSTV

SEQ ID NO: 198275 - protein, 15 aa, Artificial Sequence
  Description of Artificial Sequence: Synthetic peptide
  Seed: SPGMMMGMFNMLSTV
SPGIMMWMNNMMSTV

SEQ ID NO: 198276 - protein, 15 aa, Artificial Sequence
  Description of Artificial Sequence: Synthetic peptide
  Seed: SPGMMMGMFNMLSTV
SPGIMMWMNNMNSTV

SEQ ID NO: 198277 - protein, 15 aa, Artificial Sequence
  Description of Artificial Sequence: Synthetic peptide
  Seed: SPGMMMGMFNMLSTV
SPGIMMWMNNMVSTV

SEQ ID NO: 198278 - protein, 15 aa, Artificial Sequence
  Description of Artificial Sequence: Synthetic peptide
  Seed: SPGMMMGMFNMLSTV
SPGIMMWMNNMYSTV

SEQ ID NO: 198279 - protein, 15 aa, Artificial Sequence
  Description of Artificial Sequence: Synthetic peptide
  Seed: SPGMMMGMFNMLSTV
SPGIMMWMPNMISTV

SEQ ID NO: 198280 - protein, 15 aa, Artificial Sequence
  Description of Artificial Sequence: Synthetic peptide
  Seed: SPGMMMGMFNMLSTV
SPGIMMWMPNMVSTV

SEQ ID NO: 198281 - protein, 15 aa, Artificial Sequence
  Description of Artificial Sequence: Synthetic peptide
  Seed: SPGMMMGMFNMLSTV
SPGIMMWMSNMASTV

SEQ ID NO: 198282 - protein, 15 aa, Artificial Sequence
  Description of Artificial Sequence: Synthetic peptide
  Seed: SPGMMMGMFNMLSTV
SPGIMMWMSNMISTV

SEQ ID NO: 198283 - protein, 15 aa, Artificial Sequence
  Description of Artificial Sequence: Synthetic peptide
  Seed: SPGMMMGMFNMLSTV
SPGIMMWMSNMVSTV

SEQ ID NO: 198284 - protein, 15 aa, Artificial Sequence
  Description of Artificial Sequence: Synthetic peptide
  Seed: SPGMMMGMFNMLSTV
SPGIMMWMVNMASTV

SEQ ID NO: 198285 - protein, 15 aa, Artificial Sequence
  Description of Artificial Sequence: Synthetic peptide
  Seed: SPGMMMGMFNMLSTV
SPGIMMWMWNMLSTV

SEQ ID NO: 198286 - protein, 15 aa, Artificial Sequence
  Description of Artificial Sequence: Synthetic peptide
  Seed: SPGMMMGMFNMLSTV
SPGIMMWMYNMISTV

SEQ ID NO: 198287 - protein, 15 aa, Artificial Sequence
  Description of Artificial Sequence: Synthetic peptide
  Seed: SPGMMMGMFNMLSTV
SPGIMMWMYNMLSTV

SEQ ID NO: 198288 - protein, 15 aa, Artificial Sequence
  Description of Artificial Sequence: Synthetic peptide
  Seed: SPGMMMGMFNMLSTV
SPGIMMYMANMASTV

SEQ ID NO: 198289 - protein, 15 aa, Artificial Sequence
  Description of Artificial Sequence: Synthetic peptide
  Seed: SPGMMMGMFNMLSTV
SPGIMMYMANMISTV

SEQ ID NO: 198290 - protein, 15 aa, Artificial Sequence
  Description of Artificial Sequence: Synthetic peptide
  Seed: SPGMMMGMFNMLSTV
SPGIMMYMANMSSTV

SEQ ID NO: 198291 - protein, 15 aa, Artificial Sequence
  Description of Artificial Sequence: Synthetic peptide
  Seed: SPGMMMGMFNMLSTV
SPGIMMYMANMVSTV

SEQ ID NO: 198292 - protein, 15 aa, Artificial Sequence
  Description of Artificial Sequence: Synthetic peptide
  Seed: SPGMMMGMFNMLSTV
SPGIMMYMFNMLSTV

SEQ ID NO: 198293 - protein, 15 aa, Artificial Sequence
  Description of Artificial Sequence: Synthetic peptide
  Seed: SPGMMMGMFNMLSTV
SPGIMMYMFNMYSTV

SEQ ID NO: 198294 - protein, 15 aa, Artificial Sequence
  Description of Artificial Sequence: Synthetic peptide
  Seed: SPGMMMGMFNMLSTV
SPGIMMYMHNMASTV

SEQ ID NO: 198295 - protein, 15 aa, Artificial Sequence
  Description of Artificial Sequence: Synthetic peptide
  Seed: SPGMMMGMFNMLSTV
SPGIMMYMKNMASTV

SEQ ID NO: 198296 - protein, 15 aa, Artificial Sequence
  Description of Artificial Sequence: Synthetic peptide
  Seed: SPGMMMGMFNMLSTV
SPGIMMYMNNMASTV

SEQ ID NO: 198297 - protein, 15 aa, Artificial Sequence
  Description of Artificial Sequence: Synthetic peptide
  Seed: SPGMMMGMFNMLSTV
SPGIMMYMNNMFSTV

SEQ ID NO: 198298 - protein, 15 aa, Artificial Sequence
  Description of Artificial Sequence: Synthetic peptide
  Seed: SPGMMMGMFNMLSTV
SPGIMMYMNNMISTV

SEQ ID NO: 198299 - protein, 15 aa, Artificial Sequence
  Description of Artificial Sequence: Synthetic peptide
  Seed: SPGMMMGMFNMLSTV
SPGIMMYMNNMLSTV

SEQ ID NO: 198300 - protein, 15 aa, Artificial Sequence
  Description of Artificial Sequence: Synthetic peptide
  Seed: SPGMMMGMFNMLSTV
SPGIMMYMNNMMSTV

SEQ ID NO: 198301 - protein, 15 aa, Artificial Sequence
  Description of Artificial Sequence: Synthetic peptide
  Seed: SPGMMMGMFNMLSTV
SPGIMMYMNNMNSTV

SEQ ID NO: 198302 - protein, 15 aa, Artificial Sequence
  Description of Artificial Sequence: Synthetic peptide
  Seed: SPGMMMGMFNMLSTV
SPGIMMYMNNMSSTV

SEQ ID NO: 198303 - protein, 15 aa, Artificial Sequence
  Description of Artificial Sequence: Synthetic peptide
  Seed: SPGMMMGMFNMLSTV
SPGIMMYMNNMTSTV

SEQ ID NO: 198304 - protein, 15 aa, Artificial Sequence
  Description of Artificial Sequence: Synthetic peptide
  Seed: SPGMMMGMFNMLSTV
SPGIMMYMNNMVSTV

SEQ ID NO: 198305 - protein, 15 aa, Artificial Sequence
  Description of Artificial Sequence: Synthetic peptide
  Seed: SPGMMMGMFNMLSTV
SPGIMMYMNNMYSTV

SEQ ID NO: 198306 - protein, 15 aa, Artificial Sequence
  Description of Artificial Sequence: Synthetic peptide
  Seed: SPGMMMGMFNMLSTV
SPGIMMYMPNMISTV

SEQ ID NO: 198307 - protein, 15 aa, Artificial Sequence
  Description of Artificial Sequence: Synthetic peptide
  Seed: SPGMMMGMFNMLSTV
SPGIMMYMPNMVSTV

SEQ ID NO: 198308 - protein, 15 aa, Artificial Sequence
  Description of Artificial Sequence: Synthetic peptide
  Seed: SPGMMMGMFNMLSTV
SPGIMMYMRNMASTV

SEQ ID NO: 198309 - protein, 15 aa, Artificial Sequence
  Description of Artificial Sequence: Synthetic peptide
  Seed: SPGMMMGMFNMLSTV
SPGIMMYMSNMASTV

SEQ ID NO: 198310 - protein, 15 aa, Artificial Sequence
  Description of Artificial Sequence: Synthetic peptide
  Seed: SPGMMMGMFNMLSTV
SPGIMMYMSNMISTV

SEQ ID NO: 198311 - protein, 15 aa, Artificial Sequence
  Description of Artificial Sequence: Synthetic peptide
  Seed: SPGMMMGMFNMLSTV
SPGIMMYMSNMVSTV

SEQ ID NO: 198312 - protein, 15 aa, Artificial Sequence
  Description of Artificial Sequence: Synthetic peptide
  Seed: SPGMMMGMFNMLSTV
SPGIMMYMVNMASTV

SEQ ID NO: 198313 - protein, 15 aa, Artificial Sequence
  Description of Artificial Sequence: Synthetic peptide
  Seed: SPGMMMGMFNMLSTV
SPGIMMYMYNMISTV

SEQ ID NO: 198314 - protein, 15 aa, Artificial Sequence
  Description of Artificial Sequence: Synthetic peptide
  Seed: SPGMMMGMFNMLSTV
SPGIMMYMYNMLSTV

SEQ ID NO: 198315 - protein, 15 aa, Artificial Sequence
  Description of Artificial Sequence: Synthetic peptide
  Seed: SPGMMMGMFNMLSTV
SPGKMMFMFNMVSTV

SEQ ID NO: 198316 - protein, 15 aa, Artificial Sequence
  Description of Artificial Sequence: Synthetic peptide
  Seed: SPGMMMGMFNMLSTV
SPGKMMIMFNMLSTV

SEQ ID NO: 198317 - protein, 15 aa, Artificial Sequence
  Description of Artificial Sequence: Synthetic peptide
  Seed: SPGMMMGMFNMLSTV
SPGKMMMMFNMLSTV

SEQ ID NO: 198318 - protein, 15 aa, Artificial Sequence
  Description of Artificial Sequence: Synthetic peptide
  Seed: SPGMMMGMFNMLSTV
SPGKMMNMANMISTV

SEQ ID NO: 198319 - protein, 15 aa, Artificial Sequence
  Description of Artificial Sequence: Synthetic peptide
  Seed: SPGMMMGMFNMLSTV
SPGKMMNMANMLSTV

SEQ ID NO: 198320 - protein, 15 aa, Artificial Sequence
  Description of Artificial Sequence: Synthetic peptide
  Seed: SPGMMMGMFNMLSTV
SPGKMMNMANMVSTV

SEQ ID NO: 198321 - protein, 15 aa, Artificial Sequence
  Description of Artificial Sequence: Synthetic peptide
  Seed: SPGMMMGMFNMLSTV
SPGKMMNMNNMFSTV

SEQ ID NO: 198322 - protein, 15 aa, Artificial Sequence
  Description of Artificial Sequence: Synthetic peptide
  Seed: SPGMMMGMFNMLSTV
SPGKMMNMNNMISTV

SEQ ID NO: 198323 - protein, 15 aa, Artificial Sequence
  Description of Artificial Sequence: Synthetic peptide
  Seed: SPGMMMGMFNMLSTV
SPGKMMNMNNMLSTV

SEQ ID NO: 198324 - protein, 15 aa, Artificial Sequence
  Description of Artificial Sequence: Synthetic peptide
  Seed: SPGMMMGMFNMLSTV
SPGKMMNMNNMVSTV

SEQ ID NO: 198325 - protein, 15 aa, Artificial Sequence
  Description of Artificial Sequence: Synthetic peptide
  Seed: SPGMMMGMFNMLSTV
SPGKMMNMSNMISTV

SEQ ID NO: 198326 - protein, 15 aa, Artificial Sequence
  Description of Artificial Sequence: Synthetic peptide
  Seed: SPGMMMGMFNMLSTV
SPGKMMNMSNMLSTV

SEQ ID NO: 198327 - protein, 15 aa, Artificial Sequence
  Description of Artificial Sequence: Synthetic peptide
  Seed: SPGMMMGMFNMLSTV
SPGKMMNMSNMVSTV

SEQ ID NO: 198328 - protein, 15 aa, Artificial Sequence
  Description of Artificial Sequence: Synthetic peptide
  Seed: SPGMMMGMFNMLSTV
SPGKMMSMFNMLSTV

SEQ ID NO: 198329 - protein, 15 aa, Artificial Sequence
  Description of Artificial Sequence: Synthetic peptide
  Seed: SPGMMMGMFNMLSTV
SPGKMMSMSNMISTV

SEQ ID NO: 198330 - protein, 15 aa, Artificial Sequence
  Description of Artificial Sequence: Synthetic peptide
  Seed: SPGMMMGMFNMLSTV
SPGKMMTMFNMISTV

SEQ ID NO: 198331 - protein, 15 aa, Artificial Sequence
  Description of Artificial Sequence: Synthetic peptide
  Seed: SPGMMMGMFNMLSTV
SPGKMMTMFNMLSTV

SEQ ID NO: 198332 - protein, 15 aa, Artificial Sequence
  Description of Artificial Sequence: Synthetic peptide
  Seed: SPGMMMGMFNMLSTV
SPGKMMTMFNMVSTV

SEQ ID NO: 198333 - protein, 15 aa, Artificial Sequence
  Description of Artificial Sequence: Synthetic peptide
  Seed: SPGMMMGMFNMLSTV
SPGKMMTMSNMISTV

SEQ ID NO: 198334 - protein, 15 aa, Artificial Sequence
  Description of Artificial Sequence: Synthetic peptide
  Seed: SPGMMMGMFNMLSTV
SPGLMMAMANMASTV

SEQ ID NO: 198335 - protein, 15 aa, Artificial Sequence
  Description of Artificial Sequence: Synthetic peptide
  Seed: SPGMMMGMFNMLSTV
SPGLMMAMANMFSTV

SEQ ID NO: 198336 - protein, 15 aa, Artificial Sequence
  Description of Artificial Sequence: Synthetic peptide
  Seed: SPGMMMGMFNMLSTV
SPGLMMAMANMISTV

SEQ ID NO: 198337 - protein, 15 aa, Artificial Sequence
  Description of Artificial Sequence: Synthetic peptide
  Seed: SPGMMMGMFNMLSTV
SPGLMMAMANMLSTV

SEQ ID NO: 198338 - protein, 15 aa, Artificial Sequence
  Description of Artificial Sequence: Synthetic peptide
  Seed: SPGMMMGMFNMLSTV
SPGLMMAMANMMSTV

SEQ ID NO: 198339 - protein, 15 aa, Artificial Sequence
  Description of Artificial Sequence: Synthetic peptide
  Seed: SPGMMMGMFNMLSTV
SPGLMMAMANMSSTV

SEQ ID NO: 198340 - protein, 15 aa, Artificial Sequence
  Description of Artificial Sequence: Synthetic peptide
  Seed: SPGMMMGMFNMLSTV
SPGLMMAMANMTSTV

SEQ ID NO: 198341 - protein, 15 aa, Artificial Sequence
  Description of Artificial Sequence: Synthetic peptide
  Seed: SPGMMMGMFNMLSTV
SPGLMMAMANMVSTV

SEQ ID NO: 198342 - protein, 15 aa, Artificial Sequence
  Description of Artificial Sequence: Synthetic peptide
  Seed: SPGMMMGMFNMLSTV
SPGLMMAMANMYSTV

SEQ ID NO: 198343 - protein, 15 aa, Artificial Sequence
  Description of Artificial Sequence: Synthetic peptide
  Seed: SPGMMMGMFNMLSTV
SPGLMMAMFNMDSTV

SEQ ID NO: 198344 - protein, 15 aa, Artificial Sequence
  Description of Artificial Sequence: Synthetic peptide
  Seed: SPGMMMGMFNMLSTV
SPGLMMAMFNMESTV

SEQ ID NO: 198345 - protein, 15 aa, Artificial Sequence
  Description of Artificial Sequence: Synthetic peptide
  Seed: SPGMMMGMFNMLSTV
SPGLMMAMFNMFSTV

SEQ ID NO: 198346 - protein, 15 aa, Artificial Sequence
  Description of Artificial Sequence: Synthetic peptide
  Seed: SPGMMMGMFNMLSTV
SPGLMMAMFNMISTV

SEQ ID NO: 198347 - protein, 15 aa, Artificial Sequence
  Description of Artificial Sequence: Synthetic peptide
  Seed: SPGMMMGMFNMLSTV
SPGLMMAMFNMLSTV

SEQ ID NO: 198348 - protein, 15 aa, Artificial Sequence
  Description of Artificial Sequence: Synthetic peptide
  Seed: SPGMMMGMFNMLSTV
SPGLMMAMFNMMSTV

SEQ ID NO: 198349 - protein, 15 aa, Artificial Sequence
  Description of Artificial Sequence: Synthetic peptide
  Seed: SPGMMMGMFNMLSTV
SPGLMMAMFNMNSTV

SEQ ID NO: 198350 - protein, 15 aa, Artificial Sequence
  Description of Artificial Sequence: Synthetic peptide
  Seed: SPGMMMGMFNMLSTV
SPGLMMAMFNMTSTV

SEQ ID NO: 198351 - protein, 15 aa, Artificial Sequence
  Description of Artificial Sequence: Synthetic peptide
  Seed: SPGMMMGMFNMLSTV
SPGLMMAMFNMVSTV

SEQ ID NO: 198352 - protein, 15 aa, Artificial Sequence
  Description of Artificial Sequence: Synthetic peptide
  Seed: SPGMMMGMFNMLSTV
SPGLMMAMFNMYSTV

SEQ ID NO: 198353 - protein, 15 aa, Artificial Sequence
  Description of Artificial Sequence: Synthetic peptide
  Seed: SPGMMMGMFNMLSTV
SPGLMMAMGNMASTV

SEQ ID NO: 198354 - protein, 15 aa, Artificial Sequence
  Description of Artificial Sequence: Synthetic peptide
  Seed: SPGMMMGMFNMLSTV
SPGLMMAMGNMISTV

SEQ ID NO: 198355 - protein, 15 aa, Artificial Sequence
  Description of Artificial Sequence: Synthetic peptide
  Seed: SPGMMMGMFNMLSTV
SPGLMMAMGNMLSTV

SEQ ID NO: 198356 - protein, 15 aa, Artificial Sequence
  Description of Artificial Sequence: Synthetic peptide
  Seed: SPGMMMGMFNMLSTV
SPGLMMAMGNMMSTV

SEQ ID NO: 198357 - protein, 15 aa, Artificial Sequence
  Description of Artificial Sequence: Synthetic peptide
  Seed: SPGMMMGMFNMLSTV
SPGLMMAMGNMVSTV

SEQ ID NO: 198358 - protein, 15 aa, Artificial Sequence
  Description of Artificial Sequence: Synthetic peptide
  Seed: SPGMMMGMFNMLSTV
SPGLMMAMGNMYSTV

SEQ ID NO: 198359 - protein, 15 aa, Artificial Sequence
  Description of Artificial Sequence: Synthetic peptide
  Seed: SPGMMMGMFNMLSTV
SPGLMMAMNNMASTV

SEQ ID NO: 198360 - protein, 15 aa, Artificial Sequence
  Description of Artificial Sequence: Synthetic peptide
  Seed: SPGMMMGMFNMLSTV
SPGLMMAMNNMFSTV

SEQ ID NO: 198361 - protein, 15 aa, Artificial Sequence
  Description of Artificial Sequence: Synthetic peptide
  Seed: SPGMMMGMFNMLSTV
SPGLMMAMNNMISTV

SEQ ID NO: 198362 - protein, 15 aa, Artificial Sequence
  Description of Artificial Sequence: Synthetic peptide
  Seed: SPGMMMGMFNMLSTV
SPGLMMAMNNMLSTV

SEQ ID NO: 198363 - protein, 15 aa, Artificial Sequence
  Description of Artificial Sequence: Synthetic peptide
  Seed: SPGMMMGMFNMLSTV
SPGLMMAMNNMMSTV

SEQ ID NO: 198364 - protein, 15 aa, Artificial Sequence
  Description of Artificial Sequence: Synthetic peptide
  Seed: SPGMMMGMFNMLSTV
SPGLMMAMNNMTSTV

SEQ ID NO: 198365 - protein, 15 aa, Artificial Sequence
  Description of Artificial Sequence: Synthetic peptide
  Seed: SPGMMMGMFNMLSTV
SPGLMMAMNNMVSTV

SEQ ID NO: 198366 - protein, 15 aa, Artificial Sequence
  Description of Artificial Sequence: Synthetic peptide
  Seed: SPGMMMGMFNMLSTV
SPGLMMAMNNMYSTV

SEQ ID NO: 198367 - protein, 15 aa, Artificial Sequence
  Description of Artificial Sequence: Synthetic peptide
  Seed: SPGMMMGMFNMLSTV
SPGLMMAMPNMASTV

SEQ ID NO: 198368 - protein, 15 aa, Artificial Sequence
  Description of Artificial Sequence: Synthetic peptide
  Seed: SPGMMMGMFNMLSTV
SPGLMMAMPNMFSTV

SEQ ID NO: 198369 - protein, 15 aa, Artificial Sequence
  Description of Artificial Sequence: Synthetic peptide
  Seed: SPGMMMGMFNMLSTV
SPGLMMAMPNMISTV

SEQ ID NO: 198370 - protein, 15 aa, Artificial Sequence
  Description of Artificial Sequence: Synthetic peptide
  Seed: SPGMMMGMFNMLSTV
SPGLMMAMPNMLSTV

SEQ ID NO: 198371 - protein, 15 aa, Artificial Sequence
  Description of Artificial Sequence: Synthetic peptide
  Seed: SPGMMMGMFNMLSTV
SPGLMMAMPNMMSTV

SEQ ID NO: 198372 - protein, 15 aa, Artificial Sequence
  Description of Artificial Sequence: Synthetic peptide
  Seed: SPGMMMGMFNMLSTV
SPGLMMAMPNMTSTV

SEQ ID NO: 198373 - protein, 15 aa, Artificial Sequence
  Description of Artificial Sequence: Synthetic peptide
  Seed: SPGMMMGMFNMLSTV
SPGLMMAMPNMVSTV

SEQ ID NO: 198374 - protein, 15 aa, Artificial Sequence
  Description of Artificial Sequence: Synthetic peptide
  Seed: SPGMMMGMFNMLSTV
SPGLMMAMPNMYSTV

SEQ ID NO: 198375 - protein, 15 aa, Artificial Sequence
  Description of Artificial Sequence: Synthetic peptide
  Seed: SPGMMMGMFNMLSTV
SPGLMMAMSNMASTV

SEQ ID NO: 198376 - protein, 15 aa, Artificial Sequence
  Description of Artificial Sequence: Synthetic peptide
  Seed: SPGMMMGMFNMLSTV
SPGLMMAMSNMFSTV

SEQ ID NO: 198377 - protein, 15 aa, Artificial Sequence
  Description of Artificial Sequence: Synthetic peptide
  Seed: SPGMMMGMFNMLSTV
SPGLMMAMSNMISTV

SEQ ID NO: 198378 - protein, 15 aa, Artificial Sequence
  Description of Artificial Sequence: Synthetic peptide
  Seed: SPGMMMGMFNMLSTV
SPGLMMAMSNMLSTV

SEQ ID NO: 198379 - protein, 15 aa, Artificial Sequence
  Description of Artificial Sequence: Synthetic peptide
  Seed: SPGMMMGMFNMLSTV
SPGLMMAMSNMMSTV

SEQ ID NO: 198380 - protein, 15 aa, Artificial Sequence
  Description of Artificial Sequence: Synthetic peptide
  Seed: SPGMMMGMFNMLSTV
SPGLMMAMSNMTSTV

SEQ ID NO: 198381 - protein, 15 aa, Artificial Sequence
  Description of Artificial Sequence: Synthetic peptide
  Seed: SPGMMMGMFNMLSTV
SPGLMMAMSNMVSTV

SEQ ID NO: 198382 - protein, 15 aa, Artificial Sequence
  Description of Artificial Sequence: Synthetic peptide
  Seed: SPGMMMGMFNMLSTV
SPGLMMAMSNMYSTV

SEQ ID NO: 198383 - protein, 15 aa, Artificial Sequence
  Description of Artificial Sequence: Synthetic peptide
  Seed: SPGMMMGMFNMLSTV
SPGLMMAMTNMISTV

SEQ ID NO: 198384 - protein, 15 aa, Artificial Sequence
  Description of Artificial Sequence: Synthetic peptide
  Seed: SPGMMMGMFNMLSTV
SPGLMMAMTNMLSTV

SEQ ID NO: 198385 - protein, 15 aa, Artificial Sequence
  Description of Artificial Sequence: Synthetic peptide
  Seed: SPGMMMGMFNMLSTV
SPGLMMAMTNMMSTV

SEQ ID NO: 198386 - protein, 15 aa, Artificial Sequence
  Description of Artificial Sequence: Synthetic peptide
  Seed: SPGMMMGMFNMLSTV
SPGLMMAMTNMVSTV

SEQ ID NO: 198387 - protein, 15 aa, Artificial Sequence
  Description of Artificial Sequence: Synthetic peptide
  Seed: SPGMMMGMFNMLSTV
SPGLMMAMTNMYSTV

SEQ ID NO: 198388 - protein, 15 aa, Artificial Sequence
  Description of Artificial Sequence: Synthetic peptide
  Seed: SPGMMMGMFNMLSTV
SPGLMMAMYNMFSTV

SEQ ID NO: 198389 - protein, 15 aa, Artificial Sequence
  Description of Artificial Sequence: Synthetic peptide
  Seed: SPGMMMGMFNMLSTV
SPGLMMAMYNMISTV

SEQ ID NO: 198390 - protein, 15 aa, Artificial Sequence
  Description of Artificial Sequence: Synthetic peptide
  Seed: SPGMMMGMFNMLSTV
SPGLMMAMYNMLSTV

SEQ ID NO: 198391 - protein, 15 aa, Artificial Sequence
  Description of Artificial Sequence: Synthetic peptide
  Seed: SPGMMMGMFNMLSTV
SPGLMMAMYNMVSTV

SEQ ID NO: 198392 - protein, 15 aa, Artificial Sequence
  Description of Artificial Sequence: Synthetic peptide
  Seed: SPGMMMGMFNMLSTV
SPGLMMCMNNMISTV

SEQ ID NO: 198393 - protein, 15 aa, Artificial Sequence
  Description of Artificial Sequence: Synthetic peptide
  Seed: SPGMMMGMFNMLSTV
SPGLMMCMNNMVSTV

SEQ ID NO: 198394 - protein, 15 aa, Artificial Sequence
  Description of Artificial Sequence: Synthetic peptide
  Seed: SPGMMMGMFNMLSTV
SPGLMMCMYNMFSTV

SEQ ID NO: 198395 - protein, 15 aa, Artificial Sequence
  Description of Artificial Sequence: Synthetic peptide
  Seed: SPGMMMGMFNMLSTV
SPGLMMDMANMASTV

SEQ ID NO: 198396 - protein, 15 aa, Artificial Sequence
  Description of Artificial Sequence: Synthetic peptide
  Seed: SPGMMMGMFNMLSTV
SPGLMMDMANMFSTV

SEQ ID NO: 198397 - protein, 15 aa, Artificial Sequence
  Description of Artificial Sequence: Synthetic peptide
  Seed: SPGMMMGMFNMLSTV
SPGLMMDMANMISTV

SEQ ID NO: 198398 - protein, 15 aa, Artificial Sequence
  Description of Artificial Sequence: Synthetic peptide
  Seed: SPGMMMGMFNMLSTV
SPGLMMDMANMLSTV

SEQ ID NO: 198399 - protein, 15 aa, Artificial Sequence
  Description of Artificial Sequence: Synthetic peptide
  Seed: SPGMMMGMFNMLSTV
SPGLMMDMANMMSTV

SEQ ID NO: 198400 - protein, 15 aa, Artificial Sequence
  Description of Artificial Sequence: Synthetic peptide
  Seed: SPGMMMGMFNMLSTV
SPGLMMDMANMSSTV

SEQ ID NO: 198401 - protein, 15 aa, Artificial Sequence
  Description of Artificial Sequence: Synthetic peptide
  Seed: SPGMMMGMFNMLSTV
SPGLMMDMANMTSTV

SEQ ID NO: 198402 - protein, 15 aa, Artificial Sequence
  Description of Artificial Sequence: Synthetic peptide
  Seed: SPGMMMGMFNMLSTV
SPGLMMDMANMVSTV

SEQ ID NO: 198403 - protein, 15 aa, Artificial Sequence
  Description of Artificial Sequence: Synthetic peptide
  Seed: SPGMMMGMFNMLSTV
SPGLMMDMANMYSTV

SEQ ID NO: 198404 - protein, 15 aa, Artificial Sequence
  Description of Artificial Sequence: Synthetic peptide
  Seed: SPGMMMGMFNMLSTV
SPGLMMDMFNMISTV

SEQ ID NO: 198405 - protein, 15 aa, Artificial Sequence
  Description of Artificial Sequence: Synthetic peptide
  Seed: SPGMMMGMFNMLSTV
SPGLMMDMFNMLSTV

SEQ ID NO: 198406 - protein, 15 aa, Artificial Sequence
  Description of Artificial Sequence: Synthetic peptide
  Seed: SPGMMMGMFNMLSTV
SPGLMMDMFNMVSTV

SEQ ID NO: 198407 - protein, 15 aa, Artificial Sequence
  Description of Artificial Sequence: Synthetic peptide
  Seed: SPGMMMGMFNMLSTV
SPGLMMDMGNMISTV

SEQ ID NO: 198408 - protein, 15 aa, Artificial Sequence
  Description of Artificial Sequence: Synthetic peptide
  Seed: SPGMMMGMFNMLSTV
SPGLMMDMGNMLSTV

SEQ ID NO: 198409 - protein, 15 aa, Artificial Sequence
  Description of Artificial Sequence: Synthetic peptide
  Seed: SPGMMMGMFNMLSTV
SPGLMMDMGNMVSTV

SEQ ID NO: 198410 - protein, 15 aa, Artificial Sequence
  Description of Artificial Sequence: Synthetic peptide
  Seed: SPGMMMGMFNMLSTV
SPGLMMDMINMISTV

SEQ ID NO: 198411 - protein, 15 aa, Artificial Sequence
  Description of Artificial Sequence: Synthetic peptide
  Seed: SPGMMMGMFNMLSTV
SPGLMMDMINMVSTV

SEQ ID NO: 198412 - protein, 15 aa, Artificial Sequence
  Description of Artificial Sequence: Synthetic peptide
  Seed: SPGMMMGMFNMLSTV
SPGLMMDMNNMASTV

SEQ ID NO: 198413 - protein, 15 aa, Artificial Sequence
  Description of Artificial Sequence: Synthetic peptide
  Seed: SPGMMMGMFNMLSTV
SPGLMMDMNNMFSTV

SEQ ID NO: 198414 - protein, 15 aa, Artificial Sequence
  Description of Artificial Sequence: Synthetic peptide
  Seed: SPGMMMGMFNMLSTV
SPGLMMDMNNMISTV

SEQ ID NO: 198415 - protein, 15 aa, Artificial Sequence
  Description of Artificial Sequence: Synthetic peptide
  Seed: SPGMMMGMFNMLSTV
SPGLMMDMNNMLSTV

SEQ ID NO: 198416 - protein, 15 aa, Artificial Sequence
  Description of Artificial Sequence: Synthetic peptide
  Seed: SPGMMMGMFNMLSTV
SPGLMMDMNNMMSTV

SEQ ID NO: 198417 - protein, 15 aa, Artificial Sequence
  Description of Artificial Sequence: Synthetic peptide
  Seed: SPGMMMGMFNMLSTV
SPGLMMDMNNMVSTV

SEQ ID NO: 198418 - protein, 15 aa, Artificial Sequence
  Description of Artificial Sequence: Synthetic peptide
  Seed: SPGMMMGMFNMLSTV
SPGLMMDMNNMYSTV

SEQ ID NO: 198419 - protein, 15 aa, Artificial Sequence
  Description of Artificial Sequence: Synthetic peptide
  Seed: SPGMMMGMFNMLSTV
SPGLMMDMPNMFSTV

SEQ ID NO: 198420 - protein, 15 aa, Artificial Sequence
  Description of Artificial Sequence: Synthetic peptide
  Seed: SPGMMMGMFNMLSTV
SPGLMMDMPNMISTV

SEQ ID NO: 198421 - protein, 15 aa, Artificial Sequence
  Description of Artificial Sequence: Synthetic peptide
  Seed: SPGMMMGMFNMLSTV
SPGLMMDMPNMLSTV

SEQ ID NO: 198422 - protein, 15 aa, Artificial Sequence
  Description of Artificial Sequence: Synthetic peptide
  Seed: SPGMMMGMFNMLSTV
SPGLMMDMPNMMSTV

SEQ ID NO: 198423 - protein, 15 aa, Artificial Sequence
  Description of Artificial Sequence: Synthetic peptide
  Seed: SPGMMMGMFNMLSTV
SPGLMMDMPNMVSTV

SEQ ID NO: 198424 - protein, 15 aa, Artificial Sequence
  Description of Artificial Sequence: Synthetic peptide
  Seed: SPGMMMGMFNMLSTV
SPGLMMDMPNMYSTV

SEQ ID NO: 198425 - protein, 15 aa, Artificial Sequence
  Description of Artificial Sequence: Synthetic peptide
  Seed: SPGMMMGMFNMLSTV
SPGLMMDMSNMASTV

SEQ ID NO: 198426 - protein, 15 aa, Artificial Sequence
  Description of Artificial Sequence: Synthetic peptide
  Seed: SPGMMMGMFNMLSTV
SPGLMMDMSNMFSTV

SEQ ID NO: 198427 - protein, 15 aa, Artificial Sequence
  Description of Artificial Sequence: Synthetic peptide
  Seed: SPGMMMGMFNMLSTV
SPGLMMDMSNMISTV

SEQ ID NO: 198428 - protein, 15 aa, Artificial Sequence
  Description of Artificial Sequence: Synthetic peptide
  Seed: SPGMMMGMFNMLSTV
SPGLMMDMSNMLSTV

SEQ ID NO: 198429 - protein, 15 aa, Artificial Sequence
  Description of Artificial Sequence: Synthetic peptide
  Seed: SPGMMMGMFNMLSTV
SPGLMMDMSNMMSTV

SEQ ID NO: 198430 - protein, 15 aa, Artificial Sequence
  Description of Artificial Sequence: Synthetic peptide
  Seed: SPGMMMGMFNMLSTV
SPGLMMDMSNMVSTV

SEQ ID NO: 198431 - protein, 15 aa, Artificial Sequence
  Description of Artificial Sequence: Synthetic peptide
  Seed: SPGMMMGMFNMLSTV
SPGLMMDMSNMYSTV

SEQ ID NO: 198432 - protein, 15 aa, Artificial Sequence
  Description of Artificial Sequence: Synthetic peptide
  Seed: SPGMMMGMFNMLSTV
SPGLMMDMTNMFSTV

SEQ ID NO: 198433 - protein, 15 aa, Artificial Sequence
  Description of Artificial Sequence: Synthetic peptide
  Seed: SPGMMMGMFNMLSTV
SPGLMMDMTNMISTV

SEQ ID NO: 198434 - protein, 15 aa, Artificial Sequence
  Description of Artificial Sequence: Synthetic peptide
  Seed: SPGMMMGMFNMLSTV
SPGLMMDMTNMLSTV

SEQ ID NO: 198435 - protein, 15 aa, Artificial Sequence
  Description of Artificial Sequence: Synthetic peptide
  Seed: SPGMMMGMFNMLSTV
SPGLMMDMTNMMSTV

SEQ ID NO: 198436 - protein, 15 aa, Artificial Sequence
  Description of Artificial Sequence: Synthetic peptide
  Seed: SPGMMMGMFNMLSTV
SPGLMMDMTNMVSTV

SEQ ID NO: 198437 - protein, 15 aa, Artificial Sequence
  Description of Artificial Sequence: Synthetic peptide
  Seed: SPGMMMGMFNMLSTV
SPGLMMDMTNMYSTV

SEQ ID NO: 198438 - protein, 15 aa, Artificial Sequence
  Description of Artificial Sequence: Synthetic peptide
  Seed: SPGMMMGMFNMLSTV
SPGLMMDMVNMISTV

SEQ ID NO: 198439 - protein, 15 aa, Artificial Sequence
  Description of Artificial Sequence: Synthetic peptide
  Seed: SPGMMMGMFNMLSTV
SPGLMMDMVNMLSTV

SEQ ID NO: 198440 - protein, 15 aa, Artificial Sequence
  Description of Artificial Sequence: Synthetic peptide
  Seed: SPGMMMGMFNMLSTV
SPGLMMDMVNMVSTV

SEQ ID NO: 198441 - protein, 15 aa, Artificial Sequence
  Description of Artificial Sequence: Synthetic peptide
  Seed: SPGMMMGMFNMLSTV
SPGLMMDMVNMYSTV

SEQ ID NO: 198442 - protein, 15 aa, Artificial Sequence
  Description of Artificial Sequence: Synthetic peptide
  Seed: SPGMMMGMFNMLSTV
SPGLMMEMANMISTV

SEQ ID NO: 198443 - protein, 15 aa, Artificial Sequence
  Description of Artificial Sequence: Synthetic peptide
  Seed: SPGMMMGMFNMLSTV
SPGLMMEMANMVSTV

SEQ ID NO: 198444 - protein, 15 aa, Artificial Sequence
  Description of Artificial Sequence: Synthetic peptide
  Seed: SPGMMMGMFNMLSTV
SPGLMMEMFNMASTV

SEQ ID NO: 198445 - protein, 15 aa, Artificial Sequence
  Description of Artificial Sequence: Synthetic peptide
  Seed: SPGMMMGMFNMLSTV
SPGLMMEMFNMESTV

SEQ ID NO: 198446 - protein, 15 aa, Artificial Sequence
  Description of Artificial Sequence: Synthetic peptide
  Seed: SPGMMMGMFNMLSTV
SPGLMMEMFNMFSTV

SEQ ID NO: 198447 - protein, 15 aa, Artificial Sequence
  Description of Artificial Sequence: Synthetic peptide
  Seed: SPGMMMGMFNMLSTV
SPGLMMEMFNMISTV

SEQ ID NO: 198448 - protein, 15 aa, Artificial Sequence
  Description of Artificial Sequence: Synthetic peptide
  Seed: SPGMMMGMFNMLSTV
SPGLMMEMFNMLSTV

SEQ ID NO: 198449 - protein, 15 aa, Artificial Sequence
  Description of Artificial Sequence: Synthetic peptide
  Seed: SPGMMMGMFNMLSTV
SPGLMMEMFNMMSTV

SEQ ID NO: 198450 - protein, 15 aa, Artificial Sequence
  Description of Artificial Sequence: Synthetic peptide
  Seed: SPGMMMGMFNMLSTV
SPGLMMEMFNMNSTV

SEQ ID NO: 198451 - protein, 15 aa, Artificial Sequence
  Description of Artificial Sequence: Synthetic peptide
  Seed: SPGMMMGMFNMLSTV
SPGLMMEMFNMSSTV

SEQ ID NO: 198452 - protein, 15 aa, Artificial Sequence
  Description of Artificial Sequence: Synthetic peptide
  Seed: SPGMMMGMFNMLSTV
SPGLMMEMFNMTSTV

SEQ ID NO: 198453 - protein, 15 aa, Artificial Sequence
  Description of Artificial Sequence: Synthetic peptide
  Seed: SPGMMMGMFNMLSTV
SPGLMMEMFNMVSTV

SEQ ID NO: 198454 - protein, 15 aa, Artificial Sequence
  Description of Artificial Sequence: Synthetic peptide
  Seed: SPGMMMGMFNMLSTV
SPGLMMEMFNMYSTV

SEQ ID NO: 198455 - protein, 15 aa, Artificial Sequence
  Description of Artificial Sequence: Synthetic peptide
  Seed: SPGMMMGMFNMLSTV
SPGLMMEMNNMFSTV

SEQ ID NO: 198456 - protein, 15 aa, Artificial Sequence
  Description of Artificial Sequence: Synthetic peptide
  Seed: SPGMMMGMFNMLSTV
SPGLMMEMNNMISTV

SEQ ID NO: 198457 - protein, 15 aa, Artificial Sequence
  Description of Artificial Sequence: Synthetic peptide
  Seed: SPGMMMGMFNMLSTV
SPGLMMEMNNMLSTV

SEQ ID NO: 198458 - protein, 15 aa, Artificial Sequence
  Description of Artificial Sequence: Synthetic peptide
  Seed: SPGMMMGMFNMLSTV
SPGLMMEMNNMVSTV

SEQ ID NO: 198459 - protein, 15 aa, Artificial Sequence
  Description of Artificial Sequence: Synthetic peptide
  Seed: SPGMMMGMFNMLSTV
SPGLMMEMNNMYSTV

SEQ ID NO: 198460 - protein, 15 aa, Artificial Sequence
  Description of Artificial Sequence: Synthetic peptide
  Seed: SPGMMMGMFNMLSTV
SPGLMMEMPNMISTV

SEQ ID NO: 198461 - protein, 15 aa, Artificial Sequence
  Description of Artificial Sequence: Synthetic peptide
  Seed: SPGMMMGMFNMLSTV
SPGLMMEMSNMISTV

SEQ ID NO: 198462 - protein, 15 aa, Artificial Sequence
  Description of Artificial Sequence: Synthetic peptide
  Seed: SPGMMMGMFNMLSTV
SPGLMMEMSNMVSTV

SEQ ID NO: 198463 - protein, 15 aa, Artificial Sequence
  Description of Artificial Sequence: Synthetic peptide
  Seed: SPGMMMGMFNMLSTV
SPGLMMEMWNMLSTV

SEQ ID NO: 198464 - protein, 15 aa, Artificial Sequence
  Description of Artificial Sequence: Synthetic peptide
  Seed: SPGMMMGMFNMLSTV
SPGLMMEMYNMFSTV

SEQ ID NO: 198465 - protein, 15 aa, Artificial Sequence
  Description of Artificial Sequence: Synthetic peptide
  Seed: SPGMMMGMFNMLSTV
SPGLMMEMYNMISTV

SEQ ID NO: 198466 - protein, 15 aa, Artificial Sequence
  Description of Artificial Sequence: Synthetic peptide
  Seed: SPGMMMGMFNMLSTV
SPGLMMEMYNMLSTV

SEQ ID NO: 198467 - protein, 15 aa, Artificial Sequence
  Description of Artificial Sequence: Synthetic peptide
  Seed: SPGMMMGMFNMLSTV
SPGLMMEMYNMVSTV

SEQ ID NO: 198468 - protein, 15 aa, Artificial Sequence
  Description of Artificial Sequence: Synthetic peptide
  Seed: SPGMMMGMFNMLSTV
SPGLMMFMANMASTV

SEQ ID NO: 198469 - protein, 15 aa, Artificial Sequence
  Description of Artificial Sequence: Synthetic peptide
  Seed: SPGMMMGMFNMLSTV
SPGLMMFMANMISTV

SEQ ID NO: 198470 - protein, 15 aa, Artificial Sequence
  Description of Artificial Sequence: Synthetic peptide
  Seed: SPGMMMGMFNMLSTV
SPGLMMFMANMLSTV

SEQ ID NO: 198471 - protein, 15 aa, Artificial Sequence
  Description of Artificial Sequence: Synthetic peptide
  Seed: SPGMMMGMFNMLSTV
SPGLMMFMANMVSTV

SEQ ID NO: 198472 - protein, 15 aa, Artificial Sequence
  Description of Artificial Sequence: Synthetic peptide
  Seed: SPGMMMGMFNMLSTV
SPGLMMFMFNMESTV

SEQ ID NO: 198473 - protein, 15 aa, Artificial Sequence
  Description of Artificial Sequence: Synthetic peptide
  Seed: SPGMMMGMFNMLSTV
SPGLMMFMFNMISTV

SEQ ID NO: 198474 - protein, 15 aa, Artificial Sequence
  Description of Artificial Sequence: Synthetic peptide
  Seed: SPGMMMGMFNMLSTV
SPGLMMFMFNMLSTV

SEQ ID NO: 198475 - protein, 15 aa, Artificial Sequence
  Description of Artificial Sequence: Synthetic peptide
  Seed: SPGMMMGMFNMLSTV
SPGLMMFMFNMMSTV

SEQ ID NO: 198476 - protein, 15 aa, Artificial Sequence
  Description of Artificial Sequence: Synthetic peptide
  Seed: SPGMMMGMFNMLSTV
SPGLMMFMFNMVSTV

SEQ ID NO: 198477 - protein, 15 aa, Artificial Sequence
  Description of Artificial Sequence: Synthetic peptide
  Seed: SPGMMMGMFNMLSTV
SPGLMMFMFNMYSTV

SEQ ID NO: 198478 - protein, 15 aa, Artificial Sequence
  Description of Artificial Sequence: Synthetic peptide
  Seed: SPGMMMGMFNMLSTV
SPGLMMFMHNMASTV

SEQ ID NO: 198479 - protein, 15 aa, Artificial Sequence
  Description of Artificial Sequence: Synthetic peptide
  Seed: SPGMMMGMFNMLSTV
SPGLMMFMKNMASTV

SEQ ID NO: 198480 - protein, 15 aa, Artificial Sequence
  Description of Artificial Sequence: Synthetic peptide
  Seed: SPGMMMGMFNMLSTV
SPGLMMFMKNMSSTV

SEQ ID NO: 198481 - protein, 15 aa, Artificial Sequence
  Description of Artificial Sequence: Synthetic peptide
  Seed: SPGMMMGMFNMLSTV
SPGLMMFMKNMVSTV

SEQ ID NO: 198482 - protein, 15 aa, Artificial Sequence
  Description of Artificial Sequence: Synthetic peptide
  Seed: SPGMMMGMFNMLSTV
SPGLMMFMLNMYSTV

SEQ ID NO: 198483 - protein, 15 aa, Artificial Sequence
  Description of Artificial Sequence: Synthetic peptide
  Seed: SPGMMMGMFNMLSTV
SPGLMMFMMNMLSTV

SEQ ID NO: 198484 - protein, 15 aa, Artificial Sequence
  Description of Artificial Sequence: Synthetic peptide
  Seed: SPGMMMGMFNMLSTV
SPGLMMFMNNMASTV

SEQ ID NO: 198485 - protein, 15 aa, Artificial Sequence
  Description of Artificial Sequence: Synthetic peptide
  Seed: SPGMMMGMFNMLSTV
SPGLMMFMNNMISTV

SEQ ID NO: 198486 - protein, 15 aa, Artificial Sequence
  Description of Artificial Sequence: Synthetic peptide
  Seed: SPGMMMGMFNMLSTV
SPGLMMFMNNMLSTV

SEQ ID NO: 198487 - protein, 15 aa, Artificial Sequence
  Description of Artificial Sequence: Synthetic peptide
  Seed: SPGMMMGMFNMLSTV
SPGLMMFMNNMMSTV

SEQ ID NO: 198488 - protein, 15 aa, Artificial Sequence
  Description of Artificial Sequence: Synthetic peptide
  Seed: SPGMMMGMFNMLSTV
SPGLMMFMNNMSSTV

SEQ ID NO: 198489 - protein, 15 aa, Artificial Sequence
  Description of Artificial Sequence: Synthetic peptide
  Seed: SPGMMMGMFNMLSTV
SPGLMMFMNNMTSTV

SEQ ID NO: 198490 - protein, 15 aa, Artificial Sequence
  Description of Artificial Sequence: Synthetic peptide
  Seed: SPGMMMGMFNMLSTV
SPGLMMFMNNMVSTV

SEQ ID NO: 198491 - protein, 15 aa, Artificial Sequence
  Description of Artificial Sequence: Synthetic peptide
  Seed: SPGMMMGMFNMLSTV
SPGLMMFMNNMYSTV

SEQ ID NO: 198492 - protein, 15 aa, Artificial Sequence
  Description of Artificial Sequence: Synthetic peptide
  Seed: SPGMMMGMFNMLSTV
SPGLMMFMPNMASTV

SEQ ID NO: 198493 - protein, 15 aa, Artificial Sequence
  Description of Artificial Sequence: Synthetic peptide
  Seed: SPGMMMGMFNMLSTV
SPGLMMFMPNMISTV

SEQ ID NO: 198494 - protein, 15 aa, Artificial Sequence
  Description of Artificial Sequence: Synthetic peptide
  Seed: SPGMMMGMFNMLSTV
SPGLMMFMPNMLSTV

SEQ ID NO: 198495 - protein, 15 aa, Artificial Sequence
  Description of Artificial Sequence: Synthetic peptide
  Seed: SPGMMMGMFNMLSTV
SPGLMMFMPNMMSTV

SEQ ID NO: 198496 - protein, 15 aa, Artificial Sequence
  Description of Artificial Sequence: Synthetic peptide
  Seed: SPGMMMGMFNMLSTV
SPGLMMFMPNMVSTV

SEQ ID NO: 198497 - protein, 15 aa, Artificial Sequence
  Description of Artificial Sequence: Synthetic peptide
  Seed: SPGMMMGMFNMLSTV
SPGLMMFMRNMASTV

SEQ ID NO: 198498 - protein, 15 aa, Artificial Sequence
  Description of Artificial Sequence: Synthetic peptide
  Seed: SPGMMMGMFNMLSTV
SPGLMMFMRNMGSTV

SEQ ID NO: 198499 - protein, 15 aa, Artificial Sequence
  Description of Artificial Sequence: Synthetic peptide
  Seed: SPGMMMGMFNMLSTV
SPGLMMFMRNMISTV

SEQ ID NO: 198500 - protein, 15 aa, Artificial Sequence
  Description of Artificial Sequence: Synthetic peptide
  Seed: SPGMMMGMFNMLSTV
SPGLMMFMRNMNSTV

SEQ ID NO: 198501 - protein, 15 aa, Artificial Sequence
  Description of Artificial Sequence: Synthetic peptide
  Seed: SPGMMMGMFNMLSTV
SPGLMMFMRNMSSTV

SEQ ID NO: 198502 - protein, 15 aa, Artificial Sequence
  Description of Artificial Sequence: Synthetic peptide
  Seed: SPGMMMGMFNMLSTV
SPGLMMFMRNMTSTV

SEQ ID NO: 198503 - protein, 15 aa, Artificial Sequence
  Description of Artificial Sequence: Synthetic peptide
  Seed: SPGMMMGMFNMLSTV
SPGLMMFMRNMVSTV

SEQ ID NO: 198504 - protein, 15 aa, Artificial Sequence
  Description of Artificial Sequence: Synthetic peptide
  Seed: SPGMMMGMFNMLSTV
SPGLMMFMSNMASTV

SEQ ID NO: 198505 - protein, 15 aa, Artificial Sequence
  Description of Artificial Sequence: Synthetic peptide
  Seed: SPGMMMGMFNMLSTV
SPGLMMFMSNMSSTV

SEQ ID NO: 198506 - protein, 15 aa, Artificial Sequence
  Description of Artificial Sequence: Synthetic peptide
  Seed: SPGMMMGMFNMLSTV
SPGLMMFMSNMVSTV

SEQ ID NO: 198507 - protein, 15 aa, Artificial Sequence
  Description of Artificial Sequence: Synthetic peptide
  Seed: SPGMMMGMFNMLSTV
SPGLMMFMTNMASTV

SEQ ID NO: 198508 - protein, 15 aa, Artificial Sequence
  Description of Artificial Sequence: Synthetic peptide
  Seed: SPGMMMGMFNMLSTV
SPGLMMFMTNMSSTV

SEQ ID NO: 198509 - protein, 15 aa, Artificial Sequence
  Description of Artificial Sequence: Synthetic peptide
  Seed: SPGMMMGMFNMLSTV
SPGLMMFMWNMISTV

SEQ ID NO: 198510 - protein, 15 aa, Artificial Sequence
  Description of Artificial Sequence: Synthetic peptide
  Seed: SPGMMMGMFNMLSTV
SPGLMMFMWNMLSTV

SEQ ID NO: 198511 - protein, 15 aa, Artificial Sequence
  Description of Artificial Sequence: Synthetic peptide
  Seed: SPGMMMGMFNMLSTV
SPGLMMFMWNMMSTV

SEQ ID NO: 198512 - protein, 15 aa, Artificial Sequence
  Description of Artificial Sequence: Synthetic peptide
  Seed: SPGMMMGMFNMLSTV
SPGLMMFMWNMVSTV

SEQ ID NO: 198513 - protein, 15 aa, Artificial Sequence
  Description of Artificial Sequence: Synthetic peptide
  Seed: SPGMMMGMFNMLSTV
SPGLMMFMYNMFSTV

SEQ ID NO: 198514 - protein, 15 aa, Artificial Sequence
  Description of Artificial Sequence: Synthetic peptide
  Seed: SPGMMMGMFNMLSTV
SPGLMMFMYNMISTV

SEQ ID NO: 198515 - protein, 15 aa, Artificial Sequence
  Description of Artificial Sequence: Synthetic peptide
  Seed: SPGMMMGMFNMLSTV
SPGLMMFMYNMLSTV

SEQ ID NO: 198516 - protein, 15 aa, Artificial Sequence
  Description of Artificial Sequence: Synthetic peptide
  Seed: SPGMMMGMFNMLSTV
SPGLMMFMYNMMSTV

SEQ ID NO: 198517 - protein, 15 aa, Artificial Sequence
  Description of Artificial Sequence: Synthetic peptide
  Seed: SPGMMMGMFNMLSTV
SPGLMMFMYNMVSTV

SEQ ID NO: 198518 - protein, 15 aa, Artificial Sequence
  Description of Artificial Sequence: Synthetic peptide
  Seed: SPGMMMGMFNMLSTV
SPGLMMGMANMASTV

SEQ ID NO: 198519 - protein, 15 aa, Artificial Sequence
  Description of Artificial Sequence: Synthetic peptide
  Seed: SPGMMMGMFNMLSTV
SPGLMMGMANMISTV

SEQ ID NO: 198520 - protein, 15 aa, Artificial Sequence
  Description of Artificial Sequence: Synthetic peptide
  Seed: SPGMMMGMFNMLSTV
SPGLMMGMANMLSTV

SEQ ID NO: 198521 - protein, 15 aa, Artificial Sequence
  Description of Artificial Sequence: Synthetic peptide
  Seed: SPGMMMGMFNMLSTV
SPGLMMGMANMMSTV

SEQ ID NO: 198522 - protein, 15 aa, Artificial Sequence
  Description of Artificial Sequence: Synthetic peptide
  Seed: SPGMMMGMFNMLSTV
SPGLMMGMANMVSTV

SEQ ID NO: 198523 - protein, 15 aa, Artificial Sequence
  Description of Artificial Sequence: Synthetic peptide
  Seed: SPGMMMGMFNMLSTV
SPGLMMGMFNMISTV

SEQ ID NO: 198524 - protein, 15 aa, Artificial Sequence
  Description of Artificial Sequence: Synthetic peptide
  Seed: SPGMMMGMFNMLSTV
SPGLMMGMFNMLSTV

SEQ ID NO: 198525 - protein, 15 aa, Artificial Sequence
  Description of Artificial Sequence: Synthetic peptide
  Seed: SPGMMMGMFNMLSTV
SPGLMMGMFNMVSTV

SEQ ID NO: 198526 - protein, 15 aa, Artificial Sequence
  Description of Artificial Sequence: Synthetic peptide
  Seed: SPGMMMGMFNMLSTV
SPGLMMGMGNMISTV

SEQ ID NO: 198527 - protein, 15 aa, Artificial Sequence
  Description of Artificial Sequence: Synthetic peptide
  Seed: SPGMMMGMFNMLSTV
SPGLMMGMGNMLSTV

SEQ ID NO: 198528 - protein, 15 aa, Artificial Sequence
  Description of Artificial Sequence: Synthetic peptide
  Seed: SPGMMMGMFNMLSTV
SPGLMMGMNNMFSTV

SEQ ID NO: 198529 - protein, 15 aa, Artificial Sequence
  Description of Artificial Sequence: Synthetic peptide
  Seed: SPGMMMGMFNMLSTV
SPGLMMGMNNMISTV

SEQ ID NO: 198530 - protein, 15 aa, Artificial Sequence
  Description of Artificial Sequence: Synthetic peptide
  Seed: SPGMMMGMFNMLSTV
SPGLMMGMNNMLSTV

SEQ ID NO: 198531 - protein, 15 aa, Artificial Sequence
  Description of Artificial Sequence: Synthetic peptide
  Seed: SPGMMMGMFNMLSTV
SPGLMMGMNNMVSTV

SEQ ID NO: 198532 - protein, 15 aa, Artificial Sequence
  Description of Artificial Sequence: Synthetic peptide
  Seed: SPGMMMGMFNMLSTV
SPGLMMGMNNMYSTV

SEQ ID NO: 198533 - protein, 15 aa, Artificial Sequence
  Description of Artificial Sequence: Synthetic peptide
  Seed: SPGMMMGMFNMLSTV
SPGLMMGMPNMISTV

SEQ ID NO: 198534 - protein, 15 aa, Artificial Sequence
  Description of Artificial Sequence: Synthetic peptide
  Seed: SPGMMMGMFNMLSTV
SPGLMMGMPNMLSTV

SEQ ID NO: 198535 - protein, 15 aa, Artificial Sequence
  Description of Artificial Sequence: Synthetic peptide
  Seed: SPGMMMGMFNMLSTV
SPGLMMGMSNMISTV

SEQ ID NO: 198536 - protein, 15 aa, Artificial Sequence
  Description of Artificial Sequence: Synthetic peptide
  Seed: SPGMMMGMFNMLSTV
SPGLMMGMSNMLSTV

SEQ ID NO: 198537 - protein, 15 aa, Artificial Sequence
  Description of Artificial Sequence: Synthetic peptide
  Seed: SPGMMMGMFNMLSTV
SPGLMMGMSNMVSTV

SEQ ID NO: 198538 - protein, 15 aa, Artificial Sequence
  Description of Artificial Sequence: Synthetic peptide
  Seed: SPGMMMGMFNMLSTV
SPGLMMHMANMASTV

SEQ ID NO: 198539 - protein, 15 aa, Artificial Sequence
  Description of Artificial Sequence: Synthetic peptide
  Seed: SPGMMMGMFNMLSTV
SPGLMMHMANMFSTV

SEQ ID NO: 198540 - protein, 15 aa, Artificial Sequence
  Description of Artificial Sequence: Synthetic peptide
  Seed: SPGMMMGMFNMLSTV
SPGLMMHMANMISTV

SEQ ID NO: 198541 - protein, 15 aa, Artificial Sequence
  Description of Artificial Sequence: Synthetic peptide
  Seed: SPGMMMGMFNMLSTV
SPGLMMHMANMLSTV

SEQ ID NO: 198542 - protein, 15 aa, Artificial Sequence
  Description of Artificial Sequence: Synthetic peptide
  Seed: SPGMMMGMFNMLSTV
SPGLMMHMANMMSTV

SEQ ID NO: 198543 - protein, 15 aa, Artificial Sequence
  Description of Artificial Sequence: Synthetic peptide
  Seed: SPGMMMGMFNMLSTV
SPGLMMHMANMVSTV

SEQ ID NO: 198544 - protein, 15 aa, Artificial Sequence
  Description of Artificial Sequence: Synthetic peptide
  Seed: SPGMMMGMFNMLSTV
SPGLMMHMANMYSTV

SEQ ID NO: 198545 - protein, 15 aa, Artificial Sequence
  Description of Artificial Sequence: Synthetic peptide
  Seed: SPGMMMGMFNMLSTV
SPGLMMHMFNMASTV

SEQ ID NO: 198546 - protein, 15 aa, Artificial Sequence
  Description of Artificial Sequence: Synthetic peptide
  Seed: SPGMMMGMFNMLSTV
SPGLMMHMFNMDSTV

SEQ ID NO: 198547 - protein, 15 aa, Artificial Sequence
  Description of Artificial Sequence: Synthetic peptide
  Seed: SPGMMMGMFNMLSTV
SPGLMMHMFNMESTV

SEQ ID NO: 198548 - protein, 15 aa, Artificial Sequence
  Description of Artificial Sequence: Synthetic peptide
  Seed: SPGMMMGMFNMLSTV
SPGLMMHMFNMFSTV

SEQ ID NO: 198549 - protein, 15 aa, Artificial Sequence
  Description of Artificial Sequence: Synthetic peptide
  Seed: SPGMMMGMFNMLSTV
SPGLMMHMFNMISTV

SEQ ID NO: 198550 - protein, 15 aa, Artificial Sequence
  Description of Artificial Sequence: Synthetic peptide
  Seed: SPGMMMGMFNMLSTV
SPGLMMHMFNMLSTV

SEQ ID NO: 198551 - protein, 15 aa, Artificial Sequence
  Description of Artificial Sequence: Synthetic peptide
  Seed: SPGMMMGMFNMLSTV
SPGLMMHMFNMMSTV

SEQ ID NO: 198552 - protein, 15 aa, Artificial Sequence
  Description of Artificial Sequence: Synthetic peptide
  Seed: SPGMMMGMFNMLSTV
SPGLMMHMFNMNSTV

SEQ ID NO: 198553 - protein, 15 aa, Artificial Sequence
  Description of Artificial Sequence: Synthetic peptide
  Seed: SPGMMMGMFNMLSTV
SPGLMMHMFNMSSTV

SEQ ID NO: 198554 - protein, 15 aa, Artificial Sequence
  Description of Artificial Sequence: Synthetic peptide
  Seed: SPGMMMGMFNMLSTV
SPGLMMHMFNMTSTV

SEQ ID NO: 198555 - protein, 15 aa, Artificial Sequence
  Description of Artificial Sequence: Synthetic peptide
  Seed: SPGMMMGMFNMLSTV
SPGLMMHMFNMVSTV

SEQ ID NO: 198556 - protein, 15 aa, Artificial Sequence
  Description of Artificial Sequence: Synthetic peptide
  Seed: SPGMMMGMFNMLSTV
SPGLMMHMFNMYSTV

SEQ ID NO: 198557 - protein, 15 aa, Artificial Sequence
  Description of Artificial Sequence: Synthetic peptide
  Seed: SPGMMMGMFNMLSTV
SPGLMMHMGNMFSTV

SEQ ID NO: 198558 - protein, 15 aa, Artificial Sequence
  Description of Artificial Sequence: Synthetic peptide
  Seed: SPGMMMGMFNMLSTV
SPGLMMHMGNMISTV

SEQ ID NO: 198559 - protein, 15 aa, Artificial Sequence
  Description of Artificial Sequence: Synthetic peptide
  Seed: SPGMMMGMFNMLSTV
SPGLMMHMGNMLSTV

SEQ ID NO: 198560 - protein, 15 aa, Artificial Sequence
  Description of Artificial Sequence: Synthetic peptide
  Seed: SPGMMMGMFNMLSTV
SPGLMMHMGNMVSTV

SEQ ID NO: 198561 - protein, 15 aa, Artificial Sequence
  Description of Artificial Sequence: Synthetic peptide
  Seed: SPGMMMGMFNMLSTV
SPGLMMHMINMFSTV

SEQ ID NO: 198562 - protein, 15 aa, Artificial Sequence
  Description of Artificial Sequence: Synthetic peptide
  Seed: SPGMMMGMFNMLSTV
SPGLMMHMINMISTV

SEQ ID NO: 198563 - protein, 15 aa, Artificial Sequence
  Description of Artificial Sequence: Synthetic peptide
  Seed: SPGMMMGMFNMLSTV
SPGLMMHMINMLSTV

SEQ ID NO: 198564 - protein, 15 aa, Artificial Sequence
  Description of Artificial Sequence: Synthetic peptide
  Seed: SPGMMMGMFNMLSTV
SPGLMMHMINMVSTV

SEQ ID NO: 198565 - protein, 15 aa, Artificial Sequence
  Description of Artificial Sequence: Synthetic peptide
  Seed: SPGMMMGMFNMLSTV
SPGLMMHMLNMFSTV

SEQ ID NO: 198566 - protein, 15 aa, Artificial Sequence
  Description of Artificial Sequence: Synthetic peptide
  Seed: SPGMMMGMFNMLSTV
SPGLMMHMLNMISTV

SEQ ID NO: 198567 - protein, 15 aa, Artificial Sequence
  Description of Artificial Sequence: Synthetic peptide
  Seed: SPGMMMGMFNMLSTV
SPGLMMHMLNMLSTV

SEQ ID NO: 198568 - protein, 15 aa, Artificial Sequence
  Description of Artificial Sequence: Synthetic peptide
  Seed: SPGMMMGMFNMLSTV
SPGLMMHMLNMVSTV

SEQ ID NO: 198569 - protein, 15 aa, Artificial Sequence
  Description of Artificial Sequence: Synthetic peptide
  Seed: SPGMMMGMFNMLSTV
SPGLMMHMMNMLSTV

SEQ ID NO: 198570 - protein, 15 aa, Artificial Sequence
  Description of Artificial Sequence: Synthetic peptide
  Seed: SPGMMMGMFNMLSTV
SPGLMMHMNNMASTV

SEQ ID NO: 198571 - protein, 15 aa, Artificial Sequence
  Description of Artificial Sequence: Synthetic peptide
  Seed: SPGMMMGMFNMLSTV
SPGLMMHMNNMFSTV

SEQ ID NO: 198572 - protein, 15 aa, Artificial Sequence
  Description of Artificial Sequence: Synthetic peptide
  Seed: SPGMMMGMFNMLSTV
SPGLMMHMNNMISTV

SEQ ID NO: 198573 - protein, 15 aa, Artificial Sequence
  Description of Artificial Sequence: Synthetic peptide
  Seed: SPGMMMGMFNMLSTV
SPGLMMHMNNMLSTV

SEQ ID NO: 198574 - protein, 15 aa, Artificial Sequence
  Description of Artificial Sequence: Synthetic peptide
  Seed: SPGMMMGMFNMLSTV
SPGLMMHMNNMMSTV

SEQ ID NO: 198575 - protein, 15 aa, Artificial Sequence
  Description of Artificial Sequence: Synthetic peptide
  Seed: SPGMMMGMFNMLSTV
SPGLMMHMNNMVSTV

SEQ ID NO: 198576 - protein, 15 aa, Artificial Sequence
  Description of Artificial Sequence: Synthetic peptide
  Seed: SPGMMMGMFNMLSTV
SPGLMMHMNNMYSTV

SEQ ID NO: 198577 - protein, 15 aa, Artificial Sequence
  Description of Artificial Sequence: Synthetic peptide
  Seed: SPGMMMGMFNMLSTV
SPGLMMHMPNMFSTV

SEQ ID NO: 198578 - protein, 15 aa, Artificial Sequence
  Description of Artificial Sequence: Synthetic peptide
  Seed: SPGMMMGMFNMLSTV
SPGLMMHMPNMISTV

SEQ ID NO: 198579 - protein, 15 aa, Artificial Sequence
  Description of Artificial Sequence: Synthetic peptide
  Seed: SPGMMMGMFNMLSTV
SPGLMMHMPNMLSTV

SEQ ID NO: 198580 - protein, 15 aa, Artificial Sequence
  Description of Artificial Sequence: Synthetic peptide
  Seed: SPGMMMGMFNMLSTV
SPGLMMHMPNMMSTV

SEQ ID NO: 198581 - protein, 15 aa, Artificial Sequence
  Description of Artificial Sequence: Synthetic peptide
  Seed: SPGMMMGMFNMLSTV
SPGLMMHMPNMVSTV

SEQ ID NO: 198582 - protein, 15 aa, Artificial Sequence
  Description of Artificial Sequence: Synthetic peptide
  Seed: SPGMMMGMFNMLSTV
SPGLMMHMPNMYSTV

SEQ ID NO: 198583 - protein, 15 aa, Artificial Sequence
  Description of Artificial Sequence: Synthetic peptide
  Seed: SPGMMMGMFNMLSTV
SPGLMMHMSNMFSTV

SEQ ID NO: 198584 - protein, 15 aa, Artificial Sequence
  Description of Artificial Sequence: Synthetic peptide
  Seed: SPGMMMGMFNMLSTV
SPGLMMHMSNMISTV

SEQ ID NO: 198585 - protein, 15 aa, Artificial Sequence
  Description of Artificial Sequence: Synthetic peptide
  Seed: SPGMMMGMFNMLSTV
SPGLMMHMSNMLSTV

SEQ ID NO: 198586 - protein, 15 aa, Artificial Sequence
  Description of Artificial Sequence: Synthetic peptide
  Seed: SPGMMMGMFNMLSTV
SPGLMMHMSNMMSTV

SEQ ID NO: 198587 - protein, 15 aa, Artificial Sequence
  Description of Artificial Sequence: Synthetic peptide
  Seed: SPGMMMGMFNMLSTV
SPGLMMHMSNMVSTV

SEQ ID NO: 198588 - protein, 15 aa, Artificial Sequence
  Description of Artificial Sequence: Synthetic peptide
  Seed: SPGMMMGMFNMLSTV
SPGLMMHMSNMYSTV

SEQ ID NO: 198589 - protein, 15 aa, Artificial Sequence
  Description of Artificial Sequence: Synthetic peptide
  Seed: SPGMMMGMFNMLSTV
SPGLMMHMTNMFSTV

SEQ ID NO: 198590 - protein, 15 aa, Artificial Sequence
  Description of Artificial Sequence: Synthetic peptide
  Seed: SPGMMMGMFNMLSTV
SPGLMMHMTNMISTV

SEQ ID NO: 198591 - protein, 15 aa, Artificial Sequence
  Description of Artificial Sequence: Synthetic peptide
  Seed: SPGMMMGMFNMLSTV
SPGLMMHMTNMLSTV

SEQ ID NO: 198592 - protein, 15 aa, Artificial Sequence
  Description of Artificial Sequence: Synthetic peptide
  Seed: SPGMMMGMFNMLSTV
SPGLMMHMTNMVSTV

SEQ ID NO: 198593 - protein, 15 aa, Artificial Sequence
  Description of Artificial Sequence: Synthetic peptide
  Seed: SPGMMMGMFNMLSTV
SPGLMMHMVNMISTV

SEQ ID NO: 198594 - protein, 15 aa, Artificial Sequence
  Description of Artificial Sequence: Synthetic peptide
  Seed: SPGMMMGMFNMLSTV
SPGLMMHMVNMLSTV

SEQ ID NO: 198595 - protein, 15 aa, Artificial Sequence
  Description of Artificial Sequence: Synthetic peptide
  Seed: SPGMMMGMFNMLSTV
SPGLMMHMVNMVSTV

SEQ ID NO: 198596 - protein, 15 aa, Artificial Sequence
  Description of Artificial Sequence: Synthetic peptide
  Seed: SPGMMMGMFNMLSTV
SPGLMMHMWNMFSTV

SEQ ID NO: 198597 - protein, 15 aa, Artificial Sequence
  Description of Artificial Sequence: Synthetic peptide
  Seed: SPGMMMGMFNMLSTV
SPGLMMHMWNMISTV

SEQ ID NO: 198598 - protein, 15 aa, Artificial Sequence
  Description of Artificial Sequence: Synthetic peptide
  Seed: SPGMMMGMFNMLSTV
SPGLMMHMWNMLSTV

SEQ ID NO: 198599 - protein, 15 aa, Artificial Sequence
  Description of Artificial Sequence: Synthetic peptide
  Seed: SPGMMMGMFNMLSTV
SPGLMMHMWNMVSTV

SEQ ID NO: 198600 - protein, 15 aa, Artificial Sequence
  Description of Artificial Sequence: Synthetic peptide
  Seed: SPGMMMGMFNMLSTV
SPGLMMHMYNMFSTV

SEQ ID NO: 198601 - protein, 15 aa, Artificial Sequence
  Description of Artificial Sequence: Synthetic peptide
  Seed: SPGMMMGMFNMLSTV
SPGLMMHMYNMISTV

SEQ ID NO: 198602 - protein, 15 aa, Artificial Sequence
  Description of Artificial Sequence: Synthetic peptide
  Seed: SPGMMMGMFNMLSTV
SPGLMMHMYNMLSTV

SEQ ID NO: 198603 - protein, 15 aa, Artificial Sequence
  Description of Artificial Sequence: Synthetic peptide
  Seed: SPGMMMGMFNMLSTV
SPGLMMHMYNMVSTV

SEQ ID NO: 198604 - protein, 15 aa, Artificial Sequence
  Description of Artificial Sequence: Synthetic peptide
  Seed: SPGMMMGMFNMLSTV
SPGLMMIMANMASTV

SEQ ID NO: 198605 - protein, 15 aa, Artificial Sequence
  Description of Artificial Sequence: Synthetic peptide
  Seed: SPGMMMGMFNMLSTV
SPGLMMIMANMGSTV

SEQ ID NO: 198606 - protein, 15 aa, Artificial Sequence
  Description of Artificial Sequence: Synthetic peptide
  Seed: SPGMMMGMFNMLSTV
SPGLMMIMANMISTV

SEQ ID NO: 198607 - protein, 15 aa, Artificial Sequence
  Description of Artificial Sequence: Synthetic peptide
  Seed: SPGMMMGMFNMLSTV
SPGLMMIMANMLSTV

SEQ ID NO: 198608 - protein, 15 aa, Artificial Sequence
  Description of Artificial Sequence: Synthetic peptide
  Seed: SPGMMMGMFNMLSTV
SPGLMMIMANMMSTV

SEQ ID NO: 198609 - protein, 15 aa, Artificial Sequence
  Description of Artificial Sequence: Synthetic peptide
  Seed: SPGMMMGMFNMLSTV
SPGLMMIMANMRSTV

SEQ ID NO: 198610 - protein, 15 aa, Artificial Sequence
  Description of Artificial Sequence: Synthetic peptide
  Seed: SPGMMMGMFNMLSTV
SPGLMMIMANMSSTV

SEQ ID NO: 198611 - protein, 15 aa, Artificial Sequence
  Description of Artificial Sequence: Synthetic peptide
  Seed: SPGMMMGMFNMLSTV
SPGLMMIMANMTSTV

SEQ ID NO: 198612 - protein, 15 aa, Artificial Sequence
  Description of Artificial Sequence: Synthetic peptide
  Seed: SPGMMMGMFNMLSTV
SPGLMMIMANMVSTV

SEQ ID NO: 198613 - protein, 15 aa, Artificial Sequence
  Description of Artificial Sequence: Synthetic peptide
  Seed: SPGMMMGMFNMLSTV
SPGLMMIMANMYSTV

SEQ ID NO: 198614 - protein, 15 aa, Artificial Sequence
  Description of Artificial Sequence: Synthetic peptide
  Seed: SPGMMMGMFNMLSTV
SPGLMMIMDNMASTV

SEQ ID NO: 198615 - protein, 15 aa, Artificial Sequence
  Description of Artificial Sequence: Synthetic peptide
  Seed: SPGMMMGMFNMLSTV
SPGLMMIMFNMDSTV

SEQ ID NO: 198616 - protein, 15 aa, Artificial Sequence
  Description of Artificial Sequence: Synthetic peptide
  Seed: SPGMMMGMFNMLSTV
SPGLMMIMFNMESTV

SEQ ID NO: 198617 - protein, 15 aa, Artificial Sequence
  Description of Artificial Sequence: Synthetic peptide
  Seed: SPGMMMGMFNMLSTV
SPGLMMIMFNMFSTV

SEQ ID NO: 198618 - protein, 15 aa, Artificial Sequence
  Description of Artificial Sequence: Synthetic peptide
  Seed: SPGMMMGMFNMLSTV
SPGLMMIMFNMLSTV

SEQ ID NO: 198619 - protein, 15 aa, Artificial Sequence
  Description of Artificial Sequence: Synthetic peptide
  Seed: SPGMMMGMFNMLSTV
SPGLMMIMFNMNSTV

SEQ ID NO: 198620 - protein, 15 aa, Artificial Sequence
  Description of Artificial Sequence: Synthetic peptide
  Seed: SPGMMMGMFNMLSTV
SPGLMMIMFNMYSTV

SEQ ID NO: 198621 - protein, 15 aa, Artificial Sequence
  Description of Artificial Sequence: Synthetic peptide
  Seed: SPGMMMGMFNMLSTV
SPGLMMIMGNMASTV

SEQ ID NO: 198622 - protein, 15 aa, Artificial Sequence
  Description of Artificial Sequence: Synthetic peptide
  Seed: SPGMMMGMFNMLSTV
SPGLMMIMGNMISTV

SEQ ID NO: 198623 - protein, 15 aa, Artificial Sequence
  Description of Artificial Sequence: Synthetic peptide
  Seed: SPGMMMGMFNMLSTV
SPGLMMIMGNMMSTV

SEQ ID NO: 198624 - protein, 15 aa, Artificial Sequence
  Description of Artificial Sequence: Synthetic peptide
  Seed: SPGMMMGMFNMLSTV
SPGLMMIMGNMSSTV

SEQ ID NO: 198625 - protein, 15 aa, Artificial Sequence
  Description of Artificial Sequence: Synthetic peptide
  Seed: SPGMMMGMFNMLSTV
SPGLMMIMGNMTSTV

SEQ ID NO: 198626 - protein, 15 aa, Artificial Sequence
  Description of Artificial Sequence: Synthetic peptide
  Seed: SPGMMMGMFNMLSTV
SPGLMMIMGNMVSTV

SEQ ID NO: 198627 - protein, 15 aa, Artificial Sequence
  Description of Artificial Sequence: Synthetic peptide
  Seed: SPGMMMGMFNMLSTV
SPGLMMIMHNMASTV

SEQ ID NO: 198628 - protein, 15 aa, Artificial Sequence
  Description of Artificial Sequence: Synthetic peptide
  Seed: SPGMMMGMFNMLSTV
SPGLMMIMHNMGSTV

SEQ ID NO: 198629 - protein, 15 aa, Artificial Sequence
  Description of Artificial Sequence: Synthetic peptide
  Seed: SPGMMMGMFNMLSTV
SPGLMMIMHNMISTV

SEQ ID NO: 198630 - protein, 15 aa, Artificial Sequence
  Description of Artificial Sequence: Synthetic peptide
  Seed: SPGMMMGMFNMLSTV
SPGLMMIMHNMLSTV

SEQ ID NO: 198631 - protein, 15 aa, Artificial Sequence
  Description of Artificial Sequence: Synthetic peptide
  Seed: SPGMMMGMFNMLSTV
SPGLMMIMHNMMSTV

SEQ ID NO: 198632 - protein, 15 aa, Artificial Sequence
  Description of Artificial Sequence: Synthetic peptide
  Seed: SPGMMMGMFNMLSTV
SPGLMMIMHNMSSTV

SEQ ID NO: 198633 - protein, 15 aa, Artificial Sequence
  Description of Artificial Sequence: Synthetic peptide
  Seed: SPGMMMGMFNMLSTV
SPGLMMIMHNMVSTV

SEQ ID NO: 198634 - protein, 15 aa, Artificial Sequence
  Description of Artificial Sequence: Synthetic peptide
  Seed: SPGMMMGMFNMLSTV
SPGLMMIMHNMYSTV

SEQ ID NO: 198635 - protein, 15 aa, Artificial Sequence
  Description of Artificial Sequence: Synthetic peptide
  Seed: SPGMMMGMFNMLSTV
SPGLMMIMINMVSTV

SEQ ID NO: 198636 - protein, 15 aa, Artificial Sequence
  Description of Artificial Sequence: Synthetic peptide
  Seed: SPGMMMGMFNMLSTV
SPGLMMIMKNMASTV

SEQ ID NO: 198637 - protein, 15 aa, Artificial Sequence
  Description of Artificial Sequence: Synthetic peptide
  Seed: SPGMMMGMFNMLSTV
SPGLMMIMKNMGSTV

SEQ ID NO: 198638 - protein, 15 aa, Artificial Sequence
  Description of Artificial Sequence: Synthetic peptide
  Seed: SPGMMMGMFNMLSTV
SPGLMMIMKNMISTV

SEQ ID NO: 198639 - protein, 15 aa, Artificial Sequence
  Description of Artificial Sequence: Synthetic peptide
  Seed: SPGMMMGMFNMLSTV
SPGLMMIMKNMLSTV

SEQ ID NO: 198640 - protein, 15 aa, Artificial Sequence
  Description of Artificial Sequence: Synthetic peptide
  Seed: SPGMMMGMFNMLSTV
SPGLMMIMKNMMSTV

SEQ ID NO: 198641 - protein, 15 aa, Artificial Sequence
  Description of Artificial Sequence: Synthetic peptide
  Seed: SPGMMMGMFNMLSTV
SPGLMMIMKNMNSTV

SEQ ID NO: 198642 - protein, 15 aa, Artificial Sequence
  Description of Artificial Sequence: Synthetic peptide
  Seed: SPGMMMGMFNMLSTV
SPGLMMIMKNMSSTV

SEQ ID NO: 198643 - protein, 15 aa, Artificial Sequence
  Description of Artificial Sequence: Synthetic peptide
  Seed: SPGMMMGMFNMLSTV
SPGLMMIMKNMTSTV

SEQ ID NO: 198644 - protein, 15 aa, Artificial Sequence
  Description of Artificial Sequence: Synthetic peptide
  Seed: SPGMMMGMFNMLSTV
SPGLMMIMKNMVSTV

SEQ ID NO: 198645 - protein, 15 aa, Artificial Sequence
  Description of Artificial Sequence: Synthetic peptide
  Seed: SPGMMMGMFNMLSTV
SPGLMMIMNNMASTV

SEQ ID NO: 198646 - protein, 15 aa, Artificial Sequence
  Description of Artificial Sequence: Synthetic peptide
  Seed: SPGMMMGMFNMLSTV
SPGLMMIMNNMFSTV

SEQ ID NO: 198647 - protein, 15 aa, Artificial Sequence
  Description of Artificial Sequence: Synthetic peptide
  Seed: SPGMMMGMFNMLSTV
SPGLMMIMNNMGSTV

SEQ ID NO: 198648 - protein, 15 aa, Artificial Sequence
  Description of Artificial Sequence: Synthetic peptide
  Seed: SPGMMMGMFNMLSTV
SPGLMMIMNNMISTV

SEQ ID NO: 198649 - protein, 15 aa, Artificial Sequence
  Description of Artificial Sequence: Synthetic peptide
  Seed: SPGMMMGMFNMLSTV
SPGLMMIMNNMLSTV

SEQ ID NO: 198650 - protein, 15 aa, Artificial Sequence
  Description of Artificial Sequence: Synthetic peptide
  Seed: SPGMMMGMFNMLSTV
SPGLMMIMNNMMSTV

SEQ ID NO: 198651 - protein, 15 aa, Artificial Sequence
  Description of Artificial Sequence: Synthetic peptide
  Seed: SPGMMMGMFNMLSTV
SPGLMMIMNNMQSTV

SEQ ID NO: 198652 - protein, 15 aa, Artificial Sequence
  Description of Artificial Sequence: Synthetic peptide
  Seed: SPGMMMGMFNMLSTV
SPGLMMIMNNMRSTV

SEQ ID NO: 198653 - protein, 15 aa, Artificial Sequence
  Description of Artificial Sequence: Synthetic peptide
  Seed: SPGMMMGMFNMLSTV
SPGLMMIMNNMSSTV

SEQ ID NO: 198654 - protein, 15 aa, Artificial Sequence
  Description of Artificial Sequence: Synthetic peptide
  Seed: SPGMMMGMFNMLSTV
SPGLMMIMNNMTSTV

SEQ ID NO: 198655 - protein, 15 aa, Artificial Sequence
  Description of Artificial Sequence: Synthetic peptide
  Seed: SPGMMMGMFNMLSTV
SPGLMMIMNNMVSTV

SEQ ID NO: 198656 - protein, 15 aa, Artificial Sequence
  Description of Artificial Sequence: Synthetic peptide
  Seed: SPGMMMGMFNMLSTV
SPGLMMIMNNMYSTV

SEQ ID NO: 198657 - protein, 15 aa, Artificial Sequence
  Description of Artificial Sequence: Synthetic peptide
  Seed: SPGMMMGMFNMLSTV
SPGLMMIMPNMASTV

SEQ ID NO: 198658 - protein, 15 aa, Artificial Sequence
  Description of Artificial Sequence: Synthetic peptide
  Seed: SPGMMMGMFNMLSTV
SPGLMMIMPNMFSTV

SEQ ID NO: 198659 - protein, 15 aa, Artificial Sequence
  Description of Artificial Sequence: Synthetic peptide
  Seed: SPGMMMGMFNMLSTV
SPGLMMIMPNMGSTV

SEQ ID NO: 198660 - protein, 15 aa, Artificial Sequence
  Description of Artificial Sequence: Synthetic peptide
  Seed: SPGMMMGMFNMLSTV
SPGLMMIMPNMISTV

SEQ ID NO: 198661 - protein, 15 aa, Artificial Sequence
  Description of Artificial Sequence: Synthetic peptide
  Seed: SPGMMMGMFNMLSTV
SPGLMMIMPNMLSTV

SEQ ID NO: 198662 - protein, 15 aa, Artificial Sequence
  Description of Artificial Sequence: Synthetic peptide
  Seed: SPGMMMGMFNMLSTV
SPGLMMIMPNMMSTV

SEQ ID NO: 198663 - protein, 15 aa, Artificial Sequence
  Description of Artificial Sequence: Synthetic peptide
  Seed: SPGMMMGMFNMLSTV
SPGLMMIMPNMSSTV

SEQ ID NO: 198664 - protein, 15 aa, Artificial Sequence
  Description of Artificial Sequence: Synthetic peptide
  Seed: SPGMMMGMFNMLSTV
SPGLMMIMPNMTSTV

SEQ ID NO: 198665 - protein, 15 aa, Artificial Sequence
  Description of Artificial Sequence: Synthetic peptide
  Seed: SPGMMMGMFNMLSTV
SPGLMMIMPNMVSTV

SEQ ID NO: 198666 - protein, 15 aa, Artificial Sequence
  Description of Artificial Sequence: Synthetic peptide
  Seed: SPGMMMGMFNMLSTV
SPGLMMIMPNMYSTV

SEQ ID NO: 198667 - protein, 15 aa, Artificial Sequence
  Description of Artificial Sequence: Synthetic peptide
  Seed: SPGMMMGMFNMLSTV
SPGLMMIMRNMASTV

SEQ ID NO: 198668 - protein, 15 aa, Artificial Sequence
  Description of Artificial Sequence: Synthetic peptide
  Seed: SPGMMMGMFNMLSTV
SPGLMMIMRNMGSTV

SEQ ID NO: 198669 - protein, 15 aa, Artificial Sequence
  Description of Artificial Sequence: Synthetic peptide
  Seed: SPGMMMGMFNMLSTV
SPGLMMIMRNMHSTV

SEQ ID NO: 198670 - protein, 15 aa, Artificial Sequence
  Description of Artificial Sequence: Synthetic peptide
  Seed: SPGMMMGMFNMLSTV
SPGLMMIMRNMISTV

SEQ ID NO: 198671 - protein, 15 aa, Artificial Sequence
  Description of Artificial Sequence: Synthetic peptide
  Seed: SPGMMMGMFNMLSTV
SPGLMMIMRNMLSTV

SEQ ID NO: 198672 - protein, 15 aa, Artificial Sequence
  Description of Artificial Sequence: Synthetic peptide
  Seed: SPGMMMGMFNMLSTV
SPGLMMIMRNMMSTV

SEQ ID NO: 198673 - protein, 15 aa, Artificial Sequence
  Description of Artificial Sequence: Synthetic peptide
  Seed: SPGMMMGMFNMLSTV
SPGLMMIMRNMNSTV

SEQ ID NO: 198674 - protein, 15 aa, Artificial Sequence
  Description of Artificial Sequence: Synthetic peptide
  Seed: SPGMMMGMFNMLSTV
SPGLMMIMRNMSSTV

SEQ ID NO: 198675 - protein, 15 aa, Artificial Sequence
  Description of Artificial Sequence: Synthetic peptide
  Seed: SPGMMMGMFNMLSTV
SPGLMMIMRNMTSTV

SEQ ID NO: 198676 - protein, 15 aa, Artificial Sequence
  Description of Artificial Sequence: Synthetic peptide
  Seed: SPGMMMGMFNMLSTV
SPGLMMIMRNMVSTV

SEQ ID NO: 198677 - protein, 15 aa, Artificial Sequence
  Description of Artificial Sequence: Synthetic peptide
  Seed: SPGMMMGMFNMLSTV
SPGLMMIMSNMASTV

SEQ ID NO: 198678 - protein, 15 aa, Artificial Sequence
  Description of Artificial Sequence: Synthetic peptide
  Seed: SPGMMMGMFNMLSTV
SPGLMMIMSNMGSTV

SEQ ID NO: 198679 - protein, 15 aa, Artificial Sequence
  Description of Artificial Sequence: Synthetic peptide
  Seed: SPGMMMGMFNMLSTV
SPGLMMIMSNMHSTV

SEQ ID NO: 198680 - protein, 15 aa, Artificial Sequence
  Description of Artificial Sequence: Synthetic peptide
  Seed: SPGMMMGMFNMLSTV
SPGLMMIMSNMISTV

SEQ ID NO: 198681 - protein, 15 aa, Artificial Sequence
  Description of Artificial Sequence: Synthetic peptide
  Seed: SPGMMMGMFNMLSTV
SPGLMMIMSNMLSTV

SEQ ID NO: 198682 - protein, 15 aa, Artificial Sequence
  Description of Artificial Sequence: Synthetic peptide
  Seed: SPGMMMGMFNMLSTV
SPGLMMIMSNMMSTV

SEQ ID NO: 198683 - protein, 15 aa, Artificial Sequence
  Description of Artificial Sequence: Synthetic peptide
  Seed: SPGMMMGMFNMLSTV
SPGLMMIMSNMRSTV

SEQ ID NO: 198684 - protein, 15 aa, Artificial Sequence
  Description of Artificial Sequence: Synthetic peptide
  Seed: SPGMMMGMFNMLSTV
SPGLMMIMSNMSSTV

SEQ ID NO: 198685 - protein, 15 aa, Artificial Sequence
  Description of Artificial Sequence: Synthetic peptide
  Seed: SPGMMMGMFNMLSTV
SPGLMMIMSNMTSTV

SEQ ID NO: 198686 - protein, 15 aa, Artificial Sequence
  Description of Artificial Sequence: Synthetic peptide
  Seed: SPGMMMGMFNMLSTV
SPGLMMIMSNMVSTV

SEQ ID NO: 198687 - protein, 15 aa, Artificial Sequence
  Description of Artificial Sequence: Synthetic peptide
  Seed: SPGMMMGMFNMLSTV
SPGLMMIMSNMYSTV

SEQ ID NO: 198688 - protein, 15 aa, Artificial Sequence
  Description of Artificial Sequence: Synthetic peptide
  Seed: SPGMMMGMFNMLSTV
SPGLMMIMTNMASTV

SEQ ID NO: 198689 - protein, 15 aa, Artificial Sequence
  Description of Artificial Sequence: Synthetic peptide
  Seed: SPGMMMGMFNMLSTV
SPGLMMIMTNMGSTV

SEQ ID NO: 198690 - protein, 15 aa, Artificial Sequence
  Description of Artificial Sequence: Synthetic peptide
  Seed: SPGMMMGMFNMLSTV
SPGLMMIMTNMISTV

SEQ ID NO: 198691 - protein, 15 aa, Artificial Sequence
  Description of Artificial Sequence: Synthetic peptide
  Seed: SPGMMMGMFNMLSTV
SPGLMMIMTNMLSTV

SEQ ID NO: 198692 - protein, 15 aa, Artificial Sequence
  Description of Artificial Sequence: Synthetic peptide
  Seed: SPGMMMGMFNMLSTV
SPGLMMIMTNMMSTV

SEQ ID NO: 198693 - protein, 15 aa, Artificial Sequence
  Description of Artificial Sequence: Synthetic peptide
  Seed: SPGMMMGMFNMLSTV
SPGLMMIMTNMSSTV

SEQ ID NO: 198694 - protein, 15 aa, Artificial Sequence
  Description of Artificial Sequence: Synthetic peptide
  Seed: SPGMMMGMFNMLSTV
SPGLMMIMTNMTSTV

SEQ ID NO: 198695 - protein, 15 aa, Artificial Sequence
  Description of Artificial Sequence: Synthetic peptide
  Seed: SPGMMMGMFNMLSTV
SPGLMMIMTNMVSTV

SEQ ID NO: 198696 - protein, 15 aa, Artificial Sequence
  Description of Artificial Sequence: Synthetic peptide
  Seed: SPGMMMGMFNMLSTV
SPGLMMIMTNMYSTV

SEQ ID NO: 198697 - protein, 15 aa, Artificial Sequence
  Description of Artificial Sequence: Synthetic peptide
  Seed: SPGMMMGMFNMLSTV
SPGLMMIMWNMLSTV

SEQ ID NO: 198698 - protein, 15 aa, Artificial Sequence
  Description of Artificial Sequence: Synthetic peptide
  Seed: SPGMMMGMFNMLSTV
SPGLMMIMWNMYSTV

SEQ ID NO: 198699 - protein, 15 aa, Artificial Sequence
  Description of Artificial Sequence: Synthetic peptide
  Seed: SPGMMMGMFNMLSTV
SPGLMMIMYNMISTV

SEQ ID NO: 198700 - protein, 15 aa, Artificial Sequence
  Description of Artificial Sequence: Synthetic peptide
  Seed: SPGMMMGMFNMLSTV
SPGLMMIMYNMLSTV

SEQ ID NO: 198701 - protein, 15 aa, Artificial Sequence
  Description of Artificial Sequence: Synthetic peptide
  Seed: SPGMMMGMFNMLSTV
SPGLMMIMYNMVSTV

SEQ ID NO: 198702 - protein, 15 aa, Artificial Sequence
  Description of Artificial Sequence: Synthetic peptide
  Seed: SPGMMMGMFNMLSTV
SPGLMMIMYNMYSTV

SEQ ID NO: 198703 - protein, 15 aa, Artificial Sequence
  Description of Artificial Sequence: Synthetic peptide
  Seed: SPGMMMGMFNMLSTV
SPGLMMKMANMISTV

SEQ ID NO: 198704 - protein, 15 aa, Artificial Sequence
  Description of Artificial Sequence: Synthetic peptide
  Seed: SPGMMMGMFNMLSTV
SPGLMMKMANMVSTV

SEQ ID NO: 198705 - protein, 15 aa, Artificial Sequence
  Description of Artificial Sequence: Synthetic peptide
  Seed: SPGMMMGMFNMLSTV
SPGLMMKMFNMFSTV

SEQ ID NO: 198706 - protein, 15 aa, Artificial Sequence
  Description of Artificial Sequence: Synthetic peptide
  Seed: SPGMMMGMFNMLSTV
SPGLMMKMFNMISTV

SEQ ID NO: 198707 - protein, 15 aa, Artificial Sequence
  Description of Artificial Sequence: Synthetic peptide
  Seed: SPGMMMGMFNMLSTV
SPGLMMKMFNMLSTV

SEQ ID NO: 198708 - protein, 15 aa, Artificial Sequence
  Description of Artificial Sequence: Synthetic peptide
  Seed: SPGMMMGMFNMLSTV
SPGLMMKMFNMMSTV

SEQ ID NO: 198709 - protein, 15 aa, Artificial Sequence
  Description of Artificial Sequence: Synthetic peptide
  Seed: SPGMMMGMFNMLSTV
SPGLMMKMFNMVSTV

SEQ ID NO: 198710 - protein, 15 aa, Artificial Sequence
  Description of Artificial Sequence: Synthetic peptide
  Seed: SPGMMMGMFNMLSTV
SPGLMMKMNNMASTV

SEQ ID NO: 198711 - protein, 15 aa, Artificial Sequence
  Description of Artificial Sequence: Synthetic peptide
  Seed: SPGMMMGMFNMLSTV
SPGLMMKMNNMFSTV

SEQ ID NO: 198712 - protein, 15 aa, Artificial Sequence
  Description of Artificial Sequence: Synthetic peptide
  Seed: SPGMMMGMFNMLSTV
SPGLMMKMNNMISTV

SEQ ID NO: 198713 - protein, 15 aa, Artificial Sequence
  Description of Artificial Sequence: Synthetic peptide
  Seed: SPGMMMGMFNMLSTV
SPGLMMKMNNMLSTV

SEQ ID NO: 198714 - protein, 15 aa, Artificial Sequence
  Description of Artificial Sequence: Synthetic peptide
  Seed: SPGMMMGMFNMLSTV
SPGLMMKMNNMMSTV

SEQ ID NO: 198715 - protein, 15 aa, Artificial Sequence
  Description of Artificial Sequence: Synthetic peptide
  Seed: SPGMMMGMFNMLSTV
SPGLMMKMNNMVSTV

SEQ ID NO: 198716 - protein, 15 aa, Artificial Sequence
  Description of Artificial Sequence: Synthetic peptide
  Seed: SPGMMMGMFNMLSTV
SPGLMMKMNNMYSTV

SEQ ID NO: 198717 - protein, 15 aa, Artificial Sequence
  Description of Artificial Sequence: Synthetic peptide
  Seed: SPGMMMGMFNMLSTV
SPGLMMKMSNMISTV

SEQ ID NO: 198718 - protein, 15 aa, Artificial Sequence
  Description of Artificial Sequence: Synthetic peptide
  Seed: SPGMMMGMFNMLSTV
SPGLMMKMSNMVSTV

SEQ ID NO: 198719 - protein, 15 aa, Artificial Sequence
  Description of Artificial Sequence: Synthetic peptide
  Seed: SPGMMMGMFNMLSTV
SPGLMMKMYNMFSTV

SEQ ID NO: 198720 - protein, 15 aa, Artificial Sequence
  Description of Artificial Sequence: Synthetic peptide
  Seed: SPGMMMGMFNMLSTV
SPGLMMLMANMGSTV

SEQ ID NO: 198721 - protein, 15 aa, Artificial Sequence
  Description of Artificial Sequence: Synthetic peptide
  Seed: SPGMMMGMFNMLSTV
SPGLMMLMANMISTV

SEQ ID NO: 198722 - protein, 15 aa, Artificial Sequence
  Description of Artificial Sequence: Synthetic peptide
  Seed: SPGMMMGMFNMLSTV
SPGLMMLMANMVSTV

SEQ ID NO: 198723 - protein, 15 aa, Artificial Sequence
  Description of Artificial Sequence: Synthetic peptide
  Seed: SPGMMMGMFNMLSTV
SPGLMMLMFNMESTV

SEQ ID NO: 198724 - protein, 15 aa, Artificial Sequence
  Description of Artificial Sequence: Synthetic peptide
  Seed: SPGMMMGMFNMLSTV
SPGLMMLMFNMFSTV

SEQ ID NO: 198725 - protein, 15 aa, Artificial Sequence
  Description of Artificial Sequence: Synthetic peptide
  Seed: SPGMMMGMFNMLSTV
SPGLMMLMFNMLSTV

SEQ ID NO: 198726 - protein, 15 aa, Artificial Sequence
  Description of Artificial Sequence: Synthetic peptide
  Seed: SPGMMMGMFNMLSTV
SPGLMMLMFNMYSTV

SEQ ID NO: 198727 - protein, 15 aa, Artificial Sequence
  Description of Artificial Sequence: Synthetic peptide
  Seed: SPGMMMGMFNMLSTV
SPGLMMLMGNMASTV

SEQ ID NO: 198728 - protein, 15 aa, Artificial Sequence
  Description of Artificial Sequence: Synthetic peptide
  Seed: SPGMMMGMFNMLSTV
SPGLMMLMHNMVSTV

SEQ ID NO: 198729 - protein, 15 aa, Artificial Sequence
  Description of Artificial Sequence: Synthetic peptide
  Seed: SPGMMMGMFNMLSTV
SPGLMMLMKNMASTV

SEQ ID NO: 198730 - protein, 15 aa, Artificial Sequence
  Description of Artificial Sequence: Synthetic peptide
  Seed: SPGMMMGMFNMLSTV
SPGLMMLMKNMNSTV

SEQ ID NO: 198731 - protein, 15 aa, Artificial Sequence
  Description of Artificial Sequence: Synthetic peptide
  Seed: SPGMMMGMFNMLSTV
SPGLMMLMKNMSSTV

SEQ ID NO: 198732 - protein, 15 aa, Artificial Sequence
  Description of Artificial Sequence: Synthetic peptide
  Seed: SPGMMMGMFNMLSTV
SPGLMMLMKNMVSTV

SEQ ID NO: 198733 - protein, 15 aa, Artificial Sequence
  Description of Artificial Sequence: Synthetic peptide
  Seed: SPGMMMGMFNMLSTV
SPGLMMLMNNMASTV

SEQ ID NO: 198734 - protein, 15 aa, Artificial Sequence
  Description of Artificial Sequence: Synthetic peptide
  Seed: SPGMMMGMFNMLSTV
SPGLMMLMNNMFSTV

SEQ ID NO: 198735 - protein, 15 aa, Artificial Sequence
  Description of Artificial Sequence: Synthetic peptide
  Seed: SPGMMMGMFNMLSTV
SPGLMMLMNNMGSTV

SEQ ID NO: 198736 - protein, 15 aa, Artificial Sequence
  Description of Artificial Sequence: Synthetic peptide
  Seed: SPGMMMGMFNMLSTV
SPGLMMLMNNMISTV

SEQ ID NO: 198737 - protein, 15 aa, Artificial Sequence
  Description of Artificial Sequence: Synthetic peptide
  Seed: SPGMMMGMFNMLSTV
SPGLMMLMNNMLSTV

SEQ ID NO: 198738 - protein, 15 aa, Artificial Sequence
  Description of Artificial Sequence: Synthetic peptide
  Seed: SPGMMMGMFNMLSTV
SPGLMMLMNNMMSTV

SEQ ID NO: 198739 - protein, 15 aa, Artificial Sequence
  Description of Artificial Sequence: Synthetic peptide
  Seed: SPGMMMGMFNMLSTV
SPGLMMLMNNMRSTV

SEQ ID NO: 198740 - protein, 15 aa, Artificial Sequence
  Description of Artificial Sequence: Synthetic peptide
  Seed: SPGMMMGMFNMLSTV
SPGLMMLMNNMSSTV

SEQ ID NO: 198741 - protein, 15 aa, Artificial Sequence
  Description of Artificial Sequence: Synthetic peptide
  Seed: SPGMMMGMFNMLSTV
SPGLMMLMNNMTSTV

SEQ ID NO: 198742 - protein, 15 aa, Artificial Sequence
  Description of Artificial Sequence: Synthetic peptide
  Seed: SPGMMMGMFNMLSTV
SPGLMMLMNNMVSTV

SEQ ID NO: 198743 - protein, 15 aa, Artificial Sequence
  Description of Artificial Sequence: Synthetic peptide
  Seed: SPGMMMGMFNMLSTV
SPGLMMLMNNMYSTV

SEQ ID NO: 198744 - protein, 15 aa, Artificial Sequence
  Description of Artificial Sequence: Synthetic peptide
  Seed: SPGMMMGMFNMLSTV
SPGLMMLMPNMISTV

SEQ ID NO: 198745 - protein, 15 aa, Artificial Sequence
  Description of Artificial Sequence: Synthetic peptide
  Seed: SPGMMMGMFNMLSTV
SPGLMMLMPNMLSTV

SEQ ID NO: 198746 - protein, 15 aa, Artificial Sequence
  Description of Artificial Sequence: Synthetic peptide
  Seed: SPGMMMGMFNMLSTV
SPGLMMLMPNMMSTV

SEQ ID NO: 198747 - protein, 15 aa, Artificial Sequence
  Description of Artificial Sequence: Synthetic peptide
  Seed: SPGMMMGMFNMLSTV
SPGLMMLMPNMVSTV

SEQ ID NO: 198748 - protein, 15 aa, Artificial Sequence
  Description of Artificial Sequence: Synthetic peptide
  Seed: SPGMMMGMFNMLSTV
SPGLMMLMRNMASTV

SEQ ID NO: 198749 - protein, 15 aa, Artificial Sequence
  Description of Artificial Sequence: Synthetic peptide
  Seed: SPGMMMGMFNMLSTV
SPGLMMLMRNMGSTV

SEQ ID NO: 198750 - protein, 15 aa, Artificial Sequence
  Description of Artificial Sequence: Synthetic peptide
  Seed: SPGMMMGMFNMLSTV
SPGLMMLMRNMISTV

SEQ ID NO: 198751 - protein, 15 aa, Artificial Sequence
  Description of Artificial Sequence: Synthetic peptide
  Seed: SPGMMMGMFNMLSTV
SPGLMMLMRNMNSTV

SEQ ID NO: 198752 - protein, 15 aa, Artificial Sequence
  Description of Artificial Sequence: Synthetic peptide
  Seed: SPGMMMGMFNMLSTV
SPGLMMLMRNMSSTV

SEQ ID NO: 198753 - protein, 15 aa, Artificial Sequence
  Description of Artificial Sequence: Synthetic peptide
  Seed: SPGMMMGMFNMLSTV
SPGLMMLMRNMTSTV

SEQ ID NO: 198754 - protein, 15 aa, Artificial Sequence
  Description of Artificial Sequence: Synthetic peptide
  Seed: SPGMMMGMFNMLSTV
SPGLMMLMRNMVSTV

SEQ ID NO: 198755 - protein, 15 aa, Artificial Sequence
  Description of Artificial Sequence: Synthetic peptide
  Seed: SPGMMMGMFNMLSTV
SPGLMMLMSNMASTV

SEQ ID NO: 198756 - protein, 15 aa, Artificial Sequence
  Description of Artificial Sequence: Synthetic peptide
  Seed: SPGMMMGMFNMLSTV
SPGLMMLMSNMISTV

SEQ ID NO: 198757 - protein, 15 aa, Artificial Sequence
  Description of Artificial Sequence: Synthetic peptide
  Seed: SPGMMMGMFNMLSTV
SPGLMMLMSNMSSTV

SEQ ID NO: 198758 - protein, 15 aa, Artificial Sequence
  Description of Artificial Sequence: Synthetic peptide
  Seed: SPGMMMGMFNMLSTV
SPGLMMLMSNMTSTV

SEQ ID NO: 198759 - protein, 15 aa, Artificial Sequence
  Description of Artificial Sequence: Synthetic peptide
  Seed: SPGMMMGMFNMLSTV
SPGLMMLMSNMVSTV

SEQ ID NO: 198760 - protein, 15 aa, Artificial Sequence
  Description of Artificial Sequence: Synthetic peptide
  Seed: SPGMMMGMFNMLSTV
SPGLMMLMTNMASTV

SEQ ID NO: 198761 - protein, 15 aa, Artificial Sequence
  Description of Artificial Sequence: Synthetic peptide
  Seed: SPGMMMGMFNMLSTV
SPGLMMLMTNMSSTV

SEQ ID NO: 198762 - protein, 15 aa, Artificial Sequence
  Description of Artificial Sequence: Synthetic peptide
  Seed: SPGMMMGMFNMLSTV
SPGLMMLMTNMVSTV

SEQ ID NO: 198763 - protein, 15 aa, Artificial Sequence
  Description of Artificial Sequence: Synthetic peptide
  Seed: SPGMMMGMFNMLSTV
SPGLMMLMWNMLSTV

SEQ ID NO: 198764 - protein, 15 aa, Artificial Sequence
  Description of Artificial Sequence: Synthetic peptide
  Seed: SPGMMMGMFNMLSTV
SPGLMMLMYNMLSTV

SEQ ID NO: 198765 - protein, 15 aa, Artificial Sequence
  Description of Artificial Sequence: Synthetic peptide
  Seed: SPGMMMGMFNMLSTV
SPGLMMLMYNMYSTV

SEQ ID NO: 198766 - protein, 15 aa, Artificial Sequence
  Description of Artificial Sequence: Synthetic peptide
  Seed: SPGMMMGMFNMLSTV
SPGLMMMMANMASTV

SEQ ID NO: 198767 - protein, 15 aa, Artificial Sequence
  Description of Artificial Sequence: Synthetic peptide
  Seed: SPGMMMGMFNMLSTV
SPGLMMMMANMISTV

SEQ ID NO: 198768 - protein, 15 aa, Artificial Sequence
  Description of Artificial Sequence: Synthetic peptide
  Seed: SPGMMMGMFNMLSTV
SPGLMMMMANMLSTV

SEQ ID NO: 198769 - protein, 15 aa, Artificial Sequence
  Description of Artificial Sequence: Synthetic peptide
  Seed: SPGMMMGMFNMLSTV
SPGLMMMMANMMSTV

SEQ ID NO: 198770 - protein, 15 aa, Artificial Sequence
  Description of Artificial Sequence: Synthetic peptide
  Seed: SPGMMMGMFNMLSTV
SPGLMMMMANMSSTV

SEQ ID NO: 198771 - protein, 15 aa, Artificial Sequence
  Description of Artificial Sequence: Synthetic peptide
  Seed: SPGMMMGMFNMLSTV
SPGLMMMMANMVSTV

SEQ ID NO: 198772 - protein, 15 aa, Artificial Sequence
  Description of Artificial Sequence: Synthetic peptide
  Seed: SPGMMMGMFNMLSTV
SPGLMMMMANMYSTV

SEQ ID NO: 198773 - protein, 15 aa, Artificial Sequence
  Description of Artificial Sequence: Synthetic peptide
  Seed: SPGMMMGMFNMLSTV
SPGLMMMMFNMFSTV

SEQ ID NO: 198774 - protein, 15 aa, Artificial Sequence
  Description of Artificial Sequence: Synthetic peptide
  Seed: SPGMMMGMFNMLSTV
SPGLMMMMFNMLSTV

SEQ ID NO: 198775 - protein, 15 aa, Artificial Sequence
  Description of Artificial Sequence: Synthetic peptide
  Seed: SPGMMMGMFNMLSTV
SPGLMMMMFNMYSTV

SEQ ID NO: 198776 - protein, 15 aa, Artificial Sequence
  Description of Artificial Sequence: Synthetic peptide
  Seed: SPGMMMGMFNMLSTV
SPGLMMMMGNMVSTV

SEQ ID NO: 198777 - protein, 15 aa, Artificial Sequence
  Description of Artificial Sequence: Synthetic peptide
  Seed: SPGMMMGMFNMLSTV
SPGLMMMMHNMASTV

SEQ ID NO: 198778 - protein, 15 aa, Artificial Sequence
  Description of Artificial Sequence: Synthetic peptide
  Seed: SPGMMMGMFNMLSTV
SPGLMMMMHNMVSTV

SEQ ID NO: 198779 - protein, 15 aa, Artificial Sequence
  Description of Artificial Sequence: Synthetic peptide
  Seed: SPGMMMGMFNMLSTV
SPGLMMMMKNMASTV

SEQ ID NO: 198780 - protein, 15 aa, Artificial Sequence
  Description of Artificial Sequence: Synthetic peptide
  Seed: SPGMMMGMFNMLSTV
SPGLMMMMNNMASTV

SEQ ID NO: 198781 - protein, 15 aa, Artificial Sequence
  Description of Artificial Sequence: Synthetic peptide
  Seed: SPGMMMGMFNMLSTV
SPGLMMMMNNMFSTV

SEQ ID NO: 198782 - protein, 15 aa, Artificial Sequence
  Description of Artificial Sequence: Synthetic peptide
  Seed: SPGMMMGMFNMLSTV
SPGLMMMMNNMISTV

SEQ ID NO: 198783 - protein, 15 aa, Artificial Sequence
  Description of Artificial Sequence: Synthetic peptide
  Seed: SPGMMMGMFNMLSTV
SPGLMMMMNNMLSTV

SEQ ID NO: 198784 - protein, 15 aa, Artificial Sequence
  Description of Artificial Sequence: Synthetic peptide
  Seed: SPGMMMGMFNMLSTV
SPGLMMMMNNMMSTV

SEQ ID NO: 198785 - protein, 15 aa, Artificial Sequence
  Description of Artificial Sequence: Synthetic peptide
  Seed: SPGMMMGMFNMLSTV
SPGLMMMMNNMNSTV

SEQ ID NO: 198786 - protein, 15 aa, Artificial Sequence
  Description of Artificial Sequence: Synthetic peptide
  Seed: SPGMMMGMFNMLSTV
SPGLMMMMNNMSSTV

SEQ ID NO: 198787 - protein, 15 aa, Artificial Sequence
  Description of Artificial Sequence: Synthetic peptide
  Seed: SPGMMMGMFNMLSTV
SPGLMMMMNNMTSTV

SEQ ID NO: 198788 - protein, 15 aa, Artificial Sequence
  Description of Artificial Sequence: Synthetic peptide
  Seed: SPGMMMGMFNMLSTV
SPGLMMMMNNMVSTV

SEQ ID NO: 198789 - protein, 15 aa, Artificial Sequence
  Description of Artificial Sequence: Synthetic peptide
  Seed: SPGMMMGMFNMLSTV
SPGLMMMMNNMYSTV

SEQ ID NO: 198790 - protein, 15 aa, Artificial Sequence
  Description of Artificial Sequence: Synthetic peptide
  Seed: SPGMMMGMFNMLSTV
SPGLMMMMPNMASTV

SEQ ID NO: 198791 - protein, 15 aa, Artificial Sequence
  Description of Artificial Sequence: Synthetic peptide
  Seed: SPGMMMGMFNMLSTV
SPGLMMMMPNMISTV

SEQ ID NO: 198792 - protein, 15 aa, Artificial Sequence
  Description of Artificial Sequence: Synthetic peptide
  Seed: SPGMMMGMFNMLSTV
SPGLMMMMPNMLSTV

SEQ ID NO: 198793 - protein, 15 aa, Artificial Sequence
  Description of Artificial Sequence: Synthetic peptide
  Seed: SPGMMMGMFNMLSTV
SPGLMMMMPNMMSTV

SEQ ID NO: 198794 - protein, 15 aa, Artificial Sequence
  Description of Artificial Sequence: Synthetic peptide
  Seed: SPGMMMGMFNMLSTV
SPGLMMMMPNMVSTV

SEQ ID NO: 198795 - protein, 15 aa, Artificial Sequence
  Description of Artificial Sequence: Synthetic peptide
  Seed: SPGMMMGMFNMLSTV
SPGLMMMMRNMASTV

SEQ ID NO: 198796 - protein, 15 aa, Artificial Sequence
  Description of Artificial Sequence: Synthetic peptide
  Seed: SPGMMMGMFNMLSTV
SPGLMMMMSNMASTV

SEQ ID NO: 198797 - protein, 15 aa, Artificial Sequence
  Description of Artificial Sequence: Synthetic peptide
  Seed: SPGMMMGMFNMLSTV
SPGLMMMMSNMISTV

SEQ ID NO: 198798 - protein, 15 aa, Artificial Sequence
  Description of Artificial Sequence: Synthetic peptide
  Seed: SPGMMMGMFNMLSTV
SPGLMMMMSNMVSTV

SEQ ID NO: 198799 - protein, 15 aa, Artificial Sequence
  Description of Artificial Sequence: Synthetic peptide
  Seed: SPGMMMGMFNMLSTV
SPGLMMMMTNMASTV

SEQ ID NO: 198800 - protein, 15 aa, Artificial Sequence
  Description of Artificial Sequence: Synthetic peptide
  Seed: SPGMMMGMFNMLSTV
SPGLMMMMTNMISTV

SEQ ID NO: 198801 - protein, 15 aa, Artificial Sequence
  Description of Artificial Sequence: Synthetic peptide
  Seed: SPGMMMGMFNMLSTV
SPGLMMMMTNMVSTV

SEQ ID NO: 198802 - protein, 15 aa, Artificial Sequence
  Description of Artificial Sequence: Synthetic peptide
  Seed: SPGMMMGMFNMLSTV
SPGLMMMMVNMSSTV

SEQ ID NO: 198803 - protein, 15 aa, Artificial Sequence
  Description of Artificial Sequence: Synthetic peptide
  Seed: SPGMMMGMFNMLSTV
SPGLMMMMWNMFSTV

SEQ ID NO: 198804 - protein, 15 aa, Artificial Sequence
  Description of Artificial Sequence: Synthetic peptide
  Seed: SPGMMMGMFNMLSTV
SPGLMMMMYNMFSTV

SEQ ID NO: 198805 - protein, 15 aa, Artificial Sequence
  Description of Artificial Sequence: Synthetic peptide
  Seed: SPGMMMGMFNMLSTV
SPGLMMMMYNMLSTV

SEQ ID NO: 198806 - protein, 15 aa, Artificial Sequence
  Description of Artificial Sequence: Synthetic peptide
  Seed: SPGMMMGMFNMLSTV
SPGLMMNMANMASTV

SEQ ID NO: 198807 - protein, 15 aa, Artificial Sequence
  Description of Artificial Sequence: Synthetic peptide
  Seed: SPGMMMGMFNMLSTV
SPGLMMNMANMCSTV

SEQ ID NO: 198808 - protein, 15 aa, Artificial Sequence
  Description of Artificial Sequence: Synthetic peptide
  Seed: SPGMMMGMFNMLSTV
SPGLMMNMANMDSTV

SEQ ID NO: 198809 - protein, 15 aa, Artificial Sequence
  Description of Artificial Sequence: Synthetic peptide
  Seed: SPGMMMGMFNMLSTV
SPGLMMNMANMESTV

SEQ ID NO: 198810 - protein, 15 aa, Artificial Sequence
  Description of Artificial Sequence: Synthetic peptide
  Seed: SPGMMMGMFNMLSTV
SPGLMMNMANMFSTV

SEQ ID NO: 198811 - protein, 15 aa, Artificial Sequence
  Description of Artificial Sequence: Synthetic peptide
  Seed: SPGMMMGMFNMLSTV
SPGLMMNMANMGSTV

SEQ ID NO: 198812 - protein, 15 aa, Artificial Sequence
  Description of Artificial Sequence: Synthetic peptide
  Seed: SPGMMMGMFNMLSTV
SPGLMMNMANMHSTV

SEQ ID NO: 198813 - protein, 15 aa, Artificial Sequence
  Description of Artificial Sequence: Synthetic peptide
  Seed: SPGMMMGMFNMLSTV
SPGLMMNMANMISTV

SEQ ID NO: 198814 - protein, 15 aa, Artificial Sequence
  Description of Artificial Sequence: Synthetic peptide
  Seed: SPGMMMGMFNMLSTV
SPGLMMNMANMKSTV

SEQ ID NO: 198815 - protein, 15 aa, Artificial Sequence
  Description of Artificial Sequence: Synthetic peptide
  Seed: SPGMMMGMFNMLSTV
SPGLMMNMANMLSTV

SEQ ID NO: 198816 - protein, 15 aa, Artificial Sequence
  Description of Artificial Sequence: Synthetic peptide
  Seed: SPGMMMGMFNMLSTV
SPGLMMNMANMMSTV

SEQ ID NO: 198817 - protein, 15 aa, Artificial Sequence
  Description of Artificial Sequence: Synthetic peptide
  Seed: SPGMMMGMFNMLSTV
SPGLMMNMANMNSTV

SEQ ID NO: 198818 - protein, 15 aa, Artificial Sequence
  Description of Artificial Sequence: Synthetic peptide
  Seed: SPGMMMGMFNMLSTV
SPGLMMNMANMPSTV

SEQ ID NO: 198819 - protein, 15 aa, Artificial Sequence
  Description of Artificial Sequence: Synthetic peptide
  Seed: SPGMMMGMFNMLSTV
SPGLMMNMANMQSTV

SEQ ID NO: 198820 - protein, 15 aa, Artificial Sequence
  Description of Artificial Sequence: Synthetic peptide
  Seed: SPGMMMGMFNMLSTV
SPGLMMNMANMRSTV

SEQ ID NO: 198821 - protein, 15 aa, Artificial Sequence
  Description of Artificial Sequence: Synthetic peptide
  Seed: SPGMMMGMFNMLSTV
SPGLMMNMANMSSTV

SEQ ID NO: 198822 - protein, 15 aa, Artificial Sequence
  Description of Artificial Sequence: Synthetic peptide
  Seed: SPGMMMGMFNMLSTV
SPGLMMNMANMTSTV

SEQ ID NO: 198823 - protein, 15 aa, Artificial Sequence
  Description of Artificial Sequence: Synthetic peptide
  Seed: SPGMMMGMFNMLSTV
SPGLMMNMANMVSTV

SEQ ID NO: 198824 - protein, 15 aa, Artificial Sequence
  Description of Artificial Sequence: Synthetic peptide
  Seed: SPGMMMGMFNMLSTV
SPGLMMNMANMWSTV

SEQ ID NO: 198825 - protein, 15 aa, Artificial Sequence
  Description of Artificial Sequence: Synthetic peptide
  Seed: SPGMMMGMFNMLSTV
SPGLMMNMANMYSTV

SEQ ID NO: 198826 - protein, 15 aa, Artificial Sequence
  Description of Artificial Sequence: Synthetic peptide
  Seed: SPGMMMGMFNMLSTV
SPGLMMNMCNMFSTV

SEQ ID NO: 198827 - protein, 15 aa, Artificial Sequence
  Description of Artificial Sequence: Synthetic peptide
  Seed: SPGMMMGMFNMLSTV
SPGLMMNMCNMISTV

SEQ ID NO: 198828 - protein, 15 aa, Artificial Sequence
  Description of Artificial Sequence: Synthetic peptide
  Seed: SPGMMMGMFNMLSTV
SPGLMMNMCNMLSTV

SEQ ID NO: 198829 - protein, 15 aa, Artificial Sequence
  Description of Artificial Sequence: Synthetic peptide
  Seed: SPGMMMGMFNMLSTV
SPGLMMNMCNMMSTV

SEQ ID NO: 198830 - protein, 15 aa, Artificial Sequence
  Description of Artificial Sequence: Synthetic peptide
  Seed: SPGMMMGMFNMLSTV
SPGLMMNMCNMVSTV

SEQ ID NO: 198831 - protein, 15 aa, Artificial Sequence
  Description of Artificial Sequence: Synthetic peptide
  Seed: SPGMMMGMFNMLSTV
SPGLMMNMCNMYSTV

SEQ ID NO: 198832 - protein, 15 aa, Artificial Sequence
  Description of Artificial Sequence: Synthetic peptide
  Seed: SPGMMMGMFNMLSTV
SPGLMMNMDNMFSTV

SEQ ID NO: 198833 - protein, 15 aa, Artificial Sequence
  Description of Artificial Sequence: Synthetic peptide
  Seed: SPGMMMGMFNMLSTV
SPGLMMNMDNMISTV

SEQ ID NO: 198834 - protein, 15 aa, Artificial Sequence
  Description of Artificial Sequence: Synthetic peptide
  Seed: SPGMMMGMFNMLSTV
SPGLMMNMDNMLSTV

SEQ ID NO: 198835 - protein, 15 aa, Artificial Sequence
  Description of Artificial Sequence: Synthetic peptide
  Seed: SPGMMMGMFNMLSTV
SPGLMMNMDNMMSTV

SEQ ID NO: 198836 - protein, 15 aa, Artificial Sequence
  Description of Artificial Sequence: Synthetic peptide
  Seed: SPGMMMGMFNMLSTV
SPGLMMNMDNMVSTV

SEQ ID NO: 198837 - protein, 15 aa, Artificial Sequence
  Description of Artificial Sequence: Synthetic peptide
  Seed: SPGMMMGMFNMLSTV
SPGLMMNMDNMYSTV

SEQ ID NO: 198838 - protein, 15 aa, Artificial Sequence
  Description of Artificial Sequence: Synthetic peptide
  Seed: SPGMMMGMFNMLSTV
SPGLMMNMENMASTV

SEQ ID NO: 198839 - protein, 15 aa, Artificial Sequence
  Description of Artificial Sequence: Synthetic peptide
  Seed: SPGMMMGMFNMLSTV
SPGLMMNMENMFSTV

SEQ ID NO: 198840 - protein, 15 aa, Artificial Sequence
  Description of Artificial Sequence: Synthetic peptide
  Seed: SPGMMMGMFNMLSTV
SPGLMMNMENMISTV

SEQ ID NO: 198841 - protein, 15 aa, Artificial Sequence
  Description of Artificial Sequence: Synthetic peptide
  Seed: SPGMMMGMFNMLSTV
SPGLMMNMENMLSTV

SEQ ID NO: 198842 - protein, 15 aa, Artificial Sequence
  Description of Artificial Sequence: Synthetic peptide
  Seed: SPGMMMGMFNMLSTV
SPGLMMNMENMMSTV

SEQ ID NO: 198843 - protein, 15 aa, Artificial Sequence
  Description of Artificial Sequence: Synthetic peptide
  Seed: SPGMMMGMFNMLSTV
SPGLMMNMENMVSTV

SEQ ID NO: 198844 - protein, 15 aa, Artificial Sequence
  Description of Artificial Sequence: Synthetic peptide
  Seed: SPGMMMGMFNMLSTV
SPGLMMNMENMYSTV

SEQ ID NO: 198845 - protein, 15 aa, Artificial Sequence
  Description of Artificial Sequence: Synthetic peptide
  Seed: SPGMMMGMFNMLSTV
SPGLMMNMFNMASTV

SEQ ID NO: 198846 - protein, 15 aa, Artificial Sequence
  Description of Artificial Sequence: Synthetic peptide
  Seed: SPGMMMGMFNMLSTV
SPGLMMNMFNMFSTV

SEQ ID NO: 198847 - protein, 15 aa, Artificial Sequence
  Description of Artificial Sequence: Synthetic peptide
  Seed: SPGMMMGMFNMLSTV
SPGLMMNMFNMISTV

SEQ ID NO: 198848 - protein, 15 aa, Artificial Sequence
  Description of Artificial Sequence: Synthetic peptide
  Seed: SPGMMMGMFNMLSTV
SPGLMMNMFNMLSTV

SEQ ID NO: 198849 - protein, 15 aa, Artificial Sequence
  Description of Artificial Sequence: Synthetic peptide
  Seed: SPGMMMGMFNMLSTV
SPGLMMNMFNMMSTV

SEQ ID NO: 198850 - protein, 15 aa, Artificial Sequence
  Description of Artificial Sequence: Synthetic peptide
  Seed: SPGMMMGMFNMLSTV
SPGLMMNMFNMTSTV

SEQ ID NO: 198851 - protein, 15 aa, Artificial Sequence
  Description of Artificial Sequence: Synthetic peptide
  Seed: SPGMMMGMFNMLSTV
SPGLMMNMFNMVSTV

SEQ ID NO: 198852 - protein, 15 aa, Artificial Sequence
  Description of Artificial Sequence: Synthetic peptide
  Seed: SPGMMMGMFNMLSTV
SPGLMMNMFNMYSTV

SEQ ID NO: 198853 - protein, 15 aa, Artificial Sequence
  Description of Artificial Sequence: Synthetic peptide
  Seed: SPGMMMGMFNMLSTV
SPGLMMNMGNMASTV

SEQ ID NO: 198854 - protein, 15 aa, Artificial Sequence
  Description of Artificial Sequence: Synthetic peptide
  Seed: SPGMMMGMFNMLSTV
SPGLMMNMGNMESTV

SEQ ID NO: 198855 - protein, 15 aa, Artificial Sequence
  Description of Artificial Sequence: Synthetic peptide
  Seed: SPGMMMGMFNMLSTV
SPGLMMNMGNMFSTV

SEQ ID NO: 198856 - protein, 15 aa, Artificial Sequence
  Description of Artificial Sequence: Synthetic peptide
  Seed: SPGMMMGMFNMLSTV
SPGLMMNMGNMGSTV

SEQ ID NO: 198857 - protein, 15 aa, Artificial Sequence
  Description of Artificial Sequence: Synthetic peptide
  Seed: SPGMMMGMFNMLSTV
SPGLMMNMGNMHSTV

SEQ ID NO: 198858 - protein, 15 aa, Artificial Sequence
  Description of Artificial Sequence: Synthetic peptide
  Seed: SPGMMMGMFNMLSTV
SPGLMMNMGNMISTV

SEQ ID NO: 198859 - protein, 15 aa, Artificial Sequence
  Description of Artificial Sequence: Synthetic peptide
  Seed: SPGMMMGMFNMLSTV
SPGLMMNMGNMKSTV

SEQ ID NO: 198860 - protein, 15 aa, Artificial Sequence
  Description of Artificial Sequence: Synthetic peptide
  Seed: SPGMMMGMFNMLSTV
SPGLMMNMGNMLSTV

SEQ ID NO: 198861 - protein, 15 aa, Artificial Sequence
  Description of Artificial Sequence: Synthetic peptide
  Seed: SPGMMMGMFNMLSTV
SPGLMMNMGNMMSTV

SEQ ID NO: 198862 - protein, 15 aa, Artificial Sequence
  Description of Artificial Sequence: Synthetic peptide
  Seed: SPGMMMGMFNMLSTV
SPGLMMNMGNMNSTV

SEQ ID NO: 198863 - protein, 15 aa, Artificial Sequence
  Description of Artificial Sequence: Synthetic peptide
  Seed: SPGMMMGMFNMLSTV
SPGLMMNMGNMPSTV

SEQ ID NO: 198864 - protein, 15 aa, Artificial Sequence
  Description of Artificial Sequence: Synthetic peptide
  Seed: SPGMMMGMFNMLSTV
SPGLMMNMGNMQSTV

SEQ ID NO: 198865 - protein, 15 aa, Artificial Sequence
  Description of Artificial Sequence: Synthetic peptide
  Seed: SPGMMMGMFNMLSTV
SPGLMMNMGNMRSTV

SEQ ID NO: 198866 - protein, 15 aa, Artificial Sequence
  Description of Artificial Sequence: Synthetic peptide
  Seed: SPGMMMGMFNMLSTV
SPGLMMNMGNMSSTV

SEQ ID NO: 198867 - protein, 15 aa, Artificial Sequence
  Description of Artificial Sequence: Synthetic peptide
  Seed: SPGMMMGMFNMLSTV
SPGLMMNMGNMTSTV

SEQ ID NO: 198868 - protein, 15 aa, Artificial Sequence
  Description of Artificial Sequence: Synthetic peptide
  Seed: SPGMMMGMFNMLSTV
SPGLMMNMGNMVSTV

SEQ ID NO: 198869 - protein, 15 aa, Artificial Sequence
  Description of Artificial Sequence: Synthetic peptide
  Seed: SPGMMMGMFNMLSTV
SPGLMMNMGNMWSTV

SEQ ID NO: 198870 - protein, 15 aa, Artificial Sequence
  Description of Artificial Sequence: Synthetic peptide
  Seed: SPGMMMGMFNMLSTV
SPGLMMNMGNMYSTV

SEQ ID NO: 198871 - protein, 15 aa, Artificial Sequence
  Description of Artificial Sequence: Synthetic peptide
  Seed: SPGMMMGMFNMLSTV
SPGLMMNMHNMASTV

SEQ ID NO: 198872 - protein, 15 aa, Artificial Sequence
  Description of Artificial Sequence: Synthetic peptide
  Seed: SPGMMMGMFNMLSTV
SPGLMMNMHNMFSTV

SEQ ID NO: 198873 - protein, 15 aa, Artificial Sequence
  Description of Artificial Sequence: Synthetic peptide
  Seed: SPGMMMGMFNMLSTV
SPGLMMNMHNMISTV

SEQ ID NO: 198874 - protein, 15 aa, Artificial Sequence
  Description of Artificial Sequence: Synthetic peptide
  Seed: SPGMMMGMFNMLSTV
SPGLMMNMHNMLSTV

SEQ ID NO: 198875 - protein, 15 aa, Artificial Sequence
  Description of Artificial Sequence: Synthetic peptide
  Seed: SPGMMMGMFNMLSTV
SPGLMMNMHNMMSTV

SEQ ID NO: 198876 - protein, 15 aa, Artificial Sequence
  Description of Artificial Sequence: Synthetic peptide
  Seed: SPGMMMGMFNMLSTV
SPGLMMNMHNMSSTV

SEQ ID NO: 198877 - protein, 15 aa, Artificial Sequence
  Description of Artificial Sequence: Synthetic peptide
  Seed: SPGMMMGMFNMLSTV
SPGLMMNMHNMTSTV

SEQ ID NO: 198878 - protein, 15 aa, Artificial Sequence
  Description of Artificial Sequence: Synthetic peptide
  Seed: SPGMMMGMFNMLSTV
SPGLMMNMHNMVSTV

SEQ ID NO: 198879 - protein, 15 aa, Artificial Sequence
  Description of Artificial Sequence: Synthetic peptide
  Seed: SPGMMMGMFNMLSTV
SPGLMMNMHNMYSTV

SEQ ID NO: 198880 - protein, 15 aa, Artificial Sequence
  Description of Artificial Sequence: Synthetic peptide
  Seed: SPGMMMGMFNMLSTV
SPGLMMNMINMASTV

SEQ ID NO: 198881 - protein, 15 aa, Artificial Sequence
  Description of Artificial Sequence: Synthetic peptide
  Seed: SPGMMMGMFNMLSTV
SPGLMMNMINMFSTV

SEQ ID NO: 198882 - protein, 15 aa, Artificial Sequence
  Description of Artificial Sequence: Synthetic peptide
  Seed: SPGMMMGMFNMLSTV
SPGLMMNMINMGSTV

SEQ ID NO: 198883 - protein, 15 aa, Artificial Sequence
  Description of Artificial Sequence: Synthetic peptide
  Seed: SPGMMMGMFNMLSTV
SPGLMMNMINMHSTV

SEQ ID NO: 198884 - protein, 15 aa, Artificial Sequence
  Description of Artificial Sequence: Synthetic peptide
  Seed: SPGMMMGMFNMLSTV
SPGLMMNMINMISTV

SEQ ID NO: 198885 - protein, 15 aa, Artificial Sequence
  Description of Artificial Sequence: Synthetic peptide
  Seed: SPGMMMGMFNMLSTV
SPGLMMNMINMKSTV

SEQ ID NO: 198886 - protein, 15 aa, Artificial Sequence
  Description of Artificial Sequence: Synthetic peptide
  Seed: SPGMMMGMFNMLSTV
SPGLMMNMINMLSTV

SEQ ID NO: 198887 - protein, 15 aa, Artificial Sequence
  Description of Artificial Sequence: Synthetic peptide
  Seed: SPGMMMGMFNMLSTV
SPGLMMNMINMMSTV

SEQ ID NO: 198888 - protein, 15 aa, Artificial Sequence
  Description of Artificial Sequence: Synthetic peptide
  Seed: SPGMMMGMFNMLSTV
SPGLMMNMINMNSTV

SEQ ID NO: 198889 - protein, 15 aa, Artificial Sequence
  Description of Artificial Sequence: Synthetic peptide
  Seed: SPGMMMGMFNMLSTV
SPGLMMNMINMPSTV

SEQ ID NO: 198890 - protein, 15 aa, Artificial Sequence
  Description of Artificial Sequence: Synthetic peptide
  Seed: SPGMMMGMFNMLSTV
SPGLMMNMINMQSTV

SEQ ID NO: 198891 - protein, 15 aa, Artificial Sequence
  Description of Artificial Sequence: Synthetic peptide
  Seed: SPGMMMGMFNMLSTV
SPGLMMNMINMRSTV

SEQ ID NO: 198892 - protein, 15 aa, Artificial Sequence
  Description of Artificial Sequence: Synthetic peptide
  Seed: SPGMMMGMFNMLSTV
SPGLMMNMINMSSTV

SEQ ID NO: 198893 - protein, 15 aa, Artificial Sequence
  Description of Artificial Sequence: Synthetic peptide
  Seed: SPGMMMGMFNMLSTV
SPGLMMNMINMTSTV

SEQ ID NO: 198894 - protein, 15 aa, Artificial Sequence
  Description of Artificial Sequence: Synthetic peptide
  Seed: SPGMMMGMFNMLSTV
SPGLMMNMINMVSTV

SEQ ID NO: 198895 - protein, 15 aa, Artificial Sequence
  Description of Artificial Sequence: Synthetic peptide
  Seed: SPGMMMGMFNMLSTV
SPGLMMNMINMYSTV

SEQ ID NO: 198896 - protein, 15 aa, Artificial Sequence
  Description of Artificial Sequence: Synthetic peptide
  Seed: SPGMMMGMFNMLSTV
SPGLMMNMKNMASTV

SEQ ID NO: 198897 - protein, 15 aa, Artificial Sequence
  Description of Artificial Sequence: Synthetic peptide
  Seed: SPGMMMGMFNMLSTV
SPGLMMNMKNMFSTV

SEQ ID NO: 198898 - protein, 15 aa, Artificial Sequence
  Description of Artificial Sequence: Synthetic peptide
  Seed: SPGMMMGMFNMLSTV
SPGLMMNMKNMISTV

SEQ ID NO: 198899 - protein, 15 aa, Artificial Sequence
  Description of Artificial Sequence: Synthetic peptide
  Seed: SPGMMMGMFNMLSTV
SPGLMMNMKNMLSTV

SEQ ID NO: 198900 - protein, 15 aa, Artificial Sequence
  Description of Artificial Sequence: Synthetic peptide
  Seed: SPGMMMGMFNMLSTV
SPGLMMNMKNMMSTV

SEQ ID NO: 198901 - protein, 15 aa, Artificial Sequence
  Description of Artificial Sequence: Synthetic peptide
  Seed: SPGMMMGMFNMLSTV
SPGLMMNMKNMVSTV

SEQ ID NO: 198902 - protein, 15 aa, Artificial Sequence
  Description of Artificial Sequence: Synthetic peptide
  Seed: SPGMMMGMFNMLSTV
SPGLMMNMKNMYSTV

SEQ ID NO: 198903 - protein, 15 aa, Artificial Sequence
  Description of Artificial Sequence: Synthetic peptide
  Seed: SPGMMMGMFNMLSTV
SPGLMMNMLNMASTV

SEQ ID NO: 198904 - protein, 15 aa, Artificial Sequence
  Description of Artificial Sequence: Synthetic peptide
  Seed: SPGMMMGMFNMLSTV
SPGLMMNMLNMFSTV

SEQ ID NO: 198905 - protein, 15 aa, Artificial Sequence
  Description of Artificial Sequence: Synthetic peptide
  Seed: SPGMMMGMFNMLSTV
SPGLMMNMLNMGSTV

SEQ ID NO: 198906 - protein, 15 aa, Artificial Sequence
  Description of Artificial Sequence: Synthetic peptide
  Seed: SPGMMMGMFNMLSTV
SPGLMMNMLNMISTV

SEQ ID NO: 198907 - protein, 15 aa, Artificial Sequence
  Description of Artificial Sequence: Synthetic peptide
  Seed: SPGMMMGMFNMLSTV
SPGLMMNMLNMLSTV

SEQ ID NO: 198908 - protein, 15 aa, Artificial Sequence
  Description of Artificial Sequence: Synthetic peptide
  Seed: SPGMMMGMFNMLSTV
SPGLMMNMLNMMSTV

SEQ ID NO: 198909 - protein, 15 aa, Artificial Sequence
  Description of Artificial Sequence: Synthetic peptide
  Seed: SPGMMMGMFNMLSTV
SPGLMMNMLNMNSTV

SEQ ID NO: 198910 - protein, 15 aa, Artificial Sequence
  Description of Artificial Sequence: Synthetic peptide
  Seed: SPGMMMGMFNMLSTV
SPGLMMNMLNMSSTV

SEQ ID NO: 198911 - protein, 15 aa, Artificial Sequence
  Description of Artificial Sequence: Synthetic peptide
  Seed: SPGMMMGMFNMLSTV
SPGLMMNMLNMTSTV

SEQ ID NO: 198912 - protein, 15 aa, Artificial Sequence
  Description of Artificial Sequence: Synthetic peptide
  Seed: SPGMMMGMFNMLSTV
SPGLMMNMLNMVSTV

SEQ ID NO: 198913 - protein, 15 aa, Artificial Sequence
  Description of Artificial Sequence: Synthetic peptide
  Seed: SPGMMMGMFNMLSTV
SPGLMMNMLNMYSTV

SEQ ID NO: 198914 - protein, 15 aa, Artificial Sequence
  Description of Artificial Sequence: Synthetic peptide
  Seed: SPGMMMGMFNMLSTV
SPGLMMNMMNMASTV

SEQ ID NO: 198915 - protein, 15 aa, Artificial Sequence
  Description of Artificial Sequence: Synthetic peptide
  Seed: SPGMMMGMFNMLSTV
SPGLMMNMMNMFSTV

SEQ ID NO: 198916 - protein, 15 aa, Artificial Sequence
  Description of Artificial Sequence: Synthetic peptide
  Seed: SPGMMMGMFNMLSTV
SPGLMMNMMNMGSTV

SEQ ID NO: 198917 - protein, 15 aa, Artificial Sequence
  Description of Artificial Sequence: Synthetic peptide
  Seed: SPGMMMGMFNMLSTV
SPGLMMNMMNMISTV

SEQ ID NO: 198918 - protein, 15 aa, Artificial Sequence
  Description of Artificial Sequence: Synthetic peptide
  Seed: SPGMMMGMFNMLSTV
SPGLMMNMMNMLSTV

SEQ ID NO: 198919 - protein, 15 aa, Artificial Sequence
  Description of Artificial Sequence: Synthetic peptide
  Seed: SPGMMMGMFNMLSTV
SPGLMMNMMNMMSTV

SEQ ID NO: 198920 - protein, 15 aa, Artificial Sequence
  Description of Artificial Sequence: Synthetic peptide
  Seed: SPGMMMGMFNMLSTV
SPGLMMNMMNMNSTV

SEQ ID NO: 198921 - protein, 15 aa, Artificial Sequence
  Description of Artificial Sequence: Synthetic peptide
  Seed: SPGMMMGMFNMLSTV
SPGLMMNMMNMSSTV

SEQ ID NO: 198922 - protein, 15 aa, Artificial Sequence
  Description of Artificial Sequence: Synthetic peptide
  Seed: SPGMMMGMFNMLSTV
SPGLMMNMMNMTSTV

SEQ ID NO: 198923 - protein, 15 aa, Artificial Sequence
  Description of Artificial Sequence: Synthetic peptide
  Seed: SPGMMMGMFNMLSTV
SPGLMMNMMNMVSTV

SEQ ID NO: 198924 - protein, 15 aa, Artificial Sequence
  Description of Artificial Sequence: Synthetic peptide
  Seed: SPGMMMGMFNMLSTV
SPGLMMNMMNMYSTV

SEQ ID NO: 198925 - protein, 15 aa, Artificial Sequence
  Description of Artificial Sequence: Synthetic peptide
  Seed: SPGMMMGMFNMLSTV
SPGLMMNMNNMASTV

SEQ ID NO: 198926 - protein, 15 aa, Artificial Sequence
  Description of Artificial Sequence: Synthetic peptide
  Seed: SPGMMMGMFNMLSTV
SPGLMMNMNNMCSTV

SEQ ID NO: 198927 - protein, 15 aa, Artificial Sequence
  Description of Artificial Sequence: Synthetic peptide
  Seed: SPGMMMGMFNMLSTV
SPGLMMNMNNMESTV

SEQ ID NO: 198928 - protein, 15 aa, Artificial Sequence
  Description of Artificial Sequence: Synthetic peptide
  Seed: SPGMMMGMFNMLSTV
SPGLMMNMNNMFSTV

SEQ ID NO: 198929 - protein, 15 aa, Artificial Sequence
  Description of Artificial Sequence: Synthetic peptide
  Seed: SPGMMMGMFNMLSTV
SPGLMMNMNNMGSTV

SEQ ID NO: 198930 - protein, 15 aa, Artificial Sequence
  Description of Artificial Sequence: Synthetic peptide
  Seed: SPGMMMGMFNMLSTV
SPGLMMNMNNMHSTV

SEQ ID NO: 198931 - protein, 15 aa, Artificial Sequence
  Description of Artificial Sequence: Synthetic peptide
  Seed: SPGMMMGMFNMLSTV
SPGLMMNMNNMISTV

SEQ ID NO: 198932 - protein, 15 aa, Artificial Sequence
  Description of Artificial Sequence: Synthetic peptide
  Seed: SPGMMMGMFNMLSTV
SPGLMMNMNNMKSTV

SEQ ID NO: 198933 - protein, 15 aa, Artificial Sequence
  Description of Artificial Sequence: Synthetic peptide
  Seed: SPGMMMGMFNMLSTV
SPGLMMNMNNMLSTV

SEQ ID NO: 198934 - protein, 15 aa, Artificial Sequence
  Description of Artificial Sequence: Synthetic peptide
  Seed: SPGMMMGMFNMLSTV
SPGLMMNMNNMMSTV

SEQ ID NO: 198935 - protein, 15 aa, Artificial Sequence
  Description of Artificial Sequence: Synthetic peptide
  Seed: SPGMMMGMFNMLSTV
SPGLMMNMNNMNSTV

SEQ ID NO: 198936 - protein, 15 aa, Artificial Sequence
  Description of Artificial Sequence: Synthetic peptide
  Seed: SPGMMMGMFNMLSTV
SPGLMMNMNNMPSTV

SEQ ID NO: 198937 - protein, 15 aa, Artificial Sequence
  Description of Artificial Sequence: Synthetic peptide
  Seed: SPGMMMGMFNMLSTV
SPGLMMNMNNMQSTV

SEQ ID NO: 198938 - protein, 15 aa, Artificial Sequence
  Description of Artificial Sequence: Synthetic peptide
  Seed: SPGMMMGMFNMLSTV
SPGLMMNMNNMRSTV

SEQ ID NO: 198939 - protein, 15 aa, Artificial Sequence
  Description of Artificial Sequence: Synthetic peptide
  Seed: SPGMMMGMFNMLSTV
SPGLMMNMNNMSSTV

SEQ ID NO: 198940 - protein, 15 aa, Artificial Sequence
  Description of Artificial Sequence: Synthetic peptide
  Seed: SPGMMMGMFNMLSTV
SPGLMMNMNNMTSTV

SEQ ID NO: 198941 - protein, 15 aa, Artificial Sequence
  Description of Artificial Sequence: Synthetic peptide
  Seed: SPGMMMGMFNMLSTV
SPGLMMNMNNMVSTV

SEQ ID NO: 198942 - protein, 15 aa, Artificial Sequence
  Description of Artificial Sequence: Synthetic peptide
  Seed: SPGMMMGMFNMLSTV
SPGLMMNMNNMWSTV

SEQ ID NO: 198943 - protein, 15 aa, Artificial Sequence
  Description of Artificial Sequence: Synthetic peptide
  Seed: SPGMMMGMFNMLSTV
SPGLMMNMNNMYSTV

SEQ ID NO: 198944 - protein, 15 aa, Artificial Sequence
  Description of Artificial Sequence: Synthetic peptide
  Seed: SPGMMMGMFNMLSTV
SPGLMMNMPNMASTV

SEQ ID NO: 198945 - protein, 15 aa, Artificial Sequence
  Description of Artificial Sequence: Synthetic peptide
  Seed: SPGMMMGMFNMLSTV
SPGLMMNMPNMFSTV

SEQ ID NO: 198946 - protein, 15 aa, Artificial Sequence
  Description of Artificial Sequence: Synthetic peptide
  Seed: SPGMMMGMFNMLSTV
SPGLMMNMPNMGSTV

SEQ ID NO: 198947 - protein, 15 aa, Artificial Sequence
  Description of Artificial Sequence: Synthetic peptide
  Seed: SPGMMMGMFNMLSTV
SPGLMMNMPNMHSTV

SEQ ID NO: 198948 - protein, 15 aa, Artificial Sequence
  Description of Artificial Sequence: Synthetic peptide
  Seed: SPGMMMGMFNMLSTV
SPGLMMNMPNMISTV

SEQ ID NO: 198949 - protein, 15 aa, Artificial Sequence
  Description of Artificial Sequence: Synthetic peptide
  Seed: SPGMMMGMFNMLSTV
SPGLMMNMPNMLSTV

SEQ ID NO: 198950 - protein, 15 aa, Artificial Sequence
  Description of Artificial Sequence: Synthetic peptide
  Seed: SPGMMMGMFNMLSTV
SPGLMMNMPNMMSTV

SEQ ID NO: 198951 - protein, 15 aa, Artificial Sequence
  Description of Artificial Sequence: Synthetic peptide
  Seed: SPGMMMGMFNMLSTV
SPGLMMNMPNMNSTV

SEQ ID NO: 198952 - protein, 15 aa, Artificial Sequence
  Description of Artificial Sequence: Synthetic peptide
  Seed: SPGMMMGMFNMLSTV
SPGLMMNMPNMPSTV

SEQ ID NO: 198953 - protein, 15 aa, Artificial Sequence
  Description of Artificial Sequence: Synthetic peptide
  Seed: SPGMMMGMFNMLSTV
SPGLMMNMPNMQSTV

SEQ ID NO: 198954 - protein, 15 aa, Artificial Sequence
  Description of Artificial Sequence: Synthetic peptide
  Seed: SPGMMMGMFNMLSTV
SPGLMMNMPNMRSTV

SEQ ID NO: 198955 - protein, 15 aa, Artificial Sequence
  Description of Artificial Sequence: Synthetic peptide
  Seed: SPGMMMGMFNMLSTV
SPGLMMNMPNMSSTV

SEQ ID NO: 198956 - protein, 15 aa, Artificial Sequence
  Description of Artificial Sequence: Synthetic peptide
  Seed: SPGMMMGMFNMLSTV
SPGLMMNMPNMTSTV

SEQ ID NO: 198957 - protein, 15 aa, Artificial Sequence
  Description of Artificial Sequence: Synthetic peptide
  Seed: SPGMMMGMFNMLSTV
SPGLMMNMPNMVSTV

SEQ ID NO: 198958 - protein, 15 aa, Artificial Sequence
  Description of Artificial Sequence: Synthetic peptide
  Seed: SPGMMMGMFNMLSTV
SPGLMMNMPNMWSTV

SEQ ID NO: 198959 - protein, 15 aa, Artificial Sequence
  Description of Artificial Sequence: Synthetic peptide
  Seed: SPGMMMGMFNMLSTV
SPGLMMNMPNMYSTV

SEQ ID NO: 198960 - protein, 15 aa, Artificial Sequence
  Description of Artificial Sequence: Synthetic peptide
  Seed: SPGMMMGMFNMLSTV
SPGLMMNMQNMASTV

SEQ ID NO: 198961 - protein, 15 aa, Artificial Sequence
  Description of Artificial Sequence: Synthetic peptide
  Seed: SPGMMMGMFNMLSTV
SPGLMMNMQNMFSTV

SEQ ID NO: 198962 - protein, 15 aa, Artificial Sequence
  Description of Artificial Sequence: Synthetic peptide
  Seed: SPGMMMGMFNMLSTV
SPGLMMNMQNMISTV

SEQ ID NO: 198963 - protein, 15 aa, Artificial Sequence
  Description of Artificial Sequence: Synthetic peptide
  Seed: SPGMMMGMFNMLSTV
SPGLMMNMQNMLSTV

SEQ ID NO: 198964 - protein, 15 aa, Artificial Sequence
  Description of Artificial Sequence: Synthetic peptide
  Seed: SPGMMMGMFNMLSTV
SPGLMMNMQNMMSTV

SEQ ID NO: 198965 - protein, 15 aa, Artificial Sequence
  Description of Artificial Sequence: Synthetic peptide
  Seed: SPGMMMGMFNMLSTV
SPGLMMNMQNMSSTV

SEQ ID NO: 198966 - protein, 15 aa, Artificial Sequence
  Description of Artificial Sequence: Synthetic peptide
  Seed: SPGMMMGMFNMLSTV
SPGLMMNMQNMTSTV

SEQ ID NO: 198967 - protein, 15 aa, Artificial Sequence
  Description of Artificial Sequence: Synthetic peptide
  Seed: SPGMMMGMFNMLSTV
SPGLMMNMQNMVSTV

SEQ ID NO: 198968 - protein, 15 aa, Artificial Sequence
  Description of Artificial Sequence: Synthetic peptide
  Seed: SPGMMMGMFNMLSTV
SPGLMMNMQNMYSTV

SEQ ID NO: 198969 - protein, 15 aa, Artificial Sequence
  Description of Artificial Sequence: Synthetic peptide
  Seed: SPGMMMGMFNMLSTV
SPGLMMNMRNMASTV

SEQ ID NO: 198970 - protein, 15 aa, Artificial Sequence
  Description of Artificial Sequence: Synthetic peptide
  Seed: SPGMMMGMFNMLSTV
SPGLMMNMRNMFSTV

SEQ ID NO: 198971 - protein, 15 aa, Artificial Sequence
  Description of Artificial Sequence: Synthetic peptide
  Seed: SPGMMMGMFNMLSTV
SPGLMMNMRNMISTV

SEQ ID NO: 198972 - protein, 15 aa, Artificial Sequence
  Description of Artificial Sequence: Synthetic peptide
  Seed: SPGMMMGMFNMLSTV
SPGLMMNMRNMLSTV

SEQ ID NO: 198973 - protein, 15 aa, Artificial Sequence
  Description of Artificial Sequence: Synthetic peptide
  Seed: SPGMMMGMFNMLSTV
SPGLMMNMRNMMSTV

SEQ ID NO: 198974 - protein, 15 aa, Artificial Sequence
  Description of Artificial Sequence: Synthetic peptide
  Seed: SPGMMMGMFNMLSTV
SPGLMMNMRNMVSTV

SEQ ID NO: 198975 - protein, 15 aa, Artificial Sequence
  Description of Artificial Sequence: Synthetic peptide
  Seed: SPGMMMGMFNMLSTV
SPGLMMNMRNMYSTV

SEQ ID NO: 198976 - protein, 15 aa, Artificial Sequence
  Description of Artificial Sequence: Synthetic peptide
  Seed: SPGMMMGMFNMLSTV
SPGLMMNMSNMASTV

SEQ ID NO: 198977 - protein, 15 aa, Artificial Sequence
  Description of Artificial Sequence: Synthetic peptide
  Seed: SPGMMMGMFNMLSTV
SPGLMMNMSNMCSTV

SEQ ID NO: 198978 - protein, 15 aa, Artificial Sequence
  Description of Artificial Sequence: Synthetic peptide
  Seed: SPGMMMGMFNMLSTV
SPGLMMNMSNMESTV

SEQ ID NO: 198979 - protein, 15 aa, Artificial Sequence
  Description of Artificial Sequence: Synthetic peptide
  Seed: SPGMMMGMFNMLSTV
SPGLMMNMSNMFSTV

SEQ ID NO: 198980 - protein, 15 aa, Artificial Sequence
  Description of Artificial Sequence: Synthetic peptide
  Seed: SPGMMMGMFNMLSTV
SPGLMMNMSNMGSTV

SEQ ID NO: 198981 - protein, 15 aa, Artificial Sequence
  Description of Artificial Sequence: Synthetic peptide
  Seed: SPGMMMGMFNMLSTV
SPGLMMNMSNMHSTV

SEQ ID NO: 198982 - protein, 15 aa, Artificial Sequence
  Description of Artificial Sequence: Synthetic peptide
  Seed: SPGMMMGMFNMLSTV
SPGLMMNMSNMISTV

SEQ ID NO: 198983 - protein, 15 aa, Artificial Sequence
  Description of Artificial Sequence: Synthetic peptide
  Seed: SPGMMMGMFNMLSTV
SPGLMMNMSNMKSTV

SEQ ID NO: 198984 - protein, 15 aa, Artificial Sequence
  Description of Artificial Sequence: Synthetic peptide
  Seed: SPGMMMGMFNMLSTV
SPGLMMNMSNMLSTV

SEQ ID NO: 198985 - protein, 15 aa, Artificial Sequence
  Description of Artificial Sequence: Synthetic peptide
  Seed: SPGMMMGMFNMLSTV
SPGLMMNMSNMMSTV

SEQ ID NO: 198986 - protein, 15 aa, Artificial Sequence
  Description of Artificial Sequence: Synthetic peptide
  Seed: SPGMMMGMFNMLSTV
SPGLMMNMSNMNSTV

SEQ ID NO: 198987 - protein, 15 aa, Artificial Sequence
  Description of Artificial Sequence: Synthetic peptide
  Seed: SPGMMMGMFNMLSTV
SPGLMMNMSNMPSTV

SEQ ID NO: 198988 - protein, 15 aa, Artificial Sequence
  Description of Artificial Sequence: Synthetic peptide
  Seed: SPGMMMGMFNMLSTV
SPGLMMNMSNMQSTV

SEQ ID NO: 198989 - protein, 15 aa, Artificial Sequence
  Description of Artificial Sequence: Synthetic peptide
  Seed: SPGMMMGMFNMLSTV
SPGLMMNMSNMRSTV

SEQ ID NO: 198990 - protein, 15 aa, Artificial Sequence
  Description of Artificial Sequence: Synthetic peptide
  Seed: SPGMMMGMFNMLSTV
SPGLMMNMSNMSSTV

SEQ ID NO: 198991 - protein, 15 aa, Artificial Sequence
  Description of Artificial Sequence: Synthetic peptide
  Seed: SPGMMMGMFNMLSTV
SPGLMMNMSNMTSTV

SEQ ID NO: 198992 - protein, 15 aa, Artificial Sequence
  Description of Artificial Sequence: Synthetic peptide
  Seed: SPGMMMGMFNMLSTV
SPGLMMNMSNMVSTV

SEQ ID NO: 198993 - protein, 15 aa, Artificial Sequence
  Description of Artificial Sequence: Synthetic peptide
  Seed: SPGMMMGMFNMLSTV
SPGLMMNMSNMWSTV

SEQ ID NO: 198994 - protein, 15 aa, Artificial Sequence
  Description of Artificial Sequence: Synthetic peptide
  Seed: SPGMMMGMFNMLSTV
SPGLMMNMSNMYSTV

SEQ ID NO: 198995 - protein, 15 aa, Artificial Sequence
  Description of Artificial Sequence: Synthetic peptide
  Seed: SPGMMMGMFNMLSTV
SPGLMMNMTNMASTV

SEQ ID NO: 198996 - protein, 15 aa, Artificial Sequence
  Description of Artificial Sequence: Synthetic peptide
  Seed: SPGMMMGMFNMLSTV
SPGLMMNMTNMFSTV

SEQ ID NO: 198997 - protein, 15 aa, Artificial Sequence
  Description of Artificial Sequence: Synthetic peptide
  Seed: SPGMMMGMFNMLSTV
SPGLMMNMTNMGSTV

SEQ ID NO: 198998 - protein, 15 aa, Artificial Sequence
  Description of Artificial Sequence: Synthetic peptide
  Seed: SPGMMMGMFNMLSTV
SPGLMMNMTNMHSTV

SEQ ID NO: 198999 - protein, 15 aa, Artificial Sequence
  Description of Artificial Sequence: Synthetic peptide
  Seed: SPGMMMGMFNMLSTV
SPGLMMNMTNMISTV

SEQ ID NO: 199000 - protein, 15 aa, Artificial Sequence
  Description of Artificial Sequence: Synthetic peptide
  Seed: SPGMMMGMFNMLSTV
SPGLMMNMTNMLSTV

SEQ ID NO: 199001 - protein, 15 aa, Artificial Sequence
  Description of Artificial Sequence: Synthetic peptide
  Seed: SPGMMMGMFNMLSTV
SPGLMMNMTNMMSTV

SEQ ID NO: 199002 - protein, 15 aa, Artificial Sequence
  Description of Artificial Sequence: Synthetic peptide
  Seed: SPGMMMGMFNMLSTV
SPGLMMNMTNMNSTV

SEQ ID NO: 199003 - protein, 15 aa, Artificial Sequence
  Description of Artificial Sequence: Synthetic peptide
  Seed: SPGMMMGMFNMLSTV
SPGLMMNMTNMPSTV

SEQ ID NO: 199004 - protein, 15 aa, Artificial Sequence
  Description of Artificial Sequence: Synthetic peptide
  Seed: SPGMMMGMFNMLSTV
SPGLMMNMTNMQSTV

SEQ ID NO: 199005 - protein, 15 aa, Artificial Sequence
  Description of Artificial Sequence: Synthetic peptide
  Seed: SPGMMMGMFNMLSTV
SPGLMMNMTNMRSTV

SEQ ID NO: 199006 - protein, 15 aa, Artificial Sequence
  Description of Artificial Sequence: Synthetic peptide
  Seed: SPGMMMGMFNMLSTV
SPGLMMNMTNMSSTV

SEQ ID NO: 199007 - protein, 15 aa, Artificial Sequence
  Description of Artificial Sequence: Synthetic peptide
  Seed: SPGMMMGMFNMLSTV
SPGLMMNMTNMTSTV

SEQ ID NO: 199008 - protein, 15 aa, Artificial Sequence
  Description of Artificial Sequence: Synthetic peptide
  Seed: SPGMMMGMFNMLSTV
SPGLMMNMTNMVSTV

SEQ ID NO: 199009 - protein, 15 aa, Artificial Sequence
  Description of Artificial Sequence: Synthetic peptide
  Seed: SPGMMMGMFNMLSTV
SPGLMMNMTNMWSTV

SEQ ID NO: 199010 - protein, 15 aa, Artificial Sequence
  Description of Artificial Sequence: Synthetic peptide
  Seed: SPGMMMGMFNMLSTV
SPGLMMNMTNMYSTV

SEQ ID NO: 199011 - protein, 15 aa, Artificial Sequence
  Description of Artificial Sequence: Synthetic peptide
  Seed: SPGMMMGMFNMLSTV
SPGLMMNMVNMASTV

SEQ ID NO: 199012 - protein, 15 aa, Artificial Sequence
  Description of Artificial Sequence: Synthetic peptide
  Seed: SPGMMMGMFNMLSTV
SPGLMMNMVNMFSTV

SEQ ID NO: 199013 - protein, 15 aa, Artificial Sequence
  Description of Artificial Sequence: Synthetic peptide
  Seed: SPGMMMGMFNMLSTV
SPGLMMNMVNMGSTV

SEQ ID NO: 199014 - protein, 15 aa, Artificial Sequence
  Description of Artificial Sequence: Synthetic peptide
  Seed: SPGMMMGMFNMLSTV
SPGLMMNMVNMHSTV

SEQ ID NO: 199015 - protein, 15 aa, Artificial Sequence
  Description of Artificial Sequence: Synthetic peptide
  Seed: SPGMMMGMFNMLSTV
SPGLMMNMVNMISTV

SEQ ID NO: 199016 - protein, 15 aa, Artificial Sequence
  Description of Artificial Sequence: Synthetic peptide
  Seed: SPGMMMGMFNMLSTV
SPGLMMNMVNMKSTV

SEQ ID NO: 199017 - protein, 15 aa, Artificial Sequence
  Description of Artificial Sequence: Synthetic peptide
  Seed: SPGMMMGMFNMLSTV
SPGLMMNMVNMLSTV

SEQ ID NO: 199018 - protein, 15 aa, Artificial Sequence
  Description of Artificial Sequence: Synthetic peptide
  Seed: SPGMMMGMFNMLSTV
SPGLMMNMVNMMSTV

SEQ ID NO: 199019 - protein, 15 aa, Artificial Sequence
  Description of Artificial Sequence: Synthetic peptide
  Seed: SPGMMMGMFNMLSTV
SPGLMMNMVNMNSTV

SEQ ID NO: 199020 - protein, 15 aa, Artificial Sequence
  Description of Artificial Sequence: Synthetic peptide
  Seed: SPGMMMGMFNMLSTV
SPGLMMNMVNMPSTV

SEQ ID NO: 199021 - protein, 15 aa, Artificial Sequence
  Description of Artificial Sequence: Synthetic peptide
  Seed: SPGMMMGMFNMLSTV
SPGLMMNMVNMQSTV

SEQ ID NO: 199022 - protein, 15 aa, Artificial Sequence
  Description of Artificial Sequence: Synthetic peptide
  Seed: SPGMMMGMFNMLSTV
SPGLMMNMVNMRSTV

SEQ ID NO: 199023 - protein, 15 aa, Artificial Sequence
  Description of Artificial Sequence: Synthetic peptide
  Seed: SPGMMMGMFNMLSTV
SPGLMMNMVNMSSTV

SEQ ID NO: 199024 - protein, 15 aa, Artificial Sequence
  Description of Artificial Sequence: Synthetic peptide
  Seed: SPGMMMGMFNMLSTV
SPGLMMNMVNMTSTV

SEQ ID NO: 199025 - protein, 15 aa, Artificial Sequence
  Description of Artificial Sequence: Synthetic peptide
  Seed: SPGMMMGMFNMLSTV
SPGLMMNMVNMVSTV

SEQ ID NO: 199026 - protein, 15 aa, Artificial Sequence
  Description of Artificial Sequence: Synthetic peptide
  Seed: SPGMMMGMFNMLSTV
SPGLMMNMVNMWSTV

SEQ ID NO: 199027 - protein, 15 aa, Artificial Sequence
  Description of Artificial Sequence: Synthetic peptide
  Seed: SPGMMMGMFNMLSTV
SPGLMMNMVNMYSTV

SEQ ID NO: 199028 - protein, 15 aa, Artificial Sequence
  Description of Artificial Sequence: Synthetic peptide
  Seed: SPGMMMGMFNMLSTV
SPGLMMNMWNMASTV

SEQ ID NO: 199029 - protein, 15 aa, Artificial Sequence
  Description of Artificial Sequence: Synthetic peptide
  Seed: SPGMMMGMFNMLSTV
SPGLMMNMWNMFSTV

SEQ ID NO: 199030 - protein, 15 aa, Artificial Sequence
  Description of Artificial Sequence: Synthetic peptide
  Seed: SPGMMMGMFNMLSTV
SPGLMMNMWNMISTV

SEQ ID NO: 199031 - protein, 15 aa, Artificial Sequence
  Description of Artificial Sequence: Synthetic peptide
  Seed: SPGMMMGMFNMLSTV
SPGLMMNMWNMLSTV

SEQ ID NO: 199032 - protein, 15 aa, Artificial Sequence
  Description of Artificial Sequence: Synthetic peptide
  Seed: SPGMMMGMFNMLSTV
SPGLMMNMWNMMSTV

SEQ ID NO: 199033 - protein, 15 aa, Artificial Sequence
  Description of Artificial Sequence: Synthetic peptide
  Seed: SPGMMMGMFNMLSTV
SPGLMMNMWNMVSTV

SEQ ID NO: 199034 - protein, 15 aa, Artificial Sequence
  Description of Artificial Sequence: Synthetic peptide
  Seed: SPGMMMGMFNMLSTV
SPGLMMNMWNMYSTV

SEQ ID NO: 199035 - protein, 15 aa, Artificial Sequence
  Description of Artificial Sequence: Synthetic peptide
  Seed: SPGMMMGMFNMLSTV
SPGLMMNMYNMASTV

SEQ ID NO: 199036 - protein, 15 aa, Artificial Sequence
  Description of Artificial Sequence: Synthetic peptide
  Seed: SPGMMMGMFNMLSTV
SPGLMMNMYNMFSTV

SEQ ID NO: 199037 - protein, 15 aa, Artificial Sequence
  Description of Artificial Sequence: Synthetic peptide
  Seed: SPGMMMGMFNMLSTV
SPGLMMNMYNMISTV

SEQ ID NO: 199038 - protein, 15 aa, Artificial Sequence
  Description of Artificial Sequence: Synthetic peptide
  Seed: SPGMMMGMFNMLSTV
SPGLMMNMYNMLSTV

SEQ ID NO: 199039 - protein, 15 aa, Artificial Sequence
  Description of Artificial Sequence: Synthetic peptide
  Seed: SPGMMMGMFNMLSTV
SPGLMMNMYNMMSTV

SEQ ID NO: 199040 - protein, 15 aa, Artificial Sequence
  Description of Artificial Sequence: Synthetic peptide
  Seed: SPGMMMGMFNMLSTV
SPGLMMNMYNMSSTV

SEQ ID NO: 199041 - protein, 15 aa, Artificial Sequence
  Description of Artificial Sequence: Synthetic peptide
  Seed: SPGMMMGMFNMLSTV
SPGLMMNMYNMVSTV

SEQ ID NO: 199042 - protein, 15 aa, Artificial Sequence
  Description of Artificial Sequence: Synthetic peptide
  Seed: SPGMMMGMFNMLSTV
SPGLMMNMYNMYSTV

SEQ ID NO: 199043 - protein, 15 aa, Artificial Sequence
  Description of Artificial Sequence: Synthetic peptide
  Seed: SPGMMMGMFNMLSTV
SPGLMMQMANMFSTV

SEQ ID NO: 199044 - protein, 15 aa, Artificial Sequence
  Description of Artificial Sequence: Synthetic peptide
  Seed: SPGMMMGMFNMLSTV
SPGLMMQMANMISTV

SEQ ID NO: 199045 - protein, 15 aa, Artificial Sequence
  Description of Artificial Sequence: Synthetic peptide
  Seed: SPGMMMGMFNMLSTV
SPGLMMQMANMLSTV

SEQ ID NO: 199046 - protein, 15 aa, Artificial Sequence
  Description of Artificial Sequence: Synthetic peptide
  Seed: SPGMMMGMFNMLSTV
SPGLMMQMANMMSTV

SEQ ID NO: 199047 - protein, 15 aa, Artificial Sequence
  Description of Artificial Sequence: Synthetic peptide
  Seed: SPGMMMGMFNMLSTV
SPGLMMQMANMVSTV

SEQ ID NO: 199048 - protein, 15 aa, Artificial Sequence
  Description of Artificial Sequence: Synthetic peptide
  Seed: SPGMMMGMFNMLSTV
SPGLMMQMANMYSTV

SEQ ID NO: 199049 - protein, 15 aa, Artificial Sequence
  Description of Artificial Sequence: Synthetic peptide
  Seed: SPGMMMGMFNMLSTV
SPGLMMQMFNMASTV

SEQ ID NO: 199050 - protein, 15 aa, Artificial Sequence
  Description of Artificial Sequence: Synthetic peptide
  Seed: SPGMMMGMFNMLSTV
SPGLMMQMFNMFSTV

SEQ ID NO: 199051 - protein, 15 aa, Artificial Sequence
  Description of Artificial Sequence: Synthetic peptide
  Seed: SPGMMMGMFNMLSTV
SPGLMMQMFNMISTV

SEQ ID NO: 199052 - protein, 15 aa, Artificial Sequence
  Description of Artificial Sequence: Synthetic peptide
  Seed: SPGMMMGMFNMLSTV
SPGLMMQMFNMLSTV

SEQ ID NO: 199053 - protein, 15 aa, Artificial Sequence
  Description of Artificial Sequence: Synthetic peptide
  Seed: SPGMMMGMFNMLSTV
SPGLMMQMFNMMSTV

SEQ ID NO: 199054 - protein, 15 aa, Artificial Sequence
  Description of Artificial Sequence: Synthetic peptide
  Seed: SPGMMMGMFNMLSTV
SPGLMMQMFNMNSTV

SEQ ID NO: 199055 - protein, 15 aa, Artificial Sequence
  Description of Artificial Sequence: Synthetic peptide
  Seed: SPGMMMGMFNMLSTV
SPGLMMQMFNMTSTV

SEQ ID NO: 199056 - protein, 15 aa, Artificial Sequence
  Description of Artificial Sequence: Synthetic peptide
  Seed: SPGMMMGMFNMLSTV
SPGLMMQMFNMVSTV

SEQ ID NO: 199057 - protein, 15 aa, Artificial Sequence
  Description of Artificial Sequence: Synthetic peptide
  Seed: SPGMMMGMFNMLSTV
SPGLMMQMFNMYSTV

SEQ ID NO: 199058 - protein, 15 aa, Artificial Sequence
  Description of Artificial Sequence: Synthetic peptide
  Seed: SPGMMMGMFNMLSTV
SPGLMMQMGNMISTV

SEQ ID NO: 199059 - protein, 15 aa, Artificial Sequence
  Description of Artificial Sequence: Synthetic peptide
  Seed: SPGMMMGMFNMLSTV
SPGLMMQMGNMVSTV

SEQ ID NO: 199060 - protein, 15 aa, Artificial Sequence
  Description of Artificial Sequence: Synthetic peptide
  Seed: SPGMMMGMFNMLSTV
SPGLMMQMNNMASTV

SEQ ID NO: 199061 - protein, 15 aa, Artificial Sequence
  Description of Artificial Sequence: Synthetic peptide
  Seed: SPGMMMGMFNMLSTV
SPGLMMQMNNMFSTV

SEQ ID NO: 199062 - protein, 15 aa, Artificial Sequence
  Description of Artificial Sequence: Synthetic peptide
  Seed: SPGMMMGMFNMLSTV
SPGLMMQMNNMISTV

SEQ ID NO: 199063 - protein, 15 aa, Artificial Sequence
  Description of Artificial Sequence: Synthetic peptide
  Seed: SPGMMMGMFNMLSTV
SPGLMMQMNNMLSTV

SEQ ID NO: 199064 - protein, 15 aa, Artificial Sequence
  Description of Artificial Sequence: Synthetic peptide
  Seed: SPGMMMGMFNMLSTV
SPGLMMQMNNMMSTV

SEQ ID NO: 199065 - protein, 15 aa, Artificial Sequence
  Description of Artificial Sequence: Synthetic peptide
  Seed: SPGMMMGMFNMLSTV
SPGLMMQMNNMVSTV

SEQ ID NO: 199066 - protein, 15 aa, Artificial Sequence
  Description of Artificial Sequence: Synthetic peptide
  Seed: SPGMMMGMFNMLSTV
SPGLMMQMNNMYSTV

SEQ ID NO: 199067 - protein, 15 aa, Artificial Sequence
  Description of Artificial Sequence: Synthetic peptide
  Seed: SPGMMMGMFNMLSTV
SPGLMMQMPNMISTV

SEQ ID NO: 199068 - protein, 15 aa, Artificial Sequence
  Description of Artificial Sequence: Synthetic peptide
  Seed: SPGMMMGMFNMLSTV
SPGLMMQMPNMLSTV

SEQ ID NO: 199069 - protein, 15 aa, Artificial Sequence
  Description of Artificial Sequence: Synthetic peptide
  Seed: SPGMMMGMFNMLSTV
SPGLMMQMPNMVSTV

SEQ ID NO: 199070 - protein, 15 aa, Artificial Sequence
  Description of Artificial Sequence: Synthetic peptide
  Seed: SPGMMMGMFNMLSTV
SPGLMMQMSNMFSTV

SEQ ID NO: 199071 - protein, 15 aa, Artificial Sequence
  Description of Artificial Sequence: Synthetic peptide
  Seed: SPGMMMGMFNMLSTV
SPGLMMQMSNMISTV

SEQ ID NO: 199072 - protein, 15 aa, Artificial Sequence
  Description of Artificial Sequence: Synthetic peptide
  Seed: SPGMMMGMFNMLSTV
SPGLMMQMSNMLSTV

SEQ ID NO: 199073 - protein, 15 aa, Artificial Sequence
  Description of Artificial Sequence: Synthetic peptide
  Seed: SPGMMMGMFNMLSTV
SPGLMMQMSNMMSTV

SEQ ID NO: 199074 - protein, 15 aa, Artificial Sequence
  Description of Artificial Sequence: Synthetic peptide
  Seed: SPGMMMGMFNMLSTV
SPGLMMQMSNMVSTV

SEQ ID NO: 199075 - protein, 15 aa, Artificial Sequence
  Description of Artificial Sequence: Synthetic peptide
  Seed: SPGMMMGMFNMLSTV
SPGLMMQMSNMYSTV

SEQ ID NO: 199076 - protein, 15 aa, Artificial Sequence
  Description of Artificial Sequence: Synthetic peptide
  Seed: SPGMMMGMFNMLSTV
SPGLMMQMTNMISTV

SEQ ID NO: 199077 - protein, 15 aa, Artificial Sequence
  Description of Artificial Sequence: Synthetic peptide
  Seed: SPGMMMGMFNMLSTV
SPGLMMQMTNMLSTV

SEQ ID NO: 199078 - protein, 15 aa, Artificial Sequence
  Description of Artificial Sequence: Synthetic peptide
  Seed: SPGMMMGMFNMLSTV
SPGLMMQMTNMVSTV

SEQ ID NO: 199079 - protein, 15 aa, Artificial Sequence
  Description of Artificial Sequence: Synthetic peptide
  Seed: SPGMMMGMFNMLSTV
SPGLMMQMVNMISTV

SEQ ID NO: 199080 - protein, 15 aa, Artificial Sequence
  Description of Artificial Sequence: Synthetic peptide
  Seed: SPGMMMGMFNMLSTV
SPGLMMQMVNMVSTV

SEQ ID NO: 199081 - protein, 15 aa, Artificial Sequence
  Description of Artificial Sequence: Synthetic peptide
  Seed: SPGMMMGMFNMLSTV
SPGLMMQMYNMFSTV

SEQ ID NO: 199082 - protein, 15 aa, Artificial Sequence
  Description of Artificial Sequence: Synthetic peptide
  Seed: SPGMMMGMFNMLSTV
SPGLMMQMYNMISTV

SEQ ID NO: 199083 - protein, 15 aa, Artificial Sequence
  Description of Artificial Sequence: Synthetic peptide
  Seed: SPGMMMGMFNMLSTV
SPGLMMQMYNMLSTV

SEQ ID NO: 199084 - protein, 15 aa, Artificial Sequence
  Description of Artificial Sequence: Synthetic peptide
  Seed: SPGMMMGMFNMLSTV
SPGLMMQMYNMVSTV

SEQ ID NO: 199085 - protein, 15 aa, Artificial Sequence
  Description of Artificial Sequence: Synthetic peptide
  Seed: SPGMMMGMFNMLSTV
SPGLMMRMFNMFSTV

SEQ ID NO: 199086 - protein, 15 aa, Artificial Sequence
  Description of Artificial Sequence: Synthetic peptide
  Seed: SPGMMMGMFNMLSTV
SPGLMMRMFNMLSTV

SEQ ID NO: 199087 - protein, 15 aa, Artificial Sequence
  Description of Artificial Sequence: Synthetic peptide
  Seed: SPGMMMGMFNMLSTV
SPGLMMRMNNMASTV

SEQ ID NO: 199088 - protein, 15 aa, Artificial Sequence
  Description of Artificial Sequence: Synthetic peptide
  Seed: SPGMMMGMFNMLSTV
SPGLMMRMNNMFSTV

SEQ ID NO: 199089 - protein, 15 aa, Artificial Sequence
  Description of Artificial Sequence: Synthetic peptide
  Seed: SPGMMMGMFNMLSTV
SPGLMMRMNNMISTV

SEQ ID NO: 199090 - protein, 15 aa, Artificial Sequence
  Description of Artificial Sequence: Synthetic peptide
  Seed: SPGMMMGMFNMLSTV
SPGLMMRMNNMLSTV

SEQ ID NO: 199091 - protein, 15 aa, Artificial Sequence
  Description of Artificial Sequence: Synthetic peptide
  Seed: SPGMMMGMFNMLSTV
SPGLMMRMNNMMSTV

SEQ ID NO: 199092 - protein, 15 aa, Artificial Sequence
  Description of Artificial Sequence: Synthetic peptide
  Seed: SPGMMMGMFNMLSTV
SPGLMMRMNNMVSTV

SEQ ID NO: 199093 - protein, 15 aa, Artificial Sequence
  Description of Artificial Sequence: Synthetic peptide
  Seed: SPGMMMGMFNMLSTV
SPGLMMRMNNMYSTV

SEQ ID NO: 199094 - protein, 15 aa, Artificial Sequence
  Description of Artificial Sequence: Synthetic peptide
  Seed: SPGMMMGMFNMLSTV
SPGLMMRMYNMFSTV

SEQ ID NO: 199095 - protein, 15 aa, Artificial Sequence
  Description of Artificial Sequence: Synthetic peptide
  Seed: SPGMMMGMFNMLSTV
SPGLMMSMANMASTV

SEQ ID NO: 199096 - protein, 15 aa, Artificial Sequence
  Description of Artificial Sequence: Synthetic peptide
  Seed: SPGMMMGMFNMLSTV
SPGLMMSMANMFSTV

SEQ ID NO: 199097 - protein, 15 aa, Artificial Sequence
  Description of Artificial Sequence: Synthetic peptide
  Seed: SPGMMMGMFNMLSTV
SPGLMMSMANMHSTV

SEQ ID NO: 199098 - protein, 15 aa, Artificial Sequence
  Description of Artificial Sequence: Synthetic peptide
  Seed: SPGMMMGMFNMLSTV
SPGLMMSMANMISTV

SEQ ID NO: 199099 - protein, 15 aa, Artificial Sequence
  Description of Artificial Sequence: Synthetic peptide
  Seed: SPGMMMGMFNMLSTV
SPGLMMSMANMLSTV

SEQ ID NO: 199100 - protein, 15 aa, Artificial Sequence
  Description of Artificial Sequence: Synthetic peptide
  Seed: SPGMMMGMFNMLSTV
SPGLMMSMANMMSTV

SEQ ID NO: 199101 - protein, 15 aa, Artificial Sequence
  Description of Artificial Sequence: Synthetic peptide
  Seed: SPGMMMGMFNMLSTV
SPGLMMSMANMNSTV

SEQ ID NO: 199102 - protein, 15 aa, Artificial Sequence
  Description of Artificial Sequence: Synthetic peptide
  Seed: SPGMMMGMFNMLSTV
SPGLMMSMANMSSTV

SEQ ID NO: 199103 - protein, 15 aa, Artificial Sequence
  Description of Artificial Sequence: Synthetic peptide
  Seed: SPGMMMGMFNMLSTV
SPGLMMSMANMTSTV

SEQ ID NO: 199104 - protein, 15 aa, Artificial Sequence
  Description of Artificial Sequence: Synthetic peptide
  Seed: SPGMMMGMFNMLSTV
SPGLMMSMANMVSTV

SEQ ID NO: 199105 - protein, 15 aa, Artificial Sequence
  Description of Artificial Sequence: Synthetic peptide
  Seed: SPGMMMGMFNMLSTV
SPGLMMSMANMYSTV

SEQ ID NO: 199106 - protein, 15 aa, Artificial Sequence
  Description of Artificial Sequence: Synthetic peptide
  Seed: SPGMMMGMFNMLSTV
SPGLMMSMDNMISTV

SEQ ID NO: 199107 - protein, 15 aa, Artificial Sequence
  Description of Artificial Sequence: Synthetic peptide
  Seed: SPGMMMGMFNMLSTV
SPGLMMSMDNMVSTV

SEQ ID NO: 199108 - protein, 15 aa, Artificial Sequence
  Description of Artificial Sequence: Synthetic peptide
  Seed: SPGMMMGMFNMLSTV
SPGLMMSMFNMASTV

SEQ ID NO: 199109 - protein, 15 aa, Artificial Sequence
  Description of Artificial Sequence: Synthetic peptide
  Seed: SPGMMMGMFNMLSTV
SPGLMMSMFNMDSTV

SEQ ID NO: 199110 - protein, 15 aa, Artificial Sequence
  Description of Artificial Sequence: Synthetic peptide
  Seed: SPGMMMGMFNMLSTV
SPGLMMSMFNMESTV

SEQ ID NO: 199111 - protein, 15 aa, Artificial Sequence
  Description of Artificial Sequence: Synthetic peptide
  Seed: SPGMMMGMFNMLSTV
SPGLMMSMFNMFSTV

SEQ ID NO: 199112 - protein, 15 aa, Artificial Sequence
  Description of Artificial Sequence: Synthetic peptide
  Seed: SPGMMMGMFNMLSTV
SPGLMMSMFNMHSTV

SEQ ID NO: 199113 - protein, 15 aa, Artificial Sequence
  Description of Artificial Sequence: Synthetic peptide
  Seed: SPGMMMGMFNMLSTV
SPGLMMSMFNMISTV

SEQ ID NO: 199114 - protein, 15 aa, Artificial Sequence
  Description of Artificial Sequence: Synthetic peptide
  Seed: SPGMMMGMFNMLSTV
SPGLMMSMFNMLSTV

SEQ ID NO: 199115 - protein, 15 aa, Artificial Sequence
  Description of Artificial Sequence: Synthetic peptide
  Seed: SPGMMMGMFNMLSTV
SPGLMMSMFNMMSTV

SEQ ID NO: 199116 - protein, 15 aa, Artificial Sequence
  Description of Artificial Sequence: Synthetic peptide
  Seed: SPGMMMGMFNMLSTV
SPGLMMSMFNMNSTV

SEQ ID NO: 199117 - protein, 15 aa, Artificial Sequence
  Description of Artificial Sequence: Synthetic peptide
  Seed: SPGMMMGMFNMLSTV
SPGLMMSMFNMPSTV

SEQ ID NO: 199118 - protein, 15 aa, Artificial Sequence
  Description of Artificial Sequence: Synthetic peptide
  Seed: SPGMMMGMFNMLSTV
SPGLMMSMFNMQSTV

SEQ ID NO: 199119 - protein, 15 aa, Artificial Sequence
  Description of Artificial Sequence: Synthetic peptide
  Seed: SPGMMMGMFNMLSTV
SPGLMMSMFNMSSTV

SEQ ID NO: 199120 - protein, 15 aa, Artificial Sequence
  Description of Artificial Sequence: Synthetic peptide
  Seed: SPGMMMGMFNMLSTV
SPGLMMSMFNMTSTV

SEQ ID NO: 199121 - protein, 15 aa, Artificial Sequence
  Description of Artificial Sequence: Synthetic peptide
  Seed: SPGMMMGMFNMLSTV
SPGLMMSMFNMVSTV

SEQ ID NO: 199122 - protein, 15 aa, Artificial Sequence
  Description of Artificial Sequence: Synthetic peptide
  Seed: SPGMMMGMFNMLSTV
SPGLMMSMFNMYSTV

SEQ ID NO: 199123 - protein, 15 aa, Artificial Sequence
  Description of Artificial Sequence: Synthetic peptide
  Seed: SPGMMMGMFNMLSTV
SPGLMMSMGNMASTV

SEQ ID NO: 199124 - protein, 15 aa, Artificial Sequence
  Description of Artificial Sequence: Synthetic peptide
  Seed: SPGMMMGMFNMLSTV
SPGLMMSMGNMFSTV

SEQ ID NO: 199125 - protein, 15 aa, Artificial Sequence
  Description of Artificial Sequence: Synthetic peptide
  Seed: SPGMMMGMFNMLSTV
SPGLMMSMGNMISTV

SEQ ID NO: 199126 - protein, 15 aa, Artificial Sequence
  Description of Artificial Sequence: Synthetic peptide
  Seed: SPGMMMGMFNMLSTV
SPGLMMSMGNMLSTV

SEQ ID NO: 199127 - protein, 15 aa, Artificial Sequence
  Description of Artificial Sequence: Synthetic peptide
  Seed: SPGMMMGMFNMLSTV
SPGLMMSMGNMMSTV

SEQ ID NO: 199128 - protein, 15 aa, Artificial Sequence
  Description of Artificial Sequence: Synthetic peptide
  Seed: SPGMMMGMFNMLSTV
SPGLMMSMGNMSSTV

SEQ ID NO: 199129 - protein, 15 aa, Artificial Sequence
  Description of Artificial Sequence: Synthetic peptide
  Seed: SPGMMMGMFNMLSTV
SPGLMMSMGNMTSTV

SEQ ID NO: 199130 - protein, 15 aa, Artificial Sequence
  Description of Artificial Sequence: Synthetic peptide
  Seed: SPGMMMGMFNMLSTV
SPGLMMSMGNMVSTV

SEQ ID NO: 199131 - protein, 15 aa, Artificial Sequence
  Description of Artificial Sequence: Synthetic peptide
  Seed: SPGMMMGMFNMLSTV
SPGLMMSMGNMYSTV

SEQ ID NO: 199132 - protein, 15 aa, Artificial Sequence
  Description of Artificial Sequence: Synthetic peptide
  Seed: SPGMMMGMFNMLSTV
SPGLMMSMHNMFSTV

SEQ ID NO: 199133 - protein, 15 aa, Artificial Sequence
  Description of Artificial Sequence: Synthetic peptide
  Seed: SPGMMMGMFNMLSTV
SPGLMMSMHNMISTV

SEQ ID NO: 199134 - protein, 15 aa, Artificial Sequence
  Description of Artificial Sequence: Synthetic peptide
  Seed: SPGMMMGMFNMLSTV
SPGLMMSMHNMLSTV

SEQ ID NO: 199135 - protein, 15 aa, Artificial Sequence
  Description of Artificial Sequence: Synthetic peptide
  Seed: SPGMMMGMFNMLSTV
SPGLMMSMHNMVSTV

SEQ ID NO: 199136 - protein, 15 aa, Artificial Sequence
  Description of Artificial Sequence: Synthetic peptide
  Seed: SPGMMMGMFNMLSTV
SPGLMMSMINMFSTV

SEQ ID NO: 199137 - protein, 15 aa, Artificial Sequence
  Description of Artificial Sequence: Synthetic peptide
  Seed: SPGMMMGMFNMLSTV
SPGLMMSMINMISTV

SEQ ID NO: 199138 - protein, 15 aa, Artificial Sequence
  Description of Artificial Sequence: Synthetic peptide
  Seed: SPGMMMGMFNMLSTV
SPGLMMSMINMLSTV

SEQ ID NO: 199139 - protein, 15 aa, Artificial Sequence
  Description of Artificial Sequence: Synthetic peptide
  Seed: SPGMMMGMFNMLSTV
SPGLMMSMINMMSTV

SEQ ID NO: 199140 - protein, 15 aa, Artificial Sequence
  Description of Artificial Sequence: Synthetic peptide
  Seed: SPGMMMGMFNMLSTV
SPGLMMSMINMVSTV

SEQ ID NO: 199141 - protein, 15 aa, Artificial Sequence
  Description of Artificial Sequence: Synthetic peptide
  Seed: SPGMMMGMFNMLSTV
SPGLMMSMINMYSTV

SEQ ID NO: 199142 - protein, 15 aa, Artificial Sequence
  Description of Artificial Sequence: Synthetic peptide
  Seed: SPGMMMGMFNMLSTV
SPGLMMSMKNMISTV

SEQ ID NO: 199143 - protein, 15 aa, Artificial Sequence
  Description of Artificial Sequence: Synthetic peptide
  Seed: SPGMMMGMFNMLSTV
SPGLMMSMKNMVSTV

SEQ ID NO: 199144 - protein, 15 aa, Artificial Sequence
  Description of Artificial Sequence: Synthetic peptide
  Seed: SPGMMMGMFNMLSTV
SPGLMMSMLNMISTV

SEQ ID NO: 199145 - protein, 15 aa, Artificial Sequence
  Description of Artificial Sequence: Synthetic peptide
  Seed: SPGMMMGMFNMLSTV
SPGLMMSMLNMLSTV

SEQ ID NO: 199146 - protein, 15 aa, Artificial Sequence
  Description of Artificial Sequence: Synthetic peptide
  Seed: SPGMMMGMFNMLSTV
SPGLMMSMLNMVSTV

SEQ ID NO: 199147 - protein, 15 aa, Artificial Sequence
  Description of Artificial Sequence: Synthetic peptide
  Seed: SPGMMMGMFNMLSTV
SPGLMMSMMNMISTV

SEQ ID NO: 199148 - protein, 15 aa, Artificial Sequence
  Description of Artificial Sequence: Synthetic peptide
  Seed: SPGMMMGMFNMLSTV
SPGLMMSMMNMVSTV

SEQ ID NO: 199149 - protein, 15 aa, Artificial Sequence
  Description of Artificial Sequence: Synthetic peptide
  Seed: SPGMMMGMFNMLSTV
SPGLMMSMNNMASTV

SEQ ID NO: 199150 - protein, 15 aa, Artificial Sequence
  Description of Artificial Sequence: Synthetic peptide
  Seed: SPGMMMGMFNMLSTV
SPGLMMSMNNMFSTV

SEQ ID NO: 199151 - protein, 15 aa, Artificial Sequence
  Description of Artificial Sequence: Synthetic peptide
  Seed: SPGMMMGMFNMLSTV
SPGLMMSMNNMISTV

SEQ ID NO: 199152 - protein, 15 aa, Artificial Sequence
  Description of Artificial Sequence: Synthetic peptide
  Seed: SPGMMMGMFNMLSTV
SPGLMMSMNNMLSTV

SEQ ID NO: 199153 - protein, 15 aa, Artificial Sequence
  Description of Artificial Sequence: Synthetic peptide
  Seed: SPGMMMGMFNMLSTV
SPGLMMSMNNMMSTV

SEQ ID NO: 199154 - protein, 15 aa, Artificial Sequence
  Description of Artificial Sequence: Synthetic peptide
  Seed: SPGMMMGMFNMLSTV
SPGLMMSMNNMNSTV

SEQ ID NO: 199155 - protein, 15 aa, Artificial Sequence
  Description of Artificial Sequence: Synthetic peptide
  Seed: SPGMMMGMFNMLSTV
SPGLMMSMNNMSSTV

SEQ ID NO: 199156 - protein, 15 aa, Artificial Sequence
  Description of Artificial Sequence: Synthetic peptide
  Seed: SPGMMMGMFNMLSTV
SPGLMMSMNNMTSTV

SEQ ID NO: 199157 - protein, 15 aa, Artificial Sequence
  Description of Artificial Sequence: Synthetic peptide
  Seed: SPGMMMGMFNMLSTV
SPGLMMSMNNMVSTV

SEQ ID NO: 199158 - protein, 15 aa, Artificial Sequence
  Description of Artificial Sequence: Synthetic peptide
  Seed: SPGMMMGMFNMLSTV
SPGLMMSMNNMYSTV

SEQ ID NO: 199159 - protein, 15 aa, Artificial Sequence
  Description of Artificial Sequence: Synthetic peptide
  Seed: SPGMMMGMFNMLSTV
SPGLMMSMPNMASTV

SEQ ID NO: 199160 - protein, 15 aa, Artificial Sequence
  Description of Artificial Sequence: Synthetic peptide
  Seed: SPGMMMGMFNMLSTV
SPGLMMSMPNMFSTV

SEQ ID NO: 199161 - protein, 15 aa, Artificial Sequence
  Description of Artificial Sequence: Synthetic peptide
  Seed: SPGMMMGMFNMLSTV
SPGLMMSMPNMISTV

SEQ ID NO: 199162 - protein, 15 aa, Artificial Sequence
  Description of Artificial Sequence: Synthetic peptide
  Seed: SPGMMMGMFNMLSTV
SPGLMMSMPNMLSTV

SEQ ID NO: 199163 - protein, 15 aa, Artificial Sequence
  Description of Artificial Sequence: Synthetic peptide
  Seed: SPGMMMGMFNMLSTV
SPGLMMSMPNMMSTV

SEQ ID NO: 199164 - protein, 15 aa, Artificial Sequence
  Description of Artificial Sequence: Synthetic peptide
  Seed: SPGMMMGMFNMLSTV
SPGLMMSMPNMSSTV

SEQ ID NO: 199165 - protein, 15 aa, Artificial Sequence
  Description of Artificial Sequence: Synthetic peptide
  Seed: SPGMMMGMFNMLSTV
SPGLMMSMPNMTSTV

SEQ ID NO: 199166 - protein, 15 aa, Artificial Sequence
  Description of Artificial Sequence: Synthetic peptide
  Seed: SPGMMMGMFNMLSTV
SPGLMMSMPNMVSTV

SEQ ID NO: 199167 - protein, 15 aa, Artificial Sequence
  Description of Artificial Sequence: Synthetic peptide
  Seed: SPGMMMGMFNMLSTV
SPGLMMSMPNMYSTV

SEQ ID NO: 199168 - protein, 15 aa, Artificial Sequence
  Description of Artificial Sequence: Synthetic peptide
  Seed: SPGMMMGMFNMLSTV
SPGLMMSMQNMISTV

SEQ ID NO: 199169 - protein, 15 aa, Artificial Sequence
  Description of Artificial Sequence: Synthetic peptide
  Seed: SPGMMMGMFNMLSTV
SPGLMMSMSNMASTV

SEQ ID NO: 199170 - protein, 15 aa, Artificial Sequence
  Description of Artificial Sequence: Synthetic peptide
  Seed: SPGMMMGMFNMLSTV
SPGLMMSMSNMFSTV

SEQ ID NO: 199171 - protein, 15 aa, Artificial Sequence
  Description of Artificial Sequence: Synthetic peptide
  Seed: SPGMMMGMFNMLSTV
SPGLMMSMSNMISTV

SEQ ID NO: 199172 - protein, 15 aa, Artificial Sequence
  Description of Artificial Sequence: Synthetic peptide
  Seed: SPGMMMGMFNMLSTV
SPGLMMSMSNMLSTV

SEQ ID NO: 199173 - protein, 15 aa, Artificial Sequence
  Description of Artificial Sequence: Synthetic peptide
  Seed: SPGMMMGMFNMLSTV
SPGLMMSMSNMMSTV

SEQ ID NO: 199174 - protein, 15 aa, Artificial Sequence
  Description of Artificial Sequence: Synthetic peptide
  Seed: SPGMMMGMFNMLSTV
SPGLMMSMSNMSSTV

SEQ ID NO: 199175 - protein, 15 aa, Artificial Sequence
  Description of Artificial Sequence: Synthetic peptide
  Seed: SPGMMMGMFNMLSTV
SPGLMMSMSNMTSTV

SEQ ID NO: 199176 - protein, 15 aa, Artificial Sequence
  Description of Artificial Sequence: Synthetic peptide
  Seed: SPGMMMGMFNMLSTV
SPGLMMSMSNMVSTV

SEQ ID NO: 199177 - protein, 15 aa, Artificial Sequence
  Description of Artificial Sequence: Synthetic peptide
  Seed: SPGMMMGMFNMLSTV
SPGLMMSMSNMYSTV

SEQ ID NO: 199178 - protein, 15 aa, Artificial Sequence
  Description of Artificial Sequence: Synthetic peptide
  Seed: SPGMMMGMFNMLSTV
SPGLMMSMTNMASTV

SEQ ID NO: 199179 - protein, 15 aa, Artificial Sequence
  Description of Artificial Sequence: Synthetic peptide
  Seed: SPGMMMGMFNMLSTV
SPGLMMSMTNMFSTV

SEQ ID NO: 199180 - protein, 15 aa, Artificial Sequence
  Description of Artificial Sequence: Synthetic peptide
  Seed: SPGMMMGMFNMLSTV
SPGLMMSMTNMISTV

SEQ ID NO: 199181 - protein, 15 aa, Artificial Sequence
  Description of Artificial Sequence: Synthetic peptide
  Seed: SPGMMMGMFNMLSTV
SPGLMMSMTNMLSTV

SEQ ID NO: 199182 - protein, 15 aa, Artificial Sequence
  Description of Artificial Sequence: Synthetic peptide
  Seed: SPGMMMGMFNMLSTV
SPGLMMSMTNMMSTV

SEQ ID NO: 199183 - protein, 15 aa, Artificial Sequence
  Description of Artificial Sequence: Synthetic peptide
  Seed: SPGMMMGMFNMLSTV
SPGLMMSMTNMTSTV

SEQ ID NO: 199184 - protein, 15 aa, Artificial Sequence
  Description of Artificial Sequence: Synthetic peptide
  Seed: SPGMMMGMFNMLSTV
SPGLMMSMTNMVSTV

SEQ ID NO: 199185 - protein, 15 aa, Artificial Sequence
  Description of Artificial Sequence: Synthetic peptide
  Seed: SPGMMMGMFNMLSTV
SPGLMMSMTNMYSTV

SEQ ID NO: 199186 - protein, 15 aa, Artificial Sequence
  Description of Artificial Sequence: Synthetic peptide
  Seed: SPGMMMGMFNMLSTV
SPGLMMSMVNMFSTV

SEQ ID NO: 199187 - protein, 15 aa, Artificial Sequence
  Description of Artificial Sequence: Synthetic peptide
  Seed: SPGMMMGMFNMLSTV
SPGLMMSMVNMISTV

SEQ ID NO: 199188 - protein, 15 aa, Artificial Sequence
  Description of Artificial Sequence: Synthetic peptide
  Seed: SPGMMMGMFNMLSTV
SPGLMMSMVNMLSTV

SEQ ID NO: 199189 - protein, 15 aa, Artificial Sequence
  Description of Artificial Sequence: Synthetic peptide
  Seed: SPGMMMGMFNMLSTV
SPGLMMSMVNMMSTV

SEQ ID NO: 199190 - protein, 15 aa, Artificial Sequence
  Description of Artificial Sequence: Synthetic peptide
  Seed: SPGMMMGMFNMLSTV
SPGLMMSMVNMVSTV

SEQ ID NO: 199191 - protein, 15 aa, Artificial Sequence
  Description of Artificial Sequence: Synthetic peptide
  Seed: SPGMMMGMFNMLSTV
SPGLMMSMVNMYSTV

SEQ ID NO: 199192 - protein, 15 aa, Artificial Sequence
  Description of Artificial Sequence: Synthetic peptide
  Seed: SPGMMMGMFNMLSTV
SPGLMMSMWNMFSTV

SEQ ID NO: 199193 - protein, 15 aa, Artificial Sequence
  Description of Artificial Sequence: Synthetic peptide
  Seed: SPGMMMGMFNMLSTV
SPGLMMSMWNMISTV

SEQ ID NO: 199194 - protein, 15 aa, Artificial Sequence
  Description of Artificial Sequence: Synthetic peptide
  Seed: SPGMMMGMFNMLSTV
SPGLMMSMWNMLSTV

SEQ ID NO: 199195 - protein, 15 aa, Artificial Sequence
  Description of Artificial Sequence: Synthetic peptide
  Seed: SPGMMMGMFNMLSTV
SPGLMMSMWNMVSTV

SEQ ID NO: 199196 - protein, 15 aa, Artificial Sequence
  Description of Artificial Sequence: Synthetic peptide
  Seed: SPGMMMGMFNMLSTV
SPGLMMSMYNMFSTV

SEQ ID NO: 199197 - protein, 15 aa, Artificial Sequence
  Description of Artificial Sequence: Synthetic peptide
  Seed: SPGMMMGMFNMLSTV
SPGLMMSMYNMISTV

SEQ ID NO: 199198 - protein, 15 aa, Artificial Sequence
  Description of Artificial Sequence: Synthetic peptide
  Seed: SPGMMMGMFNMLSTV
SPGLMMSMYNMLSTV

SEQ ID NO: 199199 - protein, 15 aa, Artificial Sequence
  Description of Artificial Sequence: Synthetic peptide
  Seed: SPGMMMGMFNMLSTV
SPGLMMSMYNMMSTV

SEQ ID NO: 199200 - protein, 15 aa, Artificial Sequence
  Description of Artificial Sequence: Synthetic peptide
  Seed: SPGMMMGMFNMLSTV
SPGLMMSMYNMVSTV

SEQ ID NO: 199201 - protein, 15 aa, Artificial Sequence
  Description of Artificial Sequence: Synthetic peptide
  Seed: SPGMMMGMFNMLSTV
SPGLMMTMANMASTV

SEQ ID NO: 199202 - protein, 15 aa, Artificial Sequence
  Description of Artificial Sequence: Synthetic peptide
  Seed: SPGMMMGMFNMLSTV
SPGLMMTMANMFSTV

SEQ ID NO: 199203 - protein, 15 aa, Artificial Sequence
  Description of Artificial Sequence: Synthetic peptide
  Seed: SPGMMMGMFNMLSTV
SPGLMMTMANMISTV

SEQ ID NO: 199204 - protein, 15 aa, Artificial Sequence
  Description of Artificial Sequence: Synthetic peptide
  Seed: SPGMMMGMFNMLSTV
SPGLMMTMANMLSTV

SEQ ID NO: 199205 - protein, 15 aa, Artificial Sequence
  Description of Artificial Sequence: Synthetic peptide
  Seed: SPGMMMGMFNMLSTV
SPGLMMTMANMMSTV

SEQ ID NO: 199206 - protein, 15 aa, Artificial Sequence
  Description of Artificial Sequence: Synthetic peptide
  Seed: SPGMMMGMFNMLSTV
SPGLMMTMANMSSTV

SEQ ID NO: 199207 - protein, 15 aa, Artificial Sequence
  Description of Artificial Sequence: Synthetic peptide
  Seed: SPGMMMGMFNMLSTV
SPGLMMTMANMTSTV

SEQ ID NO: 199208 - protein, 15 aa, Artificial Sequence
  Description of Artificial Sequence: Synthetic peptide
  Seed: SPGMMMGMFNMLSTV
SPGLMMTMANMVSTV

SEQ ID NO: 199209 - protein, 15 aa, Artificial Sequence
  Description of Artificial Sequence: Synthetic peptide
  Seed: SPGMMMGMFNMLSTV
SPGLMMTMANMYSTV

SEQ ID NO: 199210 - protein, 15 aa, Artificial Sequence
  Description of Artificial Sequence: Synthetic peptide
  Seed: SPGMMMGMFNMLSTV
SPGLMMTMFNMASTV

SEQ ID NO: 199211 - protein, 15 aa, Artificial Sequence
  Description of Artificial Sequence: Synthetic peptide
  Seed: SPGMMMGMFNMLSTV
SPGLMMTMFNMDSTV

SEQ ID NO: 199212 - protein, 15 aa, Artificial Sequence
  Description of Artificial Sequence: Synthetic peptide
  Seed: SPGMMMGMFNMLSTV
SPGLMMTMFNMESTV

SEQ ID NO: 199213 - protein, 15 aa, Artificial Sequence
  Description of Artificial Sequence: Synthetic peptide
  Seed: SPGMMMGMFNMLSTV
SPGLMMTMFNMFSTV

SEQ ID NO: 199214 - protein, 15 aa, Artificial Sequence
  Description of Artificial Sequence: Synthetic peptide
  Seed: SPGMMMGMFNMLSTV
SPGLMMTMFNMHSTV

SEQ ID NO: 199215 - protein, 15 aa, Artificial Sequence
  Description of Artificial Sequence: Synthetic peptide
  Seed: SPGMMMGMFNMLSTV
SPGLMMTMFNMISTV

SEQ ID NO: 199216 - protein, 15 aa, Artificial Sequence
  Description of Artificial Sequence: Synthetic peptide
  Seed: SPGMMMGMFNMLSTV
SPGLMMTMFNMLSTV

SEQ ID NO: 199217 - protein, 15 aa, Artificial Sequence
  Description of Artificial Sequence: Synthetic peptide
  Seed: SPGMMMGMFNMLSTV
SPGLMMTMFNMMSTV

SEQ ID NO: 199218 - protein, 15 aa, Artificial Sequence
  Description of Artificial Sequence: Synthetic peptide
  Seed: SPGMMMGMFNMLSTV
SPGLMMTMFNMNSTV

SEQ ID NO: 199219 - protein, 15 aa, Artificial Sequence
  Description of Artificial Sequence: Synthetic peptide
  Seed: SPGMMMGMFNMLSTV
SPGLMMTMFNMPSTV

SEQ ID NO: 199220 - protein, 15 aa, Artificial Sequence
  Description of Artificial Sequence: Synthetic peptide
  Seed: SPGMMMGMFNMLSTV
SPGLMMTMFNMQSTV

SEQ ID NO: 199221 - protein, 15 aa, Artificial Sequence
  Description of Artificial Sequence: Synthetic peptide
  Seed: SPGMMMGMFNMLSTV
SPGLMMTMFNMSSTV

SEQ ID NO: 199222 - protein, 15 aa, Artificial Sequence
  Description of Artificial Sequence: Synthetic peptide
  Seed: SPGMMMGMFNMLSTV
SPGLMMTMFNMTSTV

SEQ ID NO: 199223 - protein, 15 aa, Artificial Sequence
  Description of Artificial Sequence: Synthetic peptide
  Seed: SPGMMMGMFNMLSTV
SPGLMMTMFNMVSTV

SEQ ID NO: 199224 - protein, 15 aa, Artificial Sequence
  Description of Artificial Sequence: Synthetic peptide
  Seed: SPGMMMGMFNMLSTV
SPGLMMTMFNMYSTV

SEQ ID NO: 199225 - protein, 15 aa, Artificial Sequence
  Description of Artificial Sequence: Synthetic peptide
  Seed: SPGMMMGMFNMLSTV
SPGLMMTMGNMASTV

SEQ ID NO: 199226 - protein, 15 aa, Artificial Sequence
  Description of Artificial Sequence: Synthetic peptide
  Seed: SPGMMMGMFNMLSTV
SPGLMMTMGNMFSTV

SEQ ID NO: 199227 - protein, 15 aa, Artificial Sequence
  Description of Artificial Sequence: Synthetic peptide
  Seed: SPGMMMGMFNMLSTV
SPGLMMTMGNMISTV

SEQ ID NO: 199228 - protein, 15 aa, Artificial Sequence
  Description of Artificial Sequence: Synthetic peptide
  Seed: SPGMMMGMFNMLSTV
SPGLMMTMGNMLSTV

SEQ ID NO: 199229 - protein, 15 aa, Artificial Sequence
  Description of Artificial Sequence: Synthetic peptide
  Seed: SPGMMMGMFNMLSTV
SPGLMMTMGNMMSTV

SEQ ID NO: 199230 - protein, 15 aa, Artificial Sequence
  Description of Artificial Sequence: Synthetic peptide
  Seed: SPGMMMGMFNMLSTV
SPGLMMTMGNMTSTV

SEQ ID NO: 199231 - protein, 15 aa, Artificial Sequence
  Description of Artificial Sequence: Synthetic peptide
  Seed: SPGMMMGMFNMLSTV
SPGLMMTMGNMVSTV

SEQ ID NO: 199232 - protein, 15 aa, Artificial Sequence
  Description of Artificial Sequence: Synthetic peptide
  Seed: SPGMMMGMFNMLSTV
SPGLMMTMGNMYSTV

SEQ ID NO: 199233 - protein, 15 aa, Artificial Sequence
  Description of Artificial Sequence: Synthetic peptide
  Seed: SPGMMMGMFNMLSTV
SPGLMMTMINMLSTV

SEQ ID NO: 199234 - protein, 15 aa, Artificial Sequence
  Description of Artificial Sequence: Synthetic peptide
  Seed: SPGMMMGMFNMLSTV
SPGLMMTMLNMLSTV

SEQ ID NO: 199235 - protein, 15 aa, Artificial Sequence
  Description of Artificial Sequence: Synthetic peptide
  Seed: SPGMMMGMFNMLSTV
SPGLMMTMNNMASTV

SEQ ID NO: 199236 - protein, 15 aa, Artificial Sequence
  Description of Artificial Sequence: Synthetic peptide
  Seed: SPGMMMGMFNMLSTV
SPGLMMTMNNMFSTV

SEQ ID NO: 199237 - protein, 15 aa, Artificial Sequence
  Description of Artificial Sequence: Synthetic peptide
  Seed: SPGMMMGMFNMLSTV
SPGLMMTMNNMISTV

SEQ ID NO: 199238 - protein, 15 aa, Artificial Sequence
  Description of Artificial Sequence: Synthetic peptide
  Seed: SPGMMMGMFNMLSTV
SPGLMMTMNNMLSTV

SEQ ID NO: 199239 - protein, 15 aa, Artificial Sequence
  Description of Artificial Sequence: Synthetic peptide
  Seed: SPGMMMGMFNMLSTV
SPGLMMTMNNMMSTV

SEQ ID NO: 199240 - protein, 15 aa, Artificial Sequence
  Description of Artificial Sequence: Synthetic peptide
  Seed: SPGMMMGMFNMLSTV
SPGLMMTMNNMSSTV

SEQ ID NO: 199241 - protein, 15 aa, Artificial Sequence
  Description of Artificial Sequence: Synthetic peptide
  Seed: SPGMMMGMFNMLSTV
SPGLMMTMNNMTSTV

SEQ ID NO: 199242 - protein, 15 aa, Artificial Sequence
  Description of Artificial Sequence: Synthetic peptide
  Seed: SPGMMMGMFNMLSTV
SPGLMMTMNNMVSTV

SEQ ID NO: 199243 - protein, 15 aa, Artificial Sequence
  Description of Artificial Sequence: Synthetic peptide
  Seed: SPGMMMGMFNMLSTV
SPGLMMTMNNMYSTV

SEQ ID NO: 199244 - protein, 15 aa, Artificial Sequence
  Description of Artificial Sequence: Synthetic peptide
  Seed: SPGMMMGMFNMLSTV
SPGLMMTMPNMASTV

SEQ ID NO: 199245 - protein, 15 aa, Artificial Sequence
  Description of Artificial Sequence: Synthetic peptide
  Seed: SPGMMMGMFNMLSTV
SPGLMMTMPNMFSTV

SEQ ID NO: 199246 - protein, 15 aa, Artificial Sequence
  Description of Artificial Sequence: Synthetic peptide
  Seed: SPGMMMGMFNMLSTV
SPGLMMTMPNMISTV

SEQ ID NO: 199247 - protein, 15 aa, Artificial Sequence
  Description of Artificial Sequence: Synthetic peptide
  Seed: SPGMMMGMFNMLSTV
SPGLMMTMPNMLSTV

SEQ ID NO: 199248 - protein, 15 aa, Artificial Sequence
  Description of Artificial Sequence: Synthetic peptide
  Seed: SPGMMMGMFNMLSTV
SPGLMMTMPNMMSTV

SEQ ID NO: 199249 - protein, 15 aa, Artificial Sequence
  Description of Artificial Sequence: Synthetic peptide
  Seed: SPGMMMGMFNMLSTV
SPGLMMTMPNMVSTV

SEQ ID NO: 199250 - protein, 15 aa, Artificial Sequence
  Description of Artificial Sequence: Synthetic peptide
  Seed: SPGMMMGMFNMLSTV
SPGLMMTMPNMYSTV

SEQ ID NO: 199251 - protein, 15 aa, Artificial Sequence
  Description of Artificial Sequence: Synthetic peptide
  Seed: SPGMMMGMFNMLSTV
SPGLMMTMSNMASTV

SEQ ID NO: 199252 - protein, 15 aa, Artificial Sequence
  Description of Artificial Sequence: Synthetic peptide
  Seed: SPGMMMGMFNMLSTV
SPGLMMTMSNMFSTV

SEQ ID NO: 199253 - protein, 15 aa, Artificial Sequence
  Description of Artificial Sequence: Synthetic peptide
  Seed: SPGMMMGMFNMLSTV
SPGLMMTMSNMISTV

SEQ ID NO: 199254 - protein, 15 aa, Artificial Sequence
  Description of Artificial Sequence: Synthetic peptide
  Seed: SPGMMMGMFNMLSTV
SPGLMMTMSNMLSTV

SEQ ID NO: 199255 - protein, 15 aa, Artificial Sequence
  Description of Artificial Sequence: Synthetic peptide
  Seed: SPGMMMGMFNMLSTV
SPGLMMTMSNMMSTV

SEQ ID NO: 199256 - protein, 15 aa, Artificial Sequence
  Description of Artificial Sequence: Synthetic peptide
  Seed: SPGMMMGMFNMLSTV
SPGLMMTMSNMSSTV

SEQ ID NO: 199257 - protein, 15 aa, Artificial Sequence
  Description of Artificial Sequence: Synthetic peptide
  Seed: SPGMMMGMFNMLSTV
SPGLMMTMSNMTSTV

SEQ ID NO: 199258 - protein, 15 aa, Artificial Sequence
  Description of Artificial Sequence: Synthetic peptide
  Seed: SPGMMMGMFNMLSTV
SPGLMMTMSNMVSTV

SEQ ID NO: 199259 - protein, 15 aa, Artificial Sequence
  Description of Artificial Sequence: Synthetic peptide
  Seed: SPGMMMGMFNMLSTV
SPGLMMTMSNMYSTV

SEQ ID NO: 199260 - protein, 15 aa, Artificial Sequence
  Description of Artificial Sequence: Synthetic peptide
  Seed: SPGMMMGMFNMLSTV
SPGLMMTMTNMFSTV

SEQ ID NO: 199261 - protein, 15 aa, Artificial Sequence
  Description of Artificial Sequence: Synthetic peptide
  Seed: SPGMMMGMFNMLSTV
SPGLMMTMTNMISTV

SEQ ID NO: 199262 - protein, 15 aa, Artificial Sequence
  Description of Artificial Sequence: Synthetic peptide
  Seed: SPGMMMGMFNMLSTV
SPGLMMTMTNMLSTV

SEQ ID NO: 199263 - protein, 15 aa, Artificial Sequence
  Description of Artificial Sequence: Synthetic peptide
  Seed: SPGMMMGMFNMLSTV
SPGLMMTMTNMMSTV

SEQ ID NO: 199264 - protein, 15 aa, Artificial Sequence
  Description of Artificial Sequence: Synthetic peptide
  Seed: SPGMMMGMFNMLSTV
SPGLMMTMTNMVSTV

SEQ ID NO: 199265 - protein, 15 aa, Artificial Sequence
  Description of Artificial Sequence: Synthetic peptide
  Seed: SPGMMMGMFNMLSTV
SPGLMMTMTNMYSTV

SEQ ID NO: 199266 - protein, 15 aa, Artificial Sequence
  Description of Artificial Sequence: Synthetic peptide
  Seed: SPGMMMGMFNMLSTV
SPGLMMTMVNMISTV

SEQ ID NO: 199267 - protein, 15 aa, Artificial Sequence
  Description of Artificial Sequence: Synthetic peptide
  Seed: SPGMMMGMFNMLSTV
SPGLMMTMVNMLSTV

SEQ ID NO: 199268 - protein, 15 aa, Artificial Sequence
  Description of Artificial Sequence: Synthetic peptide
  Seed: SPGMMMGMFNMLSTV
SPGLMMTMVNMMSTV

SEQ ID NO: 199269 - protein, 15 aa, Artificial Sequence
  Description of Artificial Sequence: Synthetic peptide
  Seed: SPGMMMGMFNMLSTV
SPGLMMTMVNMVSTV

SEQ ID NO: 199270 - protein, 15 aa, Artificial Sequence
  Description of Artificial Sequence: Synthetic peptide
  Seed: SPGMMMGMFNMLSTV
SPGLMMTMWNMFSTV

SEQ ID NO: 199271 - protein, 15 aa, Artificial Sequence
  Description of Artificial Sequence: Synthetic peptide
  Seed: SPGMMMGMFNMLSTV
SPGLMMTMWNMISTV

SEQ ID NO: 199272 - protein, 15 aa, Artificial Sequence
  Description of Artificial Sequence: Synthetic peptide
  Seed: SPGMMMGMFNMLSTV
SPGLMMTMWNMLSTV

SEQ ID NO: 199273 - protein, 15 aa, Artificial Sequence
  Description of Artificial Sequence: Synthetic peptide
  Seed: SPGMMMGMFNMLSTV
SPGLMMTMWNMVSTV

SEQ ID NO: 199274 - protein, 15 aa, Artificial Sequence
  Description of Artificial Sequence: Synthetic peptide
  Seed: SPGMMMGMFNMLSTV
SPGLMMTMYNMFSTV

SEQ ID NO: 199275 - protein, 15 aa, Artificial Sequence
  Description of Artificial Sequence: Synthetic peptide
  Seed: SPGMMMGMFNMLSTV
SPGLMMTMYNMISTV

SEQ ID NO: 199276 - protein, 15 aa, Artificial Sequence
  Description of Artificial Sequence: Synthetic peptide
  Seed: SPGMMMGMFNMLSTV
SPGLMMTMYNMLSTV

SEQ ID NO: 199277 - protein, 15 aa, Artificial Sequence
  Description of Artificial Sequence: Synthetic peptide
  Seed: SPGMMMGMFNMLSTV
SPGLMMTMYNMMSTV

SEQ ID NO: 199278 - protein, 15 aa, Artificial Sequence
  Description of Artificial Sequence: Synthetic peptide
  Seed: SPGMMMGMFNMLSTV
SPGLMMTMYNMVSTV

SEQ ID NO: 199279 - protein, 15 aa, Artificial Sequence
  Description of Artificial Sequence: Synthetic peptide
  Seed: SPGMMMGMFNMLSTV
SPGLMMVMANMASTV

SEQ ID NO: 199280 - protein, 15 aa, Artificial Sequence
  Description of Artificial Sequence: Synthetic peptide
  Seed: SPGMMMGMFNMLSTV
SPGLMMVMANMISTV

SEQ ID NO: 199281 - protein, 15 aa, Artificial Sequence
  Description of Artificial Sequence: Synthetic peptide
  Seed: SPGMMMGMFNMLSTV
SPGLMMVMANMLSTV

SEQ ID NO: 199282 - protein, 15 aa, Artificial Sequence
  Description of Artificial Sequence: Synthetic peptide
  Seed: SPGMMMGMFNMLSTV
SPGLMMVMANMMSTV

SEQ ID NO: 199283 - protein, 15 aa, Artificial Sequence
  Description of Artificial Sequence: Synthetic peptide
  Seed: SPGMMMGMFNMLSTV
SPGLMMVMANMNSTV

SEQ ID NO: 199284 - protein, 15 aa, Artificial Sequence
  Description of Artificial Sequence: Synthetic peptide
  Seed: SPGMMMGMFNMLSTV
SPGLMMVMANMSSTV

SEQ ID NO: 199285 - protein, 15 aa, Artificial Sequence
  Description of Artificial Sequence: Synthetic peptide
  Seed: SPGMMMGMFNMLSTV
SPGLMMVMANMTSTV

SEQ ID NO: 199286 - protein, 15 aa, Artificial Sequence
  Description of Artificial Sequence: Synthetic peptide
  Seed: SPGMMMGMFNMLSTV
SPGLMMVMANMVSTV

SEQ ID NO: 199287 - protein, 15 aa, Artificial Sequence
  Description of Artificial Sequence: Synthetic peptide
  Seed: SPGMMMGMFNMLSTV
SPGLMMVMANMYSTV

SEQ ID NO: 199288 - protein, 15 aa, Artificial Sequence
  Description of Artificial Sequence: Synthetic peptide
  Seed: SPGMMMGMFNMLSTV
SPGLMMVMFNMDSTV

SEQ ID NO: 199289 - protein, 15 aa, Artificial Sequence
  Description of Artificial Sequence: Synthetic peptide
  Seed: SPGMMMGMFNMLSTV
SPGLMMVMFNMESTV

SEQ ID NO: 199290 - protein, 15 aa, Artificial Sequence
  Description of Artificial Sequence: Synthetic peptide
  Seed: SPGMMMGMFNMLSTV
SPGLMMVMFNMFSTV

SEQ ID NO: 199291 - protein, 15 aa, Artificial Sequence
  Description of Artificial Sequence: Synthetic peptide
  Seed: SPGMMMGMFNMLSTV
SPGLMMVMFNMLSTV

SEQ ID NO: 199292 - protein, 15 aa, Artificial Sequence
  Description of Artificial Sequence: Synthetic peptide
  Seed: SPGMMMGMFNMLSTV
SPGLMMVMFNMNSTV

SEQ ID NO: 199293 - protein, 15 aa, Artificial Sequence
  Description of Artificial Sequence: Synthetic peptide
  Seed: SPGMMMGMFNMLSTV
SPGLMMVMFNMYSTV

SEQ ID NO: 199294 - protein, 15 aa, Artificial Sequence
  Description of Artificial Sequence: Synthetic peptide
  Seed: SPGMMMGMFNMLSTV
SPGLMMVMGNMASTV

SEQ ID NO: 199295 - protein, 15 aa, Artificial Sequence
  Description of Artificial Sequence: Synthetic peptide
  Seed: SPGMMMGMFNMLSTV
SPGLMMVMGNMISTV

SEQ ID NO: 199296 - protein, 15 aa, Artificial Sequence
  Description of Artificial Sequence: Synthetic peptide
  Seed: SPGMMMGMFNMLSTV
SPGLMMVMGNMVSTV

SEQ ID NO: 199297 - protein, 15 aa, Artificial Sequence
  Description of Artificial Sequence: Synthetic peptide
  Seed: SPGMMMGMFNMLSTV
SPGLMMVMHNMASTV

SEQ ID NO: 199298 - protein, 15 aa, Artificial Sequence
  Description of Artificial Sequence: Synthetic peptide
  Seed: SPGMMMGMFNMLSTV
SPGLMMVMHNMISTV

SEQ ID NO: 199299 - protein, 15 aa, Artificial Sequence
  Description of Artificial Sequence: Synthetic peptide
  Seed: SPGMMMGMFNMLSTV
SPGLMMVMHNMSSTV

SEQ ID NO: 199300 - protein, 15 aa, Artificial Sequence
  Description of Artificial Sequence: Synthetic peptide
  Seed: SPGMMMGMFNMLSTV
SPGLMMVMHNMVSTV

SEQ ID NO: 199301 - protein, 15 aa, Artificial Sequence
  Description of Artificial Sequence: Synthetic peptide
  Seed: SPGMMMGMFNMLSTV
SPGLMMVMKNMASTV

SEQ ID NO: 199302 - protein, 15 aa, Artificial Sequence
  Description of Artificial Sequence: Synthetic peptide
  Seed: SPGMMMGMFNMLSTV
SPGLMMVMKNMSSTV

SEQ ID NO: 199303 - protein, 15 aa, Artificial Sequence
  Description of Artificial Sequence: Synthetic peptide
  Seed: SPGMMMGMFNMLSTV
SPGLMMVMKNMVSTV

SEQ ID NO: 199304 - protein, 15 aa, Artificial Sequence
  Description of Artificial Sequence: Synthetic peptide
  Seed: SPGMMMGMFNMLSTV
SPGLMMVMNNMASTV

SEQ ID NO: 199305 - protein, 15 aa, Artificial Sequence
  Description of Artificial Sequence: Synthetic peptide
  Seed: SPGMMMGMFNMLSTV
SPGLMMVMNNMFSTV

SEQ ID NO: 199306 - protein, 15 aa, Artificial Sequence
  Description of Artificial Sequence: Synthetic peptide
  Seed: SPGMMMGMFNMLSTV
SPGLMMVMNNMGSTV

SEQ ID NO: 199307 - protein, 15 aa, Artificial Sequence
  Description of Artificial Sequence: Synthetic peptide
  Seed: SPGMMMGMFNMLSTV
SPGLMMVMNNMISTV

SEQ ID NO: 199308 - protein, 15 aa, Artificial Sequence
  Description of Artificial Sequence: Synthetic peptide
  Seed: SPGMMMGMFNMLSTV
SPGLMMVMNNMLSTV

SEQ ID NO: 199309 - protein, 15 aa, Artificial Sequence
  Description of Artificial Sequence: Synthetic peptide
  Seed: SPGMMMGMFNMLSTV
SPGLMMVMNNMMSTV

SEQ ID NO: 199310 - protein, 15 aa, Artificial Sequence
  Description of Artificial Sequence: Synthetic peptide
  Seed: SPGMMMGMFNMLSTV
SPGLMMVMNNMRSTV

SEQ ID NO: 199311 - protein, 15 aa, Artificial Sequence
  Description of Artificial Sequence: Synthetic peptide
  Seed: SPGMMMGMFNMLSTV
SPGLMMVMNNMSSTV

SEQ ID NO: 199312 - protein, 15 aa, Artificial Sequence
  Description of Artificial Sequence: Synthetic peptide
  Seed: SPGMMMGMFNMLSTV
SPGLMMVMNNMTSTV

SEQ ID NO: 199313 - protein, 15 aa, Artificial Sequence
  Description of Artificial Sequence: Synthetic peptide
  Seed: SPGMMMGMFNMLSTV
SPGLMMVMNNMVSTV

SEQ ID NO: 199314 - protein, 15 aa, Artificial Sequence
  Description of Artificial Sequence: Synthetic peptide
  Seed: SPGMMMGMFNMLSTV
SPGLMMVMNNMYSTV

SEQ ID NO: 199315 - protein, 15 aa, Artificial Sequence
  Description of Artificial Sequence: Synthetic peptide
  Seed: SPGMMMGMFNMLSTV
SPGLMMVMPNMASTV

SEQ ID NO: 199316 - protein, 15 aa, Artificial Sequence
  Description of Artificial Sequence: Synthetic peptide
  Seed: SPGMMMGMFNMLSTV
SPGLMMVMPNMFSTV

SEQ ID NO: 199317 - protein, 15 aa, Artificial Sequence
  Description of Artificial Sequence: Synthetic peptide
  Seed: SPGMMMGMFNMLSTV
SPGLMMVMPNMISTV

SEQ ID NO: 199318 - protein, 15 aa, Artificial Sequence
  Description of Artificial Sequence: Synthetic peptide
  Seed: SPGMMMGMFNMLSTV
SPGLMMVMPNMLSTV

SEQ ID NO: 199319 - protein, 15 aa, Artificial Sequence
  Description of Artificial Sequence: Synthetic peptide
  Seed: SPGMMMGMFNMLSTV
SPGLMMVMPNMMSTV

SEQ ID NO: 199320 - protein, 15 aa, Artificial Sequence
  Description of Artificial Sequence: Synthetic peptide
  Seed: SPGMMMGMFNMLSTV
SPGLMMVMPNMSSTV

SEQ ID NO: 199321 - protein, 15 aa, Artificial Sequence
  Description of Artificial Sequence: Synthetic peptide
  Seed: SPGMMMGMFNMLSTV
SPGLMMVMPNMVSTV

SEQ ID NO: 199322 - protein, 15 aa, Artificial Sequence
  Description of Artificial Sequence: Synthetic peptide
  Seed: SPGMMMGMFNMLSTV
SPGLMMVMPNMYSTV

SEQ ID NO: 199323 - protein, 15 aa, Artificial Sequence
  Description of Artificial Sequence: Synthetic peptide
  Seed: SPGMMMGMFNMLSTV
SPGLMMVMRNMASTV

SEQ ID NO: 199324 - protein, 15 aa, Artificial Sequence
  Description of Artificial Sequence: Synthetic peptide
  Seed: SPGMMMGMFNMLSTV
SPGLMMVMRNMNSTV

SEQ ID NO: 199325 - protein, 15 aa, Artificial Sequence
  Description of Artificial Sequence: Synthetic peptide
  Seed: SPGMMMGMFNMLSTV
SPGLMMVMRNMSSTV

SEQ ID NO: 199326 - protein, 15 aa, Artificial Sequence
  Description of Artificial Sequence: Synthetic peptide
  Seed: SPGMMMGMFNMLSTV
SPGLMMVMSNMASTV

SEQ ID NO: 199327 - protein, 15 aa, Artificial Sequence
  Description of Artificial Sequence: Synthetic peptide
  Seed: SPGMMMGMFNMLSTV
SPGLMMVMSNMISTV

SEQ ID NO: 199328 - protein, 15 aa, Artificial Sequence
  Description of Artificial Sequence: Synthetic peptide
  Seed: SPGMMMGMFNMLSTV
SPGLMMVMSNMLSTV

SEQ ID NO: 199329 - protein, 15 aa, Artificial Sequence
  Description of Artificial Sequence: Synthetic peptide
  Seed: SPGMMMGMFNMLSTV
SPGLMMVMSNMMSTV

SEQ ID NO: 199330 - protein, 15 aa, Artificial Sequence
  Description of Artificial Sequence: Synthetic peptide
  Seed: SPGMMMGMFNMLSTV
SPGLMMVMSNMNSTV

SEQ ID NO: 199331 - protein, 15 aa, Artificial Sequence
  Description of Artificial Sequence: Synthetic peptide
  Seed: SPGMMMGMFNMLSTV
SPGLMMVMSNMSSTV

SEQ ID NO: 199332 - protein, 15 aa, Artificial Sequence
  Description of Artificial Sequence: Synthetic peptide
  Seed: SPGMMMGMFNMLSTV
SPGLMMVMSNMTSTV

SEQ ID NO: 199333 - protein, 15 aa, Artificial Sequence
  Description of Artificial Sequence: Synthetic peptide
  Seed: SPGMMMGMFNMLSTV
SPGLMMVMSNMVSTV

SEQ ID NO: 199334 - protein, 15 aa, Artificial Sequence
  Description of Artificial Sequence: Synthetic peptide
  Seed: SPGMMMGMFNMLSTV
SPGLMMVMSNMYSTV

SEQ ID NO: 199335 - protein, 15 aa, Artificial Sequence
  Description of Artificial Sequence: Synthetic peptide
  Seed: SPGMMMGMFNMLSTV
SPGLMMVMTNMASTV

SEQ ID NO: 199336 - protein, 15 aa, Artificial Sequence
  Description of Artificial Sequence: Synthetic peptide
  Seed: SPGMMMGMFNMLSTV
SPGLMMVMTNMISTV

SEQ ID NO: 199337 - protein, 15 aa, Artificial Sequence
  Description of Artificial Sequence: Synthetic peptide
  Seed: SPGMMMGMFNMLSTV
SPGLMMVMTNMSSTV

SEQ ID NO: 199338 - protein, 15 aa, Artificial Sequence
  Description of Artificial Sequence: Synthetic peptide
  Seed: SPGMMMGMFNMLSTV
SPGLMMVMTNMVSTV

SEQ ID NO: 199339 - protein, 15 aa, Artificial Sequence
  Description of Artificial Sequence: Synthetic peptide
  Seed: SPGMMMGMFNMLSTV
SPGLMMVMYNMFSTV

SEQ ID NO: 199340 - protein, 15 aa, Artificial Sequence
  Description of Artificial Sequence: Synthetic peptide
  Seed: SPGMMMGMFNMLSTV
SPGLMMVMYNMLSTV

SEQ ID NO: 199341 - protein, 15 aa, Artificial Sequence
  Description of Artificial Sequence: Synthetic peptide
  Seed: SPGMMMGMFNMLSTV
SPGLMMVMYNMYSTV

SEQ ID NO: 199342 - protein, 15 aa, Artificial Sequence
  Description of Artificial Sequence: Synthetic peptide
  Seed: SPGMMMGMFNMLSTV
SPGLMMWMANMASTV

SEQ ID NO: 199343 - protein, 15 aa, Artificial Sequence
  Description of Artificial Sequence: Synthetic peptide
  Seed: SPGMMMGMFNMLSTV
SPGLMMWMFNMFSTV

SEQ ID NO: 199344 - protein, 15 aa, Artificial Sequence
  Description of Artificial Sequence: Synthetic peptide
  Seed: SPGMMMGMFNMLSTV
SPGLMMWMFNMISTV

SEQ ID NO: 199345 - protein, 15 aa, Artificial Sequence
  Description of Artificial Sequence: Synthetic peptide
  Seed: SPGMMMGMFNMLSTV
SPGLMMWMFNMLSTV

SEQ ID NO: 199346 - protein, 15 aa, Artificial Sequence
  Description of Artificial Sequence: Synthetic peptide
  Seed: SPGMMMGMFNMLSTV
SPGLMMWMFNMMSTV

SEQ ID NO: 199347 - protein, 15 aa, Artificial Sequence
  Description of Artificial Sequence: Synthetic peptide
  Seed: SPGMMMGMFNMLSTV
SPGLMMWMFNMVSTV

SEQ ID NO: 199348 - protein, 15 aa, Artificial Sequence
  Description of Artificial Sequence: Synthetic peptide
  Seed: SPGMMMGMFNMLSTV
SPGLMMWMFNMYSTV

SEQ ID NO: 199349 - protein, 15 aa, Artificial Sequence
  Description of Artificial Sequence: Synthetic peptide
  Seed: SPGMMMGMFNMLSTV
SPGLMMWMLNMFSTV

SEQ ID NO: 199350 - protein, 15 aa, Artificial Sequence
  Description of Artificial Sequence: Synthetic peptide
  Seed: SPGMMMGMFNMLSTV
SPGLMMWMNNMASTV

SEQ ID NO: 199351 - protein, 15 aa, Artificial Sequence
  Description of Artificial Sequence: Synthetic peptide
  Seed: SPGMMMGMFNMLSTV
SPGLMMWMNNMISTV

SEQ ID NO: 199352 - protein, 15 aa, Artificial Sequence
  Description of Artificial Sequence: Synthetic peptide
  Seed: SPGMMMGMFNMLSTV
SPGLMMWMNNMLSTV

SEQ ID NO: 199353 - protein, 15 aa, Artificial Sequence
  Description of Artificial Sequence: Synthetic peptide
  Seed: SPGMMMGMFNMLSTV
SPGLMMWMNNMMSTV

SEQ ID NO: 199354 - protein, 15 aa, Artificial Sequence
  Description of Artificial Sequence: Synthetic peptide
  Seed: SPGMMMGMFNMLSTV
SPGLMMWMNNMVSTV

SEQ ID NO: 199355 - protein, 15 aa, Artificial Sequence
  Description of Artificial Sequence: Synthetic peptide
  Seed: SPGMMMGMFNMLSTV
SPGLMMWMPNMISTV

SEQ ID NO: 199356 - protein, 15 aa, Artificial Sequence
  Description of Artificial Sequence: Synthetic peptide
  Seed: SPGMMMGMFNMLSTV
SPGLMMWMWNMLSTV

SEQ ID NO: 199357 - protein, 15 aa, Artificial Sequence
  Description of Artificial Sequence: Synthetic peptide
  Seed: SPGMMMGMFNMLSTV
SPGLMMWMYNMISTV

SEQ ID NO: 199358 - protein, 15 aa, Artificial Sequence
  Description of Artificial Sequence: Synthetic peptide
  Seed: SPGMMMGMFNMLSTV
SPGLMMWMYNMLSTV

SEQ ID NO: 199359 - protein, 15 aa, Artificial Sequence
  Description of Artificial Sequence: Synthetic peptide
  Seed: SPGMMMGMFNMLSTV
SPGLMMWMYNMYSTV

SEQ ID NO: 199360 - protein, 15 aa, Artificial Sequence
  Description of Artificial Sequence: Synthetic peptide
  Seed: SPGMMMGMFNMLSTV
SPGLMMYMANMASTV

SEQ ID NO: 199361 - protein, 15 aa, Artificial Sequence
  Description of Artificial Sequence: Synthetic peptide
  Seed: SPGMMMGMFNMLSTV
SPGLMMYMANMSSTV

SEQ ID NO: 199362 - protein, 15 aa, Artificial Sequence
  Description of Artificial Sequence: Synthetic peptide
  Seed: SPGMMMGMFNMLSTV
SPGLMMYMANMVSTV

SEQ ID NO: 199363 - protein, 15 aa, Artificial Sequence
  Description of Artificial Sequence: Synthetic peptide
  Seed: SPGMMMGMFNMLSTV
SPGLMMYMFNMLSTV

SEQ ID NO: 199364 - protein, 15 aa, Artificial Sequence
  Description of Artificial Sequence: Synthetic peptide
  Seed: SPGMMMGMFNMLSTV
SPGLMMYMFNMYSTV

SEQ ID NO: 199365 - protein, 15 aa, Artificial Sequence
  Description of Artificial Sequence: Synthetic peptide
  Seed: SPGMMMGMFNMLSTV
SPGLMMYMHNMASTV

SEQ ID NO: 199366 - protein, 15 aa, Artificial Sequence
  Description of Artificial Sequence: Synthetic peptide
  Seed: SPGMMMGMFNMLSTV
SPGLMMYMNNMASTV

SEQ ID NO: 199367 - protein, 15 aa, Artificial Sequence
  Description of Artificial Sequence: Synthetic peptide
  Seed: SPGMMMGMFNMLSTV
SPGLMMYMNNMFSTV

SEQ ID NO: 199368 - protein, 15 aa, Artificial Sequence
  Description of Artificial Sequence: Synthetic peptide
  Seed: SPGMMMGMFNMLSTV
SPGLMMYMNNMISTV

SEQ ID NO: 199369 - protein, 15 aa, Artificial Sequence
  Description of Artificial Sequence: Synthetic peptide
  Seed: SPGMMMGMFNMLSTV
SPGLMMYMNNMLSTV

SEQ ID NO: 199370 - protein, 15 aa, Artificial Sequence
  Description of Artificial Sequence: Synthetic peptide
  Seed: SPGMMMGMFNMLSTV
SPGLMMYMNNMMSTV

SEQ ID NO: 199371 - protein, 15 aa, Artificial Sequence
  Description of Artificial Sequence: Synthetic peptide
  Seed: SPGMMMGMFNMLSTV
SPGLMMYMNNMVSTV

SEQ ID NO: 199372 - protein, 15 aa, Artificial Sequence
  Description of Artificial Sequence: Synthetic peptide
  Seed: SPGMMMGMFNMLSTV
SPGLMMYMNNMYSTV

SEQ ID NO: 199373 - protein, 15 aa, Artificial Sequence
  Description of Artificial Sequence: Synthetic peptide
  Seed: SPGMMMGMFNMLSTV
SPGLMMYMRNMASTV

SEQ ID NO: 199374 - protein, 15 aa, Artificial Sequence
  Description of Artificial Sequence: Synthetic peptide
  Seed: SPGMMMGMFNMLSTV
SPGLMMYMSNMASTV

SEQ ID NO: 199375 - protein, 15 aa, Artificial Sequence
  Description of Artificial Sequence: Synthetic peptide
  Seed: SPGMMMGMFNMLSTV
SPGLMMYMYNMISTV

SEQ ID NO: 199376 - protein, 15 aa, Artificial Sequence
  Description of Artificial Sequence: Synthetic peptide
  Seed: SPGMMMGMFNMLSTV
SPGLMMYMYNMLSTV

SEQ ID NO: 199377 - protein, 15 aa, Artificial Sequence
  Description of Artificial Sequence: Synthetic peptide
  Seed: SPGMMMGMFNMLSTV
SPGLMMYMYNMMSTV

SEQ ID NO: 199378 - protein, 15 aa, Artificial Sequence
  Description of Artificial Sequence: Synthetic peptide
  Seed: SPGMMMGMFNMLSTV
SPGMMMAMANMASTV

SEQ ID NO: 199379 - protein, 15 aa, Artificial Sequence
  Description of Artificial Sequence: Synthetic peptide
  Seed: SPGMMMGMFNMLSTV
SPGMMMAMANMFSTV

SEQ ID NO: 199380 - protein, 15 aa, Artificial Sequence
  Description of Artificial Sequence: Synthetic peptide
  Seed: SPGMMMGMFNMLSTV
SPGMMMAMANMISTV

SEQ ID NO: 199381 - protein, 15 aa, Artificial Sequence
  Description of Artificial Sequence: Synthetic peptide
  Seed: SPGMMMGMFNMLSTV
SPGMMMAMANMLSTV

SEQ ID NO: 199382 - protein, 15 aa, Artificial Sequence
  Description of Artificial Sequence: Synthetic peptide
  Seed: SPGMMMGMFNMLSTV
SPGMMMAMANMMSTV

SEQ ID NO: 199383 - protein, 15 aa, Artificial Sequence
  Description of Artificial Sequence: Synthetic peptide
  Seed: SPGMMMGMFNMLSTV
SPGMMMAMANMSSTV

SEQ ID NO: 199384 - protein, 15 aa, Artificial Sequence
  Description of Artificial Sequence: Synthetic peptide
  Seed: SPGMMMGMFNMLSTV
SPGMMMAMANMTSTV

SEQ ID NO: 199385 - protein, 15 aa, Artificial Sequence
  Description of Artificial Sequence: Synthetic peptide
  Seed: SPGMMMGMFNMLSTV
SPGMMMAMANMVSTV

SEQ ID NO: 199386 - protein, 15 aa, Artificial Sequence
  Description of Artificial Sequence: Synthetic peptide
  Seed: SPGMMMGMFNMLSTV
SPGMMMAMANMYSTV

SEQ ID NO: 199387 - protein, 15 aa, Artificial Sequence
  Description of Artificial Sequence: Synthetic peptide
  Seed: SPGMMMGMFNMLSTV
SPGMMMAMFNMFSTV

SEQ ID NO: 199388 - protein, 15 aa, Artificial Sequence
  Description of Artificial Sequence: Synthetic peptide
  Seed: SPGMMMGMFNMLSTV
SPGMMMAMFNMISTV

SEQ ID NO: 199389 - protein, 15 aa, Artificial Sequence
  Description of Artificial Sequence: Synthetic peptide
  Seed: SPGMMMGMFNMLSTV
SPGMMMAMFNMLSTV

SEQ ID NO: 199390 - protein, 15 aa, Artificial Sequence
  Description of Artificial Sequence: Synthetic peptide
  Seed: SPGMMMGMFNMLSTV
SPGMMMAMFNMMSTV

SEQ ID NO: 199391 - protein, 15 aa, Artificial Sequence
  Description of Artificial Sequence: Synthetic peptide
  Seed: SPGMMMGMFNMLSTV
SPGMMMAMFNMVSTV

SEQ ID NO: 199392 - protein, 15 aa, Artificial Sequence
  Description of Artificial Sequence: Synthetic peptide
  Seed: SPGMMMGMFNMLSTV
SPGMMMAMFNMYSTV

SEQ ID NO: 199393 - protein, 15 aa, Artificial Sequence
  Description of Artificial Sequence: Synthetic peptide
  Seed: SPGMMMGMFNMLSTV
SPGMMMAMGNMASTV

SEQ ID NO: 199394 - protein, 15 aa, Artificial Sequence
  Description of Artificial Sequence: Synthetic peptide
  Seed: SPGMMMGMFNMLSTV
SPGMMMAMGNMISTV

SEQ ID NO: 199395 - protein, 15 aa, Artificial Sequence
  Description of Artificial Sequence: Synthetic peptide
  Seed: SPGMMMGMFNMLSTV
SPGMMMAMGNMLSTV

SEQ ID NO: 199396 - protein, 15 aa, Artificial Sequence
  Description of Artificial Sequence: Synthetic peptide
  Seed: SPGMMMGMFNMLSTV
SPGMMMAMGNMMSTV

SEQ ID NO: 199397 - protein, 15 aa, Artificial Sequence
  Description of Artificial Sequence: Synthetic peptide
  Seed: SPGMMMGMFNMLSTV
SPGMMMAMGNMVSTV

SEQ ID NO: 199398 - protein, 15 aa, Artificial Sequence
  Description of Artificial Sequence: Synthetic peptide
  Seed: SPGMMMGMFNMLSTV
SPGMMMAMNNMFSTV

SEQ ID NO: 199399 - protein, 15 aa, Artificial Sequence
  Description of Artificial Sequence: Synthetic peptide
  Seed: SPGMMMGMFNMLSTV
SPGMMMAMNNMISTV

SEQ ID NO: 199400 - protein, 15 aa, Artificial Sequence
  Description of Artificial Sequence: Synthetic peptide
  Seed: SPGMMMGMFNMLSTV
SPGMMMAMNNMLSTV

SEQ ID NO: 199401 - protein, 15 aa, Artificial Sequence
  Description of Artificial Sequence: Synthetic peptide
  Seed: SPGMMMGMFNMLSTV
SPGMMMAMNNMMSTV

SEQ ID NO: 199402 - protein, 15 aa, Artificial Sequence
  Description of Artificial Sequence: Synthetic peptide
  Seed: SPGMMMGMFNMLSTV
SPGMMMAMNNMVSTV

SEQ ID NO: 199403 - protein, 15 aa, Artificial Sequence
  Description of Artificial Sequence: Synthetic peptide
  Seed: SPGMMMGMFNMLSTV
SPGMMMAMNNMYSTV

SEQ ID NO: 199404 - protein, 15 aa, Artificial Sequence
  Description of Artificial Sequence: Synthetic peptide
  Seed: SPGMMMGMFNMLSTV
SPGMMMAMPNMASTV

SEQ ID NO: 199405 - protein, 15 aa, Artificial Sequence
  Description of Artificial Sequence: Synthetic peptide
  Seed: SPGMMMGMFNMLSTV
SPGMMMAMPNMFSTV

SEQ ID NO: 199406 - protein, 15 aa, Artificial Sequence
  Description of Artificial Sequence: Synthetic peptide
  Seed: SPGMMMGMFNMLSTV
SPGMMMAMPNMISTV

SEQ ID NO: 199407 - protein, 15 aa, Artificial Sequence
  Description of Artificial Sequence: Synthetic peptide
  Seed: SPGMMMGMFNMLSTV
SPGMMMAMPNMLSTV

SEQ ID NO: 199408 - protein, 15 aa, Artificial Sequence
  Description of Artificial Sequence: Synthetic peptide
  Seed: SPGMMMGMFNMLSTV
SPGMMMAMPNMMSTV

SEQ ID NO: 199409 - protein, 15 aa, Artificial Sequence
  Description of Artificial Sequence: Synthetic peptide
  Seed: SPGMMMGMFNMLSTV
SPGMMMAMPNMVSTV

SEQ ID NO: 199410 - protein, 15 aa, Artificial Sequence
  Description of Artificial Sequence: Synthetic peptide
  Seed: SPGMMMGMFNMLSTV
SPGMMMAMSNMASTV

SEQ ID NO: 199411 - protein, 15 aa, Artificial Sequence
  Description of Artificial Sequence: Synthetic peptide
  Seed: SPGMMMGMFNMLSTV
SPGMMMAMSNMFSTV

SEQ ID NO: 199412 - protein, 15 aa, Artificial Sequence
  Description of Artificial Sequence: Synthetic peptide
  Seed: SPGMMMGMFNMLSTV
SPGMMMAMSNMISTV

SEQ ID NO: 199413 - protein, 15 aa, Artificial Sequence
  Description of Artificial Sequence: Synthetic peptide
  Seed: SPGMMMGMFNMLSTV
SPGMMMAMSNMLSTV

SEQ ID NO: 199414 - protein, 15 aa, Artificial Sequence
  Description of Artificial Sequence: Synthetic peptide
  Seed: SPGMMMGMFNMLSTV
SPGMMMAMSNMMSTV

SEQ ID NO: 199415 - protein, 15 aa, Artificial Sequence
  Description of Artificial Sequence: Synthetic peptide
  Seed: SPGMMMGMFNMLSTV
SPGMMMAMSNMSSTV

SEQ ID NO: 199416 - protein, 15 aa, Artificial Sequence
  Description of Artificial Sequence: Synthetic peptide
  Seed: SPGMMMGMFNMLSTV
SPGMMMAMSNMTSTV

SEQ ID NO: 199417 - protein, 15 aa, Artificial Sequence
  Description of Artificial Sequence: Synthetic peptide
  Seed: SPGMMMGMFNMLSTV
SPGMMMAMSNMVSTV

SEQ ID NO: 199418 - protein, 15 aa, Artificial Sequence
  Description of Artificial Sequence: Synthetic peptide
  Seed: SPGMMMGMFNMLSTV
SPGMMMAMTNMISTV

SEQ ID NO: 199419 - protein, 15 aa, Artificial Sequence
  Description of Artificial Sequence: Synthetic peptide
  Seed: SPGMMMGMFNMLSTV
SPGMMMAMTNMLSTV

SEQ ID NO: 199420 - protein, 15 aa, Artificial Sequence
  Description of Artificial Sequence: Synthetic peptide
  Seed: SPGMMMGMFNMLSTV
SPGMMMAMTNMMSTV

SEQ ID NO: 199421 - protein, 15 aa, Artificial Sequence
  Description of Artificial Sequence: Synthetic peptide
  Seed: SPGMMMGMFNMLSTV
SPGMMMAMTNMVSTV

SEQ ID NO: 199422 - protein, 15 aa, Artificial Sequence
  Description of Artificial Sequence: Synthetic peptide
  Seed: SPGMMMGMFNMLSTV
SPGMMMAMYNMLSTV

SEQ ID NO: 199423 - protein, 15 aa, Artificial Sequence
  Description of Artificial Sequence: Synthetic peptide
  Seed: SPGMMMGMFNMLSTV
SPGMMMDMANMFSTV

SEQ ID NO: 199424 - protein, 15 aa, Artificial Sequence
  Description of Artificial Sequence: Synthetic peptide
  Seed: SPGMMMGMFNMLSTV
SPGMMMDMANMISTV

SEQ ID NO: 199425 - protein, 15 aa, Artificial Sequence
  Description of Artificial Sequence: Synthetic peptide
  Seed: SPGMMMGMFNMLSTV
SPGMMMDMANMLSTV

SEQ ID NO: 199426 - protein, 15 aa, Artificial Sequence
  Description of Artificial Sequence: Synthetic peptide
  Seed: SPGMMMGMFNMLSTV
SPGMMMDMANMMSTV

SEQ ID NO: 199427 - protein, 15 aa, Artificial Sequence
  Description of Artificial Sequence: Synthetic peptide
  Seed: SPGMMMGMFNMLSTV
SPGMMMDMANMVSTV

SEQ ID NO: 199428 - protein, 15 aa, Artificial Sequence
  Description of Artificial Sequence: Synthetic peptide
  Seed: SPGMMMGMFNMLSTV
SPGMMMDMANMYSTV

SEQ ID NO: 199429 - protein, 15 aa, Artificial Sequence
  Description of Artificial Sequence: Synthetic peptide
  Seed: SPGMMMGMFNMLSTV
SPGMMMDMFNMLSTV

SEQ ID NO: 199430 - protein, 15 aa, Artificial Sequence
  Description of Artificial Sequence: Synthetic peptide
  Seed: SPGMMMGMFNMLSTV
SPGMMMDMGNMISTV

SEQ ID NO: 199431 - protein, 15 aa, Artificial Sequence
  Description of Artificial Sequence: Synthetic peptide
  Seed: SPGMMMGMFNMLSTV
SPGMMMDMGNMVSTV

SEQ ID NO: 199432 - protein, 15 aa, Artificial Sequence
  Description of Artificial Sequence: Synthetic peptide
  Seed: SPGMMMGMFNMLSTV
SPGMMMDMNNMISTV

SEQ ID NO: 199433 - protein, 15 aa, Artificial Sequence
  Description of Artificial Sequence: Synthetic peptide
  Seed: SPGMMMGMFNMLSTV
SPGMMMDMNNMLSTV

SEQ ID NO: 199434 - protein, 15 aa, Artificial Sequence
  Description of Artificial Sequence: Synthetic peptide
  Seed: SPGMMMGMFNMLSTV
SPGMMMDMNNMVSTV

SEQ ID NO: 199435 - protein, 15 aa, Artificial Sequence
  Description of Artificial Sequence: Synthetic peptide
  Seed: SPGMMMGMFNMLSTV
SPGMMMDMPNMISTV

SEQ ID NO: 199436 - protein, 15 aa, Artificial Sequence
  Description of Artificial Sequence: Synthetic peptide
  Seed: SPGMMMGMFNMLSTV
SPGMMMDMPNMVSTV

SEQ ID NO: 199437 - protein, 15 aa, Artificial Sequence
  Description of Artificial Sequence: Synthetic peptide
  Seed: SPGMMMGMFNMLSTV
SPGMMMDMSNMISTV

SEQ ID NO: 199438 - protein, 15 aa, Artificial Sequence
  Description of Artificial Sequence: Synthetic peptide
  Seed: SPGMMMGMFNMLSTV
SPGMMMDMSNMLSTV

SEQ ID NO: 199439 - protein, 15 aa, Artificial Sequence
  Description of Artificial Sequence: Synthetic peptide
  Seed: SPGMMMGMFNMLSTV
SPGMMMDMSNMVSTV

SEQ ID NO: 199440 - protein, 15 aa, Artificial Sequence
  Description of Artificial Sequence: Synthetic peptide
  Seed: SPGMMMGMFNMLSTV
SPGMMMDMTNMISTV

SEQ ID NO: 199441 - protein, 15 aa, Artificial Sequence
  Description of Artificial Sequence: Synthetic peptide
  Seed: SPGMMMGMFNMLSTV
SPGMMMDMTNMVSTV

SEQ ID NO: 199442 - protein, 15 aa, Artificial Sequence
  Description of Artificial Sequence: Synthetic peptide
  Seed: SPGMMMGMFNMLSTV
SPGMMMDMVNMISTV

SEQ ID NO: 199443 - protein, 15 aa, Artificial Sequence
  Description of Artificial Sequence: Synthetic peptide
  Seed: SPGMMMGMFNMLSTV
SPGMMMDMVNMVSTV

SEQ ID NO: 199444 - protein, 15 aa, Artificial Sequence
  Description of Artificial Sequence: Synthetic peptide
  Seed: SPGMMMGMFNMLSTV
SPGMMMEMFNMASTV

SEQ ID NO: 199445 - protein, 15 aa, Artificial Sequence
  Description of Artificial Sequence: Synthetic peptide
  Seed: SPGMMMGMFNMLSTV
SPGMMMEMFNMFSTV

SEQ ID NO: 199446 - protein, 15 aa, Artificial Sequence
  Description of Artificial Sequence: Synthetic peptide
  Seed: SPGMMMGMFNMLSTV
SPGMMMEMFNMISTV

SEQ ID NO: 199447 - protein, 15 aa, Artificial Sequence
  Description of Artificial Sequence: Synthetic peptide
  Seed: SPGMMMGMFNMLSTV
SPGMMMEMFNMLSTV

SEQ ID NO: 199448 - protein, 15 aa, Artificial Sequence
  Description of Artificial Sequence: Synthetic peptide
  Seed: SPGMMMGMFNMLSTV
SPGMMMEMFNMMSTV

SEQ ID NO: 199449 - protein, 15 aa, Artificial Sequence
  Description of Artificial Sequence: Synthetic peptide
  Seed: SPGMMMGMFNMLSTV
SPGMMMEMFNMVSTV

SEQ ID NO: 199450 - protein, 15 aa, Artificial Sequence
  Description of Artificial Sequence: Synthetic peptide
  Seed: SPGMMMGMFNMLSTV
SPGMMMEMFNMYSTV

SEQ ID NO: 199451 - protein, 15 aa, Artificial Sequence
  Description of Artificial Sequence: Synthetic peptide
  Seed: SPGMMMGMFNMLSTV
SPGMMMEMYNMLSTV

SEQ ID NO: 199452 - protein, 15 aa, Artificial Sequence
  Description of Artificial Sequence: Synthetic peptide
  Seed: SPGMMMGMFNMLSTV
SPGMMMFMANMASTV

SEQ ID NO: 199453 - protein, 15 aa, Artificial Sequence
  Description of Artificial Sequence: Synthetic peptide
  Seed: SPGMMMGMFNMLSTV
SPGMMMFMANMISTV

SEQ ID NO: 199454 - protein, 15 aa, Artificial Sequence
  Description of Artificial Sequence: Synthetic peptide
  Seed: SPGMMMGMFNMLSTV
SPGMMMFMANMVSTV

SEQ ID NO: 199455 - protein, 15 aa, Artificial Sequence
  Description of Artificial Sequence: Synthetic peptide
  Seed: SPGMMMGMFNMLSTV
SPGMMMFMFNMISTV

SEQ ID NO: 199456 - protein, 15 aa, Artificial Sequence
  Description of Artificial Sequence: Synthetic peptide
  Seed: SPGMMMGMFNMLSTV
SPGMMMFMFNMLSTV

SEQ ID NO: 199457 - protein, 15 aa, Artificial Sequence
  Description of Artificial Sequence: Synthetic peptide
  Seed: SPGMMMGMFNMLSTV
SPGMMMFMFNMMSTV

SEQ ID NO: 199458 - protein, 15 aa, Artificial Sequence
  Description of Artificial Sequence: Synthetic peptide
  Seed: SPGMMMGMFNMLSTV
SPGMMMFMFNMVSTV

SEQ ID NO: 199459 - protein, 15 aa, Artificial Sequence
  Description of Artificial Sequence: Synthetic peptide
  Seed: SPGMMMGMFNMLSTV
SPGMMMFMFNMYSTV

SEQ ID NO: 199460 - protein, 15 aa, Artificial Sequence
  Description of Artificial Sequence: Synthetic peptide
  Seed: SPGMMMGMFNMLSTV
SPGMMMFMKNMASTV

SEQ ID NO: 199461 - protein, 15 aa, Artificial Sequence
  Description of Artificial Sequence: Synthetic peptide
  Seed: SPGMMMGMFNMLSTV
SPGMMMFMKNMSSTV

SEQ ID NO: 199462 - protein, 15 aa, Artificial Sequence
  Description of Artificial Sequence: Synthetic peptide
  Seed: SPGMMMGMFNMLSTV
SPGMMMFMLNMYSTV

SEQ ID NO: 199463 - protein, 15 aa, Artificial Sequence
  Description of Artificial Sequence: Synthetic peptide
  Seed: SPGMMMGMFNMLSTV
SPGMMMFMNNMASTV

SEQ ID NO: 199464 - protein, 15 aa, Artificial Sequence
  Description of Artificial Sequence: Synthetic peptide
  Seed: SPGMMMGMFNMLSTV
SPGMMMFMNNMISTV

SEQ ID NO: 199465 - protein, 15 aa, Artificial Sequence
  Description of Artificial Sequence: Synthetic peptide
  Seed: SPGMMMGMFNMLSTV
SPGMMMFMNNMLSTV

SEQ ID NO: 199466 - protein, 15 aa, Artificial Sequence
  Description of Artificial Sequence: Synthetic peptide
  Seed: SPGMMMGMFNMLSTV
SPGMMMFMNNMMSTV

SEQ ID NO: 199467 - protein, 15 aa, Artificial Sequence
  Description of Artificial Sequence: Synthetic peptide
  Seed: SPGMMMGMFNMLSTV
SPGMMMFMNNMSSTV

SEQ ID NO: 199468 - protein, 15 aa, Artificial Sequence
  Description of Artificial Sequence: Synthetic peptide
  Seed: SPGMMMGMFNMLSTV
SPGMMMFMNNMVSTV

SEQ ID NO: 199469 - protein, 15 aa, Artificial Sequence
  Description of Artificial Sequence: Synthetic peptide
  Seed: SPGMMMGMFNMLSTV
SPGMMMFMPNMISTV

SEQ ID NO: 199470 - protein, 15 aa, Artificial Sequence
  Description of Artificial Sequence: Synthetic peptide
  Seed: SPGMMMGMFNMLSTV
SPGMMMFMPNMVSTV

SEQ ID NO: 199471 - protein, 15 aa, Artificial Sequence
  Description of Artificial Sequence: Synthetic peptide
  Seed: SPGMMMGMFNMLSTV
SPGMMMFMRNMASTV

SEQ ID NO: 199472 - protein, 15 aa, Artificial Sequence
  Description of Artificial Sequence: Synthetic peptide
  Seed: SPGMMMGMFNMLSTV
SPGMMMFMRNMGSTV

SEQ ID NO: 199473 - protein, 15 aa, Artificial Sequence
  Description of Artificial Sequence: Synthetic peptide
  Seed: SPGMMMGMFNMLSTV
SPGMMMFMRNMISTV

SEQ ID NO: 199474 - protein, 15 aa, Artificial Sequence
  Description of Artificial Sequence: Synthetic peptide
  Seed: SPGMMMGMFNMLSTV
SPGMMMFMRNMSSTV

SEQ ID NO: 199475 - protein, 15 aa, Artificial Sequence
  Description of Artificial Sequence: Synthetic peptide
  Seed: SPGMMMGMFNMLSTV
SPGMMMFMRNMTSTV

SEQ ID NO: 199476 - protein, 15 aa, Artificial Sequence
  Description of Artificial Sequence: Synthetic peptide
  Seed: SPGMMMGMFNMLSTV
SPGMMMFMRNMVSTV

SEQ ID NO: 199477 - protein, 15 aa, Artificial Sequence
  Description of Artificial Sequence: Synthetic peptide
  Seed: SPGMMMGMFNMLSTV
SPGMMMFMSNMASTV

SEQ ID NO: 199478 - protein, 15 aa, Artificial Sequence
  Description of Artificial Sequence: Synthetic peptide
  Seed: SPGMMMGMFNMLSTV
SPGMMMFMSNMISTV

SEQ ID NO: 199479 - protein, 15 aa, Artificial Sequence
  Description of Artificial Sequence: Synthetic peptide
  Seed: SPGMMMGMFNMLSTV
SPGMMMFMSNMVSTV

SEQ ID NO: 199480 - protein, 15 aa, Artificial Sequence
  Description of Artificial Sequence: Synthetic peptide
  Seed: SPGMMMGMFNMLSTV
SPGMMMFMWNMISTV

SEQ ID NO: 199481 - protein, 15 aa, Artificial Sequence
  Description of Artificial Sequence: Synthetic peptide
  Seed: SPGMMMGMFNMLSTV
SPGMMMFMWNMLSTV

SEQ ID NO: 199482 - protein, 15 aa, Artificial Sequence
  Description of Artificial Sequence: Synthetic peptide
  Seed: SPGMMMGMFNMLSTV
SPGMMMFMWNMMSTV

SEQ ID NO: 199483 - protein, 15 aa, Artificial Sequence
  Description of Artificial Sequence: Synthetic peptide
  Seed: SPGMMMGMFNMLSTV
SPGMMMFMWNMVSTV

SEQ ID NO: 199484 - protein, 15 aa, Artificial Sequence
  Description of Artificial Sequence: Synthetic peptide
  Seed: SPGMMMGMFNMLSTV
SPGMMMFMYNMFSTV

SEQ ID NO: 199485 - protein, 15 aa, Artificial Sequence
  Description of Artificial Sequence: Synthetic peptide
  Seed: SPGMMMGMFNMLSTV
SPGMMMFMYNMISTV

SEQ ID NO: 199486 - protein, 15 aa, Artificial Sequence
  Description of Artificial Sequence: Synthetic peptide
  Seed: SPGMMMGMFNMLSTV
SPGMMMFMYNMLSTV

SEQ ID NO: 199487 - protein, 15 aa, Artificial Sequence
  Description of Artificial Sequence: Synthetic peptide
  Seed: SPGMMMGMFNMLSTV
SPGMMMFMYNMMSTV

SEQ ID NO: 199488 - protein, 15 aa, Artificial Sequence
  Description of Artificial Sequence: Synthetic peptide
  Seed: SPGMMMGMFNMLSTV
SPGMMMFMYNMVSTV

SEQ ID NO: 199489 - protein, 15 aa, Artificial Sequence
  Description of Artificial Sequence: Synthetic peptide
  Seed: SPGMMMGMFNMLSTV
SPGMMMGMANMASTV

SEQ ID NO: 199490 - protein, 15 aa, Artificial Sequence
  Description of Artificial Sequence: Synthetic peptide
  Seed: SPGMMMGMFNMLSTV
SPGMMMGMANMISTV

SEQ ID NO: 199491 - protein, 15 aa, Artificial Sequence
  Description of Artificial Sequence: Synthetic peptide
  Seed: SPGMMMGMFNMLSTV
SPGMMMGMANMLSTV

SEQ ID NO: 199492 - protein, 15 aa, Artificial Sequence
  Description of Artificial Sequence: Synthetic peptide
  Seed: SPGMMMGMFNMLSTV
SPGMMMGMANMMSTV

SEQ ID NO: 199493 - protein, 15 aa, Artificial Sequence
  Description of Artificial Sequence: Synthetic peptide
  Seed: SPGMMMGMFNMLSTV
SPGMMMGMANMSSTV

SEQ ID NO: 199494 - protein, 15 aa, Artificial Sequence
  Description of Artificial Sequence: Synthetic peptide
  Seed: SPGMMMGMFNMLSTV
SPGMMMGMANMTSTV

SEQ ID NO: 199495 - protein, 15 aa, Artificial Sequence
  Description of Artificial Sequence: Synthetic peptide
  Seed: SPGMMMGMFNMLSTV
SPGMMMGMANMVSTV

SEQ ID NO: 199496 - protein, 15 aa, Artificial Sequence
  Description of Artificial Sequence: Synthetic peptide
  Seed: SPGMMMGMFNMLSTV
SPGMMMGMSNMISTV

SEQ ID NO: 199497 - protein, 15 aa, Artificial Sequence
  Description of Artificial Sequence: Synthetic peptide
  Seed: SPGMMMGMFNMLSTV
SPGMMMGMSNMLSTV

SEQ ID NO: 199498 - protein, 15 aa, Artificial Sequence
  Description of Artificial Sequence: Synthetic peptide
  Seed: SPGMMMGMFNMLSTV
SPGMMMGMSNMVSTV

SEQ ID NO: 199499 - protein, 15 aa, Artificial Sequence
  Description of Artificial Sequence: Synthetic peptide
  Seed: SPGMMMGMFNMLSTV
SPGMMMHMANMFSTV

SEQ ID NO: 199500 - protein, 15 aa, Artificial Sequence
  Description of Artificial Sequence: Synthetic peptide
  Seed: SPGMMMGMFNMLSTV
SPGMMMHMANMISTV

SEQ ID NO: 199501 - protein, 15 aa, Artificial Sequence
  Description of Artificial Sequence: Synthetic peptide
  Seed: SPGMMMGMFNMLSTV
SPGMMMHMANMLSTV

SEQ ID NO: 199502 - protein, 15 aa, Artificial Sequence
  Description of Artificial Sequence: Synthetic peptide
  Seed: SPGMMMGMFNMLSTV
SPGMMMHMANMVSTV

SEQ ID NO: 199503 - protein, 15 aa, Artificial Sequence
  Description of Artificial Sequence: Synthetic peptide
  Seed: SPGMMMGMFNMLSTV
SPGMMMHMFNMASTV

SEQ ID NO: 199504 - protein, 15 aa, Artificial Sequence
  Description of Artificial Sequence: Synthetic peptide
  Seed: SPGMMMGMFNMLSTV
SPGMMMHMFNMESTV

SEQ ID NO: 199505 - protein, 15 aa, Artificial Sequence
  Description of Artificial Sequence: Synthetic peptide
  Seed: SPGMMMGMFNMLSTV
SPGMMMHMFNMFSTV

SEQ ID NO: 199506 - protein, 15 aa, Artificial Sequence
  Description of Artificial Sequence: Synthetic peptide
  Seed: SPGMMMGMFNMLSTV
SPGMMMHMFNMISTV

SEQ ID NO: 199507 - protein, 15 aa, Artificial Sequence
  Description of Artificial Sequence: Synthetic peptide
  Seed: SPGMMMGMFNMLSTV
SPGMMMHMFNMLSTV

SEQ ID NO: 199508 - protein, 15 aa, Artificial Sequence
  Description of Artificial Sequence: Synthetic peptide
  Seed: SPGMMMGMFNMLSTV
SPGMMMHMFNMMSTV

SEQ ID NO: 199509 - protein, 15 aa, Artificial Sequence
  Description of Artificial Sequence: Synthetic peptide
  Seed: SPGMMMGMFNMLSTV
SPGMMMHMFNMVSTV

SEQ ID NO: 199510 - protein, 15 aa, Artificial Sequence
  Description of Artificial Sequence: Synthetic peptide
  Seed: SPGMMMGMFNMLSTV
SPGMMMHMFNMYSTV

SEQ ID NO: 199511 - protein, 15 aa, Artificial Sequence
  Description of Artificial Sequence: Synthetic peptide
  Seed: SPGMMMGMFNMLSTV
SPGMMMHMGNMISTV

SEQ ID NO: 199512 - protein, 15 aa, Artificial Sequence
  Description of Artificial Sequence: Synthetic peptide
  Seed: SPGMMMGMFNMLSTV
SPGMMMHMGNMVSTV

SEQ ID NO: 199513 - protein, 15 aa, Artificial Sequence
  Description of Artificial Sequence: Synthetic peptide
  Seed: SPGMMMGMFNMLSTV
SPGMMMHMLNMFSTV

SEQ ID NO: 199514 - protein, 15 aa, Artificial Sequence
  Description of Artificial Sequence: Synthetic peptide
  Seed: SPGMMMGMFNMLSTV
SPGMMMHMLNMLSTV

SEQ ID NO: 199515 - protein, 15 aa, Artificial Sequence
  Description of Artificial Sequence: Synthetic peptide
  Seed: SPGMMMGMFNMLSTV
SPGMMMHMNNMFSTV

SEQ ID NO: 199516 - protein, 15 aa, Artificial Sequence
  Description of Artificial Sequence: Synthetic peptide
  Seed: SPGMMMGMFNMLSTV
SPGMMMHMNNMISTV

SEQ ID NO: 199517 - protein, 15 aa, Artificial Sequence
  Description of Artificial Sequence: Synthetic peptide
  Seed: SPGMMMGMFNMLSTV
SPGMMMHMNNMLSTV

SEQ ID NO: 199518 - protein, 15 aa, Artificial Sequence
  Description of Artificial Sequence: Synthetic peptide
  Seed: SPGMMMGMFNMLSTV
SPGMMMHMNNMMSTV

SEQ ID NO: 199519 - protein, 15 aa, Artificial Sequence
  Description of Artificial Sequence: Synthetic peptide
  Seed: SPGMMMGMFNMLSTV
SPGMMMHMNNMVSTV

SEQ ID NO: 199520 - protein, 15 aa, Artificial Sequence
  Description of Artificial Sequence: Synthetic peptide
  Seed: SPGMMMGMFNMLSTV
SPGMMMHMNNMYSTV

SEQ ID NO: 199521 - protein, 15 aa, Artificial Sequence
  Description of Artificial Sequence: Synthetic peptide
  Seed: SPGMMMGMFNMLSTV
SPGMMMHMPNMISTV

SEQ ID NO: 199522 - protein, 15 aa, Artificial Sequence
  Description of Artificial Sequence: Synthetic peptide
  Seed: SPGMMMGMFNMLSTV
SPGMMMHMPNMVSTV

SEQ ID NO: 199523 - protein, 15 aa, Artificial Sequence
  Description of Artificial Sequence: Synthetic peptide
  Seed: SPGMMMGMFNMLSTV
SPGMMMHMSNMISTV

SEQ ID NO: 199524 - protein, 15 aa, Artificial Sequence
  Description of Artificial Sequence: Synthetic peptide
  Seed: SPGMMMGMFNMLSTV
SPGMMMHMSNMLSTV

SEQ ID NO: 199525 - protein, 15 aa, Artificial Sequence
  Description of Artificial Sequence: Synthetic peptide
  Seed: SPGMMMGMFNMLSTV
SPGMMMHMSNMVSTV

SEQ ID NO: 199526 - protein, 15 aa, Artificial Sequence
  Description of Artificial Sequence: Synthetic peptide
  Seed: SPGMMMGMFNMLSTV
SPGMMMHMTNMISTV

SEQ ID NO: 199527 - protein, 15 aa, Artificial Sequence
  Description of Artificial Sequence: Synthetic peptide
  Seed: SPGMMMGMFNMLSTV
SPGMMMHMWNMLSTV

SEQ ID NO: 199528 - protein, 15 aa, Artificial Sequence
  Description of Artificial Sequence: Synthetic peptide
  Seed: SPGMMMGMFNMLSTV
SPGMMMHMYNMFSTV

SEQ ID NO: 199529 - protein, 15 aa, Artificial Sequence
  Description of Artificial Sequence: Synthetic peptide
  Seed: SPGMMMGMFNMLSTV
SPGMMMHMYNMLSTV

SEQ ID NO: 199530 - protein, 15 aa, Artificial Sequence
  Description of Artificial Sequence: Synthetic peptide
  Seed: SPGMMMGMFNMLSTV
SPGMMMIMANMISTV

SEQ ID NO: 199531 - protein, 15 aa, Artificial Sequence
  Description of Artificial Sequence: Synthetic peptide
  Seed: SPGMMMGMFNMLSTV
SPGMMMIMANMLSTV

SEQ ID NO: 199532 - protein, 15 aa, Artificial Sequence
  Description of Artificial Sequence: Synthetic peptide
  Seed: SPGMMMGMFNMLSTV
SPGMMMIMANMMSTV

SEQ ID NO: 199533 - protein, 15 aa, Artificial Sequence
  Description of Artificial Sequence: Synthetic peptide
  Seed: SPGMMMGMFNMLSTV
SPGMMMIMANMVSTV

SEQ ID NO: 199534 - protein, 15 aa, Artificial Sequence
  Description of Artificial Sequence: Synthetic peptide
  Seed: SPGMMMGMFNMLSTV
SPGMMMIMANMYSTV

SEQ ID NO: 199535 - protein, 15 aa, Artificial Sequence
  Description of Artificial Sequence: Synthetic peptide
  Seed: SPGMMMGMFNMLSTV
SPGMMMIMFNMESTV

SEQ ID NO: 199536 - protein, 15 aa, Artificial Sequence
  Description of Artificial Sequence: Synthetic peptide
  Seed: SPGMMMGMFNMLSTV
SPGMMMIMFNMFSTV

SEQ ID NO: 199537 - protein, 15 aa, Artificial Sequence
  Description of Artificial Sequence: Synthetic peptide
  Seed: SPGMMMGMFNMLSTV
SPGMMMIMFNMLSTV

SEQ ID NO: 199538 - protein, 15 aa, Artificial Sequence
  Description of Artificial Sequence: Synthetic peptide
  Seed: SPGMMMGMFNMLSTV
SPGMMMIMFNMYSTV

SEQ ID NO: 199539 - protein, 15 aa, Artificial Sequence
  Description of Artificial Sequence: Synthetic peptide
  Seed: SPGMMMGMFNMLSTV
SPGMMMIMGNMISTV

SEQ ID NO: 199540 - protein, 15 aa, Artificial Sequence
  Description of Artificial Sequence: Synthetic peptide
  Seed: SPGMMMGMFNMLSTV
SPGMMMIMGNMVSTV

SEQ ID NO: 199541 - protein, 15 aa, Artificial Sequence
  Description of Artificial Sequence: Synthetic peptide
  Seed: SPGMMMGMFNMLSTV
SPGMMMIMHNMISTV

SEQ ID NO: 199542 - protein, 15 aa, Artificial Sequence
  Description of Artificial Sequence: Synthetic peptide
  Seed: SPGMMMGMFNMLSTV
SPGMMMIMHNMLSTV

SEQ ID NO: 199543 - protein, 15 aa, Artificial Sequence
  Description of Artificial Sequence: Synthetic peptide
  Seed: SPGMMMGMFNMLSTV
SPGMMMIMHNMMSTV

SEQ ID NO: 199544 - protein, 15 aa, Artificial Sequence
  Description of Artificial Sequence: Synthetic peptide
  Seed: SPGMMMGMFNMLSTV
SPGMMMIMHNMVSTV

SEQ ID NO: 199545 - protein, 15 aa, Artificial Sequence
  Description of Artificial Sequence: Synthetic peptide
  Seed: SPGMMMGMFNMLSTV
SPGMMMIMKNMASTV

SEQ ID NO: 199546 - protein, 15 aa, Artificial Sequence
  Description of Artificial Sequence: Synthetic peptide
  Seed: SPGMMMGMFNMLSTV
SPGMMMIMKNMGSTV

SEQ ID NO: 199547 - protein, 15 aa, Artificial Sequence
  Description of Artificial Sequence: Synthetic peptide
  Seed: SPGMMMGMFNMLSTV
SPGMMMIMKNMISTV

SEQ ID NO: 199548 - protein, 15 aa, Artificial Sequence
  Description of Artificial Sequence: Synthetic peptide
  Seed: SPGMMMGMFNMLSTV
SPGMMMIMKNMLSTV

SEQ ID NO: 199549 - protein, 15 aa, Artificial Sequence
  Description of Artificial Sequence: Synthetic peptide
  Seed: SPGMMMGMFNMLSTV
SPGMMMIMKNMMSTV

SEQ ID NO: 199550 - protein, 15 aa, Artificial Sequence
  Description of Artificial Sequence: Synthetic peptide
  Seed: SPGMMMGMFNMLSTV
SPGMMMIMKNMSSTV

SEQ ID NO: 199551 - protein, 15 aa, Artificial Sequence
  Description of Artificial Sequence: Synthetic peptide
  Seed: SPGMMMGMFNMLSTV
SPGMMMIMKNMTSTV

SEQ ID NO: 199552 - protein, 15 aa, Artificial Sequence
  Description of Artificial Sequence: Synthetic peptide
  Seed: SPGMMMGMFNMLSTV
SPGMMMIMKNMVSTV

SEQ ID NO: 199553 - protein, 15 aa, Artificial Sequence
  Description of Artificial Sequence: Synthetic peptide
  Seed: SPGMMMGMFNMLSTV
SPGMMMIMNNMASTV

SEQ ID NO: 199554 - protein, 15 aa, Artificial Sequence
  Description of Artificial Sequence: Synthetic peptide
  Seed: SPGMMMGMFNMLSTV
SPGMMMIMNNMFSTV

SEQ ID NO: 199555 - protein, 15 aa, Artificial Sequence
  Description of Artificial Sequence: Synthetic peptide
  Seed: SPGMMMGMFNMLSTV
SPGMMMIMNNMGSTV

SEQ ID NO: 199556 - protein, 15 aa, Artificial Sequence
  Description of Artificial Sequence: Synthetic peptide
  Seed: SPGMMMGMFNMLSTV
SPGMMMIMNNMISTV

SEQ ID NO: 199557 - protein, 15 aa, Artificial Sequence
  Description of Artificial Sequence: Synthetic peptide
  Seed: SPGMMMGMFNMLSTV
SPGMMMIMNNMLSTV

SEQ ID NO: 199558 - protein, 15 aa, Artificial Sequence
  Description of Artificial Sequence: Synthetic peptide
  Seed: SPGMMMGMFNMLSTV
SPGMMMIMNNMMSTV

SEQ ID NO: 199559 - protein, 15 aa, Artificial Sequence
  Description of Artificial Sequence: Synthetic peptide
  Seed: SPGMMMGMFNMLSTV
SPGMMMIMNNMSSTV

SEQ ID NO: 199560 - protein, 15 aa, Artificial Sequence
  Description of Artificial Sequence: Synthetic peptide
  Seed: SPGMMMGMFNMLSTV
SPGMMMIMNNMTSTV

SEQ ID NO: 199561 - protein, 15 aa, Artificial Sequence
  Description of Artificial Sequence: Synthetic peptide
  Seed: SPGMMMGMFNMLSTV
SPGMMMIMNNMVSTV

SEQ ID NO: 199562 - protein, 15 aa, Artificial Sequence
  Description of Artificial Sequence: Synthetic peptide
  Seed: SPGMMMGMFNMLSTV
SPGMMMIMNNMYSTV

SEQ ID NO: 199563 - protein, 15 aa, Artificial Sequence
  Description of Artificial Sequence: Synthetic peptide
  Seed: SPGMMMGMFNMLSTV
SPGMMMIMPNMISTV

SEQ ID NO: 199564 - protein, 15 aa, Artificial Sequence
  Description of Artificial Sequence: Synthetic peptide
  Seed: SPGMMMGMFNMLSTV
SPGMMMIMPNMLSTV

SEQ ID NO: 199565 - protein, 15 aa, Artificial Sequence
  Description of Artificial Sequence: Synthetic peptide
  Seed: SPGMMMGMFNMLSTV
SPGMMMIMPNMMSTV

SEQ ID NO: 199566 - protein, 15 aa, Artificial Sequence
  Description of Artificial Sequence: Synthetic peptide
  Seed: SPGMMMGMFNMLSTV
SPGMMMIMPNMVSTV

SEQ ID NO: 199567 - protein, 15 aa, Artificial Sequence
  Description of Artificial Sequence: Synthetic peptide
  Seed: SPGMMMGMFNMLSTV
SPGMMMIMPNMYSTV

SEQ ID NO: 199568 - protein, 15 aa, Artificial Sequence
  Description of Artificial Sequence: Synthetic peptide
  Seed: SPGMMMGMFNMLSTV
SPGMMMIMRNMASTV

SEQ ID NO: 199569 - protein, 15 aa, Artificial Sequence
  Description of Artificial Sequence: Synthetic peptide
  Seed: SPGMMMGMFNMLSTV
SPGMMMIMRNMGSTV

SEQ ID NO: 199570 - protein, 15 aa, Artificial Sequence
  Description of Artificial Sequence: Synthetic peptide
  Seed: SPGMMMGMFNMLSTV
SPGMMMIMRNMISTV

SEQ ID NO: 199571 - protein, 15 aa, Artificial Sequence
  Description of Artificial Sequence: Synthetic peptide
  Seed: SPGMMMGMFNMLSTV
SPGMMMIMRNMLSTV

SEQ ID NO: 199572 - protein, 15 aa, Artificial Sequence
  Description of Artificial Sequence: Synthetic peptide
  Seed: SPGMMMGMFNMLSTV
SPGMMMIMRNMMSTV

SEQ ID NO: 199573 - protein, 15 aa, Artificial Sequence
  Description of Artificial Sequence: Synthetic peptide
  Seed: SPGMMMGMFNMLSTV
SPGMMMIMRNMSSTV

SEQ ID NO: 199574 - protein, 15 aa, Artificial Sequence
  Description of Artificial Sequence: Synthetic peptide
  Seed: SPGMMMGMFNMLSTV
SPGMMMIMRNMTSTV

SEQ ID NO: 199575 - protein, 15 aa, Artificial Sequence
  Description of Artificial Sequence: Synthetic peptide
  Seed: SPGMMMGMFNMLSTV
SPGMMMIMRNMVSTV

SEQ ID NO: 199576 - protein, 15 aa, Artificial Sequence
  Description of Artificial Sequence: Synthetic peptide
  Seed: SPGMMMGMFNMLSTV
SPGMMMIMSNMISTV

SEQ ID NO: 199577 - protein, 15 aa, Artificial Sequence
  Description of Artificial Sequence: Synthetic peptide
  Seed: SPGMMMGMFNMLSTV
SPGMMMIMSNMLSTV

SEQ ID NO: 199578 - protein, 15 aa, Artificial Sequence
  Description of Artificial Sequence: Synthetic peptide
  Seed: SPGMMMGMFNMLSTV
SPGMMMIMSNMMSTV

SEQ ID NO: 199579 - protein, 15 aa, Artificial Sequence
  Description of Artificial Sequence: Synthetic peptide
  Seed: SPGMMMGMFNMLSTV
SPGMMMIMSNMVSTV

SEQ ID NO: 199580 - protein, 15 aa, Artificial Sequence
  Description of Artificial Sequence: Synthetic peptide
  Seed: SPGMMMGMFNMLSTV
SPGMMMIMSNMYSTV

SEQ ID NO: 199581 - protein, 15 aa, Artificial Sequence
  Description of Artificial Sequence: Synthetic peptide
  Seed: SPGMMMGMFNMLSTV
SPGMMMIMTNMISTV

SEQ ID NO: 199582 - protein, 15 aa, Artificial Sequence
  Description of Artificial Sequence: Synthetic peptide
  Seed: SPGMMMGMFNMLSTV
SPGMMMIMTNMLSTV

SEQ ID NO: 199583 - protein, 15 aa, Artificial Sequence
  Description of Artificial Sequence: Synthetic peptide
  Seed: SPGMMMGMFNMLSTV
SPGMMMIMTNMMSTV

SEQ ID NO: 199584 - protein, 15 aa, Artificial Sequence
  Description of Artificial Sequence: Synthetic peptide
  Seed: SPGMMMGMFNMLSTV
SPGMMMIMTNMVSTV

SEQ ID NO: 199585 - protein, 15 aa, Artificial Sequence
  Description of Artificial Sequence: Synthetic peptide
  Seed: SPGMMMGMFNMLSTV
SPGMMMIMVNMVSTV

SEQ ID NO: 199586 - protein, 15 aa, Artificial Sequence
  Description of Artificial Sequence: Synthetic peptide
  Seed: SPGMMMGMFNMLSTV
SPGMMMIMWNMLSTV

SEQ ID NO: 199587 - protein, 15 aa, Artificial Sequence
  Description of Artificial Sequence: Synthetic peptide
  Seed: SPGMMMGMFNMLSTV
SPGMMMIMYNMISTV

SEQ ID NO: 199588 - protein, 15 aa, Artificial Sequence
  Description of Artificial Sequence: Synthetic peptide
  Seed: SPGMMMGMFNMLSTV
SPGMMMIMYNMLSTV

SEQ ID NO: 199589 - protein, 15 aa, Artificial Sequence
  Description of Artificial Sequence: Synthetic peptide
  Seed: SPGMMMGMFNMLSTV
SPGMMMIMYNMYSTV

SEQ ID NO: 199590 - protein, 15 aa, Artificial Sequence
  Description of Artificial Sequence: Synthetic peptide
  Seed: SPGMMMGMFNMLSTV
SPGMMMKMFNMFSTV

SEQ ID NO: 199591 - protein, 15 aa, Artificial Sequence
  Description of Artificial Sequence: Synthetic peptide
  Seed: SPGMMMGMFNMLSTV
SPGMMMKMFNMISTV

SEQ ID NO: 199592 - protein, 15 aa, Artificial Sequence
  Description of Artificial Sequence: Synthetic peptide
  Seed: SPGMMMGMFNMLSTV
SPGMMMKMFNMLSTV

SEQ ID NO: 199593 - protein, 15 aa, Artificial Sequence
  Description of Artificial Sequence: Synthetic peptide
  Seed: SPGMMMGMFNMLSTV
SPGMMMKMFNMMSTV

SEQ ID NO: 199594 - protein, 15 aa, Artificial Sequence
  Description of Artificial Sequence: Synthetic peptide
  Seed: SPGMMMGMFNMLSTV
SPGMMMKMFNMVSTV

SEQ ID NO: 199595 - protein, 15 aa, Artificial Sequence
  Description of Artificial Sequence: Synthetic peptide
  Seed: SPGMMMGMFNMLSTV
SPGMMMKMNNMISTV

SEQ ID NO: 199596 - protein, 15 aa, Artificial Sequence
  Description of Artificial Sequence: Synthetic peptide
  Seed: SPGMMMGMFNMLSTV
SPGMMMKMNNMLSTV

SEQ ID NO: 199597 - protein, 15 aa, Artificial Sequence
  Description of Artificial Sequence: Synthetic peptide
  Seed: SPGMMMGMFNMLSTV
SPGMMMKMNNMVSTV

SEQ ID NO: 199598 - protein, 15 aa, Artificial Sequence
  Description of Artificial Sequence: Synthetic peptide
  Seed: SPGMMMGMFNMLSTV
SPGMMMLMANMISTV

SEQ ID NO: 199599 - protein, 15 aa, Artificial Sequence
  Description of Artificial Sequence: Synthetic peptide
  Seed: SPGMMMGMFNMLSTV
SPGMMMLMANMVSTV

SEQ ID NO: 199600 - protein, 15 aa, Artificial Sequence
  Description of Artificial Sequence: Synthetic peptide
  Seed: SPGMMMGMFNMLSTV
SPGMMMLMFNMFSTV

SEQ ID NO: 199601 - protein, 15 aa, Artificial Sequence
  Description of Artificial Sequence: Synthetic peptide
  Seed: SPGMMMGMFNMLSTV
SPGMMMLMFNMLSTV

SEQ ID NO: 199602 - protein, 15 aa, Artificial Sequence
  Description of Artificial Sequence: Synthetic peptide
  Seed: SPGMMMGMFNMLSTV
SPGMMMLMFNMYSTV

SEQ ID NO: 199603 - protein, 15 aa, Artificial Sequence
  Description of Artificial Sequence: Synthetic peptide
  Seed: SPGMMMGMFNMLSTV
SPGMMMLMHNMVSTV

SEQ ID NO: 199604 - protein, 15 aa, Artificial Sequence
  Description of Artificial Sequence: Synthetic peptide
  Seed: SPGMMMGMFNMLSTV
SPGMMMLMKNMASTV

SEQ ID NO: 199605 - protein, 15 aa, Artificial Sequence
  Description of Artificial Sequence: Synthetic peptide
  Seed: SPGMMMGMFNMLSTV
SPGMMMLMKNMSSTV

SEQ ID NO: 199606 - protein, 15 aa, Artificial Sequence
  Description of Artificial Sequence: Synthetic peptide
  Seed: SPGMMMGMFNMLSTV
SPGMMMLMKNMVSTV

SEQ ID NO: 199607 - protein, 15 aa, Artificial Sequence
  Description of Artificial Sequence: Synthetic peptide
  Seed: SPGMMMGMFNMLSTV
SPGMMMLMNNMASTV

SEQ ID NO: 199608 - protein, 15 aa, Artificial Sequence
  Description of Artificial Sequence: Synthetic peptide
  Seed: SPGMMMGMFNMLSTV
SPGMMMLMNNMISTV

SEQ ID NO: 199609 - protein, 15 aa, Artificial Sequence
  Description of Artificial Sequence: Synthetic peptide
  Seed: SPGMMMGMFNMLSTV
SPGMMMLMNNMLSTV

SEQ ID NO: 199610 - protein, 15 aa, Artificial Sequence
  Description of Artificial Sequence: Synthetic peptide
  Seed: SPGMMMGMFNMLSTV
SPGMMMLMNNMMSTV

SEQ ID NO: 199611 - protein, 15 aa, Artificial Sequence
  Description of Artificial Sequence: Synthetic peptide
  Seed: SPGMMMGMFNMLSTV
SPGMMMLMNNMSSTV

SEQ ID NO: 199612 - protein, 15 aa, Artificial Sequence
  Description of Artificial Sequence: Synthetic peptide
  Seed: SPGMMMGMFNMLSTV
SPGMMMLMNNMTSTV

SEQ ID NO: 199613 - protein, 15 aa, Artificial Sequence
  Description of Artificial Sequence: Synthetic peptide
  Seed: SPGMMMGMFNMLSTV
SPGMMMLMNNMVSTV

SEQ ID NO: 199614 - protein, 15 aa, Artificial Sequence
  Description of Artificial Sequence: Synthetic peptide
  Seed: SPGMMMGMFNMLSTV
SPGMMMLMNNMYSTV

SEQ ID NO: 199615 - protein, 15 aa, Artificial Sequence
  Description of Artificial Sequence: Synthetic peptide
  Seed: SPGMMMGMFNMLSTV
SPGMMMLMPNMISTV

SEQ ID NO: 199616 - protein, 15 aa, Artificial Sequence
  Description of Artificial Sequence: Synthetic peptide
  Seed: SPGMMMGMFNMLSTV
SPGMMMLMPNMVSTV

SEQ ID NO: 199617 - protein, 15 aa, Artificial Sequence
  Description of Artificial Sequence: Synthetic peptide
  Seed: SPGMMMGMFNMLSTV
SPGMMMLMRNMASTV

SEQ ID NO: 199618 - protein, 15 aa, Artificial Sequence
  Description of Artificial Sequence: Synthetic peptide
  Seed: SPGMMMGMFNMLSTV
SPGMMMLMRNMGSTV

SEQ ID NO: 199619 - protein, 15 aa, Artificial Sequence
  Description of Artificial Sequence: Synthetic peptide
  Seed: SPGMMMGMFNMLSTV
SPGMMMLMRNMISTV

SEQ ID NO: 199620 - protein, 15 aa, Artificial Sequence
  Description of Artificial Sequence: Synthetic peptide
  Seed: SPGMMMGMFNMLSTV
SPGMMMLMRNMSSTV

SEQ ID NO: 199621 - protein, 15 aa, Artificial Sequence
  Description of Artificial Sequence: Synthetic peptide
  Seed: SPGMMMGMFNMLSTV
SPGMMMLMRNMVSTV

SEQ ID NO: 199622 - protein, 15 aa, Artificial Sequence
  Description of Artificial Sequence: Synthetic peptide
  Seed: SPGMMMGMFNMLSTV
SPGMMMLMSNMISTV

SEQ ID NO: 199623 - protein, 15 aa, Artificial Sequence
  Description of Artificial Sequence: Synthetic peptide
  Seed: SPGMMMGMFNMLSTV
SPGMMMLMSNMVSTV

SEQ ID NO: 199624 - protein, 15 aa, Artificial Sequence
  Description of Artificial Sequence: Synthetic peptide
  Seed: SPGMMMGMFNMLSTV
SPGMMMLMWNMLSTV

SEQ ID NO: 199625 - protein, 15 aa, Artificial Sequence
  Description of Artificial Sequence: Synthetic peptide
  Seed: SPGMMMGMFNMLSTV
SPGMMMLMYNMLSTV

SEQ ID NO: 199626 - protein, 15 aa, Artificial Sequence
  Description of Artificial Sequence: Synthetic peptide
  Seed: SPGMMMGMFNMLSTV
SPGMMMLMYNMYSTV

SEQ ID NO: 199627 - protein, 15 aa, Artificial Sequence
  Description of Artificial Sequence: Synthetic peptide
  Seed: SPGMMMGMFNMLSTV
SPGMMMMMANMASTV

SEQ ID NO: 199628 - protein, 15 aa, Artificial Sequence
  Description of Artificial Sequence: Synthetic peptide
  Seed: SPGMMMGMFNMLSTV
SPGMMMMMANMISTV

SEQ ID NO: 199629 - protein, 15 aa, Artificial Sequence
  Description of Artificial Sequence: Synthetic peptide
  Seed: SPGMMMGMFNMLSTV
SPGMMMMMANMSSTV

SEQ ID NO: 199630 - protein, 15 aa, Artificial Sequence
  Description of Artificial Sequence: Synthetic peptide
  Seed: SPGMMMGMFNMLSTV
SPGMMMMMANMVSTV

SEQ ID NO: 199631 - protein, 15 aa, Artificial Sequence
  Description of Artificial Sequence: Synthetic peptide
  Seed: SPGMMMGMFNMLSTV
SPGMMMMMFNMFSTV

SEQ ID NO: 199632 - protein, 15 aa, Artificial Sequence
  Description of Artificial Sequence: Synthetic peptide
  Seed: SPGMMMGMFNMLSTV
SPGMMMMMHNMASTV

SEQ ID NO: 199633 - protein, 15 aa, Artificial Sequence
  Description of Artificial Sequence: Synthetic peptide
  Seed: SPGMMMGMFNMLSTV
SPGMMMMMKNMASTV

SEQ ID NO: 199634 - protein, 15 aa, Artificial Sequence
  Description of Artificial Sequence: Synthetic peptide
  Seed: SPGMMMGMFNMLSTV
SPGMMMMMNNMASTV

SEQ ID NO: 199635 - protein, 15 aa, Artificial Sequence
  Description of Artificial Sequence: Synthetic peptide
  Seed: SPGMMMGMFNMLSTV
SPGMMMMMNNMFSTV

SEQ ID NO: 199636 - protein, 15 aa, Artificial Sequence
  Description of Artificial Sequence: Synthetic peptide
  Seed: SPGMMMGMFNMLSTV
SPGMMMMMNNMISTV

SEQ ID NO: 199637 - protein, 15 aa, Artificial Sequence
  Description of Artificial Sequence: Synthetic peptide
  Seed: SPGMMMGMFNMLSTV
SPGMMMMMNNMLSTV

SEQ ID NO: 199638 - protein, 15 aa, Artificial Sequence
  Description of Artificial Sequence: Synthetic peptide
  Seed: SPGMMMGMFNMLSTV
SPGMMMMMNNMMSTV

SEQ ID NO: 199639 - protein, 15 aa, Artificial Sequence
  Description of Artificial Sequence: Synthetic peptide
  Seed: SPGMMMGMFNMLSTV
SPGMMMMMNNMVSTV

SEQ ID NO: 199640 - protein, 15 aa, Artificial Sequence
  Description of Artificial Sequence: Synthetic peptide
  Seed: SPGMMMGMFNMLSTV
SPGMMMMMNNMYSTV

SEQ ID NO: 199641 - protein, 15 aa, Artificial Sequence
  Description of Artificial Sequence: Synthetic peptide
  Seed: SPGMMMGMFNMLSTV
SPGMMMMMPNMISTV

SEQ ID NO: 199642 - protein, 15 aa, Artificial Sequence
  Description of Artificial Sequence: Synthetic peptide
  Seed: SPGMMMGMFNMLSTV
SPGMMMMMPNMVSTV

SEQ ID NO: 199643 - protein, 15 aa, Artificial Sequence
  Description of Artificial Sequence: Synthetic peptide
  Seed: SPGMMMGMFNMLSTV
SPGMMMMMRNMASTV

SEQ ID NO: 199644 - protein, 15 aa, Artificial Sequence
  Description of Artificial Sequence: Synthetic peptide
  Seed: SPGMMMGMFNMLSTV
SPGMMMMMSNMASTV

SEQ ID NO: 199645 - protein, 15 aa, Artificial Sequence
  Description of Artificial Sequence: Synthetic peptide
  Seed: SPGMMMGMFNMLSTV
SPGMMMMMSNMISTV

SEQ ID NO: 199646 - protein, 15 aa, Artificial Sequence
  Description of Artificial Sequence: Synthetic peptide
  Seed: SPGMMMGMFNMLSTV
SPGMMMMMSNMVSTV

SEQ ID NO: 199647 - protein, 15 aa, Artificial Sequence
  Description of Artificial Sequence: Synthetic peptide
  Seed: SPGMMMGMFNMLSTV
SPGMMMNMANMASTV

SEQ ID NO: 199648 - protein, 15 aa, Artificial Sequence
  Description of Artificial Sequence: Synthetic peptide
  Seed: SPGMMMGMFNMLSTV
SPGMMMNMANMFSTV

SEQ ID NO: 199649 - protein, 15 aa, Artificial Sequence
  Description of Artificial Sequence: Synthetic peptide
  Seed: SPGMMMGMFNMLSTV
SPGMMMNMANMGSTV

SEQ ID NO: 199650 - protein, 15 aa, Artificial Sequence
  Description of Artificial Sequence: Synthetic peptide
  Seed: SPGMMMGMFNMLSTV
SPGMMMNMANMHSTV

SEQ ID NO: 199651 - protein, 15 aa, Artificial Sequence
  Description of Artificial Sequence: Synthetic peptide
  Seed: SPGMMMGMFNMLSTV
SPGMMMNMANMISTV

SEQ ID NO: 199652 - protein, 15 aa, Artificial Sequence
  Description of Artificial Sequence: Synthetic peptide
  Seed: SPGMMMGMFNMLSTV
SPGMMMNMANMLSTV

SEQ ID NO: 199653 - protein, 15 aa, Artificial Sequence
  Description of Artificial Sequence: Synthetic peptide
  Seed: SPGMMMGMFNMLSTV
SPGMMMNMANMMSTV

SEQ ID NO: 199654 - protein, 15 aa, Artificial Sequence
  Description of Artificial Sequence: Synthetic peptide
  Seed: SPGMMMGMFNMLSTV
SPGMMMNMANMNSTV

SEQ ID NO: 199655 - protein, 15 aa, Artificial Sequence
  Description of Artificial Sequence: Synthetic peptide
  Seed: SPGMMMGMFNMLSTV
SPGMMMNMANMQSTV

SEQ ID NO: 199656 - protein, 15 aa, Artificial Sequence
  Description of Artificial Sequence: Synthetic peptide
  Seed: SPGMMMGMFNMLSTV
SPGMMMNMANMSSTV

SEQ ID NO: 199657 - protein, 15 aa, Artificial Sequence
  Description of Artificial Sequence: Synthetic peptide
  Seed: SPGMMMGMFNMLSTV
SPGMMMNMANMTSTV

SEQ ID NO: 199658 - protein, 15 aa, Artificial Sequence
  Description of Artificial Sequence: Synthetic peptide
  Seed: SPGMMMGMFNMLSTV
SPGMMMNMANMVSTV

SEQ ID NO: 199659 - protein, 15 aa, Artificial Sequence
  Description of Artificial Sequence: Synthetic peptide
  Seed: SPGMMMGMFNMLSTV
SPGMMMNMANMWSTV

SEQ ID NO: 199660 - protein, 15 aa, Artificial Sequence
  Description of Artificial Sequence: Synthetic peptide
  Seed: SPGMMMGMFNMLSTV
SPGMMMNMANMYSTV

SEQ ID NO: 199661 - protein, 15 aa, Artificial Sequence
  Description of Artificial Sequence: Synthetic peptide
  Seed: SPGMMMGMFNMLSTV
SPGMMMNMCNMISTV

SEQ ID NO: 199662 - protein, 15 aa, Artificial Sequence
  Description of Artificial Sequence: Synthetic peptide
  Seed: SPGMMMGMFNMLSTV
SPGMMMNMCNMLSTV

SEQ ID NO: 199663 - protein, 15 aa, Artificial Sequence
  Description of Artificial Sequence: Synthetic peptide
  Seed: SPGMMMGMFNMLSTV
SPGMMMNMCNMVSTV

SEQ ID NO: 199664 - protein, 15 aa, Artificial Sequence
  Description of Artificial Sequence: Synthetic peptide
  Seed: SPGMMMGMFNMLSTV
SPGMMMNMDNMISTV

SEQ ID NO: 199665 - protein, 15 aa, Artificial Sequence
  Description of Artificial Sequence: Synthetic peptide
  Seed: SPGMMMGMFNMLSTV
SPGMMMNMDNMLSTV

SEQ ID NO: 199666 - protein, 15 aa, Artificial Sequence
  Description of Artificial Sequence: Synthetic peptide
  Seed: SPGMMMGMFNMLSTV
SPGMMMNMDNMVSTV

SEQ ID NO: 199667 - protein, 15 aa, Artificial Sequence
  Description of Artificial Sequence: Synthetic peptide
  Seed: SPGMMMGMFNMLSTV
SPGMMMNMENMISTV

SEQ ID NO: 199668 - protein, 15 aa, Artificial Sequence
  Description of Artificial Sequence: Synthetic peptide
  Seed: SPGMMMGMFNMLSTV
SPGMMMNMENMVSTV

SEQ ID NO: 199669 - protein, 15 aa, Artificial Sequence
  Description of Artificial Sequence: Synthetic peptide
  Seed: SPGMMMGMFNMLSTV
SPGMMMNMFNMFSTV

SEQ ID NO: 199670 - protein, 15 aa, Artificial Sequence
  Description of Artificial Sequence: Synthetic peptide
  Seed: SPGMMMGMFNMLSTV
SPGMMMNMFNMISTV

SEQ ID NO: 199671 - protein, 15 aa, Artificial Sequence
  Description of Artificial Sequence: Synthetic peptide
  Seed: SPGMMMGMFNMLSTV
SPGMMMNMFNMLSTV

SEQ ID NO: 199672 - protein, 15 aa, Artificial Sequence
  Description of Artificial Sequence: Synthetic peptide
  Seed: SPGMMMGMFNMLSTV
SPGMMMNMFNMMSTV

SEQ ID NO: 199673 - protein, 15 aa, Artificial Sequence
  Description of Artificial Sequence: Synthetic peptide
  Seed: SPGMMMGMFNMLSTV
SPGMMMNMFNMVSTV

SEQ ID NO: 199674 - protein, 15 aa, Artificial Sequence
  Description of Artificial Sequence: Synthetic peptide
  Seed: SPGMMMGMFNMLSTV
SPGMMMNMGNMASTV

SEQ ID NO: 199675 - protein, 15 aa, Artificial Sequence
  Description of Artificial Sequence: Synthetic peptide
  Seed: SPGMMMGMFNMLSTV
SPGMMMNMGNMFSTV

SEQ ID NO: 199676 - protein, 15 aa, Artificial Sequence
  Description of Artificial Sequence: Synthetic peptide
  Seed: SPGMMMGMFNMLSTV
SPGMMMNMGNMISTV

SEQ ID NO: 199677 - protein, 15 aa, Artificial Sequence
  Description of Artificial Sequence: Synthetic peptide
  Seed: SPGMMMGMFNMLSTV
SPGMMMNMGNMLSTV

SEQ ID NO: 199678 - protein, 15 aa, Artificial Sequence
  Description of Artificial Sequence: Synthetic peptide
  Seed: SPGMMMGMFNMLSTV
SPGMMMNMGNMMSTV

SEQ ID NO: 199679 - protein, 15 aa, Artificial Sequence
  Description of Artificial Sequence: Synthetic peptide
  Seed: SPGMMMGMFNMLSTV
SPGMMMNMGNMSSTV

SEQ ID NO: 199680 - protein, 15 aa, Artificial Sequence
  Description of Artificial Sequence: Synthetic peptide
  Seed: SPGMMMGMFNMLSTV
SPGMMMNMGNMTSTV

SEQ ID NO: 199681 - protein, 15 aa, Artificial Sequence
  Description of Artificial Sequence: Synthetic peptide
  Seed: SPGMMMGMFNMLSTV
SPGMMMNMGNMVSTV

SEQ ID NO: 199682 - protein, 15 aa, Artificial Sequence
  Description of Artificial Sequence: Synthetic peptide
  Seed: SPGMMMGMFNMLSTV
SPGMMMNMGNMWSTV

SEQ ID NO: 199683 - protein, 15 aa, Artificial Sequence
  Description of Artificial Sequence: Synthetic peptide
  Seed: SPGMMMGMFNMLSTV
SPGMMMNMGNMYSTV

SEQ ID NO: 199684 - protein, 15 aa, Artificial Sequence
  Description of Artificial Sequence: Synthetic peptide
  Seed: SPGMMMGMFNMLSTV
SPGMMMNMHNMASTV

SEQ ID NO: 199685 - protein, 15 aa, Artificial Sequence
  Description of Artificial Sequence: Synthetic peptide
  Seed: SPGMMMGMFNMLSTV
SPGMMMNMHNMFSTV

SEQ ID NO: 199686 - protein, 15 aa, Artificial Sequence
  Description of Artificial Sequence: Synthetic peptide
  Seed: SPGMMMGMFNMLSTV
SPGMMMNMHNMISTV

SEQ ID NO: 199687 - protein, 15 aa, Artificial Sequence
  Description of Artificial Sequence: Synthetic peptide
  Seed: SPGMMMGMFNMLSTV
SPGMMMNMHNMLSTV

SEQ ID NO: 199688 - protein, 15 aa, Artificial Sequence
  Description of Artificial Sequence: Synthetic peptide
  Seed: SPGMMMGMFNMLSTV
SPGMMMNMHNMMSTV

SEQ ID NO: 199689 - protein, 15 aa, Artificial Sequence
  Description of Artificial Sequence: Synthetic peptide
  Seed: SPGMMMGMFNMLSTV
SPGMMMNMHNMVSTV

SEQ ID NO: 199690 - protein, 15 aa, Artificial Sequence
  Description of Artificial Sequence: Synthetic peptide
  Seed: SPGMMMGMFNMLSTV
SPGMMMNMHNMYSTV

SEQ ID NO: 199691 - protein, 15 aa, Artificial Sequence
  Description of Artificial Sequence: Synthetic peptide
  Seed: SPGMMMGMFNMLSTV
SPGMMMNMINMASTV

SEQ ID NO: 199692 - protein, 15 aa, Artificial Sequence
  Description of Artificial Sequence: Synthetic peptide
  Seed: SPGMMMGMFNMLSTV
SPGMMMNMINMFSTV

SEQ ID NO: 199693 - protein, 15 aa, Artificial Sequence
  Description of Artificial Sequence: Synthetic peptide
  Seed: SPGMMMGMFNMLSTV
SPGMMMNMINMISTV

SEQ ID NO: 199694 - protein, 15 aa, Artificial Sequence
  Description of Artificial Sequence: Synthetic peptide
  Seed: SPGMMMGMFNMLSTV
SPGMMMNMINMLSTV

SEQ ID NO: 199695 - protein, 15 aa, Artificial Sequence
  Description of Artificial Sequence: Synthetic peptide
  Seed: SPGMMMGMFNMLSTV
SPGMMMNMINMMSTV

SEQ ID NO: 199696 - protein, 15 aa, Artificial Sequence
  Description of Artificial Sequence: Synthetic peptide
  Seed: SPGMMMGMFNMLSTV
SPGMMMNMINMNSTV

SEQ ID NO: 199697 - protein, 15 aa, Artificial Sequence
  Description of Artificial Sequence: Synthetic peptide
  Seed: SPGMMMGMFNMLSTV
SPGMMMNMINMSSTV

SEQ ID NO: 199698 - protein, 15 aa, Artificial Sequence
  Description of Artificial Sequence: Synthetic peptide
  Seed: SPGMMMGMFNMLSTV
SPGMMMNMINMTSTV

SEQ ID NO: 199699 - protein, 15 aa, Artificial Sequence
  Description of Artificial Sequence: Synthetic peptide
  Seed: SPGMMMGMFNMLSTV
SPGMMMNMINMVSTV

SEQ ID NO: 199700 - protein, 15 aa, Artificial Sequence
  Description of Artificial Sequence: Synthetic peptide
  Seed: SPGMMMGMFNMLSTV
SPGMMMNMINMYSTV

SEQ ID NO: 199701 - protein, 15 aa, Artificial Sequence
  Description of Artificial Sequence: Synthetic peptide
  Seed: SPGMMMGMFNMLSTV
SPGMMMNMKNMISTV

SEQ ID NO: 199702 - protein, 15 aa, Artificial Sequence
  Description of Artificial Sequence: Synthetic peptide
  Seed: SPGMMMGMFNMLSTV
SPGMMMNMKNMLSTV

SEQ ID NO: 199703 - protein, 15 aa, Artificial Sequence
  Description of Artificial Sequence: Synthetic peptide
  Seed: SPGMMMGMFNMLSTV
SPGMMMNMKNMVSTV

SEQ ID NO: 199704 - protein, 15 aa, Artificial Sequence
  Description of Artificial Sequence: Synthetic peptide
  Seed: SPGMMMGMFNMLSTV
SPGMMMNMLNMASTV

SEQ ID NO: 199705 - protein, 15 aa, Artificial Sequence
  Description of Artificial Sequence: Synthetic peptide
  Seed: SPGMMMGMFNMLSTV
SPGMMMNMLNMFSTV

SEQ ID NO: 199706 - protein, 15 aa, Artificial Sequence
  Description of Artificial Sequence: Synthetic peptide
  Seed: SPGMMMGMFNMLSTV
SPGMMMNMLNMISTV

SEQ ID NO: 199707 - protein, 15 aa, Artificial Sequence
  Description of Artificial Sequence: Synthetic peptide
  Seed: SPGMMMGMFNMLSTV
SPGMMMNMLNMLSTV

SEQ ID NO: 199708 - protein, 15 aa, Artificial Sequence
  Description of Artificial Sequence: Synthetic peptide
  Seed: SPGMMMGMFNMLSTV
SPGMMMNMLNMMSTV

SEQ ID NO: 199709 - protein, 15 aa, Artificial Sequence
  Description of Artificial Sequence: Synthetic peptide
  Seed: SPGMMMGMFNMLSTV
SPGMMMNMLNMSSTV

SEQ ID NO: 199710 - protein, 15 aa, Artificial Sequence
  Description of Artificial Sequence: Synthetic peptide
  Seed: SPGMMMGMFNMLSTV
SPGMMMNMLNMTSTV

SEQ ID NO: 199711 - protein, 15 aa, Artificial Sequence
  Description of Artificial Sequence: Synthetic peptide
  Seed: SPGMMMGMFNMLSTV
SPGMMMNMLNMVSTV

SEQ ID NO: 199712 - protein, 15 aa, Artificial Sequence
  Description of Artificial Sequence: Synthetic peptide
  Seed: SPGMMMGMFNMLSTV
SPGMMMNMLNMYSTV

SEQ ID NO: 199713 - protein, 15 aa, Artificial Sequence
  Description of Artificial Sequence: Synthetic peptide
  Seed: SPGMMMGMFNMLSTV
SPGMMMNMMNMASTV

SEQ ID NO: 199714 - protein, 15 aa, Artificial Sequence
  Description of Artificial Sequence: Synthetic peptide
  Seed: SPGMMMGMFNMLSTV
SPGMMMNMMNMFSTV

SEQ ID NO: 199715 - protein, 15 aa, Artificial Sequence
  Description of Artificial Sequence: Synthetic peptide
  Seed: SPGMMMGMFNMLSTV
SPGMMMNMMNMISTV

SEQ ID NO: 199716 - protein, 15 aa, Artificial Sequence
  Description of Artificial Sequence: Synthetic peptide
  Seed: SPGMMMGMFNMLSTV
SPGMMMNMMNMLSTV

SEQ ID NO: 199717 - protein, 15 aa, Artificial Sequence
  Description of Artificial Sequence: Synthetic peptide
  Seed: SPGMMMGMFNMLSTV
SPGMMMNMMNMMSTV

SEQ ID NO: 199718 - protein, 15 aa, Artificial Sequence
  Description of Artificial Sequence: Synthetic peptide
  Seed: SPGMMMGMFNMLSTV
SPGMMMNMMNMTSTV

SEQ ID NO: 199719 - protein, 15 aa, Artificial Sequence
  Description of Artificial Sequence: Synthetic peptide
  Seed: SPGMMMGMFNMLSTV
SPGMMMNMMNMVSTV

SEQ ID NO: 199720 - protein, 15 aa, Artificial Sequence
  Description of Artificial Sequence: Synthetic peptide
  Seed: SPGMMMGMFNMLSTV
SPGMMMNMMNMYSTV

SEQ ID NO: 199721 - protein, 15 aa, Artificial Sequence
  Description of Artificial Sequence: Synthetic peptide
  Seed: SPGMMMGMFNMLSTV
SPGMMMNMNNMASTV

SEQ ID NO: 199722 - protein, 15 aa, Artificial Sequence
  Description of Artificial Sequence: Synthetic peptide
  Seed: SPGMMMGMFNMLSTV
SPGMMMNMNNMFSTV

SEQ ID NO: 199723 - protein, 15 aa, Artificial Sequence
  Description of Artificial Sequence: Synthetic peptide
  Seed: SPGMMMGMFNMLSTV
SPGMMMNMNNMHSTV

SEQ ID NO: 199724 - protein, 15 aa, Artificial Sequence
  Description of Artificial Sequence: Synthetic peptide
  Seed: SPGMMMGMFNMLSTV
SPGMMMNMNNMISTV

SEQ ID NO: 199725 - protein, 15 aa, Artificial Sequence
  Description of Artificial Sequence: Synthetic peptide
  Seed: SPGMMMGMFNMLSTV
SPGMMMNMNNMLSTV

SEQ ID NO: 199726 - protein, 15 aa, Artificial Sequence
  Description of Artificial Sequence: Synthetic peptide
  Seed: SPGMMMGMFNMLSTV
SPGMMMNMNNMMSTV

SEQ ID NO: 199727 - protein, 15 aa, Artificial Sequence
  Description of Artificial Sequence: Synthetic peptide
  Seed: SPGMMMGMFNMLSTV
SPGMMMNMNNMNSTV

SEQ ID NO: 199728 - protein, 15 aa, Artificial Sequence
  Description of Artificial Sequence: Synthetic peptide
  Seed: SPGMMMGMFNMLSTV
SPGMMMNMNNMQSTV

SEQ ID NO: 199729 - protein, 15 aa, Artificial Sequence
  Description of Artificial Sequence: Synthetic peptide
  Seed: SPGMMMGMFNMLSTV
SPGMMMNMNNMSSTV

SEQ ID NO: 199730 - protein, 15 aa, Artificial Sequence
  Description of Artificial Sequence: Synthetic peptide
  Seed: SPGMMMGMFNMLSTV
SPGMMMNMNNMTSTV

SEQ ID NO: 199731 - protein, 15 aa, Artificial Sequence
  Description of Artificial Sequence: Synthetic peptide
  Seed: SPGMMMGMFNMLSTV
SPGMMMNMNNMVSTV

SEQ ID NO: 199732 - protein, 15 aa, Artificial Sequence
  Description of Artificial Sequence: Synthetic peptide
  Seed: SPGMMMGMFNMLSTV
SPGMMMNMNNMWSTV

SEQ ID NO: 199733 - protein, 15 aa, Artificial Sequence
  Description of Artificial Sequence: Synthetic peptide
  Seed: SPGMMMGMFNMLSTV
SPGMMMNMNNMYSTV

SEQ ID NO: 199734 - protein, 15 aa, Artificial Sequence
  Description of Artificial Sequence: Synthetic peptide
  Seed: SPGMMMGMFNMLSTV
SPGMMMNMPNMASTV

SEQ ID NO: 199735 - protein, 15 aa, Artificial Sequence
  Description of Artificial Sequence: Synthetic peptide
  Seed: SPGMMMGMFNMLSTV
SPGMMMNMPNMFSTV

SEQ ID NO: 199736 - protein, 15 aa, Artificial Sequence
  Description of Artificial Sequence: Synthetic peptide
  Seed: SPGMMMGMFNMLSTV
SPGMMMNMPNMISTV

SEQ ID NO: 199737 - protein, 15 aa, Artificial Sequence
  Description of Artificial Sequence: Synthetic peptide
  Seed: SPGMMMGMFNMLSTV
SPGMMMNMPNMLSTV

SEQ ID NO: 199738 - protein, 15 aa, Artificial Sequence
  Description of Artificial Sequence: Synthetic peptide
  Seed: SPGMMMGMFNMLSTV
SPGMMMNMPNMMSTV

SEQ ID NO: 199739 - protein, 15 aa, Artificial Sequence
  Description of Artificial Sequence: Synthetic peptide
  Seed: SPGMMMGMFNMLSTV
SPGMMMNMPNMSSTV

SEQ ID NO: 199740 - protein, 15 aa, Artificial Sequence
  Description of Artificial Sequence: Synthetic peptide
  Seed: SPGMMMGMFNMLSTV
SPGMMMNMPNMTSTV

SEQ ID NO: 199741 - protein, 15 aa, Artificial Sequence
  Description of Artificial Sequence: Synthetic peptide
  Seed: SPGMMMGMFNMLSTV
SPGMMMNMPNMVSTV

SEQ ID NO: 199742 - protein, 15 aa, Artificial Sequence
  Description of Artificial Sequence: Synthetic peptide
  Seed: SPGMMMGMFNMLSTV
SPGMMMNMPNMWSTV

SEQ ID NO: 199743 - protein, 15 aa, Artificial Sequence
  Description of Artificial Sequence: Synthetic peptide
  Seed: SPGMMMGMFNMLSTV
SPGMMMNMPNMYSTV

SEQ ID NO: 199744 - protein, 15 aa, Artificial Sequence
  Description of Artificial Sequence: Synthetic peptide
  Seed: SPGMMMGMFNMLSTV
SPGMMMNMQNMISTV

SEQ ID NO: 199745 - protein, 15 aa, Artificial Sequence
  Description of Artificial Sequence: Synthetic peptide
  Seed: SPGMMMGMFNMLSTV
SPGMMMNMQNMLSTV

SEQ ID NO: 199746 - protein, 15 aa, Artificial Sequence
  Description of Artificial Sequence: Synthetic peptide
  Seed: SPGMMMGMFNMLSTV
SPGMMMNMQNMVSTV

SEQ ID NO: 199747 - protein, 15 aa, Artificial Sequence
  Description of Artificial Sequence: Synthetic peptide
  Seed: SPGMMMGMFNMLSTV
SPGMMMNMRNMISTV

SEQ ID NO: 199748 - protein, 15 aa, Artificial Sequence
  Description of Artificial Sequence: Synthetic peptide
  Seed: SPGMMMGMFNMLSTV
SPGMMMNMRNMLSTV

SEQ ID NO: 199749 - protein, 15 aa, Artificial Sequence
  Description of Artificial Sequence: Synthetic peptide
  Seed: SPGMMMGMFNMLSTV
SPGMMMNMRNMVSTV

SEQ ID NO: 199750 - protein, 15 aa, Artificial Sequence
  Description of Artificial Sequence: Synthetic peptide
  Seed: SPGMMMGMFNMLSTV
SPGMMMNMSNMASTV

SEQ ID NO: 199751 - protein, 15 aa, Artificial Sequence
  Description of Artificial Sequence: Synthetic peptide
  Seed: SPGMMMGMFNMLSTV
SPGMMMNMSNMFSTV

SEQ ID NO: 199752 - protein, 15 aa, Artificial Sequence
  Description of Artificial Sequence: Synthetic peptide
  Seed: SPGMMMGMFNMLSTV
SPGMMMNMSNMGSTV

SEQ ID NO: 199753 - protein, 15 aa, Artificial Sequence
  Description of Artificial Sequence: Synthetic peptide
  Seed: SPGMMMGMFNMLSTV
SPGMMMNMSNMISTV

SEQ ID NO: 199754 - protein, 15 aa, Artificial Sequence
  Description of Artificial Sequence: Synthetic peptide
  Seed: SPGMMMGMFNMLSTV
SPGMMMNMSNMLSTV

SEQ ID NO: 199755 - protein, 15 aa, Artificial Sequence
  Description of Artificial Sequence: Synthetic peptide
  Seed: SPGMMMGMFNMLSTV
SPGMMMNMSNMMSTV

SEQ ID NO: 199756 - protein, 15 aa, Artificial Sequence
  Description of Artificial Sequence: Synthetic peptide
  Seed: SPGMMMGMFNMLSTV
SPGMMMNMSNMNSTV

SEQ ID NO: 199757 - protein, 15 aa, Artificial Sequence
  Description of Artificial Sequence: Synthetic peptide
  Seed: SPGMMMGMFNMLSTV
SPGMMMNMSNMQSTV

SEQ ID NO: 199758 - protein, 15 aa, Artificial Sequence
  Description of Artificial Sequence: Synthetic peptide
  Seed: SPGMMMGMFNMLSTV
SPGMMMNMSNMSSTV

SEQ ID NO: 199759 - protein, 15 aa, Artificial Sequence
  Description of Artificial Sequence: Synthetic peptide
  Seed: SPGMMMGMFNMLSTV
SPGMMMNMSNMTSTV

SEQ ID NO: 199760 - protein, 15 aa, Artificial Sequence
  Description of Artificial Sequence: Synthetic peptide
  Seed: SPGMMMGMFNMLSTV
SPGMMMNMSNMVSTV

SEQ ID NO: 199761 - protein, 15 aa, Artificial Sequence
  Description of Artificial Sequence: Synthetic peptide
  Seed: SPGMMMGMFNMLSTV
SPGMMMNMSNMWSTV

SEQ ID NO: 199762 - protein, 15 aa, Artificial Sequence
  Description of Artificial Sequence: Synthetic peptide
  Seed: SPGMMMGMFNMLSTV
SPGMMMNMSNMYSTV

SEQ ID NO: 199763 - protein, 15 aa, Artificial Sequence
  Description of Artificial Sequence: Synthetic peptide
  Seed: SPGMMMGMFNMLSTV
SPGMMMNMTNMASTV

SEQ ID NO: 199764 - protein, 15 aa, Artificial Sequence
  Description of Artificial Sequence: Synthetic peptide
  Seed: SPGMMMGMFNMLSTV
SPGMMMNMTNMFSTV

SEQ ID NO: 199765 - protein, 15 aa, Artificial Sequence
  Description of Artificial Sequence: Synthetic peptide
  Seed: SPGMMMGMFNMLSTV
SPGMMMNMTNMISTV

SEQ ID NO: 199766 - protein, 15 aa, Artificial Sequence
  Description of Artificial Sequence: Synthetic peptide
  Seed: SPGMMMGMFNMLSTV
SPGMMMNMTNMLSTV

SEQ ID NO: 199767 - protein, 15 aa, Artificial Sequence
  Description of Artificial Sequence: Synthetic peptide
  Seed: SPGMMMGMFNMLSTV
SPGMMMNMTNMMSTV

SEQ ID NO: 199768 - protein, 15 aa, Artificial Sequence
  Description of Artificial Sequence: Synthetic peptide
  Seed: SPGMMMGMFNMLSTV
SPGMMMNMTNMSSTV

SEQ ID NO: 199769 - protein, 15 aa, Artificial Sequence
  Description of Artificial Sequence: Synthetic peptide
  Seed: SPGMMMGMFNMLSTV
SPGMMMNMTNMTSTV

SEQ ID NO: 199770 - protein, 15 aa, Artificial Sequence
  Description of Artificial Sequence: Synthetic peptide
  Seed: SPGMMMGMFNMLSTV
SPGMMMNMTNMVSTV

SEQ ID NO: 199771 - protein, 15 aa, Artificial Sequence
  Description of Artificial Sequence: Synthetic peptide
  Seed: SPGMMMGMFNMLSTV
SPGMMMNMTNMWSTV

SEQ ID NO: 199772 - protein, 15 aa, Artificial Sequence
  Description of Artificial Sequence: Synthetic peptide
  Seed: SPGMMMGMFNMLSTV
SPGMMMNMTNMYSTV

SEQ ID NO: 199773 - protein, 15 aa, Artificial Sequence
  Description of Artificial Sequence: Synthetic peptide
  Seed: SPGMMMGMFNMLSTV
SPGMMMNMVNMASTV

SEQ ID NO: 199774 - protein, 15 aa, Artificial Sequence
  Description of Artificial Sequence: Synthetic peptide
  Seed: SPGMMMGMFNMLSTV
SPGMMMNMVNMFSTV

SEQ ID NO: 199775 - protein, 15 aa, Artificial Sequence
  Description of Artificial Sequence: Synthetic peptide
  Seed: SPGMMMGMFNMLSTV
SPGMMMNMVNMISTV

SEQ ID NO: 199776 - protein, 15 aa, Artificial Sequence
  Description of Artificial Sequence: Synthetic peptide
  Seed: SPGMMMGMFNMLSTV
SPGMMMNMVNMLSTV

SEQ ID NO: 199777 - protein, 15 aa, Artificial Sequence
  Description of Artificial Sequence: Synthetic peptide
  Seed: SPGMMMGMFNMLSTV
SPGMMMNMVNMMSTV

SEQ ID NO: 199778 - protein, 15 aa, Artificial Sequence
  Description of Artificial Sequence: Synthetic peptide
  Seed: SPGMMMGMFNMLSTV
SPGMMMNMVNMNSTV

SEQ ID NO: 199779 - protein, 15 aa, Artificial Sequence
  Description of Artificial Sequence: Synthetic peptide
  Seed: SPGMMMGMFNMLSTV
SPGMMMNMVNMSSTV

SEQ ID NO: 199780 - protein, 15 aa, Artificial Sequence
  Description of Artificial Sequence: Synthetic peptide
  Seed: SPGMMMGMFNMLSTV
SPGMMMNMVNMTSTV

SEQ ID NO: 199781 - protein, 15 aa, Artificial Sequence
  Description of Artificial Sequence: Synthetic peptide
  Seed: SPGMMMGMFNMLSTV
SPGMMMNMVNMVSTV

SEQ ID NO: 199782 - protein, 15 aa, Artificial Sequence
  Description of Artificial Sequence: Synthetic peptide
  Seed: SPGMMMGMFNMLSTV
SPGMMMNMVNMYSTV

SEQ ID NO: 199783 - protein, 15 aa, Artificial Sequence
  Description of Artificial Sequence: Synthetic peptide
  Seed: SPGMMMGMFNMLSTV
SPGMMMNMWNMISTV

SEQ ID NO: 199784 - protein, 15 aa, Artificial Sequence
  Description of Artificial Sequence: Synthetic peptide
  Seed: SPGMMMGMFNMLSTV
SPGMMMNMWNMLSTV

SEQ ID NO: 199785 - protein, 15 aa, Artificial Sequence
  Description of Artificial Sequence: Synthetic peptide
  Seed: SPGMMMGMFNMLSTV
SPGMMMNMWNMVSTV

SEQ ID NO: 199786 - protein, 15 aa, Artificial Sequence
  Description of Artificial Sequence: Synthetic peptide
  Seed: SPGMMMGMFNMLSTV
SPGMMMNMYNMFSTV

SEQ ID NO: 199787 - protein, 15 aa, Artificial Sequence
  Description of Artificial Sequence: Synthetic peptide
  Seed: SPGMMMGMFNMLSTV
SPGMMMNMYNMISTV

SEQ ID NO: 199788 - protein, 15 aa, Artificial Sequence
  Description of Artificial Sequence: Synthetic peptide
  Seed: SPGMMMGMFNMLSTV
SPGMMMNMYNMLSTV

SEQ ID NO: 199789 - protein, 15 aa, Artificial Sequence
  Description of Artificial Sequence: Synthetic peptide
  Seed: SPGMMMGMFNMLSTV
SPGMMMNMYNMMSTV

SEQ ID NO: 199790 - protein, 15 aa, Artificial Sequence
  Description of Artificial Sequence: Synthetic peptide
  Seed: SPGMMMGMFNMLSTV
SPGMMMNMYNMVSTV

SEQ ID NO: 199791 - protein, 15 aa, Artificial Sequence
  Description of Artificial Sequence: Synthetic peptide
  Seed: SPGMMMGMFNMLSTV
SPGMMMQMANMISTV

SEQ ID NO: 199792 - protein, 15 aa, Artificial Sequence
  Description of Artificial Sequence: Synthetic peptide
  Seed: SPGMMMGMFNMLSTV
SPGMMMQMANMLSTV

SEQ ID NO: 199793 - protein, 15 aa, Artificial Sequence
  Description of Artificial Sequence: Synthetic peptide
  Seed: SPGMMMGMFNMLSTV
SPGMMMQMANMVSTV

SEQ ID NO: 199794 - protein, 15 aa, Artificial Sequence
  Description of Artificial Sequence: Synthetic peptide
  Seed: SPGMMMGMFNMLSTV
SPGMMMQMFNMFSTV

SEQ ID NO: 199795 - protein, 15 aa, Artificial Sequence
  Description of Artificial Sequence: Synthetic peptide
  Seed: SPGMMMGMFNMLSTV
SPGMMMQMFNMISTV

SEQ ID NO: 199796 - protein, 15 aa, Artificial Sequence
  Description of Artificial Sequence: Synthetic peptide
  Seed: SPGMMMGMFNMLSTV
SPGMMMQMFNMLSTV

SEQ ID NO: 199797 - protein, 15 aa, Artificial Sequence
  Description of Artificial Sequence: Synthetic peptide
  Seed: SPGMMMGMFNMLSTV
SPGMMMQMFNMMSTV

SEQ ID NO: 199798 - protein, 15 aa, Artificial Sequence
  Description of Artificial Sequence: Synthetic peptide
  Seed: SPGMMMGMFNMLSTV
SPGMMMQMFNMVSTV

SEQ ID NO: 199799 - protein, 15 aa, Artificial Sequence
  Description of Artificial Sequence: Synthetic peptide
  Seed: SPGMMMGMFNMLSTV
SPGMMMQMNNMFSTV

SEQ ID NO: 199800 - protein, 15 aa, Artificial Sequence
  Description of Artificial Sequence: Synthetic peptide
  Seed: SPGMMMGMFNMLSTV
SPGMMMQMNNMISTV

SEQ ID NO: 199801 - protein, 15 aa, Artificial Sequence
  Description of Artificial Sequence: Synthetic peptide
  Seed: SPGMMMGMFNMLSTV
SPGMMMQMNNMLSTV

SEQ ID NO: 199802 - protein, 15 aa, Artificial Sequence
  Description of Artificial Sequence: Synthetic peptide
  Seed: SPGMMMGMFNMLSTV
SPGMMMQMNNMVSTV

SEQ ID NO: 199803 - protein, 15 aa, Artificial Sequence
  Description of Artificial Sequence: Synthetic peptide
  Seed: SPGMMMGMFNMLSTV
SPGMMMQMNNMYSTV

SEQ ID NO: 199804 - protein, 15 aa, Artificial Sequence
  Description of Artificial Sequence: Synthetic peptide
  Seed: SPGMMMGMFNMLSTV
SPGMMMQMPNMISTV

SEQ ID NO: 199805 - protein, 15 aa, Artificial Sequence
  Description of Artificial Sequence: Synthetic peptide
  Seed: SPGMMMGMFNMLSTV
SPGMMMQMSNMISTV

SEQ ID NO: 199806 - protein, 15 aa, Artificial Sequence
  Description of Artificial Sequence: Synthetic peptide
  Seed: SPGMMMGMFNMLSTV
SPGMMMQMSNMVSTV

SEQ ID NO: 199807 - protein, 15 aa, Artificial Sequence
  Description of Artificial Sequence: Synthetic peptide
  Seed: SPGMMMGMFNMLSTV
SPGMMMRMFNMFSTV

SEQ ID NO: 199808 - protein, 15 aa, Artificial Sequence
  Description of Artificial Sequence: Synthetic peptide
  Seed: SPGMMMGMFNMLSTV
SPGMMMRMFNMLSTV

SEQ ID NO: 199809 - protein, 15 aa, Artificial Sequence
  Description of Artificial Sequence: Synthetic peptide
  Seed: SPGMMMGMFNMLSTV
SPGMMMRMNNMVSTV

SEQ ID NO: 199810 - protein, 15 aa, Artificial Sequence
  Description of Artificial Sequence: Synthetic peptide
  Seed: SPGMMMGMFNMLSTV
SPGMMMSMANMASTV

SEQ ID NO: 199811 - protein, 15 aa, Artificial Sequence
  Description of Artificial Sequence: Synthetic peptide
  Seed: SPGMMMGMFNMLSTV
SPGMMMSMANMFSTV

SEQ ID NO: 199812 - protein, 15 aa, Artificial Sequence
  Description of Artificial Sequence: Synthetic peptide
  Seed: SPGMMMGMFNMLSTV
SPGMMMSMANMISTV

SEQ ID NO: 199813 - protein, 15 aa, Artificial Sequence
  Description of Artificial Sequence: Synthetic peptide
  Seed: SPGMMMGMFNMLSTV
SPGMMMSMANMLSTV

SEQ ID NO: 199814 - protein, 15 aa, Artificial Sequence
  Description of Artificial Sequence: Synthetic peptide
  Seed: SPGMMMGMFNMLSTV
SPGMMMSMANMMSTV

SEQ ID NO: 199815 - protein, 15 aa, Artificial Sequence
  Description of Artificial Sequence: Synthetic peptide
  Seed: SPGMMMGMFNMLSTV
SPGMMMSMANMSSTV

SEQ ID NO: 199816 - protein, 15 aa, Artificial Sequence
  Description of Artificial Sequence: Synthetic peptide
  Seed: SPGMMMGMFNMLSTV
SPGMMMSMANMTSTV

SEQ ID NO: 199817 - protein, 15 aa, Artificial Sequence
  Description of Artificial Sequence: Synthetic peptide
  Seed: SPGMMMGMFNMLSTV
SPGMMMSMANMVSTV

SEQ ID NO: 199818 - protein, 15 aa, Artificial Sequence
  Description of Artificial Sequence: Synthetic peptide
  Seed: SPGMMMGMFNMLSTV
SPGMMMSMANMYSTV

SEQ ID NO: 199819 - protein, 15 aa, Artificial Sequence
  Description of Artificial Sequence: Synthetic peptide
  Seed: SPGMMMGMFNMLSTV
SPGMMMSMFNMASTV

SEQ ID NO: 199820 - protein, 15 aa, Artificial Sequence
  Description of Artificial Sequence: Synthetic peptide
  Seed: SPGMMMGMFNMLSTV
SPGMMMSMFNMESTV

SEQ ID NO: 199821 - protein, 15 aa, Artificial Sequence
  Description of Artificial Sequence: Synthetic peptide
  Seed: SPGMMMGMFNMLSTV
SPGMMMSMFNMFSTV

SEQ ID NO: 199822 - protein, 15 aa, Artificial Sequence
  Description of Artificial Sequence: Synthetic peptide
  Seed: SPGMMMGMFNMLSTV
SPGMMMSMFNMISTV

SEQ ID NO: 199823 - protein, 15 aa, Artificial Sequence
  Description of Artificial Sequence: Synthetic peptide
  Seed: SPGMMMGMFNMLSTV
SPGMMMSMFNMLSTV

SEQ ID NO: 199824 - protein, 15 aa, Artificial Sequence
  Description of Artificial Sequence: Synthetic peptide
  Seed: SPGMMMGMFNMLSTV
SPGMMMSMFNMMSTV

SEQ ID NO: 199825 - protein, 15 aa, Artificial Sequence
  Description of Artificial Sequence: Synthetic peptide
  Seed: SPGMMMGMFNMLSTV
SPGMMMSMFNMNSTV

SEQ ID NO: 199826 - protein, 15 aa, Artificial Sequence
  Description of Artificial Sequence: Synthetic peptide
  Seed: SPGMMMGMFNMLSTV
SPGMMMSMFNMSSTV

SEQ ID NO: 199827 - protein, 15 aa, Artificial Sequence
  Description of Artificial Sequence: Synthetic peptide
  Seed: SPGMMMGMFNMLSTV
SPGMMMSMFNMTSTV

SEQ ID NO: 199828 - protein, 15 aa, Artificial Sequence
  Description of Artificial Sequence: Synthetic peptide
  Seed: SPGMMMGMFNMLSTV
SPGMMMSMFNMVSTV

SEQ ID NO: 199829 - protein, 15 aa, Artificial Sequence
  Description of Artificial Sequence: Synthetic peptide
  Seed: SPGMMMGMFNMLSTV
SPGMMMSMFNMYSTV

SEQ ID NO: 199830 - protein, 15 aa, Artificial Sequence
  Description of Artificial Sequence: Synthetic peptide
  Seed: SPGMMMGMFNMLSTV
SPGMMMSMGNMASTV

SEQ ID NO: 199831 - protein, 15 aa, Artificial Sequence
  Description of Artificial Sequence: Synthetic peptide
  Seed: SPGMMMGMFNMLSTV
SPGMMMSMGNMFSTV

SEQ ID NO: 199832 - protein, 15 aa, Artificial Sequence
  Description of Artificial Sequence: Synthetic peptide
  Seed: SPGMMMGMFNMLSTV
SPGMMMSMGNMISTV

SEQ ID NO: 199833 - protein, 15 aa, Artificial Sequence
  Description of Artificial Sequence: Synthetic peptide
  Seed: SPGMMMGMFNMLSTV
SPGMMMSMGNMLSTV

SEQ ID NO: 199834 - protein, 15 aa, Artificial Sequence
  Description of Artificial Sequence: Synthetic peptide
  Seed: SPGMMMGMFNMLSTV
SPGMMMSMGNMMSTV

SEQ ID NO: 199835 - protein, 15 aa, Artificial Sequence
  Description of Artificial Sequence: Synthetic peptide
  Seed: SPGMMMGMFNMLSTV
SPGMMMSMGNMVSTV

SEQ ID NO: 199836 - protein, 15 aa, Artificial Sequence
  Description of Artificial Sequence: Synthetic peptide
  Seed: SPGMMMGMFNMLSTV
SPGMMMSMGNMYSTV

SEQ ID NO: 199837 - protein, 15 aa, Artificial Sequence
  Description of Artificial Sequence: Synthetic peptide
  Seed: SPGMMMGMFNMLSTV
SPGMMMSMHNMISTV

SEQ ID NO: 199838 - protein, 15 aa, Artificial Sequence
  Description of Artificial Sequence: Synthetic peptide
  Seed: SPGMMMGMFNMLSTV
SPGMMMSMINMISTV

SEQ ID NO: 199839 - protein, 15 aa, Artificial Sequence
  Description of Artificial Sequence: Synthetic peptide
  Seed: SPGMMMGMFNMLSTV
SPGMMMSMINMVSTV

SEQ ID NO: 199840 - protein, 15 aa, Artificial Sequence
  Description of Artificial Sequence: Synthetic peptide
  Seed: SPGMMMGMFNMLSTV
SPGMMMSMNNMASTV

SEQ ID NO: 199841 - protein, 15 aa, Artificial Sequence
  Description of Artificial Sequence: Synthetic peptide
  Seed: SPGMMMGMFNMLSTV
SPGMMMSMNNMFSTV

SEQ ID NO: 199842 - protein, 15 aa, Artificial Sequence
  Description of Artificial Sequence: Synthetic peptide
  Seed: SPGMMMGMFNMLSTV
SPGMMMSMNNMISTV

SEQ ID NO: 199843 - protein, 15 aa, Artificial Sequence
  Description of Artificial Sequence: Synthetic peptide
  Seed: SPGMMMGMFNMLSTV
SPGMMMSMNNMLSTV

SEQ ID NO: 199844 - protein, 15 aa, Artificial Sequence
  Description of Artificial Sequence: Synthetic peptide
  Seed: SPGMMMGMFNMLSTV
SPGMMMSMNNMMSTV

SEQ ID NO: 199845 - protein, 15 aa, Artificial Sequence
  Description of Artificial Sequence: Synthetic peptide
  Seed: SPGMMMGMFNMLSTV
SPGMMMSMNNMVSTV

SEQ ID NO: 199846 - protein, 15 aa, Artificial Sequence
  Description of Artificial Sequence: Synthetic peptide
  Seed: SPGMMMGMFNMLSTV
SPGMMMSMNNMYSTV

SEQ ID NO: 199847 - protein, 15 aa, Artificial Sequence
  Description of Artificial Sequence: Synthetic peptide
  Seed: SPGMMMGMFNMLSTV
SPGMMMSMPNMASTV

SEQ ID NO: 199848 - protein, 15 aa, Artificial Sequence
  Description of Artificial Sequence: Synthetic peptide
  Seed: SPGMMMGMFNMLSTV
SPGMMMSMPNMFSTV

SEQ ID NO: 199849 - protein, 15 aa, Artificial Sequence
  Description of Artificial Sequence: Synthetic peptide
  Seed: SPGMMMGMFNMLSTV
SPGMMMSMPNMISTV

SEQ ID NO: 199850 - protein, 15 aa, Artificial Sequence
  Description of Artificial Sequence: Synthetic peptide
  Seed: SPGMMMGMFNMLSTV
SPGMMMSMPNMLSTV

SEQ ID NO: 199851 - protein, 15 aa, Artificial Sequence
  Description of Artificial Sequence: Synthetic peptide
  Seed: SPGMMMGMFNMLSTV
SPGMMMSMPNMMSTV

SEQ ID NO: 199852 - protein, 15 aa, Artificial Sequence
  Description of Artificial Sequence: Synthetic peptide
  Seed: SPGMMMGMFNMLSTV
SPGMMMSMPNMVSTV

SEQ ID NO: 199853 - protein, 15 aa, Artificial Sequence
  Description of Artificial Sequence: Synthetic peptide
  Seed: SPGMMMGMFNMLSTV
SPGMMMSMPNMYSTV

SEQ ID NO: 199854 - protein, 15 aa, Artificial Sequence
  Description of Artificial Sequence: Synthetic peptide
  Seed: SPGMMMGMFNMLSTV
SPGMMMSMSNMASTV

SEQ ID NO: 199855 - protein, 15 aa, Artificial Sequence
  Description of Artificial Sequence: Synthetic peptide
  Seed: SPGMMMGMFNMLSTV
SPGMMMSMSNMFSTV

SEQ ID NO: 199856 - protein, 15 aa, Artificial Sequence
  Description of Artificial Sequence: Synthetic peptide
  Seed: SPGMMMGMFNMLSTV
SPGMMMSMSNMISTV

SEQ ID NO: 199857 - protein, 15 aa, Artificial Sequence
  Description of Artificial Sequence: Synthetic peptide
  Seed: SPGMMMGMFNMLSTV
SPGMMMSMSNMLSTV

SEQ ID NO: 199858 - protein, 15 aa, Artificial Sequence
  Description of Artificial Sequence: Synthetic peptide
  Seed: SPGMMMGMFNMLSTV
SPGMMMSMSNMMSTV

SEQ ID NO: 199859 - protein, 15 aa, Artificial Sequence
  Description of Artificial Sequence: Synthetic peptide
  Seed: SPGMMMGMFNMLSTV
SPGMMMSMSNMTSTV

SEQ ID NO: 199860 - protein, 15 aa, Artificial Sequence
  Description of Artificial Sequence: Synthetic peptide
  Seed: SPGMMMGMFNMLSTV
SPGMMMSMSNMVSTV

SEQ ID NO: 199861 - protein, 15 aa, Artificial Sequence
  Description of Artificial Sequence: Synthetic peptide
  Seed: SPGMMMGMFNMLSTV
SPGMMMSMSNMYSTV

SEQ ID NO: 199862 - protein, 15 aa, Artificial Sequence
  Description of Artificial Sequence: Synthetic peptide
  Seed: SPGMMMGMFNMLSTV
SPGMMMSMTNMFSTV

SEQ ID NO: 199863 - protein, 15 aa, Artificial Sequence
  Description of Artificial Sequence: Synthetic peptide
  Seed: SPGMMMGMFNMLSTV
SPGMMMSMTNMISTV

SEQ ID NO: 199864 - protein, 15 aa, Artificial Sequence
  Description of Artificial Sequence: Synthetic peptide
  Seed: SPGMMMGMFNMLSTV
SPGMMMSMTNMLSTV

SEQ ID NO: 199865 - protein, 15 aa, Artificial Sequence
  Description of Artificial Sequence: Synthetic peptide
  Seed: SPGMMMGMFNMLSTV
SPGMMMSMTNMMSTV

SEQ ID NO: 199866 - protein, 15 aa, Artificial Sequence
  Description of Artificial Sequence: Synthetic peptide
  Seed: SPGMMMGMFNMLSTV
SPGMMMSMTNMVSTV

SEQ ID NO: 199867 - protein, 15 aa, Artificial Sequence
  Description of Artificial Sequence: Synthetic peptide
  Seed: SPGMMMGMFNMLSTV
SPGMMMSMTNMYSTV

SEQ ID NO: 199868 - protein, 15 aa, Artificial Sequence
  Description of Artificial Sequence: Synthetic peptide
  Seed: SPGMMMGMFNMLSTV
SPGMMMSMVNMISTV

SEQ ID NO: 199869 - protein, 15 aa, Artificial Sequence
  Description of Artificial Sequence: Synthetic peptide
  Seed: SPGMMMGMFNMLSTV
SPGMMMSMVNMLSTV

SEQ ID NO: 199870 - protein, 15 aa, Artificial Sequence
  Description of Artificial Sequence: Synthetic peptide
  Seed: SPGMMMGMFNMLSTV
SPGMMMSMVNMVSTV

SEQ ID NO: 199871 - protein, 15 aa, Artificial Sequence
  Description of Artificial Sequence: Synthetic peptide
  Seed: SPGMMMGMFNMLSTV
SPGMMMSMWNMLSTV

SEQ ID NO: 199872 - protein, 15 aa, Artificial Sequence
  Description of Artificial Sequence: Synthetic peptide
  Seed: SPGMMMGMFNMLSTV
SPGMMMSMYNMFSTV

SEQ ID NO: 199873 - protein, 15 aa, Artificial Sequence
  Description of Artificial Sequence: Synthetic peptide
  Seed: SPGMMMGMFNMLSTV
SPGMMMSMYNMISTV

SEQ ID NO: 199874 - protein, 15 aa, Artificial Sequence
  Description of Artificial Sequence: Synthetic peptide
  Seed: SPGMMMGMFNMLSTV
SPGMMMSMYNMLSTV

SEQ ID NO: 199875 - protein, 15 aa, Artificial Sequence
  Description of Artificial Sequence: Synthetic peptide
  Seed: SPGMMMGMFNMLSTV
SPGMMMSMYNMVSTV

SEQ ID NO: 199876 - protein, 15 aa, Artificial Sequence
  Description of Artificial Sequence: Synthetic peptide
  Seed: SPGMMMGMFNMLSTV
SPGMMMTMANMASTV

SEQ ID NO: 199877 - protein, 15 aa, Artificial Sequence
  Description of Artificial Sequence: Synthetic peptide
  Seed: SPGMMMGMFNMLSTV
SPGMMMTMANMFSTV

SEQ ID NO: 199878 - protein, 15 aa, Artificial Sequence
  Description of Artificial Sequence: Synthetic peptide
  Seed: SPGMMMGMFNMLSTV
SPGMMMTMANMISTV

SEQ ID NO: 199879 - protein, 15 aa, Artificial Sequence
  Description of Artificial Sequence: Synthetic peptide
  Seed: SPGMMMGMFNMLSTV
SPGMMMTMANMLSTV

SEQ ID NO: 199880 - protein, 15 aa, Artificial Sequence
  Description of Artificial Sequence: Synthetic peptide
  Seed: SPGMMMGMFNMLSTV
SPGMMMTMANMMSTV

SEQ ID NO: 199881 - protein, 15 aa, Artificial Sequence
  Description of Artificial Sequence: Synthetic peptide
  Seed: SPGMMMGMFNMLSTV
SPGMMMTMANMSSTV

SEQ ID NO: 199882 - protein, 15 aa, Artificial Sequence
  Description of Artificial Sequence: Synthetic peptide
  Seed: SPGMMMGMFNMLSTV
SPGMMMTMANMTSTV

SEQ ID NO: 199883 - protein, 15 aa, Artificial Sequence
  Description of Artificial Sequence: Synthetic peptide
  Seed: SPGMMMGMFNMLSTV
SPGMMMTMANMVSTV

SEQ ID NO: 199884 - protein, 15 aa, Artificial Sequence
  Description of Artificial Sequence: Synthetic peptide
  Seed: SPGMMMGMFNMLSTV
SPGMMMTMANMYSTV

SEQ ID NO: 199885 - protein, 15 aa, Artificial Sequence
  Description of Artificial Sequence: Synthetic peptide
  Seed: SPGMMMGMFNMLSTV
SPGMMMTMFNMASTV

SEQ ID NO: 199886 - protein, 15 aa, Artificial Sequence
  Description of Artificial Sequence: Synthetic peptide
  Seed: SPGMMMGMFNMLSTV
SPGMMMTMFNMESTV

SEQ ID NO: 199887 - protein, 15 aa, Artificial Sequence
  Description of Artificial Sequence: Synthetic peptide
  Seed: SPGMMMGMFNMLSTV
SPGMMMTMFNMFSTV

SEQ ID NO: 199888 - protein, 15 aa, Artificial Sequence
  Description of Artificial Sequence: Synthetic peptide
  Seed: SPGMMMGMFNMLSTV
SPGMMMTMFNMISTV

SEQ ID NO: 199889 - protein, 15 aa, Artificial Sequence
  Description of Artificial Sequence: Synthetic peptide
  Seed: SPGMMMGMFNMLSTV
SPGMMMTMFNMLSTV

SEQ ID NO: 199890 - protein, 15 aa, Artificial Sequence
  Description of Artificial Sequence: Synthetic peptide
  Seed: SPGMMMGMFNMLSTV
SPGMMMTMFNMMSTV

SEQ ID NO: 199891 - protein, 15 aa, Artificial Sequence
  Description of Artificial Sequence: Synthetic peptide
  Seed: SPGMMMGMFNMLSTV
SPGMMMTMFNMNSTV

SEQ ID NO: 199892 - protein, 15 aa, Artificial Sequence
  Description of Artificial Sequence: Synthetic peptide
  Seed: SPGMMMGMFNMLSTV
SPGMMMTMFNMSSTV

SEQ ID NO: 199893 - protein, 15 aa, Artificial Sequence
  Description of Artificial Sequence: Synthetic peptide
  Seed: SPGMMMGMFNMLSTV
SPGMMMTMFNMTSTV

SEQ ID NO: 199894 - protein, 15 aa, Artificial Sequence
  Description of Artificial Sequence: Synthetic peptide
  Seed: SPGMMMGMFNMLSTV
SPGMMMTMFNMVSTV

SEQ ID NO: 199895 - protein, 15 aa, Artificial Sequence
  Description of Artificial Sequence: Synthetic peptide
  Seed: SPGMMMGMFNMLSTV
SPGMMMTMFNMYSTV

SEQ ID NO: 199896 - protein, 15 aa, Artificial Sequence
  Description of Artificial Sequence: Synthetic peptide
  Seed: SPGMMMGMFNMLSTV
SPGMMMTMGNMASTV

SEQ ID NO: 199897 - protein, 15 aa, Artificial Sequence
  Description of Artificial Sequence: Synthetic peptide
  Seed: SPGMMMGMFNMLSTV
SPGMMMTMGNMFSTV

SEQ ID NO: 199898 - protein, 15 aa, Artificial Sequence
  Description of Artificial Sequence: Synthetic peptide
  Seed: SPGMMMGMFNMLSTV
SPGMMMTMGNMISTV

SEQ ID NO: 199899 - protein, 15 aa, Artificial Sequence
  Description of Artificial Sequence: Synthetic peptide
  Seed: SPGMMMGMFNMLSTV
SPGMMMTMGNMLSTV

SEQ ID NO: 199900 - protein, 15 aa, Artificial Sequence
  Description of Artificial Sequence: Synthetic peptide
  Seed: SPGMMMGMFNMLSTV
SPGMMMTMGNMMSTV

SEQ ID NO: 199901 - protein, 15 aa, Artificial Sequence
  Description of Artificial Sequence: Synthetic peptide
  Seed: SPGMMMGMFNMLSTV
SPGMMMTMGNMVSTV

SEQ ID NO: 199902 - protein, 15 aa, Artificial Sequence
  Description of Artificial Sequence: Synthetic peptide
  Seed: SPGMMMGMFNMLSTV
SPGMMMTMINMISTV

SEQ ID NO: 199903 - protein, 15 aa, Artificial Sequence
  Description of Artificial Sequence: Synthetic peptide
  Seed: SPGMMMGMFNMLSTV
SPGMMMTMLNMLSTV

SEQ ID NO: 199904 - protein, 15 aa, Artificial Sequence
  Description of Artificial Sequence: Synthetic peptide
  Seed: SPGMMMGMFNMLSTV
SPGMMMTMNNMASTV

SEQ ID NO: 199905 - protein, 15 aa, Artificial Sequence
  Description of Artificial Sequence: Synthetic peptide
  Seed: SPGMMMGMFNMLSTV
SPGMMMTMNNMFSTV

SEQ ID NO: 199906 - protein, 15 aa, Artificial Sequence
  Description of Artificial Sequence: Synthetic peptide
  Seed: SPGMMMGMFNMLSTV
SPGMMMTMNNMISTV

SEQ ID NO: 199907 - protein, 15 aa, Artificial Sequence
  Description of Artificial Sequence: Synthetic peptide
  Seed: SPGMMMGMFNMLSTV
SPGMMMTMNNMLSTV

SEQ ID NO: 199908 - protein, 15 aa, Artificial Sequence
  Description of Artificial Sequence: Synthetic peptide
  Seed: SPGMMMGMFNMLSTV
SPGMMMTMNNMMSTV

SEQ ID NO: 199909 - protein, 15 aa, Artificial Sequence
  Description of Artificial Sequence: Synthetic peptide
  Seed: SPGMMMGMFNMLSTV
SPGMMMTMNNMVSTV

SEQ ID NO: 199910 - protein, 15 aa, Artificial Sequence
  Description of Artificial Sequence: Synthetic peptide
  Seed: SPGMMMGMFNMLSTV
SPGMMMTMNNMYSTV

SEQ ID NO: 199911 - protein, 15 aa, Artificial Sequence
  Description of Artificial Sequence: Synthetic peptide
  Seed: SPGMMMGMFNMLSTV
SPGMMMTMPNMFSTV

SEQ ID NO: 199912 - protein, 15 aa, Artificial Sequence
  Description of Artificial Sequence: Synthetic peptide
  Seed: SPGMMMGMFNMLSTV
SPGMMMTMPNMISTV

SEQ ID NO: 199913 - protein, 15 aa, Artificial Sequence
  Description of Artificial Sequence: Synthetic peptide
  Seed: SPGMMMGMFNMLSTV
SPGMMMTMPNMLSTV

SEQ ID NO: 199914 - protein, 15 aa, Artificial Sequence
  Description of Artificial Sequence: Synthetic peptide
  Seed: SPGMMMGMFNMLSTV
SPGMMMTMPNMMSTV

SEQ ID NO: 199915 - protein, 15 aa, Artificial Sequence
  Description of Artificial Sequence: Synthetic peptide
  Seed: SPGMMMGMFNMLSTV
SPGMMMTMPNMVSTV

SEQ ID NO: 199916 - protein, 15 aa, Artificial Sequence
  Description of Artificial Sequence: Synthetic peptide
  Seed: SPGMMMGMFNMLSTV
SPGMMMTMSNMASTV

SEQ ID NO: 199917 - protein, 15 aa, Artificial Sequence
  Description of Artificial Sequence: Synthetic peptide
  Seed: SPGMMMGMFNMLSTV
SPGMMMTMSNMFSTV

SEQ ID NO: 199918 - protein, 15 aa, Artificial Sequence
  Description of Artificial Sequence: Synthetic peptide
  Seed: SPGMMMGMFNMLSTV
SPGMMMTMSNMISTV

SEQ ID NO: 199919 - protein, 15 aa, Artificial Sequence
  Description of Artificial Sequence: Synthetic peptide
  Seed: SPGMMMGMFNMLSTV
SPGMMMTMSNMLSTV

SEQ ID NO: 199920 - protein, 15 aa, Artificial Sequence
  Description of Artificial Sequence: Synthetic peptide
  Seed: SPGMMMGMFNMLSTV
SPGMMMTMSNMMSTV

SEQ ID NO: 199921 - protein, 15 aa, Artificial Sequence
  Description of Artificial Sequence: Synthetic peptide
  Seed: SPGMMMGMFNMLSTV
SPGMMMTMSNMSSTV

SEQ ID NO: 199922 - protein, 15 aa, Artificial Sequence
  Description of Artificial Sequence: Synthetic peptide
  Seed: SPGMMMGMFNMLSTV
SPGMMMTMSNMTSTV

SEQ ID NO: 199923 - protein, 15 aa, Artificial Sequence
  Description of Artificial Sequence: Synthetic peptide
  Seed: SPGMMMGMFNMLSTV
SPGMMMTMSNMVSTV

SEQ ID NO: 199924 - protein, 15 aa, Artificial Sequence
  Description of Artificial Sequence: Synthetic peptide
  Seed: SPGMMMGMFNMLSTV
SPGMMMTMSNMYSTV

SEQ ID NO: 199925 - protein, 15 aa, Artificial Sequence
  Description of Artificial Sequence: Synthetic peptide
  Seed: SPGMMMGMFNMLSTV
SPGMMMTMTNMFSTV

SEQ ID NO: 199926 - protein, 15 aa, Artificial Sequence
  Description of Artificial Sequence: Synthetic peptide
  Seed: SPGMMMGMFNMLSTV
SPGMMMTMTNMISTV

SEQ ID NO: 199927 - protein, 15 aa, Artificial Sequence
  Description of Artificial Sequence: Synthetic peptide
  Seed: SPGMMMGMFNMLSTV
SPGMMMTMTNMLSTV

SEQ ID NO: 199928 - protein, 15 aa, Artificial Sequence
  Description of Artificial Sequence: Synthetic peptide
  Seed: SPGMMMGMFNMLSTV
SPGMMMTMTNMMSTV

SEQ ID NO: 199929 - protein, 15 aa, Artificial Sequence
  Description of Artificial Sequence: Synthetic peptide
  Seed: SPGMMMGMFNMLSTV
SPGMMMTMTNMVSTV

SEQ ID NO: 199930 - protein, 15 aa, Artificial Sequence
  Description of Artificial Sequence: Synthetic peptide
  Seed: SPGMMMGMFNMLSTV
SPGMMMTMVNMISTV

SEQ ID NO: 199931 - protein, 15 aa, Artificial Sequence
  Description of Artificial Sequence: Synthetic peptide
  Seed: SPGMMMGMFNMLSTV
SPGMMMTMVNMLSTV

SEQ ID NO: 199932 - protein, 15 aa, Artificial Sequence
  Description of Artificial Sequence: Synthetic peptide
  Seed: SPGMMMGMFNMLSTV
SPGMMMTMVNMVSTV

SEQ ID NO: 199933 - protein, 15 aa, Artificial Sequence
  Description of Artificial Sequence: Synthetic peptide
  Seed: SPGMMMGMFNMLSTV
SPGMMMTMWNMLSTV

SEQ ID NO: 199934 - protein, 15 aa, Artificial Sequence
  Description of Artificial Sequence: Synthetic peptide
  Seed: SPGMMMGMFNMLSTV
SPGMMMTMYNMFSTV

SEQ ID NO: 199935 - protein, 15 aa, Artificial Sequence
  Description of Artificial Sequence: Synthetic peptide
  Seed: SPGMMMGMFNMLSTV
SPGMMMTMYNMISTV

SEQ ID NO: 199936 - protein, 15 aa, Artificial Sequence
  Description of Artificial Sequence: Synthetic peptide
  Seed: SPGMMMGMFNMLSTV
SPGMMMTMYNMLSTV

SEQ ID NO: 199937 - protein, 15 aa, Artificial Sequence
  Description of Artificial Sequence: Synthetic peptide
  Seed: SPGMMMGMFNMLSTV
SPGMMMTMYNMVSTV

SEQ ID NO: 199938 - protein, 15 aa, Artificial Sequence
  Description of Artificial Sequence: Synthetic peptide
  Seed: SPGMMMGMFNMLSTV
SPGMMMVMANMASTV

SEQ ID NO: 199939 - protein, 15 aa, Artificial Sequence
  Description of Artificial Sequence: Synthetic peptide
  Seed: SPGMMMGMFNMLSTV
SPGMMMVMANMISTV

SEQ ID NO: 199940 - protein, 15 aa, Artificial Sequence
  Description of Artificial Sequence: Synthetic peptide
  Seed: SPGMMMGMFNMLSTV
SPGMMMVMANMLSTV

SEQ ID NO: 199941 - protein, 15 aa, Artificial Sequence
  Description of Artificial Sequence: Synthetic peptide
  Seed: SPGMMMGMFNMLSTV
SPGMMMVMANMMSTV

SEQ ID NO: 199942 - protein, 15 aa, Artificial Sequence
  Description of Artificial Sequence: Synthetic peptide
  Seed: SPGMMMGMFNMLSTV
SPGMMMVMANMSSTV

SEQ ID NO: 199943 - protein, 15 aa, Artificial Sequence
  Description of Artificial Sequence: Synthetic peptide
  Seed: SPGMMMGMFNMLSTV
SPGMMMVMANMVSTV

SEQ ID NO: 199944 - protein, 15 aa, Artificial Sequence
  Description of Artificial Sequence: Synthetic peptide
  Seed: SPGMMMGMFNMLSTV
SPGMMMVMFNMESTV

SEQ ID NO: 199945 - protein, 15 aa, Artificial Sequence
  Description of Artificial Sequence: Synthetic peptide
  Seed: SPGMMMGMFNMLSTV
SPGMMMVMFNMFSTV

SEQ ID NO: 199946 - protein, 15 aa, Artificial Sequence
  Description of Artificial Sequence: Synthetic peptide
  Seed: SPGMMMGMFNMLSTV
SPGMMMVMFNMLSTV

SEQ ID NO: 199947 - protein, 15 aa, Artificial Sequence
  Description of Artificial Sequence: Synthetic peptide
  Seed: SPGMMMGMFNMLSTV
SPGMMMVMFNMYSTV

SEQ ID NO: 199948 - protein, 15 aa, Artificial Sequence
  Description of Artificial Sequence: Synthetic peptide
  Seed: SPGMMMGMFNMLSTV
SPGMMMVMGNMISTV

SEQ ID NO: 199949 - protein, 15 aa, Artificial Sequence
  Description of Artificial Sequence: Synthetic peptide
  Seed: SPGMMMGMFNMLSTV
SPGMMMVMGNMLSTV

SEQ ID NO: 199950 - protein, 15 aa, Artificial Sequence
  Description of Artificial Sequence: Synthetic peptide
  Seed: SPGMMMGMFNMLSTV
SPGMMMVMGNMVSTV

SEQ ID NO: 199951 - protein, 15 aa, Artificial Sequence
  Description of Artificial Sequence: Synthetic peptide
  Seed: SPGMMMGMFNMLSTV
SPGMMMVMKNMASTV

SEQ ID NO: 199952 - protein, 15 aa, Artificial Sequence
  Description of Artificial Sequence: Synthetic peptide
  Seed: SPGMMMGMFNMLSTV
SPGMMMVMKNMSSTV

SEQ ID NO: 199953 - protein, 15 aa, Artificial Sequence
  Description of Artificial Sequence: Synthetic peptide
  Seed: SPGMMMGMFNMLSTV
SPGMMMVMNNMASTV

SEQ ID NO: 199954 - protein, 15 aa, Artificial Sequence
  Description of Artificial Sequence: Synthetic peptide
  Seed: SPGMMMGMFNMLSTV
SPGMMMVMNNMFSTV

SEQ ID NO: 199955 - protein, 15 aa, Artificial Sequence
  Description of Artificial Sequence: Synthetic peptide
  Seed: SPGMMMGMFNMLSTV
SPGMMMVMNNMISTV

SEQ ID NO: 199956 - protein, 15 aa, Artificial Sequence
  Description of Artificial Sequence: Synthetic peptide
  Seed: SPGMMMGMFNMLSTV
SPGMMMVMNNMLSTV

SEQ ID NO: 199957 - protein, 15 aa, Artificial Sequence
  Description of Artificial Sequence: Synthetic peptide
  Seed: SPGMMMGMFNMLSTV
SPGMMMVMNNMMSTV

SEQ ID NO: 199958 - protein, 15 aa, Artificial Sequence
  Description of Artificial Sequence: Synthetic peptide
  Seed: SPGMMMGMFNMLSTV
SPGMMMVMNNMSSTV

SEQ ID NO: 199959 - protein, 15 aa, Artificial Sequence
  Description of Artificial Sequence: Synthetic peptide
  Seed: SPGMMMGMFNMLSTV
SPGMMMVMNNMTSTV

SEQ ID NO: 199960 - protein, 15 aa, Artificial Sequence
  Description of Artificial Sequence: Synthetic peptide
  Seed: SPGMMMGMFNMLSTV
SPGMMMVMNNMVSTV

SEQ ID NO: 199961 - protein, 15 aa, Artificial Sequence
  Description of Artificial Sequence: Synthetic peptide
  Seed: SPGMMMGMFNMLSTV
SPGMMMVMNNMYSTV

SEQ ID NO: 199962 - protein, 15 aa, Artificial Sequence
  Description of Artificial Sequence: Synthetic peptide
  Seed: SPGMMMGMFNMLSTV
SPGMMMVMPNMISTV

SEQ ID NO: 199963 - protein, 15 aa, Artificial Sequence
  Description of Artificial Sequence: Synthetic peptide
  Seed: SPGMMMGMFNMLSTV
SPGMMMVMPNMLSTV

SEQ ID NO: 199964 - protein, 15 aa, Artificial Sequence
  Description of Artificial Sequence: Synthetic peptide
  Seed: SPGMMMGMFNMLSTV
SPGMMMVMPNMVSTV

SEQ ID NO: 199965 - protein, 15 aa, Artificial Sequence
  Description of Artificial Sequence: Synthetic peptide
  Seed: SPGMMMGMFNMLSTV
SPGMMMVMRNMASTV

SEQ ID NO: 199966 - protein, 15 aa, Artificial Sequence
  Description of Artificial Sequence: Synthetic peptide
  Seed: SPGMMMGMFNMLSTV
SPGMMMVMRNMSSTV

SEQ ID NO: 199967 - protein, 15 aa, Artificial Sequence
  Description of Artificial Sequence: Synthetic peptide
  Seed: SPGMMMGMFNMLSTV
SPGMMMVMSNMASTV

SEQ ID NO: 199968 - protein, 15 aa, Artificial Sequence
  Description of Artificial Sequence: Synthetic peptide
  Seed: SPGMMMGMFNMLSTV
SPGMMMVMSNMISTV

SEQ ID NO: 199969 - protein, 15 aa, Artificial Sequence
  Description of Artificial Sequence: Synthetic peptide
  Seed: SPGMMMGMFNMLSTV
SPGMMMVMSNMLSTV

SEQ ID NO: 199970 - protein, 15 aa, Artificial Sequence
  Description of Artificial Sequence: Synthetic peptide
  Seed: SPGMMMGMFNMLSTV
SPGMMMVMSNMMSTV

SEQ ID NO: 199971 - protein, 15 aa, Artificial Sequence
  Description of Artificial Sequence: Synthetic peptide
  Seed: SPGMMMGMFNMLSTV
SPGMMMVMSNMSSTV

SEQ ID NO: 199972 - protein, 15 aa, Artificial Sequence
  Description of Artificial Sequence: Synthetic peptide
  Seed: SPGMMMGMFNMLSTV
SPGMMMVMSNMVSTV

SEQ ID NO: 199973 - protein, 15 aa, Artificial Sequence
  Description of Artificial Sequence: Synthetic peptide
  Seed: SPGMMMGMFNMLSTV
SPGMMMVMTNMASTV

SEQ ID NO: 199974 - protein, 15 aa, Artificial Sequence
  Description of Artificial Sequence: Synthetic peptide
  Seed: SPGMMMGMFNMLSTV
SPGMMMVMTNMISTV

SEQ ID NO: 199975 - protein, 15 aa, Artificial Sequence
  Description of Artificial Sequence: Synthetic peptide
  Seed: SPGMMMGMFNMLSTV
SPGMMMVMTNMVSTV

SEQ ID NO: 199976 - protein, 15 aa, Artificial Sequence
  Description of Artificial Sequence: Synthetic peptide
  Seed: SPGMMMGMFNMLSTV
SPGMMMVMYNMLSTV

SEQ ID NO: 199977 - protein, 15 aa, Artificial Sequence
  Description of Artificial Sequence: Synthetic peptide
  Seed: SPGMMMGMFNMLSTV
SPGMMMWMFNMFSTV

SEQ ID NO: 199978 - protein, 15 aa, Artificial Sequence
  Description of Artificial Sequence: Synthetic peptide
  Seed: SPGMMMGMFNMLSTV
SPGMMMWMFNMISTV

SEQ ID NO: 199979 - protein, 15 aa, Artificial Sequence
  Description of Artificial Sequence: Synthetic peptide
  Seed: SPGMMMGMFNMLSTV
SPGMMMWMFNMLSTV

SEQ ID NO: 199980 - protein, 15 aa, Artificial Sequence
  Description of Artificial Sequence: Synthetic peptide
  Seed: SPGMMMGMFNMLSTV
SPGMMMWMFNMMSTV

SEQ ID NO: 199981 - protein, 15 aa, Artificial Sequence
  Description of Artificial Sequence: Synthetic peptide
  Seed: SPGMMMGMFNMLSTV
SPGMMMWMFNMVSTV

SEQ ID NO: 199982 - protein, 15 aa, Artificial Sequence
  Description of Artificial Sequence: Synthetic peptide
  Seed: SPGMMMGMFNMLSTV
SPGMMMWMFNMYSTV

SEQ ID NO: 199983 - protein, 15 aa, Artificial Sequence
  Description of Artificial Sequence: Synthetic peptide
  Seed: SPGMMMGMFNMLSTV
SPGMMMWMLNMFSTV

SEQ ID NO: 199984 - protein, 15 aa, Artificial Sequence
  Description of Artificial Sequence: Synthetic peptide
  Seed: SPGMMMGMFNMLSTV
SPGMMMWMNNMASTV

SEQ ID NO: 199985 - protein, 15 aa, Artificial Sequence
  Description of Artificial Sequence: Synthetic peptide
  Seed: SPGMMMGMFNMLSTV
SPGMMMWMNNMISTV

SEQ ID NO: 199986 - protein, 15 aa, Artificial Sequence
  Description of Artificial Sequence: Synthetic peptide
  Seed: SPGMMMGMFNMLSTV
SPGMMMWMNNMLSTV

SEQ ID NO: 199987 - protein, 15 aa, Artificial Sequence
  Description of Artificial Sequence: Synthetic peptide
  Seed: SPGMMMGMFNMLSTV
SPGMMMWMNNMVSTV

SEQ ID NO: 199988 - protein, 15 aa, Artificial Sequence
  Description of Artificial Sequence: Synthetic peptide
  Seed: SPGMMMGMFNMLSTV
SPGMMMWMYNMLSTV

SEQ ID NO: 199989 - protein, 15 aa, Artificial Sequence
  Description of Artificial Sequence: Synthetic peptide
  Seed: SPGMMMGMFNMLSTV
SPGMMMYMANMASTV

SEQ ID NO: 199990 - protein, 15 aa, Artificial Sequence
  Description of Artificial Sequence: Synthetic peptide
  Seed: SPGMMMGMFNMLSTV
SPGMMMYMFNMLSTV

SEQ ID NO: 199991 - protein, 15 aa, Artificial Sequence
  Description of Artificial Sequence: Synthetic peptide
  Seed: SPGMMMGMFNMLSTV
SPGMMMYMFNMMSTV

SEQ ID NO: 199992 - protein, 15 aa, Artificial Sequence
  Description of Artificial Sequence: Synthetic peptide
  Seed: SPGMMMGMFNMLSTV
SPGMMMYMFNMYSTV

SEQ ID NO: 199993 - protein, 15 aa, Artificial Sequence
  Description of Artificial Sequence: Synthetic peptide
  Seed: SPGMMMGMFNMLSTV
SPGMMMYMNNMASTV

SEQ ID NO: 199994 - protein, 15 aa, Artificial Sequence
  Description of Artificial Sequence: Synthetic peptide
  Seed: SPGMMMGMFNMLSTV
SPGMMMYMNNMISTV

SEQ ID NO: 199995 - protein, 15 aa, Artificial Sequence
  Description of Artificial Sequence: Synthetic peptide
  Seed: SPGMMMGMFNMLSTV
SPGMMMYMNNMLSTV

SEQ ID NO: 199996 - protein, 15 aa, Artificial Sequence
  Description of Artificial Sequence: Synthetic peptide
  Seed: SPGMMMGMFNMLSTV
SPGMMMYMNNMVSTV

SEQ ID NO: 199997 - protein, 15 aa, Artificial Sequence
  Description of Artificial Sequence: Synthetic peptide
  Seed: SPGMMMGMFNMLSTV
SPGMMMYMRNMASTV

SEQ ID NO: 199998 - protein, 15 aa, Artificial Sequence
  Description of Artificial Sequence: Synthetic peptide
  Seed: SPGMMMGMFNMLSTV
SPGMMMYMWNMLSTV

SEQ ID NO: 199999 - protein, 15 aa, Artificial Sequence
  Description of Artificial Sequence: Synthetic peptide
  Seed: SPGMMMGMFNMLSTV
SPGMMMYMYNMLSTV

SEQ ID NO: 200000 - protein, 15 aa, Artificial Sequence
  Description of Artificial Sequence: Synthetic peptide
  Seed: SPGMMMGMFNMLSTV
SPGNMMAMANMASTV

SEQ ID NO: 200001 - protein, 15 aa, Artificial Sequence
  Description of Artificial Sequence: Synthetic peptide
  Seed: SPGMMMGMFNMLSTV
SPGNMMNMANMISTV

SEQ ID NO: 200002 - protein, 15 aa, Artificial Sequence
  Description of Artificial Sequence: Synthetic peptide
  Seed: SPGMMMGMFNMLSTV
SPGNMMTMANMISTV

SEQ ID NO: 200003 - protein, 15 aa, Artificial Sequence
  Description of Artificial Sequence: Synthetic peptide
  Seed: SPGMMMGMFNMLSTV
SPGNMMTMSNMISTV

SEQ ID NO: 200004 - protein, 15 aa, Artificial Sequence
  Description of Artificial Sequence: Synthetic peptide
  Seed: SPGMMMGMFNMLSTV
SPGNMMTMSNMLSTV

SEQ ID NO: 200005 - protein, 15 aa, Artificial Sequence
  Description of Artificial Sequence: Synthetic peptide
  Seed: SPGMMMGMFNMLSTV
SPGPMMAMANMASTV

SEQ ID NO: 200006 - protein, 15 aa, Artificial Sequence
  Description of Artificial Sequence: Synthetic peptide
  Seed: SPGMMMGMFNMLSTV
SPGPMMGMANMASTV

SEQ ID NO: 200007 - protein, 15 aa, Artificial Sequence
  Description of Artificial Sequence: Synthetic peptide
  Seed: SPGMMMGMFNMLSTV
SPGQMMFMFNMISTV

SEQ ID NO: 200008 - protein, 15 aa, Artificial Sequence
  Description of Artificial Sequence: Synthetic peptide
  Seed: SPGMMMGMFNMLSTV
SPGQMMFMFNMLSTV

SEQ ID NO: 200009 - protein, 15 aa, Artificial Sequence
  Description of Artificial Sequence: Synthetic peptide
  Seed: SPGMMMGMFNMLSTV
SPGQMMIMFNMLSTV

SEQ ID NO: 200010 - protein, 15 aa, Artificial Sequence
  Description of Artificial Sequence: Synthetic peptide
  Seed: SPGMMMGMFNMLSTV
SPGQMMIMYNMLSTV

SEQ ID NO: 200011 - protein, 15 aa, Artificial Sequence
  Description of Artificial Sequence: Synthetic peptide
  Seed: SPGMMMGMFNMLSTV
SPGQMMLMFNMLSTV

SEQ ID NO: 200012 - protein, 15 aa, Artificial Sequence
  Description of Artificial Sequence: Synthetic peptide
  Seed: SPGMMMGMFNMLSTV
SPGQMMNMANMISTV

SEQ ID NO: 200013 - protein, 15 aa, Artificial Sequence
  Description of Artificial Sequence: Synthetic peptide
  Seed: SPGMMMGMFNMLSTV
SPGQMMNMNNMISTV

SEQ ID NO: 200014 - protein, 15 aa, Artificial Sequence
  Description of Artificial Sequence: Synthetic peptide
  Seed: SPGMMMGMFNMLSTV
SPGQMMNMSNMISTV

SEQ ID NO: 200015 - protein, 15 aa, Artificial Sequence
  Description of Artificial Sequence: Synthetic peptide
  Seed: SPGMMMGMFNMLSTV
SPGQMMSMFNMLSTV

SEQ ID NO: 200016 - protein, 15 aa, Artificial Sequence
  Description of Artificial Sequence: Synthetic peptide
  Seed: SPGMMMGMFNMLSTV
SPGQMMSMSNMISTV

SEQ ID NO: 200017 - protein, 15 aa, Artificial Sequence
  Description of Artificial Sequence: Synthetic peptide
  Seed: SPGMMMGMFNMLSTV
SPGQMMTMANMISTV

SEQ ID NO: 200018 - protein, 15 aa, Artificial Sequence
  Description of Artificial Sequence: Synthetic peptide
  Seed: SPGMMMGMFNMLSTV
SPGQMMTMFNMISTV

SEQ ID NO: 200019 - protein, 15 aa, Artificial Sequence
  Description of Artificial Sequence: Synthetic peptide
  Seed: SPGMMMGMFNMLSTV
SPGQMMTMFNMLSTV

SEQ ID NO: 200020 - protein, 15 aa, Artificial Sequence
  Description of Artificial Sequence: Synthetic peptide
  Seed: SPGMMMGMFNMLSTV
SPGQMMTMSNMISTV

SEQ ID NO: 200021 - protein, 15 aa, Artificial Sequence
  Description of Artificial Sequence: Synthetic peptide
  Seed: SPGMMMGMFNMLSTV
SPGQMMTMSNMLSTV

SEQ ID NO: 200022 - protein, 15 aa, Artificial Sequence
  Description of Artificial Sequence: Synthetic peptide
  Seed: SPGMMMGMFNMLSTV
SPGQMMVMFNMLSTV

SEQ ID NO: 200023 - protein, 15 aa, Artificial Sequence
  Description of Artificial Sequence: Synthetic peptide
  Seed: SPGMMMGMFNMLSTV
SPGQMMWMFNMLSTV

SEQ ID NO: 200024 - protein, 15 aa, Artificial Sequence
  Description of Artificial Sequence: Synthetic peptide
  Seed: SPGMMMGMFNMLSTV
SPGRMMAMFNMLSTV

SEQ ID NO: 200025 - protein, 15 aa, Artificial Sequence
  Description of Artificial Sequence: Synthetic peptide
  Seed: SPGMMMGMFNMLSTV
SPGRMMEMFNMLSTV

SEQ ID NO: 200026 - protein, 15 aa, Artificial Sequence
  Description of Artificial Sequence: Synthetic peptide
  Seed: SPGMMMGMFNMLSTV
SPGRMMFMFNMISTV

SEQ ID NO: 200027 - protein, 15 aa, Artificial Sequence
  Description of Artificial Sequence: Synthetic peptide
  Seed: SPGMMMGMFNMLSTV
SPGRMMFMFNMMSTV

SEQ ID NO: 200028 - protein, 15 aa, Artificial Sequence
  Description of Artificial Sequence: Synthetic peptide
  Seed: SPGMMMGMFNMLSTV
SPGRMMFMFNMVSTV

SEQ ID NO: 200029 - protein, 15 aa, Artificial Sequence
  Description of Artificial Sequence: Synthetic peptide
  Seed: SPGMMMGMFNMLSTV
SPGRMMHMFNMLSTV

SEQ ID NO: 200030 - protein, 15 aa, Artificial Sequence
  Description of Artificial Sequence: Synthetic peptide
  Seed: SPGMMMGMFNMLSTV
SPGRMMIMFNMISTV

SEQ ID NO: 200031 - protein, 15 aa, Artificial Sequence
  Description of Artificial Sequence: Synthetic peptide
  Seed: SPGMMMGMFNMLSTV
SPGRMMIMFNMLSTV

SEQ ID NO: 200032 - protein, 15 aa, Artificial Sequence
  Description of Artificial Sequence: Synthetic peptide
  Seed: SPGMMMGMFNMLSTV
SPGRMMIMFNMVSTV

SEQ ID NO: 200033 - protein, 15 aa, Artificial Sequence
  Description of Artificial Sequence: Synthetic peptide
  Seed: SPGMMMGMFNMLSTV
SPGRMMLMFNMLSTV

SEQ ID NO: 200034 - protein, 15 aa, Artificial Sequence
  Description of Artificial Sequence: Synthetic peptide
  Seed: SPGMMMGMFNMLSTV
SPGRMMMMFNMLSTV

SEQ ID NO: 200035 - protein, 15 aa, Artificial Sequence
  Description of Artificial Sequence: Synthetic peptide
  Seed: SPGMMMGMFNMLSTV
SPGRMMNMNNMISTV

SEQ ID NO: 200036 - protein, 15 aa, Artificial Sequence
  Description of Artificial Sequence: Synthetic peptide
  Seed: SPGMMMGMFNMLSTV
SPGRMMNMNNMVSTV

SEQ ID NO: 200037 - protein, 15 aa, Artificial Sequence
  Description of Artificial Sequence: Synthetic peptide
  Seed: SPGMMMGMFNMLSTV
SPGRMMSMFNMISTV

SEQ ID NO: 200038 - protein, 15 aa, Artificial Sequence
  Description of Artificial Sequence: Synthetic peptide
  Seed: SPGMMMGMFNMLSTV
SPGRMMSMFNMLSTV

SEQ ID NO: 200039 - protein, 15 aa, Artificial Sequence
  Description of Artificial Sequence: Synthetic peptide
  Seed: SPGMMMGMFNMLSTV
SPGRMMSMFNMVSTV

SEQ ID NO: 200040 - protein, 15 aa, Artificial Sequence
  Description of Artificial Sequence: Synthetic peptide
  Seed: SPGMMMGMFNMLSTV
SPGRMMTMFNMFSTV

SEQ ID NO: 200041 - protein, 15 aa, Artificial Sequence
  Description of Artificial Sequence: Synthetic peptide
  Seed: SPGMMMGMFNMLSTV
SPGRMMTMFNMISTV

SEQ ID NO: 200042 - protein, 15 aa, Artificial Sequence
  Description of Artificial Sequence: Synthetic peptide
  Seed: SPGMMMGMFNMLSTV
SPGRMMTMFNMLSTV

SEQ ID NO: 200043 - protein, 15 aa, Artificial Sequence
  Description of Artificial Sequence: Synthetic peptide
  Seed: SPGMMMGMFNMLSTV
SPGRMMTMFNMVSTV

SEQ ID NO: 200044 - protein, 15 aa, Artificial Sequence
  Description of Artificial Sequence: Synthetic peptide
  Seed: SPGMMMGMFNMLSTV
SPGRMMVMFNMISTV

SEQ ID NO: 200045 - protein, 15 aa, Artificial Sequence
  Description of Artificial Sequence: Synthetic peptide
  Seed: SPGMMMGMFNMLSTV
SPGRMMVMFNMLSTV

SEQ ID NO: 200046 - protein, 15 aa, Artificial Sequence
  Description of Artificial Sequence: Synthetic peptide
  Seed: SPGMMMGMFNMLSTV
SPGRMMWMFNMLSTV

SEQ ID NO: 200047 - protein, 15 aa, Artificial Sequence
  Description of Artificial Sequence: Synthetic peptide
  Seed: SPGMMMGMFNMLSTV
SPGSMMAMANMASTV

SEQ ID NO: 200048 - protein, 15 aa, Artificial Sequence
  Description of Artificial Sequence: Synthetic peptide
  Seed: SPGMMMGMFNMLSTV
SPGSMMTMANMISTV

SEQ ID NO: 200049 - protein, 15 aa, Artificial Sequence
  Description of Artificial Sequence: Synthetic peptide
  Seed: SPGMMMGMFNMLSTV
SPGSMMTMFNMLSTV

SEQ ID NO: 200050 - protein, 15 aa, Artificial Sequence
  Description of Artificial Sequence: Synthetic peptide
  Seed: SPGMMMGMFNMLSTV
SPGSMMTMSNMISTV

SEQ ID NO: 200051 - protein, 15 aa, Artificial Sequence
  Description of Artificial Sequence: Synthetic peptide
  Seed: SPGMMMGMFNMLSTV
SPGSMMTMSNMLSTV

SEQ ID NO: 200052 - protein, 15 aa, Artificial Sequence
  Description of Artificial Sequence: Synthetic peptide
  Seed: SPGMMMGMFNMLSTV
SPGTMMAMANMASTV

SEQ ID NO: 200053 - protein, 15 aa, Artificial Sequence
  Description of Artificial Sequence: Synthetic peptide
  Seed: SPGMMMGMFNMLSTV
SPGTMMNMANMISTV

SEQ ID NO: 200054 - protein, 15 aa, Artificial Sequence
  Description of Artificial Sequence: Synthetic peptide
  Seed: SPGMMMGMFNMLSTV
SPGTMMNMANMLSTV

SEQ ID NO: 200055 - protein, 15 aa, Artificial Sequence
  Description of Artificial Sequence: Synthetic peptide
  Seed: SPGMMMGMFNMLSTV
SPGTMMNMANMVSTV

SEQ ID NO: 200056 - protein, 15 aa, Artificial Sequence
  Description of Artificial Sequence: Synthetic peptide
  Seed: SPGMMMGMFNMLSTV
SPGTMMNMNNMISTV

SEQ ID NO: 200057 - protein, 15 aa, Artificial Sequence
  Description of Artificial Sequence: Synthetic peptide
  Seed: SPGMMMGMFNMLSTV
SPGTMMNMNNMLSTV

SEQ ID NO: 200058 - protein, 15 aa, Artificial Sequence
  Description of Artificial Sequence: Synthetic peptide
  Seed: SPGMMMGMFNMLSTV
SPGTMMNMNNMVSTV

SEQ ID NO: 200059 - protein, 15 aa, Artificial Sequence
  Description of Artificial Sequence: Synthetic peptide
  Seed: SPGMMMGMFNMLSTV
SPGTMMNMSNMISTV

SEQ ID NO: 200060 - protein, 15 aa, Artificial Sequence
  Description of Artificial Sequence: Synthetic peptide
  Seed: SPGMMMGMFNMLSTV
SPGTMMNMSNMVSTV

SEQ ID NO: 200061 - protein, 15 aa, Artificial Sequence
  Description of Artificial Sequence: Synthetic peptide
  Seed: SPGMMMGMFNMLSTV
SPGTMMSMANMISTV

SEQ ID NO: 200062 - protein, 15 aa, Artificial Sequence
  Description of Artificial Sequence: Synthetic peptide
  Seed: SPGMMMGMFNMLSTV
SPGTMMSMSNMISTV

SEQ ID NO: 200063 - protein, 15 aa, Artificial Sequence
  Description of Artificial Sequence: Synthetic peptide
  Seed: SPGMMMGMFNMLSTV
SPGTMMTMANMISTV

SEQ ID NO: 200064 - protein, 15 aa, Artificial Sequence
  Description of Artificial Sequence: Synthetic peptide
  Seed: SPGMMMGMFNMLSTV
SPGTMMTMANMLSTV

SEQ ID NO: 200065 - protein, 15 aa, Artificial Sequence
  Description of Artificial Sequence: Synthetic peptide
  Seed: SPGMMMGMFNMLSTV
SPGTMMTMANMVSTV

SEQ ID NO: 200066 - protein, 15 aa, Artificial Sequence
  Description of Artificial Sequence: Synthetic peptide
  Seed: SPGMMMGMFNMLSTV
SPGTMMTMFNMLSTV

SEQ ID NO: 200067 - protein, 15 aa, Artificial Sequence
  Description of Artificial Sequence: Synthetic peptide
  Seed: SPGMMMGMFNMLSTV
SPGTMMTMSNMISTV

SEQ ID NO: 200068 - protein, 15 aa, Artificial Sequence
  Description of Artificial Sequence: Synthetic peptide
  Seed: SPGMMMGMFNMLSTV
SPGTMMTMSNMLSTV

SEQ ID NO: 200069 - protein, 15 aa, Artificial Sequence
  Description of Artificial Sequence: Synthetic peptide
  Seed: SPGMMMGMFNMLSTV
SPGTMMTMSNMVSTV

SEQ ID NO: 200070 - protein, 15 aa, Artificial Sequence
  Description of Artificial Sequence: Synthetic peptide
  Seed: SPGMMMGMFNMLSTV
SPGVMMAMANMASTV

SEQ ID NO: 200071 - protein, 15 aa, Artificial Sequence
  Description of Artificial Sequence: Synthetic peptide
  Seed: SPGMMMGMFNMLSTV
SPGVMMAMANMISTV

SEQ ID NO: 200072 - protein, 15 aa, Artificial Sequence
  Description of Artificial Sequence: Synthetic peptide
  Seed: SPGMMMGMFNMLSTV
SPGVMMAMANMLSTV

SEQ ID NO: 200073 - protein, 15 aa, Artificial Sequence
  Description of Artificial Sequence: Synthetic peptide
  Seed: SPGMMMGMFNMLSTV
SPGVMMAMANMMSTV

SEQ ID NO: 200074 - protein, 15 aa, Artificial Sequence
  Description of Artificial Sequence: Synthetic peptide
  Seed: SPGMMMGMFNMLSTV
SPGVMMAMANMSSTV

SEQ ID NO: 200075 - protein, 15 aa, Artificial Sequence
  Description of Artificial Sequence: Synthetic peptide
  Seed: SPGMMMGMFNMLSTV
SPGVMMAMANMTSTV

SEQ ID NO: 200076 - protein, 15 aa, Artificial Sequence
  Description of Artificial Sequence: Synthetic peptide
  Seed: SPGMMMGMFNMLSTV
SPGVMMAMANMVSTV

SEQ ID NO: 200077 - protein, 15 aa, Artificial Sequence
  Description of Artificial Sequence: Synthetic peptide
  Seed: SPGMMMGMFNMLSTV
SPGVMMAMANMYSTV

SEQ ID NO: 200078 - protein, 15 aa, Artificial Sequence
  Description of Artificial Sequence: Synthetic peptide
  Seed: SPGMMMGMFNMLSTV
SPGVMMAMFNMISTV

SEQ ID NO: 200079 - protein, 15 aa, Artificial Sequence
  Description of Artificial Sequence: Synthetic peptide
  Seed: SPGMMMGMFNMLSTV
SPGVMMAMFNMLSTV

SEQ ID NO: 200080 - protein, 15 aa, Artificial Sequence
  Description of Artificial Sequence: Synthetic peptide
  Seed: SPGMMMGMFNMLSTV
SPGVMMAMFNMVSTV

SEQ ID NO: 200081 - protein, 15 aa, Artificial Sequence
  Description of Artificial Sequence: Synthetic peptide
  Seed: SPGMMMGMFNMLSTV
SPGVMMAMGNMISTV

SEQ ID NO: 200082 - protein, 15 aa, Artificial Sequence
  Description of Artificial Sequence: Synthetic peptide
  Seed: SPGMMMGMFNMLSTV
SPGVMMAMGNMLSTV

SEQ ID NO: 200083 - protein, 15 aa, Artificial Sequence
  Description of Artificial Sequence: Synthetic peptide
  Seed: SPGMMMGMFNMLSTV
SPGVMMAMGNMMSTV

SEQ ID NO: 200084 - protein, 15 aa, Artificial Sequence
  Description of Artificial Sequence: Synthetic peptide
  Seed: SPGMMMGMFNMLSTV
SPGVMMAMGNMVSTV

SEQ ID NO: 200085 - protein, 15 aa, Artificial Sequence
  Description of Artificial Sequence: Synthetic peptide
  Seed: SPGMMMGMFNMLSTV
SPGVMMAMNNMASTV

SEQ ID NO: 200086 - protein, 15 aa, Artificial Sequence
  Description of Artificial Sequence: Synthetic peptide
  Seed: SPGMMMGMFNMLSTV
SPGVMMAMNNMFSTV

SEQ ID NO: 200087 - protein, 15 aa, Artificial Sequence
  Description of Artificial Sequence: Synthetic peptide
  Seed: SPGMMMGMFNMLSTV
SPGVMMAMNNMISTV

SEQ ID NO: 200088 - protein, 15 aa, Artificial Sequence
  Description of Artificial Sequence: Synthetic peptide
  Seed: SPGMMMGMFNMLSTV
SPGVMMAMNNMLSTV

SEQ ID NO: 200089 - protein, 15 aa, Artificial Sequence
  Description of Artificial Sequence: Synthetic peptide
  Seed: SPGMMMGMFNMLSTV
SPGVMMAMNNMMSTV

SEQ ID NO: 200090 - protein, 15 aa, Artificial Sequence
  Description of Artificial Sequence: Synthetic peptide
  Seed: SPGMMMGMFNMLSTV
SPGVMMAMNNMVSTV

SEQ ID NO: 200091 - protein, 15 aa, Artificial Sequence
  Description of Artificial Sequence: Synthetic peptide
  Seed: SPGMMMGMFNMLSTV
SPGVMMAMNNMYSTV

SEQ ID NO: 200092 - protein, 15 aa, Artificial Sequence
  Description of Artificial Sequence: Synthetic peptide
  Seed: SPGMMMGMFNMLSTV
SPGVMMAMPNMASTV

SEQ ID NO: 200093 - protein, 15 aa, Artificial Sequence
  Description of Artificial Sequence: Synthetic peptide
  Seed: SPGMMMGMFNMLSTV
SPGVMMAMPNMISTV

SEQ ID NO: 200094 - protein, 15 aa, Artificial Sequence
  Description of Artificial Sequence: Synthetic peptide
  Seed: SPGMMMGMFNMLSTV
SPGVMMAMPNMLSTV

SEQ ID NO: 200095 - protein, 15 aa, Artificial Sequence
  Description of Artificial Sequence: Synthetic peptide
  Seed: SPGMMMGMFNMLSTV
SPGVMMAMPNMMSTV

SEQ ID NO: 200096 - protein, 15 aa, Artificial Sequence
  Description of Artificial Sequence: Synthetic peptide
  Seed: SPGMMMGMFNMLSTV
SPGVMMAMPNMSSTV

SEQ ID NO: 200097 - protein, 15 aa, Artificial Sequence
  Description of Artificial Sequence: Synthetic peptide
  Seed: SPGMMMGMFNMLSTV
SPGVMMAMPNMVSTV

SEQ ID NO: 200098 - protein, 15 aa, Artificial Sequence
  Description of Artificial Sequence: Synthetic peptide
  Seed: SPGMMMGMFNMLSTV
SPGVMMAMSNMFSTV

SEQ ID NO: 200099 - protein, 15 aa, Artificial Sequence
  Description of Artificial Sequence: Synthetic peptide
  Seed: SPGMMMGMFNMLSTV
SPGVMMAMSNMISTV

SEQ ID NO: 200100 - protein, 15 aa, Artificial Sequence
  Description of Artificial Sequence: Synthetic peptide
  Seed: SPGMMMGMFNMLSTV
SPGVMMAMSNMLSTV

SEQ ID NO: 200101 - protein, 15 aa, Artificial Sequence
  Description of Artificial Sequence: Synthetic peptide
  Seed: SPGMMMGMFNMLSTV
SPGVMMAMSNMMSTV

SEQ ID NO: 200102 - protein, 15 aa, Artificial Sequence
  Description of Artificial Sequence: Synthetic peptide
  Seed: SPGMMMGMFNMLSTV
SPGVMMAMSNMVSTV

SEQ ID NO: 200103 - protein, 15 aa, Artificial Sequence
  Description of Artificial Sequence: Synthetic peptide
  Seed: SPGMMMGMFNMLSTV
SPGVMMAMTNMISTV

SEQ ID NO: 200104 - protein, 15 aa, Artificial Sequence
  Description of Artificial Sequence: Synthetic peptide
  Seed: SPGMMMGMFNMLSTV
SPGVMMAMTNMVSTV

SEQ ID NO: 200105 - protein, 15 aa, Artificial Sequence
  Description of Artificial Sequence: Synthetic peptide
  Seed: SPGMMMGMFNMLSTV
SPGVMMAMYNMLSTV

SEQ ID NO: 200106 - protein, 15 aa, Artificial Sequence
  Description of Artificial Sequence: Synthetic peptide
  Seed: SPGMMMGMFNMLSTV
SPGVMMDMANMASTV

SEQ ID NO: 200107 - protein, 15 aa, Artificial Sequence
  Description of Artificial Sequence: Synthetic peptide
  Seed: SPGMMMGMFNMLSTV
SPGVMMDMANMFSTV

SEQ ID NO: 200108 - protein, 15 aa, Artificial Sequence
  Description of Artificial Sequence: Synthetic peptide
  Seed: SPGMMMGMFNMLSTV
SPGVMMDMANMISTV

SEQ ID NO: 200109 - protein, 15 aa, Artificial Sequence
  Description of Artificial Sequence: Synthetic peptide
  Seed: SPGMMMGMFNMLSTV
SPGVMMDMANMLSTV

SEQ ID NO: 200110 - protein, 15 aa, Artificial Sequence
  Description of Artificial Sequence: Synthetic peptide
  Seed: SPGMMMGMFNMLSTV
SPGVMMDMANMMSTV

SEQ ID NO: 200111 - protein, 15 aa, Artificial Sequence
  Description of Artificial Sequence: Synthetic peptide
  Seed: SPGMMMGMFNMLSTV
SPGVMMDMANMVSTV

SEQ ID NO: 200112 - protein, 15 aa, Artificial Sequence
  Description of Artificial Sequence: Synthetic peptide
  Seed: SPGMMMGMFNMLSTV
SPGVMMDMANMYSTV

SEQ ID NO: 200113 - protein, 15 aa, Artificial Sequence
  Description of Artificial Sequence: Synthetic peptide
  Seed: SPGMMMGMFNMLSTV
SPGVMMDMGNMISTV

SEQ ID NO: 200114 - protein, 15 aa, Artificial Sequence
  Description of Artificial Sequence: Synthetic peptide
  Seed: SPGMMMGMFNMLSTV
SPGVMMDMGNMVSTV

SEQ ID NO: 200115 - protein, 15 aa, Artificial Sequence
  Description of Artificial Sequence: Synthetic peptide
  Seed: SPGMMMGMFNMLSTV
SPGVMMDMNNMFSTV

SEQ ID NO: 200116 - protein, 15 aa, Artificial Sequence
  Description of Artificial Sequence: Synthetic peptide
  Seed: SPGMMMGMFNMLSTV
SPGVMMDMNNMISTV

SEQ ID NO: 200117 - protein, 15 aa, Artificial Sequence
  Description of Artificial Sequence: Synthetic peptide
  Seed: SPGMMMGMFNMLSTV
SPGVMMDMNNMLSTV

SEQ ID NO: 200118 - protein, 15 aa, Artificial Sequence
  Description of Artificial Sequence: Synthetic peptide
  Seed: SPGMMMGMFNMLSTV
SPGVMMDMNNMVSTV

SEQ ID NO: 200119 - protein, 15 aa, Artificial Sequence
  Description of Artificial Sequence: Synthetic peptide
  Seed: SPGMMMGMFNMLSTV
SPGVMMDMNNMYSTV

SEQ ID NO: 200120 - protein, 15 aa, Artificial Sequence
  Description of Artificial Sequence: Synthetic peptide
  Seed: SPGMMMGMFNMLSTV
SPGVMMDMPNMISTV

SEQ ID NO: 200121 - protein, 15 aa, Artificial Sequence
  Description of Artificial Sequence: Synthetic peptide
  Seed: SPGMMMGMFNMLSTV
SPGVMMDMPNMLSTV

SEQ ID NO: 200122 - protein, 15 aa, Artificial Sequence
  Description of Artificial Sequence: Synthetic peptide
  Seed: SPGMMMGMFNMLSTV
SPGVMMDMPNMVSTV

SEQ ID NO: 200123 - protein, 15 aa, Artificial Sequence
  Description of Artificial Sequence: Synthetic peptide
  Seed: SPGMMMGMFNMLSTV
SPGVMMDMSNMISTV

SEQ ID NO: 200124 - protein, 15 aa, Artificial Sequence
  Description of Artificial Sequence: Synthetic peptide
  Seed: SPGMMMGMFNMLSTV
SPGVMMDMSNMLSTV

SEQ ID NO: 200125 - protein, 15 aa, Artificial Sequence
  Description of Artificial Sequence: Synthetic peptide
  Seed: SPGMMMGMFNMLSTV
SPGVMMDMSNMVSTV

SEQ ID NO: 200126 - protein, 15 aa, Artificial Sequence
  Description of Artificial Sequence: Synthetic peptide
  Seed: SPGMMMGMFNMLSTV
SPGVMMDMTNMISTV

SEQ ID NO: 200127 - protein, 15 aa, Artificial Sequence
  Description of Artificial Sequence: Synthetic peptide
  Seed: SPGMMMGMFNMLSTV
SPGVMMDMTNMVSTV

SEQ ID NO: 200128 - protein, 15 aa, Artificial Sequence
  Description of Artificial Sequence: Synthetic peptide
  Seed: SPGMMMGMFNMLSTV
SPGVMMDMVNMISTV

SEQ ID NO: 200129 - protein, 15 aa, Artificial Sequence
  Description of Artificial Sequence: Synthetic peptide
  Seed: SPGMMMGMFNMLSTV
SPGVMMEMANMISTV

SEQ ID NO: 200130 - protein, 15 aa, Artificial Sequence
  Description of Artificial Sequence: Synthetic peptide
  Seed: SPGMMMGMFNMLSTV
SPGVMMEMFNMFSTV

SEQ ID NO: 200131 - protein, 15 aa, Artificial Sequence
  Description of Artificial Sequence: Synthetic peptide
  Seed: SPGMMMGMFNMLSTV
SPGVMMEMFNMISTV

SEQ ID NO: 200132 - protein, 15 aa, Artificial Sequence
  Description of Artificial Sequence: Synthetic peptide
  Seed: SPGMMMGMFNMLSTV
SPGVMMEMFNMLSTV

SEQ ID NO: 200133 - protein, 15 aa, Artificial Sequence
  Description of Artificial Sequence: Synthetic peptide
  Seed: SPGMMMGMFNMLSTV
SPGVMMEMFNMMSTV

SEQ ID NO: 200134 - protein, 15 aa, Artificial Sequence
  Description of Artificial Sequence: Synthetic peptide
  Seed: SPGMMMGMFNMLSTV
SPGVMMEMFNMVSTV

SEQ ID NO: 200135 - protein, 15 aa, Artificial Sequence
  Description of Artificial Sequence: Synthetic peptide
  Seed: SPGMMMGMFNMLSTV
SPGVMMEMNNMISTV

SEQ ID NO: 200136 - protein, 15 aa, Artificial Sequence
  Description of Artificial Sequence: Synthetic peptide
  Seed: SPGMMMGMFNMLSTV
SPGVMMEMNNMVSTV

SEQ ID NO: 200137 - protein, 15 aa, Artificial Sequence
  Description of Artificial Sequence: Synthetic peptide
  Seed: SPGMMMGMFNMLSTV
SPGVMMFMANMASTV

SEQ ID NO: 200138 - protein, 15 aa, Artificial Sequence
  Description of Artificial Sequence: Synthetic peptide
  Seed: SPGMMMGMFNMLSTV
SPGVMMFMANMISTV

SEQ ID NO: 200139 - protein, 15 aa, Artificial Sequence
  Description of Artificial Sequence: Synthetic peptide
  Seed: SPGMMMGMFNMLSTV
SPGVMMFMANMVSTV

SEQ ID NO: 200140 - protein, 15 aa, Artificial Sequence
  Description of Artificial Sequence: Synthetic peptide
  Seed: SPGMMMGMFNMLSTV
SPGVMMFMFNMLSTV

SEQ ID NO: 200141 - protein, 15 aa, Artificial Sequence
  Description of Artificial Sequence: Synthetic peptide
  Seed: SPGMMMGMFNMLSTV
SPGVMMFMFNMYSTV

SEQ ID NO: 200142 - protein, 15 aa, Artificial Sequence
  Description of Artificial Sequence: Synthetic peptide
  Seed: SPGMMMGMFNMLSTV
SPGVMMFMHNMVSTV

SEQ ID NO: 200143 - protein, 15 aa, Artificial Sequence
  Description of Artificial Sequence: Synthetic peptide
  Seed: SPGMMMGMFNMLSTV
SPGVMMFMKNMASTV

SEQ ID NO: 200144 - protein, 15 aa, Artificial Sequence
  Description of Artificial Sequence: Synthetic peptide
  Seed: SPGMMMGMFNMLSTV
SPGVMMFMKNMSSTV

SEQ ID NO: 200145 - protein, 15 aa, Artificial Sequence
  Description of Artificial Sequence: Synthetic peptide
  Seed: SPGMMMGMFNMLSTV
SPGVMMFMNNMASTV

SEQ ID NO: 200146 - protein, 15 aa, Artificial Sequence
  Description of Artificial Sequence: Synthetic peptide
  Seed: SPGMMMGMFNMLSTV
SPGVMMFMNNMISTV

SEQ ID NO: 200147 - protein, 15 aa, Artificial Sequence
  Description of Artificial Sequence: Synthetic peptide
  Seed: SPGMMMGMFNMLSTV
SPGVMMFMNNMLSTV

SEQ ID NO: 200148 - protein, 15 aa, Artificial Sequence
  Description of Artificial Sequence: Synthetic peptide
  Seed: SPGMMMGMFNMLSTV
SPGVMMFMNNMMSTV

SEQ ID NO: 200149 - protein, 15 aa, Artificial Sequence
  Description of Artificial Sequence: Synthetic peptide
  Seed: SPGMMMGMFNMLSTV
SPGVMMFMNNMSSTV

SEQ ID NO: 200150 - protein, 15 aa, Artificial Sequence
  Description of Artificial Sequence: Synthetic peptide
  Seed: SPGMMMGMFNMLSTV
SPGVMMFMNNMTSTV

SEQ ID NO: 200151 - protein, 15 aa, Artificial Sequence
  Description of Artificial Sequence: Synthetic peptide
  Seed: SPGMMMGMFNMLSTV
SPGVMMFMNNMVSTV

SEQ ID NO: 200152 - protein, 15 aa, Artificial Sequence
  Description of Artificial Sequence: Synthetic peptide
  Seed: SPGMMMGMFNMLSTV
SPGVMMFMPNMISTV

SEQ ID NO: 200153 - protein, 15 aa, Artificial Sequence
  Description of Artificial Sequence: Synthetic peptide
  Seed: SPGMMMGMFNMLSTV
SPGVMMFMPNMVSTV

SEQ ID NO: 200154 - protein, 15 aa, Artificial Sequence
  Description of Artificial Sequence: Synthetic peptide
  Seed: SPGMMMGMFNMLSTV
SPGVMMFMRNMASTV

SEQ ID NO: 200155 - protein, 15 aa, Artificial Sequence
  Description of Artificial Sequence: Synthetic peptide
  Seed: SPGMMMGMFNMLSTV
SPGVMMFMRNMGSTV

SEQ ID NO: 200156 - protein, 15 aa, Artificial Sequence
  Description of Artificial Sequence: Synthetic peptide
  Seed: SPGMMMGMFNMLSTV
SPGVMMFMRNMISTV

SEQ ID NO: 200157 - protein, 15 aa, Artificial Sequence
  Description of Artificial Sequence: Synthetic peptide
  Seed: SPGMMMGMFNMLSTV
SPGVMMFMRNMNSTV

SEQ ID NO: 200158 - protein, 15 aa, Artificial Sequence
  Description of Artificial Sequence: Synthetic peptide
  Seed: SPGMMMGMFNMLSTV
SPGVMMFMRNMSSTV

SEQ ID NO: 200159 - protein, 15 aa, Artificial Sequence
  Description of Artificial Sequence: Synthetic peptide
  Seed: SPGMMMGMFNMLSTV
SPGVMMFMRNMTSTV

SEQ ID NO: 200160 - protein, 15 aa, Artificial Sequence
  Description of Artificial Sequence: Synthetic peptide
  Seed: SPGMMMGMFNMLSTV
SPGVMMFMRNMVSTV

SEQ ID NO: 200161 - protein, 15 aa, Artificial Sequence
  Description of Artificial Sequence: Synthetic peptide
  Seed: SPGMMMGMFNMLSTV
SPGVMMFMSNMASTV

SEQ ID NO: 200162 - protein, 15 aa, Artificial Sequence
  Description of Artificial Sequence: Synthetic peptide
  Seed: SPGMMMGMFNMLSTV
SPGVMMFMSNMVSTV

SEQ ID NO: 200163 - protein, 15 aa, Artificial Sequence
  Description of Artificial Sequence: Synthetic peptide
  Seed: SPGMMMGMFNMLSTV
SPGVMMFMWNMISTV

SEQ ID NO: 200164 - protein, 15 aa, Artificial Sequence
  Description of Artificial Sequence: Synthetic peptide
  Seed: SPGMMMGMFNMLSTV
SPGVMMFMWNMLSTV

SEQ ID NO: 200165 - protein, 15 aa, Artificial Sequence
  Description of Artificial Sequence: Synthetic peptide
  Seed: SPGMMMGMFNMLSTV
SPGVMMFMYNMISTV

SEQ ID NO: 200166 - protein, 15 aa, Artificial Sequence
  Description of Artificial Sequence: Synthetic peptide
  Seed: SPGMMMGMFNMLSTV
SPGVMMFMYNMLSTV

SEQ ID NO: 200167 - protein, 15 aa, Artificial Sequence
  Description of Artificial Sequence: Synthetic peptide
  Seed: SPGMMMGMFNMLSTV
SPGVMMFMYNMMSTV

SEQ ID NO: 200168 - protein, 15 aa, Artificial Sequence
  Description of Artificial Sequence: Synthetic peptide
  Seed: SPGMMMGMFNMLSTV
SPGVMMFMYNMVSTV

SEQ ID NO: 200169 - protein, 15 aa, Artificial Sequence
  Description of Artificial Sequence: Synthetic peptide
  Seed: SPGMMMGMFNMLSTV
SPGVMMGMANMASTV

SEQ ID NO: 200170 - protein, 15 aa, Artificial Sequence
  Description of Artificial Sequence: Synthetic peptide
  Seed: SPGMMMGMFNMLSTV
SPGVMMGMANMISTV

SEQ ID NO: 200171 - protein, 15 aa, Artificial Sequence
  Description of Artificial Sequence: Synthetic peptide
  Seed: SPGMMMGMFNMLSTV
SPGVMMGMANMLSTV

SEQ ID NO: 200172 - protein, 15 aa, Artificial Sequence
  Description of Artificial Sequence: Synthetic peptide
  Seed: SPGMMMGMFNMLSTV
SPGVMMGMANMSSTV

SEQ ID NO: 200173 - protein, 15 aa, Artificial Sequence
  Description of Artificial Sequence: Synthetic peptide
  Seed: SPGMMMGMFNMLSTV
SPGVMMGMANMTSTV

SEQ ID NO: 200174 - protein, 15 aa, Artificial Sequence
  Description of Artificial Sequence: Synthetic peptide
  Seed: SPGMMMGMFNMLSTV
SPGVMMGMANMVSTV

SEQ ID NO: 200175 - protein, 15 aa, Artificial Sequence
  Description of Artificial Sequence: Synthetic peptide
  Seed: SPGMMMGMFNMLSTV
SPGVMMGMNNMISTV

SEQ ID NO: 200176 - protein, 15 aa, Artificial Sequence
  Description of Artificial Sequence: Synthetic peptide
  Seed: SPGMMMGMFNMLSTV
SPGVMMGMNNMVSTV

SEQ ID NO: 200177 - protein, 15 aa, Artificial Sequence
  Description of Artificial Sequence: Synthetic peptide
  Seed: SPGMMMGMFNMLSTV
SPGVMMGMPNMASTV

SEQ ID NO: 200178 - protein, 15 aa, Artificial Sequence
  Description of Artificial Sequence: Synthetic peptide
  Seed: SPGMMMGMFNMLSTV
SPGVMMGMVNMASTV

SEQ ID NO: 200179 - protein, 15 aa, Artificial Sequence
  Description of Artificial Sequence: Synthetic peptide
  Seed: SPGMMMGMFNMLSTV
SPGVMMHMANMFSTV

SEQ ID NO: 200180 - protein, 15 aa, Artificial Sequence
  Description of Artificial Sequence: Synthetic peptide
  Seed: SPGMMMGMFNMLSTV
SPGVMMHMANMISTV

SEQ ID NO: 200181 - protein, 15 aa, Artificial Sequence
  Description of Artificial Sequence: Synthetic peptide
  Seed: SPGMMMGMFNMLSTV
SPGVMMHMANMLSTV

SEQ ID NO: 200182 - protein, 15 aa, Artificial Sequence
  Description of Artificial Sequence: Synthetic peptide
  Seed: SPGMMMGMFNMLSTV
SPGVMMHMANMMSTV

SEQ ID NO: 200183 - protein, 15 aa, Artificial Sequence
  Description of Artificial Sequence: Synthetic peptide
  Seed: SPGMMMGMFNMLSTV
SPGVMMHMANMVSTV

SEQ ID NO: 200184 - protein, 15 aa, Artificial Sequence
  Description of Artificial Sequence: Synthetic peptide
  Seed: SPGMMMGMFNMLSTV
SPGVMMHMANMYSTV

SEQ ID NO: 200185 - protein, 15 aa, Artificial Sequence
  Description of Artificial Sequence: Synthetic peptide
  Seed: SPGMMMGMFNMLSTV
SPGVMMHMFNMFSTV

SEQ ID NO: 200186 - protein, 15 aa, Artificial Sequence
  Description of Artificial Sequence: Synthetic peptide
  Seed: SPGMMMGMFNMLSTV
SPGVMMHMFNMISTV

SEQ ID NO: 200187 - protein, 15 aa, Artificial Sequence
  Description of Artificial Sequence: Synthetic peptide
  Seed: SPGMMMGMFNMLSTV
SPGVMMHMFNMLSTV

SEQ ID NO: 200188 - protein, 15 aa, Artificial Sequence
  Description of Artificial Sequence: Synthetic peptide
  Seed: SPGMMMGMFNMLSTV
SPGVMMHMFNMMSTV

SEQ ID NO: 200189 - protein, 15 aa, Artificial Sequence
  Description of Artificial Sequence: Synthetic peptide
  Seed: SPGMMMGMFNMLSTV
SPGVMMHMFNMVSTV

SEQ ID NO: 200190 - protein, 15 aa, Artificial Sequence
  Description of Artificial Sequence: Synthetic peptide
  Seed: SPGMMMGMFNMLSTV
SPGVMMHMGNMISTV

SEQ ID NO: 200191 - protein, 15 aa, Artificial Sequence
  Description of Artificial Sequence: Synthetic peptide
  Seed: SPGMMMGMFNMLSTV
SPGVMMHMGNMVSTV

SEQ ID NO: 200192 - protein, 15 aa, Artificial Sequence
  Description of Artificial Sequence: Synthetic peptide
  Seed: SPGMMMGMFNMLSTV
SPGVMMHMLNMLSTV

SEQ ID NO: 200193 - protein, 15 aa, Artificial Sequence
  Description of Artificial Sequence: Synthetic peptide
  Seed: SPGMMMGMFNMLSTV
SPGVMMHMNNMFSTV

SEQ ID NO: 200194 - protein, 15 aa, Artificial Sequence
  Description of Artificial Sequence: Synthetic peptide
  Seed: SPGMMMGMFNMLSTV
SPGVMMHMNNMISTV

SEQ ID NO: 200195 - protein, 15 aa, Artificial Sequence
  Description of Artificial Sequence: Synthetic peptide
  Seed: SPGMMMGMFNMLSTV
SPGVMMHMNNMLSTV

SEQ ID NO: 200196 - protein, 15 aa, Artificial Sequence
  Description of Artificial Sequence: Synthetic peptide
  Seed: SPGMMMGMFNMLSTV
SPGVMMHMNNMMSTV

SEQ ID NO: 200197 - protein, 15 aa, Artificial Sequence
  Description of Artificial Sequence: Synthetic peptide
  Seed: SPGMMMGMFNMLSTV
SPGVMMHMNNMVSTV

SEQ ID NO: 200198 - protein, 15 aa, Artificial Sequence
  Description of Artificial Sequence: Synthetic peptide
  Seed: SPGMMMGMFNMLSTV
SPGVMMHMNNMYSTV

SEQ ID NO: 200199 - protein, 15 aa, Artificial Sequence
  Description of Artificial Sequence: Synthetic peptide
  Seed: SPGMMMGMFNMLSTV
SPGVMMHMPNMISTV

SEQ ID NO: 200200 - protein, 15 aa, Artificial Sequence
  Description of Artificial Sequence: Synthetic peptide
  Seed: SPGMMMGMFNMLSTV
SPGVMMHMPNMLSTV

SEQ ID NO: 200201 - protein, 15 aa, Artificial Sequence
  Description of Artificial Sequence: Synthetic peptide
  Seed: SPGMMMGMFNMLSTV
SPGVMMHMPNMVSTV

SEQ ID NO: 200202 - protein, 15 aa, Artificial Sequence
  Description of Artificial Sequence: Synthetic peptide
  Seed: SPGMMMGMFNMLSTV
SPGVMMHMSNMISTV

SEQ ID NO: 200203 - protein, 15 aa, Artificial Sequence
  Description of Artificial Sequence: Synthetic peptide
  Seed: SPGMMMGMFNMLSTV
SPGVMMHMSNMLSTV

SEQ ID NO: 200204 - protein, 15 aa, Artificial Sequence
  Description of Artificial Sequence: Synthetic peptide
  Seed: SPGMMMGMFNMLSTV
SPGVMMHMSNMVSTV

SEQ ID NO: 200205 - protein, 15 aa, Artificial Sequence
  Description of Artificial Sequence: Synthetic peptide
  Seed: SPGMMMGMFNMLSTV
SPGVMMHMTNMISTV

SEQ ID NO: 200206 - protein, 15 aa, Artificial Sequence
  Description of Artificial Sequence: Synthetic peptide
  Seed: SPGMMMGMFNMLSTV
SPGVMMHMTNMVSTV

SEQ ID NO: 200207 - protein, 15 aa, Artificial Sequence
  Description of Artificial Sequence: Synthetic peptide
  Seed: SPGMMMGMFNMLSTV
SPGVMMHMVNMISTV

SEQ ID NO: 200208 - protein, 15 aa, Artificial Sequence
  Description of Artificial Sequence: Synthetic peptide
  Seed: SPGMMMGMFNMLSTV
SPGVMMHMYNMFSTV

SEQ ID NO: 200209 - protein, 15 aa, Artificial Sequence
  Description of Artificial Sequence: Synthetic peptide
  Seed: SPGMMMGMFNMLSTV
SPGVMMHMYNMLSTV

SEQ ID NO: 200210 - protein, 15 aa, Artificial Sequence
  Description of Artificial Sequence: Synthetic peptide
  Seed: SPGMMMGMFNMLSTV
SPGVMMIMANMISTV

SEQ ID NO: 200211 - protein, 15 aa, Artificial Sequence
  Description of Artificial Sequence: Synthetic peptide
  Seed: SPGMMMGMFNMLSTV
SPGVMMIMANMLSTV

SEQ ID NO: 200212 - protein, 15 aa, Artificial Sequence
  Description of Artificial Sequence: Synthetic peptide
  Seed: SPGMMMGMFNMLSTV
SPGVMMIMANMMSTV

SEQ ID NO: 200213 - protein, 15 aa, Artificial Sequence
  Description of Artificial Sequence: Synthetic peptide
  Seed: SPGMMMGMFNMLSTV
SPGVMMIMANMVSTV

SEQ ID NO: 200214 - protein, 15 aa, Artificial Sequence
  Description of Artificial Sequence: Synthetic peptide
  Seed: SPGMMMGMFNMLSTV
SPGVMMIMANMYSTV

SEQ ID NO: 200215 - protein, 15 aa, Artificial Sequence
  Description of Artificial Sequence: Synthetic peptide
  Seed: SPGMMMGMFNMLSTV
SPGVMMIMFNMFSTV

SEQ ID NO: 200216 - protein, 15 aa, Artificial Sequence
  Description of Artificial Sequence: Synthetic peptide
  Seed: SPGMMMGMFNMLSTV
SPGVMMIMFNMYSTV

SEQ ID NO: 200217 - protein, 15 aa, Artificial Sequence
  Description of Artificial Sequence: Synthetic peptide
  Seed: SPGMMMGMFNMLSTV
SPGVMMIMGNMISTV

SEQ ID NO: 200218 - protein, 15 aa, Artificial Sequence
  Description of Artificial Sequence: Synthetic peptide
  Seed: SPGMMMGMFNMLSTV
SPGVMMIMGNMVSTV

SEQ ID NO: 200219 - protein, 15 aa, Artificial Sequence
  Description of Artificial Sequence: Synthetic peptide
  Seed: SPGMMMGMFNMLSTV
SPGVMMIMHNMISTV

SEQ ID NO: 200220 - protein, 15 aa, Artificial Sequence
  Description of Artificial Sequence: Synthetic peptide
  Seed: SPGMMMGMFNMLSTV
SPGVMMIMHNMLSTV

SEQ ID NO: 200221 - protein, 15 aa, Artificial Sequence
  Description of Artificial Sequence: Synthetic peptide
  Seed: SPGMMMGMFNMLSTV
SPGVMMIMHNMMSTV

SEQ ID NO: 200222 - protein, 15 aa, Artificial Sequence
  Description of Artificial Sequence: Synthetic peptide
  Seed: SPGMMMGMFNMLSTV
SPGVMMIMHNMVSTV

SEQ ID NO: 200223 - protein, 15 aa, Artificial Sequence
  Description of Artificial Sequence: Synthetic peptide
  Seed: SPGMMMGMFNMLSTV
SPGVMMIMKNMASTV

SEQ ID NO: 200224 - protein, 15 aa, Artificial Sequence
  Description of Artificial Sequence: Synthetic peptide
  Seed: SPGMMMGMFNMLSTV
SPGVMMIMKNMGSTV

SEQ ID NO: 200225 - protein, 15 aa, Artificial Sequence
  Description of Artificial Sequence: Synthetic peptide
  Seed: SPGMMMGMFNMLSTV
SPGVMMIMKNMISTV

SEQ ID NO: 200226 - protein, 15 aa, Artificial Sequence
  Description of Artificial Sequence: Synthetic peptide
  Seed: SPGMMMGMFNMLSTV
SPGVMMIMKNMLSTV

SEQ ID NO: 200227 - protein, 15 aa, Artificial Sequence
  Description of Artificial Sequence: Synthetic peptide
  Seed: SPGMMMGMFNMLSTV
SPGVMMIMKNMMSTV

SEQ ID NO: 200228 - protein, 15 aa, Artificial Sequence
  Description of Artificial Sequence: Synthetic peptide
  Seed: SPGMMMGMFNMLSTV
SPGVMMIMKNMSSTV

SEQ ID NO: 200229 - protein, 15 aa, Artificial Sequence
  Description of Artificial Sequence: Synthetic peptide
  Seed: SPGMMMGMFNMLSTV
SPGVMMIMKNMTSTV

SEQ ID NO: 200230 - protein, 15 aa, Artificial Sequence
  Description of Artificial Sequence: Synthetic peptide
  Seed: SPGMMMGMFNMLSTV
SPGVMMIMKNMVSTV

SEQ ID NO: 200231 - protein, 15 aa, Artificial Sequence
  Description of Artificial Sequence: Synthetic peptide
  Seed: SPGMMMGMFNMLSTV
SPGVMMIMNNMASTV

SEQ ID NO: 200232 - protein, 15 aa, Artificial Sequence
  Description of Artificial Sequence: Synthetic peptide
  Seed: SPGMMMGMFNMLSTV
SPGVMMIMNNMFSTV

SEQ ID NO: 200233 - protein, 15 aa, Artificial Sequence
  Description of Artificial Sequence: Synthetic peptide
  Seed: SPGMMMGMFNMLSTV
SPGVMMIMNNMGSTV

SEQ ID NO: 200234 - protein, 15 aa, Artificial Sequence
  Description of Artificial Sequence: Synthetic peptide
  Seed: SPGMMMGMFNMLSTV
SPGVMMIMNNMISTV

SEQ ID NO: 200235 - protein, 15 aa, Artificial Sequence
  Description of Artificial Sequence: Synthetic peptide
  Seed: SPGMMMGMFNMLSTV
SPGVMMIMNNMLSTV

SEQ ID NO: 200236 - protein, 15 aa, Artificial Sequence
  Description of Artificial Sequence: Synthetic peptide
  Seed: SPGMMMGMFNMLSTV
SPGVMMIMNNMMSTV

SEQ ID NO: 200237 - protein, 15 aa, Artificial Sequence
  Description of Artificial Sequence: Synthetic peptide
  Seed: SPGMMMGMFNMLSTV
SPGVMMIMNNMSSTV

SEQ ID NO: 200238 - protein, 15 aa, Artificial Sequence
  Description of Artificial Sequence: Synthetic peptide
  Seed: SPGMMMGMFNMLSTV
SPGVMMIMNNMTSTV

SEQ ID NO: 200239 - protein, 15 aa, Artificial Sequence
  Description of Artificial Sequence: Synthetic peptide
  Seed: SPGMMMGMFNMLSTV
SPGVMMIMNNMVSTV

SEQ ID NO: 200240 - protein, 15 aa, Artificial Sequence
  Description of Artificial Sequence: Synthetic peptide
  Seed: SPGMMMGMFNMLSTV
SPGVMMIMNNMYSTV

SEQ ID NO: 200241 - protein, 15 aa, Artificial Sequence
  Description of Artificial Sequence: Synthetic peptide
  Seed: SPGMMMGMFNMLSTV
SPGVMMIMPNMFSTV

SEQ ID NO: 200242 - protein, 15 aa, Artificial Sequence
  Description of Artificial Sequence: Synthetic peptide
  Seed: SPGMMMGMFNMLSTV
SPGVMMIMPNMISTV

SEQ ID NO: 200243 - protein, 15 aa, Artificial Sequence
  Description of Artificial Sequence: Synthetic peptide
  Seed: SPGMMMGMFNMLSTV
SPGVMMIMPNMMSTV

SEQ ID NO: 200244 - protein, 15 aa, Artificial Sequence
  Description of Artificial Sequence: Synthetic peptide
  Seed: SPGMMMGMFNMLSTV
SPGVMMIMPNMVSTV

SEQ ID NO: 200245 - protein, 15 aa, Artificial Sequence
  Description of Artificial Sequence: Synthetic peptide
  Seed: SPGMMMGMFNMLSTV
SPGVMMIMPNMYSTV

SEQ ID NO: 200246 - protein, 15 aa, Artificial Sequence
  Description of Artificial Sequence: Synthetic peptide
  Seed: SPGMMMGMFNMLSTV
SPGVMMIMRNMASTV

SEQ ID NO: 200247 - protein, 15 aa, Artificial Sequence
  Description of Artificial Sequence: Synthetic peptide
  Seed: SPGMMMGMFNMLSTV
SPGVMMIMRNMGSTV

SEQ ID NO: 200248 - protein, 15 aa, Artificial Sequence
  Description of Artificial Sequence: Synthetic peptide
  Seed: SPGMMMGMFNMLSTV
SPGVMMIMRNMISTV

SEQ ID NO: 200249 - protein, 15 aa, Artificial Sequence
  Description of Artificial Sequence: Synthetic peptide
  Seed: SPGMMMGMFNMLSTV
SPGVMMIMRNMLSTV

SEQ ID NO: 200250 - protein, 15 aa, Artificial Sequence
  Description of Artificial Sequence: Synthetic peptide
  Seed: SPGMMMGMFNMLSTV
SPGVMMIMRNMMSTV

SEQ ID NO: 200251 - protein, 15 aa, Artificial Sequence
  Description of Artificial Sequence: Synthetic peptide
  Seed: SPGMMMGMFNMLSTV
SPGVMMIMRNMSSTV

SEQ ID NO: 200252 - protein, 15 aa, Artificial Sequence
  Description of Artificial Sequence: Synthetic peptide
  Seed: SPGMMMGMFNMLSTV
SPGVMMIMRNMTSTV

SEQ ID NO: 200253 - protein, 15 aa, Artificial Sequence
  Description of Artificial Sequence: Synthetic peptide
  Seed: SPGMMMGMFNMLSTV
SPGVMMIMRNMVSTV

SEQ ID NO: 200254 - protein, 15 aa, Artificial Sequence
  Description of Artificial Sequence: Synthetic peptide
  Seed: SPGMMMGMFNMLSTV
SPGVMMIMSNMISTV

SEQ ID NO: 200255 - protein, 15 aa, Artificial Sequence
  Description of Artificial Sequence: Synthetic peptide
  Seed: SPGMMMGMFNMLSTV
SPGVMMIMSNMLSTV

SEQ ID NO: 200256 - protein, 15 aa, Artificial Sequence
  Description of Artificial Sequence: Synthetic peptide
  Seed: SPGMMMGMFNMLSTV
SPGVMMIMSNMMSTV

SEQ ID NO: 200257 - protein, 15 aa, Artificial Sequence
  Description of Artificial Sequence: Synthetic peptide
  Seed: SPGMMMGMFNMLSTV
SPGVMMIMSNMVSTV

SEQ ID NO: 200258 - protein, 15 aa, Artificial Sequence
  Description of Artificial Sequence: Synthetic peptide
  Seed: SPGMMMGMFNMLSTV
SPGVMMIMSNMYSTV

SEQ ID NO: 200259 - protein, 15 aa, Artificial Sequence
  Description of Artificial Sequence: Synthetic peptide
  Seed: SPGMMMGMFNMLSTV
SPGVMMIMTNMGSTV

SEQ ID NO: 200260 - protein, 15 aa, Artificial Sequence
  Description of Artificial Sequence: Synthetic peptide
  Seed: SPGMMMGMFNMLSTV
SPGVMMIMTNMISTV

SEQ ID NO: 200261 - protein, 15 aa, Artificial Sequence
  Description of Artificial Sequence: Synthetic peptide
  Seed: SPGMMMGMFNMLSTV
SPGVMMIMTNMLSTV

SEQ ID NO: 200262 - protein, 15 aa, Artificial Sequence
  Description of Artificial Sequence: Synthetic peptide
  Seed: SPGMMMGMFNMLSTV
SPGVMMIMTNMMSTV

SEQ ID NO: 200263 - protein, 15 aa, Artificial Sequence
  Description of Artificial Sequence: Synthetic peptide
  Seed: SPGMMMGMFNMLSTV
SPGVMMIMTNMVSTV

SEQ ID NO: 200264 - protein, 15 aa, Artificial Sequence
  Description of Artificial Sequence: Synthetic peptide
  Seed: SPGMMMGMFNMLSTV
SPGVMMIMTNMYSTV

SEQ ID NO: 200265 - protein, 15 aa, Artificial Sequence
  Description of Artificial Sequence: Synthetic peptide
  Seed: SPGMMMGMFNMLSTV
SPGVMMIMYNMLSTV

SEQ ID NO: 200266 - protein, 15 aa, Artificial Sequence
  Description of Artificial Sequence: Synthetic peptide
  Seed: SPGMMMGMFNMLSTV
SPGVMMIMYNMYSTV

SEQ ID NO: 200267 - protein, 15 aa, Artificial Sequence
  Description of Artificial Sequence: Synthetic peptide
  Seed: SPGMMMGMFNMLSTV
SPGVMMKMFNMFSTV

SEQ ID NO: 200268 - protein, 15 aa, Artificial Sequence
  Description of Artificial Sequence: Synthetic peptide
  Seed: SPGMMMGMFNMLSTV
SPGVMMKMFNMLSTV

SEQ ID NO: 200269 - protein, 15 aa, Artificial Sequence
  Description of Artificial Sequence: Synthetic peptide
  Seed: SPGMMMGMFNMLSTV
SPGVMMKMNNMFSTV

SEQ ID NO: 200270 - protein, 15 aa, Artificial Sequence
  Description of Artificial Sequence: Synthetic peptide
  Seed: SPGMMMGMFNMLSTV
SPGVMMKMNNMISTV

SEQ ID NO: 200271 - protein, 15 aa, Artificial Sequence
  Description of Artificial Sequence: Synthetic peptide
  Seed: SPGMMMGMFNMLSTV
SPGVMMKMNNMLSTV

SEQ ID NO: 200272 - protein, 15 aa, Artificial Sequence
  Description of Artificial Sequence: Synthetic peptide
  Seed: SPGMMMGMFNMLSTV
SPGVMMKMNNMMSTV

SEQ ID NO: 200273 - protein, 15 aa, Artificial Sequence
  Description of Artificial Sequence: Synthetic peptide
  Seed: SPGMMMGMFNMLSTV
SPGVMMKMNNMVSTV

SEQ ID NO: 200274 - protein, 15 aa, Artificial Sequence
  Description of Artificial Sequence: Synthetic peptide
  Seed: SPGMMMGMFNMLSTV
SPGVMMKMNNMYSTV

SEQ ID NO: 200275 - protein, 15 aa, Artificial Sequence
  Description of Artificial Sequence: Synthetic peptide
  Seed: SPGMMMGMFNMLSTV
SPGVMMLMANMISTV

SEQ ID NO: 200276 - protein, 15 aa, Artificial Sequence
  Description of Artificial Sequence: Synthetic peptide
  Seed: SPGMMMGMFNMLSTV
SPGVMMLMANMVSTV

SEQ ID NO: 200277 - protein, 15 aa, Artificial Sequence
  Description of Artificial Sequence: Synthetic peptide
  Seed: SPGMMMGMFNMLSTV
SPGVMMLMHNMVSTV

SEQ ID NO: 200278 - protein, 15 aa, Artificial Sequence
  Description of Artificial Sequence: Synthetic peptide
  Seed: SPGMMMGMFNMLSTV
SPGVMMLMKNMASTV

SEQ ID NO: 200279 - protein, 15 aa, Artificial Sequence
  Description of Artificial Sequence: Synthetic peptide
  Seed: SPGMMMGMFNMLSTV
SPGVMMLMKNMSSTV

SEQ ID NO: 200280 - protein, 15 aa, Artificial Sequence
  Description of Artificial Sequence: Synthetic peptide
  Seed: SPGMMMGMFNMLSTV
SPGVMMLMKNMVSTV

SEQ ID NO: 200281 - protein, 15 aa, Artificial Sequence
  Description of Artificial Sequence: Synthetic peptide
  Seed: SPGMMMGMFNMLSTV
SPGVMMLMNNMASTV

SEQ ID NO: 200282 - protein, 15 aa, Artificial Sequence
  Description of Artificial Sequence: Synthetic peptide
  Seed: SPGMMMGMFNMLSTV
SPGVMMLMNNMFSTV

SEQ ID NO: 200283 - protein, 15 aa, Artificial Sequence
  Description of Artificial Sequence: Synthetic peptide
  Seed: SPGMMMGMFNMLSTV
SPGVMMLMNNMISTV

SEQ ID NO: 200284 - protein, 15 aa, Artificial Sequence
  Description of Artificial Sequence: Synthetic peptide
  Seed: SPGMMMGMFNMLSTV
SPGVMMLMNNMLSTV

SEQ ID NO: 200285 - protein, 15 aa, Artificial Sequence
  Description of Artificial Sequence: Synthetic peptide
  Seed: SPGMMMGMFNMLSTV
SPGVMMLMNNMMSTV

SEQ ID NO: 200286 - protein, 15 aa, Artificial Sequence
  Description of Artificial Sequence: Synthetic peptide
  Seed: SPGMMMGMFNMLSTV
SPGVMMLMNNMSSTV

SEQ ID NO: 200287 - protein, 15 aa, Artificial Sequence
  Description of Artificial Sequence: Synthetic peptide
  Seed: SPGMMMGMFNMLSTV
SPGVMMLMNNMTSTV

SEQ ID NO: 200288 - protein, 15 aa, Artificial Sequence
  Description of Artificial Sequence: Synthetic peptide
  Seed: SPGMMMGMFNMLSTV
SPGVMMLMNNMVSTV

SEQ ID NO: 200289 - protein, 15 aa, Artificial Sequence
  Description of Artificial Sequence: Synthetic peptide
  Seed: SPGMMMGMFNMLSTV
SPGVMMLMNNMYSTV

SEQ ID NO: 200290 - protein, 15 aa, Artificial Sequence
  Description of Artificial Sequence: Synthetic peptide
  Seed: SPGMMMGMFNMLSTV
SPGVMMLMPNMISTV

SEQ ID NO: 200291 - protein, 15 aa, Artificial Sequence
  Description of Artificial Sequence: Synthetic peptide
  Seed: SPGMMMGMFNMLSTV
SPGVMMLMPNMVSTV

SEQ ID NO: 200292 - protein, 15 aa, Artificial Sequence
  Description of Artificial Sequence: Synthetic peptide
  Seed: SPGMMMGMFNMLSTV
SPGVMMLMRNMASTV

SEQ ID NO: 200293 - protein, 15 aa, Artificial Sequence
  Description of Artificial Sequence: Synthetic peptide
  Seed: SPGMMMGMFNMLSTV
SPGVMMLMRNMGSTV

SEQ ID NO: 200294 - protein, 15 aa, Artificial Sequence
  Description of Artificial Sequence: Synthetic peptide
  Seed: SPGMMMGMFNMLSTV
SPGVMMLMRNMSSTV

SEQ ID NO: 200295 - protein, 15 aa, Artificial Sequence
  Description of Artificial Sequence: Synthetic peptide
  Seed: SPGMMMGMFNMLSTV
SPGVMMLMRNMTSTV

SEQ ID NO: 200296 - protein, 15 aa, Artificial Sequence
  Description of Artificial Sequence: Synthetic peptide
  Seed: SPGMMMGMFNMLSTV
SPGVMMLMRNMVSTV

SEQ ID NO: 200297 - protein, 15 aa, Artificial Sequence
  Description of Artificial Sequence: Synthetic peptide
  Seed: SPGMMMGMFNMLSTV
SPGVMMLMSNMISTV

SEQ ID NO: 200298 - protein, 15 aa, Artificial Sequence
  Description of Artificial Sequence: Synthetic peptide
  Seed: SPGMMMGMFNMLSTV
SPGVMMLMSNMVSTV

SEQ ID NO: 200299 - protein, 15 aa, Artificial Sequence
  Description of Artificial Sequence: Synthetic peptide
  Seed: SPGMMMGMFNMLSTV
SPGVMMLMYNMLSTV

SEQ ID NO: 200300 - protein, 15 aa, Artificial Sequence
  Description of Artificial Sequence: Synthetic peptide
  Seed: SPGMMMGMFNMLSTV
SPGVMMMMANMASTV

SEQ ID NO: 200301 - protein, 15 aa, Artificial Sequence
  Description of Artificial Sequence: Synthetic peptide
  Seed: SPGMMMGMFNMLSTV
SPGVMMMMANMISTV

SEQ ID NO: 200302 - protein, 15 aa, Artificial Sequence
  Description of Artificial Sequence: Synthetic peptide
  Seed: SPGMMMGMFNMLSTV
SPGVMMMMANMVSTV

SEQ ID NO: 200303 - protein, 15 aa, Artificial Sequence
  Description of Artificial Sequence: Synthetic peptide
  Seed: SPGMMMGMFNMLSTV
SPGVMMMMHNMASTV

SEQ ID NO: 200304 - protein, 15 aa, Artificial Sequence
  Description of Artificial Sequence: Synthetic peptide
  Seed: SPGMMMGMFNMLSTV
SPGVMMMMKNMASTV

SEQ ID NO: 200305 - protein, 15 aa, Artificial Sequence
  Description of Artificial Sequence: Synthetic peptide
  Seed: SPGMMMGMFNMLSTV
SPGVMMMMNNMASTV

SEQ ID NO: 200306 - protein, 15 aa, Artificial Sequence
  Description of Artificial Sequence: Synthetic peptide
  Seed: SPGMMMGMFNMLSTV
SPGVMMMMNNMFSTV

SEQ ID NO: 200307 - protein, 15 aa, Artificial Sequence
  Description of Artificial Sequence: Synthetic peptide
  Seed: SPGMMMGMFNMLSTV
SPGVMMMMNNMISTV

SEQ ID NO: 200308 - protein, 15 aa, Artificial Sequence
  Description of Artificial Sequence: Synthetic peptide
  Seed: SPGMMMGMFNMLSTV
SPGVMMMMNNMLSTV

SEQ ID NO: 200309 - protein, 15 aa, Artificial Sequence
  Description of Artificial Sequence: Synthetic peptide
  Seed: SPGMMMGMFNMLSTV
SPGVMMMMNNMMSTV

SEQ ID NO: 200310 - protein, 15 aa, Artificial Sequence
  Description of Artificial Sequence: Synthetic peptide
  Seed: SPGMMMGMFNMLSTV
SPGVMMMMNNMVSTV

SEQ ID NO: 200311 - protein, 15 aa, Artificial Sequence
  Description of Artificial Sequence: Synthetic peptide
  Seed: SPGMMMGMFNMLSTV
SPGVMMMMNNMYSTV

SEQ ID NO: 200312 - protein, 15 aa, Artificial Sequence
  Description of Artificial Sequence: Synthetic peptide
  Seed: SPGMMMGMFNMLSTV
SPGVMMMMPNMISTV

SEQ ID NO: 200313 - protein, 15 aa, Artificial Sequence
  Description of Artificial Sequence: Synthetic peptide
  Seed: SPGMMMGMFNMLSTV
SPGVMMMMPNMVSTV

SEQ ID NO: 200314 - protein, 15 aa, Artificial Sequence
  Description of Artificial Sequence: Synthetic peptide
  Seed: SPGMMMGMFNMLSTV
SPGVMMMMRNMASTV

SEQ ID NO: 200315 - protein, 15 aa, Artificial Sequence
  Description of Artificial Sequence: Synthetic peptide
  Seed: SPGMMMGMFNMLSTV
SPGVMMMMSNMASTV

SEQ ID NO: 200316 - protein, 15 aa, Artificial Sequence
  Description of Artificial Sequence: Synthetic peptide
  Seed: SPGMMMGMFNMLSTV
SPGVMMMMSNMISTV

SEQ ID NO: 200317 - protein, 15 aa, Artificial Sequence
  Description of Artificial Sequence: Synthetic peptide
  Seed: SPGMMMGMFNMLSTV
SPGVMMMMSNMVSTV

SEQ ID NO: 200318 - protein, 15 aa, Artificial Sequence
  Description of Artificial Sequence: Synthetic peptide
  Seed: SPGMMMGMFNMLSTV
SPGVMMNMANMASTV

SEQ ID NO: 200319 - protein, 15 aa, Artificial Sequence
  Description of Artificial Sequence: Synthetic peptide
  Seed: SPGMMMGMFNMLSTV
SPGVMMNMANMCSTV

SEQ ID NO: 200320 - protein, 15 aa, Artificial Sequence
  Description of Artificial Sequence: Synthetic peptide
  Seed: SPGMMMGMFNMLSTV
SPGVMMNMANMFSTV

SEQ ID NO: 200321 - protein, 15 aa, Artificial Sequence
  Description of Artificial Sequence: Synthetic peptide
  Seed: SPGMMMGMFNMLSTV
SPGVMMNMANMGSTV

SEQ ID NO: 200322 - protein, 15 aa, Artificial Sequence
  Description of Artificial Sequence: Synthetic peptide
  Seed: SPGMMMGMFNMLSTV
SPGVMMNMANMHSTV

SEQ ID NO: 200323 - protein, 15 aa, Artificial Sequence
  Description of Artificial Sequence: Synthetic peptide
  Seed: SPGMMMGMFNMLSTV
SPGVMMNMANMISTV

SEQ ID NO: 200324 - protein, 15 aa, Artificial Sequence
  Description of Artificial Sequence: Synthetic peptide
  Seed: SPGMMMGMFNMLSTV
SPGVMMNMANMKSTV

SEQ ID NO: 200325 - protein, 15 aa, Artificial Sequence
  Description of Artificial Sequence: Synthetic peptide
  Seed: SPGMMMGMFNMLSTV
SPGVMMNMANMLSTV

SEQ ID NO: 200326 - protein, 15 aa, Artificial Sequence
  Description of Artificial Sequence: Synthetic peptide
  Seed: SPGMMMGMFNMLSTV
SPGVMMNMANMMSTV

SEQ ID NO: 200327 - protein, 15 aa, Artificial Sequence
  Description of Artificial Sequence: Synthetic peptide
  Seed: SPGMMMGMFNMLSTV
SPGVMMNMANMNSTV

SEQ ID NO: 200328 - protein, 15 aa, Artificial Sequence
  Description of Artificial Sequence: Synthetic peptide
  Seed: SPGMMMGMFNMLSTV
SPGVMMNMANMPSTV

SEQ ID NO: 200329 - protein, 15 aa, Artificial Sequence
  Description of Artificial Sequence: Synthetic peptide
  Seed: SPGMMMGMFNMLSTV
SPGVMMNMANMQSTV

SEQ ID NO: 200330 - protein, 15 aa, Artificial Sequence
  Description of Artificial Sequence: Synthetic peptide
  Seed: SPGMMMGMFNMLSTV
SPGVMMNMANMRSTV

SEQ ID NO: 200331 - protein, 15 aa, Artificial Sequence
  Description of Artificial Sequence: Synthetic peptide
  Seed: SPGMMMGMFNMLSTV
SPGVMMNMANMSSTV

SEQ ID NO: 200332 - protein, 15 aa, Artificial Sequence
  Description of Artificial Sequence: Synthetic peptide
  Seed: SPGMMMGMFNMLSTV
SPGVMMNMANMTSTV

SEQ ID NO: 200333 - protein, 15 aa, Artificial Sequence
  Description of Artificial Sequence: Synthetic peptide
  Seed: SPGMMMGMFNMLSTV
SPGVMMNMANMVSTV

SEQ ID NO: 200334 - protein, 15 aa, Artificial Sequence
  Description of Artificial Sequence: Synthetic peptide
  Seed: SPGMMMGMFNMLSTV
SPGVMMNMANMWSTV

SEQ ID NO: 200335 - protein, 15 aa, Artificial Sequence
  Description of Artificial Sequence: Synthetic peptide
  Seed: SPGMMMGMFNMLSTV
SPGVMMNMANMYSTV

SEQ ID NO: 200336 - protein, 15 aa, Artificial Sequence
  Description of Artificial Sequence: Synthetic peptide
  Seed: SPGMMMGMFNMLSTV
SPGVMMNMCNMISTV

SEQ ID NO: 200337 - protein, 15 aa, Artificial Sequence
  Description of Artificial Sequence: Synthetic peptide
  Seed: SPGMMMGMFNMLSTV
SPGVMMNMCNMLSTV

SEQ ID NO: 200338 - protein, 15 aa, Artificial Sequence
  Description of Artificial Sequence: Synthetic peptide
  Seed: SPGMMMGMFNMLSTV
SPGVMMNMCNMVSTV

SEQ ID NO: 200339 - protein, 15 aa, Artificial Sequence
  Description of Artificial Sequence: Synthetic peptide
  Seed: SPGMMMGMFNMLSTV
SPGVMMNMDNMFSTV

SEQ ID NO: 200340 - protein, 15 aa, Artificial Sequence
  Description of Artificial Sequence: Synthetic peptide
  Seed: SPGMMMGMFNMLSTV
SPGVMMNMDNMISTV

SEQ ID NO: 200341 - protein, 15 aa, Artificial Sequence
  Description of Artificial Sequence: Synthetic peptide
  Seed: SPGMMMGMFNMLSTV
SPGVMMNMDNMLSTV

SEQ ID NO: 200342 - protein, 15 aa, Artificial Sequence
  Description of Artificial Sequence: Synthetic peptide
  Seed: SPGMMMGMFNMLSTV
SPGVMMNMDNMMSTV

SEQ ID NO: 200343 - protein, 15 aa, Artificial Sequence
  Description of Artificial Sequence: Synthetic peptide
  Seed: SPGMMMGMFNMLSTV
SPGVMMNMDNMVSTV

SEQ ID NO: 200344 - protein, 15 aa, Artificial Sequence
  Description of Artificial Sequence: Synthetic peptide
  Seed: SPGMMMGMFNMLSTV
SPGVMMNMENMISTV

SEQ ID NO: 200345 - protein, 15 aa, Artificial Sequence
  Description of Artificial Sequence: Synthetic peptide
  Seed: SPGMMMGMFNMLSTV
SPGVMMNMENMLSTV

SEQ ID NO: 200346 - protein, 15 aa, Artificial Sequence
  Description of Artificial Sequence: Synthetic peptide
  Seed: SPGMMMGMFNMLSTV
SPGVMMNMENMVSTV

SEQ ID NO: 200347 - protein, 15 aa, Artificial Sequence
  Description of Artificial Sequence: Synthetic peptide
  Seed: SPGMMMGMFNMLSTV
SPGVMMNMFNMFSTV

SEQ ID NO: 200348 - protein, 15 aa, Artificial Sequence
  Description of Artificial Sequence: Synthetic peptide
  Seed: SPGMMMGMFNMLSTV
SPGVMMNMFNMISTV

SEQ ID NO: 200349 - protein, 15 aa, Artificial Sequence
  Description of Artificial Sequence: Synthetic peptide
  Seed: SPGMMMGMFNMLSTV
SPGVMMNMFNMLSTV

SEQ ID NO: 200350 - protein, 15 aa, Artificial Sequence
  Description of Artificial Sequence: Synthetic peptide
  Seed: SPGMMMGMFNMLSTV
SPGVMMNMFNMMSTV

SEQ ID NO: 200351 - protein, 15 aa, Artificial Sequence
  Description of Artificial Sequence: Synthetic peptide
  Seed: SPGMMMGMFNMLSTV
SPGVMMNMFNMVSTV

SEQ ID NO: 200352 - protein, 15 aa, Artificial Sequence
  Description of Artificial Sequence: Synthetic peptide
  Seed: SPGMMMGMFNMLSTV
SPGVMMNMGNMASTV

SEQ ID NO: 200353 - protein, 15 aa, Artificial Sequence
  Description of Artificial Sequence: Synthetic peptide
  Seed: SPGMMMGMFNMLSTV
SPGVMMNMGNMFSTV

SEQ ID NO: 200354 - protein, 15 aa, Artificial Sequence
  Description of Artificial Sequence: Synthetic peptide
  Seed: SPGMMMGMFNMLSTV
SPGVMMNMGNMISTV

SEQ ID NO: 200355 - protein, 15 aa, Artificial Sequence
  Description of Artificial Sequence: Synthetic peptide
  Seed: SPGMMMGMFNMLSTV
SPGVMMNMGNMLSTV

SEQ ID NO: 200356 - protein, 15 aa, Artificial Sequence
  Description of Artificial Sequence: Synthetic peptide
  Seed: SPGMMMGMFNMLSTV
SPGVMMNMGNMMSTV

SEQ ID NO: 200357 - protein, 15 aa, Artificial Sequence
  Description of Artificial Sequence: Synthetic peptide
  Seed: SPGMMMGMFNMLSTV
SPGVMMNMGNMNSTV

SEQ ID NO: 200358 - protein, 15 aa, Artificial Sequence
  Description of Artificial Sequence: Synthetic peptide
  Seed: SPGMMMGMFNMLSTV
SPGVMMNMGNMQSTV

SEQ ID NO: 200359 - protein, 15 aa, Artificial Sequence
  Description of Artificial Sequence: Synthetic peptide
  Seed: SPGMMMGMFNMLSTV
SPGVMMNMGNMSSTV

SEQ ID NO: 200360 - protein, 15 aa, Artificial Sequence
  Description of Artificial Sequence: Synthetic peptide
  Seed: SPGMMMGMFNMLSTV
SPGVMMNMGNMTSTV

SEQ ID NO: 200361 - protein, 15 aa, Artificial Sequence
  Description of Artificial Sequence: Synthetic peptide
  Seed: SPGMMMGMFNMLSTV
SPGVMMNMGNMVSTV

SEQ ID NO: 200362 - protein, 15 aa, Artificial Sequence
  Description of Artificial Sequence: Synthetic peptide
  Seed: SPGMMMGMFNMLSTV
SPGVMMNMGNMWSTV

SEQ ID NO: 200363 - protein, 15 aa, Artificial Sequence
  Description of Artificial Sequence: Synthetic peptide
  Seed: SPGMMMGMFNMLSTV
SPGVMMNMGNMYSTV

SEQ ID NO: 200364 - protein, 15 aa, Artificial Sequence
  Description of Artificial Sequence: Synthetic peptide
  Seed: SPGMMMGMFNMLSTV
SPGVMMNMHNMASTV

SEQ ID NO: 200365 - protein, 15 aa, Artificial Sequence
  Description of Artificial Sequence: Synthetic peptide
  Seed: SPGMMMGMFNMLSTV
SPGVMMNMHNMFSTV

SEQ ID NO: 200366 - protein, 15 aa, Artificial Sequence
  Description of Artificial Sequence: Synthetic peptide
  Seed: SPGMMMGMFNMLSTV
SPGVMMNMHNMISTV

SEQ ID NO: 200367 - protein, 15 aa, Artificial Sequence
  Description of Artificial Sequence: Synthetic peptide
  Seed: SPGMMMGMFNMLSTV
SPGVMMNMHNMLSTV

SEQ ID NO: 200368 - protein, 15 aa, Artificial Sequence
  Description of Artificial Sequence: Synthetic peptide
  Seed: SPGMMMGMFNMLSTV
SPGVMMNMHNMMSTV

SEQ ID NO: 200369 - protein, 15 aa, Artificial Sequence
  Description of Artificial Sequence: Synthetic peptide
  Seed: SPGMMMGMFNMLSTV
SPGVMMNMHNMVSTV

SEQ ID NO: 200370 - protein, 15 aa, Artificial Sequence
  Description of Artificial Sequence: Synthetic peptide
  Seed: SPGMMMGMFNMLSTV
SPGVMMNMHNMYSTV

SEQ ID NO: 200371 - protein, 15 aa, Artificial Sequence
  Description of Artificial Sequence: Synthetic peptide
  Seed: SPGMMMGMFNMLSTV
SPGVMMNMINMASTV

SEQ ID NO: 200372 - protein, 15 aa, Artificial Sequence
  Description of Artificial Sequence: Synthetic peptide
  Seed: SPGMMMGMFNMLSTV
SPGVMMNMINMFSTV

SEQ ID NO: 200373 - protein, 15 aa, Artificial Sequence
  Description of Artificial Sequence: Synthetic peptide
  Seed: SPGMMMGMFNMLSTV
SPGVMMNMINMISTV

SEQ ID NO: 200374 - protein, 15 aa, Artificial Sequence
  Description of Artificial Sequence: Synthetic peptide
  Seed: SPGMMMGMFNMLSTV
SPGVMMNMINMLSTV

SEQ ID NO: 200375 - protein, 15 aa, Artificial Sequence
  Description of Artificial Sequence: Synthetic peptide
  Seed: SPGMMMGMFNMLSTV
SPGVMMNMINMMSTV

SEQ ID NO: 200376 - protein, 15 aa, Artificial Sequence
  Description of Artificial Sequence: Synthetic peptide
  Seed: SPGMMMGMFNMLSTV
SPGVMMNMINMNSTV

SEQ ID NO: 200377 - protein, 15 aa, Artificial Sequence
  Description of Artificial Sequence: Synthetic peptide
  Seed: SPGMMMGMFNMLSTV
SPGVMMNMINMSSTV

SEQ ID NO: 200378 - protein, 15 aa, Artificial Sequence
  Description of Artificial Sequence: Synthetic peptide
  Seed: SPGMMMGMFNMLSTV
SPGVMMNMINMTSTV

SEQ ID NO: 200379 - protein, 15 aa, Artificial Sequence
  Description of Artificial Sequence: Synthetic peptide
  Seed: SPGMMMGMFNMLSTV
SPGVMMNMINMVSTV

SEQ ID NO: 200380 - protein, 15 aa, Artificial Sequence
  Description of Artificial Sequence: Synthetic peptide
  Seed: SPGMMMGMFNMLSTV
SPGVMMNMINMYSTV

SEQ ID NO: 200381 - protein, 15 aa, Artificial Sequence
  Description of Artificial Sequence: Synthetic peptide
  Seed: SPGMMMGMFNMLSTV
SPGVMMNMKNMFSTV

SEQ ID NO: 200382 - protein, 15 aa, Artificial Sequence
  Description of Artificial Sequence: Synthetic peptide
  Seed: SPGMMMGMFNMLSTV
SPGVMMNMKNMISTV

SEQ ID NO: 200383 - protein, 15 aa, Artificial Sequence
  Description of Artificial Sequence: Synthetic peptide
  Seed: SPGMMMGMFNMLSTV
SPGVMMNMKNMLSTV

SEQ ID NO: 200384 - protein, 15 aa, Artificial Sequence
  Description of Artificial Sequence: Synthetic peptide
  Seed: SPGMMMGMFNMLSTV
SPGVMMNMKNMMSTV

SEQ ID NO: 200385 - protein, 15 aa, Artificial Sequence
  Description of Artificial Sequence: Synthetic peptide
  Seed: SPGMMMGMFNMLSTV
SPGVMMNMKNMVSTV

SEQ ID NO: 200386 - protein, 15 aa, Artificial Sequence
  Description of Artificial Sequence: Synthetic peptide
  Seed: SPGMMMGMFNMLSTV
SPGVMMNMLNMASTV

SEQ ID NO: 200387 - protein, 15 aa, Artificial Sequence
  Description of Artificial Sequence: Synthetic peptide
  Seed: SPGMMMGMFNMLSTV
SPGVMMNMLNMFSTV

SEQ ID NO: 200388 - protein, 15 aa, Artificial Sequence
  Description of Artificial Sequence: Synthetic peptide
  Seed: SPGMMMGMFNMLSTV
SPGVMMNMLNMISTV

SEQ ID NO: 200389 - protein, 15 aa, Artificial Sequence
  Description of Artificial Sequence: Synthetic peptide
  Seed: SPGMMMGMFNMLSTV
SPGVMMNMLNMLSTV

SEQ ID NO: 200390 - protein, 15 aa, Artificial Sequence
  Description of Artificial Sequence: Synthetic peptide
  Seed: SPGMMMGMFNMLSTV
SPGVMMNMLNMMSTV

SEQ ID NO: 200391 - protein, 15 aa, Artificial Sequence
  Description of Artificial Sequence: Synthetic peptide
  Seed: SPGMMMGMFNMLSTV
SPGVMMNMLNMSSTV

SEQ ID NO: 200392 - protein, 15 aa, Artificial Sequence
  Description of Artificial Sequence: Synthetic peptide
  Seed: SPGMMMGMFNMLSTV
SPGVMMNMLNMTSTV

SEQ ID NO: 200393 - protein, 15 aa, Artificial Sequence
  Description of Artificial Sequence: Synthetic peptide
  Seed: SPGMMMGMFNMLSTV
SPGVMMNMLNMVSTV

SEQ ID NO: 200394 - protein, 15 aa, Artificial Sequence
  Description of Artificial Sequence: Synthetic peptide
  Seed: SPGMMMGMFNMLSTV
SPGVMMNMLNMYSTV

SEQ ID NO: 200395 - protein, 15 aa, Artificial Sequence
  Description of Artificial Sequence: Synthetic peptide
  Seed: SPGMMMGMFNMLSTV
SPGVMMNMMNMASTV

SEQ ID NO: 200396 - protein, 15 aa, Artificial Sequence
  Description of Artificial Sequence: Synthetic peptide
  Seed: SPGMMMGMFNMLSTV
SPGVMMNMMNMFSTV

SEQ ID NO: 200397 - protein, 15 aa, Artificial Sequence
  Description of Artificial Sequence: Synthetic peptide
  Seed: SPGMMMGMFNMLSTV
SPGVMMNMMNMISTV

SEQ ID NO: 200398 - protein, 15 aa, Artificial Sequence
  Description of Artificial Sequence: Synthetic peptide
  Seed: SPGMMMGMFNMLSTV
SPGVMMNMMNMLSTV

SEQ ID NO: 200399 - protein, 15 aa, Artificial Sequence
  Description of Artificial Sequence: Synthetic peptide
  Seed: SPGMMMGMFNMLSTV
SPGVMMNMMNMMSTV

SEQ ID NO: 200400 - protein, 15 aa, Artificial Sequence
  Description of Artificial Sequence: Synthetic peptide
  Seed: SPGMMMGMFNMLSTV
SPGVMMNMMNMTSTV

SEQ ID NO: 200401 - protein, 15 aa, Artificial Sequence
  Description of Artificial Sequence: Synthetic peptide
  Seed: SPGMMMGMFNMLSTV
SPGVMMNMMNMVSTV

SEQ ID NO: 200402 - protein, 15 aa, Artificial Sequence
  Description of Artificial Sequence: Synthetic peptide
  Seed: SPGMMMGMFNMLSTV
SPGVMMNMMNMYSTV

SEQ ID NO: 200403 - protein, 15 aa, Artificial Sequence
  Description of Artificial Sequence: Synthetic peptide
  Seed: SPGMMMGMFNMLSTV
SPGVMMNMNNMASTV

SEQ ID NO: 200404 - protein, 15 aa, Artificial Sequence
  Description of Artificial Sequence: Synthetic peptide
  Seed: SPGMMMGMFNMLSTV
SPGVMMNMNNMFSTV

SEQ ID NO: 200405 - protein, 15 aa, Artificial Sequence
  Description of Artificial Sequence: Synthetic peptide
  Seed: SPGMMMGMFNMLSTV
SPGVMMNMNNMGSTV

SEQ ID NO: 200406 - protein, 15 aa, Artificial Sequence
  Description of Artificial Sequence: Synthetic peptide
  Seed: SPGMMMGMFNMLSTV
SPGVMMNMNNMHSTV

SEQ ID NO: 200407 - protein, 15 aa, Artificial Sequence
  Description of Artificial Sequence: Synthetic peptide
  Seed: SPGMMMGMFNMLSTV
SPGVMMNMNNMISTV

SEQ ID NO: 200408 - protein, 15 aa, Artificial Sequence
  Description of Artificial Sequence: Synthetic peptide
  Seed: SPGMMMGMFNMLSTV
SPGVMMNMNNMLSTV

SEQ ID NO: 200409 - protein, 15 aa, Artificial Sequence
  Description of Artificial Sequence: Synthetic peptide
  Seed: SPGMMMGMFNMLSTV
SPGVMMNMNNMMSTV

SEQ ID NO: 200410 - protein, 15 aa, Artificial Sequence
  Description of Artificial Sequence: Synthetic peptide
  Seed: SPGMMMGMFNMLSTV
SPGVMMNMNNMNSTV

SEQ ID NO: 200411 - protein, 15 aa, Artificial Sequence
  Description of Artificial Sequence: Synthetic peptide
  Seed: SPGMMMGMFNMLSTV
SPGVMMNMNNMQSTV

SEQ ID NO: 200412 - protein, 15 aa, Artificial Sequence
  Description of Artificial Sequence: Synthetic peptide
  Seed: SPGMMMGMFNMLSTV
SPGVMMNMNNMRSTV

SEQ ID NO: 200413 - protein, 15 aa, Artificial Sequence
  Description of Artificial Sequence: Synthetic peptide
  Seed: SPGMMMGMFNMLSTV
SPGVMMNMNNMSSTV

SEQ ID NO: 200414 - protein, 15 aa, Artificial Sequence
  Description of Artificial Sequence: Synthetic peptide
  Seed: SPGMMMGMFNMLSTV
SPGVMMNMNNMTSTV

SEQ ID NO: 200415 - protein, 15 aa, Artificial Sequence
  Description of Artificial Sequence: Synthetic peptide
  Seed: SPGMMMGMFNMLSTV
SPGVMMNMNNMVSTV

SEQ ID NO: 200416 - protein, 15 aa, Artificial Sequence
  Description of Artificial Sequence: Synthetic peptide
  Seed: SPGMMMGMFNMLSTV
SPGVMMNMNNMWSTV

SEQ ID NO: 200417 - protein, 15 aa, Artificial Sequence
  Description of Artificial Sequence: Synthetic peptide
  Seed: SPGMMMGMFNMLSTV
SPGVMMNMNNMYSTV

SEQ ID NO: 200418 - protein, 15 aa, Artificial Sequence
  Description of Artificial Sequence: Synthetic peptide
  Seed: SPGMMMGMFNMLSTV
SPGVMMNMPNMASTV

SEQ ID NO: 200419 - protein, 15 aa, Artificial Sequence
  Description of Artificial Sequence: Synthetic peptide
  Seed: SPGMMMGMFNMLSTV
SPGVMMNMPNMFSTV

SEQ ID NO: 200420 - protein, 15 aa, Artificial Sequence
  Description of Artificial Sequence: Synthetic peptide
  Seed: SPGMMMGMFNMLSTV
SPGVMMNMPNMISTV

SEQ ID NO: 200421 - protein, 15 aa, Artificial Sequence
  Description of Artificial Sequence: Synthetic peptide
  Seed: SPGMMMGMFNMLSTV
SPGVMMNMPNMLSTV

SEQ ID NO: 200422 - protein, 15 aa, Artificial Sequence
  Description of Artificial Sequence: Synthetic peptide
  Seed: SPGMMMGMFNMLSTV
SPGVMMNMPNMMSTV

SEQ ID NO: 200423 - protein, 15 aa, Artificial Sequence
  Description of Artificial Sequence: Synthetic peptide
  Seed: SPGMMMGMFNMLSTV
SPGVMMNMPNMSSTV

SEQ ID NO: 200424 - protein, 15 aa, Artificial Sequence
  Description of Artificial Sequence: Synthetic peptide
  Seed: SPGMMMGMFNMLSTV
SPGVMMNMPNMTSTV

SEQ ID NO: 200425 - protein, 15 aa, Artificial Sequence
  Description of Artificial Sequence: Synthetic peptide
  Seed: SPGMMMGMFNMLSTV
SPGVMMNMPNMVSTV

SEQ ID NO: 200426 - protein, 15 aa, Artificial Sequence
  Description of Artificial Sequence: Synthetic peptide
  Seed: SPGMMMGMFNMLSTV
SPGVMMNMPNMWSTV

SEQ ID NO: 200427 - protein, 15 aa, Artificial Sequence
  Description of Artificial Sequence: Synthetic peptide
  Seed: SPGMMMGMFNMLSTV
SPGVMMNMPNMYSTV

SEQ ID NO: 200428 - protein, 15 aa, Artificial Sequence
  Description of Artificial Sequence: Synthetic peptide
  Seed: SPGMMMGMFNMLSTV
SPGVMMNMQNMFSTV

SEQ ID NO: 200429 - protein, 15 aa, Artificial Sequence
  Description of Artificial Sequence: Synthetic peptide
  Seed: SPGMMMGMFNMLSTV
SPGVMMNMQNMISTV

SEQ ID NO: 200430 - protein, 15 aa, Artificial Sequence
  Description of Artificial Sequence: Synthetic peptide
  Seed: SPGMMMGMFNMLSTV
SPGVMMNMQNMLSTV

SEQ ID NO: 200431 - protein, 15 aa, Artificial Sequence
  Description of Artificial Sequence: Synthetic peptide
  Seed: SPGMMMGMFNMLSTV
SPGVMMNMQNMMSTV

SEQ ID NO: 200432 - protein, 15 aa, Artificial Sequence
  Description of Artificial Sequence: Synthetic peptide
  Seed: SPGMMMGMFNMLSTV
SPGVMMNMQNMVSTV

SEQ ID NO: 200433 - protein, 15 aa, Artificial Sequence
  Description of Artificial Sequence: Synthetic peptide
  Seed: SPGMMMGMFNMLSTV
SPGVMMNMQNMYSTV

SEQ ID NO: 200434 - protein, 15 aa, Artificial Sequence
  Description of Artificial Sequence: Synthetic peptide
  Seed: SPGMMMGMFNMLSTV
SPGVMMNMRNMFSTV

SEQ ID NO: 200435 - protein, 15 aa, Artificial Sequence
  Description of Artificial Sequence: Synthetic peptide
  Seed: SPGMMMGMFNMLSTV
SPGVMMNMRNMISTV

SEQ ID NO: 200436 - protein, 15 aa, Artificial Sequence
  Description of Artificial Sequence: Synthetic peptide
  Seed: SPGMMMGMFNMLSTV
SPGVMMNMRNMLSTV

SEQ ID NO: 200437 - protein, 15 aa, Artificial Sequence
  Description of Artificial Sequence: Synthetic peptide
  Seed: SPGMMMGMFNMLSTV
SPGVMMNMRNMVSTV

SEQ ID NO: 200438 - protein, 15 aa, Artificial Sequence
  Description of Artificial Sequence: Synthetic peptide
  Seed: SPGMMMGMFNMLSTV
SPGVMMNMSNMASTV

SEQ ID NO: 200439 - protein, 15 aa, Artificial Sequence
  Description of Artificial Sequence: Synthetic peptide
  Seed: SPGMMMGMFNMLSTV
SPGVMMNMSNMFSTV

SEQ ID NO: 200440 - protein, 15 aa, Artificial Sequence
  Description of Artificial Sequence: Synthetic peptide
  Seed: SPGMMMGMFNMLSTV
SPGVMMNMSNMGSTV

SEQ ID NO: 200441 - protein, 15 aa, Artificial Sequence
  Description of Artificial Sequence: Synthetic peptide
  Seed: SPGMMMGMFNMLSTV
SPGVMMNMSNMHSTV

SEQ ID NO: 200442 - protein, 15 aa, Artificial Sequence
  Description of Artificial Sequence: Synthetic peptide
  Seed: SPGMMMGMFNMLSTV
SPGVMMNMSNMISTV

SEQ ID NO: 200443 - protein, 15 aa, Artificial Sequence
  Description of Artificial Sequence: Synthetic peptide
  Seed: SPGMMMGMFNMLSTV
SPGVMMNMSNMLSTV

SEQ ID NO: 200444 - protein, 15 aa, Artificial Sequence
  Description of Artificial Sequence: Synthetic peptide
  Seed: SPGMMMGMFNMLSTV
SPGVMMNMSNMMSTV

SEQ ID NO: 200445 - protein, 15 aa, Artificial Sequence
  Description of Artificial Sequence: Synthetic peptide
  Seed: SPGMMMGMFNMLSTV
SPGVMMNMSNMNSTV

SEQ ID NO: 200446 - protein, 15 aa, Artificial Sequence
  Description of Artificial Sequence: Synthetic peptide
  Seed: SPGMMMGMFNMLSTV
SPGVMMNMSNMQSTV

SEQ ID NO: 200447 - protein, 15 aa, Artificial Sequence
  Description of Artificial Sequence: Synthetic peptide
  Seed: SPGMMMGMFNMLSTV
SPGVMMNMSNMSSTV

SEQ ID NO: 200448 - protein, 15 aa, Artificial Sequence
  Description of Artificial Sequence: Synthetic peptide
  Seed: SPGMMMGMFNMLSTV
SPGVMMNMSNMTSTV

SEQ ID NO: 200449 - protein, 15 aa, Artificial Sequence
  Description of Artificial Sequence: Synthetic peptide
  Seed: SPGMMMGMFNMLSTV
SPGVMMNMSNMVSTV

SEQ ID NO: 200450 - protein, 15 aa, Artificial Sequence
  Description of Artificial Sequence: Synthetic peptide
  Seed: SPGMMMGMFNMLSTV
SPGVMMNMSNMWSTV

SEQ ID NO: 200451 - protein, 15 aa, Artificial Sequence
  Description of Artificial Sequence: Synthetic peptide
  Seed: SPGMMMGMFNMLSTV
SPGVMMNMSNMYSTV

SEQ ID NO: 200452 - protein, 15 aa, Artificial Sequence
  Description of Artificial Sequence: Synthetic peptide
  Seed: SPGMMMGMFNMLSTV
SPGVMMNMTNMASTV

SEQ ID NO: 200453 - protein, 15 aa, Artificial Sequence
  Description of Artificial Sequence: Synthetic peptide
  Seed: SPGMMMGMFNMLSTV
SPGVMMNMTNMFSTV

SEQ ID NO: 200454 - protein, 15 aa, Artificial Sequence
  Description of Artificial Sequence: Synthetic peptide
  Seed: SPGMMMGMFNMLSTV
SPGVMMNMTNMISTV

SEQ ID NO: 200455 - protein, 15 aa, Artificial Sequence
  Description of Artificial Sequence: Synthetic peptide
  Seed: SPGMMMGMFNMLSTV
SPGVMMNMTNMLSTV

SEQ ID NO: 200456 - protein, 15 aa, Artificial Sequence
  Description of Artificial Sequence: Synthetic peptide
  Seed: SPGMMMGMFNMLSTV
SPGVMMNMTNMMSTV

SEQ ID NO: 200457 - protein, 15 aa, Artificial Sequence
  Description of Artificial Sequence: Synthetic peptide
  Seed: SPGMMMGMFNMLSTV
SPGVMMNMTNMNSTV

SEQ ID NO: 200458 - protein, 15 aa, Artificial Sequence
  Description of Artificial Sequence: Synthetic peptide
  Seed: SPGMMMGMFNMLSTV
SPGVMMNMTNMSSTV

SEQ ID NO: 200459 - protein, 15 aa, Artificial Sequence
  Description of Artificial Sequence: Synthetic peptide
  Seed: SPGMMMGMFNMLSTV
SPGVMMNMTNMTSTV

SEQ ID NO: 200460 - protein, 15 aa, Artificial Sequence
  Description of Artificial Sequence: Synthetic peptide
  Seed: SPGMMMGMFNMLSTV
SPGVMMNMTNMVSTV

SEQ ID NO: 200461 - protein, 15 aa, Artificial Sequence
  Description of Artificial Sequence: Synthetic peptide
  Seed: SPGMMMGMFNMLSTV
SPGVMMNMTNMWSTV

SEQ ID NO: 200462 - protein, 15 aa, Artificial Sequence
  Description of Artificial Sequence: Synthetic peptide
  Seed: SPGMMMGMFNMLSTV
SPGVMMNMTNMYSTV

SEQ ID NO: 200463 - protein, 15 aa, Artificial Sequence
  Description of Artificial Sequence: Synthetic peptide
  Seed: SPGMMMGMFNMLSTV
SPGVMMNMVNMASTV

SEQ ID NO: 200464 - protein, 15 aa, Artificial Sequence
  Description of Artificial Sequence: Synthetic peptide
  Seed: SPGMMMGMFNMLSTV
SPGVMMNMVNMFSTV

SEQ ID NO: 200465 - protein, 15 aa, Artificial Sequence
  Description of Artificial Sequence: Synthetic peptide
  Seed: SPGMMMGMFNMLSTV
SPGVMMNMVNMISTV

SEQ ID NO: 200466 - protein, 15 aa, Artificial Sequence
  Description of Artificial Sequence: Synthetic peptide
  Seed: SPGMMMGMFNMLSTV
SPGVMMNMVNMLSTV

SEQ ID NO: 200467 - protein, 15 aa, Artificial Sequence
  Description of Artificial Sequence: Synthetic peptide
  Seed: SPGMMMGMFNMLSTV
SPGVMMNMVNMMSTV

SEQ ID NO: 200468 - protein, 15 aa, Artificial Sequence
  Description of Artificial Sequence: Synthetic peptide
  Seed: SPGMMMGMFNMLSTV
SPGVMMNMVNMNSTV

SEQ ID NO: 200469 - protein, 15 aa, Artificial Sequence
  Description of Artificial Sequence: Synthetic peptide
  Seed: SPGMMMGMFNMLSTV
SPGVMMNMVNMSSTV

SEQ ID NO: 200470 - protein, 15 aa, Artificial Sequence
  Description of Artificial Sequence: Synthetic peptide
  Seed: SPGMMMGMFNMLSTV
SPGVMMNMVNMTSTV

SEQ ID NO: 200471 - protein, 15 aa, Artificial Sequence
  Description of Artificial Sequence: Synthetic peptide
  Seed: SPGMMMGMFNMLSTV
SPGVMMNMVNMVSTV

SEQ ID NO: 200472 - protein, 15 aa, Artificial Sequence
  Description of Artificial Sequence: Synthetic peptide
  Seed: SPGMMMGMFNMLSTV
SPGVMMNMVNMYSTV

SEQ ID NO: 200473 - protein, 15 aa, Artificial Sequence
  Description of Artificial Sequence: Synthetic peptide
  Seed: SPGMMMGMFNMLSTV
SPGVMMNMWNMISTV

SEQ ID NO: 200474 - protein, 15 aa, Artificial Sequence
  Description of Artificial Sequence: Synthetic peptide
  Seed: SPGMMMGMFNMLSTV
SPGVMMNMWNMLSTV

SEQ ID NO: 200475 - protein, 15 aa, Artificial Sequence
  Description of Artificial Sequence: Synthetic peptide
  Seed: SPGMMMGMFNMLSTV
SPGVMMNMWNMMSTV

SEQ ID NO: 200476 - protein, 15 aa, Artificial Sequence
  Description of Artificial Sequence: Synthetic peptide
  Seed: SPGMMMGMFNMLSTV
SPGVMMNMWNMVSTV

SEQ ID NO: 200477 - protein, 15 aa, Artificial Sequence
  Description of Artificial Sequence: Synthetic peptide
  Seed: SPGMMMGMFNMLSTV
SPGVMMNMYNMASTV

SEQ ID NO: 200478 - protein, 15 aa, Artificial Sequence
  Description of Artificial Sequence: Synthetic peptide
  Seed: SPGMMMGMFNMLSTV
SPGVMMNMYNMFSTV

SEQ ID NO: 200479 - protein, 15 aa, Artificial Sequence
  Description of Artificial Sequence: Synthetic peptide
  Seed: SPGMMMGMFNMLSTV
SPGVMMNMYNMISTV

SEQ ID NO: 200480 - protein, 15 aa, Artificial Sequence
  Description of Artificial Sequence: Synthetic peptide
  Seed: SPGMMMGMFNMLSTV
SPGVMMNMYNMLSTV

SEQ ID NO: 200481 - protein, 15 aa, Artificial Sequence
  Description of Artificial Sequence: Synthetic peptide
  Seed: SPGMMMGMFNMLSTV
SPGVMMNMYNMMSTV

SEQ ID NO: 200482 - protein, 15 aa, Artificial Sequence
  Description of Artificial Sequence: Synthetic peptide
  Seed: SPGMMMGMFNMLSTV
SPGVMMNMYNMVSTV

SEQ ID NO: 200483 - protein, 15 aa, Artificial Sequence
  Description of Artificial Sequence: Synthetic peptide
  Seed: SPGMMMGMFNMLSTV
SPGVMMNMYNMYSTV

SEQ ID NO: 200484 - protein, 15 aa, Artificial Sequence
  Description of Artificial Sequence: Synthetic peptide
  Seed: SPGMMMGMFNMLSTV
SPGVMMQMANMISTV

SEQ ID NO: 200485 - protein, 15 aa, Artificial Sequence
  Description of Artificial Sequence: Synthetic peptide
  Seed: SPGMMMGMFNMLSTV
SPGVMMQMANMLSTV

SEQ ID NO: 200486 - protein, 15 aa, Artificial Sequence
  Description of Artificial Sequence: Synthetic peptide
  Seed: SPGMMMGMFNMLSTV
SPGVMMQMANMVSTV

SEQ ID NO: 200487 - protein, 15 aa, Artificial Sequence
  Description of Artificial Sequence: Synthetic peptide
  Seed: SPGMMMGMFNMLSTV
SPGVMMQMFNMISTV

SEQ ID NO: 200488 - protein, 15 aa, Artificial Sequence
  Description of Artificial Sequence: Synthetic peptide
  Seed: SPGMMMGMFNMLSTV
SPGVMMQMFNMLSTV

SEQ ID NO: 200489 - protein, 15 aa, Artificial Sequence
  Description of Artificial Sequence: Synthetic peptide
  Seed: SPGMMMGMFNMLSTV
SPGVMMQMFNMMSTV

SEQ ID NO: 200490 - protein, 15 aa, Artificial Sequence
  Description of Artificial Sequence: Synthetic peptide
  Seed: SPGMMMGMFNMLSTV
SPGVMMQMFNMVSTV

SEQ ID NO: 200491 - protein, 15 aa, Artificial Sequence
  Description of Artificial Sequence: Synthetic peptide
  Seed: SPGMMMGMFNMLSTV
SPGVMMQMGNMISTV

SEQ ID NO: 200492 - protein, 15 aa, Artificial Sequence
  Description of Artificial Sequence: Synthetic peptide
  Seed: SPGMMMGMFNMLSTV
SPGVMMQMNNMFSTV

SEQ ID NO: 200493 - protein, 15 aa, Artificial Sequence
  Description of Artificial Sequence: Synthetic peptide
  Seed: SPGMMMGMFNMLSTV
SPGVMMQMNNMISTV

SEQ ID NO: 200494 - protein, 15 aa, Artificial Sequence
  Description of Artificial Sequence: Synthetic peptide
  Seed: SPGMMMGMFNMLSTV
SPGVMMQMNNMLSTV

SEQ ID NO: 200495 - protein, 15 aa, Artificial Sequence
  Description of Artificial Sequence: Synthetic peptide
  Seed: SPGMMMGMFNMLSTV
SPGVMMQMNNMMSTV

SEQ ID NO: 200496 - protein, 15 aa, Artificial Sequence
  Description of Artificial Sequence: Synthetic peptide
  Seed: SPGMMMGMFNMLSTV
SPGVMMQMNNMVSTV

SEQ ID NO: 200497 - protein, 15 aa, Artificial Sequence
  Description of Artificial Sequence: Synthetic peptide
  Seed: SPGMMMGMFNMLSTV
SPGVMMQMNNMYSTV

SEQ ID NO: 200498 - protein, 15 aa, Artificial Sequence
  Description of Artificial Sequence: Synthetic peptide
  Seed: SPGMMMGMFNMLSTV
SPGVMMQMPNMISTV

SEQ ID NO: 200499 - protein, 15 aa, Artificial Sequence
  Description of Artificial Sequence: Synthetic peptide
  Seed: SPGMMMGMFNMLSTV
SPGVMMQMPNMVSTV

SEQ ID NO: 200500 - protein, 15 aa, Artificial Sequence
  Description of Artificial Sequence: Synthetic peptide
  Seed: SPGMMMGMFNMLSTV
SPGVMMQMSNMISTV

SEQ ID NO: 200501 - protein, 15 aa, Artificial Sequence
  Description of Artificial Sequence: Synthetic peptide
  Seed: SPGMMMGMFNMLSTV
SPGVMMQMSNMLSTV

SEQ ID NO: 200502 - protein, 15 aa, Artificial Sequence
  Description of Artificial Sequence: Synthetic peptide
  Seed: SPGMMMGMFNMLSTV
SPGVMMQMSNMVSTV

SEQ ID NO: 200503 - protein, 15 aa, Artificial Sequence
  Description of Artificial Sequence: Synthetic peptide
  Seed: SPGMMMGMFNMLSTV
SPGVMMQMTNMISTV

SEQ ID NO: 200504 - protein, 15 aa, Artificial Sequence
  Description of Artificial Sequence: Synthetic peptide
  Seed: SPGMMMGMFNMLSTV
SPGVMMRMFNMFSTV

SEQ ID NO: 200505 - protein, 15 aa, Artificial Sequence
  Description of Artificial Sequence: Synthetic peptide
  Seed: SPGMMMGMFNMLSTV
SPGVMMRMFNMLSTV

SEQ ID NO: 200506 - protein, 15 aa, Artificial Sequence
  Description of Artificial Sequence: Synthetic peptide
  Seed: SPGMMMGMFNMLSTV
SPGVMMRMNNMFSTV

SEQ ID NO: 200507 - protein, 15 aa, Artificial Sequence
  Description of Artificial Sequence: Synthetic peptide
  Seed: SPGMMMGMFNMLSTV
SPGVMMRMNNMMSTV

SEQ ID NO: 200508 - protein, 15 aa, Artificial Sequence
  Description of Artificial Sequence: Synthetic peptide
  Seed: SPGMMMGMFNMLSTV
SPGVMMRMNNMVSTV

SEQ ID NO: 200509 - protein, 15 aa, Artificial Sequence
  Description of Artificial Sequence: Synthetic peptide
  Seed: SPGMMMGMFNMLSTV
SPGVMMRMNNMYSTV

SEQ ID NO: 200510 - protein, 15 aa, Artificial Sequence
  Description of Artificial Sequence: Synthetic peptide
  Seed: SPGMMMGMFNMLSTV
SPGVMMSMANMASTV

SEQ ID NO: 200511 - protein, 15 aa, Artificial Sequence
  Description of Artificial Sequence: Synthetic peptide
  Seed: SPGMMMGMFNMLSTV
SPGVMMSMANMFSTV

SEQ ID NO: 200512 - protein, 15 aa, Artificial Sequence
  Description of Artificial Sequence: Synthetic peptide
  Seed: SPGMMMGMFNMLSTV
SPGVMMSMANMISTV

SEQ ID NO: 200513 - protein, 15 aa, Artificial Sequence
  Description of Artificial Sequence: Synthetic peptide
  Seed: SPGMMMGMFNMLSTV
SPGVMMSMANMLSTV

SEQ ID NO: 200514 - protein, 15 aa, Artificial Sequence
  Description of Artificial Sequence: Synthetic peptide
  Seed: SPGMMMGMFNMLSTV
SPGVMMSMANMMSTV

SEQ ID NO: 200515 - protein, 15 aa, Artificial Sequence
  Description of Artificial Sequence: Synthetic peptide
  Seed: SPGMMMGMFNMLSTV
SPGVMMSMANMTSTV

SEQ ID NO: 200516 - protein, 15 aa, Artificial Sequence
  Description of Artificial Sequence: Synthetic peptide
  Seed: SPGMMMGMFNMLSTV
SPGVMMSMANMVSTV

SEQ ID NO: 200517 - protein, 15 aa, Artificial Sequence
  Description of Artificial Sequence: Synthetic peptide
  Seed: SPGMMMGMFNMLSTV
SPGVMMSMANMYSTV

SEQ ID NO: 200518 - protein, 15 aa, Artificial Sequence
  Description of Artificial Sequence: Synthetic peptide
  Seed: SPGMMMGMFNMLSTV
SPGVMMSMFNMASTV

SEQ ID NO: 200519 - protein, 15 aa, Artificial Sequence
  Description of Artificial Sequence: Synthetic peptide
  Seed: SPGMMMGMFNMLSTV
SPGVMMSMFNMFSTV

SEQ ID NO: 200520 - protein, 15 aa, Artificial Sequence
  Description of Artificial Sequence: Synthetic peptide
  Seed: SPGMMMGMFNMLSTV
SPGVMMSMFNMISTV

SEQ ID NO: 200521 - protein, 15 aa, Artificial Sequence
  Description of Artificial Sequence: Synthetic peptide
  Seed: SPGMMMGMFNMLSTV
SPGVMMSMFNMLSTV

SEQ ID NO: 200522 - protein, 15 aa, Artificial Sequence
  Description of Artificial Sequence: Synthetic peptide
  Seed: SPGMMMGMFNMLSTV
SPGVMMSMFNMMSTV

SEQ ID NO: 200523 - protein, 15 aa, Artificial Sequence
  Description of Artificial Sequence: Synthetic peptide
  Seed: SPGMMMGMFNMLSTV
SPGVMMSMFNMNSTV

SEQ ID NO: 200524 - protein, 15 aa, Artificial Sequence
  Description of Artificial Sequence: Synthetic peptide
  Seed: SPGMMMGMFNMLSTV
SPGVMMSMFNMTSTV

SEQ ID NO: 200525 - protein, 15 aa, Artificial Sequence
  Description of Artificial Sequence: Synthetic peptide
  Seed: SPGMMMGMFNMLSTV
SPGVMMSMFNMVSTV

SEQ ID NO: 200526 - protein, 15 aa, Artificial Sequence
  Description of Artificial Sequence: Synthetic peptide
  Seed: SPGMMMGMFNMLSTV
SPGVMMSMFNMYSTV

SEQ ID NO: 200527 - protein, 15 aa, Artificial Sequence
  Description of Artificial Sequence: Synthetic peptide
  Seed: SPGMMMGMFNMLSTV
SPGVMMSMGNMFSTV

SEQ ID NO: 200528 - protein, 15 aa, Artificial Sequence
  Description of Artificial Sequence: Synthetic peptide
  Seed: SPGMMMGMFNMLSTV
SPGVMMSMGNMISTV

SEQ ID NO: 200529 - protein, 15 aa, Artificial Sequence
  Description of Artificial Sequence: Synthetic peptide
  Seed: SPGMMMGMFNMLSTV
SPGVMMSMGNMLSTV

SEQ ID NO: 200530 - protein, 15 aa, Artificial Sequence
  Description of Artificial Sequence: Synthetic peptide
  Seed: SPGMMMGMFNMLSTV
SPGVMMSMGNMMSTV

SEQ ID NO: 200531 - protein, 15 aa, Artificial Sequence
  Description of Artificial Sequence: Synthetic peptide
  Seed: SPGMMMGMFNMLSTV
SPGVMMSMGNMVSTV

SEQ ID NO: 200532 - protein, 15 aa, Artificial Sequence
  Description of Artificial Sequence: Synthetic peptide
  Seed: SPGMMMGMFNMLSTV
SPGVMMSMGNMYSTV

SEQ ID NO: 200533 - protein, 15 aa, Artificial Sequence
  Description of Artificial Sequence: Synthetic peptide
  Seed: SPGMMMGMFNMLSTV
SPGVMMSMHNMISTV

SEQ ID NO: 200534 - protein, 15 aa, Artificial Sequence
  Description of Artificial Sequence: Synthetic peptide
  Seed: SPGMMMGMFNMLSTV
SPGVMMSMHNMVSTV

SEQ ID NO: 200535 - protein, 15 aa, Artificial Sequence
  Description of Artificial Sequence: Synthetic peptide
  Seed: SPGMMMGMFNMLSTV
SPGVMMSMINMISTV

SEQ ID NO: 200536 - protein, 15 aa, Artificial Sequence
  Description of Artificial Sequence: Synthetic peptide
  Seed: SPGMMMGMFNMLSTV
SPGVMMSMINMVSTV

SEQ ID NO: 200537 - protein, 15 aa, Artificial Sequence
  Description of Artificial Sequence: Synthetic peptide
  Seed: SPGMMMGMFNMLSTV
SPGVMMSMNNMASTV

SEQ ID NO: 200538 - protein, 15 aa, Artificial Sequence
  Description of Artificial Sequence: Synthetic peptide
  Seed: SPGMMMGMFNMLSTV
SPGVMMSMNNMFSTV

SEQ ID NO: 200539 - protein, 15 aa, Artificial Sequence
  Description of Artificial Sequence: Synthetic peptide
  Seed: SPGMMMGMFNMLSTV
SPGVMMSMNNMISTV

SEQ ID NO: 200540 - protein, 15 aa, Artificial Sequence
  Description of Artificial Sequence: Synthetic peptide
  Seed: SPGMMMGMFNMLSTV
SPGVMMSMNNMLSTV

SEQ ID NO: 200541 - protein, 15 aa, Artificial Sequence
  Description of Artificial Sequence: Synthetic peptide
  Seed: SPGMMMGMFNMLSTV
SPGVMMSMNNMMSTV

SEQ ID NO: 200542 - protein, 15 aa, Artificial Sequence
  Description of Artificial Sequence: Synthetic peptide
  Seed: SPGMMMGMFNMLSTV
SPGVMMSMNNMTSTV

SEQ ID NO: 200543 - protein, 15 aa, Artificial Sequence
  Description of Artificial Sequence: Synthetic peptide
  Seed: SPGMMMGMFNMLSTV
SPGVMMSMNNMVSTV

SEQ ID NO: 200544 - protein, 15 aa, Artificial Sequence
  Description of Artificial Sequence: Synthetic peptide
  Seed: SPGMMMGMFNMLSTV
SPGVMMSMNNMYSTV

SEQ ID NO: 200545 - protein, 15 aa, Artificial Sequence
  Description of Artificial Sequence: Synthetic peptide
  Seed: SPGMMMGMFNMLSTV
SPGVMMSMPNMFSTV

SEQ ID NO: 200546 - protein, 15 aa, Artificial Sequence
  Description of Artificial Sequence: Synthetic peptide
  Seed: SPGMMMGMFNMLSTV
SPGVMMSMPNMISTV

SEQ ID NO: 200547 - protein, 15 aa, Artificial Sequence
  Description of Artificial Sequence: Synthetic peptide
  Seed: SPGMMMGMFNMLSTV
SPGVMMSMPNMLSTV

SEQ ID NO: 200548 - protein, 15 aa, Artificial Sequence
  Description of Artificial Sequence: Synthetic peptide
  Seed: SPGMMMGMFNMLSTV
SPGVMMSMPNMMSTV

SEQ ID NO: 200549 - protein, 15 aa, Artificial Sequence
  Description of Artificial Sequence: Synthetic peptide
  Seed: SPGMMMGMFNMLSTV
SPGVMMSMPNMVSTV

SEQ ID NO: 200550 - protein, 15 aa, Artificial Sequence
  Description of Artificial Sequence: Synthetic peptide
  Seed: SPGMMMGMFNMLSTV
SPGVMMSMPNMYSTV

SEQ ID NO: 200551 - protein, 15 aa, Artificial Sequence
  Description of Artificial Sequence: Synthetic peptide
  Seed: SPGMMMGMFNMLSTV
SPGVMMSMSNMASTV

SEQ ID NO: 200552 - protein, 15 aa, Artificial Sequence
  Description of Artificial Sequence: Synthetic peptide
  Seed: SPGMMMGMFNMLSTV
SPGVMMSMSNMFSTV

SEQ ID NO: 200553 - protein, 15 aa, Artificial Sequence
  Description of Artificial Sequence: Synthetic peptide
  Seed: SPGMMMGMFNMLSTV
SPGVMMSMSNMISTV

SEQ ID NO: 200554 - protein, 15 aa, Artificial Sequence
  Description of Artificial Sequence: Synthetic peptide
  Seed: SPGMMMGMFNMLSTV
SPGVMMSMSNMLSTV

SEQ ID NO: 200555 - protein, 15 aa, Artificial Sequence
  Description of Artificial Sequence: Synthetic peptide
  Seed: SPGMMMGMFNMLSTV
SPGVMMSMSNMMSTV

SEQ ID NO: 200556 - protein, 15 aa, Artificial Sequence
  Description of Artificial Sequence: Synthetic peptide
  Seed: SPGMMMGMFNMLSTV
SPGVMMSMSNMVSTV

SEQ ID NO: 200557 - protein, 15 aa, Artificial Sequence
  Description of Artificial Sequence: Synthetic peptide
  Seed: SPGMMMGMFNMLSTV
SPGVMMSMSNMYSTV

SEQ ID NO: 200558 - protein, 15 aa, Artificial Sequence
  Description of Artificial Sequence: Synthetic peptide
  Seed: SPGMMMGMFNMLSTV
SPGVMMSMTNMFSTV

SEQ ID NO: 200559 - protein, 15 aa, Artificial Sequence
  Description of Artificial Sequence: Synthetic peptide
  Seed: SPGMMMGMFNMLSTV
SPGVMMSMTNMISTV

SEQ ID NO: 200560 - protein, 15 aa, Artificial Sequence
  Description of Artificial Sequence: Synthetic peptide
  Seed: SPGMMMGMFNMLSTV
SPGVMMSMTNMLSTV

SEQ ID NO: 200561 - protein, 15 aa, Artificial Sequence
  Description of Artificial Sequence: Synthetic peptide
  Seed: SPGMMMGMFNMLSTV
SPGVMMSMTNMMSTV

SEQ ID NO: 200562 - protein, 15 aa, Artificial Sequence
  Description of Artificial Sequence: Synthetic peptide
  Seed: SPGMMMGMFNMLSTV
SPGVMMSMTNMVSTV

SEQ ID NO: 200563 - protein, 15 aa, Artificial Sequence
  Description of Artificial Sequence: Synthetic peptide
  Seed: SPGMMMGMFNMLSTV
SPGVMMSMTNMYSTV

SEQ ID NO: 200564 - protein, 15 aa, Artificial Sequence
  Description of Artificial Sequence: Synthetic peptide
  Seed: SPGMMMGMFNMLSTV
SPGVMMSMVNMISTV

SEQ ID NO: 200565 - protein, 15 aa, Artificial Sequence
  Description of Artificial Sequence: Synthetic peptide
  Seed: SPGMMMGMFNMLSTV
SPGVMMSMVNMLSTV

SEQ ID NO: 200566 - protein, 15 aa, Artificial Sequence
  Description of Artificial Sequence: Synthetic peptide
  Seed: SPGMMMGMFNMLSTV
SPGVMMSMVNMVSTV

SEQ ID NO: 200567 - protein, 15 aa, Artificial Sequence
  Description of Artificial Sequence: Synthetic peptide
  Seed: SPGMMMGMFNMLSTV
SPGVMMSMYNMISTV

SEQ ID NO: 200568 - protein, 15 aa, Artificial Sequence
  Description of Artificial Sequence: Synthetic peptide
  Seed: SPGMMMGMFNMLSTV
SPGVMMSMYNMLSTV

SEQ ID NO: 200569 - protein, 15 aa, Artificial Sequence
  Description of Artificial Sequence: Synthetic peptide
  Seed: SPGMMMGMFNMLSTV
SPGVMMSMYNMVSTV

SEQ ID NO: 200570 - protein, 15 aa, Artificial Sequence
  Description of Artificial Sequence: Synthetic peptide
  Seed: SPGMMMGMFNMLSTV
SPGVMMTMANMASTV

SEQ ID NO: 200571 - protein, 15 aa, Artificial Sequence
  Description of Artificial Sequence: Synthetic peptide
  Seed: SPGMMMGMFNMLSTV
SPGVMMTMANMFSTV

SEQ ID NO: 200572 - protein, 15 aa, Artificial Sequence
  Description of Artificial Sequence: Synthetic peptide
  Seed: SPGMMMGMFNMLSTV
SPGVMMTMANMISTV

SEQ ID NO: 200573 - protein, 15 aa, Artificial Sequence
  Description of Artificial Sequence: Synthetic peptide
  Seed: SPGMMMGMFNMLSTV
SPGVMMTMANMLSTV

SEQ ID NO: 200574 - protein, 15 aa, Artificial Sequence
  Description of Artificial Sequence: Synthetic peptide
  Seed: SPGMMMGMFNMLSTV
SPGVMMTMANMMSTV

SEQ ID NO: 200575 - protein, 15 aa, Artificial Sequence
  Description of Artificial Sequence: Synthetic peptide
  Seed: SPGMMMGMFNMLSTV
SPGVMMTMANMTSTV

SEQ ID NO: 200576 - protein, 15 aa, Artificial Sequence
  Description of Artificial Sequence: Synthetic peptide
  Seed: SPGMMMGMFNMLSTV
SPGVMMTMANMVSTV

SEQ ID NO: 200577 - protein, 15 aa, Artificial Sequence
  Description of Artificial Sequence: Synthetic peptide
  Seed: SPGMMMGMFNMLSTV
SPGVMMTMANMYSTV

SEQ ID NO: 200578 - protein, 15 aa, Artificial Sequence
  Description of Artificial Sequence: Synthetic peptide
  Seed: SPGMMMGMFNMLSTV
SPGVMMTMFNMASTV

SEQ ID NO: 200579 - protein, 15 aa, Artificial Sequence
  Description of Artificial Sequence: Synthetic peptide
  Seed: SPGMMMGMFNMLSTV
SPGVMMTMFNMESTV

SEQ ID NO: 200580 - protein, 15 aa, Artificial Sequence
  Description of Artificial Sequence: Synthetic peptide
  Seed: SPGMMMGMFNMLSTV
SPGVMMTMFNMFSTV

SEQ ID NO: 200581 - protein, 15 aa, Artificial Sequence
  Description of Artificial Sequence: Synthetic peptide
  Seed: SPGMMMGMFNMLSTV
SPGVMMTMFNMISTV

SEQ ID NO: 200582 - protein, 15 aa, Artificial Sequence
  Description of Artificial Sequence: Synthetic peptide
  Seed: SPGMMMGMFNMLSTV
SPGVMMTMFNMLSTV

SEQ ID NO: 200583 - protein, 15 aa, Artificial Sequence
  Description of Artificial Sequence: Synthetic peptide
  Seed: SPGMMMGMFNMLSTV
SPGVMMTMFNMMSTV

SEQ ID NO: 200584 - protein, 15 aa, Artificial Sequence
  Description of Artificial Sequence: Synthetic peptide
  Seed: SPGMMMGMFNMLSTV
SPGVMMTMFNMNSTV

SEQ ID NO: 200585 - protein, 15 aa, Artificial Sequence
  Description of Artificial Sequence: Synthetic peptide
  Seed: SPGMMMGMFNMLSTV
SPGVMMTMFNMSSTV

SEQ ID NO: 200586 - protein, 15 aa, Artificial Sequence
  Description of Artificial Sequence: Synthetic peptide
  Seed: SPGMMMGMFNMLSTV
SPGVMMTMFNMTSTV

SEQ ID NO: 200587 - protein, 15 aa, Artificial Sequence
  Description of Artificial Sequence: Synthetic peptide
  Seed: SPGMMMGMFNMLSTV
SPGVMMTMFNMVSTV

SEQ ID NO: 200588 - protein, 15 aa, Artificial Sequence
  Description of Artificial Sequence: Synthetic peptide
  Seed: SPGMMMGMFNMLSTV
SPGVMMTMFNMYSTV

SEQ ID NO: 200589 - protein, 15 aa, Artificial Sequence
  Description of Artificial Sequence: Synthetic peptide
  Seed: SPGMMMGMFNMLSTV
SPGVMMTMGNMFSTV

SEQ ID NO: 200590 - protein, 15 aa, Artificial Sequence
  Description of Artificial Sequence: Synthetic peptide
  Seed: SPGMMMGMFNMLSTV
SPGVMMTMGNMISTV

SEQ ID NO: 200591 - protein, 15 aa, Artificial Sequence
  Description of Artificial Sequence: Synthetic peptide
  Seed: SPGMMMGMFNMLSTV
SPGVMMTMGNMLSTV

SEQ ID NO: 200592 - protein, 15 aa, Artificial Sequence
  Description of Artificial Sequence: Synthetic peptide
  Seed: SPGMMMGMFNMLSTV
SPGVMMTMGNMMSTV

SEQ ID NO: 200593 - protein, 15 aa, Artificial Sequence
  Description of Artificial Sequence: Synthetic peptide
  Seed: SPGMMMGMFNMLSTV
SPGVMMTMGNMVSTV

SEQ ID NO: 200594 - protein, 15 aa, Artificial Sequence
  Description of Artificial Sequence: Synthetic peptide
  Seed: SPGMMMGMFNMLSTV
SPGVMMTMNNMASTV

SEQ ID NO: 200595 - protein, 15 aa, Artificial Sequence
  Description of Artificial Sequence: Synthetic peptide
  Seed: SPGMMMGMFNMLSTV
SPGVMMTMNNMFSTV

SEQ ID NO: 200596 - protein, 15 aa, Artificial Sequence
  Description of Artificial Sequence: Synthetic peptide
  Seed: SPGMMMGMFNMLSTV
SPGVMMTMNNMISTV

SEQ ID NO: 200597 - protein, 15 aa, Artificial Sequence
  Description of Artificial Sequence: Synthetic peptide
  Seed: SPGMMMGMFNMLSTV
SPGVMMTMNNMLSTV

SEQ ID NO: 200598 - protein, 15 aa, Artificial Sequence
  Description of Artificial Sequence: Synthetic peptide
  Seed: SPGMMMGMFNMLSTV
SPGVMMTMNNMMSTV

SEQ ID NO: 200599 - protein, 15 aa, Artificial Sequence
  Description of Artificial Sequence: Synthetic peptide
  Seed: SPGMMMGMFNMLSTV
SPGVMMTMNNMVSTV

SEQ ID NO: 200600 - protein, 15 aa, Artificial Sequence
  Description of Artificial Sequence: Synthetic peptide
  Seed: SPGMMMGMFNMLSTV
SPGVMMTMNNMYSTV

SEQ ID NO: 200601 - protein, 15 aa, Artificial Sequence
  Description of Artificial Sequence: Synthetic peptide
  Seed: SPGMMMGMFNMLSTV
SPGVMMTMPNMFSTV

SEQ ID NO: 200602 - protein, 15 aa, Artificial Sequence
  Description of Artificial Sequence: Synthetic peptide
  Seed: SPGMMMGMFNMLSTV
SPGVMMTMPNMISTV

SEQ ID NO: 200603 - protein, 15 aa, Artificial Sequence
  Description of Artificial Sequence: Synthetic peptide
  Seed: SPGMMMGMFNMLSTV
SPGVMMTMPNMLSTV

SEQ ID NO: 200604 - protein, 15 aa, Artificial Sequence
  Description of Artificial Sequence: Synthetic peptide
  Seed: SPGMMMGMFNMLSTV
SPGVMMTMPNMMSTV

SEQ ID NO: 200605 - protein, 15 aa, Artificial Sequence
  Description of Artificial Sequence: Synthetic peptide
  Seed: SPGMMMGMFNMLSTV
SPGVMMTMPNMVSTV

SEQ ID NO: 200606 - protein, 15 aa, Artificial Sequence
  Description of Artificial Sequence: Synthetic peptide
  Seed: SPGMMMGMFNMLSTV
SPGVMMTMSNMASTV

SEQ ID NO: 200607 - protein, 15 aa, Artificial Sequence
  Description of Artificial Sequence: Synthetic peptide
  Seed: SPGMMMGMFNMLSTV
SPGVMMTMSNMFSTV

SEQ ID NO: 200608 - protein, 15 aa, Artificial Sequence
  Description of Artificial Sequence: Synthetic peptide
  Seed: SPGMMMGMFNMLSTV
SPGVMMTMSNMISTV

SEQ ID NO: 200609 - protein, 15 aa, Artificial Sequence
  Description of Artificial Sequence: Synthetic peptide
  Seed: SPGMMMGMFNMLSTV
SPGVMMTMSNMLSTV

SEQ ID NO: 200610 - protein, 15 aa, Artificial Sequence
  Description of Artificial Sequence: Synthetic peptide
  Seed: SPGMMMGMFNMLSTV
SPGVMMTMSNMMSTV

SEQ ID NO: 200611 - protein, 15 aa, Artificial Sequence
  Description of Artificial Sequence: Synthetic peptide
  Seed: SPGMMMGMFNMLSTV
SPGVMMTMSNMTSTV

SEQ ID NO: 200612 - protein, 15 aa, Artificial Sequence
  Description of Artificial Sequence: Synthetic peptide
  Seed: SPGMMMGMFNMLSTV
SPGVMMTMSNMVSTV

SEQ ID NO: 200613 - protein, 15 aa, Artificial Sequence
  Description of Artificial Sequence: Synthetic peptide
  Seed: SPGMMMGMFNMLSTV
SPGVMMTMSNMYSTV

SEQ ID NO: 200614 - protein, 15 aa, Artificial Sequence
  Description of Artificial Sequence: Synthetic peptide
  Seed: SPGMMMGMFNMLSTV
SPGVMMTMTNMISTV

SEQ ID NO: 200615 - protein, 15 aa, Artificial Sequence
  Description of Artificial Sequence: Synthetic peptide
  Seed: SPGMMMGMFNMLSTV
SPGVMMTMTNMLSTV

SEQ ID NO: 200616 - protein, 15 aa, Artificial Sequence
  Description of Artificial Sequence: Synthetic peptide
  Seed: SPGMMMGMFNMLSTV
SPGVMMTMTNMMSTV

SEQ ID NO: 200617 - protein, 15 aa, Artificial Sequence
  Description of Artificial Sequence: Synthetic peptide
  Seed: SPGMMMGMFNMLSTV
SPGVMMTMTNMVSTV

SEQ ID NO: 200618 - protein, 15 aa, Artificial Sequence
  Description of Artificial Sequence: Synthetic peptide
  Seed: SPGMMMGMFNMLSTV
SPGVMMTMYNMISTV

SEQ ID NO: 200619 - protein, 15 aa, Artificial Sequence
  Description of Artificial Sequence: Synthetic peptide
  Seed: SPGMMMGMFNMLSTV
SPGVMMTMYNMLSTV

SEQ ID NO: 200620 - protein, 15 aa, Artificial Sequence
  Description of Artificial Sequence: Synthetic peptide
  Seed: SPGMMMGMFNMLSTV
SPGVMMTMYNMVSTV

SEQ ID NO: 200621 - protein, 15 aa, Artificial Sequence
  Description of Artificial Sequence: Synthetic peptide
  Seed: SPGMMMGMFNMLSTV
SPGVMMVMANMASTV

SEQ ID NO: 200622 - protein, 15 aa, Artificial Sequence
  Description of Artificial Sequence: Synthetic peptide
  Seed: SPGMMMGMFNMLSTV
SPGVMMVMANMISTV

SEQ ID NO: 200623 - protein, 15 aa, Artificial Sequence
  Description of Artificial Sequence: Synthetic peptide
  Seed: SPGMMMGMFNMLSTV
SPGVMMVMANMSSTV

SEQ ID NO: 200624 - protein, 15 aa, Artificial Sequence
  Description of Artificial Sequence: Synthetic peptide
  Seed: SPGMMMGMFNMLSTV
SPGVMMVMANMVSTV

SEQ ID NO: 200625 - protein, 15 aa, Artificial Sequence
  Description of Artificial Sequence: Synthetic peptide
  Seed: SPGMMMGMFNMLSTV
SPGVMMVMHNMASTV

SEQ ID NO: 200626 - protein, 15 aa, Artificial Sequence
  Description of Artificial Sequence: Synthetic peptide
  Seed: SPGMMMGMFNMLSTV
SPGVMMVMHNMSSTV

SEQ ID NO: 200627 - protein, 15 aa, Artificial Sequence
  Description of Artificial Sequence: Synthetic peptide
  Seed: SPGMMMGMFNMLSTV
SPGVMMVMKNMASTV

SEQ ID NO: 200628 - protein, 15 aa, Artificial Sequence
  Description of Artificial Sequence: Synthetic peptide
  Seed: SPGMMMGMFNMLSTV
SPGVMMVMKNMSSTV

SEQ ID NO: 200629 - protein, 15 aa, Artificial Sequence
  Description of Artificial Sequence: Synthetic peptide
  Seed: SPGMMMGMFNMLSTV
SPGVMMVMNNMASTV

SEQ ID NO: 200630 - protein, 15 aa, Artificial Sequence
  Description of Artificial Sequence: Synthetic peptide
  Seed: SPGMMMGMFNMLSTV
SPGVMMVMNNMFSTV

SEQ ID NO: 200631 - protein, 15 aa, Artificial Sequence
  Description of Artificial Sequence: Synthetic peptide
  Seed: SPGMMMGMFNMLSTV
SPGVMMVMNNMISTV

SEQ ID NO: 200632 - protein, 15 aa, Artificial Sequence
  Description of Artificial Sequence: Synthetic peptide
  Seed: SPGMMMGMFNMLSTV
SPGVMMVMNNMLSTV

SEQ ID NO: 200633 - protein, 15 aa, Artificial Sequence
  Description of Artificial Sequence: Synthetic peptide
  Seed: SPGMMMGMFNMLSTV
SPGVMMVMNNMMSTV

SEQ ID NO: 200634 - protein, 15 aa, Artificial Sequence
  Description of Artificial Sequence: Synthetic peptide
  Seed: SPGMMMGMFNMLSTV
SPGVMMVMNNMSSTV

SEQ ID NO: 200635 - protein, 15 aa, Artificial Sequence
  Description of Artificial Sequence: Synthetic peptide
  Seed: SPGMMMGMFNMLSTV
SPGVMMVMNNMTSTV

SEQ ID NO: 200636 - protein, 15 aa, Artificial Sequence
  Description of Artificial Sequence: Synthetic peptide
  Seed: SPGMMMGMFNMLSTV
SPGVMMVMNNMVSTV

SEQ ID NO: 200637 - protein, 15 aa, Artificial Sequence
  Description of Artificial Sequence: Synthetic peptide
  Seed: SPGMMMGMFNMLSTV
SPGVMMVMNNMYSTV

SEQ ID NO: 200638 - protein, 15 aa, Artificial Sequence
  Description of Artificial Sequence: Synthetic peptide
  Seed: SPGMMMGMFNMLSTV
SPGVMMVMPNMISTV

SEQ ID NO: 200639 - protein, 15 aa, Artificial Sequence
  Description of Artificial Sequence: Synthetic peptide
  Seed: SPGMMMGMFNMLSTV
SPGVMMVMPNMLSTV

SEQ ID NO: 200640 - protein, 15 aa, Artificial Sequence
  Description of Artificial Sequence: Synthetic peptide
  Seed: SPGMMMGMFNMLSTV
SPGVMMVMPNMMSTV

SEQ ID NO: 200641 - protein, 15 aa, Artificial Sequence
  Description of Artificial Sequence: Synthetic peptide
  Seed: SPGMMMGMFNMLSTV
SPGVMMVMPNMVSTV

SEQ ID NO: 200642 - protein, 15 aa, Artificial Sequence
  Description of Artificial Sequence: Synthetic peptide
  Seed: SPGMMMGMFNMLSTV
SPGVMMVMRNMASTV

SEQ ID NO: 200643 - protein, 15 aa, Artificial Sequence
  Description of Artificial Sequence: Synthetic peptide
  Seed: SPGMMMGMFNMLSTV
SPGVMMVMRNMSSTV

SEQ ID NO: 200644 - protein, 15 aa, Artificial Sequence
  Description of Artificial Sequence: Synthetic peptide
  Seed: SPGMMMGMFNMLSTV
SPGVMMVMSNMASTV

SEQ ID NO: 200645 - protein, 15 aa, Artificial Sequence
  Description of Artificial Sequence: Synthetic peptide
  Seed: SPGMMMGMFNMLSTV
SPGVMMVMSNMISTV

SEQ ID NO: 200646 - protein, 15 aa, Artificial Sequence
  Description of Artificial Sequence: Synthetic peptide
  Seed: SPGMMMGMFNMLSTV
SPGVMMVMSNMLSTV

SEQ ID NO: 200647 - protein, 15 aa, Artificial Sequence
  Description of Artificial Sequence: Synthetic peptide
  Seed: SPGMMMGMFNMLSTV
SPGVMMVMSNMSSTV

SEQ ID NO: 200648 - protein, 15 aa, Artificial Sequence
  Description of Artificial Sequence: Synthetic peptide
  Seed: SPGMMMGMFNMLSTV
SPGVMMVMSNMVSTV

SEQ ID NO: 200649 - protein, 15 aa, Artificial Sequence
  Description of Artificial Sequence: Synthetic peptide
  Seed: SPGMMMGMFNMLSTV
SPGVMMVMTNMASTV

SEQ ID NO: 200650 - protein, 15 aa, Artificial Sequence
  Description of Artificial Sequence: Synthetic peptide
  Seed: SPGMMMGMFNMLSTV
SPGVMMWMFNMFSTV

SEQ ID NO: 200651 - protein, 15 aa, Artificial Sequence
  Description of Artificial Sequence: Synthetic peptide
  Seed: SPGMMMGMFNMLSTV
SPGVMMWMFNMLSTV

SEQ ID NO: 200652 - protein, 15 aa, Artificial Sequence
  Description of Artificial Sequence: Synthetic peptide
  Seed: SPGMMMGMFNMLSTV
SPGVMMWMFNMYSTV

SEQ ID NO: 200653 - protein, 15 aa, Artificial Sequence
  Description of Artificial Sequence: Synthetic peptide
  Seed: SPGMMMGMFNMLSTV
SPGVMMWMNNMASTV

SEQ ID NO: 200654 - protein, 15 aa, Artificial Sequence
  Description of Artificial Sequence: Synthetic peptide
  Seed: SPGMMMGMFNMLSTV
SPGVMMWMNNMISTV

SEQ ID NO: 200655 - protein, 15 aa, Artificial Sequence
  Description of Artificial Sequence: Synthetic peptide
  Seed: SPGMMMGMFNMLSTV
SPGVMMWMNNMLSTV

SEQ ID NO: 200656 - protein, 15 aa, Artificial Sequence
  Description of Artificial Sequence: Synthetic peptide
  Seed: SPGMMMGMFNMLSTV
SPGVMMWMNNMVSTV

SEQ ID NO: 200657 - protein, 15 aa, Artificial Sequence
  Description of Artificial Sequence: Synthetic peptide
  Seed: SPGMMMGMFNMLSTV
SPGVMMWMYNMLSTV

SEQ ID NO: 200658 - protein, 15 aa, Artificial Sequence
  Description of Artificial Sequence: Synthetic peptide
  Seed: SPGMMMGMFNMLSTV
SPGVMMYMANMASTV

SEQ ID NO: 200659 - protein, 15 aa, Artificial Sequence
  Description of Artificial Sequence: Synthetic peptide
  Seed: SPGMMMGMFNMLSTV
SPGVMMYMFNMLSTV

SEQ ID NO: 200660 - protein, 15 aa, Artificial Sequence
  Description of Artificial Sequence: Synthetic peptide
  Seed: SPGMMMGMFNMLSTV
SPGVMMYMFNMYSTV

SEQ ID NO: 200661 - protein, 15 aa, Artificial Sequence
  Description of Artificial Sequence: Synthetic peptide
  Seed: SPGMMMGMFNMLSTV
SPGVMMYMNNMASTV

SEQ ID NO: 200662 - protein, 15 aa, Artificial Sequence
  Description of Artificial Sequence: Synthetic peptide
  Seed: SPGMMMGMFNMLSTV
SPGVMMYMNNMISTV

SEQ ID NO: 200663 - protein, 15 aa, Artificial Sequence
  Description of Artificial Sequence: Synthetic peptide
  Seed: SPGMMMGMFNMLSTV
SPGVMMYMNNMLSTV

SEQ ID NO: 200664 - protein, 15 aa, Artificial Sequence
  Description of Artificial Sequence: Synthetic peptide
  Seed: SPGMMMGMFNMLSTV
SPGVMMYMNNMMSTV

SEQ ID NO: 200665 - protein, 15 aa, Artificial Sequence
  Description of Artificial Sequence: Synthetic peptide
  Seed: SPGMMMGMFNMLSTV
SPGVMMYMNNMVSTV

SEQ ID NO: 200666 - protein, 15 aa, Artificial Sequence
  Description of Artificial Sequence: Synthetic peptide
  Seed: SPGMMMGMFNMLSTV
SPGVMMYMRNMASTV

SEQ ID NO: 200667 - protein, 15 aa, Artificial Sequence
  Description of Artificial Sequence: Synthetic peptide
  Seed: SPGMMMGMFNMLSTV
SPGVMMYMYNMLSTV

SEQ ID NO: 200668 - protein, 15 aa, Artificial Sequence
  Description of Artificial Sequence: Synthetic peptide
  Seed: SPGMMMGMFNMLSTV
SPGWMMAMANMASTV

SEQ ID NO: 200669 - protein, 15 aa, Artificial Sequence
  Description of Artificial Sequence: Synthetic peptide
  Seed: SPGMMMGMFNMLSTV
SPGWMMAMANMFSTV

SEQ ID NO: 200670 - protein, 15 aa, Artificial Sequence
  Description of Artificial Sequence: Synthetic peptide
  Seed: SPGMMMGMFNMLSTV
SPGWMMAMANMHSTV

SEQ ID NO: 200671 - protein, 15 aa, Artificial Sequence
  Description of Artificial Sequence: Synthetic peptide
  Seed: SPGMMMGMFNMLSTV
SPGWMMAMANMISTV

SEQ ID NO: 200672 - protein, 15 aa, Artificial Sequence
  Description of Artificial Sequence: Synthetic peptide
  Seed: SPGMMMGMFNMLSTV
SPGWMMAMANMLSTV

SEQ ID NO: 200673 - protein, 15 aa, Artificial Sequence
  Description of Artificial Sequence: Synthetic peptide
  Seed: SPGMMMGMFNMLSTV
SPGWMMAMANMMSTV

SEQ ID NO: 200674 - protein, 15 aa, Artificial Sequence
  Description of Artificial Sequence: Synthetic peptide
  Seed: SPGMMMGMFNMLSTV
SPGWMMAMANMNSTV

SEQ ID NO: 200675 - protein, 15 aa, Artificial Sequence
  Description of Artificial Sequence: Synthetic peptide
  Seed: SPGMMMGMFNMLSTV
SPGWMMAMANMSSTV

SEQ ID NO: 200676 - protein, 15 aa, Artificial Sequence
  Description of Artificial Sequence: Synthetic peptide
  Seed: SPGMMMGMFNMLSTV
SPGWMMAMANMTSTV

SEQ ID NO: 200677 - protein, 15 aa, Artificial Sequence
  Description of Artificial Sequence: Synthetic peptide
  Seed: SPGMMMGMFNMLSTV
SPGWMMAMANMVSTV

SEQ ID NO: 200678 - protein, 15 aa, Artificial Sequence
  Description of Artificial Sequence: Synthetic peptide
  Seed: SPGMMMGMFNMLSTV
SPGWMMAMANMYSTV

SEQ ID NO: 200679 - protein, 15 aa, Artificial Sequence
  Description of Artificial Sequence: Synthetic peptide
  Seed: SPGMMMGMFNMLSTV
SPGWMMAMFNMESTV

SEQ ID NO: 200680 - protein, 15 aa, Artificial Sequence
  Description of Artificial Sequence: Synthetic peptide
  Seed: SPGMMMGMFNMLSTV
SPGWMMAMFNMISTV

SEQ ID NO: 200681 - protein, 15 aa, Artificial Sequence
  Description of Artificial Sequence: Synthetic peptide
  Seed: SPGMMMGMFNMLSTV
SPGWMMAMFNMLSTV

SEQ ID NO: 200682 - protein, 15 aa, Artificial Sequence
  Description of Artificial Sequence: Synthetic peptide
  Seed: SPGMMMGMFNMLSTV
SPGWMMAMFNMVSTV

SEQ ID NO: 200683 - protein, 15 aa, Artificial Sequence
  Description of Artificial Sequence: Synthetic peptide
  Seed: SPGMMMGMFNMLSTV
SPGWMMAMGNMASTV

SEQ ID NO: 200684 - protein, 15 aa, Artificial Sequence
  Description of Artificial Sequence: Synthetic peptide
  Seed: SPGMMMGMFNMLSTV
SPGWMMAMGNMISTV

SEQ ID NO: 200685 - protein, 15 aa, Artificial Sequence
  Description of Artificial Sequence: Synthetic peptide
  Seed: SPGMMMGMFNMLSTV
SPGWMMAMGNMLSTV

SEQ ID NO: 200686 - protein, 15 aa, Artificial Sequence
  Description of Artificial Sequence: Synthetic peptide
  Seed: SPGMMMGMFNMLSTV
SPGWMMAMGNMMSTV

SEQ ID NO: 200687 - protein, 15 aa, Artificial Sequence
  Description of Artificial Sequence: Synthetic peptide
  Seed: SPGMMMGMFNMLSTV
SPGWMMAMGNMSSTV

SEQ ID NO: 200688 - protein, 15 aa, Artificial Sequence
  Description of Artificial Sequence: Synthetic peptide
  Seed: SPGMMMGMFNMLSTV
SPGWMMAMGNMTSTV

SEQ ID NO: 200689 - protein, 15 aa, Artificial Sequence
  Description of Artificial Sequence: Synthetic peptide
  Seed: SPGMMMGMFNMLSTV
SPGWMMAMGNMVSTV

SEQ ID NO: 200690 - protein, 15 aa, Artificial Sequence
  Description of Artificial Sequence: Synthetic peptide
  Seed: SPGMMMGMFNMLSTV
SPGWMMAMGNMYSTV

SEQ ID NO: 200691 - protein, 15 aa, Artificial Sequence
  Description of Artificial Sequence: Synthetic peptide
  Seed: SPGMMMGMFNMLSTV
SPGWMMAMNNMISTV

SEQ ID NO: 200692 - protein, 15 aa, Artificial Sequence
  Description of Artificial Sequence: Synthetic peptide
  Seed: SPGMMMGMFNMLSTV
SPGWMMAMNNMLSTV

SEQ ID NO: 200693 - protein, 15 aa, Artificial Sequence
  Description of Artificial Sequence: Synthetic peptide
  Seed: SPGMMMGMFNMLSTV
SPGWMMAMNNMVSTV

SEQ ID NO: 200694 - protein, 15 aa, Artificial Sequence
  Description of Artificial Sequence: Synthetic peptide
  Seed: SPGMMMGMFNMLSTV
SPGWMMAMNNMYSTV

SEQ ID NO: 200695 - protein, 15 aa, Artificial Sequence
  Description of Artificial Sequence: Synthetic peptide
  Seed: SPGMMMGMFNMLSTV
SPGWMMAMPNMASTV

SEQ ID NO: 200696 - protein, 15 aa, Artificial Sequence
  Description of Artificial Sequence: Synthetic peptide
  Seed: SPGMMMGMFNMLSTV
SPGWMMAMPNMFSTV

SEQ ID NO: 200697 - protein, 15 aa, Artificial Sequence
  Description of Artificial Sequence: Synthetic peptide
  Seed: SPGMMMGMFNMLSTV
SPGWMMAMPNMISTV

SEQ ID NO: 200698 - protein, 15 aa, Artificial Sequence
  Description of Artificial Sequence: Synthetic peptide
  Seed: SPGMMMGMFNMLSTV
SPGWMMAMPNMLSTV

SEQ ID NO: 200699 - protein, 15 aa, Artificial Sequence
  Description of Artificial Sequence: Synthetic peptide
  Seed: SPGMMMGMFNMLSTV
SPGWMMAMPNMMSTV

SEQ ID NO: 200700 - protein, 15 aa, Artificial Sequence
  Description of Artificial Sequence: Synthetic peptide
  Seed: SPGMMMGMFNMLSTV
SPGWMMAMPNMSSTV

SEQ ID NO: 200701 - protein, 15 aa, Artificial Sequence
  Description of Artificial Sequence: Synthetic peptide
  Seed: SPGMMMGMFNMLSTV
SPGWMMAMPNMTSTV

SEQ ID NO: 200702 - protein, 15 aa, Artificial Sequence
  Description of Artificial Sequence: Synthetic peptide
  Seed: SPGMMMGMFNMLSTV
SPGWMMAMPNMVSTV

SEQ ID NO: 200703 - protein, 15 aa, Artificial Sequence
  Description of Artificial Sequence: Synthetic peptide
  Seed: SPGMMMGMFNMLSTV
SPGWMMAMPNMYSTV

SEQ ID NO: 200704 - protein, 15 aa, Artificial Sequence
  Description of Artificial Sequence: Synthetic peptide
  Seed: SPGMMMGMFNMLSTV
SPGWMMAMSNMASTV

SEQ ID NO: 200705 - protein, 15 aa, Artificial Sequence
  Description of Artificial Sequence: Synthetic peptide
  Seed: SPGMMMGMFNMLSTV
SPGWMMAMSNMFSTV

SEQ ID NO: 200706 - protein, 15 aa, Artificial Sequence
  Description of Artificial Sequence: Synthetic peptide
  Seed: SPGMMMGMFNMLSTV
SPGWMMAMSNMISTV

SEQ ID NO: 200707 - protein, 15 aa, Artificial Sequence
  Description of Artificial Sequence: Synthetic peptide
  Seed: SPGMMMGMFNMLSTV
SPGWMMAMSNMLSTV

SEQ ID NO: 200708 - protein, 15 aa, Artificial Sequence
  Description of Artificial Sequence: Synthetic peptide
  Seed: SPGMMMGMFNMLSTV
SPGWMMAMSNMMSTV

SEQ ID NO: 200709 - protein, 15 aa, Artificial Sequence
  Description of Artificial Sequence: Synthetic peptide
  Seed: SPGMMMGMFNMLSTV
SPGWMMAMSNMSSTV

SEQ ID NO: 200710 - protein, 15 aa, Artificial Sequence
  Description of Artificial Sequence: Synthetic peptide
  Seed: SPGMMMGMFNMLSTV
SPGWMMAMSNMTSTV

SEQ ID NO: 200711 - protein, 15 aa, Artificial Sequence
  Description of Artificial Sequence: Synthetic peptide
  Seed: SPGMMMGMFNMLSTV
SPGWMMAMSNMVSTV

SEQ ID NO: 200712 - protein, 15 aa, Artificial Sequence
  Description of Artificial Sequence: Synthetic peptide
  Seed: SPGMMMGMFNMLSTV
SPGWMMAMSNMYSTV

SEQ ID NO: 200713 - protein, 15 aa, Artificial Sequence
  Description of Artificial Sequence: Synthetic peptide
  Seed: SPGMMMGMFNMLSTV
SPGWMMAMTNMASTV

SEQ ID NO: 200714 - protein, 15 aa, Artificial Sequence
  Description of Artificial Sequence: Synthetic peptide
  Seed: SPGMMMGMFNMLSTV
SPGWMMAMTNMISTV

SEQ ID NO: 200715 - protein, 15 aa, Artificial Sequence
  Description of Artificial Sequence: Synthetic peptide
  Seed: SPGMMMGMFNMLSTV
SPGWMMAMTNMLSTV

SEQ ID NO: 200716 - protein, 15 aa, Artificial Sequence
  Description of Artificial Sequence: Synthetic peptide
  Seed: SPGMMMGMFNMLSTV
SPGWMMAMTNMMSTV

SEQ ID NO: 200717 - protein, 15 aa, Artificial Sequence
  Description of Artificial Sequence: Synthetic peptide
  Seed: SPGMMMGMFNMLSTV
SPGWMMAMTNMVSTV

SEQ ID NO: 200718 - protein, 15 aa, Artificial Sequence
  Description of Artificial Sequence: Synthetic peptide
  Seed: SPGMMMGMFNMLSTV
SPGWMMAMYNMLSTV

SEQ ID NO: 200719 - protein, 15 aa, Artificial Sequence
  Description of Artificial Sequence: Synthetic peptide
  Seed: SPGMMMGMFNMLSTV
SPGWMMDMANMISTV

SEQ ID NO: 200720 - protein, 15 aa, Artificial Sequence
  Description of Artificial Sequence: Synthetic peptide
  Seed: SPGMMMGMFNMLSTV
SPGWMMDMANMVSTV

SEQ ID NO: 200721 - protein, 15 aa, Artificial Sequence
  Description of Artificial Sequence: Synthetic peptide
  Seed: SPGMMMGMFNMLSTV
SPGWMMDMFNMISTV

SEQ ID NO: 200722 - protein, 15 aa, Artificial Sequence
  Description of Artificial Sequence: Synthetic peptide
  Seed: SPGMMMGMFNMLSTV
SPGWMMDMFNMLSTV

SEQ ID NO: 200723 - protein, 15 aa, Artificial Sequence
  Description of Artificial Sequence: Synthetic peptide
  Seed: SPGMMMGMFNMLSTV
SPGWMMDMFNMVSTV

SEQ ID NO: 200724 - protein, 15 aa, Artificial Sequence
  Description of Artificial Sequence: Synthetic peptide
  Seed: SPGMMMGMFNMLSTV
SPGWMMDMNNMISTV

SEQ ID NO: 200725 - protein, 15 aa, Artificial Sequence
  Description of Artificial Sequence: Synthetic peptide
  Seed: SPGMMMGMFNMLSTV
SPGWMMEMFNMFSTV

SEQ ID NO: 200726 - protein, 15 aa, Artificial Sequence
  Description of Artificial Sequence: Synthetic peptide
  Seed: SPGMMMGMFNMLSTV
SPGWMMEMFNMISTV

SEQ ID NO: 200727 - protein, 15 aa, Artificial Sequence
  Description of Artificial Sequence: Synthetic peptide
  Seed: SPGMMMGMFNMLSTV
SPGWMMEMFNMLSTV

SEQ ID NO: 200728 - protein, 15 aa, Artificial Sequence
  Description of Artificial Sequence: Synthetic peptide
  Seed: SPGMMMGMFNMLSTV
SPGWMMEMFNMMSTV

SEQ ID NO: 200729 - protein, 15 aa, Artificial Sequence
  Description of Artificial Sequence: Synthetic peptide
  Seed: SPGMMMGMFNMLSTV
SPGWMMEMFNMVSTV

SEQ ID NO: 200730 - protein, 15 aa, Artificial Sequence
  Description of Artificial Sequence: Synthetic peptide
  Seed: SPGMMMGMFNMLSTV
SPGWMMEMFNMYSTV

SEQ ID NO: 200731 - protein, 15 aa, Artificial Sequence
  Description of Artificial Sequence: Synthetic peptide
  Seed: SPGMMMGMFNMLSTV
SPGWMMFMANMASTV

SEQ ID NO: 200732 - protein, 15 aa, Artificial Sequence
  Description of Artificial Sequence: Synthetic peptide
  Seed: SPGMMMGMFNMLSTV
SPGWMMFMANMLSTV

SEQ ID NO: 200733 - protein, 15 aa, Artificial Sequence
  Description of Artificial Sequence: Synthetic peptide
  Seed: SPGMMMGMFNMLSTV
SPGWMMFMFNMLSTV

SEQ ID NO: 200734 - protein, 15 aa, Artificial Sequence
  Description of Artificial Sequence: Synthetic peptide
  Seed: SPGMMMGMFNMLSTV
SPGWMMFMFNMMSTV

SEQ ID NO: 200735 - protein, 15 aa, Artificial Sequence
  Description of Artificial Sequence: Synthetic peptide
  Seed: SPGMMMGMFNMLSTV
SPGWMMFMFNMYSTV

SEQ ID NO: 200736 - protein, 15 aa, Artificial Sequence
  Description of Artificial Sequence: Synthetic peptide
  Seed: SPGMMMGMFNMLSTV
SPGWMMFMKNMASTV

SEQ ID NO: 200737 - protein, 15 aa, Artificial Sequence
  Description of Artificial Sequence: Synthetic peptide
  Seed: SPGMMMGMFNMLSTV
SPGWMMFMKNMSSTV

SEQ ID NO: 200738 - protein, 15 aa, Artificial Sequence
  Description of Artificial Sequence: Synthetic peptide
  Seed: SPGMMMGMFNMLSTV
SPGWMMFMNNMASTV

SEQ ID NO: 200739 - protein, 15 aa, Artificial Sequence
  Description of Artificial Sequence: Synthetic peptide
  Seed: SPGMMMGMFNMLSTV
SPGWMMFMNNMISTV

SEQ ID NO: 200740 - protein, 15 aa, Artificial Sequence
  Description of Artificial Sequence: Synthetic peptide
  Seed: SPGMMMGMFNMLSTV
SPGWMMFMNNMVSTV

SEQ ID NO: 200741 - protein, 15 aa, Artificial Sequence
  Description of Artificial Sequence: Synthetic peptide
  Seed: SPGMMMGMFNMLSTV
SPGWMMFMPNMISTV

SEQ ID NO: 200742 - protein, 15 aa, Artificial Sequence
  Description of Artificial Sequence: Synthetic peptide
  Seed: SPGMMMGMFNMLSTV
SPGWMMFMRNMASTV

SEQ ID NO: 200743 - protein, 15 aa, Artificial Sequence
  Description of Artificial Sequence: Synthetic peptide
  Seed: SPGMMMGMFNMLSTV
SPGWMMFMRNMSSTV

SEQ ID NO: 200744 - protein, 15 aa, Artificial Sequence
  Description of Artificial Sequence: Synthetic peptide
  Seed: SPGMMMGMFNMLSTV
SPGWMMFMWNMISTV

SEQ ID NO: 200745 - protein, 15 aa, Artificial Sequence
  Description of Artificial Sequence: Synthetic peptide
  Seed: SPGMMMGMFNMLSTV
SPGWMMFMWNMLSTV

SEQ ID NO: 200746 - protein, 15 aa, Artificial Sequence
  Description of Artificial Sequence: Synthetic peptide
  Seed: SPGMMMGMFNMLSTV
SPGWMMFMYNMFSTV

SEQ ID NO: 200747 - protein, 15 aa, Artificial Sequence
  Description of Artificial Sequence: Synthetic peptide
  Seed: SPGMMMGMFNMLSTV
SPGWMMFMYNMISTV

SEQ ID NO: 200748 - protein, 15 aa, Artificial Sequence
  Description of Artificial Sequence: Synthetic peptide
  Seed: SPGMMMGMFNMLSTV
SPGWMMFMYNMLSTV

SEQ ID NO: 200749 - protein, 15 aa, Artificial Sequence
  Description of Artificial Sequence: Synthetic peptide
  Seed: SPGMMMGMFNMLSTV
SPGWMMFMYNMMSTV

SEQ ID NO: 200750 - protein, 15 aa, Artificial Sequence
  Description of Artificial Sequence: Synthetic peptide
  Seed: SPGMMMGMFNMLSTV
SPGWMMFMYNMVSTV

SEQ ID NO: 200751 - protein, 15 aa, Artificial Sequence
  Description of Artificial Sequence: Synthetic peptide
  Seed: SPGMMMGMFNMLSTV
SPGWMMGMANMASTV

SEQ ID NO: 200752 - protein, 15 aa, Artificial Sequence
  Description of Artificial Sequence: Synthetic peptide
  Seed: SPGMMMGMFNMLSTV
SPGWMMGMANMFSTV

SEQ ID NO: 200753 - protein, 15 aa, Artificial Sequence
  Description of Artificial Sequence: Synthetic peptide
  Seed: SPGMMMGMFNMLSTV
SPGWMMGMANMISTV

SEQ ID NO: 200754 - protein, 15 aa, Artificial Sequence
  Description of Artificial Sequence: Synthetic peptide
  Seed: SPGMMMGMFNMLSTV
SPGWMMGMANMLSTV

SEQ ID NO: 200755 - protein, 15 aa, Artificial Sequence
  Description of Artificial Sequence: Synthetic peptide
  Seed: SPGMMMGMFNMLSTV
SPGWMMGMANMMSTV

SEQ ID NO: 200756 - protein, 15 aa, Artificial Sequence
  Description of Artificial Sequence: Synthetic peptide
  Seed: SPGMMMGMFNMLSTV
SPGWMMGMANMVSTV

SEQ ID NO: 200757 - protein, 15 aa, Artificial Sequence
  Description of Artificial Sequence: Synthetic peptide
  Seed: SPGMMMGMFNMLSTV
SPGWMMGMGNMISTV

SEQ ID NO: 200758 - protein, 15 aa, Artificial Sequence
  Description of Artificial Sequence: Synthetic peptide
  Seed: SPGMMMGMFNMLSTV
SPGWMMGMGNMLSTV

SEQ ID NO: 200759 - protein, 15 aa, Artificial Sequence
  Description of Artificial Sequence: Synthetic peptide
  Seed: SPGMMMGMFNMLSTV
SPGWMMGMGNMMSTV

SEQ ID NO: 200760 - protein, 15 aa, Artificial Sequence
  Description of Artificial Sequence: Synthetic peptide
  Seed: SPGMMMGMFNMLSTV
SPGWMMGMGNMVSTV

SEQ ID NO: 200761 - protein, 15 aa, Artificial Sequence
  Description of Artificial Sequence: Synthetic peptide
  Seed: SPGMMMGMFNMLSTV
SPGWMMGMPNMISTV

SEQ ID NO: 200762 - protein, 15 aa, Artificial Sequence
  Description of Artificial Sequence: Synthetic peptide
  Seed: SPGMMMGMFNMLSTV
SPGWMMGMPNMLSTV

SEQ ID NO: 200763 - protein, 15 aa, Artificial Sequence
  Description of Artificial Sequence: Synthetic peptide
  Seed: SPGMMMGMFNMLSTV
SPGWMMGMPNMMSTV

SEQ ID NO: 200764 - protein, 15 aa, Artificial Sequence
  Description of Artificial Sequence: Synthetic peptide
  Seed: SPGMMMGMFNMLSTV
SPGWMMGMPNMVSTV

SEQ ID NO: 200765 - protein, 15 aa, Artificial Sequence
  Description of Artificial Sequence: Synthetic peptide
  Seed: SPGMMMGMFNMLSTV
SPGWMMGMSNMISTV

SEQ ID NO: 200766 - protein, 15 aa, Artificial Sequence
  Description of Artificial Sequence: Synthetic peptide
  Seed: SPGMMMGMFNMLSTV
SPGWMMGMSNMLSTV

SEQ ID NO: 200767 - protein, 15 aa, Artificial Sequence
  Description of Artificial Sequence: Synthetic peptide
  Seed: SPGMMMGMFNMLSTV
SPGWMMGMSNMMSTV

SEQ ID NO: 200768 - protein, 15 aa, Artificial Sequence
  Description of Artificial Sequence: Synthetic peptide
  Seed: SPGMMMGMFNMLSTV
SPGWMMGMSNMVSTV

SEQ ID NO: 200769 - protein, 15 aa, Artificial Sequence
  Description of Artificial Sequence: Synthetic peptide
  Seed: SPGMMMGMFNMLSTV
SPGWMMGMTNMISTV

SEQ ID NO: 200770 - protein, 15 aa, Artificial Sequence
  Description of Artificial Sequence: Synthetic peptide
  Seed: SPGMMMGMFNMLSTV
SPGWMMGMTNMLSTV

SEQ ID NO: 200771 - protein, 15 aa, Artificial Sequence
  Description of Artificial Sequence: Synthetic peptide
  Seed: SPGMMMGMFNMLSTV
SPGWMMHMANMFSTV

SEQ ID NO: 200772 - protein, 15 aa, Artificial Sequence
  Description of Artificial Sequence: Synthetic peptide
  Seed: SPGMMMGMFNMLSTV
SPGWMMHMANMISTV

SEQ ID NO: 200773 - protein, 15 aa, Artificial Sequence
  Description of Artificial Sequence: Synthetic peptide
  Seed: SPGMMMGMFNMLSTV
SPGWMMHMANMLSTV

SEQ ID NO: 200774 - protein, 15 aa, Artificial Sequence
  Description of Artificial Sequence: Synthetic peptide
  Seed: SPGMMMGMFNMLSTV
SPGWMMHMANMMSTV

SEQ ID NO: 200775 - protein, 15 aa, Artificial Sequence
  Description of Artificial Sequence: Synthetic peptide
  Seed: SPGMMMGMFNMLSTV
SPGWMMHMANMVSTV

SEQ ID NO: 200776 - protein, 15 aa, Artificial Sequence
  Description of Artificial Sequence: Synthetic peptide
  Seed: SPGMMMGMFNMLSTV
SPGWMMHMFNMASTV

SEQ ID NO: 200777 - protein, 15 aa, Artificial Sequence
  Description of Artificial Sequence: Synthetic peptide
  Seed: SPGMMMGMFNMLSTV
SPGWMMHMFNMESTV

SEQ ID NO: 200778 - protein, 15 aa, Artificial Sequence
  Description of Artificial Sequence: Synthetic peptide
  Seed: SPGMMMGMFNMLSTV
SPGWMMHMFNMFSTV

SEQ ID NO: 200779 - protein, 15 aa, Artificial Sequence
  Description of Artificial Sequence: Synthetic peptide
  Seed: SPGMMMGMFNMLSTV
SPGWMMHMFNMISTV

SEQ ID NO: 200780 - protein, 15 aa, Artificial Sequence
  Description of Artificial Sequence: Synthetic peptide
  Seed: SPGMMMGMFNMLSTV
SPGWMMHMFNMLSTV

SEQ ID NO: 200781 - protein, 15 aa, Artificial Sequence
  Description of Artificial Sequence: Synthetic peptide
  Seed: SPGMMMGMFNMLSTV
SPGWMMHMFNMMSTV

SEQ ID NO: 200782 - protein, 15 aa, Artificial Sequence
  Description of Artificial Sequence: Synthetic peptide
  Seed: SPGMMMGMFNMLSTV
SPGWMMHMFNMTSTV

SEQ ID NO: 200783 - protein, 15 aa, Artificial Sequence
  Description of Artificial Sequence: Synthetic peptide
  Seed: SPGMMMGMFNMLSTV
SPGWMMHMFNMVSTV

SEQ ID NO: 200784 - protein, 15 aa, Artificial Sequence
  Description of Artificial Sequence: Synthetic peptide
  Seed: SPGMMMGMFNMLSTV
SPGWMMHMFNMYSTV

SEQ ID NO: 200785 - protein, 15 aa, Artificial Sequence
  Description of Artificial Sequence: Synthetic peptide
  Seed: SPGMMMGMFNMLSTV
SPGWMMHMGNMISTV

SEQ ID NO: 200786 - protein, 15 aa, Artificial Sequence
  Description of Artificial Sequence: Synthetic peptide
  Seed: SPGMMMGMFNMLSTV
SPGWMMHMGNMLSTV

SEQ ID NO: 200787 - protein, 15 aa, Artificial Sequence
  Description of Artificial Sequence: Synthetic peptide
  Seed: SPGMMMGMFNMLSTV
SPGWMMHMGNMVSTV

SEQ ID NO: 200788 - protein, 15 aa, Artificial Sequence
  Description of Artificial Sequence: Synthetic peptide
  Seed: SPGMMMGMFNMLSTV
SPGWMMHMLNMFSTV

SEQ ID NO: 200789 - protein, 15 aa, Artificial Sequence
  Description of Artificial Sequence: Synthetic peptide
  Seed: SPGMMMGMFNMLSTV
SPGWMMHMLNMISTV

SEQ ID NO: 200790 - protein, 15 aa, Artificial Sequence
  Description of Artificial Sequence: Synthetic peptide
  Seed: SPGMMMGMFNMLSTV
SPGWMMHMLNMLSTV

SEQ ID NO: 200791 - protein, 15 aa, Artificial Sequence
  Description of Artificial Sequence: Synthetic peptide
  Seed: SPGMMMGMFNMLSTV
SPGWMMHMNNMFSTV

SEQ ID NO: 200792 - protein, 15 aa, Artificial Sequence
  Description of Artificial Sequence: Synthetic peptide
  Seed: SPGMMMGMFNMLSTV
SPGWMMHMNNMISTV

SEQ ID NO: 200793 - protein, 15 aa, Artificial Sequence
  Description of Artificial Sequence: Synthetic peptide
  Seed: SPGMMMGMFNMLSTV
SPGWMMHMNNMLSTV

SEQ ID NO: 200794 - protein, 15 aa, Artificial Sequence
  Description of Artificial Sequence: Synthetic peptide
  Seed: SPGMMMGMFNMLSTV
SPGWMMHMNNMMSTV

SEQ ID NO: 200795 - protein, 15 aa, Artificial Sequence
  Description of Artificial Sequence: Synthetic peptide
  Seed: SPGMMMGMFNMLSTV
SPGWMMHMNNMVSTV

SEQ ID NO: 200796 - protein, 15 aa, Artificial Sequence
  Description of Artificial Sequence: Synthetic peptide
  Seed: SPGMMMGMFNMLSTV
SPGWMMHMNNMYSTV

SEQ ID NO: 200797 - protein, 15 aa, Artificial Sequence
  Description of Artificial Sequence: Synthetic peptide
  Seed: SPGMMMGMFNMLSTV
SPGWMMHMPNMISTV

SEQ ID NO: 200798 - protein, 15 aa, Artificial Sequence
  Description of Artificial Sequence: Synthetic peptide
  Seed: SPGMMMGMFNMLSTV
SPGWMMHMPNMLSTV

SEQ ID NO: 200799 - protein, 15 aa, Artificial Sequence
  Description of Artificial Sequence: Synthetic peptide
  Seed: SPGMMMGMFNMLSTV
SPGWMMHMSNMFSTV

SEQ ID NO: 200800 - protein, 15 aa, Artificial Sequence
  Description of Artificial Sequence: Synthetic peptide
  Seed: SPGMMMGMFNMLSTV
SPGWMMHMSNMISTV

SEQ ID NO: 200801 - protein, 15 aa, Artificial Sequence
  Description of Artificial Sequence: Synthetic peptide
  Seed: SPGMMMGMFNMLSTV
SPGWMMHMSNMLSTV

SEQ ID NO: 200802 - protein, 15 aa, Artificial Sequence
  Description of Artificial Sequence: Synthetic peptide
  Seed: SPGMMMGMFNMLSTV
SPGWMMHMSNMMSTV

SEQ ID NO: 200803 - protein, 15 aa, Artificial Sequence
  Description of Artificial Sequence: Synthetic peptide
  Seed: SPGMMMGMFNMLSTV
SPGWMMHMSNMVSTV

SEQ ID NO: 200804 - protein, 15 aa, Artificial Sequence
  Description of Artificial Sequence: Synthetic peptide
  Seed: SPGMMMGMFNMLSTV
SPGWMMHMTNMISTV

SEQ ID NO: 200805 - protein, 15 aa, Artificial Sequence
  Description of Artificial Sequence: Synthetic peptide
  Seed: SPGMMMGMFNMLSTV
SPGWMMHMTNMLSTV

SEQ ID NO: 200806 - protein, 15 aa, Artificial Sequence
  Description of Artificial Sequence: Synthetic peptide
  Seed: SPGMMMGMFNMLSTV
SPGWMMHMWNMLSTV

SEQ ID NO: 200807 - protein, 15 aa, Artificial Sequence
  Description of Artificial Sequence: Synthetic peptide
  Seed: SPGMMMGMFNMLSTV
SPGWMMHMYNMFSTV

SEQ ID NO: 200808 - protein, 15 aa, Artificial Sequence
  Description of Artificial Sequence: Synthetic peptide
  Seed: SPGMMMGMFNMLSTV
SPGWMMHMYNMLSTV

SEQ ID NO: 200809 - protein, 15 aa, Artificial Sequence
  Description of Artificial Sequence: Synthetic peptide
  Seed: SPGMMMGMFNMLSTV
SPGWMMIMANMISTV

SEQ ID NO: 200810 - protein, 15 aa, Artificial Sequence
  Description of Artificial Sequence: Synthetic peptide
  Seed: SPGMMMGMFNMLSTV
SPGWMMIMANMLSTV

SEQ ID NO: 200811 - protein, 15 aa, Artificial Sequence
  Description of Artificial Sequence: Synthetic peptide
  Seed: SPGMMMGMFNMLSTV
SPGWMMIMANMMSTV

SEQ ID NO: 200812 - protein, 15 aa, Artificial Sequence
  Description of Artificial Sequence: Synthetic peptide
  Seed: SPGMMMGMFNMLSTV
SPGWMMIMANMVSTV

SEQ ID NO: 200813 - protein, 15 aa, Artificial Sequence
  Description of Artificial Sequence: Synthetic peptide
  Seed: SPGMMMGMFNMLSTV
SPGWMMIMANMYSTV

SEQ ID NO: 200814 - protein, 15 aa, Artificial Sequence
  Description of Artificial Sequence: Synthetic peptide
  Seed: SPGMMMGMFNMLSTV
SPGWMMIMFNMESTV

SEQ ID NO: 200815 - protein, 15 aa, Artificial Sequence
  Description of Artificial Sequence: Synthetic peptide
  Seed: SPGMMMGMFNMLSTV
SPGWMMIMFNMFSTV

SEQ ID NO: 200816 - protein, 15 aa, Artificial Sequence
  Description of Artificial Sequence: Synthetic peptide
  Seed: SPGMMMGMFNMLSTV
SPGWMMIMFNMLSTV

SEQ ID NO: 200817 - protein, 15 aa, Artificial Sequence
  Description of Artificial Sequence: Synthetic peptide
  Seed: SPGMMMGMFNMLSTV
SPGWMMIMFNMYSTV

SEQ ID NO: 200818 - protein, 15 aa, Artificial Sequence
  Description of Artificial Sequence: Synthetic peptide
  Seed: SPGMMMGMFNMLSTV
SPGWMMIMHNMISTV

SEQ ID NO: 200819 - protein, 15 aa, Artificial Sequence
  Description of Artificial Sequence: Synthetic peptide
  Seed: SPGMMMGMFNMLSTV
SPGWMMIMHNMVSTV

SEQ ID NO: 200820 - protein, 15 aa, Artificial Sequence
  Description of Artificial Sequence: Synthetic peptide
  Seed: SPGMMMGMFNMLSTV
SPGWMMIMKNMASTV

SEQ ID NO: 200821 - protein, 15 aa, Artificial Sequence
  Description of Artificial Sequence: Synthetic peptide
  Seed: SPGMMMGMFNMLSTV
SPGWMMIMKNMGSTV

SEQ ID NO: 200822 - protein, 15 aa, Artificial Sequence
  Description of Artificial Sequence: Synthetic peptide
  Seed: SPGMMMGMFNMLSTV
SPGWMMIMKNMISTV

SEQ ID NO: 200823 - protein, 15 aa, Artificial Sequence
  Description of Artificial Sequence: Synthetic peptide
  Seed: SPGMMMGMFNMLSTV
SPGWMMIMKNMMSTV

SEQ ID NO: 200824 - protein, 15 aa, Artificial Sequence
  Description of Artificial Sequence: Synthetic peptide
  Seed: SPGMMMGMFNMLSTV
SPGWMMIMKNMNSTV

SEQ ID NO: 200825 - protein, 15 aa, Artificial Sequence
  Description of Artificial Sequence: Synthetic peptide
  Seed: SPGMMMGMFNMLSTV
SPGWMMIMKNMSSTV

SEQ ID NO: 200826 - protein, 15 aa, Artificial Sequence
  Description of Artificial Sequence: Synthetic peptide
  Seed: SPGMMMGMFNMLSTV
SPGWMMIMKNMTSTV

SEQ ID NO: 200827 - protein, 15 aa, Artificial Sequence
  Description of Artificial Sequence: Synthetic peptide
  Seed: SPGMMMGMFNMLSTV
SPGWMMIMKNMVSTV

SEQ ID NO: 200828 - protein, 15 aa, Artificial Sequence
  Description of Artificial Sequence: Synthetic peptide
  Seed: SPGMMMGMFNMLSTV
SPGWMMIMNNMASTV

SEQ ID NO: 200829 - protein, 15 aa, Artificial Sequence
  Description of Artificial Sequence: Synthetic peptide
  Seed: SPGMMMGMFNMLSTV
SPGWMMIMNNMFSTV

SEQ ID NO: 200830 - protein, 15 aa, Artificial Sequence
  Description of Artificial Sequence: Synthetic peptide
  Seed: SPGMMMGMFNMLSTV
SPGWMMIMNNMGSTV

SEQ ID NO: 200831 - protein, 15 aa, Artificial Sequence
  Description of Artificial Sequence: Synthetic peptide
  Seed: SPGMMMGMFNMLSTV
SPGWMMIMNNMISTV

SEQ ID NO: 200832 - protein, 15 aa, Artificial Sequence
  Description of Artificial Sequence: Synthetic peptide
  Seed: SPGMMMGMFNMLSTV
SPGWMMIMNNMLSTV

SEQ ID NO: 200833 - protein, 15 aa, Artificial Sequence
  Description of Artificial Sequence: Synthetic peptide
  Seed: SPGMMMGMFNMLSTV
SPGWMMIMNNMMSTV

SEQ ID NO: 200834 - protein, 15 aa, Artificial Sequence
  Description of Artificial Sequence: Synthetic peptide
  Seed: SPGMMMGMFNMLSTV
SPGWMMIMNNMSSTV

SEQ ID NO: 200835 - protein, 15 aa, Artificial Sequence
  Description of Artificial Sequence: Synthetic peptide
  Seed: SPGMMMGMFNMLSTV
SPGWMMIMNNMTSTV

SEQ ID NO: 200836 - protein, 15 aa, Artificial Sequence
  Description of Artificial Sequence: Synthetic peptide
  Seed: SPGMMMGMFNMLSTV
SPGWMMIMNNMVSTV

SEQ ID NO: 200837 - protein, 15 aa, Artificial Sequence
  Description of Artificial Sequence: Synthetic peptide
  Seed: SPGMMMGMFNMLSTV
SPGWMMIMNNMYSTV

SEQ ID NO: 200838 - protein, 15 aa, Artificial Sequence
  Description of Artificial Sequence: Synthetic peptide
  Seed: SPGMMMGMFNMLSTV
SPGWMMIMPNMISTV

SEQ ID NO: 200839 - protein, 15 aa, Artificial Sequence
  Description of Artificial Sequence: Synthetic peptide
  Seed: SPGMMMGMFNMLSTV
SPGWMMIMPNMLSTV

SEQ ID NO: 200840 - protein, 15 aa, Artificial Sequence
  Description of Artificial Sequence: Synthetic peptide
  Seed: SPGMMMGMFNMLSTV
SPGWMMIMPNMMSTV

SEQ ID NO: 200841 - protein, 15 aa, Artificial Sequence
  Description of Artificial Sequence: Synthetic peptide
  Seed: SPGMMMGMFNMLSTV
SPGWMMIMPNMVSTV

SEQ ID NO: 200842 - protein, 15 aa, Artificial Sequence
  Description of Artificial Sequence: Synthetic peptide
  Seed: SPGMMMGMFNMLSTV
SPGWMMIMRNMASTV

SEQ ID NO: 200843 - protein, 15 aa, Artificial Sequence
  Description of Artificial Sequence: Synthetic peptide
  Seed: SPGMMMGMFNMLSTV
SPGWMMIMRNMGSTV

SEQ ID NO: 200844 - protein, 15 aa, Artificial Sequence
  Description of Artificial Sequence: Synthetic peptide
  Seed: SPGMMMGMFNMLSTV
SPGWMMIMRNMISTV

SEQ ID NO: 200845 - protein, 15 aa, Artificial Sequence
  Description of Artificial Sequence: Synthetic peptide
  Seed: SPGMMMGMFNMLSTV
SPGWMMIMRNMSSTV

SEQ ID NO: 200846 - protein, 15 aa, Artificial Sequence
  Description of Artificial Sequence: Synthetic peptide
  Seed: SPGMMMGMFNMLSTV
SPGWMMIMRNMTSTV

SEQ ID NO: 200847 - protein, 15 aa, Artificial Sequence
  Description of Artificial Sequence: Synthetic peptide
  Seed: SPGMMMGMFNMLSTV
SPGWMMIMRNMVSTV

SEQ ID NO: 200848 - protein, 15 aa, Artificial Sequence
  Description of Artificial Sequence: Synthetic peptide
  Seed: SPGMMMGMFNMLSTV
SPGWMMIMSNMISTV

SEQ ID NO: 200849 - protein, 15 aa, Artificial Sequence
  Description of Artificial Sequence: Synthetic peptide
  Seed: SPGMMMGMFNMLSTV
SPGWMMIMSNMLSTV

SEQ ID NO: 200850 - protein, 15 aa, Artificial Sequence
  Description of Artificial Sequence: Synthetic peptide
  Seed: SPGMMMGMFNMLSTV
SPGWMMIMSNMMSTV

SEQ ID NO: 200851 - protein, 15 aa, Artificial Sequence
  Description of Artificial Sequence: Synthetic peptide
  Seed: SPGMMMGMFNMLSTV
SPGWMMIMSNMVSTV

SEQ ID NO: 200852 - protein, 15 aa, Artificial Sequence
  Description of Artificial Sequence: Synthetic peptide
  Seed: SPGMMMGMFNMLSTV
SPGWMMIMTNMISTV

SEQ ID NO: 200853 - protein, 15 aa, Artificial Sequence
  Description of Artificial Sequence: Synthetic peptide
  Seed: SPGMMMGMFNMLSTV
SPGWMMIMTNMVSTV

SEQ ID NO: 200854 - protein, 15 aa, Artificial Sequence
  Description of Artificial Sequence: Synthetic peptide
  Seed: SPGMMMGMFNMLSTV
SPGWMMIMYNMLSTV

SEQ ID NO: 200855 - protein, 15 aa, Artificial Sequence
  Description of Artificial Sequence: Synthetic peptide
  Seed: SPGMMMGMFNMLSTV
SPGWMMIMYNMYSTV

SEQ ID NO: 200856 - protein, 15 aa, Artificial Sequence
  Description of Artificial Sequence: Synthetic peptide
  Seed: SPGMMMGMFNMLSTV
SPGWMMKMFNMFSTV

SEQ ID NO: 200857 - protein, 15 aa, Artificial Sequence
  Description of Artificial Sequence: Synthetic peptide
  Seed: SPGMMMGMFNMLSTV
SPGWMMKMFNMLSTV

SEQ ID NO: 200858 - protein, 15 aa, Artificial Sequence
  Description of Artificial Sequence: Synthetic peptide
  Seed: SPGMMMGMFNMLSTV
SPGWMMKMNNMISTV

SEQ ID NO: 200859 - protein, 15 aa, Artificial Sequence
  Description of Artificial Sequence: Synthetic peptide
  Seed: SPGMMMGMFNMLSTV
SPGWMMKMNNMLSTV

SEQ ID NO: 200860 - protein, 15 aa, Artificial Sequence
  Description of Artificial Sequence: Synthetic peptide
  Seed: SPGMMMGMFNMLSTV
SPGWMMKMNNMVSTV

SEQ ID NO: 200861 - protein, 15 aa, Artificial Sequence
  Description of Artificial Sequence: Synthetic peptide
  Seed: SPGMMMGMFNMLSTV
SPGWMMLMFNMFSTV

SEQ ID NO: 200862 - protein, 15 aa, Artificial Sequence
  Description of Artificial Sequence: Synthetic peptide
  Seed: SPGMMMGMFNMLSTV
SPGWMMLMFNMYSTV

SEQ ID NO: 200863 - protein, 15 aa, Artificial Sequence
  Description of Artificial Sequence: Synthetic peptide
  Seed: SPGMMMGMFNMLSTV
SPGWMMLMKNMASTV

SEQ ID NO: 200864 - protein, 15 aa, Artificial Sequence
  Description of Artificial Sequence: Synthetic peptide
  Seed: SPGMMMGMFNMLSTV
SPGWMMLMKNMSSTV

SEQ ID NO: 200865 - protein, 15 aa, Artificial Sequence
  Description of Artificial Sequence: Synthetic peptide
  Seed: SPGMMMGMFNMLSTV
SPGWMMLMNNMASTV

SEQ ID NO: 200866 - protein, 15 aa, Artificial Sequence
  Description of Artificial Sequence: Synthetic peptide
  Seed: SPGMMMGMFNMLSTV
SPGWMMLMNNMISTV

SEQ ID NO: 200867 - protein, 15 aa, Artificial Sequence
  Description of Artificial Sequence: Synthetic peptide
  Seed: SPGMMMGMFNMLSTV
SPGWMMLMNNMLSTV

SEQ ID NO: 200868 - protein, 15 aa, Artificial Sequence
  Description of Artificial Sequence: Synthetic peptide
  Seed: SPGMMMGMFNMLSTV
SPGWMMLMNNMSSTV

SEQ ID NO: 200869 - protein, 15 aa, Artificial Sequence
  Description of Artificial Sequence: Synthetic peptide
  Seed: SPGMMMGMFNMLSTV
SPGWMMLMNNMVSTV

SEQ ID NO: 200870 - protein, 15 aa, Artificial Sequence
  Description of Artificial Sequence: Synthetic peptide
  Seed: SPGMMMGMFNMLSTV
SPGWMMLMRNMASTV

SEQ ID NO: 200871 - protein, 15 aa, Artificial Sequence
  Description of Artificial Sequence: Synthetic peptide
  Seed: SPGMMMGMFNMLSTV
SPGWMMLMRNMSSTV

SEQ ID NO: 200872 - protein, 15 aa, Artificial Sequence
  Description of Artificial Sequence: Synthetic peptide
  Seed: SPGMMMGMFNMLSTV
SPGWMMLMYNMLSTV

SEQ ID NO: 200873 - protein, 15 aa, Artificial Sequence
  Description of Artificial Sequence: Synthetic peptide
  Seed: SPGMMMGMFNMLSTV
SPGWMMLMYNMYSTV

SEQ ID NO: 200874 - protein, 15 aa, Artificial Sequence
  Description of Artificial Sequence: Synthetic peptide
  Seed: SPGMMMGMFNMLSTV
SPGWMMMMFNMFSTV

SEQ ID NO: 200875 - protein, 15 aa, Artificial Sequence
  Description of Artificial Sequence: Synthetic peptide
  Seed: SPGMMMGMFNMLSTV
SPGWMMMMNNMASTV

SEQ ID NO: 200876 - protein, 15 aa, Artificial Sequence
  Description of Artificial Sequence: Synthetic peptide
  Seed: SPGMMMGMFNMLSTV
SPGWMMMMNNMISTV

SEQ ID NO: 200877 - protein, 15 aa, Artificial Sequence
  Description of Artificial Sequence: Synthetic peptide
  Seed: SPGMMMGMFNMLSTV
SPGWMMMMNNMLSTV

SEQ ID NO: 200878 - protein, 15 aa, Artificial Sequence
  Description of Artificial Sequence: Synthetic peptide
  Seed: SPGMMMGMFNMLSTV
SPGWMMMMNNMVSTV

SEQ ID NO: 200879 - protein, 15 aa, Artificial Sequence
  Description of Artificial Sequence: Synthetic peptide
  Seed: SPGMMMGMFNMLSTV
SPGWMMMMNNMYSTV

SEQ ID NO: 200880 - protein, 15 aa, Artificial Sequence
  Description of Artificial Sequence: Synthetic peptide
  Seed: SPGMMMGMFNMLSTV
SPGWMMNMANMASTV

SEQ ID NO: 200881 - protein, 15 aa, Artificial Sequence
  Description of Artificial Sequence: Synthetic peptide
  Seed: SPGMMMGMFNMLSTV
SPGWMMNMANMFSTV

SEQ ID NO: 200882 - protein, 15 aa, Artificial Sequence
  Description of Artificial Sequence: Synthetic peptide
  Seed: SPGMMMGMFNMLSTV
SPGWMMNMANMISTV

SEQ ID NO: 200883 - protein, 15 aa, Artificial Sequence
  Description of Artificial Sequence: Synthetic peptide
  Seed: SPGMMMGMFNMLSTV
SPGWMMNMANMLSTV

SEQ ID NO: 200884 - protein, 15 aa, Artificial Sequence
  Description of Artificial Sequence: Synthetic peptide
  Seed: SPGMMMGMFNMLSTV
SPGWMMNMANMMSTV

SEQ ID NO: 200885 - protein, 15 aa, Artificial Sequence
  Description of Artificial Sequence: Synthetic peptide
  Seed: SPGMMMGMFNMLSTV
SPGWMMNMANMSSTV

SEQ ID NO: 200886 - protein, 15 aa, Artificial Sequence
  Description of Artificial Sequence: Synthetic peptide
  Seed: SPGMMMGMFNMLSTV
SPGWMMNMANMTSTV

SEQ ID NO: 200887 - protein, 15 aa, Artificial Sequence
  Description of Artificial Sequence: Synthetic peptide
  Seed: SPGMMMGMFNMLSTV
SPGWMMNMANMVSTV

SEQ ID NO: 200888 - protein, 15 aa, Artificial Sequence
  Description of Artificial Sequence: Synthetic peptide
  Seed: SPGMMMGMFNMLSTV
SPGWMMNMANMWSTV

SEQ ID NO: 200889 - protein, 15 aa, Artificial Sequence
  Description of Artificial Sequence: Synthetic peptide
  Seed: SPGMMMGMFNMLSTV
SPGWMMNMANMYSTV

SEQ ID NO: 200890 - protein, 15 aa, Artificial Sequence
  Description of Artificial Sequence: Synthetic peptide
  Seed: SPGMMMGMFNMLSTV
SPGWMMNMDNMISTV

SEQ ID NO: 200891 - protein, 15 aa, Artificial Sequence
  Description of Artificial Sequence: Synthetic peptide
  Seed: SPGMMMGMFNMLSTV
SPGWMMNMFNMFSTV

SEQ ID NO: 200892 - protein, 15 aa, Artificial Sequence
  Description of Artificial Sequence: Synthetic peptide
  Seed: SPGMMMGMFNMLSTV
SPGWMMNMFNMISTV

SEQ ID NO: 200893 - protein, 15 aa, Artificial Sequence
  Description of Artificial Sequence: Synthetic peptide
  Seed: SPGMMMGMFNMLSTV
SPGWMMNMFNMLSTV

SEQ ID NO: 200894 - protein, 15 aa, Artificial Sequence
  Description of Artificial Sequence: Synthetic peptide
  Seed: SPGMMMGMFNMLSTV
SPGWMMNMFNMMSTV

SEQ ID NO: 200895 - protein, 15 aa, Artificial Sequence
  Description of Artificial Sequence: Synthetic peptide
  Seed: SPGMMMGMFNMLSTV
SPGWMMNMFNMVSTV

SEQ ID NO: 200896 - protein, 15 aa, Artificial Sequence
  Description of Artificial Sequence: Synthetic peptide
  Seed: SPGMMMGMFNMLSTV
SPGWMMNMGNMASTV

SEQ ID NO: 200897 - protein, 15 aa, Artificial Sequence
  Description of Artificial Sequence: Synthetic peptide
  Seed: SPGMMMGMFNMLSTV
SPGWMMNMGNMFSTV

SEQ ID NO: 200898 - protein, 15 aa, Artificial Sequence
  Description of Artificial Sequence: Synthetic peptide
  Seed: SPGMMMGMFNMLSTV
SPGWMMNMGNMISTV

SEQ ID NO: 200899 - protein, 15 aa, Artificial Sequence
  Description of Artificial Sequence: Synthetic peptide
  Seed: SPGMMMGMFNMLSTV
SPGWMMNMGNMLSTV

SEQ ID NO: 200900 - protein, 15 aa, Artificial Sequence
  Description of Artificial Sequence: Synthetic peptide
  Seed: SPGMMMGMFNMLSTV
SPGWMMNMGNMMSTV

SEQ ID NO: 200901 - protein, 15 aa, Artificial Sequence
  Description of Artificial Sequence: Synthetic peptide
  Seed: SPGMMMGMFNMLSTV
SPGWMMNMGNMVSTV

SEQ ID NO: 200902 - protein, 15 aa, Artificial Sequence
  Description of Artificial Sequence: Synthetic peptide
  Seed: SPGMMMGMFNMLSTV
SPGWMMNMGNMYSTV

SEQ ID NO: 200903 - protein, 15 aa, Artificial Sequence
  Description of Artificial Sequence: Synthetic peptide
  Seed: SPGMMMGMFNMLSTV
SPGWMMNMHNMFSTV

SEQ ID NO: 200904 - protein, 15 aa, Artificial Sequence
  Description of Artificial Sequence: Synthetic peptide
  Seed: SPGMMMGMFNMLSTV
SPGWMMNMHNMISTV

SEQ ID NO: 200905 - protein, 15 aa, Artificial Sequence
  Description of Artificial Sequence: Synthetic peptide
  Seed: SPGMMMGMFNMLSTV
SPGWMMNMHNMLSTV

SEQ ID NO: 200906 - protein, 15 aa, Artificial Sequence
  Description of Artificial Sequence: Synthetic peptide
  Seed: SPGMMMGMFNMLSTV
SPGWMMNMHNMVSTV

SEQ ID NO: 200907 - protein, 15 aa, Artificial Sequence
  Description of Artificial Sequence: Synthetic peptide
  Seed: SPGMMMGMFNMLSTV
SPGWMMNMINMASTV

SEQ ID NO: 200908 - protein, 15 aa, Artificial Sequence
  Description of Artificial Sequence: Synthetic peptide
  Seed: SPGMMMGMFNMLSTV
SPGWMMNMINMFSTV

SEQ ID NO: 200909 - protein, 15 aa, Artificial Sequence
  Description of Artificial Sequence: Synthetic peptide
  Seed: SPGMMMGMFNMLSTV
SPGWMMNMINMISTV

SEQ ID NO: 200910 - protein, 15 aa, Artificial Sequence
  Description of Artificial Sequence: Synthetic peptide
  Seed: SPGMMMGMFNMLSTV
SPGWMMNMINMLSTV

SEQ ID NO: 200911 - protein, 15 aa, Artificial Sequence
  Description of Artificial Sequence: Synthetic peptide
  Seed: SPGMMMGMFNMLSTV
SPGWMMNMINMMSTV

SEQ ID NO: 200912 - protein, 15 aa, Artificial Sequence
  Description of Artificial Sequence: Synthetic peptide
  Seed: SPGMMMGMFNMLSTV
SPGWMMNMINMSSTV

SEQ ID NO: 200913 - protein, 15 aa, Artificial Sequence
  Description of Artificial Sequence: Synthetic peptide
  Seed: SPGMMMGMFNMLSTV
SPGWMMNMINMTSTV

SEQ ID NO: 200914 - protein, 15 aa, Artificial Sequence
  Description of Artificial Sequence: Synthetic peptide
  Seed: SPGMMMGMFNMLSTV
SPGWMMNMINMVSTV

SEQ ID NO: 200915 - protein, 15 aa, Artificial Sequence
  Description of Artificial Sequence: Synthetic peptide
  Seed: SPGMMMGMFNMLSTV
SPGWMMNMINMYSTV

SEQ ID NO: 200916 - protein, 15 aa, Artificial Sequence
  Description of Artificial Sequence: Synthetic peptide
  Seed: SPGMMMGMFNMLSTV
SPGWMMNMKNMISTV

SEQ ID NO: 200917 - protein, 15 aa, Artificial Sequence
  Description of Artificial Sequence: Synthetic peptide
  Seed: SPGMMMGMFNMLSTV
SPGWMMNMKNMVSTV

SEQ ID NO: 200918 - protein, 15 aa, Artificial Sequence
  Description of Artificial Sequence: Synthetic peptide
  Seed: SPGMMMGMFNMLSTV
SPGWMMNMLNMFSTV

SEQ ID NO: 200919 - protein, 15 aa, Artificial Sequence
  Description of Artificial Sequence: Synthetic peptide
  Seed: SPGMMMGMFNMLSTV
SPGWMMNMLNMISTV

SEQ ID NO: 200920 - protein, 15 aa, Artificial Sequence
  Description of Artificial Sequence: Synthetic peptide
  Seed: SPGMMMGMFNMLSTV
SPGWMMNMLNMLSTV

SEQ ID NO: 200921 - protein, 15 aa, Artificial Sequence
  Description of Artificial Sequence: Synthetic peptide
  Seed: SPGMMMGMFNMLSTV
SPGWMMNMLNMMSTV

SEQ ID NO: 200922 - protein, 15 aa, Artificial Sequence
  Description of Artificial Sequence: Synthetic peptide
  Seed: SPGMMMGMFNMLSTV
SPGWMMNMLNMVSTV

SEQ ID NO: 200923 - protein, 15 aa, Artificial Sequence
  Description of Artificial Sequence: Synthetic peptide
  Seed: SPGMMMGMFNMLSTV
SPGWMMNMLNMYSTV

SEQ ID NO: 200924 - protein, 15 aa, Artificial Sequence
  Description of Artificial Sequence: Synthetic peptide
  Seed: SPGMMMGMFNMLSTV
SPGWMMNMMNMFSTV

SEQ ID NO: 200925 - protein, 15 aa, Artificial Sequence
  Description of Artificial Sequence: Synthetic peptide
  Seed: SPGMMMGMFNMLSTV
SPGWMMNMMNMISTV

SEQ ID NO: 200926 - protein, 15 aa, Artificial Sequence
  Description of Artificial Sequence: Synthetic peptide
  Seed: SPGMMMGMFNMLSTV
SPGWMMNMMNMLSTV

SEQ ID NO: 200927 - protein, 15 aa, Artificial Sequence
  Description of Artificial Sequence: Synthetic peptide
  Seed: SPGMMMGMFNMLSTV
SPGWMMNMMNMMSTV

SEQ ID NO: 200928 - protein, 15 aa, Artificial Sequence
  Description of Artificial Sequence: Synthetic peptide
  Seed: SPGMMMGMFNMLSTV
SPGWMMNMMNMVSTV

SEQ ID NO: 200929 - protein, 15 aa, Artificial Sequence
  Description of Artificial Sequence: Synthetic peptide
  Seed: SPGMMMGMFNMLSTV
SPGWMMNMMNMYSTV

SEQ ID NO: 200930 - protein, 15 aa, Artificial Sequence
  Description of Artificial Sequence: Synthetic peptide
  Seed: SPGMMMGMFNMLSTV
SPGWMMNMNNMASTV

SEQ ID NO: 200931 - protein, 15 aa, Artificial Sequence
  Description of Artificial Sequence: Synthetic peptide
  Seed: SPGMMMGMFNMLSTV
SPGWMMNMNNMFSTV

SEQ ID NO: 200932 - protein, 15 aa, Artificial Sequence
  Description of Artificial Sequence: Synthetic peptide
  Seed: SPGMMMGMFNMLSTV
SPGWMMNMNNMISTV

SEQ ID NO: 200933 - protein, 15 aa, Artificial Sequence
  Description of Artificial Sequence: Synthetic peptide
  Seed: SPGMMMGMFNMLSTV
SPGWMMNMNNMLSTV

SEQ ID NO: 200934 - protein, 15 aa, Artificial Sequence
  Description of Artificial Sequence: Synthetic peptide
  Seed: SPGMMMGMFNMLSTV
SPGWMMNMNNMMSTV

SEQ ID NO: 200935 - protein, 15 aa, Artificial Sequence
  Description of Artificial Sequence: Synthetic peptide
  Seed: SPGMMMGMFNMLSTV
SPGWMMNMNNMSSTV

SEQ ID NO: 200936 - protein, 15 aa, Artificial Sequence
  Description of Artificial Sequence: Synthetic peptide
  Seed: SPGMMMGMFNMLSTV
SPGWMMNMNNMTSTV

SEQ ID NO: 200937 - protein, 15 aa, Artificial Sequence
  Description of Artificial Sequence: Synthetic peptide
  Seed: SPGMMMGMFNMLSTV
SPGWMMNMNNMVSTV

SEQ ID NO: 200938 - protein, 15 aa, Artificial Sequence
  Description of Artificial Sequence: Synthetic peptide
  Seed: SPGMMMGMFNMLSTV
SPGWMMNMNNMWSTV

SEQ ID NO: 200939 - protein, 15 aa, Artificial Sequence
  Description of Artificial Sequence: Synthetic peptide
  Seed: SPGMMMGMFNMLSTV
SPGWMMNMNNMYSTV

SEQ ID NO: 200940 - protein, 15 aa, Artificial Sequence
  Description of Artificial Sequence: Synthetic peptide
  Seed: SPGMMMGMFNMLSTV
SPGWMMNMPNMASTV

SEQ ID NO: 200941 - protein, 15 aa, Artificial Sequence
  Description of Artificial Sequence: Synthetic peptide
  Seed: SPGMMMGMFNMLSTV
SPGWMMNMPNMFSTV

SEQ ID NO: 200942 - protein, 15 aa, Artificial Sequence
  Description of Artificial Sequence: Synthetic peptide
  Seed: SPGMMMGMFNMLSTV
SPGWMMNMPNMISTV

SEQ ID NO: 200943 - protein, 15 aa, Artificial Sequence
  Description of Artificial Sequence: Synthetic peptide
  Seed: SPGMMMGMFNMLSTV
SPGWMMNMPNMLSTV

SEQ ID NO: 200944 - protein, 15 aa, Artificial Sequence
  Description of Artificial Sequence: Synthetic peptide
  Seed: SPGMMMGMFNMLSTV
SPGWMMNMPNMMSTV

SEQ ID NO: 200945 - protein, 15 aa, Artificial Sequence
  Description of Artificial Sequence: Synthetic peptide
  Seed: SPGMMMGMFNMLSTV
SPGWMMNMPNMVSTV

SEQ ID NO: 200946 - protein, 15 aa, Artificial Sequence
  Description of Artificial Sequence: Synthetic peptide
  Seed: SPGMMMGMFNMLSTV
SPGWMMNMPNMYSTV

SEQ ID NO: 200947 - protein, 15 aa, Artificial Sequence
  Description of Artificial Sequence: Synthetic peptide
  Seed: SPGMMMGMFNMLSTV
SPGWMMNMQNMISTV

SEQ ID NO: 200948 - protein, 15 aa, Artificial Sequence
  Description of Artificial Sequence: Synthetic peptide
  Seed: SPGMMMGMFNMLSTV
SPGWMMNMQNMLSTV

SEQ ID NO: 200949 - protein, 15 aa, Artificial Sequence
  Description of Artificial Sequence: Synthetic peptide
  Seed: SPGMMMGMFNMLSTV
SPGWMMNMQNMVSTV

SEQ ID NO: 200950 - protein, 15 aa, Artificial Sequence
  Description of Artificial Sequence: Synthetic peptide
  Seed: SPGMMMGMFNMLSTV
SPGWMMNMRNMISTV

SEQ ID NO: 200951 - protein, 15 aa, Artificial Sequence
  Description of Artificial Sequence: Synthetic peptide
  Seed: SPGMMMGMFNMLSTV
SPGWMMNMRNMVSTV

SEQ ID NO: 200952 - protein, 15 aa, Artificial Sequence
  Description of Artificial Sequence: Synthetic peptide
  Seed: SPGMMMGMFNMLSTV
SPGWMMNMSNMASTV

SEQ ID NO: 200953 - protein, 15 aa, Artificial Sequence
  Description of Artificial Sequence: Synthetic peptide
  Seed: SPGMMMGMFNMLSTV
SPGWMMNMSNMFSTV

SEQ ID NO: 200954 - protein, 15 aa, Artificial Sequence
  Description of Artificial Sequence: Synthetic peptide
  Seed: SPGMMMGMFNMLSTV
SPGWMMNMSNMISTV

SEQ ID NO: 200955 - protein, 15 aa, Artificial Sequence
  Description of Artificial Sequence: Synthetic peptide
  Seed: SPGMMMGMFNMLSTV
SPGWMMNMSNMLSTV

SEQ ID NO: 200956 - protein, 15 aa, Artificial Sequence
  Description of Artificial Sequence: Synthetic peptide
  Seed: SPGMMMGMFNMLSTV
SPGWMMNMSNMMSTV

SEQ ID NO: 200957 - protein, 15 aa, Artificial Sequence
  Description of Artificial Sequence: Synthetic peptide
  Seed: SPGMMMGMFNMLSTV
SPGWMMNMSNMSSTV

SEQ ID NO: 200958 - protein, 15 aa, Artificial Sequence
  Description of Artificial Sequence: Synthetic peptide
  Seed: SPGMMMGMFNMLSTV
SPGWMMNMSNMTSTV

SEQ ID NO: 200959 - protein, 15 aa, Artificial Sequence
  Description of Artificial Sequence: Synthetic peptide
  Seed: SPGMMMGMFNMLSTV
SPGWMMNMSNMVSTV

SEQ ID NO: 200960 - protein, 15 aa, Artificial Sequence
  Description of Artificial Sequence: Synthetic peptide
  Seed: SPGMMMGMFNMLSTV
SPGWMMNMSNMYSTV

SEQ ID NO: 200961 - protein, 15 aa, Artificial Sequence
  Description of Artificial Sequence: Synthetic peptide
  Seed: SPGMMMGMFNMLSTV
SPGWMMNMTNMASTV

SEQ ID NO: 200962 - protein, 15 aa, Artificial Sequence
  Description of Artificial Sequence: Synthetic peptide
  Seed: SPGMMMGMFNMLSTV
SPGWMMNMTNMFSTV

SEQ ID NO: 200963 - protein, 15 aa, Artificial Sequence
  Description of Artificial Sequence: Synthetic peptide
  Seed: SPGMMMGMFNMLSTV
SPGWMMNMTNMISTV

SEQ ID NO: 200964 - protein, 15 aa, Artificial Sequence
  Description of Artificial Sequence: Synthetic peptide
  Seed: SPGMMMGMFNMLSTV
SPGWMMNMTNMLSTV

SEQ ID NO: 200965 - protein, 15 aa, Artificial Sequence
  Description of Artificial Sequence: Synthetic peptide
  Seed: SPGMMMGMFNMLSTV
SPGWMMNMTNMMSTV

SEQ ID NO: 200966 - protein, 15 aa, Artificial Sequence
  Description of Artificial Sequence: Synthetic peptide
  Seed: SPGMMMGMFNMLSTV
SPGWMMNMTNMTSTV

SEQ ID NO: 200967 - protein, 15 aa, Artificial Sequence
  Description of Artificial Sequence: Synthetic peptide
  Seed: SPGMMMGMFNMLSTV
SPGWMMNMTNMVSTV

SEQ ID NO: 200968 - protein, 15 aa, Artificial Sequence
  Description of Artificial Sequence: Synthetic peptide
  Seed: SPGMMMGMFNMLSTV
SPGWMMNMTNMYSTV

SEQ ID NO: 200969 - protein, 15 aa, Artificial Sequence
  Description of Artificial Sequence: Synthetic peptide
  Seed: SPGMMMGMFNMLSTV
SPGWMMNMVNMASTV

SEQ ID NO: 200970 - protein, 15 aa, Artificial Sequence
  Description of Artificial Sequence: Synthetic peptide
  Seed: SPGMMMGMFNMLSTV
SPGWMMNMVNMFSTV

SEQ ID NO: 200971 - protein, 15 aa, Artificial Sequence
  Description of Artificial Sequence: Synthetic peptide
  Seed: SPGMMMGMFNMLSTV
SPGWMMNMVNMISTV

SEQ ID NO: 200972 - protein, 15 aa, Artificial Sequence
  Description of Artificial Sequence: Synthetic peptide
  Seed: SPGMMMGMFNMLSTV
SPGWMMNMVNMLSTV

SEQ ID NO: 200973 - protein, 15 aa, Artificial Sequence
  Description of Artificial Sequence: Synthetic peptide
  Seed: SPGMMMGMFNMLSTV
SPGWMMNMVNMMSTV

SEQ ID NO: 200974 - protein, 15 aa, Artificial Sequence
  Description of Artificial Sequence: Synthetic peptide
  Seed: SPGMMMGMFNMLSTV
SPGWMMNMVNMSSTV

SEQ ID NO: 200975 - protein, 15 aa, Artificial Sequence
  Description of Artificial Sequence: Synthetic peptide
  Seed: SPGMMMGMFNMLSTV
SPGWMMNMVNMTSTV

SEQ ID NO: 200976 - protein, 15 aa, Artificial Sequence
  Description of Artificial Sequence: Synthetic peptide
  Seed: SPGMMMGMFNMLSTV
SPGWMMNMVNMVSTV

SEQ ID NO: 200977 - protein, 15 aa, Artificial Sequence
  Description of Artificial Sequence: Synthetic peptide
  Seed: SPGMMMGMFNMLSTV
SPGWMMNMVNMYSTV

SEQ ID NO: 200978 - protein, 15 aa, Artificial Sequence
  Description of Artificial Sequence: Synthetic peptide
  Seed: SPGMMMGMFNMLSTV
SPGWMMQMFNMFSTV

SEQ ID NO: 200979 - protein, 15 aa, Artificial Sequence
  Description of Artificial Sequence: Synthetic peptide
  Seed: SPGMMMGMFNMLSTV
SPGWMMQMFNMISTV

SEQ ID NO: 200980 - protein, 15 aa, Artificial Sequence
  Description of Artificial Sequence: Synthetic peptide
  Seed: SPGMMMGMFNMLSTV
SPGWMMQMFNMLSTV

SEQ ID NO: 200981 - protein, 15 aa, Artificial Sequence
  Description of Artificial Sequence: Synthetic peptide
  Seed: SPGMMMGMFNMLSTV
SPGWMMQMFNMMSTV

SEQ ID NO: 200982 - protein, 15 aa, Artificial Sequence
  Description of Artificial Sequence: Synthetic peptide
  Seed: SPGMMMGMFNMLSTV
SPGWMMQMFNMVSTV

SEQ ID NO: 200983 - protein, 15 aa, Artificial Sequence
  Description of Artificial Sequence: Synthetic peptide
  Seed: SPGMMMGMFNMLSTV
SPGWMMQMNNMISTV

SEQ ID NO: 200984 - protein, 15 aa, Artificial Sequence
  Description of Artificial Sequence: Synthetic peptide
  Seed: SPGMMMGMFNMLSTV
SPGWMMQMNNMVSTV

SEQ ID NO: 200985 - protein, 15 aa, Artificial Sequence
  Description of Artificial Sequence: Synthetic peptide
  Seed: SPGMMMGMFNMLSTV
SPGWMMRMFNMFSTV

SEQ ID NO: 200986 - protein, 15 aa, Artificial Sequence
  Description of Artificial Sequence: Synthetic peptide
  Seed: SPGMMMGMFNMLSTV
SPGWMMRMFNMLSTV

SEQ ID NO: 200987 - protein, 15 aa, Artificial Sequence
  Description of Artificial Sequence: Synthetic peptide
  Seed: SPGMMMGMFNMLSTV
SPGWMMRMNNMVSTV

SEQ ID NO: 200988 - protein, 15 aa, Artificial Sequence
  Description of Artificial Sequence: Synthetic peptide
  Seed: SPGMMMGMFNMLSTV
SPGWMMSMANMASTV

SEQ ID NO: 200989 - protein, 15 aa, Artificial Sequence
  Description of Artificial Sequence: Synthetic peptide
  Seed: SPGMMMGMFNMLSTV
SPGWMMSMANMFSTV

SEQ ID NO: 200990 - protein, 15 aa, Artificial Sequence
  Description of Artificial Sequence: Synthetic peptide
  Seed: SPGMMMGMFNMLSTV
SPGWMMSMANMISTV

SEQ ID NO: 200991 - protein, 15 aa, Artificial Sequence
  Description of Artificial Sequence: Synthetic peptide
  Seed: SPGMMMGMFNMLSTV
SPGWMMSMANMLSTV

SEQ ID NO: 200992 - protein, 15 aa, Artificial Sequence
  Description of Artificial Sequence: Synthetic peptide
  Seed: SPGMMMGMFNMLSTV
SPGWMMSMANMMSTV

SEQ ID NO: 200993 - protein, 15 aa, Artificial Sequence
  Description of Artificial Sequence: Synthetic peptide
  Seed: SPGMMMGMFNMLSTV
SPGWMMSMANMNSTV

SEQ ID NO: 200994 - protein, 15 aa, Artificial Sequence
  Description of Artificial Sequence: Synthetic peptide
  Seed: SPGMMMGMFNMLSTV
SPGWMMSMANMSSTV

SEQ ID NO: 200995 - protein, 15 aa, Artificial Sequence
  Description of Artificial Sequence: Synthetic peptide
  Seed: SPGMMMGMFNMLSTV
SPGWMMSMANMTSTV

SEQ ID NO: 200996 - protein, 15 aa, Artificial Sequence
  Description of Artificial Sequence: Synthetic peptide
  Seed: SPGMMMGMFNMLSTV
SPGWMMSMANMVSTV

SEQ ID NO: 200997 - protein, 15 aa, Artificial Sequence
  Description of Artificial Sequence: Synthetic peptide
  Seed: SPGMMMGMFNMLSTV
SPGWMMSMANMYSTV

SEQ ID NO: 200998 - protein, 15 aa, Artificial Sequence
  Description of Artificial Sequence: Synthetic peptide
  Seed: SPGMMMGMFNMLSTV
SPGWMMSMFNMASTV

SEQ ID NO: 200999 - protein, 15 aa, Artificial Sequence
  Description of Artificial Sequence: Synthetic peptide
  Seed: SPGMMMGMFNMLSTV
SPGWMMSMFNMDSTV

SEQ ID NO: 201000 - protein, 15 aa, Artificial Sequence
  Description of Artificial Sequence: Synthetic peptide
  Seed: SPGMMMGMFNMLSTV
SPGWMMSMFNMESTV

SEQ ID NO: 201001 - protein, 15 aa, Artificial Sequence
  Description of Artificial Sequence: Synthetic peptide
  Seed: SPGMMMGMFNMLSTV
SPGWMMSMFNMFSTV

SEQ ID NO: 201002 - protein, 15 aa, Artificial Sequence
  Description of Artificial Sequence: Synthetic peptide
  Seed: SPGMMMGMFNMLSTV
SPGWMMSMFNMISTV

SEQ ID NO: 201003 - protein, 15 aa, Artificial Sequence
  Description of Artificial Sequence: Synthetic peptide
  Seed: SPGMMMGMFNMLSTV
SPGWMMSMFNMLSTV

SEQ ID NO: 201004 - protein, 15 aa, Artificial Sequence
  Description of Artificial Sequence: Synthetic peptide
  Seed: SPGMMMGMFNMLSTV
SPGWMMSMFNMMSTV

SEQ ID NO: 201005 - protein, 15 aa, Artificial Sequence
  Description of Artificial Sequence: Synthetic peptide
  Seed: SPGMMMGMFNMLSTV
SPGWMMSMFNMNSTV

SEQ ID NO: 201006 - protein, 15 aa, Artificial Sequence
  Description of Artificial Sequence: Synthetic peptide
  Seed: SPGMMMGMFNMLSTV
SPGWMMSMFNMSSTV

SEQ ID NO: 201007 - protein, 15 aa, Artificial Sequence
  Description of Artificial Sequence: Synthetic peptide
  Seed: SPGMMMGMFNMLSTV
SPGWMMSMFNMTSTV

SEQ ID NO: 201008 - protein, 15 aa, Artificial Sequence
  Description of Artificial Sequence: Synthetic peptide
  Seed: SPGMMMGMFNMLSTV
SPGWMMSMFNMVSTV

SEQ ID NO: 201009 - protein, 15 aa, Artificial Sequence
  Description of Artificial Sequence: Synthetic peptide
  Seed: SPGMMMGMFNMLSTV
SPGWMMSMFNMYSTV

SEQ ID NO: 201010 - protein, 15 aa, Artificial Sequence
  Description of Artificial Sequence: Synthetic peptide
  Seed: SPGMMMGMFNMLSTV
SPGWMMSMGNMASTV

SEQ ID NO: 201011 - protein, 15 aa, Artificial Sequence
  Description of Artificial Sequence: Synthetic peptide
  Seed: SPGMMMGMFNMLSTV
SPGWMMSMGNMFSTV

SEQ ID NO: 201012 - protein, 15 aa, Artificial Sequence
  Description of Artificial Sequence: Synthetic peptide
  Seed: SPGMMMGMFNMLSTV
SPGWMMSMGNMISTV

SEQ ID NO: 201013 - protein, 15 aa, Artificial Sequence
  Description of Artificial Sequence: Synthetic peptide
  Seed: SPGMMMGMFNMLSTV
SPGWMMSMGNMLSTV

SEQ ID NO: 201014 - protein, 15 aa, Artificial Sequence
  Description of Artificial Sequence: Synthetic peptide
  Seed: SPGMMMGMFNMLSTV
SPGWMMSMGNMMSTV

SEQ ID NO: 201015 - protein, 15 aa, Artificial Sequence
  Description of Artificial Sequence: Synthetic peptide
  Seed: SPGMMMGMFNMLSTV
SPGWMMSMGNMSSTV

SEQ ID NO: 201016 - protein, 15 aa, Artificial Sequence
  Description of Artificial Sequence: Synthetic peptide
  Seed: SPGMMMGMFNMLSTV
SPGWMMSMGNMTSTV

SEQ ID NO: 201017 - protein, 15 aa, Artificial Sequence
  Description of Artificial Sequence: Synthetic peptide
  Seed: SPGMMMGMFNMLSTV
SPGWMMSMGNMVSTV

SEQ ID NO: 201018 - protein, 15 aa, Artificial Sequence
  Description of Artificial Sequence: Synthetic peptide
  Seed: SPGMMMGMFNMLSTV
SPGWMMSMGNMYSTV

SEQ ID NO: 201019 - protein, 15 aa, Artificial Sequence
  Description of Artificial Sequence: Synthetic peptide
  Seed: SPGMMMGMFNMLSTV
SPGWMMSMNNMFSTV

SEQ ID NO: 201020 - protein, 15 aa, Artificial Sequence
  Description of Artificial Sequence: Synthetic peptide
  Seed: SPGMMMGMFNMLSTV
SPGWMMSMNNMISTV

SEQ ID NO: 201021 - protein, 15 aa, Artificial Sequence
  Description of Artificial Sequence: Synthetic peptide
  Seed: SPGMMMGMFNMLSTV
SPGWMMSMNNMLSTV

SEQ ID NO: 201022 - protein, 15 aa, Artificial Sequence
  Description of Artificial Sequence: Synthetic peptide
  Seed: SPGMMMGMFNMLSTV
SPGWMMSMNNMMSTV

SEQ ID NO: 201023 - protein, 15 aa, Artificial Sequence
  Description of Artificial Sequence: Synthetic peptide
  Seed: SPGMMMGMFNMLSTV
SPGWMMSMNNMVSTV

SEQ ID NO: 201024 - protein, 15 aa, Artificial Sequence
  Description of Artificial Sequence: Synthetic peptide
  Seed: SPGMMMGMFNMLSTV
SPGWMMSMNNMYSTV

SEQ ID NO: 201025 - protein, 15 aa, Artificial Sequence
  Description of Artificial Sequence: Synthetic peptide
  Seed: SPGMMMGMFNMLSTV
SPGWMMSMPNMASTV

SEQ ID NO: 201026 - protein, 15 aa, Artificial Sequence
  Description of Artificial Sequence: Synthetic peptide
  Seed: SPGMMMGMFNMLSTV
SPGWMMSMPNMFSTV

SEQ ID NO: 201027 - protein, 15 aa, Artificial Sequence
  Description of Artificial Sequence: Synthetic peptide
  Seed: SPGMMMGMFNMLSTV
SPGWMMSMPNMISTV

SEQ ID NO: 201028 - protein, 15 aa, Artificial Sequence
  Description of Artificial Sequence: Synthetic peptide
  Seed: SPGMMMGMFNMLSTV
SPGWMMSMPNMLSTV

SEQ ID NO: 201029 - protein, 15 aa, Artificial Sequence
  Description of Artificial Sequence: Synthetic peptide
  Seed: SPGMMMGMFNMLSTV
SPGWMMSMPNMMSTV

SEQ ID NO: 201030 - protein, 15 aa, Artificial Sequence
  Description of Artificial Sequence: Synthetic peptide
  Seed: SPGMMMGMFNMLSTV
SPGWMMSMPNMTSTV

SEQ ID NO: 201031 - protein, 15 aa, Artificial Sequence
  Description of Artificial Sequence: Synthetic peptide
  Seed: SPGMMMGMFNMLSTV
SPGWMMSMPNMVSTV

SEQ ID NO: 201032 - protein, 15 aa, Artificial Sequence
  Description of Artificial Sequence: Synthetic peptide
  Seed: SPGMMMGMFNMLSTV
SPGWMMSMSNMASTV

SEQ ID NO: 201033 - protein, 15 aa, Artificial Sequence
  Description of Artificial Sequence: Synthetic peptide
  Seed: SPGMMMGMFNMLSTV
SPGWMMSMSNMFSTV

SEQ ID NO: 201034 - protein, 15 aa, Artificial Sequence
  Description of Artificial Sequence: Synthetic peptide
  Seed: SPGMMMGMFNMLSTV
SPGWMMSMSNMISTV

SEQ ID NO: 201035 - protein, 15 aa, Artificial Sequence
  Description of Artificial Sequence: Synthetic peptide
  Seed: SPGMMMGMFNMLSTV
SPGWMMSMSNMLSTV

SEQ ID NO: 201036 - protein, 15 aa, Artificial Sequence
  Description of Artificial Sequence: Synthetic peptide
  Seed: SPGMMMGMFNMLSTV
SPGWMMSMSNMMSTV

SEQ ID NO: 201037 - protein, 15 aa, Artificial Sequence
  Description of Artificial Sequence: Synthetic peptide
  Seed: SPGMMMGMFNMLSTV
SPGWMMSMSNMSSTV

SEQ ID NO: 201038 - protein, 15 aa, Artificial Sequence
  Description of Artificial Sequence: Synthetic peptide
  Seed: SPGMMMGMFNMLSTV
SPGWMMSMSNMTSTV

SEQ ID NO: 201039 - protein, 15 aa, Artificial Sequence
  Description of Artificial Sequence: Synthetic peptide
  Seed: SPGMMMGMFNMLSTV
SPGWMMSMSNMVSTV

SEQ ID NO: 201040 - protein, 15 aa, Artificial Sequence
  Description of Artificial Sequence: Synthetic peptide
  Seed: SPGMMMGMFNMLSTV
SPGWMMSMSNMYSTV

SEQ ID NO: 201041 - protein, 15 aa, Artificial Sequence
  Description of Artificial Sequence: Synthetic peptide
  Seed: SPGMMMGMFNMLSTV
SPGWMMSMTNMASTV

SEQ ID NO: 201042 - protein, 15 aa, Artificial Sequence
  Description of Artificial Sequence: Synthetic peptide
  Seed: SPGMMMGMFNMLSTV
SPGWMMSMTNMFSTV

SEQ ID NO: 201043 - protein, 15 aa, Artificial Sequence
  Description of Artificial Sequence: Synthetic peptide
  Seed: SPGMMMGMFNMLSTV
SPGWMMSMTNMISTV

SEQ ID NO: 201044 - protein, 15 aa, Artificial Sequence
  Description of Artificial Sequence: Synthetic peptide
  Seed: SPGMMMGMFNMLSTV
SPGWMMSMTNMLSTV

SEQ ID NO: 201045 - protein, 15 aa, Artificial Sequence
  Description of Artificial Sequence: Synthetic peptide
  Seed: SPGMMMGMFNMLSTV
SPGWMMSMTNMMSTV

SEQ ID NO: 201046 - protein, 15 aa, Artificial Sequence
  Description of Artificial Sequence: Synthetic peptide
  Seed: SPGMMMGMFNMLSTV
SPGWMMSMTNMVSTV

SEQ ID NO: 201047 - protein, 15 aa, Artificial Sequence
  Description of Artificial Sequence: Synthetic peptide
  Seed: SPGMMMGMFNMLSTV
SPGWMMSMVNMISTV

SEQ ID NO: 201048 - protein, 15 aa, Artificial Sequence
  Description of Artificial Sequence: Synthetic peptide
  Seed: SPGMMMGMFNMLSTV
SPGWMMSMVNMLSTV

SEQ ID NO: 201049 - protein, 15 aa, Artificial Sequence
  Description of Artificial Sequence: Synthetic peptide
  Seed: SPGMMMGMFNMLSTV
SPGWMMSMVNMMSTV

SEQ ID NO: 201050 - protein, 15 aa, Artificial Sequence
  Description of Artificial Sequence: Synthetic peptide
  Seed: SPGMMMGMFNMLSTV
SPGWMMSMVNMVSTV

SEQ ID NO: 201051 - protein, 15 aa, Artificial Sequence
  Description of Artificial Sequence: Synthetic peptide
  Seed: SPGMMMGMFNMLSTV
SPGWMMSMWNMLSTV

SEQ ID NO: 201052 - protein, 15 aa, Artificial Sequence
  Description of Artificial Sequence: Synthetic peptide
  Seed: SPGMMMGMFNMLSTV
SPGWMMSMYNMFSTV

SEQ ID NO: 201053 - protein, 15 aa, Artificial Sequence
  Description of Artificial Sequence: Synthetic peptide
  Seed: SPGMMMGMFNMLSTV
SPGWMMSMYNMISTV

SEQ ID NO: 201054 - protein, 15 aa, Artificial Sequence
  Description of Artificial Sequence: Synthetic peptide
  Seed: SPGMMMGMFNMLSTV
SPGWMMSMYNMLSTV

SEQ ID NO: 201055 - protein, 15 aa, Artificial Sequence
  Description of Artificial Sequence: Synthetic peptide
  Seed: SPGMMMGMFNMLSTV
SPGWMMSMYNMVSTV

SEQ ID NO: 201056 - protein, 15 aa, Artificial Sequence
  Description of Artificial Sequence: Synthetic peptide
  Seed: SPGMMMGMFNMLSTV
SPGWMMTMANMASTV

SEQ ID NO: 201057 - protein, 15 aa, Artificial Sequence
  Description of Artificial Sequence: Synthetic peptide
  Seed: SPGMMMGMFNMLSTV
SPGWMMTMANMFSTV

SEQ ID NO: 201058 - protein, 15 aa, Artificial Sequence
  Description of Artificial Sequence: Synthetic peptide
  Seed: SPGMMMGMFNMLSTV
SPGWMMTMANMISTV

SEQ ID NO: 201059 - protein, 15 aa, Artificial Sequence
  Description of Artificial Sequence: Synthetic peptide
  Seed: SPGMMMGMFNMLSTV
SPGWMMTMANMLSTV

SEQ ID NO: 201060 - protein, 15 aa, Artificial Sequence
  Description of Artificial Sequence: Synthetic peptide
  Seed: SPGMMMGMFNMLSTV
SPGWMMTMANMMSTV

SEQ ID NO: 201061 - protein, 15 aa, Artificial Sequence
  Description of Artificial Sequence: Synthetic peptide
  Seed: SPGMMMGMFNMLSTV
SPGWMMTMANMSSTV

SEQ ID NO: 201062 - protein, 15 aa, Artificial Sequence
  Description of Artificial Sequence: Synthetic peptide
  Seed: SPGMMMGMFNMLSTV
SPGWMMTMANMTSTV

SEQ ID NO: 201063 - protein, 15 aa, Artificial Sequence
  Description of Artificial Sequence: Synthetic peptide
  Seed: SPGMMMGMFNMLSTV
SPGWMMTMANMVSTV

SEQ ID NO: 201064 - protein, 15 aa, Artificial Sequence
  Description of Artificial Sequence: Synthetic peptide
  Seed: SPGMMMGMFNMLSTV
SPGWMMTMANMYSTV

SEQ ID NO: 201065 - protein, 15 aa, Artificial Sequence
  Description of Artificial Sequence: Synthetic peptide
  Seed: SPGMMMGMFNMLSTV
SPGWMMTMFNMASTV

SEQ ID NO: 201066 - protein, 15 aa, Artificial Sequence
  Description of Artificial Sequence: Synthetic peptide
  Seed: SPGMMMGMFNMLSTV
SPGWMMTMFNMDSTV

SEQ ID NO: 201067 - protein, 15 aa, Artificial Sequence
  Description of Artificial Sequence: Synthetic peptide
  Seed: SPGMMMGMFNMLSTV
SPGWMMTMFNMESTV

SEQ ID NO: 201068 - protein, 15 aa, Artificial Sequence
  Description of Artificial Sequence: Synthetic peptide
  Seed: SPGMMMGMFNMLSTV
SPGWMMTMFNMFSTV

SEQ ID NO: 201069 - protein, 15 aa, Artificial Sequence
  Description of Artificial Sequence: Synthetic peptide
  Seed: SPGMMMGMFNMLSTV
SPGWMMTMFNMISTV

SEQ ID NO: 201070 - protein, 15 aa, Artificial Sequence
  Description of Artificial Sequence: Synthetic peptide
  Seed: SPGMMMGMFNMLSTV
SPGWMMTMFNMLSTV

SEQ ID NO: 201071 - protein, 15 aa, Artificial Sequence
  Description of Artificial Sequence: Synthetic peptide
  Seed: SPGMMMGMFNMLSTV
SPGWMMTMFNMMSTV

SEQ ID NO: 201072 - protein, 15 aa, Artificial Sequence
  Description of Artificial Sequence: Synthetic peptide
  Seed: SPGMMMGMFNMLSTV
SPGWMMTMFNMNSTV

SEQ ID NO: 201073 - protein, 15 aa, Artificial Sequence
  Description of Artificial Sequence: Synthetic peptide
  Seed: SPGMMMGMFNMLSTV
SPGWMMTMFNMSSTV

SEQ ID NO: 201074 - protein, 15 aa, Artificial Sequence
  Description of Artificial Sequence: Synthetic peptide
  Seed: SPGMMMGMFNMLSTV
SPGWMMTMFNMTSTV

SEQ ID NO: 201075 - protein, 15 aa, Artificial Sequence
  Description of Artificial Sequence: Synthetic peptide
  Seed: SPGMMMGMFNMLSTV
SPGWMMTMFNMVSTV

SEQ ID NO: 201076 - protein, 15 aa, Artificial Sequence
  Description of Artificial Sequence: Synthetic peptide
  Seed: SPGMMMGMFNMLSTV
SPGWMMTMFNMYSTV

SEQ ID NO: 201077 - protein, 15 aa, Artificial Sequence
  Description of Artificial Sequence: Synthetic peptide
  Seed: SPGMMMGMFNMLSTV
SPGWMMTMGNMASTV

SEQ ID NO: 201078 - protein, 15 aa, Artificial Sequence
  Description of Artificial Sequence: Synthetic peptide
  Seed: SPGMMMGMFNMLSTV
SPGWMMTMGNMFSTV

SEQ ID NO: 201079 - protein, 15 aa, Artificial Sequence
  Description of Artificial Sequence: Synthetic peptide
  Seed: SPGMMMGMFNMLSTV
SPGWMMTMGNMISTV

SEQ ID NO: 201080 - protein, 15 aa, Artificial Sequence
  Description of Artificial Sequence: Synthetic peptide
  Seed: SPGMMMGMFNMLSTV
SPGWMMTMGNMLSTV

SEQ ID NO: 201081 - protein, 15 aa, Artificial Sequence
  Description of Artificial Sequence: Synthetic peptide
  Seed: SPGMMMGMFNMLSTV
SPGWMMTMGNMMSTV

SEQ ID NO: 201082 - protein, 15 aa, Artificial Sequence
  Description of Artificial Sequence: Synthetic peptide
  Seed: SPGMMMGMFNMLSTV
SPGWMMTMGNMTSTV

SEQ ID NO: 201083 - protein, 15 aa, Artificial Sequence
  Description of Artificial Sequence: Synthetic peptide
  Seed: SPGMMMGMFNMLSTV
SPGWMMTMGNMVSTV

SEQ ID NO: 201084 - protein, 15 aa, Artificial Sequence
  Description of Artificial Sequence: Synthetic peptide
  Seed: SPGMMMGMFNMLSTV
SPGWMMTMGNMYSTV

SEQ ID NO: 201085 - protein, 15 aa, Artificial Sequence
  Description of Artificial Sequence: Synthetic peptide
  Seed: SPGMMMGMFNMLSTV
SPGWMMTMNNMFSTV

SEQ ID NO: 201086 - protein, 15 aa, Artificial Sequence
  Description of Artificial Sequence: Synthetic peptide
  Seed: SPGMMMGMFNMLSTV
SPGWMMTMNNMISTV

SEQ ID NO: 201087 - protein, 15 aa, Artificial Sequence
  Description of Artificial Sequence: Synthetic peptide
  Seed: SPGMMMGMFNMLSTV
SPGWMMTMNNMLSTV

SEQ ID NO: 201088 - protein, 15 aa, Artificial Sequence
  Description of Artificial Sequence: Synthetic peptide
  Seed: SPGMMMGMFNMLSTV
SPGWMMTMNNMMSTV

SEQ ID NO: 201089 - protein, 15 aa, Artificial Sequence
  Description of Artificial Sequence: Synthetic peptide
  Seed: SPGMMMGMFNMLSTV
SPGWMMTMNNMVSTV

SEQ ID NO: 201090 - protein, 15 aa, Artificial Sequence
  Description of Artificial Sequence: Synthetic peptide
  Seed: SPGMMMGMFNMLSTV
SPGWMMTMNNMYSTV

SEQ ID NO: 201091 - protein, 15 aa, Artificial Sequence
  Description of Artificial Sequence: Synthetic peptide
  Seed: SPGMMMGMFNMLSTV
SPGWMMTMPNMASTV

SEQ ID NO: 201092 - protein, 15 aa, Artificial Sequence
  Description of Artificial Sequence: Synthetic peptide
  Seed: SPGMMMGMFNMLSTV
SPGWMMTMPNMFSTV

SEQ ID NO: 201093 - protein, 15 aa, Artificial Sequence
  Description of Artificial Sequence: Synthetic peptide
  Seed: SPGMMMGMFNMLSTV
SPGWMMTMPNMISTV

SEQ ID NO: 201094 - protein, 15 aa, Artificial Sequence
  Description of Artificial Sequence: Synthetic peptide
  Seed: SPGMMMGMFNMLSTV
SPGWMMTMPNMLSTV

SEQ ID NO: 201095 - protein, 15 aa, Artificial Sequence
  Description of Artificial Sequence: Synthetic peptide
  Seed: SPGMMMGMFNMLSTV
SPGWMMTMPNMMSTV

SEQ ID NO: 201096 - protein, 15 aa, Artificial Sequence
  Description of Artificial Sequence: Synthetic peptide
  Seed: SPGMMMGMFNMLSTV
SPGWMMTMPNMVSTV

SEQ ID NO: 201097 - protein, 15 aa, Artificial Sequence
  Description of Artificial Sequence: Synthetic peptide
  Seed: SPGMMMGMFNMLSTV
SPGWMMTMPNMYSTV

SEQ ID NO: 201098 - protein, 15 aa, Artificial Sequence
  Description of Artificial Sequence: Synthetic peptide
  Seed: SPGMMMGMFNMLSTV
SPGWMMTMSNMASTV

SEQ ID NO: 201099 - protein, 15 aa, Artificial Sequence
  Description of Artificial Sequence: Synthetic peptide
  Seed: SPGMMMGMFNMLSTV
SPGWMMTMSNMFSTV

SEQ ID NO: 201100 - protein, 15 aa, Artificial Sequence
  Description of Artificial Sequence: Synthetic peptide
  Seed: SPGMMMGMFNMLSTV
SPGWMMTMSNMISTV

SEQ ID NO: 201101 - protein, 15 aa, Artificial Sequence
  Description of Artificial Sequence: Synthetic peptide
  Seed: SPGMMMGMFNMLSTV
SPGWMMTMSNMLSTV

SEQ ID NO: 201102 - protein, 15 aa, Artificial Sequence
  Description of Artificial Sequence: Synthetic peptide
  Seed: SPGMMMGMFNMLSTV
SPGWMMTMSNMMSTV

SEQ ID NO: 201103 - protein, 15 aa, Artificial Sequence
  Description of Artificial Sequence: Synthetic peptide
  Seed: SPGMMMGMFNMLSTV
SPGWMMTMSNMSSTV

SEQ ID NO: 201104 - protein, 15 aa, Artificial Sequence
  Description of Artificial Sequence: Synthetic peptide
  Seed: SPGMMMGMFNMLSTV
SPGWMMTMSNMTSTV

SEQ ID NO: 201105 - protein, 15 aa, Artificial Sequence
  Description of Artificial Sequence: Synthetic peptide
  Seed: SPGMMMGMFNMLSTV
SPGWMMTMSNMVSTV

SEQ ID NO: 201106 - protein, 15 aa, Artificial Sequence
  Description of Artificial Sequence: Synthetic peptide
  Seed: SPGMMMGMFNMLSTV
SPGWMMTMSNMYSTV

SEQ ID NO: 201107 - protein, 15 aa, Artificial Sequence
  Description of Artificial Sequence: Synthetic peptide
  Seed: SPGMMMGMFNMLSTV
SPGWMMTMTNMFSTV

SEQ ID NO: 201108 - protein, 15 aa, Artificial Sequence
  Description of Artificial Sequence: Synthetic peptide
  Seed: SPGMMMGMFNMLSTV
SPGWMMTMTNMISTV

SEQ ID NO: 201109 - protein, 15 aa, Artificial Sequence
  Description of Artificial Sequence: Synthetic peptide
  Seed: SPGMMMGMFNMLSTV
SPGWMMTMTNMLSTV

SEQ ID NO: 201110 - protein, 15 aa, Artificial Sequence
  Description of Artificial Sequence: Synthetic peptide
  Seed: SPGMMMGMFNMLSTV
SPGWMMTMTNMMSTV

SEQ ID NO: 201111 - protein, 15 aa, Artificial Sequence
  Description of Artificial Sequence: Synthetic peptide
  Seed: SPGMMMGMFNMLSTV
SPGWMMTMTNMVSTV

SEQ ID NO: 201112 - protein, 15 aa, Artificial Sequence
  Description of Artificial Sequence: Synthetic peptide
  Seed: SPGMMMGMFNMLSTV
SPGWMMTMTNMYSTV

SEQ ID NO: 201113 - protein, 15 aa, Artificial Sequence
  Description of Artificial Sequence: Synthetic peptide
  Seed: SPGMMMGMFNMLSTV
SPGWMMTMVNMISTV

SEQ ID NO: 201114 - protein, 15 aa, Artificial Sequence
  Description of Artificial Sequence: Synthetic peptide
  Seed: SPGMMMGMFNMLSTV
SPGWMMTMVNMLSTV

SEQ ID NO: 201115 - protein, 15 aa, Artificial Sequence
  Description of Artificial Sequence: Synthetic peptide
  Seed: SPGMMMGMFNMLSTV
SPGWMMTMVNMVSTV

SEQ ID NO: 201116 - protein, 15 aa, Artificial Sequence
  Description of Artificial Sequence: Synthetic peptide
  Seed: SPGMMMGMFNMLSTV
SPGWMMTMWNMLSTV

SEQ ID NO: 201117 - protein, 15 aa, Artificial Sequence
  Description of Artificial Sequence: Synthetic peptide
  Seed: SPGMMMGMFNMLSTV
SPGWMMTMYNMFSTV

SEQ ID NO: 201118 - protein, 15 aa, Artificial Sequence
  Description of Artificial Sequence: Synthetic peptide
  Seed: SPGMMMGMFNMLSTV
SPGWMMTMYNMISTV

SEQ ID NO: 201119 - protein, 15 aa, Artificial Sequence
  Description of Artificial Sequence: Synthetic peptide
  Seed: SPGMMMGMFNMLSTV
SPGWMMTMYNMLSTV

SEQ ID NO: 201120 - protein, 15 aa, Artificial Sequence
  Description of Artificial Sequence: Synthetic peptide
  Seed: SPGMMMGMFNMLSTV
SPGWMMTMYNMMSTV

SEQ ID NO: 201121 - protein, 15 aa, Artificial Sequence
  Description of Artificial Sequence: Synthetic peptide
  Seed: SPGMMMGMFNMLSTV
SPGWMMTMYNMVSTV

SEQ ID NO: 201122 - protein, 15 aa, Artificial Sequence
  Description of Artificial Sequence: Synthetic peptide
  Seed: SPGMMMGMFNMLSTV
SPGWMMVMANMASTV

SEQ ID NO: 201123 - protein, 15 aa, Artificial Sequence
  Description of Artificial Sequence: Synthetic peptide
  Seed: SPGMMMGMFNMLSTV
SPGWMMVMANMISTV

SEQ ID NO: 201124 - protein, 15 aa, Artificial Sequence
  Description of Artificial Sequence: Synthetic peptide
  Seed: SPGMMMGMFNMLSTV
SPGWMMVMANMLSTV

SEQ ID NO: 201125 - protein, 15 aa, Artificial Sequence
  Description of Artificial Sequence: Synthetic peptide
  Seed: SPGMMMGMFNMLSTV
SPGWMMVMANMVSTV

SEQ ID NO: 201126 - protein, 15 aa, Artificial Sequence
  Description of Artificial Sequence: Synthetic peptide
  Seed: SPGMMMGMFNMLSTV
SPGWMMVMFNMESTV

SEQ ID NO: 201127 - protein, 15 aa, Artificial Sequence
  Description of Artificial Sequence: Synthetic peptide
  Seed: SPGMMMGMFNMLSTV
SPGWMMVMFNMLSTV

SEQ ID NO: 201128 - protein, 15 aa, Artificial Sequence
  Description of Artificial Sequence: Synthetic peptide
  Seed: SPGMMMGMFNMLSTV
SPGWMMVMGNMISTV

SEQ ID NO: 201129 - protein, 15 aa, Artificial Sequence
  Description of Artificial Sequence: Synthetic peptide
  Seed: SPGMMMGMFNMLSTV
SPGWMMVMGNMVSTV

SEQ ID NO: 201130 - protein, 15 aa, Artificial Sequence
  Description of Artificial Sequence: Synthetic peptide
  Seed: SPGMMMGMFNMLSTV
SPGWMMVMHNMASTV

SEQ ID NO: 201131 - protein, 15 aa, Artificial Sequence
  Description of Artificial Sequence: Synthetic peptide
  Seed: SPGMMMGMFNMLSTV
SPGWMMVMKNMASTV

SEQ ID NO: 201132 - protein, 15 aa, Artificial Sequence
  Description of Artificial Sequence: Synthetic peptide
  Seed: SPGMMMGMFNMLSTV
SPGWMMVMNNMASTV

SEQ ID NO: 201133 - protein, 15 aa, Artificial Sequence
  Description of Artificial Sequence: Synthetic peptide
  Seed: SPGMMMGMFNMLSTV
SPGWMMVMNNMFSTV

SEQ ID NO: 201134 - protein, 15 aa, Artificial Sequence
  Description of Artificial Sequence: Synthetic peptide
  Seed: SPGMMMGMFNMLSTV
SPGWMMVMNNMISTV

SEQ ID NO: 201135 - protein, 15 aa, Artificial Sequence
  Description of Artificial Sequence: Synthetic peptide
  Seed: SPGMMMGMFNMLSTV
SPGWMMVMNNMLSTV

SEQ ID NO: 201136 - protein, 15 aa, Artificial Sequence
  Description of Artificial Sequence: Synthetic peptide
  Seed: SPGMMMGMFNMLSTV
SPGWMMVMNNMMSTV

SEQ ID NO: 201137 - protein, 15 aa, Artificial Sequence
  Description of Artificial Sequence: Synthetic peptide
  Seed: SPGMMMGMFNMLSTV
SPGWMMVMNNMSSTV

SEQ ID NO: 201138 - protein, 15 aa, Artificial Sequence
  Description of Artificial Sequence: Synthetic peptide
  Seed: SPGMMMGMFNMLSTV
SPGWMMVMNNMVSTV

SEQ ID NO: 201139 - protein, 15 aa, Artificial Sequence
  Description of Artificial Sequence: Synthetic peptide
  Seed: SPGMMMGMFNMLSTV
SPGWMMVMNNMYSTV

SEQ ID NO: 201140 - protein, 15 aa, Artificial Sequence
  Description of Artificial Sequence: Synthetic peptide
  Seed: SPGMMMGMFNMLSTV
SPGWMMVMPNMISTV

SEQ ID NO: 201141 - protein, 15 aa, Artificial Sequence
  Description of Artificial Sequence: Synthetic peptide
  Seed: SPGMMMGMFNMLSTV
SPGWMMVMPNMLSTV

SEQ ID NO: 201142 - protein, 15 aa, Artificial Sequence
  Description of Artificial Sequence: Synthetic peptide
  Seed: SPGMMMGMFNMLSTV
SPGWMMVMPNMMSTV

SEQ ID NO: 201143 - protein, 15 aa, Artificial Sequence
  Description of Artificial Sequence: Synthetic peptide
  Seed: SPGMMMGMFNMLSTV
SPGWMMVMPNMVSTV

SEQ ID NO: 201144 - protein, 15 aa, Artificial Sequence
  Description of Artificial Sequence: Synthetic peptide
  Seed: SPGMMMGMFNMLSTV
SPGWMMVMRNMASTV

SEQ ID NO: 201145 - protein, 15 aa, Artificial Sequence
  Description of Artificial Sequence: Synthetic peptide
  Seed: SPGMMMGMFNMLSTV
SPGWMMVMSNMASTV

SEQ ID NO: 201146 - protein, 15 aa, Artificial Sequence
  Description of Artificial Sequence: Synthetic peptide
  Seed: SPGMMMGMFNMLSTV
SPGWMMVMSNMISTV

SEQ ID NO: 201147 - protein, 15 aa, Artificial Sequence
  Description of Artificial Sequence: Synthetic peptide
  Seed: SPGMMMGMFNMLSTV
SPGWMMVMSNMLSTV

SEQ ID NO: 201148 - protein, 15 aa, Artificial Sequence
  Description of Artificial Sequence: Synthetic peptide
  Seed: SPGMMMGMFNMLSTV
SPGWMMVMSNMMSTV

SEQ ID NO: 201149 - protein, 15 aa, Artificial Sequence
  Description of Artificial Sequence: Synthetic peptide
  Seed: SPGMMMGMFNMLSTV
SPGWMMVMSNMVSTV

SEQ ID NO: 201150 - protein, 15 aa, Artificial Sequence
  Description of Artificial Sequence: Synthetic peptide
  Seed: SPGMMMGMFNMLSTV
SPGWMMVMYNMFSTV

SEQ ID NO: 201151 - protein, 15 aa, Artificial Sequence
  Description of Artificial Sequence: Synthetic peptide
  Seed: SPGMMMGMFNMLSTV
SPGWMMVMYNMLSTV

SEQ ID NO: 201152 - protein, 15 aa, Artificial Sequence
  Description of Artificial Sequence: Synthetic peptide
  Seed: SPGMMMGMFNMLSTV
SPGWMMWMFNMFSTV

SEQ ID NO: 201153 - protein, 15 aa, Artificial Sequence
  Description of Artificial Sequence: Synthetic peptide
  Seed: SPGMMMGMFNMLSTV
SPGWMMWMFNMLSTV

SEQ ID NO: 201154 - protein, 15 aa, Artificial Sequence
  Description of Artificial Sequence: Synthetic peptide
  Seed: SPGMMMGMFNMLSTV
SPGWMMWMFNMYSTV

SEQ ID NO: 201155 - protein, 15 aa, Artificial Sequence
  Description of Artificial Sequence: Synthetic peptide
  Seed: SPGMMMGMFNMLSTV
SPGWMMWMYNMLSTV

SEQ ID NO: 201156 - protein, 15 aa, Artificial Sequence
  Description of Artificial Sequence: Synthetic peptide
  Seed: SPGMMMGMFNMLSTV
SPGWMMWMYNMYSTV

SEQ ID NO: 201157 - protein, 15 aa, Artificial Sequence
  Description of Artificial Sequence: Synthetic peptide
  Seed: SPGMMMGMFNMLSTV
SPGWMMYMFNMYSTV

SEQ ID NO: 201158 - protein, 15 aa, Artificial Sequence
  Description of Artificial Sequence: Synthetic peptide
  Seed: SPGMMMGMFNMLSTV
SPGWMMYMNNMASTV

SEQ ID NO: 201159 - protein, 15 aa, Artificial Sequence
  Description of Artificial Sequence: Synthetic peptide
  Seed: SPGMMMGMFNMLSTV
SPGWMMYMNNMISTV

SEQ ID NO: 201160 - protein, 15 aa, Artificial Sequence
  Description of Artificial Sequence: Synthetic peptide
  Seed: SPGMMMGMFNMLSTV
SPGWMMYMNNMVSTV

SEQ ID NO: 201161 - protein, 15 aa, Artificial Sequence
  Description of Artificial Sequence: Synthetic peptide
  Seed: SPGMMMGMFNMLSTV
SPGWMMYMYNMLSTV

SEQ ID NO: 201162 - protein, 15 aa, Artificial Sequence
  Description of Artificial Sequence: Synthetic peptide
  Seed: SPGMMMGMFNMLSTV
SPGYMMAMANMASTV

SEQ ID NO: 201163 - protein, 15 aa, Artificial Sequence
  Description of Artificial Sequence: Synthetic peptide
  Seed: SPGMMMGMFNMLSTV
SPGYMMAMANMDSTV

SEQ ID NO: 201164 - protein, 15 aa, Artificial Sequence
  Description of Artificial Sequence: Synthetic peptide
  Seed: SPGMMMGMFNMLSTV
SPGYMMAMANMESTV

SEQ ID NO: 201165 - protein, 15 aa, Artificial Sequence
  Description of Artificial Sequence: Synthetic peptide
  Seed: SPGMMMGMFNMLSTV
SPGYMMAMANMFSTV

SEQ ID NO: 201166 - protein, 15 aa, Artificial Sequence
  Description of Artificial Sequence: Synthetic peptide
  Seed: SPGMMMGMFNMLSTV
SPGYMMAMANMGSTV

SEQ ID NO: 201167 - protein, 15 aa, Artificial Sequence
  Description of Artificial Sequence: Synthetic peptide
  Seed: SPGMMMGMFNMLSTV
SPGYMMAMANMHSTV

SEQ ID NO: 201168 - protein, 15 aa, Artificial Sequence
  Description of Artificial Sequence: Synthetic peptide
  Seed: SPGMMMGMFNMLSTV
SPGYMMAMANMISTV

SEQ ID NO: 201169 - protein, 15 aa, Artificial Sequence
  Description of Artificial Sequence: Synthetic peptide
  Seed: SPGMMMGMFNMLSTV
SPGYMMAMANMLSTV

SEQ ID NO: 201170 - protein, 15 aa, Artificial Sequence
  Description of Artificial Sequence: Synthetic peptide
  Seed: SPGMMMGMFNMLSTV
SPGYMMAMANMMSTV

SEQ ID NO: 201171 - protein, 15 aa, Artificial Sequence
  Description of Artificial Sequence: Synthetic peptide
  Seed: SPGMMMGMFNMLSTV
SPGYMMAMANMNSTV

SEQ ID NO: 201172 - protein, 15 aa, Artificial Sequence
  Description of Artificial Sequence: Synthetic peptide
  Seed: SPGMMMGMFNMLSTV
SPGYMMAMANMPSTV

SEQ ID NO: 201173 - protein, 15 aa, Artificial Sequence
  Description of Artificial Sequence: Synthetic peptide
  Seed: SPGMMMGMFNMLSTV
SPGYMMAMANMQSTV

SEQ ID NO: 201174 - protein, 15 aa, Artificial Sequence
  Description of Artificial Sequence: Synthetic peptide
  Seed: SPGMMMGMFNMLSTV
SPGYMMAMANMSSTV

SEQ ID NO: 201175 - protein, 15 aa, Artificial Sequence
  Description of Artificial Sequence: Synthetic peptide
  Seed: SPGMMMGMFNMLSTV
SPGYMMAMANMTSTV

SEQ ID NO: 201176 - protein, 15 aa, Artificial Sequence
  Description of Artificial Sequence: Synthetic peptide
  Seed: SPGMMMGMFNMLSTV
SPGYMMAMANMVSTV

SEQ ID NO: 201177 - protein, 15 aa, Artificial Sequence
  Description of Artificial Sequence: Synthetic peptide
  Seed: SPGMMMGMFNMLSTV
SPGYMMAMANMYSTV

SEQ ID NO: 201178 - protein, 15 aa, Artificial Sequence
  Description of Artificial Sequence: Synthetic peptide
  Seed: SPGMMMGMFNMLSTV
SPGYMMAMENMISTV

SEQ ID NO: 201179 - protein, 15 aa, Artificial Sequence
  Description of Artificial Sequence: Synthetic peptide
  Seed: SPGMMMGMFNMLSTV
SPGYMMAMENMVSTV

SEQ ID NO: 201180 - protein, 15 aa, Artificial Sequence
  Description of Artificial Sequence: Synthetic peptide
  Seed: SPGMMMGMFNMLSTV
SPGYMMAMFNMASTV

SEQ ID NO: 201181 - protein, 15 aa, Artificial Sequence
  Description of Artificial Sequence: Synthetic peptide
  Seed: SPGMMMGMFNMLSTV
SPGYMMAMFNMESTV

SEQ ID NO: 201182 - protein, 15 aa, Artificial Sequence
  Description of Artificial Sequence: Synthetic peptide
  Seed: SPGMMMGMFNMLSTV
SPGYMMAMFNMFSTV

SEQ ID NO: 201183 - protein, 15 aa, Artificial Sequence
  Description of Artificial Sequence: Synthetic peptide
  Seed: SPGMMMGMFNMLSTV
SPGYMMAMFNMISTV

SEQ ID NO: 201184 - protein, 15 aa, Artificial Sequence
  Description of Artificial Sequence: Synthetic peptide
  Seed: SPGMMMGMFNMLSTV
SPGYMMAMFNMLSTV

SEQ ID NO: 201185 - protein, 15 aa, Artificial Sequence
  Description of Artificial Sequence: Synthetic peptide
  Seed: SPGMMMGMFNMLSTV
SPGYMMAMFNMMSTV

SEQ ID NO: 201186 - protein, 15 aa, Artificial Sequence
  Description of Artificial Sequence: Synthetic peptide
  Seed: SPGMMMGMFNMLSTV
SPGYMMAMFNMNSTV

SEQ ID NO: 201187 - protein, 15 aa, Artificial Sequence
  Description of Artificial Sequence: Synthetic peptide
  Seed: SPGMMMGMFNMLSTV
SPGYMMAMFNMTSTV

SEQ ID NO: 201188 - protein, 15 aa, Artificial Sequence
  Description of Artificial Sequence: Synthetic peptide
  Seed: SPGMMMGMFNMLSTV
SPGYMMAMFNMVSTV

SEQ ID NO: 201189 - protein, 15 aa, Artificial Sequence
  Description of Artificial Sequence: Synthetic peptide
  Seed: SPGMMMGMFNMLSTV
SPGYMMAMFNMYSTV

SEQ ID NO: 201190 - protein, 15 aa, Artificial Sequence
  Description of Artificial Sequence: Synthetic peptide
  Seed: SPGMMMGMFNMLSTV
SPGYMMAMGNMASTV

SEQ ID NO: 201191 - protein, 15 aa, Artificial Sequence
  Description of Artificial Sequence: Synthetic peptide
  Seed: SPGMMMGMFNMLSTV
SPGYMMAMGNMFSTV

SEQ ID NO: 201192 - protein, 15 aa, Artificial Sequence
  Description of Artificial Sequence: Synthetic peptide
  Seed: SPGMMMGMFNMLSTV
SPGYMMAMGNMGSTV

SEQ ID NO: 201193 - protein, 15 aa, Artificial Sequence
  Description of Artificial Sequence: Synthetic peptide
  Seed: SPGMMMGMFNMLSTV
SPGYMMAMGNMHSTV

SEQ ID NO: 201194 - protein, 15 aa, Artificial Sequence
  Description of Artificial Sequence: Synthetic peptide
  Seed: SPGMMMGMFNMLSTV
SPGYMMAMGNMISTV

SEQ ID NO: 201195 - protein, 15 aa, Artificial Sequence
  Description of Artificial Sequence: Synthetic peptide
  Seed: SPGMMMGMFNMLSTV
SPGYMMAMGNMLSTV

SEQ ID NO: 201196 - protein, 15 aa, Artificial Sequence
  Description of Artificial Sequence: Synthetic peptide
  Seed: SPGMMMGMFNMLSTV
SPGYMMAMGNMMSTV

SEQ ID NO: 201197 - protein, 15 aa, Artificial Sequence
  Description of Artificial Sequence: Synthetic peptide
  Seed: SPGMMMGMFNMLSTV
SPGYMMAMGNMNSTV

SEQ ID NO: 201198 - protein, 15 aa, Artificial Sequence
  Description of Artificial Sequence: Synthetic peptide
  Seed: SPGMMMGMFNMLSTV
SPGYMMAMGNMPSTV

SEQ ID NO: 201199 - protein, 15 aa, Artificial Sequence
  Description of Artificial Sequence: Synthetic peptide
  Seed: SPGMMMGMFNMLSTV
SPGYMMAMGNMSSTV

SEQ ID NO: 201200 - protein, 15 aa, Artificial Sequence
  Description of Artificial Sequence: Synthetic peptide
  Seed: SPGMMMGMFNMLSTV
SPGYMMAMGNMTSTV

SEQ ID NO: 201201 - protein, 15 aa, Artificial Sequence
  Description of Artificial Sequence: Synthetic peptide
  Seed: SPGMMMGMFNMLSTV
SPGYMMAMGNMVSTV

SEQ ID NO: 201202 - protein, 15 aa, Artificial Sequence
  Description of Artificial Sequence: Synthetic peptide
  Seed: SPGMMMGMFNMLSTV
SPGYMMAMGNMYSTV

SEQ ID NO: 201203 - protein, 15 aa, Artificial Sequence
  Description of Artificial Sequence: Synthetic peptide
  Seed: SPGMMMGMFNMLSTV
SPGYMMAMINMISTV

SEQ ID NO: 201204 - protein, 15 aa, Artificial Sequence
  Description of Artificial Sequence: Synthetic peptide
  Seed: SPGMMMGMFNMLSTV
SPGYMMAMINMVSTV

SEQ ID NO: 201205 - protein, 15 aa, Artificial Sequence
  Description of Artificial Sequence: Synthetic peptide
  Seed: SPGMMMGMFNMLSTV
SPGYMMAMNNMASTV

SEQ ID NO: 201206 - protein, 15 aa, Artificial Sequence
  Description of Artificial Sequence: Synthetic peptide
  Seed: SPGMMMGMFNMLSTV
SPGYMMAMNNMFSTV

SEQ ID NO: 201207 - protein, 15 aa, Artificial Sequence
  Description of Artificial Sequence: Synthetic peptide
  Seed: SPGMMMGMFNMLSTV
SPGYMMAMNNMISTV

SEQ ID NO: 201208 - protein, 15 aa, Artificial Sequence
  Description of Artificial Sequence: Synthetic peptide
  Seed: SPGMMMGMFNMLSTV
SPGYMMAMNNMLSTV

SEQ ID NO: 201209 - protein, 15 aa, Artificial Sequence
  Description of Artificial Sequence: Synthetic peptide
  Seed: SPGMMMGMFNMLSTV
SPGYMMAMNNMMSTV

SEQ ID NO: 201210 - protein, 15 aa, Artificial Sequence
  Description of Artificial Sequence: Synthetic peptide
  Seed: SPGMMMGMFNMLSTV
SPGYMMAMNNMTSTV

SEQ ID NO: 201211 - protein, 15 aa, Artificial Sequence
  Description of Artificial Sequence: Synthetic peptide
  Seed: SPGMMMGMFNMLSTV
SPGYMMAMNNMVSTV

SEQ ID NO: 201212 - protein, 15 aa, Artificial Sequence
  Description of Artificial Sequence: Synthetic peptide
  Seed: SPGMMMGMFNMLSTV
SPGYMMAMNNMYSTV

SEQ ID NO: 201213 - protein, 15 aa, Artificial Sequence
  Description of Artificial Sequence: Synthetic peptide
  Seed: SPGMMMGMFNMLSTV
SPGYMMAMPNMASTV

SEQ ID NO: 201214 - protein, 15 aa, Artificial Sequence
  Description of Artificial Sequence: Synthetic peptide
  Seed: SPGMMMGMFNMLSTV
SPGYMMAMPNMFSTV

SEQ ID NO: 201215 - protein, 15 aa, Artificial Sequence
  Description of Artificial Sequence: Synthetic peptide
  Seed: SPGMMMGMFNMLSTV
SPGYMMAMPNMGSTV

SEQ ID NO: 201216 - protein, 15 aa, Artificial Sequence
  Description of Artificial Sequence: Synthetic peptide
  Seed: SPGMMMGMFNMLSTV
SPGYMMAMPNMISTV

SEQ ID NO: 201217 - protein, 15 aa, Artificial Sequence
  Description of Artificial Sequence: Synthetic peptide
  Seed: SPGMMMGMFNMLSTV
SPGYMMAMPNMLSTV

SEQ ID NO: 201218 - protein, 15 aa, Artificial Sequence
  Description of Artificial Sequence: Synthetic peptide
  Seed: SPGMMMGMFNMLSTV
SPGYMMAMPNMMSTV

SEQ ID NO: 201219 - protein, 15 aa, Artificial Sequence
  Description of Artificial Sequence: Synthetic peptide
  Seed: SPGMMMGMFNMLSTV
SPGYMMAMPNMNSTV

SEQ ID NO: 201220 - protein, 15 aa, Artificial Sequence
  Description of Artificial Sequence: Synthetic peptide
  Seed: SPGMMMGMFNMLSTV
SPGYMMAMPNMPSTV

SEQ ID NO: 201221 - protein, 15 aa, Artificial Sequence
  Description of Artificial Sequence: Synthetic peptide
  Seed: SPGMMMGMFNMLSTV
SPGYMMAMPNMSSTV

SEQ ID NO: 201222 - protein, 15 aa, Artificial Sequence
  Description of Artificial Sequence: Synthetic peptide
  Seed: SPGMMMGMFNMLSTV
SPGYMMAMPNMTSTV

SEQ ID NO: 201223 - protein, 15 aa, Artificial Sequence
  Description of Artificial Sequence: Synthetic peptide
  Seed: SPGMMMGMFNMLSTV
SPGYMMAMPNMVSTV

SEQ ID NO: 201224 - protein, 15 aa, Artificial Sequence
  Description of Artificial Sequence: Synthetic peptide
  Seed: SPGMMMGMFNMLSTV
SPGYMMAMPNMWSTV

SEQ ID NO: 201225 - protein, 15 aa, Artificial Sequence
  Description of Artificial Sequence: Synthetic peptide
  Seed: SPGMMMGMFNMLSTV
SPGYMMAMPNMYSTV

SEQ ID NO: 201226 - protein, 15 aa, Artificial Sequence
  Description of Artificial Sequence: Synthetic peptide
  Seed: SPGMMMGMFNMLSTV
SPGYMMAMQNMISTV

SEQ ID NO: 201227 - protein, 15 aa, Artificial Sequence
  Description of Artificial Sequence: Synthetic peptide
  Seed: SPGMMMGMFNMLSTV
SPGYMMAMQNMLSTV

SEQ ID NO: 201228 - protein, 15 aa, Artificial Sequence
  Description of Artificial Sequence: Synthetic peptide
  Seed: SPGMMMGMFNMLSTV
SPGYMMAMQNMVSTV

SEQ ID NO: 201229 - protein, 15 aa, Artificial Sequence
  Description of Artificial Sequence: Synthetic peptide
  Seed: SPGMMMGMFNMLSTV
SPGYMMAMSNMASTV

SEQ ID NO: 201230 - protein, 15 aa, Artificial Sequence
  Description of Artificial Sequence: Synthetic peptide
  Seed: SPGMMMGMFNMLSTV
SPGYMMAMSNMFSTV

SEQ ID NO: 201231 - protein, 15 aa, Artificial Sequence
  Description of Artificial Sequence: Synthetic peptide
  Seed: SPGMMMGMFNMLSTV
SPGYMMAMSNMGSTV

SEQ ID NO: 201232 - protein, 15 aa, Artificial Sequence
  Description of Artificial Sequence: Synthetic peptide
  Seed: SPGMMMGMFNMLSTV
SPGYMMAMSNMHSTV

SEQ ID NO: 201233 - protein, 15 aa, Artificial Sequence
  Description of Artificial Sequence: Synthetic peptide
  Seed: SPGMMMGMFNMLSTV
SPGYMMAMSNMISTV

SEQ ID NO: 201234 - protein, 15 aa, Artificial Sequence
  Description of Artificial Sequence: Synthetic peptide
  Seed: SPGMMMGMFNMLSTV
SPGYMMAMSNMLSTV

SEQ ID NO: 201235 - protein, 15 aa, Artificial Sequence
  Description of Artificial Sequence: Synthetic peptide
  Seed: SPGMMMGMFNMLSTV
SPGYMMAMSNMMSTV

SEQ ID NO: 201236 - protein, 15 aa, Artificial Sequence
  Description of Artificial Sequence: Synthetic peptide
  Seed: SPGMMMGMFNMLSTV
SPGYMMAMSNMNSTV

SEQ ID NO: 201237 - protein, 15 aa, Artificial Sequence
  Description of Artificial Sequence: Synthetic peptide
  Seed: SPGMMMGMFNMLSTV
SPGYMMAMSNMPSTV

SEQ ID NO: 201238 - protein, 15 aa, Artificial Sequence
  Description of Artificial Sequence: Synthetic peptide
  Seed: SPGMMMGMFNMLSTV
SPGYMMAMSNMSSTV

SEQ ID NO: 201239 - protein, 15 aa, Artificial Sequence
  Description of Artificial Sequence: Synthetic peptide
  Seed: SPGMMMGMFNMLSTV
SPGYMMAMSNMTSTV

SEQ ID NO: 201240 - protein, 15 aa, Artificial Sequence
  Description of Artificial Sequence: Synthetic peptide
  Seed: SPGMMMGMFNMLSTV
SPGYMMAMSNMVSTV

SEQ ID NO: 201241 - protein, 15 aa, Artificial Sequence
  Description of Artificial Sequence: Synthetic peptide
  Seed: SPGMMMGMFNMLSTV
SPGYMMAMSNMYSTV

SEQ ID NO: 201242 - protein, 15 aa, Artificial Sequence
  Description of Artificial Sequence: Synthetic peptide
  Seed: SPGMMMGMFNMLSTV
SPGYMMAMTNMASTV

SEQ ID NO: 201243 - protein, 15 aa, Artificial Sequence
  Description of Artificial Sequence: Synthetic peptide
  Seed: SPGMMMGMFNMLSTV
SPGYMMAMTNMFSTV

SEQ ID NO: 201244 - protein, 15 aa, Artificial Sequence
  Description of Artificial Sequence: Synthetic peptide
  Seed: SPGMMMGMFNMLSTV
SPGYMMAMTNMISTV

SEQ ID NO: 201245 - protein, 15 aa, Artificial Sequence
  Description of Artificial Sequence: Synthetic peptide
  Seed: SPGMMMGMFNMLSTV
SPGYMMAMTNMLSTV

SEQ ID NO: 201246 - protein, 15 aa, Artificial Sequence
  Description of Artificial Sequence: Synthetic peptide
  Seed: SPGMMMGMFNMLSTV
SPGYMMAMTNMMSTV

SEQ ID NO: 201247 - protein, 15 aa, Artificial Sequence
  Description of Artificial Sequence: Synthetic peptide
  Seed: SPGMMMGMFNMLSTV
SPGYMMAMTNMNSTV

SEQ ID NO: 201248 - protein, 15 aa, Artificial Sequence
  Description of Artificial Sequence: Synthetic peptide
  Seed: SPGMMMGMFNMLSTV
SPGYMMAMTNMSSTV

SEQ ID NO: 201249 - protein, 15 aa, Artificial Sequence
  Description of Artificial Sequence: Synthetic peptide
  Seed: SPGMMMGMFNMLSTV
SPGYMMAMTNMTSTV

SEQ ID NO: 201250 - protein, 15 aa, Artificial Sequence
  Description of Artificial Sequence: Synthetic peptide
  Seed: SPGMMMGMFNMLSTV
SPGYMMAMTNMVSTV

SEQ ID NO: 201251 - protein, 15 aa, Artificial Sequence
  Description of Artificial Sequence: Synthetic peptide
  Seed: SPGMMMGMFNMLSTV
SPGYMMAMTNMYSTV

SEQ ID NO: 201252 - protein, 15 aa, Artificial Sequence
  Description of Artificial Sequence: Synthetic peptide
  Seed: SPGMMMGMFNMLSTV
SPGYMMAMVNMASTV

SEQ ID NO: 201253 - protein, 15 aa, Artificial Sequence
  Description of Artificial Sequence: Synthetic peptide
  Seed: SPGMMMGMFNMLSTV
SPGYMMAMVNMISTV

SEQ ID NO: 201254 - protein, 15 aa, Artificial Sequence
  Description of Artificial Sequence: Synthetic peptide
  Seed: SPGMMMGMFNMLSTV
SPGYMMAMVNMLSTV

SEQ ID NO: 201255 - protein, 15 aa, Artificial Sequence
  Description of Artificial Sequence: Synthetic peptide
  Seed: SPGMMMGMFNMLSTV
SPGYMMAMVNMMSTV

SEQ ID NO: 201256 - protein, 15 aa, Artificial Sequence
  Description of Artificial Sequence: Synthetic peptide
  Seed: SPGMMMGMFNMLSTV
SPGYMMAMVNMSSTV

SEQ ID NO: 201257 - protein, 15 aa, Artificial Sequence
  Description of Artificial Sequence: Synthetic peptide
  Seed: SPGMMMGMFNMLSTV
SPGYMMAMVNMTSTV

SEQ ID NO: 201258 - protein, 15 aa, Artificial Sequence
  Description of Artificial Sequence: Synthetic peptide
  Seed: SPGMMMGMFNMLSTV
SPGYMMAMVNMVSTV

SEQ ID NO: 201259 - protein, 15 aa, Artificial Sequence
  Description of Artificial Sequence: Synthetic peptide
  Seed: SPGMMMGMFNMLSTV
SPGYMMAMWNMLSTV

SEQ ID NO: 201260 - protein, 15 aa, Artificial Sequence
  Description of Artificial Sequence: Synthetic peptide
  Seed: SPGMMMGMFNMLSTV
SPGYMMAMYNMFSTV

SEQ ID NO: 201261 - protein, 15 aa, Artificial Sequence
  Description of Artificial Sequence: Synthetic peptide
  Seed: SPGMMMGMFNMLSTV
SPGYMMAMYNMISTV

SEQ ID NO: 201262 - protein, 15 aa, Artificial Sequence
  Description of Artificial Sequence: Synthetic peptide
  Seed: SPGMMMGMFNMLSTV
SPGYMMAMYNMLSTV

SEQ ID NO: 201263 - protein, 15 aa, Artificial Sequence
  Description of Artificial Sequence: Synthetic peptide
  Seed: SPGMMMGMFNMLSTV
SPGYMMAMYNMVSTV

SEQ ID NO: 201264 - protein, 15 aa, Artificial Sequence
  Description of Artificial Sequence: Synthetic peptide
  Seed: SPGMMMGMFNMLSTV
SPGYMMCMANMISTV

SEQ ID NO: 201265 - protein, 15 aa, Artificial Sequence
  Description of Artificial Sequence: Synthetic peptide
  Seed: SPGMMMGMFNMLSTV
SPGYMMCMSNMISTV

SEQ ID NO: 201266 - protein, 15 aa, Artificial Sequence
  Description of Artificial Sequence: Synthetic peptide
  Seed: SPGMMMGMFNMLSTV
SPGYMMCMSNMVSTV

SEQ ID NO: 201267 - protein, 15 aa, Artificial Sequence
  Description of Artificial Sequence: Synthetic peptide
  Seed: SPGMMMGMFNMLSTV
SPGYMMDMANMISTV

SEQ ID NO: 201268 - protein, 15 aa, Artificial Sequence
  Description of Artificial Sequence: Synthetic peptide
  Seed: SPGMMMGMFNMLSTV
SPGYMMDMANMLSTV

SEQ ID NO: 201269 - protein, 15 aa, Artificial Sequence
  Description of Artificial Sequence: Synthetic peptide
  Seed: SPGMMMGMFNMLSTV
SPGYMMDMANMVSTV

SEQ ID NO: 201270 - protein, 15 aa, Artificial Sequence
  Description of Artificial Sequence: Synthetic peptide
  Seed: SPGMMMGMFNMLSTV
SPGYMMDMFNMFSTV

SEQ ID NO: 201271 - protein, 15 aa, Artificial Sequence
  Description of Artificial Sequence: Synthetic peptide
  Seed: SPGMMMGMFNMLSTV
SPGYMMDMFNMISTV

SEQ ID NO: 201272 - protein, 15 aa, Artificial Sequence
  Description of Artificial Sequence: Synthetic peptide
  Seed: SPGMMMGMFNMLSTV
SPGYMMDMFNMLSTV

SEQ ID NO: 201273 - protein, 15 aa, Artificial Sequence
  Description of Artificial Sequence: Synthetic peptide
  Seed: SPGMMMGMFNMLSTV
SPGYMMDMFNMMSTV

SEQ ID NO: 201274 - protein, 15 aa, Artificial Sequence
  Description of Artificial Sequence: Synthetic peptide
  Seed: SPGMMMGMFNMLSTV
SPGYMMDMFNMVSTV

SEQ ID NO: 201275 - protein, 15 aa, Artificial Sequence
  Description of Artificial Sequence: Synthetic peptide
  Seed: SPGMMMGMFNMLSTV
SPGYMMDMNNMISTV

SEQ ID NO: 201276 - protein, 15 aa, Artificial Sequence
  Description of Artificial Sequence: Synthetic peptide
  Seed: SPGMMMGMFNMLSTV
SPGYMMDMNNMLSTV

SEQ ID NO: 201277 - protein, 15 aa, Artificial Sequence
  Description of Artificial Sequence: Synthetic peptide
  Seed: SPGMMMGMFNMLSTV
SPGYMMDMNNMVSTV

SEQ ID NO: 201278 - protein, 15 aa, Artificial Sequence
  Description of Artificial Sequence: Synthetic peptide
  Seed: SPGMMMGMFNMLSTV
SPGYMMDMPNMISTV

SEQ ID NO: 201279 - protein, 15 aa, Artificial Sequence
  Description of Artificial Sequence: Synthetic peptide
  Seed: SPGMMMGMFNMLSTV
SPGYMMDMSNMISTV

SEQ ID NO: 201280 - protein, 15 aa, Artificial Sequence
  Description of Artificial Sequence: Synthetic peptide
  Seed: SPGMMMGMFNMLSTV
SPGYMMDMSNMVSTV

SEQ ID NO: 201281 - protein, 15 aa, Artificial Sequence
  Description of Artificial Sequence: Synthetic peptide
  Seed: SPGMMMGMFNMLSTV
SPGYMMDMTNMISTV

SEQ ID NO: 201282 - protein, 15 aa, Artificial Sequence
  Description of Artificial Sequence: Synthetic peptide
  Seed: SPGMMMGMFNMLSTV
SPGYMMEMFNMASTV

SEQ ID NO: 201283 - protein, 15 aa, Artificial Sequence
  Description of Artificial Sequence: Synthetic peptide
  Seed: SPGMMMGMFNMLSTV
SPGYMMEMFNMESTV

SEQ ID NO: 201284 - protein, 15 aa, Artificial Sequence
  Description of Artificial Sequence: Synthetic peptide
  Seed: SPGMMMGMFNMLSTV
SPGYMMEMFNMFSTV

SEQ ID NO: 201285 - protein, 15 aa, Artificial Sequence
  Description of Artificial Sequence: Synthetic peptide
  Seed: SPGMMMGMFNMLSTV
SPGYMMEMFNMISTV

SEQ ID NO: 201286 - protein, 15 aa, Artificial Sequence
  Description of Artificial Sequence: Synthetic peptide
  Seed: SPGMMMGMFNMLSTV
SPGYMMEMFNMLSTV

SEQ ID NO: 201287 - protein, 15 aa, Artificial Sequence
  Description of Artificial Sequence: Synthetic peptide
  Seed: SPGMMMGMFNMLSTV
SPGYMMEMFNMMSTV

SEQ ID NO: 201288 - protein, 15 aa, Artificial Sequence
  Description of Artificial Sequence: Synthetic peptide
  Seed: SPGMMMGMFNMLSTV
SPGYMMEMFNMTSTV

SEQ ID NO: 201289 - protein, 15 aa, Artificial Sequence
  Description of Artificial Sequence: Synthetic peptide
  Seed: SPGMMMGMFNMLSTV
SPGYMMEMFNMVSTV

SEQ ID NO: 201290 - protein, 15 aa, Artificial Sequence
  Description of Artificial Sequence: Synthetic peptide
  Seed: SPGMMMGMFNMLSTV
SPGYMMEMFNMYSTV

SEQ ID NO: 201291 - protein, 15 aa, Artificial Sequence
  Description of Artificial Sequence: Synthetic peptide
  Seed: SPGMMMGMFNMLSTV
SPGYMMEMWNMLSTV

SEQ ID NO: 201292 - protein, 15 aa, Artificial Sequence
  Description of Artificial Sequence: Synthetic peptide
  Seed: SPGMMMGMFNMLSTV
SPGYMMEMYNMFSTV

SEQ ID NO: 201293 - protein, 15 aa, Artificial Sequence
  Description of Artificial Sequence: Synthetic peptide
  Seed: SPGMMMGMFNMLSTV
SPGYMMEMYNMISTV

SEQ ID NO: 201294 - protein, 15 aa, Artificial Sequence
  Description of Artificial Sequence: Synthetic peptide
  Seed: SPGMMMGMFNMLSTV
SPGYMMEMYNMLSTV

SEQ ID NO: 201295 - protein, 15 aa, Artificial Sequence
  Description of Artificial Sequence: Synthetic peptide
  Seed: SPGMMMGMFNMLSTV
SPGYMMEMYNMVSTV

SEQ ID NO: 201296 - protein, 15 aa, Artificial Sequence
  Description of Artificial Sequence: Synthetic peptide
  Seed: SPGMMMGMFNMLSTV
SPGYMMFMANMASTV

SEQ ID NO: 201297 - protein, 15 aa, Artificial Sequence
  Description of Artificial Sequence: Synthetic peptide
  Seed: SPGMMMGMFNMLSTV
SPGYMMFMANMISTV

SEQ ID NO: 201298 - protein, 15 aa, Artificial Sequence
  Description of Artificial Sequence: Synthetic peptide
  Seed: SPGMMMGMFNMLSTV
SPGYMMFMANMLSTV

SEQ ID NO: 201299 - protein, 15 aa, Artificial Sequence
  Description of Artificial Sequence: Synthetic peptide
  Seed: SPGMMMGMFNMLSTV
SPGYMMFMANMMSTV

SEQ ID NO: 201300 - protein, 15 aa, Artificial Sequence
  Description of Artificial Sequence: Synthetic peptide
  Seed: SPGMMMGMFNMLSTV
SPGYMMFMANMSSTV

SEQ ID NO: 201301 - protein, 15 aa, Artificial Sequence
  Description of Artificial Sequence: Synthetic peptide
  Seed: SPGMMMGMFNMLSTV
SPGYMMFMANMTSTV

SEQ ID NO: 201302 - protein, 15 aa, Artificial Sequence
  Description of Artificial Sequence: Synthetic peptide
  Seed: SPGMMMGMFNMLSTV
SPGYMMFMANMVSTV

SEQ ID NO: 201303 - protein, 15 aa, Artificial Sequence
  Description of Artificial Sequence: Synthetic peptide
  Seed: SPGMMMGMFNMLSTV
SPGYMMFMFNMASTV

SEQ ID NO: 201304 - protein, 15 aa, Artificial Sequence
  Description of Artificial Sequence: Synthetic peptide
  Seed: SPGMMMGMFNMLSTV
SPGYMMFMFNMESTV

SEQ ID NO: 201305 - protein, 15 aa, Artificial Sequence
  Description of Artificial Sequence: Synthetic peptide
  Seed: SPGMMMGMFNMLSTV
SPGYMMFMFNMFSTV

SEQ ID NO: 201306 - protein, 15 aa, Artificial Sequence
  Description of Artificial Sequence: Synthetic peptide
  Seed: SPGMMMGMFNMLSTV
SPGYMMFMFNMISTV

SEQ ID NO: 201307 - protein, 15 aa, Artificial Sequence
  Description of Artificial Sequence: Synthetic peptide
  Seed: SPGMMMGMFNMLSTV
SPGYMMFMFNMLSTV

SEQ ID NO: 201308 - protein, 15 aa, Artificial Sequence
  Description of Artificial Sequence: Synthetic peptide
  Seed: SPGMMMGMFNMLSTV
SPGYMMFMFNMMSTV

SEQ ID NO: 201309 - protein, 15 aa, Artificial Sequence
  Description of Artificial Sequence: Synthetic peptide
  Seed: SPGMMMGMFNMLSTV
SPGYMMFMFNMVSTV

SEQ ID NO: 201310 - protein, 15 aa, Artificial Sequence
  Description of Artificial Sequence: Synthetic peptide
  Seed: SPGMMMGMFNMLSTV
SPGYMMFMFNMYSTV

SEQ ID NO: 201311 - protein, 15 aa, Artificial Sequence
  Description of Artificial Sequence: Synthetic peptide
  Seed: SPGMMMGMFNMLSTV
SPGYMMFMGNMISTV

SEQ ID NO: 201312 - protein, 15 aa, Artificial Sequence
  Description of Artificial Sequence: Synthetic peptide
  Seed: SPGMMMGMFNMLSTV
SPGYMMFMGNMVSTV

SEQ ID NO: 201313 - protein, 15 aa, Artificial Sequence
  Description of Artificial Sequence: Synthetic peptide
  Seed: SPGMMMGMFNMLSTV
SPGYMMFMHNMASTV

SEQ ID NO: 201314 - protein, 15 aa, Artificial Sequence
  Description of Artificial Sequence: Synthetic peptide
  Seed: SPGMMMGMFNMLSTV
SPGYMMFMINMLSTV

SEQ ID NO: 201315 - protein, 15 aa, Artificial Sequence
  Description of Artificial Sequence: Synthetic peptide
  Seed: SPGMMMGMFNMLSTV
SPGYMMFMINMYSTV

SEQ ID NO: 201316 - protein, 15 aa, Artificial Sequence
  Description of Artificial Sequence: Synthetic peptide
  Seed: SPGMMMGMFNMLSTV
SPGYMMFMKNMASTV

SEQ ID NO: 201317 - protein, 15 aa, Artificial Sequence
  Description of Artificial Sequence: Synthetic peptide
  Seed: SPGMMMGMFNMLSTV
SPGYMMFMKNMNSTV

SEQ ID NO: 201318 - protein, 15 aa, Artificial Sequence
  Description of Artificial Sequence: Synthetic peptide
  Seed: SPGMMMGMFNMLSTV
SPGYMMFMKNMSSTV

SEQ ID NO: 201319 - protein, 15 aa, Artificial Sequence
  Description of Artificial Sequence: Synthetic peptide
  Seed: SPGMMMGMFNMLSTV
SPGYMMFMKNMVSTV

SEQ ID NO: 201320 - protein, 15 aa, Artificial Sequence
  Description of Artificial Sequence: Synthetic peptide
  Seed: SPGMMMGMFNMLSTV
SPGYMMFMLNMLSTV

SEQ ID NO: 201321 - protein, 15 aa, Artificial Sequence
  Description of Artificial Sequence: Synthetic peptide
  Seed: SPGMMMGMFNMLSTV
SPGYMMFMLNMYSTV

SEQ ID NO: 201322 - protein, 15 aa, Artificial Sequence
  Description of Artificial Sequence: Synthetic peptide
  Seed: SPGMMMGMFNMLSTV
SPGYMMFMMNMLSTV

SEQ ID NO: 201323 - protein, 15 aa, Artificial Sequence
  Description of Artificial Sequence: Synthetic peptide
  Seed: SPGMMMGMFNMLSTV
SPGYMMFMNNMASTV

SEQ ID NO: 201324 - protein, 15 aa, Artificial Sequence
  Description of Artificial Sequence: Synthetic peptide
  Seed: SPGMMMGMFNMLSTV
SPGYMMFMNNMISTV

SEQ ID NO: 201325 - protein, 15 aa, Artificial Sequence
  Description of Artificial Sequence: Synthetic peptide
  Seed: SPGMMMGMFNMLSTV
SPGYMMFMNNMLSTV

SEQ ID NO: 201326 - protein, 15 aa, Artificial Sequence
  Description of Artificial Sequence: Synthetic peptide
  Seed: SPGMMMGMFNMLSTV
SPGYMMFMNNMMSTV

SEQ ID NO: 201327 - protein, 15 aa, Artificial Sequence
  Description of Artificial Sequence: Synthetic peptide
  Seed: SPGMMMGMFNMLSTV
SPGYMMFMNNMSSTV

SEQ ID NO: 201328 - protein, 15 aa, Artificial Sequence
  Description of Artificial Sequence: Synthetic peptide
  Seed: SPGMMMGMFNMLSTV
SPGYMMFMNNMTSTV

SEQ ID NO: 201329 - protein, 15 aa, Artificial Sequence
  Description of Artificial Sequence: Synthetic peptide
  Seed: SPGMMMGMFNMLSTV
SPGYMMFMNNMVSTV

SEQ ID NO: 201330 - protein, 15 aa, Artificial Sequence
  Description of Artificial Sequence: Synthetic peptide
  Seed: SPGMMMGMFNMLSTV
SPGYMMFMNNMYSTV

SEQ ID NO: 201331 - protein, 15 aa, Artificial Sequence
  Description of Artificial Sequence: Synthetic peptide
  Seed: SPGMMMGMFNMLSTV
SPGYMMFMPNMASTV

SEQ ID NO: 201332 - protein, 15 aa, Artificial Sequence
  Description of Artificial Sequence: Synthetic peptide
  Seed: SPGMMMGMFNMLSTV
SPGYMMFMPNMISTV

SEQ ID NO: 201333 - protein, 15 aa, Artificial Sequence
  Description of Artificial Sequence: Synthetic peptide
  Seed: SPGMMMGMFNMLSTV
SPGYMMFMPNMLSTV

SEQ ID NO: 201334 - protein, 15 aa, Artificial Sequence
  Description of Artificial Sequence: Synthetic peptide
  Seed: SPGMMMGMFNMLSTV
SPGYMMFMPNMMSTV

SEQ ID NO: 201335 - protein, 15 aa, Artificial Sequence
  Description of Artificial Sequence: Synthetic peptide
  Seed: SPGMMMGMFNMLSTV
SPGYMMFMPNMVSTV

SEQ ID NO: 201336 - protein, 15 aa, Artificial Sequence
  Description of Artificial Sequence: Synthetic peptide
  Seed: SPGMMMGMFNMLSTV
SPGYMMFMRNMASTV

SEQ ID NO: 201337 - protein, 15 aa, Artificial Sequence
  Description of Artificial Sequence: Synthetic peptide
  Seed: SPGMMMGMFNMLSTV
SPGYMMFMRNMGSTV

SEQ ID NO: 201338 - protein, 15 aa, Artificial Sequence
  Description of Artificial Sequence: Synthetic peptide
  Seed: SPGMMMGMFNMLSTV
SPGYMMFMRNMISTV

SEQ ID NO: 201339 - protein, 15 aa, Artificial Sequence
  Description of Artificial Sequence: Synthetic peptide
  Seed: SPGMMMGMFNMLSTV
SPGYMMFMRNMNSTV

SEQ ID NO: 201340 - protein, 15 aa, Artificial Sequence
  Description of Artificial Sequence: Synthetic peptide
  Seed: SPGMMMGMFNMLSTV
SPGYMMFMRNMSSTV

SEQ ID NO: 201341 - protein, 15 aa, Artificial Sequence
  Description of Artificial Sequence: Synthetic peptide
  Seed: SPGMMMGMFNMLSTV
SPGYMMFMRNMTSTV

SEQ ID NO: 201342 - protein, 15 aa, Artificial Sequence
  Description of Artificial Sequence: Synthetic peptide
  Seed: SPGMMMGMFNMLSTV
SPGYMMFMRNMVSTV

SEQ ID NO: 201343 - protein, 15 aa, Artificial Sequence
  Description of Artificial Sequence: Synthetic peptide
  Seed: SPGMMMGMFNMLSTV
SPGYMMFMSNMASTV

SEQ ID NO: 201344 - protein, 15 aa, Artificial Sequence
  Description of Artificial Sequence: Synthetic peptide
  Seed: SPGMMMGMFNMLSTV
SPGYMMFMSNMGSTV

SEQ ID NO: 201345 - protein, 15 aa, Artificial Sequence
  Description of Artificial Sequence: Synthetic peptide
  Seed: SPGMMMGMFNMLSTV
SPGYMMFMSNMISTV

SEQ ID NO: 201346 - protein, 15 aa, Artificial Sequence
  Description of Artificial Sequence: Synthetic peptide
  Seed: SPGMMMGMFNMLSTV
SPGYMMFMSNMLSTV

SEQ ID NO: 201347 - protein, 15 aa, Artificial Sequence
  Description of Artificial Sequence: Synthetic peptide
  Seed: SPGMMMGMFNMLSTV
SPGYMMFMSNMMSTV

SEQ ID NO: 201348 - protein, 15 aa, Artificial Sequence
  Description of Artificial Sequence: Synthetic peptide
  Seed: SPGMMMGMFNMLSTV
SPGYMMFMSNMSSTV

SEQ ID NO: 201349 - protein, 15 aa, Artificial Sequence
  Description of Artificial Sequence: Synthetic peptide
  Seed: SPGMMMGMFNMLSTV
SPGYMMFMSNMTSTV

SEQ ID NO: 201350 - protein, 15 aa, Artificial Sequence
  Description of Artificial Sequence: Synthetic peptide
  Seed: SPGMMMGMFNMLSTV
SPGYMMFMSNMVSTV

SEQ ID NO: 201351 - protein, 15 aa, Artificial Sequence
  Description of Artificial Sequence: Synthetic peptide
  Seed: SPGMMMGMFNMLSTV
SPGYMMFMTNMASTV

SEQ ID NO: 201352 - protein, 15 aa, Artificial Sequence
  Description of Artificial Sequence: Synthetic peptide
  Seed: SPGMMMGMFNMLSTV
SPGYMMFMTNMISTV

SEQ ID NO: 201353 - protein, 15 aa, Artificial Sequence
  Description of Artificial Sequence: Synthetic peptide
  Seed: SPGMMMGMFNMLSTV
SPGYMMFMTNMLSTV

SEQ ID NO: 201354 - protein, 15 aa, Artificial Sequence
  Description of Artificial Sequence: Synthetic peptide
  Seed: SPGMMMGMFNMLSTV
SPGYMMFMTNMVSTV

SEQ ID NO: 201355 - protein, 15 aa, Artificial Sequence
  Description of Artificial Sequence: Synthetic peptide
  Seed: SPGMMMGMFNMLSTV
SPGYMMFMWNMFSTV

SEQ ID NO: 201356 - protein, 15 aa, Artificial Sequence
  Description of Artificial Sequence: Synthetic peptide
  Seed: SPGMMMGMFNMLSTV
SPGYMMFMWNMISTV

SEQ ID NO: 201357 - protein, 15 aa, Artificial Sequence
  Description of Artificial Sequence: Synthetic peptide
  Seed: SPGMMMGMFNMLSTV
SPGYMMFMWNMLSTV

SEQ ID NO: 201358 - protein, 15 aa, Artificial Sequence
  Description of Artificial Sequence: Synthetic peptide
  Seed: SPGMMMGMFNMLSTV
SPGYMMFMWNMMSTV

SEQ ID NO: 201359 - protein, 15 aa, Artificial Sequence
  Description of Artificial Sequence: Synthetic peptide
  Seed: SPGMMMGMFNMLSTV
SPGYMMFMWNMVSTV

SEQ ID NO: 201360 - protein, 15 aa, Artificial Sequence
  Description of Artificial Sequence: Synthetic peptide
  Seed: SPGMMMGMFNMLSTV
SPGYMMFMWNMYSTV

SEQ ID NO: 201361 - protein, 15 aa, Artificial Sequence
  Description of Artificial Sequence: Synthetic peptide
  Seed: SPGMMMGMFNMLSTV
SPGYMMFMYNMASTV

SEQ ID NO: 201362 - protein, 15 aa, Artificial Sequence
  Description of Artificial Sequence: Synthetic peptide
  Seed: SPGMMMGMFNMLSTV
SPGYMMFMYNMFSTV

SEQ ID NO: 201363 - protein, 15 aa, Artificial Sequence
  Description of Artificial Sequence: Synthetic peptide
  Seed: SPGMMMGMFNMLSTV
SPGYMMFMYNMISTV

SEQ ID NO: 201364 - protein, 15 aa, Artificial Sequence
  Description of Artificial Sequence: Synthetic peptide
  Seed: SPGMMMGMFNMLSTV
SPGYMMFMYNMLSTV

SEQ ID NO: 201365 - protein, 15 aa, Artificial Sequence
  Description of Artificial Sequence: Synthetic peptide
  Seed: SPGMMMGMFNMLSTV
SPGYMMFMYNMMSTV

SEQ ID NO: 201366 - protein, 15 aa, Artificial Sequence
  Description of Artificial Sequence: Synthetic peptide
  Seed: SPGMMMGMFNMLSTV
SPGYMMFMYNMVSTV

SEQ ID NO: 201367 - protein, 15 aa, Artificial Sequence
  Description of Artificial Sequence: Synthetic peptide
  Seed: SPGMMMGMFNMLSTV
SPGYMMGMANMASTV

SEQ ID NO: 201368 - protein, 15 aa, Artificial Sequence
  Description of Artificial Sequence: Synthetic peptide
  Seed: SPGMMMGMFNMLSTV
SPGYMMGMANMFSTV

SEQ ID NO: 201369 - protein, 15 aa, Artificial Sequence
  Description of Artificial Sequence: Synthetic peptide
  Seed: SPGMMMGMFNMLSTV
SPGYMMGMANMISTV

SEQ ID NO: 201370 - protein, 15 aa, Artificial Sequence
  Description of Artificial Sequence: Synthetic peptide
  Seed: SPGMMMGMFNMLSTV
SPGYMMGMANMLSTV

SEQ ID NO: 201371 - protein, 15 aa, Artificial Sequence
  Description of Artificial Sequence: Synthetic peptide
  Seed: SPGMMMGMFNMLSTV
SPGYMMGMANMMSTV

SEQ ID NO: 201372 - protein, 15 aa, Artificial Sequence
  Description of Artificial Sequence: Synthetic peptide
  Seed: SPGMMMGMFNMLSTV
SPGYMMGMANMSSTV

SEQ ID NO: 201373 - protein, 15 aa, Artificial Sequence
  Description of Artificial Sequence: Synthetic peptide
  Seed: SPGMMMGMFNMLSTV
SPGYMMGMANMTSTV

SEQ ID NO: 201374 - protein, 15 aa, Artificial Sequence
  Description of Artificial Sequence: Synthetic peptide
  Seed: SPGMMMGMFNMLSTV
SPGYMMGMANMVSTV

SEQ ID NO: 201375 - protein, 15 aa, Artificial Sequence
  Description of Artificial Sequence: Synthetic peptide
  Seed: SPGMMMGMFNMLSTV
SPGYMMGMANMYSTV

SEQ ID NO: 201376 - protein, 15 aa, Artificial Sequence
  Description of Artificial Sequence: Synthetic peptide
  Seed: SPGMMMGMFNMLSTV
SPGYMMGMFNMISTV

SEQ ID NO: 201377 - protein, 15 aa, Artificial Sequence
  Description of Artificial Sequence: Synthetic peptide
  Seed: SPGMMMGMFNMLSTV
SPGYMMGMFNMLSTV

SEQ ID NO: 201378 - protein, 15 aa, Artificial Sequence
  Description of Artificial Sequence: Synthetic peptide
  Seed: SPGMMMGMFNMLSTV
SPGYMMGMFNMVSTV

SEQ ID NO: 201379 - protein, 15 aa, Artificial Sequence
  Description of Artificial Sequence: Synthetic peptide
  Seed: SPGMMMGMFNMLSTV
SPGYMMGMGNMASTV

SEQ ID NO: 201380 - protein, 15 aa, Artificial Sequence
  Description of Artificial Sequence: Synthetic peptide
  Seed: SPGMMMGMFNMLSTV
SPGYMMGMGNMFSTV

SEQ ID NO: 201381 - protein, 15 aa, Artificial Sequence
  Description of Artificial Sequence: Synthetic peptide
  Seed: SPGMMMGMFNMLSTV
SPGYMMGMGNMISTV

SEQ ID NO: 201382 - protein, 15 aa, Artificial Sequence
  Description of Artificial Sequence: Synthetic peptide
  Seed: SPGMMMGMFNMLSTV
SPGYMMGMGNMLSTV

SEQ ID NO: 201383 - protein, 15 aa, Artificial Sequence
  Description of Artificial Sequence: Synthetic peptide
  Seed: SPGMMMGMFNMLSTV
SPGYMMGMGNMMSTV

SEQ ID NO: 201384 - protein, 15 aa, Artificial Sequence
  Description of Artificial Sequence: Synthetic peptide
  Seed: SPGMMMGMFNMLSTV
SPGYMMGMGNMVSTV

SEQ ID NO: 201385 - protein, 15 aa, Artificial Sequence
  Description of Artificial Sequence: Synthetic peptide
  Seed: SPGMMMGMFNMLSTV
SPGYMMGMNNMISTV

SEQ ID NO: 201386 - protein, 15 aa, Artificial Sequence
  Description of Artificial Sequence: Synthetic peptide
  Seed: SPGMMMGMFNMLSTV
SPGYMMGMNNMLSTV

SEQ ID NO: 201387 - protein, 15 aa, Artificial Sequence
  Description of Artificial Sequence: Synthetic peptide
  Seed: SPGMMMGMFNMLSTV
SPGYMMGMNNMVSTV

SEQ ID NO: 201388 - protein, 15 aa, Artificial Sequence
  Description of Artificial Sequence: Synthetic peptide
  Seed: SPGMMMGMFNMLSTV
SPGYMMGMPNMFSTV

SEQ ID NO: 201389 - protein, 15 aa, Artificial Sequence
  Description of Artificial Sequence: Synthetic peptide
  Seed: SPGMMMGMFNMLSTV
SPGYMMGMPNMISTV

SEQ ID NO: 201390 - protein, 15 aa, Artificial Sequence
  Description of Artificial Sequence: Synthetic peptide
  Seed: SPGMMMGMFNMLSTV
SPGYMMGMPNMLSTV

SEQ ID NO: 201391 - protein, 15 aa, Artificial Sequence
  Description of Artificial Sequence: Synthetic peptide
  Seed: SPGMMMGMFNMLSTV
SPGYMMGMPNMMSTV

SEQ ID NO: 201392 - protein, 15 aa, Artificial Sequence
  Description of Artificial Sequence: Synthetic peptide
  Seed: SPGMMMGMFNMLSTV
SPGYMMGMPNMVSTV

SEQ ID NO: 201393 - protein, 15 aa, Artificial Sequence
  Description of Artificial Sequence: Synthetic peptide
  Seed: SPGMMMGMFNMLSTV
SPGYMMGMSNMASTV

SEQ ID NO: 201394 - protein, 15 aa, Artificial Sequence
  Description of Artificial Sequence: Synthetic peptide
  Seed: SPGMMMGMFNMLSTV
SPGYMMGMSNMFSTV

SEQ ID NO: 201395 - protein, 15 aa, Artificial Sequence
  Description of Artificial Sequence: Synthetic peptide
  Seed: SPGMMMGMFNMLSTV
SPGYMMGMSNMISTV

SEQ ID NO: 201396 - protein, 15 aa, Artificial Sequence
  Description of Artificial Sequence: Synthetic peptide
  Seed: SPGMMMGMFNMLSTV
SPGYMMGMSNMLSTV

SEQ ID NO: 201397 - protein, 15 aa, Artificial Sequence
  Description of Artificial Sequence: Synthetic peptide
  Seed: SPGMMMGMFNMLSTV
SPGYMMGMSNMMSTV

SEQ ID NO: 201398 - protein, 15 aa, Artificial Sequence
  Description of Artificial Sequence: Synthetic peptide
  Seed: SPGMMMGMFNMLSTV
SPGYMMGMSNMTSTV

SEQ ID NO: 201399 - protein, 15 aa, Artificial Sequence
  Description of Artificial Sequence: Synthetic peptide
  Seed: SPGMMMGMFNMLSTV
SPGYMMGMSNMVSTV

SEQ ID NO: 201400 - protein, 15 aa, Artificial Sequence
  Description of Artificial Sequence: Synthetic peptide
  Seed: SPGMMMGMFNMLSTV
SPGYMMGMSNMYSTV

SEQ ID NO: 201401 - protein, 15 aa, Artificial Sequence
  Description of Artificial Sequence: Synthetic peptide
  Seed: SPGMMMGMFNMLSTV
SPGYMMGMTNMISTV

SEQ ID NO: 201402 - protein, 15 aa, Artificial Sequence
  Description of Artificial Sequence: Synthetic peptide
  Seed: SPGMMMGMFNMLSTV
SPGYMMGMTNMLSTV

SEQ ID NO: 201403 - protein, 15 aa, Artificial Sequence
  Description of Artificial Sequence: Synthetic peptide
  Seed: SPGMMMGMFNMLSTV
SPGYMMGMTNMMSTV

SEQ ID NO: 201404 - protein, 15 aa, Artificial Sequence
  Description of Artificial Sequence: Synthetic peptide
  Seed: SPGMMMGMFNMLSTV
SPGYMMGMTNMVSTV

SEQ ID NO: 201405 - protein, 15 aa, Artificial Sequence
  Description of Artificial Sequence: Synthetic peptide
  Seed: SPGMMMGMFNMLSTV
SPGYMMGMVNMISTV

SEQ ID NO: 201406 - protein, 15 aa, Artificial Sequence
  Description of Artificial Sequence: Synthetic peptide
  Seed: SPGMMMGMFNMLSTV
SPGYMMGMVNMLSTV

SEQ ID NO: 201407 - protein, 15 aa, Artificial Sequence
  Description of Artificial Sequence: Synthetic peptide
  Seed: SPGMMMGMFNMLSTV
SPGYMMGMVNMMSTV

SEQ ID NO: 201408 - protein, 15 aa, Artificial Sequence
  Description of Artificial Sequence: Synthetic peptide
  Seed: SPGMMMGMFNMLSTV
SPGYMMGMVNMVSTV

SEQ ID NO: 201409 - protein, 15 aa, Artificial Sequence
  Description of Artificial Sequence: Synthetic peptide
  Seed: SPGMMMGMFNMLSTV
SPGYMMHMANMASTV

SEQ ID NO: 201410 - protein, 15 aa, Artificial Sequence
  Description of Artificial Sequence: Synthetic peptide
  Seed: SPGMMMGMFNMLSTV
SPGYMMHMANMFSTV

SEQ ID NO: 201411 - protein, 15 aa, Artificial Sequence
  Description of Artificial Sequence: Synthetic peptide
  Seed: SPGMMMGMFNMLSTV
SPGYMMHMANMISTV

SEQ ID NO: 201412 - protein, 15 aa, Artificial Sequence
  Description of Artificial Sequence: Synthetic peptide
  Seed: SPGMMMGMFNMLSTV
SPGYMMHMANMLSTV

SEQ ID NO: 201413 - protein, 15 aa, Artificial Sequence
  Description of Artificial Sequence: Synthetic peptide
  Seed: SPGMMMGMFNMLSTV
SPGYMMHMANMMSTV

SEQ ID NO: 201414 - protein, 15 aa, Artificial Sequence
  Description of Artificial Sequence: Synthetic peptide
  Seed: SPGMMMGMFNMLSTV
SPGYMMHMANMVSTV

SEQ ID NO: 201415 - protein, 15 aa, Artificial Sequence
  Description of Artificial Sequence: Synthetic peptide
  Seed: SPGMMMGMFNMLSTV
SPGYMMHMFNMASTV

SEQ ID NO: 201416 - protein, 15 aa, Artificial Sequence
  Description of Artificial Sequence: Synthetic peptide
  Seed: SPGMMMGMFNMLSTV
SPGYMMHMFNMDSTV

SEQ ID NO: 201417 - protein, 15 aa, Artificial Sequence
  Description of Artificial Sequence: Synthetic peptide
  Seed: SPGMMMGMFNMLSTV
SPGYMMHMFNMESTV

SEQ ID NO: 201418 - protein, 15 aa, Artificial Sequence
  Description of Artificial Sequence: Synthetic peptide
  Seed: SPGMMMGMFNMLSTV
SPGYMMHMFNMFSTV

SEQ ID NO: 201419 - protein, 15 aa, Artificial Sequence
  Description of Artificial Sequence: Synthetic peptide
  Seed: SPGMMMGMFNMLSTV
SPGYMMHMFNMISTV

SEQ ID NO: 201420 - protein, 15 aa, Artificial Sequence
  Description of Artificial Sequence: Synthetic peptide
  Seed: SPGMMMGMFNMLSTV
SPGYMMHMFNMLSTV

SEQ ID NO: 201421 - protein, 15 aa, Artificial Sequence
  Description of Artificial Sequence: Synthetic peptide
  Seed: SPGMMMGMFNMLSTV
SPGYMMHMFNMMSTV

SEQ ID NO: 201422 - protein, 15 aa, Artificial Sequence
  Description of Artificial Sequence: Synthetic peptide
  Seed: SPGMMMGMFNMLSTV
SPGYMMHMFNMNSTV

SEQ ID NO: 201423 - protein, 15 aa, Artificial Sequence
  Description of Artificial Sequence: Synthetic peptide
  Seed: SPGMMMGMFNMLSTV
SPGYMMHMFNMSSTV

SEQ ID NO: 201424 - protein, 15 aa, Artificial Sequence
  Description of Artificial Sequence: Synthetic peptide
  Seed: SPGMMMGMFNMLSTV
SPGYMMHMFNMTSTV

SEQ ID NO: 201425 - protein, 15 aa, Artificial Sequence
  Description of Artificial Sequence: Synthetic peptide
  Seed: SPGMMMGMFNMLSTV
SPGYMMHMFNMVSTV

SEQ ID NO: 201426 - protein, 15 aa, Artificial Sequence
  Description of Artificial Sequence: Synthetic peptide
  Seed: SPGMMMGMFNMLSTV
SPGYMMHMFNMYSTV

SEQ ID NO: 201427 - protein, 15 aa, Artificial Sequence
  Description of Artificial Sequence: Synthetic peptide
  Seed: SPGMMMGMFNMLSTV
SPGYMMHMGNMISTV

SEQ ID NO: 201428 - protein, 15 aa, Artificial Sequence
  Description of Artificial Sequence: Synthetic peptide
  Seed: SPGMMMGMFNMLSTV
SPGYMMHMGNMLSTV

SEQ ID NO: 201429 - protein, 15 aa, Artificial Sequence
  Description of Artificial Sequence: Synthetic peptide
  Seed: SPGMMMGMFNMLSTV
SPGYMMHMGNMMSTV

SEQ ID NO: 201430 - protein, 15 aa, Artificial Sequence
  Description of Artificial Sequence: Synthetic peptide
  Seed: SPGMMMGMFNMLSTV
SPGYMMHMGNMVSTV

SEQ ID NO: 201431 - protein, 15 aa, Artificial Sequence
  Description of Artificial Sequence: Synthetic peptide
  Seed: SPGMMMGMFNMLSTV
SPGYMMHMINMFSTV

SEQ ID NO: 201432 - protein, 15 aa, Artificial Sequence
  Description of Artificial Sequence: Synthetic peptide
  Seed: SPGMMMGMFNMLSTV
SPGYMMHMINMISTV

SEQ ID NO: 201433 - protein, 15 aa, Artificial Sequence
  Description of Artificial Sequence: Synthetic peptide
  Seed: SPGMMMGMFNMLSTV
SPGYMMHMINMLSTV

SEQ ID NO: 201434 - protein, 15 aa, Artificial Sequence
  Description of Artificial Sequence: Synthetic peptide
  Seed: SPGMMMGMFNMLSTV
SPGYMMHMLNMFSTV

SEQ ID NO: 201435 - protein, 15 aa, Artificial Sequence
  Description of Artificial Sequence: Synthetic peptide
  Seed: SPGMMMGMFNMLSTV
SPGYMMHMLNMISTV

SEQ ID NO: 201436 - protein, 15 aa, Artificial Sequence
  Description of Artificial Sequence: Synthetic peptide
  Seed: SPGMMMGMFNMLSTV
SPGYMMHMLNMLSTV

SEQ ID NO: 201437 - protein, 15 aa, Artificial Sequence
  Description of Artificial Sequence: Synthetic peptide
  Seed: SPGMMMGMFNMLSTV
SPGYMMHMLNMVSTV

SEQ ID NO: 201438 - protein, 15 aa, Artificial Sequence
  Description of Artificial Sequence: Synthetic peptide
  Seed: SPGMMMGMFNMLSTV
SPGYMMHMMNMLSTV

SEQ ID NO: 201439 - protein, 15 aa, Artificial Sequence
  Description of Artificial Sequence: Synthetic peptide
  Seed: SPGMMMGMFNMLSTV
SPGYMMHMNNMFSTV

SEQ ID NO: 201440 - protein, 15 aa, Artificial Sequence
  Description of Artificial Sequence: Synthetic peptide
  Seed: SPGMMMGMFNMLSTV
SPGYMMHMNNMISTV

SEQ ID NO: 201441 - protein, 15 aa, Artificial Sequence
  Description of Artificial Sequence: Synthetic peptide
  Seed: SPGMMMGMFNMLSTV
SPGYMMHMNNMLSTV

SEQ ID NO: 201442 - protein, 15 aa, Artificial Sequence
  Description of Artificial Sequence: Synthetic peptide
  Seed: SPGMMMGMFNMLSTV
SPGYMMHMNNMMSTV

SEQ ID NO: 201443 - protein, 15 aa, Artificial Sequence
  Description of Artificial Sequence: Synthetic peptide
  Seed: SPGMMMGMFNMLSTV
SPGYMMHMNNMVSTV

SEQ ID NO: 201444 - protein, 15 aa, Artificial Sequence
  Description of Artificial Sequence: Synthetic peptide
  Seed: SPGMMMGMFNMLSTV
SPGYMMHMNNMYSTV

SEQ ID NO: 201445 - protein, 15 aa, Artificial Sequence
  Description of Artificial Sequence: Synthetic peptide
  Seed: SPGMMMGMFNMLSTV
SPGYMMHMPNMISTV

SEQ ID NO: 201446 - protein, 15 aa, Artificial Sequence
  Description of Artificial Sequence: Synthetic peptide
  Seed: SPGMMMGMFNMLSTV
SPGYMMHMPNMLSTV

SEQ ID NO: 201447 - protein, 15 aa, Artificial Sequence
  Description of Artificial Sequence: Synthetic peptide
  Seed: SPGMMMGMFNMLSTV
SPGYMMHMPNMVSTV

SEQ ID NO: 201448 - protein, 15 aa, Artificial Sequence
  Description of Artificial Sequence: Synthetic peptide
  Seed: SPGMMMGMFNMLSTV
SPGYMMHMSNMFSTV

SEQ ID NO: 201449 - protein, 15 aa, Artificial Sequence
  Description of Artificial Sequence: Synthetic peptide
  Seed: SPGMMMGMFNMLSTV
SPGYMMHMSNMISTV

SEQ ID NO: 201450 - protein, 15 aa, Artificial Sequence
  Description of Artificial Sequence: Synthetic peptide
  Seed: SPGMMMGMFNMLSTV
SPGYMMHMSNMLSTV

SEQ ID NO: 201451 - protein, 15 aa, Artificial Sequence
  Description of Artificial Sequence: Synthetic peptide
  Seed: SPGMMMGMFNMLSTV
SPGYMMHMSNMMSTV

SEQ ID NO: 201452 - protein, 15 aa, Artificial Sequence
  Description of Artificial Sequence: Synthetic peptide
  Seed: SPGMMMGMFNMLSTV
SPGYMMHMSNMVSTV

SEQ ID NO: 201453 - protein, 15 aa, Artificial Sequence
  Description of Artificial Sequence: Synthetic peptide
  Seed: SPGMMMGMFNMLSTV
SPGYMMHMTNMISTV

SEQ ID NO: 201454 - protein, 15 aa, Artificial Sequence
  Description of Artificial Sequence: Synthetic peptide
  Seed: SPGMMMGMFNMLSTV
SPGYMMHMTNMLSTV

SEQ ID NO: 201455 - protein, 15 aa, Artificial Sequence
  Description of Artificial Sequence: Synthetic peptide
  Seed: SPGMMMGMFNMLSTV
SPGYMMHMTNMVSTV

SEQ ID NO: 201456 - protein, 15 aa, Artificial Sequence
  Description of Artificial Sequence: Synthetic peptide
  Seed: SPGMMMGMFNMLSTV
SPGYMMHMVNMISTV

SEQ ID NO: 201457 - protein, 15 aa, Artificial Sequence
  Description of Artificial Sequence: Synthetic peptide
  Seed: SPGMMMGMFNMLSTV
SPGYMMHMVNMLSTV

SEQ ID NO: 201458 - protein, 15 aa, Artificial Sequence
  Description of Artificial Sequence: Synthetic peptide
  Seed: SPGMMMGMFNMLSTV
SPGYMMHMVNMVSTV

SEQ ID NO: 201459 - protein, 15 aa, Artificial Sequence
  Description of Artificial Sequence: Synthetic peptide
  Seed: SPGMMMGMFNMLSTV
SPGYMMHMWNMFSTV

SEQ ID NO: 201460 - protein, 15 aa, Artificial Sequence
  Description of Artificial Sequence: Synthetic peptide
  Seed: SPGMMMGMFNMLSTV
SPGYMMHMWNMISTV

SEQ ID NO: 201461 - protein, 15 aa, Artificial Sequence
  Description of Artificial Sequence: Synthetic peptide
  Seed: SPGMMMGMFNMLSTV
SPGYMMHMWNMLSTV

SEQ ID NO: 201462 - protein, 15 aa, Artificial Sequence
  Description of Artificial Sequence: Synthetic peptide
  Seed: SPGMMMGMFNMLSTV
SPGYMMHMWNMVSTV

SEQ ID NO: 201463 - protein, 15 aa, Artificial Sequence
  Description of Artificial Sequence: Synthetic peptide
  Seed: SPGMMMGMFNMLSTV
SPGYMMHMYNMFSTV

SEQ ID NO: 201464 - protein, 15 aa, Artificial Sequence
  Description of Artificial Sequence: Synthetic peptide
  Seed: SPGMMMGMFNMLSTV
SPGYMMHMYNMISTV

SEQ ID NO: 201465 - protein, 15 aa, Artificial Sequence
  Description of Artificial Sequence: Synthetic peptide
  Seed: SPGMMMGMFNMLSTV
SPGYMMHMYNMLSTV

SEQ ID NO: 201466 - protein, 15 aa, Artificial Sequence
  Description of Artificial Sequence: Synthetic peptide
  Seed: SPGMMMGMFNMLSTV
SPGYMMHMYNMVSTV

SEQ ID NO: 201467 - protein, 15 aa, Artificial Sequence
  Description of Artificial Sequence: Synthetic peptide
  Seed: SPGMMMGMFNMLSTV
SPGYMMIMANMASTV

SEQ ID NO: 201468 - protein, 15 aa, Artificial Sequence
  Description of Artificial Sequence: Synthetic peptide
  Seed: SPGMMMGMFNMLSTV
SPGYMMIMANMFSTV

SEQ ID NO: 201469 - protein, 15 aa, Artificial Sequence
  Description of Artificial Sequence: Synthetic peptide
  Seed: SPGMMMGMFNMLSTV
SPGYMMIMANMGSTV

SEQ ID NO: 201470 - protein, 15 aa, Artificial Sequence
  Description of Artificial Sequence: Synthetic peptide
  Seed: SPGMMMGMFNMLSTV
SPGYMMIMANMISTV

SEQ ID NO: 201471 - protein, 15 aa, Artificial Sequence
  Description of Artificial Sequence: Synthetic peptide
  Seed: SPGMMMGMFNMLSTV
SPGYMMIMANMLSTV

SEQ ID NO: 201472 - protein, 15 aa, Artificial Sequence
  Description of Artificial Sequence: Synthetic peptide
  Seed: SPGMMMGMFNMLSTV
SPGYMMIMANMMSTV

SEQ ID NO: 201473 - protein, 15 aa, Artificial Sequence
  Description of Artificial Sequence: Synthetic peptide
  Seed: SPGMMMGMFNMLSTV
SPGYMMIMANMSSTV

SEQ ID NO: 201474 - protein, 15 aa, Artificial Sequence
  Description of Artificial Sequence: Synthetic peptide
  Seed: SPGMMMGMFNMLSTV
SPGYMMIMANMTSTV

SEQ ID NO: 201475 - protein, 15 aa, Artificial Sequence
  Description of Artificial Sequence: Synthetic peptide
  Seed: SPGMMMGMFNMLSTV
SPGYMMIMANMVSTV

SEQ ID NO: 201476 - protein, 15 aa, Artificial Sequence
  Description of Artificial Sequence: Synthetic peptide
  Seed: SPGMMMGMFNMLSTV
SPGYMMIMANMYSTV

SEQ ID NO: 201477 - protein, 15 aa, Artificial Sequence
  Description of Artificial Sequence: Synthetic peptide
  Seed: SPGMMMGMFNMLSTV
SPGYMMIMDNMASTV

SEQ ID NO: 201478 - protein, 15 aa, Artificial Sequence
  Description of Artificial Sequence: Synthetic peptide
  Seed: SPGMMMGMFNMLSTV
SPGYMMIMFNMDSTV

SEQ ID NO: 201479 - protein, 15 aa, Artificial Sequence
  Description of Artificial Sequence: Synthetic peptide
  Seed: SPGMMMGMFNMLSTV
SPGYMMIMFNMESTV

SEQ ID NO: 201480 - protein, 15 aa, Artificial Sequence
  Description of Artificial Sequence: Synthetic peptide
  Seed: SPGMMMGMFNMLSTV
SPGYMMIMFNMFSTV

SEQ ID NO: 201481 - protein, 15 aa, Artificial Sequence
  Description of Artificial Sequence: Synthetic peptide
  Seed: SPGMMMGMFNMLSTV
SPGYMMIMFNMISTV

SEQ ID NO: 201482 - protein, 15 aa, Artificial Sequence
  Description of Artificial Sequence: Synthetic peptide
  Seed: SPGMMMGMFNMLSTV
SPGYMMIMFNMLSTV

SEQ ID NO: 201483 - protein, 15 aa, Artificial Sequence
  Description of Artificial Sequence: Synthetic peptide
  Seed: SPGMMMGMFNMLSTV
SPGYMMIMFNMMSTV

SEQ ID NO: 201484 - protein, 15 aa, Artificial Sequence
  Description of Artificial Sequence: Synthetic peptide
  Seed: SPGMMMGMFNMLSTV
SPGYMMIMFNMNSTV

SEQ ID NO: 201485 - protein, 15 aa, Artificial Sequence
  Description of Artificial Sequence: Synthetic peptide
  Seed: SPGMMMGMFNMLSTV
SPGYMMIMFNMVSTV

SEQ ID NO: 201486 - protein, 15 aa, Artificial Sequence
  Description of Artificial Sequence: Synthetic peptide
  Seed: SPGMMMGMFNMLSTV
SPGYMMIMFNMYSTV

SEQ ID NO: 201487 - protein, 15 aa, Artificial Sequence
  Description of Artificial Sequence: Synthetic peptide
  Seed: SPGMMMGMFNMLSTV
SPGYMMIMGNMASTV

SEQ ID NO: 201488 - protein, 15 aa, Artificial Sequence
  Description of Artificial Sequence: Synthetic peptide
  Seed: SPGMMMGMFNMLSTV
SPGYMMIMGNMISTV

SEQ ID NO: 201489 - protein, 15 aa, Artificial Sequence
  Description of Artificial Sequence: Synthetic peptide
  Seed: SPGMMMGMFNMLSTV
SPGYMMIMGNMLSTV

SEQ ID NO: 201490 - protein, 15 aa, Artificial Sequence
  Description of Artificial Sequence: Synthetic peptide
  Seed: SPGMMMGMFNMLSTV
SPGYMMIMGNMMSTV

SEQ ID NO: 201491 - protein, 15 aa, Artificial Sequence
  Description of Artificial Sequence: Synthetic peptide
  Seed: SPGMMMGMFNMLSTV
SPGYMMIMGNMSSTV

SEQ ID NO: 201492 - protein, 15 aa, Artificial Sequence
  Description of Artificial Sequence: Synthetic peptide
  Seed: SPGMMMGMFNMLSTV
SPGYMMIMGNMVSTV

SEQ ID NO: 201493 - protein, 15 aa, Artificial Sequence
  Description of Artificial Sequence: Synthetic peptide
  Seed: SPGMMMGMFNMLSTV
SPGYMMIMHNMASTV

SEQ ID NO: 201494 - protein, 15 aa, Artificial Sequence
  Description of Artificial Sequence: Synthetic peptide
  Seed: SPGMMMGMFNMLSTV
SPGYMMIMHNMGSTV

SEQ ID NO: 201495 - protein, 15 aa, Artificial Sequence
  Description of Artificial Sequence: Synthetic peptide
  Seed: SPGMMMGMFNMLSTV
SPGYMMIMHNMISTV

SEQ ID NO: 201496 - protein, 15 aa, Artificial Sequence
  Description of Artificial Sequence: Synthetic peptide
  Seed: SPGMMMGMFNMLSTV
SPGYMMIMHNMLSTV

SEQ ID NO: 201497 - protein, 15 aa, Artificial Sequence
  Description of Artificial Sequence: Synthetic peptide
  Seed: SPGMMMGMFNMLSTV
SPGYMMIMHNMMSTV

SEQ ID NO: 201498 - protein, 15 aa, Artificial Sequence
  Description of Artificial Sequence: Synthetic peptide
  Seed: SPGMMMGMFNMLSTV
SPGYMMIMHNMSSTV

SEQ ID NO: 201499 - protein, 15 aa, Artificial Sequence
  Description of Artificial Sequence: Synthetic peptide
  Seed: SPGMMMGMFNMLSTV
SPGYMMIMHNMVSTV

SEQ ID NO: 201500 - protein, 15 aa, Artificial Sequence
  Description of Artificial Sequence: Synthetic peptide
  Seed: SPGMMMGMFNMLSTV
SPGYMMIMINMISTV

SEQ ID NO: 201501 - protein, 15 aa, Artificial Sequence
  Description of Artificial Sequence: Synthetic peptide
  Seed: SPGMMMGMFNMLSTV
SPGYMMIMINMVSTV

SEQ ID NO: 201502 - protein, 15 aa, Artificial Sequence
  Description of Artificial Sequence: Synthetic peptide
  Seed: SPGMMMGMFNMLSTV
SPGYMMIMKNMASTV

SEQ ID NO: 201503 - protein, 15 aa, Artificial Sequence
  Description of Artificial Sequence: Synthetic peptide
  Seed: SPGMMMGMFNMLSTV
SPGYMMIMKNMGSTV

SEQ ID NO: 201504 - protein, 15 aa, Artificial Sequence
  Description of Artificial Sequence: Synthetic peptide
  Seed: SPGMMMGMFNMLSTV
SPGYMMIMKNMISTV

SEQ ID NO: 201505 - protein, 15 aa, Artificial Sequence
  Description of Artificial Sequence: Synthetic peptide
  Seed: SPGMMMGMFNMLSTV
SPGYMMIMKNMLSTV

SEQ ID NO: 201506 - protein, 15 aa, Artificial Sequence
  Description of Artificial Sequence: Synthetic peptide
  Seed: SPGMMMGMFNMLSTV
SPGYMMIMKNMMSTV

SEQ ID NO: 201507 - protein, 15 aa, Artificial Sequence
  Description of Artificial Sequence: Synthetic peptide
  Seed: SPGMMMGMFNMLSTV
SPGYMMIMKNMNSTV

SEQ ID NO: 201508 - protein, 15 aa, Artificial Sequence
  Description of Artificial Sequence: Synthetic peptide
  Seed: SPGMMMGMFNMLSTV
SPGYMMIMKNMSSTV

SEQ ID NO: 201509 - protein, 15 aa, Artificial Sequence
  Description of Artificial Sequence: Synthetic peptide
  Seed: SPGMMMGMFNMLSTV
SPGYMMIMKNMTSTV

SEQ ID NO: 201510 - protein, 15 aa, Artificial Sequence
  Description of Artificial Sequence: Synthetic peptide
  Seed: SPGMMMGMFNMLSTV
SPGYMMIMKNMVSTV

SEQ ID NO: 201511 - protein, 15 aa, Artificial Sequence
  Description of Artificial Sequence: Synthetic peptide
  Seed: SPGMMMGMFNMLSTV
SPGYMMIMLNMFSTV

SEQ ID NO: 201512 - protein, 15 aa, Artificial Sequence
  Description of Artificial Sequence: Synthetic peptide
  Seed: SPGMMMGMFNMLSTV
SPGYMMIMNNMASTV

SEQ ID NO: 201513 - protein, 15 aa, Artificial Sequence
  Description of Artificial Sequence: Synthetic peptide
  Seed: SPGMMMGMFNMLSTV
SPGYMMIMNNMFSTV

SEQ ID NO: 201514 - protein, 15 aa, Artificial Sequence
  Description of Artificial Sequence: Synthetic peptide
  Seed: SPGMMMGMFNMLSTV
SPGYMMIMNNMGSTV

SEQ ID NO: 201515 - protein, 15 aa, Artificial Sequence
  Description of Artificial Sequence: Synthetic peptide
  Seed: SPGMMMGMFNMLSTV
SPGYMMIMNNMISTV

SEQ ID NO: 201516 - protein, 15 aa, Artificial Sequence
  Description of Artificial Sequence: Synthetic peptide
  Seed: SPGMMMGMFNMLSTV
SPGYMMIMNNMLSTV

SEQ ID NO: 201517 - protein, 15 aa, Artificial Sequence
  Description of Artificial Sequence: Synthetic peptide
  Seed: SPGMMMGMFNMLSTV
SPGYMMIMNNMMSTV

SEQ ID NO: 201518 - protein, 15 aa, Artificial Sequence
  Description of Artificial Sequence: Synthetic peptide
  Seed: SPGMMMGMFNMLSTV
SPGYMMIMNNMRSTV

SEQ ID NO: 201519 - protein, 15 aa, Artificial Sequence
  Description of Artificial Sequence: Synthetic peptide
  Seed: SPGMMMGMFNMLSTV
SPGYMMIMNNMSSTV

SEQ ID NO: 201520 - protein, 15 aa, Artificial Sequence
  Description of Artificial Sequence: Synthetic peptide
  Seed: SPGMMMGMFNMLSTV
SPGYMMIMNNMTSTV

SEQ ID NO: 201521 - protein, 15 aa, Artificial Sequence
  Description of Artificial Sequence: Synthetic peptide
  Seed: SPGMMMGMFNMLSTV
SPGYMMIMNNMVSTV

SEQ ID NO: 201522 - protein, 15 aa, Artificial Sequence
  Description of Artificial Sequence: Synthetic peptide
  Seed: SPGMMMGMFNMLSTV
SPGYMMIMNNMYSTV

SEQ ID NO: 201523 - protein, 15 aa, Artificial Sequence
  Description of Artificial Sequence: Synthetic peptide
  Seed: SPGMMMGMFNMLSTV
SPGYMMIMPNMASTV

SEQ ID NO: 201524 - protein, 15 aa, Artificial Sequence
  Description of Artificial Sequence: Synthetic peptide
  Seed: SPGMMMGMFNMLSTV
SPGYMMIMPNMFSTV

SEQ ID NO: 201525 - protein, 15 aa, Artificial Sequence
  Description of Artificial Sequence: Synthetic peptide
  Seed: SPGMMMGMFNMLSTV
SPGYMMIMPNMGSTV

SEQ ID NO: 201526 - protein, 15 aa, Artificial Sequence
  Description of Artificial Sequence: Synthetic peptide
  Seed: SPGMMMGMFNMLSTV
SPGYMMIMPNMISTV

SEQ ID NO: 201527 - protein, 15 aa, Artificial Sequence
  Description of Artificial Sequence: Synthetic peptide
  Seed: SPGMMMGMFNMLSTV
SPGYMMIMPNMLSTV

SEQ ID NO: 201528 - protein, 15 aa, Artificial Sequence
  Description of Artificial Sequence: Synthetic peptide
  Seed: SPGMMMGMFNMLSTV
SPGYMMIMPNMMSTV

SEQ ID NO: 201529 - protein, 15 aa, Artificial Sequence
  Description of Artificial Sequence: Synthetic peptide
  Seed: SPGMMMGMFNMLSTV
SPGYMMIMPNMSSTV

SEQ ID NO: 201530 - protein, 15 aa, Artificial Sequence
  Description of Artificial Sequence: Synthetic peptide
  Seed: SPGMMMGMFNMLSTV
SPGYMMIMPNMTSTV

SEQ ID NO: 201531 - protein, 15 aa, Artificial Sequence
  Description of Artificial Sequence: Synthetic peptide
  Seed: SPGMMMGMFNMLSTV
SPGYMMIMPNMVSTV

SEQ ID NO: 201532 - protein, 15 aa, Artificial Sequence
  Description of Artificial Sequence: Synthetic peptide
  Seed: SPGMMMGMFNMLSTV
SPGYMMIMPNMYSTV

SEQ ID NO: 201533 - protein, 15 aa, Artificial Sequence
  Description of Artificial Sequence: Synthetic peptide
  Seed: SPGMMMGMFNMLSTV
SPGYMMIMQNMVSTV

SEQ ID NO: 201534 - protein, 15 aa, Artificial Sequence
  Description of Artificial Sequence: Synthetic peptide
  Seed: SPGMMMGMFNMLSTV
SPGYMMIMRNMASTV

SEQ ID NO: 201535 - protein, 15 aa, Artificial Sequence
  Description of Artificial Sequence: Synthetic peptide
  Seed: SPGMMMGMFNMLSTV
SPGYMMIMRNMGSTV

SEQ ID NO: 201536 - protein, 15 aa, Artificial Sequence
  Description of Artificial Sequence: Synthetic peptide
  Seed: SPGMMMGMFNMLSTV
SPGYMMIMRNMHSTV

SEQ ID NO: 201537 - protein, 15 aa, Artificial Sequence
  Description of Artificial Sequence: Synthetic peptide
  Seed: SPGMMMGMFNMLSTV
SPGYMMIMRNMISTV

SEQ ID NO: 201538 - protein, 15 aa, Artificial Sequence
  Description of Artificial Sequence: Synthetic peptide
  Seed: SPGMMMGMFNMLSTV
SPGYMMIMRNMLSTV

SEQ ID NO: 201539 - protein, 15 aa, Artificial Sequence
  Description of Artificial Sequence: Synthetic peptide
  Seed: SPGMMMGMFNMLSTV
SPGYMMIMRNMMSTV

SEQ ID NO: 201540 - protein, 15 aa, Artificial Sequence
  Description of Artificial Sequence: Synthetic peptide
  Seed: SPGMMMGMFNMLSTV
SPGYMMIMRNMNSTV

SEQ ID NO: 201541 - protein, 15 aa, Artificial Sequence
  Description of Artificial Sequence: Synthetic peptide
  Seed: SPGMMMGMFNMLSTV
SPGYMMIMRNMPSTV

SEQ ID NO: 201542 - protein, 15 aa, Artificial Sequence
  Description of Artificial Sequence: Synthetic peptide
  Seed: SPGMMMGMFNMLSTV
SPGYMMIMRNMSSTV

SEQ ID NO: 201543 - protein, 15 aa, Artificial Sequence
  Description of Artificial Sequence: Synthetic peptide
  Seed: SPGMMMGMFNMLSTV
SPGYMMIMRNMTSTV

SEQ ID NO: 201544 - protein, 15 aa, Artificial Sequence
  Description of Artificial Sequence: Synthetic peptide
  Seed: SPGMMMGMFNMLSTV
SPGYMMIMRNMVSTV

SEQ ID NO: 201545 - protein, 15 aa, Artificial Sequence
  Description of Artificial Sequence: Synthetic peptide
  Seed: SPGMMMGMFNMLSTV
SPGYMMIMSNMASTV

SEQ ID NO: 201546 - protein, 15 aa, Artificial Sequence
  Description of Artificial Sequence: Synthetic peptide
  Seed: SPGMMMGMFNMLSTV
SPGYMMIMSNMFSTV

SEQ ID NO: 201547 - protein, 15 aa, Artificial Sequence
  Description of Artificial Sequence: Synthetic peptide
  Seed: SPGMMMGMFNMLSTV
SPGYMMIMSNMGSTV

SEQ ID NO: 201548 - protein, 15 aa, Artificial Sequence
  Description of Artificial Sequence: Synthetic peptide
  Seed: SPGMMMGMFNMLSTV
SPGYMMIMSNMISTV

SEQ ID NO: 201549 - protein, 15 aa, Artificial Sequence
  Description of Artificial Sequence: Synthetic peptide
  Seed: SPGMMMGMFNMLSTV
SPGYMMIMSNMLSTV

SEQ ID NO: 201550 - protein, 15 aa, Artificial Sequence
  Description of Artificial Sequence: Synthetic peptide
  Seed: SPGMMMGMFNMLSTV
SPGYMMIMSNMMSTV

SEQ ID NO: 201551 - protein, 15 aa, Artificial Sequence
  Description of Artificial Sequence: Synthetic peptide
  Seed: SPGMMMGMFNMLSTV
SPGYMMIMSNMSSTV

SEQ ID NO: 201552 - protein, 15 aa, Artificial Sequence
  Description of Artificial Sequence: Synthetic peptide
  Seed: SPGMMMGMFNMLSTV
SPGYMMIMSNMTSTV

SEQ ID NO: 201553 - protein, 15 aa, Artificial Sequence
  Description of Artificial Sequence: Synthetic peptide
  Seed: SPGMMMGMFNMLSTV
SPGYMMIMSNMVSTV

SEQ ID NO: 201554 - protein, 15 aa, Artificial Sequence
  Description of Artificial Sequence: Synthetic peptide
  Seed: SPGMMMGMFNMLSTV
SPGYMMIMSNMYSTV

SEQ ID NO: 201555 - protein, 15 aa, Artificial Sequence
  Description of Artificial Sequence: Synthetic peptide
  Seed: SPGMMMGMFNMLSTV
SPGYMMIMTNMASTV

SEQ ID NO: 201556 - protein, 15 aa, Artificial Sequence
  Description of Artificial Sequence: Synthetic peptide
  Seed: SPGMMMGMFNMLSTV
SPGYMMIMTNMGSTV

SEQ ID NO: 201557 - protein, 15 aa, Artificial Sequence
  Description of Artificial Sequence: Synthetic peptide
  Seed: SPGMMMGMFNMLSTV
SPGYMMIMTNMISTV

SEQ ID NO: 201558 - protein, 15 aa, Artificial Sequence
  Description of Artificial Sequence: Synthetic peptide
  Seed: SPGMMMGMFNMLSTV
SPGYMMIMTNMLSTV

SEQ ID NO: 201559 - protein, 15 aa, Artificial Sequence
  Description of Artificial Sequence: Synthetic peptide
  Seed: SPGMMMGMFNMLSTV
SPGYMMIMTNMMSTV

SEQ ID NO: 201560 - protein, 15 aa, Artificial Sequence
  Description of Artificial Sequence: Synthetic peptide
  Seed: SPGMMMGMFNMLSTV
SPGYMMIMTNMSSTV

SEQ ID NO: 201561 - protein, 15 aa, Artificial Sequence
  Description of Artificial Sequence: Synthetic peptide
  Seed: SPGMMMGMFNMLSTV
SPGYMMIMTNMTSTV

SEQ ID NO: 201562 - protein, 15 aa, Artificial Sequence
  Description of Artificial Sequence: Synthetic peptide
  Seed: SPGMMMGMFNMLSTV
SPGYMMIMTNMVSTV

SEQ ID NO: 201563 - protein, 15 aa, Artificial Sequence
  Description of Artificial Sequence: Synthetic peptide
  Seed: SPGMMMGMFNMLSTV
SPGYMMIMTNMYSTV

SEQ ID NO: 201564 - protein, 15 aa, Artificial Sequence
  Description of Artificial Sequence: Synthetic peptide
  Seed: SPGMMMGMFNMLSTV
SPGYMMIMVNMVSTV

SEQ ID NO: 201565 - protein, 15 aa, Artificial Sequence
  Description of Artificial Sequence: Synthetic peptide
  Seed: SPGMMMGMFNMLSTV
SPGYMMIMWNMFSTV

SEQ ID NO: 201566 - protein, 15 aa, Artificial Sequence
  Description of Artificial Sequence: Synthetic peptide
  Seed: SPGMMMGMFNMLSTV
SPGYMMIMWNMLSTV

SEQ ID NO: 201567 - protein, 15 aa, Artificial Sequence
  Description of Artificial Sequence: Synthetic peptide
  Seed: SPGMMMGMFNMLSTV
SPGYMMIMWNMYSTV

SEQ ID NO: 201568 - protein, 15 aa, Artificial Sequence
  Description of Artificial Sequence: Synthetic peptide
  Seed: SPGMMMGMFNMLSTV
SPGYMMIMYNMFSTV

SEQ ID NO: 201569 - protein, 15 aa, Artificial Sequence
  Description of Artificial Sequence: Synthetic peptide
  Seed: SPGMMMGMFNMLSTV
SPGYMMIMYNMISTV

SEQ ID NO: 201570 - protein, 15 aa, Artificial Sequence
  Description of Artificial Sequence: Synthetic peptide
  Seed: SPGMMMGMFNMLSTV
SPGYMMIMYNMLSTV

SEQ ID NO: 201571 - protein, 15 aa, Artificial Sequence
  Description of Artificial Sequence: Synthetic peptide
  Seed: SPGMMMGMFNMLSTV
SPGYMMIMYNMMSTV

SEQ ID NO: 201572 - protein, 15 aa, Artificial Sequence
  Description of Artificial Sequence: Synthetic peptide
  Seed: SPGMMMGMFNMLSTV
SPGYMMIMYNMVSTV

SEQ ID NO: 201573 - protein, 15 aa, Artificial Sequence
  Description of Artificial Sequence: Synthetic peptide
  Seed: SPGMMMGMFNMLSTV
SPGYMMIMYNMYSTV

SEQ ID NO: 201574 - protein, 15 aa, Artificial Sequence
  Description of Artificial Sequence: Synthetic peptide
  Seed: SPGMMMGMFNMLSTV
SPGYMMKMANMISTV

SEQ ID NO: 201575 - protein, 15 aa, Artificial Sequence
  Description of Artificial Sequence: Synthetic peptide
  Seed: SPGMMMGMFNMLSTV
SPGYMMKMFNMFSTV

SEQ ID NO: 201576 - protein, 15 aa, Artificial Sequence
  Description of Artificial Sequence: Synthetic peptide
  Seed: SPGMMMGMFNMLSTV
SPGYMMKMFNMISTV

SEQ ID NO: 201577 - protein, 15 aa, Artificial Sequence
  Description of Artificial Sequence: Synthetic peptide
  Seed: SPGMMMGMFNMLSTV
SPGYMMKMFNMLSTV

SEQ ID NO: 201578 - protein, 15 aa, Artificial Sequence
  Description of Artificial Sequence: Synthetic peptide
  Seed: SPGMMMGMFNMLSTV
SPGYMMKMFNMMSTV

SEQ ID NO: 201579 - protein, 15 aa, Artificial Sequence
  Description of Artificial Sequence: Synthetic peptide
  Seed: SPGMMMGMFNMLSTV
SPGYMMKMFNMVSTV

SEQ ID NO: 201580 - protein, 15 aa, Artificial Sequence
  Description of Artificial Sequence: Synthetic peptide
  Seed: SPGMMMGMFNMLSTV
SPGYMMKMNNMFSTV

SEQ ID NO: 201581 - protein, 15 aa, Artificial Sequence
  Description of Artificial Sequence: Synthetic peptide
  Seed: SPGMMMGMFNMLSTV
SPGYMMKMNNMISTV

SEQ ID NO: 201582 - protein, 15 aa, Artificial Sequence
  Description of Artificial Sequence: Synthetic peptide
  Seed: SPGMMMGMFNMLSTV
SPGYMMKMNNMLSTV

SEQ ID NO: 201583 - protein, 15 aa, Artificial Sequence
  Description of Artificial Sequence: Synthetic peptide
  Seed: SPGMMMGMFNMLSTV
SPGYMMKMNNMMSTV

SEQ ID NO: 201584 - protein, 15 aa, Artificial Sequence
  Description of Artificial Sequence: Synthetic peptide
  Seed: SPGMMMGMFNMLSTV
SPGYMMKMNNMVSTV

SEQ ID NO: 201585 - protein, 15 aa, Artificial Sequence
  Description of Artificial Sequence: Synthetic peptide
  Seed: SPGMMMGMFNMLSTV
SPGYMMKMNNMYSTV

SEQ ID NO: 201586 - protein, 15 aa, Artificial Sequence
  Description of Artificial Sequence: Synthetic peptide
  Seed: SPGMMMGMFNMLSTV
SPGYMMKMSNMISTV

SEQ ID NO: 201587 - protein, 15 aa, Artificial Sequence
  Description of Artificial Sequence: Synthetic peptide
  Seed: SPGMMMGMFNMLSTV
SPGYMMKMSNMLSTV

SEQ ID NO: 201588 - protein, 15 aa, Artificial Sequence
  Description of Artificial Sequence: Synthetic peptide
  Seed: SPGMMMGMFNMLSTV
SPGYMMKMSNMVSTV

SEQ ID NO: 201589 - protein, 15 aa, Artificial Sequence
  Description of Artificial Sequence: Synthetic peptide
  Seed: SPGMMMGMFNMLSTV
SPGYMMKMYNMFSTV

SEQ ID NO: 201590 - protein, 15 aa, Artificial Sequence
  Description of Artificial Sequence: Synthetic peptide
  Seed: SPGMMMGMFNMLSTV
SPGYMMLMANMISTV

SEQ ID NO: 201591 - protein, 15 aa, Artificial Sequence
  Description of Artificial Sequence: Synthetic peptide
  Seed: SPGMMMGMFNMLSTV
SPGYMMLMANMVSTV

SEQ ID NO: 201592 - protein, 15 aa, Artificial Sequence
  Description of Artificial Sequence: Synthetic peptide
  Seed: SPGMMMGMFNMLSTV
SPGYMMLMFNMESTV

SEQ ID NO: 201593 - protein, 15 aa, Artificial Sequence
  Description of Artificial Sequence: Synthetic peptide
  Seed: SPGMMMGMFNMLSTV
SPGYMMLMFNMFSTV

SEQ ID NO: 201594 - protein, 15 aa, Artificial Sequence
  Description of Artificial Sequence: Synthetic peptide
  Seed: SPGMMMGMFNMLSTV
SPGYMMLMFNMLSTV

SEQ ID NO: 201595 - protein, 15 aa, Artificial Sequence
  Description of Artificial Sequence: Synthetic peptide
  Seed: SPGMMMGMFNMLSTV
SPGYMMLMFNMYSTV

SEQ ID NO: 201596 - protein, 15 aa, Artificial Sequence
  Description of Artificial Sequence: Synthetic peptide
  Seed: SPGMMMGMFNMLSTV
SPGYMMLMGNMASTV

SEQ ID NO: 201597 - protein, 15 aa, Artificial Sequence
  Description of Artificial Sequence: Synthetic peptide
  Seed: SPGMMMGMFNMLSTV
SPGYMMLMHNMGSTV

SEQ ID NO: 201598 - protein, 15 aa, Artificial Sequence
  Description of Artificial Sequence: Synthetic peptide
  Seed: SPGMMMGMFNMLSTV
SPGYMMLMHNMVSTV

SEQ ID NO: 201599 - protein, 15 aa, Artificial Sequence
  Description of Artificial Sequence: Synthetic peptide
  Seed: SPGMMMGMFNMLSTV
SPGYMMLMKNMASTV

SEQ ID NO: 201600 - protein, 15 aa, Artificial Sequence
  Description of Artificial Sequence: Synthetic peptide
  Seed: SPGMMMGMFNMLSTV
SPGYMMLMKNMNSTV

SEQ ID NO: 201601 - protein, 15 aa, Artificial Sequence
  Description of Artificial Sequence: Synthetic peptide
  Seed: SPGMMMGMFNMLSTV
SPGYMMLMKNMSSTV

SEQ ID NO: 201602 - protein, 15 aa, Artificial Sequence
  Description of Artificial Sequence: Synthetic peptide
  Seed: SPGMMMGMFNMLSTV
SPGYMMLMKNMVSTV

SEQ ID NO: 201603 - protein, 15 aa, Artificial Sequence
  Description of Artificial Sequence: Synthetic peptide
  Seed: SPGMMMGMFNMLSTV
SPGYMMLMLNMFSTV

SEQ ID NO: 201604 - protein, 15 aa, Artificial Sequence
  Description of Artificial Sequence: Synthetic peptide
  Seed: SPGMMMGMFNMLSTV
SPGYMMLMNNMASTV

SEQ ID NO: 201605 - protein, 15 aa, Artificial Sequence
  Description of Artificial Sequence: Synthetic peptide
  Seed: SPGMMMGMFNMLSTV
SPGYMMLMNNMFSTV

SEQ ID NO: 201606 - protein, 15 aa, Artificial Sequence
  Description of Artificial Sequence: Synthetic peptide
  Seed: SPGMMMGMFNMLSTV
SPGYMMLMNNMGSTV

SEQ ID NO: 201607 - protein, 15 aa, Artificial Sequence
  Description of Artificial Sequence: Synthetic peptide
  Seed: SPGMMMGMFNMLSTV
SPGYMMLMNNMISTV

SEQ ID NO: 201608 - protein, 15 aa, Artificial Sequence
  Description of Artificial Sequence: Synthetic peptide
  Seed: SPGMMMGMFNMLSTV
SPGYMMLMNNMLSTV

SEQ ID NO: 201609 - protein, 15 aa, Artificial Sequence
  Description of Artificial Sequence: Synthetic peptide
  Seed: SPGMMMGMFNMLSTV
SPGYMMLMNNMMSTV

SEQ ID NO: 201610 - protein, 15 aa, Artificial Sequence
  Description of Artificial Sequence: Synthetic peptide
  Seed: SPGMMMGMFNMLSTV
SPGYMMLMNNMRSTV

SEQ ID NO: 201611 - protein, 15 aa, Artificial Sequence
  Description of Artificial Sequence: Synthetic peptide
  Seed: SPGMMMGMFNMLSTV
SPGYMMLMNNMSSTV

SEQ ID NO: 201612 - protein, 15 aa, Artificial Sequence
  Description of Artificial Sequence: Synthetic peptide
  Seed: SPGMMMGMFNMLSTV
SPGYMMLMNNMTSTV

SEQ ID NO: 201613 - protein, 15 aa, Artificial Sequence
  Description of Artificial Sequence: Synthetic peptide
  Seed: SPGMMMGMFNMLSTV
SPGYMMLMNNMVSTV

SEQ ID NO: 201614 - protein, 15 aa, Artificial Sequence
  Description of Artificial Sequence: Synthetic peptide
  Seed: SPGMMMGMFNMLSTV
SPGYMMLMNNMYSTV

SEQ ID NO: 201615 - protein, 15 aa, Artificial Sequence
  Description of Artificial Sequence: Synthetic peptide
  Seed: SPGMMMGMFNMLSTV
SPGYMMLMPNMASTV

SEQ ID NO: 201616 - protein, 15 aa, Artificial Sequence
  Description of Artificial Sequence: Synthetic peptide
  Seed: SPGMMMGMFNMLSTV
SPGYMMLMPNMISTV

SEQ ID NO: 201617 - protein, 15 aa, Artificial Sequence
  Description of Artificial Sequence: Synthetic peptide
  Seed: SPGMMMGMFNMLSTV
SPGYMMLMPNMLSTV

SEQ ID NO: 201618 - protein, 15 aa, Artificial Sequence
  Description of Artificial Sequence: Synthetic peptide
  Seed: SPGMMMGMFNMLSTV
SPGYMMLMPNMMSTV

SEQ ID NO: 201619 - protein, 15 aa, Artificial Sequence
  Description of Artificial Sequence: Synthetic peptide
  Seed: SPGMMMGMFNMLSTV
SPGYMMLMPNMVSTV

SEQ ID NO: 201620 - protein, 15 aa, Artificial Sequence
  Description of Artificial Sequence: Synthetic peptide
  Seed: SPGMMMGMFNMLSTV
SPGYMMLMRNMASTV

SEQ ID NO: 201621 - protein, 15 aa, Artificial Sequence
  Description of Artificial Sequence: Synthetic peptide
  Seed: SPGMMMGMFNMLSTV
SPGYMMLMRNMGSTV

SEQ ID NO: 201622 - protein, 15 aa, Artificial Sequence
  Description of Artificial Sequence: Synthetic peptide
  Seed: SPGMMMGMFNMLSTV
SPGYMMLMRNMISTV

SEQ ID NO: 201623 - protein, 15 aa, Artificial Sequence
  Description of Artificial Sequence: Synthetic peptide
  Seed: SPGMMMGMFNMLSTV
SPGYMMLMRNMNSTV

SEQ ID NO: 201624 - protein, 15 aa, Artificial Sequence
  Description of Artificial Sequence: Synthetic peptide
  Seed: SPGMMMGMFNMLSTV
SPGYMMLMRNMSSTV

SEQ ID NO: 201625 - protein, 15 aa, Artificial Sequence
  Description of Artificial Sequence: Synthetic peptide
  Seed: SPGMMMGMFNMLSTV
SPGYMMLMRNMTSTV

SEQ ID NO: 201626 - protein, 15 aa, Artificial Sequence
  Description of Artificial Sequence: Synthetic peptide
  Seed: SPGMMMGMFNMLSTV
SPGYMMLMRNMVSTV

SEQ ID NO: 201627 - protein, 15 aa, Artificial Sequence
  Description of Artificial Sequence: Synthetic peptide
  Seed: SPGMMMGMFNMLSTV
SPGYMMLMSNMISTV

SEQ ID NO: 201628 - protein, 15 aa, Artificial Sequence
  Description of Artificial Sequence: Synthetic peptide
  Seed: SPGMMMGMFNMLSTV
SPGYMMLMSNMLSTV

SEQ ID NO: 201629 - protein, 15 aa, Artificial Sequence
  Description of Artificial Sequence: Synthetic peptide
  Seed: SPGMMMGMFNMLSTV
SPGYMMLMSNMVSTV

SEQ ID NO: 201630 - protein, 15 aa, Artificial Sequence
  Description of Artificial Sequence: Synthetic peptide
  Seed: SPGMMMGMFNMLSTV
SPGYMMLMTNMASTV

SEQ ID NO: 201631 - protein, 15 aa, Artificial Sequence
  Description of Artificial Sequence: Synthetic peptide
  Seed: SPGMMMGMFNMLSTV
SPGYMMLMTNMSSTV

SEQ ID NO: 201632 - protein, 15 aa, Artificial Sequence
  Description of Artificial Sequence: Synthetic peptide
  Seed: SPGMMMGMFNMLSTV
SPGYMMLMWNMFSTV

SEQ ID NO: 201633 - protein, 15 aa, Artificial Sequence
  Description of Artificial Sequence: Synthetic peptide
  Seed: SPGMMMGMFNMLSTV
SPGYMMLMWNMLSTV

SEQ ID NO: 201634 - protein, 15 aa, Artificial Sequence
  Description of Artificial Sequence: Synthetic peptide
  Seed: SPGMMMGMFNMLSTV
SPGYMMLMWNMYSTV

SEQ ID NO: 201635 - protein, 15 aa, Artificial Sequence
  Description of Artificial Sequence: Synthetic peptide
  Seed: SPGMMMGMFNMLSTV
SPGYMMLMYNMFSTV

SEQ ID NO: 201636 - protein, 15 aa, Artificial Sequence
  Description of Artificial Sequence: Synthetic peptide
  Seed: SPGMMMGMFNMLSTV
SPGYMMLMYNMISTV

SEQ ID NO: 201637 - protein, 15 aa, Artificial Sequence
  Description of Artificial Sequence: Synthetic peptide
  Seed: SPGMMMGMFNMLSTV
SPGYMMLMYNMLSTV

SEQ ID NO: 201638 - protein, 15 aa, Artificial Sequence
  Description of Artificial Sequence: Synthetic peptide
  Seed: SPGMMMGMFNMLSTV
SPGYMMLMYNMYSTV

SEQ ID NO: 201639 - protein, 15 aa, Artificial Sequence
  Description of Artificial Sequence: Synthetic peptide
  Seed: SPGMMMGMFNMLSTV
SPGYMMMMANMASTV

SEQ ID NO: 201640 - protein, 15 aa, Artificial Sequence
  Description of Artificial Sequence: Synthetic peptide
  Seed: SPGMMMGMFNMLSTV
SPGYMMMMANMISTV

SEQ ID NO: 201641 - protein, 15 aa, Artificial Sequence
  Description of Artificial Sequence: Synthetic peptide
  Seed: SPGMMMGMFNMLSTV
SPGYMMMMANMVSTV

SEQ ID NO: 201642 - protein, 15 aa, Artificial Sequence
  Description of Artificial Sequence: Synthetic peptide
  Seed: SPGMMMGMFNMLSTV
SPGYMMMMFNMFSTV

SEQ ID NO: 201643 - protein, 15 aa, Artificial Sequence
  Description of Artificial Sequence: Synthetic peptide
  Seed: SPGMMMGMFNMLSTV
SPGYMMMMFNMLSTV

SEQ ID NO: 201644 - protein, 15 aa, Artificial Sequence
  Description of Artificial Sequence: Synthetic peptide
  Seed: SPGMMMGMFNMLSTV
SPGYMMMMFNMYSTV

SEQ ID NO: 201645 - protein, 15 aa, Artificial Sequence
  Description of Artificial Sequence: Synthetic peptide
  Seed: SPGMMMGMFNMLSTV
SPGYMMMMGNMVSTV

SEQ ID NO: 201646 - protein, 15 aa, Artificial Sequence
  Description of Artificial Sequence: Synthetic peptide
  Seed: SPGMMMGMFNMLSTV
SPGYMMMMHNMASTV

SEQ ID NO: 201647 - protein, 15 aa, Artificial Sequence
  Description of Artificial Sequence: Synthetic peptide
  Seed: SPGMMMGMFNMLSTV
SPGYMMMMKNMASTV

SEQ ID NO: 201648 - protein, 15 aa, Artificial Sequence
  Description of Artificial Sequence: Synthetic peptide
  Seed: SPGMMMGMFNMLSTV
SPGYMMMMNNMASTV

SEQ ID NO: 201649 - protein, 15 aa, Artificial Sequence
  Description of Artificial Sequence: Synthetic peptide
  Seed: SPGMMMGMFNMLSTV
SPGYMMMMNNMFSTV

SEQ ID NO: 201650 - protein, 15 aa, Artificial Sequence
  Description of Artificial Sequence: Synthetic peptide
  Seed: SPGMMMGMFNMLSTV
SPGYMMMMNNMISTV

SEQ ID NO: 201651 - protein, 15 aa, Artificial Sequence
  Description of Artificial Sequence: Synthetic peptide
  Seed: SPGMMMGMFNMLSTV
SPGYMMMMNNMLSTV

SEQ ID NO: 201652 - protein, 15 aa, Artificial Sequence
  Description of Artificial Sequence: Synthetic peptide
  Seed: SPGMMMGMFNMLSTV
SPGYMMMMNNMMSTV

SEQ ID NO: 201653 - protein, 15 aa, Artificial Sequence
  Description of Artificial Sequence: Synthetic peptide
  Seed: SPGMMMGMFNMLSTV
SPGYMMMMNNMNSTV

SEQ ID NO: 201654 - protein, 15 aa, Artificial Sequence
  Description of Artificial Sequence: Synthetic peptide
  Seed: SPGMMMGMFNMLSTV
SPGYMMMMNNMVSTV

SEQ ID NO: 201655 - protein, 15 aa, Artificial Sequence
  Description of Artificial Sequence: Synthetic peptide
  Seed: SPGMMMGMFNMLSTV
SPGYMMMMNNMYSTV

SEQ ID NO: 201656 - protein, 15 aa, Artificial Sequence
  Description of Artificial Sequence: Synthetic peptide
  Seed: SPGMMMGMFNMLSTV
SPGYMMMMPNMASTV

SEQ ID NO: 201657 - protein, 15 aa, Artificial Sequence
  Description of Artificial Sequence: Synthetic peptide
  Seed: SPGMMMGMFNMLSTV
SPGYMMMMPNMISTV

SEQ ID NO: 201658 - protein, 15 aa, Artificial Sequence
  Description of Artificial Sequence: Synthetic peptide
  Seed: SPGMMMGMFNMLSTV
SPGYMMMMPNMLSTV

SEQ ID NO: 201659 - protein, 15 aa, Artificial Sequence
  Description of Artificial Sequence: Synthetic peptide
  Seed: SPGMMMGMFNMLSTV
SPGYMMMMPNMMSTV

SEQ ID NO: 201660 - protein, 15 aa, Artificial Sequence
  Description of Artificial Sequence: Synthetic peptide
  Seed: SPGMMMGMFNMLSTV
SPGYMMMMPNMVSTV

SEQ ID NO: 201661 - protein, 15 aa, Artificial Sequence
  Description of Artificial Sequence: Synthetic peptide
  Seed: SPGMMMGMFNMLSTV
SPGYMMMMRNMASTV

SEQ ID NO: 201662 - protein, 15 aa, Artificial Sequence
  Description of Artificial Sequence: Synthetic peptide
  Seed: SPGMMMGMFNMLSTV
SPGYMMMMSNMASTV

SEQ ID NO: 201663 - protein, 15 aa, Artificial Sequence
  Description of Artificial Sequence: Synthetic peptide
  Seed: SPGMMMGMFNMLSTV
SPGYMMMMSNMISTV

SEQ ID NO: 201664 - protein, 15 aa, Artificial Sequence
  Description of Artificial Sequence: Synthetic peptide
  Seed: SPGMMMGMFNMLSTV
SPGYMMMMSNMLSTV

SEQ ID NO: 201665 - protein, 15 aa, Artificial Sequence
  Description of Artificial Sequence: Synthetic peptide
  Seed: SPGMMMGMFNMLSTV
SPGYMMMMSNMMSTV

SEQ ID NO: 201666 - protein, 15 aa, Artificial Sequence
  Description of Artificial Sequence: Synthetic peptide
  Seed: SPGMMMGMFNMLSTV
SPGYMMMMSNMVSTV

SEQ ID NO: 201667 - protein, 15 aa, Artificial Sequence
  Description of Artificial Sequence: Synthetic peptide
  Seed: SPGMMMGMFNMLSTV
SPGYMMMMWNMFSTV

SEQ ID NO: 201668 - protein, 15 aa, Artificial Sequence
  Description of Artificial Sequence: Synthetic peptide
  Seed: SPGMMMGMFNMLSTV
SPGYMMMMYNMFSTV

SEQ ID NO: 201669 - protein, 15 aa, Artificial Sequence
  Description of Artificial Sequence: Synthetic peptide
  Seed: SPGMMMGMFNMLSTV
SPGYMMMMYNMLSTV

SEQ ID NO: 201670 - protein, 15 aa, Artificial Sequence
  Description of Artificial Sequence: Synthetic peptide
  Seed: SPGMMMGMFNMLSTV
SPGYMMNMANMASTV

SEQ ID NO: 201671 - protein, 15 aa, Artificial Sequence
  Description of Artificial Sequence: Synthetic peptide
  Seed: SPGMMMGMFNMLSTV
SPGYMMNMANMFSTV

SEQ ID NO: 201672 - protein, 15 aa, Artificial Sequence
  Description of Artificial Sequence: Synthetic peptide
  Seed: SPGMMMGMFNMLSTV
SPGYMMNMANMGSTV

SEQ ID NO: 201673 - protein, 15 aa, Artificial Sequence
  Description of Artificial Sequence: Synthetic peptide
  Seed: SPGMMMGMFNMLSTV
SPGYMMNMANMISTV

SEQ ID NO: 201674 - protein, 15 aa, Artificial Sequence
  Description of Artificial Sequence: Synthetic peptide
  Seed: SPGMMMGMFNMLSTV
SPGYMMNMANMLSTV

SEQ ID NO: 201675 - protein, 15 aa, Artificial Sequence
  Description of Artificial Sequence: Synthetic peptide
  Seed: SPGMMMGMFNMLSTV
SPGYMMNMANMMSTV

SEQ ID NO: 201676 - protein, 15 aa, Artificial Sequence
  Description of Artificial Sequence: Synthetic peptide
  Seed: SPGMMMGMFNMLSTV
SPGYMMNMANMNSTV

SEQ ID NO: 201677 - protein, 15 aa, Artificial Sequence
  Description of Artificial Sequence: Synthetic peptide
  Seed: SPGMMMGMFNMLSTV
SPGYMMNMANMSSTV

SEQ ID NO: 201678 - protein, 15 aa, Artificial Sequence
  Description of Artificial Sequence: Synthetic peptide
  Seed: SPGMMMGMFNMLSTV
SPGYMMNMANMTSTV

SEQ ID NO: 201679 - protein, 15 aa, Artificial Sequence
  Description of Artificial Sequence: Synthetic peptide
  Seed: SPGMMMGMFNMLSTV
SPGYMMNMANMVSTV

SEQ ID NO: 201680 - protein, 15 aa, Artificial Sequence
  Description of Artificial Sequence: Synthetic peptide
  Seed: SPGMMMGMFNMLSTV
SPGYMMNMANMWSTV

SEQ ID NO: 201681 - protein, 15 aa, Artificial Sequence
  Description of Artificial Sequence: Synthetic peptide
  Seed: SPGMMMGMFNMLSTV
SPGYMMNMANMYSTV

SEQ ID NO: 201682 - protein, 15 aa, Artificial Sequence
  Description of Artificial Sequence: Synthetic peptide
  Seed: SPGMMMGMFNMLSTV
SPGYMMNMCNMISTV

SEQ ID NO: 201683 - protein, 15 aa, Artificial Sequence
  Description of Artificial Sequence: Synthetic peptide
  Seed: SPGMMMGMFNMLSTV
SPGYMMNMCNMVSTV

SEQ ID NO: 201684 - protein, 15 aa, Artificial Sequence
  Description of Artificial Sequence: Synthetic peptide
  Seed: SPGMMMGMFNMLSTV
SPGYMMNMDNMISTV

SEQ ID NO: 201685 - protein, 15 aa, Artificial Sequence
  Description of Artificial Sequence: Synthetic peptide
  Seed: SPGMMMGMFNMLSTV
SPGYMMNMDNMLSTV

SEQ ID NO: 201686 - protein, 15 aa, Artificial Sequence
  Description of Artificial Sequence: Synthetic peptide
  Seed: SPGMMMGMFNMLSTV
SPGYMMNMDNMVSTV

SEQ ID NO: 201687 - protein, 15 aa, Artificial Sequence
  Description of Artificial Sequence: Synthetic peptide
  Seed: SPGMMMGMFNMLSTV
SPGYMMNMENMISTV

SEQ ID NO: 201688 - protein, 15 aa, Artificial Sequence
  Description of Artificial Sequence: Synthetic peptide
  Seed: SPGMMMGMFNMLSTV
SPGYMMNMENMVSTV

SEQ ID NO: 201689 - protein, 15 aa, Artificial Sequence
  Description of Artificial Sequence: Synthetic peptide
  Seed: SPGMMMGMFNMLSTV
SPGYMMNMFNMFSTV

SEQ ID NO: 201690 - protein, 15 aa, Artificial Sequence
  Description of Artificial Sequence: Synthetic peptide
  Seed: SPGMMMGMFNMLSTV
SPGYMMNMFNMISTV

SEQ ID NO: 201691 - protein, 15 aa, Artificial Sequence
  Description of Artificial Sequence: Synthetic peptide
  Seed: SPGMMMGMFNMLSTV
SPGYMMNMFNMLSTV

SEQ ID NO: 201692 - protein, 15 aa, Artificial Sequence
  Description of Artificial Sequence: Synthetic peptide
  Seed: SPGMMMGMFNMLSTV
SPGYMMNMFNMMSTV

SEQ ID NO: 201693 - protein, 15 aa, Artificial Sequence
  Description of Artificial Sequence: Synthetic peptide
  Seed: SPGMMMGMFNMLSTV
SPGYMMNMFNMVSTV

SEQ ID NO: 201694 - protein, 15 aa, Artificial Sequence
  Description of Artificial Sequence: Synthetic peptide
  Seed: SPGMMMGMFNMLSTV
SPGYMMNMFNMYSTV

SEQ ID NO: 201695 - protein, 15 aa, Artificial Sequence
  Description of Artificial Sequence: Synthetic peptide
  Seed: SPGMMMGMFNMLSTV
SPGYMMNMGNMASTV

SEQ ID NO: 201696 - protein, 15 aa, Artificial Sequence
  Description of Artificial Sequence: Synthetic peptide
  Seed: SPGMMMGMFNMLSTV
SPGYMMNMGNMFSTV

SEQ ID NO: 201697 - protein, 15 aa, Artificial Sequence
  Description of Artificial Sequence: Synthetic peptide
  Seed: SPGMMMGMFNMLSTV
SPGYMMNMGNMISTV

SEQ ID NO: 201698 - protein, 15 aa, Artificial Sequence
  Description of Artificial Sequence: Synthetic peptide
  Seed: SPGMMMGMFNMLSTV
SPGYMMNMGNMLSTV

SEQ ID NO: 201699 - protein, 15 aa, Artificial Sequence
  Description of Artificial Sequence: Synthetic peptide
  Seed: SPGMMMGMFNMLSTV
SPGYMMNMGNMMSTV

SEQ ID NO: 201700 - protein, 15 aa, Artificial Sequence
  Description of Artificial Sequence: Synthetic peptide
  Seed: SPGMMMGMFNMLSTV
SPGYMMNMGNMSSTV

SEQ ID NO: 201701 - protein, 15 aa, Artificial Sequence
  Description of Artificial Sequence: Synthetic peptide
  Seed: SPGMMMGMFNMLSTV
SPGYMMNMGNMTSTV

SEQ ID NO: 201702 - protein, 15 aa, Artificial Sequence
  Description of Artificial Sequence: Synthetic peptide
  Seed: SPGMMMGMFNMLSTV
SPGYMMNMGNMVSTV

SEQ ID NO: 201703 - protein, 15 aa, Artificial Sequence
  Description of Artificial Sequence: Synthetic peptide
  Seed: SPGMMMGMFNMLSTV
SPGYMMNMGNMYSTV

SEQ ID NO: 201704 - protein, 15 aa, Artificial Sequence
  Description of Artificial Sequence: Synthetic peptide
  Seed: SPGMMMGMFNMLSTV
SPGYMMNMHNMFSTV

SEQ ID NO: 201705 - protein, 15 aa, Artificial Sequence
  Description of Artificial Sequence: Synthetic peptide
  Seed: SPGMMMGMFNMLSTV
SPGYMMNMHNMISTV

SEQ ID NO: 201706 - protein, 15 aa, Artificial Sequence
  Description of Artificial Sequence: Synthetic peptide
  Seed: SPGMMMGMFNMLSTV
SPGYMMNMHNMLSTV

SEQ ID NO: 201707 - protein, 15 aa, Artificial Sequence
  Description of Artificial Sequence: Synthetic peptide
  Seed: SPGMMMGMFNMLSTV
SPGYMMNMHNMMSTV

SEQ ID NO: 201708 - protein, 15 aa, Artificial Sequence
  Description of Artificial Sequence: Synthetic peptide
  Seed: SPGMMMGMFNMLSTV
SPGYMMNMHNMVSTV

SEQ ID NO: 201709 - protein, 15 aa, Artificial Sequence
  Description of Artificial Sequence: Synthetic peptide
  Seed: SPGMMMGMFNMLSTV
SPGYMMNMHNMYSTV

SEQ ID NO: 201710 - protein, 15 aa, Artificial Sequence
  Description of Artificial Sequence: Synthetic peptide
  Seed: SPGMMMGMFNMLSTV
SPGYMMNMINMASTV

SEQ ID NO: 201711 - protein, 15 aa, Artificial Sequence
  Description of Artificial Sequence: Synthetic peptide
  Seed: SPGMMMGMFNMLSTV
SPGYMMNMINMFSTV

SEQ ID NO: 201712 - protein, 15 aa, Artificial Sequence
  Description of Artificial Sequence: Synthetic peptide
  Seed: SPGMMMGMFNMLSTV
SPGYMMNMINMISTV

SEQ ID NO: 201713 - protein, 15 aa, Artificial Sequence
  Description of Artificial Sequence: Synthetic peptide
  Seed: SPGMMMGMFNMLSTV
SPGYMMNMINMLSTV

SEQ ID NO: 201714 - protein, 15 aa, Artificial Sequence
  Description of Artificial Sequence: Synthetic peptide
  Seed: SPGMMMGMFNMLSTV
SPGYMMNMINMMSTV

SEQ ID NO: 201715 - protein, 15 aa, Artificial Sequence
  Description of Artificial Sequence: Synthetic peptide
  Seed: SPGMMMGMFNMLSTV
SPGYMMNMINMSSTV

SEQ ID NO: 201716 - protein, 15 aa, Artificial Sequence
  Description of Artificial Sequence: Synthetic peptide
  Seed: SPGMMMGMFNMLSTV
SPGYMMNMINMTSTV

SEQ ID NO: 201717 - protein, 15 aa, Artificial Sequence
  Description of Artificial Sequence: Synthetic peptide
  Seed: SPGMMMGMFNMLSTV
SPGYMMNMINMVSTV

SEQ ID NO: 201718 - protein, 15 aa, Artificial Sequence
  Description of Artificial Sequence: Synthetic peptide
  Seed: SPGMMMGMFNMLSTV
SPGYMMNMINMYSTV

SEQ ID NO: 201719 - protein, 15 aa, Artificial Sequence
  Description of Artificial Sequence: Synthetic peptide
  Seed: SPGMMMGMFNMLSTV
SPGYMMNMKNMISTV

SEQ ID NO: 201720 - protein, 15 aa, Artificial Sequence
  Description of Artificial Sequence: Synthetic peptide
  Seed: SPGMMMGMFNMLSTV
SPGYMMNMKNMLSTV

SEQ ID NO: 201721 - protein, 15 aa, Artificial Sequence
  Description of Artificial Sequence: Synthetic peptide
  Seed: SPGMMMGMFNMLSTV
SPGYMMNMKNMVSTV

SEQ ID NO: 201722 - protein, 15 aa, Artificial Sequence
  Description of Artificial Sequence: Synthetic peptide
  Seed: SPGMMMGMFNMLSTV
SPGYMMNMLNMASTV

SEQ ID NO: 201723 - protein, 15 aa, Artificial Sequence
  Description of Artificial Sequence: Synthetic peptide
  Seed: SPGMMMGMFNMLSTV
SPGYMMNMLNMFSTV

SEQ ID NO: 201724 - protein, 15 aa, Artificial Sequence
  Description of Artificial Sequence: Synthetic peptide
  Seed: SPGMMMGMFNMLSTV
SPGYMMNMLNMISTV

SEQ ID NO: 201725 - protein, 15 aa, Artificial Sequence
  Description of Artificial Sequence: Synthetic peptide
  Seed: SPGMMMGMFNMLSTV
SPGYMMNMLNMLSTV

SEQ ID NO: 201726 - protein, 15 aa, Artificial Sequence
  Description of Artificial Sequence: Synthetic peptide
  Seed: SPGMMMGMFNMLSTV
SPGYMMNMLNMMSTV

SEQ ID NO: 201727 - protein, 15 aa, Artificial Sequence
  Description of Artificial Sequence: Synthetic peptide
  Seed: SPGMMMGMFNMLSTV
SPGYMMNMLNMVSTV

SEQ ID NO: 201728 - protein, 15 aa, Artificial Sequence
  Description of Artificial Sequence: Synthetic peptide
  Seed: SPGMMMGMFNMLSTV
SPGYMMNMLNMYSTV

SEQ ID NO: 201729 - protein, 15 aa, Artificial Sequence
  Description of Artificial Sequence: Synthetic peptide
  Seed: SPGMMMGMFNMLSTV
SPGYMMNMMNMASTV

SEQ ID NO: 201730 - protein, 15 aa, Artificial Sequence
  Description of Artificial Sequence: Synthetic peptide
  Seed: SPGMMMGMFNMLSTV
SPGYMMNMMNMFSTV

SEQ ID NO: 201731 - protein, 15 aa, Artificial Sequence
  Description of Artificial Sequence: Synthetic peptide
  Seed: SPGMMMGMFNMLSTV
SPGYMMNMMNMISTV

SEQ ID NO: 201732 - protein, 15 aa, Artificial Sequence
  Description of Artificial Sequence: Synthetic peptide
  Seed: SPGMMMGMFNMLSTV
SPGYMMNMMNMLSTV

SEQ ID NO: 201733 - protein, 15 aa, Artificial Sequence
  Description of Artificial Sequence: Synthetic peptide
  Seed: SPGMMMGMFNMLSTV
SPGYMMNMMNMMSTV

SEQ ID NO: 201734 - protein, 15 aa, Artificial Sequence
  Description of Artificial Sequence: Synthetic peptide
  Seed: SPGMMMGMFNMLSTV
SPGYMMNMMNMVSTV

SEQ ID NO: 201735 - protein, 15 aa, Artificial Sequence
  Description of Artificial Sequence: Synthetic peptide
  Seed: SPGMMMGMFNMLSTV
SPGYMMNMMNMYSTV

SEQ ID NO: 201736 - protein, 15 aa, Artificial Sequence
  Description of Artificial Sequence: Synthetic peptide
  Seed: SPGMMMGMFNMLSTV
SPGYMMNMNNMASTV

SEQ ID NO: 201737 - protein, 15 aa, Artificial Sequence
  Description of Artificial Sequence: Synthetic peptide
  Seed: SPGMMMGMFNMLSTV
SPGYMMNMNNMFSTV

SEQ ID NO: 201738 - protein, 15 aa, Artificial Sequence
  Description of Artificial Sequence: Synthetic peptide
  Seed: SPGMMMGMFNMLSTV
SPGYMMNMNNMISTV

SEQ ID NO: 201739 - protein, 15 aa, Artificial Sequence
  Description of Artificial Sequence: Synthetic peptide
  Seed: SPGMMMGMFNMLSTV
SPGYMMNMNNMLSTV

SEQ ID NO: 201740 - protein, 15 aa, Artificial Sequence
  Description of Artificial Sequence: Synthetic peptide
  Seed: SPGMMMGMFNMLSTV
SPGYMMNMNNMMSTV

SEQ ID NO: 201741 - protein, 15 aa, Artificial Sequence
  Description of Artificial Sequence: Synthetic peptide
  Seed: SPGMMMGMFNMLSTV
SPGYMMNMNNMNSTV

SEQ ID NO: 201742 - protein, 15 aa, Artificial Sequence
  Description of Artificial Sequence: Synthetic peptide
  Seed: SPGMMMGMFNMLSTV
SPGYMMNMNNMRSTV

SEQ ID NO: 201743 - protein, 15 aa, Artificial Sequence
  Description of Artificial Sequence: Synthetic peptide
  Seed: SPGMMMGMFNMLSTV
SPGYMMNMNNMSSTV

SEQ ID NO: 201744 - protein, 15 aa, Artificial Sequence
  Description of Artificial Sequence: Synthetic peptide
  Seed: SPGMMMGMFNMLSTV
SPGYMMNMNNMTSTV

SEQ ID NO: 201745 - protein, 15 aa, Artificial Sequence
  Description of Artificial Sequence: Synthetic peptide
  Seed: SPGMMMGMFNMLSTV
SPGYMMNMNNMVSTV

SEQ ID NO: 201746 - protein, 15 aa, Artificial Sequence
  Description of Artificial Sequence: Synthetic peptide
  Seed: SPGMMMGMFNMLSTV
SPGYMMNMNNMWSTV

SEQ ID NO: 201747 - protein, 15 aa, Artificial Sequence
  Description of Artificial Sequence: Synthetic peptide
  Seed: SPGMMMGMFNMLSTV
SPGYMMNMNNMYSTV

SEQ ID NO: 201748 - protein, 15 aa, Artificial Sequence
  Description of Artificial Sequence: Synthetic peptide
  Seed: SPGMMMGMFNMLSTV
SPGYMMNMPNMASTV

SEQ ID NO: 201749 - protein, 15 aa, Artificial Sequence
  Description of Artificial Sequence: Synthetic peptide
  Seed: SPGMMMGMFNMLSTV
SPGYMMNMPNMFSTV

SEQ ID NO: 201750 - protein, 15 aa, Artificial Sequence
  Description of Artificial Sequence: Synthetic peptide
  Seed: SPGMMMGMFNMLSTV
SPGYMMNMPNMISTV

SEQ ID NO: 201751 - protein, 15 aa, Artificial Sequence
  Description of Artificial Sequence: Synthetic peptide
  Seed: SPGMMMGMFNMLSTV
SPGYMMNMPNMLSTV

SEQ ID NO: 201752 - protein, 15 aa, Artificial Sequence
  Description of Artificial Sequence: Synthetic peptide
  Seed: SPGMMMGMFNMLSTV
SPGYMMNMPNMMSTV

SEQ ID NO: 201753 - protein, 15 aa, Artificial Sequence
  Description of Artificial Sequence: Synthetic peptide
  Seed: SPGMMMGMFNMLSTV
SPGYMMNMPNMVSTV

SEQ ID NO: 201754 - protein, 15 aa, Artificial Sequence
  Description of Artificial Sequence: Synthetic peptide
  Seed: SPGMMMGMFNMLSTV
SPGYMMNMPNMWSTV

SEQ ID NO: 201755 - protein, 15 aa, Artificial Sequence
  Description of Artificial Sequence: Synthetic peptide
  Seed: SPGMMMGMFNMLSTV
SPGYMMNMPNMYSTV

SEQ ID NO: 201756 - protein, 15 aa, Artificial Sequence
  Description of Artificial Sequence: Synthetic peptide
  Seed: SPGMMMGMFNMLSTV
SPGYMMNMQNMFSTV

SEQ ID NO: 201757 - protein, 15 aa, Artificial Sequence
  Description of Artificial Sequence: Synthetic peptide
  Seed: SPGMMMGMFNMLSTV
SPGYMMNMQNMISTV

SEQ ID NO: 201758 - protein, 15 aa, Artificial Sequence
  Description of Artificial Sequence: Synthetic peptide
  Seed: SPGMMMGMFNMLSTV
SPGYMMNMQNMLSTV

SEQ ID NO: 201759 - protein, 15 aa, Artificial Sequence
  Description of Artificial Sequence: Synthetic peptide
  Seed: SPGMMMGMFNMLSTV
SPGYMMNMQNMVSTV

SEQ ID NO: 201760 - protein, 15 aa, Artificial Sequence
  Description of Artificial Sequence: Synthetic peptide
  Seed: SPGMMMGMFNMLSTV
SPGYMMNMRNMISTV

SEQ ID NO: 201761 - protein, 15 aa, Artificial Sequence
  Description of Artificial Sequence: Synthetic peptide
  Seed: SPGMMMGMFNMLSTV
SPGYMMNMRNMLSTV

SEQ ID NO: 201762 - protein, 15 aa, Artificial Sequence
  Description of Artificial Sequence: Synthetic peptide
  Seed: SPGMMMGMFNMLSTV
SPGYMMNMRNMVSTV

SEQ ID NO: 201763 - protein, 15 aa, Artificial Sequence
  Description of Artificial Sequence: Synthetic peptide
  Seed: SPGMMMGMFNMLSTV
SPGYMMNMSNMASTV

SEQ ID NO: 201764 - protein, 15 aa, Artificial Sequence
  Description of Artificial Sequence: Synthetic peptide
  Seed: SPGMMMGMFNMLSTV
SPGYMMNMSNMFSTV

SEQ ID NO: 201765 - protein, 15 aa, Artificial Sequence
  Description of Artificial Sequence: Synthetic peptide
  Seed: SPGMMMGMFNMLSTV
SPGYMMNMSNMISTV

SEQ ID NO: 201766 - protein, 15 aa, Artificial Sequence
  Description of Artificial Sequence: Synthetic peptide
  Seed: SPGMMMGMFNMLSTV
SPGYMMNMSNMLSTV

SEQ ID NO: 201767 - protein, 15 aa, Artificial Sequence
  Description of Artificial Sequence: Synthetic peptide
  Seed: SPGMMMGMFNMLSTV
SPGYMMNMSNMMSTV

SEQ ID NO: 201768 - protein, 15 aa, Artificial Sequence
  Description of Artificial Sequence: Synthetic peptide
  Seed: SPGMMMGMFNMLSTV
SPGYMMNMSNMNSTV

SEQ ID NO: 201769 - protein, 15 aa, Artificial Sequence
  Description of Artificial Sequence: Synthetic peptide
  Seed: SPGMMMGMFNMLSTV
SPGYMMNMSNMSSTV

SEQ ID NO: 201770 - protein, 15 aa, Artificial Sequence
  Description of Artificial Sequence: Synthetic peptide
  Seed: SPGMMMGMFNMLSTV
SPGYMMNMSNMTSTV

SEQ ID NO: 201771 - protein, 15 aa, Artificial Sequence
  Description of Artificial Sequence: Synthetic peptide
  Seed: SPGMMMGMFNMLSTV
SPGYMMNMSNMVSTV

SEQ ID NO: 201772 - protein, 15 aa, Artificial Sequence
  Description of Artificial Sequence: Synthetic peptide
  Seed: SPGMMMGMFNMLSTV
SPGYMMNMSNMWSTV

SEQ ID NO: 201773 - protein, 15 aa, Artificial Sequence
  Description of Artificial Sequence: Synthetic peptide
  Seed: SPGMMMGMFNMLSTV
SPGYMMNMSNMYSTV

SEQ ID NO: 201774 - protein, 15 aa, Artificial Sequence
  Description of Artificial Sequence: Synthetic peptide
  Seed: SPGMMMGMFNMLSTV
SPGYMMNMTNMASTV

SEQ ID NO: 201775 - protein, 15 aa, Artificial Sequence
  Description of Artificial Sequence: Synthetic peptide
  Seed: SPGMMMGMFNMLSTV
SPGYMMNMTNMFSTV

SEQ ID NO: 201776 - protein, 15 aa, Artificial Sequence
  Description of Artificial Sequence: Synthetic peptide
  Seed: SPGMMMGMFNMLSTV
SPGYMMNMTNMISTV

SEQ ID NO: 201777 - protein, 15 aa, Artificial Sequence
  Description of Artificial Sequence: Synthetic peptide
  Seed: SPGMMMGMFNMLSTV
SPGYMMNMTNMLSTV

SEQ ID NO: 201778 - protein, 15 aa, Artificial Sequence
  Description of Artificial Sequence: Synthetic peptide
  Seed: SPGMMMGMFNMLSTV
SPGYMMNMTNMMSTV

SEQ ID NO: 201779 - protein, 15 aa, Artificial Sequence
  Description of Artificial Sequence: Synthetic peptide
  Seed: SPGMMMGMFNMLSTV
SPGYMMNMTNMSSTV

SEQ ID NO: 201780 - protein, 15 aa, Artificial Sequence
  Description of Artificial Sequence: Synthetic peptide
  Seed: SPGMMMGMFNMLSTV
SPGYMMNMTNMTSTV

SEQ ID NO: 201781 - protein, 15 aa, Artificial Sequence
  Description of Artificial Sequence: Synthetic peptide
  Seed: SPGMMMGMFNMLSTV
SPGYMMNMTNMVSTV

SEQ ID NO: 201782 - protein, 15 aa, Artificial Sequence
  Description of Artificial Sequence: Synthetic peptide
  Seed: SPGMMMGMFNMLSTV
SPGYMMNMTNMWSTV

SEQ ID NO: 201783 - protein, 15 aa, Artificial Sequence
  Description of Artificial Sequence: Synthetic peptide
  Seed: SPGMMMGMFNMLSTV
SPGYMMNMTNMYSTV

SEQ ID NO: 201784 - protein, 15 aa, Artificial Sequence
  Description of Artificial Sequence: Synthetic peptide
  Seed: SPGMMMGMFNMLSTV
SPGYMMNMVNMASTV

SEQ ID NO: 201785 - protein, 15 aa, Artificial Sequence
  Description of Artificial Sequence: Synthetic peptide
  Seed: SPGMMMGMFNMLSTV
SPGYMMNMVNMFSTV

SEQ ID NO: 201786 - protein, 15 aa, Artificial Sequence
  Description of Artificial Sequence: Synthetic peptide
  Seed: SPGMMMGMFNMLSTV
SPGYMMNMVNMISTV

SEQ ID NO: 201787 - protein, 15 aa, Artificial Sequence
  Description of Artificial Sequence: Synthetic peptide
  Seed: SPGMMMGMFNMLSTV
SPGYMMNMVNMLSTV

SEQ ID NO: 201788 - protein, 15 aa, Artificial Sequence
  Description of Artificial Sequence: Synthetic peptide
  Seed: SPGMMMGMFNMLSTV
SPGYMMNMVNMMSTV

SEQ ID NO: 201789 - protein, 15 aa, Artificial Sequence
  Description of Artificial Sequence: Synthetic peptide
  Seed: SPGMMMGMFNMLSTV
SPGYMMNMVNMNSTV

SEQ ID NO: 201790 - protein, 15 aa, Artificial Sequence
  Description of Artificial Sequence: Synthetic peptide
  Seed: SPGMMMGMFNMLSTV
SPGYMMNMVNMSSTV

SEQ ID NO: 201791 - protein, 15 aa, Artificial Sequence
  Description of Artificial Sequence: Synthetic peptide
  Seed: SPGMMMGMFNMLSTV
SPGYMMNMVNMTSTV

SEQ ID NO: 201792 - protein, 15 aa, Artificial Sequence
  Description of Artificial Sequence: Synthetic peptide
  Seed: SPGMMMGMFNMLSTV
SPGYMMNMVNMVSTV

SEQ ID NO: 201793 - protein, 15 aa, Artificial Sequence
  Description of Artificial Sequence: Synthetic peptide
  Seed: SPGMMMGMFNMLSTV
SPGYMMNMVNMYSTV

SEQ ID NO: 201794 - protein, 15 aa, Artificial Sequence
  Description of Artificial Sequence: Synthetic peptide
  Seed: SPGMMMGMFNMLSTV
SPGYMMNMWNMISTV

SEQ ID NO: 201795 - protein, 15 aa, Artificial Sequence
  Description of Artificial Sequence: Synthetic peptide
  Seed: SPGMMMGMFNMLSTV
SPGYMMNMWNMVSTV

SEQ ID NO: 201796 - protein, 15 aa, Artificial Sequence
  Description of Artificial Sequence: Synthetic peptide
  Seed: SPGMMMGMFNMLSTV
SPGYMMNMYNMFSTV

SEQ ID NO: 201797 - protein, 15 aa, Artificial Sequence
  Description of Artificial Sequence: Synthetic peptide
  Seed: SPGMMMGMFNMLSTV
SPGYMMNMYNMISTV

SEQ ID NO: 201798 - protein, 15 aa, Artificial Sequence
  Description of Artificial Sequence: Synthetic peptide
  Seed: SPGMMMGMFNMLSTV
SPGYMMNMYNMLSTV

SEQ ID NO: 201799 - protein, 15 aa, Artificial Sequence
  Description of Artificial Sequence: Synthetic peptide
  Seed: SPGMMMGMFNMLSTV
SPGYMMNMYNMVSTV

SEQ ID NO: 201800 - protein, 15 aa, Artificial Sequence
  Description of Artificial Sequence: Synthetic peptide
  Seed: SPGMMMGMFNMLSTV
SPGYMMPMFNMLSTV

SEQ ID NO: 201801 - protein, 15 aa, Artificial Sequence
  Description of Artificial Sequence: Synthetic peptide
  Seed: SPGMMMGMFNMLSTV
SPGYMMQMANMISTV

SEQ ID NO: 201802 - protein, 15 aa, Artificial Sequence
  Description of Artificial Sequence: Synthetic peptide
  Seed: SPGMMMGMFNMLSTV
SPGYMMQMANMLSTV

SEQ ID NO: 201803 - protein, 15 aa, Artificial Sequence
  Description of Artificial Sequence: Synthetic peptide
  Seed: SPGMMMGMFNMLSTV
SPGYMMQMANMVSTV

SEQ ID NO: 201804 - protein, 15 aa, Artificial Sequence
  Description of Artificial Sequence: Synthetic peptide
  Seed: SPGMMMGMFNMLSTV
SPGYMMQMFNMFSTV

SEQ ID NO: 201805 - protein, 15 aa, Artificial Sequence
  Description of Artificial Sequence: Synthetic peptide
  Seed: SPGMMMGMFNMLSTV
SPGYMMQMFNMISTV

SEQ ID NO: 201806 - protein, 15 aa, Artificial Sequence
  Description of Artificial Sequence: Synthetic peptide
  Seed: SPGMMMGMFNMLSTV
SPGYMMQMFNMLSTV

SEQ ID NO: 201807 - protein, 15 aa, Artificial Sequence
  Description of Artificial Sequence: Synthetic peptide
  Seed: SPGMMMGMFNMLSTV
SPGYMMQMFNMMSTV

SEQ ID NO: 201808 - protein, 15 aa, Artificial Sequence
  Description of Artificial Sequence: Synthetic peptide
  Seed: SPGMMMGMFNMLSTV
SPGYMMQMFNMVSTV

SEQ ID NO: 201809 - protein, 15 aa, Artificial Sequence
  Description of Artificial Sequence: Synthetic peptide
  Seed: SPGMMMGMFNMLSTV
SPGYMMQMFNMYSTV

SEQ ID NO: 201810 - protein, 15 aa, Artificial Sequence
  Description of Artificial Sequence: Synthetic peptide
  Seed: SPGMMMGMFNMLSTV
SPGYMMQMGNMISTV

SEQ ID NO: 201811 - protein, 15 aa, Artificial Sequence
  Description of Artificial Sequence: Synthetic peptide
  Seed: SPGMMMGMFNMLSTV
SPGYMMQMLNMLSTV

SEQ ID NO: 201812 - protein, 15 aa, Artificial Sequence
  Description of Artificial Sequence: Synthetic peptide
  Seed: SPGMMMGMFNMLSTV
SPGYMMQMNNMFSTV

SEQ ID NO: 201813 - protein, 15 aa, Artificial Sequence
  Description of Artificial Sequence: Synthetic peptide
  Seed: SPGMMMGMFNMLSTV
SPGYMMQMNNMISTV

SEQ ID NO: 201814 - protein, 15 aa, Artificial Sequence
  Description of Artificial Sequence: Synthetic peptide
  Seed: SPGMMMGMFNMLSTV
SPGYMMQMNNMLSTV

SEQ ID NO: 201815 - protein, 15 aa, Artificial Sequence
  Description of Artificial Sequence: Synthetic peptide
  Seed: SPGMMMGMFNMLSTV
SPGYMMQMNNMMSTV

SEQ ID NO: 201816 - protein, 15 aa, Artificial Sequence
  Description of Artificial Sequence: Synthetic peptide
  Seed: SPGMMMGMFNMLSTV
SPGYMMQMNNMVSTV

SEQ ID NO: 201817 - protein, 15 aa, Artificial Sequence
  Description of Artificial Sequence: Synthetic peptide
  Seed: SPGMMMGMFNMLSTV
SPGYMMQMNNMYSTV

SEQ ID NO: 201818 - protein, 15 aa, Artificial Sequence
  Description of Artificial Sequence: Synthetic peptide
  Seed: SPGMMMGMFNMLSTV
SPGYMMQMPNMISTV

SEQ ID NO: 201819 - protein, 15 aa, Artificial Sequence
  Description of Artificial Sequence: Synthetic peptide
  Seed: SPGMMMGMFNMLSTV
SPGYMMQMSNMISTV

SEQ ID NO: 201820 - protein, 15 aa, Artificial Sequence
  Description of Artificial Sequence: Synthetic peptide
  Seed: SPGMMMGMFNMLSTV
SPGYMMQMSNMLSTV

SEQ ID NO: 201821 - protein, 15 aa, Artificial Sequence
  Description of Artificial Sequence: Synthetic peptide
  Seed: SPGMMMGMFNMLSTV
SPGYMMQMSNMVSTV

SEQ ID NO: 201822 - protein, 15 aa, Artificial Sequence
  Description of Artificial Sequence: Synthetic peptide
  Seed: SPGMMMGMFNMLSTV
SPGYMMQMYNMFSTV

SEQ ID NO: 201823 - protein, 15 aa, Artificial Sequence
  Description of Artificial Sequence: Synthetic peptide
  Seed: SPGMMMGMFNMLSTV
SPGYMMQMYNMISTV

SEQ ID NO: 201824 - protein, 15 aa, Artificial Sequence
  Description of Artificial Sequence: Synthetic peptide
  Seed: SPGMMMGMFNMLSTV
SPGYMMQMYNMLSTV

SEQ ID NO: 201825 - protein, 15 aa, Artificial Sequence
  Description of Artificial Sequence: Synthetic peptide
  Seed: SPGMMMGMFNMLSTV
SPGYMMRMFNMFSTV

SEQ ID NO: 201826 - protein, 15 aa, Artificial Sequence
  Description of Artificial Sequence: Synthetic peptide
  Seed: SPGMMMGMFNMLSTV
SPGYMMRMFNMISTV

SEQ ID NO: 201827 - protein, 15 aa, Artificial Sequence
  Description of Artificial Sequence: Synthetic peptide
  Seed: SPGMMMGMFNMLSTV
SPGYMMRMFNMLSTV

SEQ ID NO: 201828 - protein, 15 aa, Artificial Sequence
  Description of Artificial Sequence: Synthetic peptide
  Seed: SPGMMMGMFNMLSTV
SPGYMMRMFNMMSTV

SEQ ID NO: 201829 - protein, 15 aa, Artificial Sequence
  Description of Artificial Sequence: Synthetic peptide
  Seed: SPGMMMGMFNMLSTV
SPGYMMRMFNMVSTV

SEQ ID NO: 201830 - protein, 15 aa, Artificial Sequence
  Description of Artificial Sequence: Synthetic peptide
  Seed: SPGMMMGMFNMLSTV
SPGYMMRMNNMASTV

SEQ ID NO: 201831 - protein, 15 aa, Artificial Sequence
  Description of Artificial Sequence: Synthetic peptide
  Seed: SPGMMMGMFNMLSTV
SPGYMMRMNNMFSTV

SEQ ID NO: 201832 - protein, 15 aa, Artificial Sequence
  Description of Artificial Sequence: Synthetic peptide
  Seed: SPGMMMGMFNMLSTV
SPGYMMRMNNMISTV

SEQ ID NO: 201833 - protein, 15 aa, Artificial Sequence
  Description of Artificial Sequence: Synthetic peptide
  Seed: SPGMMMGMFNMLSTV
SPGYMMRMNNMLSTV

SEQ ID NO: 201834 - protein, 15 aa, Artificial Sequence
  Description of Artificial Sequence: Synthetic peptide
  Seed: SPGMMMGMFNMLSTV
SPGYMMRMNNMMSTV

SEQ ID NO: 201835 - protein, 15 aa, Artificial Sequence
  Description of Artificial Sequence: Synthetic peptide
  Seed: SPGMMMGMFNMLSTV
SPGYMMRMNNMVSTV

SEQ ID NO: 201836 - protein, 15 aa, Artificial Sequence
  Description of Artificial Sequence: Synthetic peptide
  Seed: SPGMMMGMFNMLSTV
SPGYMMRMNNMYSTV

SEQ ID NO: 201837 - protein, 15 aa, Artificial Sequence
  Description of Artificial Sequence: Synthetic peptide
  Seed: SPGMMMGMFNMLSTV
SPGYMMRMSNMISTV

SEQ ID NO: 201838 - protein, 15 aa, Artificial Sequence
  Description of Artificial Sequence: Synthetic peptide
  Seed: SPGMMMGMFNMLSTV
SPGYMMRMYNMFSTV

SEQ ID NO: 201839 - protein, 15 aa, Artificial Sequence
  Description of Artificial Sequence: Synthetic peptide
  Seed: SPGMMMGMFNMLSTV
SPGYMMSMANMASTV

SEQ ID NO: 201840 - protein, 15 aa, Artificial Sequence
  Description of Artificial Sequence: Synthetic peptide
  Seed: SPGMMMGMFNMLSTV
SPGYMMSMANMFSTV

SEQ ID NO: 201841 - protein, 15 aa, Artificial Sequence
  Description of Artificial Sequence: Synthetic peptide
  Seed: SPGMMMGMFNMLSTV
SPGYMMSMANMGSTV

SEQ ID NO: 201842 - protein, 15 aa, Artificial Sequence
  Description of Artificial Sequence: Synthetic peptide
  Seed: SPGMMMGMFNMLSTV
SPGYMMSMANMHSTV

SEQ ID NO: 201843 - protein, 15 aa, Artificial Sequence
  Description of Artificial Sequence: Synthetic peptide
  Seed: SPGMMMGMFNMLSTV
SPGYMMSMANMISTV

SEQ ID NO: 201844 - protein, 15 aa, Artificial Sequence
  Description of Artificial Sequence: Synthetic peptide
  Seed: SPGMMMGMFNMLSTV
SPGYMMSMANMLSTV

SEQ ID NO: 201845 - protein, 15 aa, Artificial Sequence
  Description of Artificial Sequence: Synthetic peptide
  Seed: SPGMMMGMFNMLSTV
SPGYMMSMANMMSTV

SEQ ID NO: 201846 - protein, 15 aa, Artificial Sequence
  Description of Artificial Sequence: Synthetic peptide
  Seed: SPGMMMGMFNMLSTV
SPGYMMSMANMNSTV

SEQ ID NO: 201847 - protein, 15 aa, Artificial Sequence
  Description of Artificial Sequence: Synthetic peptide
  Seed: SPGMMMGMFNMLSTV
SPGYMMSMANMPSTV

SEQ ID NO: 201848 - protein, 15 aa, Artificial Sequence
  Description of Artificial Sequence: Synthetic peptide
  Seed: SPGMMMGMFNMLSTV
SPGYMMSMANMQSTV

SEQ ID NO: 201849 - protein, 15 aa, Artificial Sequence
  Description of Artificial Sequence: Synthetic peptide
  Seed: SPGMMMGMFNMLSTV
SPGYMMSMANMSSTV

SEQ ID NO: 201850 - protein, 15 aa, Artificial Sequence
  Description of Artificial Sequence: Synthetic peptide
  Seed: SPGMMMGMFNMLSTV
SPGYMMSMANMTSTV

SEQ ID NO: 201851 - protein, 15 aa, Artificial Sequence
  Description of Artificial Sequence: Synthetic peptide
  Seed: SPGMMMGMFNMLSTV
SPGYMMSMANMVSTV

SEQ ID NO: 201852 - protein, 15 aa, Artificial Sequence
  Description of Artificial Sequence: Synthetic peptide
  Seed: SPGMMMGMFNMLSTV
SPGYMMSMANMWSTV

SEQ ID NO: 201853 - protein, 15 aa, Artificial Sequence
  Description of Artificial Sequence: Synthetic peptide
  Seed: SPGMMMGMFNMLSTV
SPGYMMSMANMYSTV

SEQ ID NO: 201854 - protein, 15 aa, Artificial Sequence
  Description of Artificial Sequence: Synthetic peptide
  Seed: SPGMMMGMFNMLSTV
SPGYMMSMDNMISTV

SEQ ID NO: 201855 - protein, 15 aa, Artificial Sequence
  Description of Artificial Sequence: Synthetic peptide
  Seed: SPGMMMGMFNMLSTV
SPGYMMSMDNMLSTV

SEQ ID NO: 201856 - protein, 15 aa, Artificial Sequence
  Description of Artificial Sequence: Synthetic peptide
  Seed: SPGMMMGMFNMLSTV
SPGYMMSMDNMVSTV

SEQ ID NO: 201857 - protein, 15 aa, Artificial Sequence
  Description of Artificial Sequence: Synthetic peptide
  Seed: SPGMMMGMFNMLSTV
SPGYMMSMENMISTV

SEQ ID NO: 201858 - protein, 15 aa, Artificial Sequence
  Description of Artificial Sequence: Synthetic peptide
  Seed: SPGMMMGMFNMLSTV
SPGYMMSMENMLSTV

SEQ ID NO: 201859 - protein, 15 aa, Artificial Sequence
  Description of Artificial Sequence: Synthetic peptide
  Seed: SPGMMMGMFNMLSTV
SPGYMMSMENMVSTV

SEQ ID NO: 201860 - protein, 15 aa, Artificial Sequence
  Description of Artificial Sequence: Synthetic peptide
  Seed: SPGMMMGMFNMLSTV
SPGYMMSMFNMASTV

SEQ ID NO: 201861 - protein, 15 aa, Artificial Sequence
  Description of Artificial Sequence: Synthetic peptide
  Seed: SPGMMMGMFNMLSTV
SPGYMMSMFNMDSTV

SEQ ID NO: 201862 - protein, 15 aa, Artificial Sequence
  Description of Artificial Sequence: Synthetic peptide
  Seed: SPGMMMGMFNMLSTV
SPGYMMSMFNMESTV

SEQ ID NO: 201863 - protein, 15 aa, Artificial Sequence
  Description of Artificial Sequence: Synthetic peptide
  Seed: SPGMMMGMFNMLSTV
SPGYMMSMFNMFSTV

SEQ ID NO: 201864 - protein, 15 aa, Artificial Sequence
  Description of Artificial Sequence: Synthetic peptide
  Seed: SPGMMMGMFNMLSTV
SPGYMMSMFNMISTV

SEQ ID NO: 201865 - protein, 15 aa, Artificial Sequence
  Description of Artificial Sequence: Synthetic peptide
  Seed: SPGMMMGMFNMLSTV
SPGYMMSMFNMLSTV

SEQ ID NO: 201866 - protein, 15 aa, Artificial Sequence
  Description of Artificial Sequence: Synthetic peptide
  Seed: SPGMMMGMFNMLSTV
SPGYMMSMFNMMSTV

SEQ ID NO: 201867 - protein, 15 aa, Artificial Sequence
  Description of Artificial Sequence: Synthetic peptide
  Seed: SPGMMMGMFNMLSTV
SPGYMMSMFNMNSTV

SEQ ID NO: 201868 - protein, 15 aa, Artificial Sequence
  Description of Artificial Sequence: Synthetic peptide
  Seed: SPGMMMGMFNMLSTV
SPGYMMSMFNMQSTV

SEQ ID NO: 201869 - protein, 15 aa, Artificial Sequence
  Description of Artificial Sequence: Synthetic peptide
  Seed: SPGMMMGMFNMLSTV
SPGYMMSMFNMSSTV

SEQ ID NO: 201870 - protein, 15 aa, Artificial Sequence
  Description of Artificial Sequence: Synthetic peptide
  Seed: SPGMMMGMFNMLSTV
SPGYMMSMFNMTSTV

SEQ ID NO: 201871 - protein, 15 aa, Artificial Sequence
  Description of Artificial Sequence: Synthetic peptide
  Seed: SPGMMMGMFNMLSTV
SPGYMMSMFNMVSTV

SEQ ID NO: 201872 - protein, 15 aa, Artificial Sequence
  Description of Artificial Sequence: Synthetic peptide
  Seed: SPGMMMGMFNMLSTV
SPGYMMSMFNMYSTV

SEQ ID NO: 201873 - protein, 15 aa, Artificial Sequence
  Description of Artificial Sequence: Synthetic peptide
  Seed: SPGMMMGMFNMLSTV
SPGYMMSMGNMASTV

SEQ ID NO: 201874 - protein, 15 aa, Artificial Sequence
  Description of Artificial Sequence: Synthetic peptide
  Seed: SPGMMMGMFNMLSTV
SPGYMMSMGNMFSTV

SEQ ID NO: 201875 - protein, 15 aa, Artificial Sequence
  Description of Artificial Sequence: Synthetic peptide
  Seed: SPGMMMGMFNMLSTV
SPGYMMSMGNMGSTV

SEQ ID NO: 201876 - protein, 15 aa, Artificial Sequence
  Description of Artificial Sequence: Synthetic peptide
  Seed: SPGMMMGMFNMLSTV
SPGYMMSMGNMISTV

SEQ ID NO: 201877 - protein, 15 aa, Artificial Sequence
  Description of Artificial Sequence: Synthetic peptide
  Seed: SPGMMMGMFNMLSTV
SPGYMMSMGNMLSTV

SEQ ID NO: 201878 - protein, 15 aa, Artificial Sequence
  Description of Artificial Sequence: Synthetic peptide
  Seed: SPGMMMGMFNMLSTV
SPGYMMSMGNMMSTV

SEQ ID NO: 201879 - protein, 15 aa, Artificial Sequence
  Description of Artificial Sequence: Synthetic peptide
  Seed: SPGMMMGMFNMLSTV
SPGYMMSMGNMNSTV

SEQ ID NO: 201880 - protein, 15 aa, Artificial Sequence
  Description of Artificial Sequence: Synthetic peptide
  Seed: SPGMMMGMFNMLSTV
SPGYMMSMGNMSSTV

SEQ ID NO: 201881 - protein, 15 aa, Artificial Sequence
  Description of Artificial Sequence: Synthetic peptide
  Seed: SPGMMMGMFNMLSTV
SPGYMMSMGNMTSTV

SEQ ID NO: 201882 - protein, 15 aa, Artificial Sequence
  Description of Artificial Sequence: Synthetic peptide
  Seed: SPGMMMGMFNMLSTV
SPGYMMSMGNMVSTV

SEQ ID NO: 201883 - protein, 15 aa, Artificial Sequence
  Description of Artificial Sequence: Synthetic peptide
  Seed: SPGMMMGMFNMLSTV
SPGYMMSMGNMYSTV

SEQ ID NO: 201884 - protein, 15 aa, Artificial Sequence
  Description of Artificial Sequence: Synthetic peptide
  Seed: SPGMMMGMFNMLSTV
SPGYMMSMHNMISTV

SEQ ID NO: 201885 - protein, 15 aa, Artificial Sequence
  Description of Artificial Sequence: Synthetic peptide
  Seed: SPGMMMGMFNMLSTV
SPGYMMSMHNMVSTV

SEQ ID NO: 201886 - protein, 15 aa, Artificial Sequence
  Description of Artificial Sequence: Synthetic peptide
  Seed: SPGMMMGMFNMLSTV
SPGYMMSMINMFSTV

SEQ ID NO: 201887 - protein, 15 aa, Artificial Sequence
  Description of Artificial Sequence: Synthetic peptide
  Seed: SPGMMMGMFNMLSTV
SPGYMMSMINMISTV

SEQ ID NO: 201888 - protein, 15 aa, Artificial Sequence
  Description of Artificial Sequence: Synthetic peptide
  Seed: SPGMMMGMFNMLSTV
SPGYMMSMINMLSTV

SEQ ID NO: 201889 - protein, 15 aa, Artificial Sequence
  Description of Artificial Sequence: Synthetic peptide
  Seed: SPGMMMGMFNMLSTV
SPGYMMSMINMMSTV

SEQ ID NO: 201890 - protein, 15 aa, Artificial Sequence
  Description of Artificial Sequence: Synthetic peptide
  Seed: SPGMMMGMFNMLSTV
SPGYMMSMINMVSTV

SEQ ID NO: 201891 - protein, 15 aa, Artificial Sequence
  Description of Artificial Sequence: Synthetic peptide
  Seed: SPGMMMGMFNMLSTV
SPGYMMSMLNMISTV

SEQ ID NO: 201892 - protein, 15 aa, Artificial Sequence
  Description of Artificial Sequence: Synthetic peptide
  Seed: SPGMMMGMFNMLSTV
SPGYMMSMLNMLSTV

SEQ ID NO: 201893 - protein, 15 aa, Artificial Sequence
  Description of Artificial Sequence: Synthetic peptide
  Seed: SPGMMMGMFNMLSTV
SPGYMMSMLNMVSTV

SEQ ID NO: 201894 - protein, 15 aa, Artificial Sequence
  Description of Artificial Sequence: Synthetic peptide
  Seed: SPGMMMGMFNMLSTV
SPGYMMSMMNMISTV

SEQ ID NO: 201895 - protein, 15 aa, Artificial Sequence
  Description of Artificial Sequence: Synthetic peptide
  Seed: SPGMMMGMFNMLSTV
SPGYMMSMMNMLSTV

SEQ ID NO: 201896 - protein, 15 aa, Artificial Sequence
  Description of Artificial Sequence: Synthetic peptide
  Seed: SPGMMMGMFNMLSTV
SPGYMMSMMNMMSTV

SEQ ID NO: 201897 - protein, 15 aa, Artificial Sequence
  Description of Artificial Sequence: Synthetic peptide
  Seed: SPGMMMGMFNMLSTV
SPGYMMSMMNMVSTV

SEQ ID NO: 201898 - protein, 15 aa, Artificial Sequence
  Description of Artificial Sequence: Synthetic peptide
  Seed: SPGMMMGMFNMLSTV
SPGYMMSMNNMASTV

SEQ ID NO: 201899 - protein, 15 aa, Artificial Sequence
  Description of Artificial Sequence: Synthetic peptide
  Seed: SPGMMMGMFNMLSTV
SPGYMMSMNNMFSTV

SEQ ID NO: 201900 - protein, 15 aa, Artificial Sequence
  Description of Artificial Sequence: Synthetic peptide
  Seed: SPGMMMGMFNMLSTV
SPGYMMSMNNMISTV

SEQ ID NO: 201901 - protein, 15 aa, Artificial Sequence
  Description of Artificial Sequence: Synthetic peptide
  Seed: SPGMMMGMFNMLSTV
SPGYMMSMNNMLSTV

SEQ ID NO: 201902 - protein, 15 aa, Artificial Sequence
  Description of Artificial Sequence: Synthetic peptide
  Seed: SPGMMMGMFNMLSTV
SPGYMMSMNNMMSTV

SEQ ID NO: 201903 - protein, 15 aa, Artificial Sequence
  Description of Artificial Sequence: Synthetic peptide
  Seed: SPGMMMGMFNMLSTV
SPGYMMSMNNMVSTV

SEQ ID NO: 201904 - protein, 15 aa, Artificial Sequence
  Description of Artificial Sequence: Synthetic peptide
  Seed: SPGMMMGMFNMLSTV
SPGYMMSMNNMYSTV

SEQ ID NO: 201905 - protein, 15 aa, Artificial Sequence
  Description of Artificial Sequence: Synthetic peptide
  Seed: SPGMMMGMFNMLSTV
SPGYMMSMPNMASTV

SEQ ID NO: 201906 - protein, 15 aa, Artificial Sequence
  Description of Artificial Sequence: Synthetic peptide
  Seed: SPGMMMGMFNMLSTV
SPGYMMSMPNMFSTV

SEQ ID NO: 201907 - protein, 15 aa, Artificial Sequence
  Description of Artificial Sequence: Synthetic peptide
  Seed: SPGMMMGMFNMLSTV
SPGYMMSMPNMGSTV

SEQ ID NO: 201908 - protein, 15 aa, Artificial Sequence
  Description of Artificial Sequence: Synthetic peptide
  Seed: SPGMMMGMFNMLSTV
SPGYMMSMPNMISTV

SEQ ID NO: 201909 - protein, 15 aa, Artificial Sequence
  Description of Artificial Sequence: Synthetic peptide
  Seed: SPGMMMGMFNMLSTV
SPGYMMSMPNMLSTV

SEQ ID NO: 201910 - protein, 15 aa, Artificial Sequence
  Description of Artificial Sequence: Synthetic peptide
  Seed: SPGMMMGMFNMLSTV
SPGYMMSMPNMMSTV

SEQ ID NO: 201911 - protein, 15 aa, Artificial Sequence
  Description of Artificial Sequence: Synthetic peptide
  Seed: SPGMMMGMFNMLSTV
SPGYMMSMPNMNSTV

SEQ ID NO: 201912 - protein, 15 aa, Artificial Sequence
  Description of Artificial Sequence: Synthetic peptide
  Seed: SPGMMMGMFNMLSTV
SPGYMMSMPNMSSTV

SEQ ID NO: 201913 - protein, 15 aa, Artificial Sequence
  Description of Artificial Sequence: Synthetic peptide
  Seed: SPGMMMGMFNMLSTV
SPGYMMSMPNMTSTV

SEQ ID NO: 201914 - protein, 15 aa, Artificial Sequence
  Description of Artificial Sequence: Synthetic peptide
  Seed: SPGMMMGMFNMLSTV
SPGYMMSMPNMVSTV

SEQ ID NO: 201915 - protein, 15 aa, Artificial Sequence
  Description of Artificial Sequence: Synthetic peptide
  Seed: SPGMMMGMFNMLSTV
SPGYMMSMPNMWSTV

SEQ ID NO: 201916 - protein, 15 aa, Artificial Sequence
  Description of Artificial Sequence: Synthetic peptide
  Seed: SPGMMMGMFNMLSTV
SPGYMMSMPNMYSTV

SEQ ID NO: 201917 - protein, 15 aa, Artificial Sequence
  Description of Artificial Sequence: Synthetic peptide
  Seed: SPGMMMGMFNMLSTV
SPGYMMSMQNMISTV

SEQ ID NO: 201918 - protein, 15 aa, Artificial Sequence
  Description of Artificial Sequence: Synthetic peptide
  Seed: SPGMMMGMFNMLSTV
SPGYMMSMQNMLSTV

SEQ ID NO: 201919 - protein, 15 aa, Artificial Sequence
  Description of Artificial Sequence: Synthetic peptide
  Seed: SPGMMMGMFNMLSTV
SPGYMMSMQNMMSTV

SEQ ID NO: 201920 - protein, 15 aa, Artificial Sequence
  Description of Artificial Sequence: Synthetic peptide
  Seed: SPGMMMGMFNMLSTV
SPGYMMSMQNMVSTV

SEQ ID NO: 201921 - protein, 15 aa, Artificial Sequence
  Description of Artificial Sequence: Synthetic peptide
  Seed: SPGMMMGMFNMLSTV
SPGYMMSMSNMASTV

SEQ ID NO: 201922 - protein, 15 aa, Artificial Sequence
  Description of Artificial Sequence: Synthetic peptide
  Seed: SPGMMMGMFNMLSTV
SPGYMMSMSNMFSTV

SEQ ID NO: 201923 - protein, 15 aa, Artificial Sequence
  Description of Artificial Sequence: Synthetic peptide
  Seed: SPGMMMGMFNMLSTV
SPGYMMSMSNMGSTV

SEQ ID NO: 201924 - protein, 15 aa, Artificial Sequence
  Description of Artificial Sequence: Synthetic peptide
  Seed: SPGMMMGMFNMLSTV
SPGYMMSMSNMHSTV

SEQ ID NO: 201925 - protein, 15 aa, Artificial Sequence
  Description of Artificial Sequence: Synthetic peptide
  Seed: SPGMMMGMFNMLSTV
SPGYMMSMSNMISTV

SEQ ID NO: 201926 - protein, 15 aa, Artificial Sequence
  Description of Artificial Sequence: Synthetic peptide
  Seed: SPGMMMGMFNMLSTV
SPGYMMSMSNMLSTV

SEQ ID NO: 201927 - protein, 15 aa, Artificial Sequence
  Description of Artificial Sequence: Synthetic peptide
  Seed: SPGMMMGMFNMLSTV
SPGYMMSMSNMMSTV

SEQ ID NO: 201928 - protein, 15 aa, Artificial Sequence
  Description of Artificial Sequence: Synthetic peptide
  Seed: SPGMMMGMFNMLSTV
SPGYMMSMSNMNSTV

SEQ ID NO: 201929 - protein, 15 aa, Artificial Sequence
  Description of Artificial Sequence: Synthetic peptide
  Seed: SPGMMMGMFNMLSTV
SPGYMMSMSNMPSTV

SEQ ID NO: 201930 - protein, 15 aa, Artificial Sequence
  Description of Artificial Sequence: Synthetic peptide
  Seed: SPGMMMGMFNMLSTV
SPGYMMSMSNMSSTV

SEQ ID NO: 201931 - protein, 15 aa, Artificial Sequence
  Description of Artificial Sequence: Synthetic peptide
  Seed: SPGMMMGMFNMLSTV
SPGYMMSMSNMTSTV

SEQ ID NO: 201932 - protein, 15 aa, Artificial Sequence
  Description of Artificial Sequence: Synthetic peptide
  Seed: SPGMMMGMFNMLSTV
SPGYMMSMSNMVSTV

SEQ ID NO: 201933 - protein, 15 aa, Artificial Sequence
  Description of Artificial Sequence: Synthetic peptide
  Seed: SPGMMMGMFNMLSTV
SPGYMMSMSNMWSTV

SEQ ID NO: 201934 - protein, 15 aa, Artificial Sequence
  Description of Artificial Sequence: Synthetic peptide
  Seed: SPGMMMGMFNMLSTV
SPGYMMSMSNMYSTV

SEQ ID NO: 201935 - protein, 15 aa, Artificial Sequence
  Description of Artificial Sequence: Synthetic peptide
  Seed: SPGMMMGMFNMLSTV
SPGYMMSMTNMASTV

SEQ ID NO: 201936 - protein, 15 aa, Artificial Sequence
  Description of Artificial Sequence: Synthetic peptide
  Seed: SPGMMMGMFNMLSTV
SPGYMMSMTNMFSTV

SEQ ID NO: 201937 - protein, 15 aa, Artificial Sequence
  Description of Artificial Sequence: Synthetic peptide
  Seed: SPGMMMGMFNMLSTV
SPGYMMSMTNMISTV

SEQ ID NO: 201938 - protein, 15 aa, Artificial Sequence
  Description of Artificial Sequence: Synthetic peptide
  Seed: SPGMMMGMFNMLSTV
SPGYMMSMTNMLSTV

SEQ ID NO: 201939 - protein, 15 aa, Artificial Sequence
  Description of Artificial Sequence: Synthetic peptide
  Seed: SPGMMMGMFNMLSTV
SPGYMMSMTNMMSTV

SEQ ID NO: 201940 - protein, 15 aa, Artificial Sequence
  Description of Artificial Sequence: Synthetic peptide
  Seed: SPGMMMGMFNMLSTV
SPGYMMSMTNMSSTV

SEQ ID NO: 201941 - protein, 15 aa, Artificial Sequence
  Description of Artificial Sequence: Synthetic peptide
  Seed: SPGMMMGMFNMLSTV
SPGYMMSMTNMTSTV

SEQ ID NO: 201942 - protein, 15 aa, Artificial Sequence
  Description of Artificial Sequence: Synthetic peptide
  Seed: SPGMMMGMFNMLSTV
SPGYMMSMTNMVSTV

SEQ ID NO: 201943 - protein, 15 aa, Artificial Sequence
  Description of Artificial Sequence: Synthetic peptide
  Seed: SPGMMMGMFNMLSTV
SPGYMMSMTNMYSTV

SEQ ID NO: 201944 - protein, 15 aa, Artificial Sequence
  Description of Artificial Sequence: Synthetic peptide
  Seed: SPGMMMGMFNMLSTV
SPGYMMSMVNMASTV

SEQ ID NO: 201945 - protein, 15 aa, Artificial Sequence
  Description of Artificial Sequence: Synthetic peptide
  Seed: SPGMMMGMFNMLSTV
SPGYMMSMVNMFSTV

SEQ ID NO: 201946 - protein, 15 aa, Artificial Sequence
  Description of Artificial Sequence: Synthetic peptide
  Seed: SPGMMMGMFNMLSTV
SPGYMMSMVNMISTV

SEQ ID NO: 201947 - protein, 15 aa, Artificial Sequence
  Description of Artificial Sequence: Synthetic peptide
  Seed: SPGMMMGMFNMLSTV
SPGYMMSMVNMLSTV

SEQ ID NO: 201948 - protein, 15 aa, Artificial Sequence
  Description of Artificial Sequence: Synthetic peptide
  Seed: SPGMMMGMFNMLSTV
SPGYMMSMVNMMSTV

SEQ ID NO: 201949 - protein, 15 aa, Artificial Sequence
  Description of Artificial Sequence: Synthetic peptide
  Seed: SPGMMMGMFNMLSTV
SPGYMMSMVNMSSTV

SEQ ID NO: 201950 - protein, 15 aa, Artificial Sequence
  Description of Artificial Sequence: Synthetic peptide
  Seed: SPGMMMGMFNMLSTV
SPGYMMSMVNMTSTV

SEQ ID NO: 201951 - protein, 15 aa, Artificial Sequence
  Description of Artificial Sequence: Synthetic peptide
  Seed: SPGMMMGMFNMLSTV
SPGYMMSMVNMVSTV

SEQ ID NO: 201952 - protein, 15 aa, Artificial Sequence
  Description of Artificial Sequence: Synthetic peptide
  Seed: SPGMMMGMFNMLSTV
SPGYMMSMVNMYSTV

SEQ ID NO: 201953 - protein, 15 aa, Artificial Sequence
  Description of Artificial Sequence: Synthetic peptide
  Seed: SPGMMMGMFNMLSTV
SPGYMMSMWNMFSTV

SEQ ID NO: 201954 - protein, 15 aa, Artificial Sequence
  Description of Artificial Sequence: Synthetic peptide
  Seed: SPGMMMGMFNMLSTV
SPGYMMSMWNMISTV

SEQ ID NO: 201955 - protein, 15 aa, Artificial Sequence
  Description of Artificial Sequence: Synthetic peptide
  Seed: SPGMMMGMFNMLSTV
SPGYMMSMWNMLSTV

SEQ ID NO: 201956 - protein, 15 aa, Artificial Sequence
  Description of Artificial Sequence: Synthetic peptide
  Seed: SPGMMMGMFNMLSTV
SPGYMMSMWNMVSTV

SEQ ID NO: 201957 - protein, 15 aa, Artificial Sequence
  Description of Artificial Sequence: Synthetic peptide
  Seed: SPGMMMGMFNMLSTV
SPGYMMSMYNMFSTV

SEQ ID NO: 201958 - protein, 15 aa, Artificial Sequence
  Description of Artificial Sequence: Synthetic peptide
  Seed: SPGMMMGMFNMLSTV
SPGYMMSMYNMISTV

SEQ ID NO: 201959 - protein, 15 aa, Artificial Sequence
  Description of Artificial Sequence: Synthetic peptide
  Seed: SPGMMMGMFNMLSTV
SPGYMMSMYNMLSTV

SEQ ID NO: 201960 - protein, 15 aa, Artificial Sequence
  Description of Artificial Sequence: Synthetic peptide
  Seed: SPGMMMGMFNMLSTV
SPGYMMSMYNMMSTV

SEQ ID NO: 201961 - protein, 15 aa, Artificial Sequence
  Description of Artificial Sequence: Synthetic peptide
  Seed: SPGMMMGMFNMLSTV
SPGYMMSMYNMVSTV

SEQ ID NO: 201962 - protein, 15 aa, Artificial Sequence
  Description of Artificial Sequence: Synthetic peptide
  Seed: SPGMMMGMFNMLSTV
SPGYMMTMANMASTV

SEQ ID NO: 201963 - protein, 15 aa, Artificial Sequence
  Description of Artificial Sequence: Synthetic peptide
  Seed: SPGMMMGMFNMLSTV
SPGYMMTMANMFSTV

SEQ ID NO: 201964 - protein, 15 aa, Artificial Sequence
  Description of Artificial Sequence: Synthetic peptide
  Seed: SPGMMMGMFNMLSTV
SPGYMMTMANMGSTV

SEQ ID NO: 201965 - protein, 15 aa, Artificial Sequence
  Description of Artificial Sequence: Synthetic peptide
  Seed: SPGMMMGMFNMLSTV
SPGYMMTMANMHSTV

SEQ ID NO: 201966 - protein, 15 aa, Artificial Sequence
  Description of Artificial Sequence: Synthetic peptide
  Seed: SPGMMMGMFNMLSTV
SPGYMMTMANMISTV

SEQ ID NO: 201967 - protein, 15 aa, Artificial Sequence
  Description of Artificial Sequence: Synthetic peptide
  Seed: SPGMMMGMFNMLSTV
SPGYMMTMANMLSTV

SEQ ID NO: 201968 - protein, 15 aa, Artificial Sequence
  Description of Artificial Sequence: Synthetic peptide
  Seed: SPGMMMGMFNMLSTV
SPGYMMTMANMMSTV

SEQ ID NO: 201969 - protein, 15 aa, Artificial Sequence
  Description of Artificial Sequence: Synthetic peptide
  Seed: SPGMMMGMFNMLSTV
SPGYMMTMANMNSTV

SEQ ID NO: 201970 - protein, 15 aa, Artificial Sequence
  Description of Artificial Sequence: Synthetic peptide
  Seed: SPGMMMGMFNMLSTV
SPGYMMTMANMPSTV

SEQ ID NO: 201971 - protein, 15 aa, Artificial Sequence
  Description of Artificial Sequence: Synthetic peptide
  Seed: SPGMMMGMFNMLSTV
SPGYMMTMANMSSTV

SEQ ID NO: 201972 - protein, 15 aa, Artificial Sequence
  Description of Artificial Sequence: Synthetic peptide
  Seed: SPGMMMGMFNMLSTV
SPGYMMTMANMTSTV

SEQ ID NO: 201973 - protein, 15 aa, Artificial Sequence
  Description of Artificial Sequence: Synthetic peptide
  Seed: SPGMMMGMFNMLSTV
SPGYMMTMANMVSTV

SEQ ID NO: 201974 - protein, 15 aa, Artificial Sequence
  Description of Artificial Sequence: Synthetic peptide
  Seed: SPGMMMGMFNMLSTV
SPGYMMTMANMYSTV

SEQ ID NO: 201975 - protein, 15 aa, Artificial Sequence
  Description of Artificial Sequence: Synthetic peptide
  Seed: SPGMMMGMFNMLSTV
SPGYMMTMDNMISTV

SEQ ID NO: 201976 - protein, 15 aa, Artificial Sequence
  Description of Artificial Sequence: Synthetic peptide
  Seed: SPGMMMGMFNMLSTV
SPGYMMTMENMISTV

SEQ ID NO: 201977 - protein, 15 aa, Artificial Sequence
  Description of Artificial Sequence: Synthetic peptide
  Seed: SPGMMMGMFNMLSTV
SPGYMMTMENMLSTV

SEQ ID NO: 201978 - protein, 15 aa, Artificial Sequence
  Description of Artificial Sequence: Synthetic peptide
  Seed: SPGMMMGMFNMLSTV
SPGYMMTMENMVSTV

SEQ ID NO: 201979 - protein, 15 aa, Artificial Sequence
  Description of Artificial Sequence: Synthetic peptide
  Seed: SPGMMMGMFNMLSTV
SPGYMMTMFNMASTV

SEQ ID NO: 201980 - protein, 15 aa, Artificial Sequence
  Description of Artificial Sequence: Synthetic peptide
  Seed: SPGMMMGMFNMLSTV
SPGYMMTMFNMDSTV

SEQ ID NO: 201981 - protein, 15 aa, Artificial Sequence
  Description of Artificial Sequence: Synthetic peptide
  Seed: SPGMMMGMFNMLSTV
SPGYMMTMFNMESTV

SEQ ID NO: 201982 - protein, 15 aa, Artificial Sequence
  Description of Artificial Sequence: Synthetic peptide
  Seed: SPGMMMGMFNMLSTV
SPGYMMTMFNMFSTV

SEQ ID NO: 201983 - protein, 15 aa, Artificial Sequence
  Description of Artificial Sequence: Synthetic peptide
  Seed: SPGMMMGMFNMLSTV
SPGYMMTMFNMHSTV

SEQ ID NO: 201984 - protein, 15 aa, Artificial Sequence
  Description of Artificial Sequence: Synthetic peptide
  Seed: SPGMMMGMFNMLSTV
SPGYMMTMFNMISTV

SEQ ID NO: 201985 - protein, 15 aa, Artificial Sequence
  Description of Artificial Sequence: Synthetic peptide
  Seed: SPGMMMGMFNMLSTV
SPGYMMTMFNMLSTV

SEQ ID NO: 201986 - protein, 15 aa, Artificial Sequence
  Description of Artificial Sequence: Synthetic peptide
  Seed: SPGMMMGMFNMLSTV
SPGYMMTMFNMMSTV

SEQ ID NO: 201987 - protein, 15 aa, Artificial Sequence
  Description of Artificial Sequence: Synthetic peptide
  Seed: SPGMMMGMFNMLSTV
SPGYMMTMFNMNSTV

SEQ ID NO: 201988 - protein, 15 aa, Artificial Sequence
  Description of Artificial Sequence: Synthetic peptide
  Seed: SPGMMMGMFNMLSTV
SPGYMMTMFNMPSTV

SEQ ID NO: 201989 - protein, 15 aa, Artificial Sequence
  Description of Artificial Sequence: Synthetic peptide
  Seed: SPGMMMGMFNMLSTV
SPGYMMTMFNMQSTV

SEQ ID NO: 201990 - protein, 15 aa, Artificial Sequence
  Description of Artificial Sequence: Synthetic peptide
  Seed: SPGMMMGMFNMLSTV
SPGYMMTMFNMSSTV

SEQ ID NO: 201991 - protein, 15 aa, Artificial Sequence
  Description of Artificial Sequence: Synthetic peptide
  Seed: SPGMMMGMFNMLSTV
SPGYMMTMFNMTSTV

SEQ ID NO: 201992 - protein, 15 aa, Artificial Sequence
  Description of Artificial Sequence: Synthetic peptide
  Seed: SPGMMMGMFNMLSTV
SPGYMMTMFNMVSTV

SEQ ID NO: 201993 - protein, 15 aa, Artificial Sequence
  Description of Artificial Sequence: Synthetic peptide
  Seed: SPGMMMGMFNMLSTV
SPGYMMTMFNMYSTV

SEQ ID NO: 201994 - protein, 15 aa, Artificial Sequence
  Description of Artificial Sequence: Synthetic peptide
  Seed: SPGMMMGMFNMLSTV
SPGYMMTMGNMASTV

SEQ ID NO: 201995 - protein, 15 aa, Artificial Sequence
  Description of Artificial Sequence: Synthetic peptide
  Seed: SPGMMMGMFNMLSTV
SPGYMMTMGNMFSTV

SEQ ID NO: 201996 - protein, 15 aa, Artificial Sequence
  Description of Artificial Sequence: Synthetic peptide
  Seed: SPGMMMGMFNMLSTV
SPGYMMTMGNMISTV

SEQ ID NO: 201997 - protein, 15 aa, Artificial Sequence
  Description of Artificial Sequence: Synthetic peptide
  Seed: SPGMMMGMFNMLSTV
SPGYMMTMGNMLSTV

SEQ ID NO: 201998 - protein, 15 aa, Artificial Sequence
  Description of Artificial Sequence: Synthetic peptide
  Seed: SPGMMMGMFNMLSTV
SPGYMMTMGNMMSTV

SEQ ID NO: 201999 - protein, 15 aa, Artificial Sequence
  Description of Artificial Sequence: Synthetic peptide
  Seed: SPGMMMGMFNMLSTV
SPGYMMTMGNMSSTV

SEQ ID NO: 202000 - protein, 15 aa, Artificial Sequence
  Description of Artificial Sequence: Synthetic peptide
  Seed: SPGMMMGMFNMLSTV
SPGYMMTMGNMTSTV

SEQ ID NO: 202001 - protein, 15 aa, Artificial Sequence
  Description of Artificial Sequence: Synthetic peptide
  Seed: SPGMMMGMFNMLSTV
SPGYMMTMGNMVSTV

SEQ ID NO: 202002 - protein, 15 aa, Artificial Sequence
  Description of Artificial Sequence: Synthetic peptide
  Seed: SPGMMMGMFNMLSTV
SPGYMMTMGNMYSTV

SEQ ID NO: 202003 - protein, 15 aa, Artificial Sequence
  Description of Artificial Sequence: Synthetic peptide
  Seed: SPGMMMGMFNMLSTV
SPGYMMTMHNMISTV

SEQ ID NO: 202004 - protein, 15 aa, Artificial Sequence
  Description of Artificial Sequence: Synthetic peptide
  Seed: SPGMMMGMFNMLSTV
SPGYMMTMHNMVSTV

SEQ ID NO: 202005 - protein, 15 aa, Artificial Sequence
  Description of Artificial Sequence: Synthetic peptide
  Seed: SPGMMMGMFNMLSTV
SPGYMMTMINMISTV

SEQ ID NO: 202006 - protein, 15 aa, Artificial Sequence
  Description of Artificial Sequence: Synthetic peptide
  Seed: SPGMMMGMFNMLSTV
SPGYMMTMINMLSTV

SEQ ID NO: 202007 - protein, 15 aa, Artificial Sequence
  Description of Artificial Sequence: Synthetic peptide
  Seed: SPGMMMGMFNMLSTV
SPGYMMTMINMMSTV

SEQ ID NO: 202008 - protein, 15 aa, Artificial Sequence
  Description of Artificial Sequence: Synthetic peptide
  Seed: SPGMMMGMFNMLSTV
SPGYMMTMINMVSTV

SEQ ID NO: 202009 - protein, 15 aa, Artificial Sequence
  Description of Artificial Sequence: Synthetic peptide
  Seed: SPGMMMGMFNMLSTV
SPGYMMTMLNMISTV

SEQ ID NO: 202010 - protein, 15 aa, Artificial Sequence
  Description of Artificial Sequence: Synthetic peptide
  Seed: SPGMMMGMFNMLSTV
SPGYMMTMLNMLSTV

SEQ ID NO: 202011 - protein, 15 aa, Artificial Sequence
  Description of Artificial Sequence: Synthetic peptide
  Seed: SPGMMMGMFNMLSTV
SPGYMMTMLNMVSTV

SEQ ID NO: 202012 - protein, 15 aa, Artificial Sequence
  Description of Artificial Sequence: Synthetic peptide
  Seed: SPGMMMGMFNMLSTV
SPGYMMTMMNMISTV

SEQ ID NO: 202013 - protein, 15 aa, Artificial Sequence
  Description of Artificial Sequence: Synthetic peptide
  Seed: SPGMMMGMFNMLSTV
SPGYMMTMMNMLSTV

SEQ ID NO: 202014 - protein, 15 aa, Artificial Sequence
  Description of Artificial Sequence: Synthetic peptide
  Seed: SPGMMMGMFNMLSTV
SPGYMMTMMNMVSTV

SEQ ID NO: 202015 - protein, 15 aa, Artificial Sequence
  Description of Artificial Sequence: Synthetic peptide
  Seed: SPGMMMGMFNMLSTV
SPGYMMTMNNMASTV

SEQ ID NO: 202016 - protein, 15 aa, Artificial Sequence
  Description of Artificial Sequence: Synthetic peptide
  Seed: SPGMMMGMFNMLSTV
SPGYMMTMNNMFSTV

SEQ ID NO: 202017 - protein, 15 aa, Artificial Sequence
  Description of Artificial Sequence: Synthetic peptide
  Seed: SPGMMMGMFNMLSTV
SPGYMMTMNNMISTV

SEQ ID NO: 202018 - protein, 15 aa, Artificial Sequence
  Description of Artificial Sequence: Synthetic peptide
  Seed: SPGMMMGMFNMLSTV
SPGYMMTMNNMLSTV

SEQ ID NO: 202019 - protein, 15 aa, Artificial Sequence
  Description of Artificial Sequence: Synthetic peptide
  Seed: SPGMMMGMFNMLSTV
SPGYMMTMNNMMSTV

SEQ ID NO: 202020 - protein, 15 aa, Artificial Sequence
  Description of Artificial Sequence: Synthetic peptide
  Seed: SPGMMMGMFNMLSTV
SPGYMMTMNNMTSTV

SEQ ID NO: 202021 - protein, 15 aa, Artificial Sequence
  Description of Artificial Sequence: Synthetic peptide
  Seed: SPGMMMGMFNMLSTV
SPGYMMTMNNMVSTV

SEQ ID NO: 202022 - protein, 15 aa, Artificial Sequence
  Description of Artificial Sequence: Synthetic peptide
  Seed: SPGMMMGMFNMLSTV
SPGYMMTMNNMYSTV

SEQ ID NO: 202023 - protein, 15 aa, Artificial Sequence
  Description of Artificial Sequence: Synthetic peptide
  Seed: SPGMMMGMFNMLSTV
SPGYMMTMPNMASTV

SEQ ID NO: 202024 - protein, 15 aa, Artificial Sequence
  Description of Artificial Sequence: Synthetic peptide
  Seed: SPGMMMGMFNMLSTV
SPGYMMTMPNMFSTV

SEQ ID NO: 202025 - protein, 15 aa, Artificial Sequence
  Description of Artificial Sequence: Synthetic peptide
  Seed: SPGMMMGMFNMLSTV
SPGYMMTMPNMISTV

SEQ ID NO: 202026 - protein, 15 aa, Artificial Sequence
  Description of Artificial Sequence: Synthetic peptide
  Seed: SPGMMMGMFNMLSTV
SPGYMMTMPNMLSTV

SEQ ID NO: 202027 - protein, 15 aa, Artificial Sequence
  Description of Artificial Sequence: Synthetic peptide
  Seed: SPGMMMGMFNMLSTV
SPGYMMTMPNMMSTV

SEQ ID NO: 202028 - protein, 15 aa, Artificial Sequence
  Description of Artificial Sequence: Synthetic peptide
  Seed: SPGMMMGMFNMLSTV
SPGYMMTMPNMSSTV

SEQ ID NO: 202029 - protein, 15 aa, Artificial Sequence
  Description of Artificial Sequence: Synthetic peptide
  Seed: SPGMMMGMFNMLSTV
SPGYMMTMPNMTSTV

SEQ ID NO: 202030 - protein, 15 aa, Artificial Sequence
  Description of Artificial Sequence: Synthetic peptide
  Seed: SPGMMMGMFNMLSTV
SPGYMMTMPNMVSTV

SEQ ID NO: 202031 - protein, 15 aa, Artificial Sequence
  Description of Artificial Sequence: Synthetic peptide
  Seed: SPGMMMGMFNMLSTV
SPGYMMTMPNMYSTV

SEQ ID NO: 202032 - protein, 15 aa, Artificial Sequence
  Description of Artificial Sequence: Synthetic peptide
  Seed: SPGMMMGMFNMLSTV
SPGYMMTMQNMISTV

SEQ ID NO: 202033 - protein, 15 aa, Artificial Sequence
  Description of Artificial Sequence: Synthetic peptide
  Seed: SPGMMMGMFNMLSTV
SPGYMMTMQNMLSTV

SEQ ID NO: 202034 - protein, 15 aa, Artificial Sequence
  Description of Artificial Sequence: Synthetic peptide
  Seed: SPGMMMGMFNMLSTV
SPGYMMTMQNMVSTV

SEQ ID NO: 202035 - protein, 15 aa, Artificial Sequence
  Description of Artificial Sequence: Synthetic peptide
  Seed: SPGMMMGMFNMLSTV
SPGYMMTMSNMASTV

SEQ ID NO: 202036 - protein, 15 aa, Artificial Sequence
  Description of Artificial Sequence: Synthetic peptide
  Seed: SPGMMMGMFNMLSTV
SPGYMMTMSNMFSTV

SEQ ID NO: 202037 - protein, 15 aa, Artificial Sequence
  Description of Artificial Sequence: Synthetic peptide
  Seed: SPGMMMGMFNMLSTV
SPGYMMTMSNMGSTV

SEQ ID NO: 202038 - protein, 15 aa, Artificial Sequence
  Description of Artificial Sequence: Synthetic peptide
  Seed: SPGMMMGMFNMLSTV
SPGYMMTMSNMHSTV

SEQ ID NO: 202039 - protein, 15 aa, Artificial Sequence
  Description of Artificial Sequence: Synthetic peptide
  Seed: SPGMMMGMFNMLSTV
SPGYMMTMSNMISTV

SEQ ID NO: 202040 - protein, 15 aa, Artificial Sequence
  Description of Artificial Sequence: Synthetic peptide
  Seed: SPGMMMGMFNMLSTV
SPGYMMTMSNMLSTV

SEQ ID NO: 202041 - protein, 15 aa, Artificial Sequence
  Description of Artificial Sequence: Synthetic peptide
  Seed: SPGMMMGMFNMLSTV
SPGYMMTMSNMMSTV

SEQ ID NO: 202042 - protein, 15 aa, Artificial Sequence
  Description of Artificial Sequence: Synthetic peptide
  Seed: SPGMMMGMFNMLSTV
SPGYMMTMSNMNSTV

SEQ ID NO: 202043 - protein, 15 aa, Artificial Sequence
  Description of Artificial Sequence: Synthetic peptide
  Seed: SPGMMMGMFNMLSTV
SPGYMMTMSNMPSTV

SEQ ID NO: 202044 - protein, 15 aa, Artificial Sequence
  Description of Artificial Sequence: Synthetic peptide
  Seed: SPGMMMGMFNMLSTV
SPGYMMTMSNMSSTV

SEQ ID NO: 202045 - protein, 15 aa, Artificial Sequence
  Description of Artificial Sequence: Synthetic peptide
  Seed: SPGMMMGMFNMLSTV
SPGYMMTMSNMTSTV

SEQ ID NO: 202046 - protein, 15 aa, Artificial Sequence
  Description of Artificial Sequence: Synthetic peptide
  Seed: SPGMMMGMFNMLSTV
SPGYMMTMSNMVSTV

SEQ ID NO: 202047 - protein, 15 aa, Artificial Sequence
  Description of Artificial Sequence: Synthetic peptide
  Seed: SPGMMMGMFNMLSTV
SPGYMMTMSNMYSTV

SEQ ID NO: 202048 - protein, 15 aa, Artificial Sequence
  Description of Artificial Sequence: Synthetic peptide
  Seed: SPGMMMGMFNMLSTV
SPGYMMTMTNMASTV

SEQ ID NO: 202049 - protein, 15 aa, Artificial Sequence
  Description of Artificial Sequence: Synthetic peptide
  Seed: SPGMMMGMFNMLSTV
SPGYMMTMTNMFSTV

SEQ ID NO: 202050 - protein, 15 aa, Artificial Sequence
  Description of Artificial Sequence: Synthetic peptide
  Seed: SPGMMMGMFNMLSTV
SPGYMMTMTNMISTV

SEQ ID NO: 202051 - protein, 15 aa, Artificial Sequence
  Description of Artificial Sequence: Synthetic peptide
  Seed: SPGMMMGMFNMLSTV
SPGYMMTMTNMLSTV

SEQ ID NO: 202052 - protein, 15 aa, Artificial Sequence
  Description of Artificial Sequence: Synthetic peptide
  Seed: SPGMMMGMFNMLSTV
SPGYMMTMTNMMSTV

SEQ ID NO: 202053 - protein, 15 aa, Artificial Sequence
  Description of Artificial Sequence: Synthetic peptide
  Seed: SPGMMMGMFNMLSTV
SPGYMMTMTNMSSTV

SEQ ID NO: 202054 - protein, 15 aa, Artificial Sequence
  Description of Artificial Sequence: Synthetic peptide
  Seed: SPGMMMGMFNMLSTV
SPGYMMTMTNMTSTV

SEQ ID NO: 202055 - protein, 15 aa, Artificial Sequence
  Description of Artificial Sequence: Synthetic peptide
  Seed: SPGMMMGMFNMLSTV
SPGYMMTMTNMVSTV

SEQ ID NO: 202056 - protein, 15 aa, Artificial Sequence
  Description of Artificial Sequence: Synthetic peptide
  Seed: SPGMMMGMFNMLSTV
SPGYMMTMTNMYSTV

SEQ ID NO: 202057 - protein, 15 aa, Artificial Sequence
  Description of Artificial Sequence: Synthetic peptide
  Seed: SPGMMMGMFNMLSTV
SPGYMMTMVNMASTV

SEQ ID NO: 202058 - protein, 15 aa, Artificial Sequence
  Description of Artificial Sequence: Synthetic peptide
  Seed: SPGMMMGMFNMLSTV
SPGYMMTMVNMFSTV

SEQ ID NO: 202059 - protein, 15 aa, Artificial Sequence
  Description of Artificial Sequence: Synthetic peptide
  Seed: SPGMMMGMFNMLSTV
SPGYMMTMVNMISTV

SEQ ID NO: 202060 - protein, 15 aa, Artificial Sequence
  Description of Artificial Sequence: Synthetic peptide
  Seed: SPGMMMGMFNMLSTV
SPGYMMTMVNMLSTV

SEQ ID NO: 202061 - protein, 15 aa, Artificial Sequence
  Description of Artificial Sequence: Synthetic peptide
  Seed: SPGMMMGMFNMLSTV
SPGYMMTMVNMMSTV

SEQ ID NO: 202062 - protein, 15 aa, Artificial Sequence
  Description of Artificial Sequence: Synthetic peptide
  Seed: SPGMMMGMFNMLSTV
SPGYMMTMVNMTSTV

SEQ ID NO: 202063 - protein, 15 aa, Artificial Sequence
  Description of Artificial Sequence: Synthetic peptide
  Seed: SPGMMMGMFNMLSTV
SPGYMMTMVNMVSTV

SEQ ID NO: 202064 - protein, 15 aa, Artificial Sequence
  Description of Artificial Sequence: Synthetic peptide
  Seed: SPGMMMGMFNMLSTV
SPGYMMTMVNMYSTV

SEQ ID NO: 202065 - protein, 15 aa, Artificial Sequence
  Description of Artificial Sequence: Synthetic peptide
  Seed: SPGMMMGMFNMLSTV
SPGYMMTMWNMFSTV

SEQ ID NO: 202066 - protein, 15 aa, Artificial Sequence
  Description of Artificial Sequence: Synthetic peptide
  Seed: SPGMMMGMFNMLSTV
SPGYMMTMWNMISTV

SEQ ID NO: 202067 - protein, 15 aa, Artificial Sequence
  Description of Artificial Sequence: Synthetic peptide
  Seed: SPGMMMGMFNMLSTV
SPGYMMTMWNMLSTV

SEQ ID NO: 202068 - protein, 15 aa, Artificial Sequence
  Description of Artificial Sequence: Synthetic peptide
  Seed: SPGMMMGMFNMLSTV
SPGYMMTMWNMMSTV

SEQ ID NO: 202069 - protein, 15 aa, Artificial Sequence
  Description of Artificial Sequence: Synthetic peptide
  Seed: SPGMMMGMFNMLSTV
SPGYMMTMWNMVSTV

SEQ ID NO: 202070 - protein, 15 aa, Artificial Sequence
  Description of Artificial Sequence: Synthetic peptide
  Seed: SPGMMMGMFNMLSTV
SPGYMMTMYNMFSTV

SEQ ID NO: 202071 - protein, 15 aa, Artificial Sequence
  Description of Artificial Sequence: Synthetic peptide
  Seed: SPGMMMGMFNMLSTV
SPGYMMTMYNMISTV

SEQ ID NO: 202072 - protein, 15 aa, Artificial Sequence
  Description of Artificial Sequence: Synthetic peptide
  Seed: SPGMMMGMFNMLSTV
SPGYMMTMYNMLSTV

SEQ ID NO: 202073 - protein, 15 aa, Artificial Sequence
  Description of Artificial Sequence: Synthetic peptide
  Seed: SPGMMMGMFNMLSTV
SPGYMMTMYNMMSTV

SEQ ID NO: 202074 - protein, 15 aa, Artificial Sequence
  Description of Artificial Sequence: Synthetic peptide
  Seed: SPGMMMGMFNMLSTV
SPGYMMTMYNMVSTV

SEQ ID NO: 202075 - protein, 15 aa, Artificial Sequence
  Description of Artificial Sequence: Synthetic peptide
  Seed: SPGMMMGMFNMLSTV
SPGYMMVMANMASTV

SEQ ID NO: 202076 - protein, 15 aa, Artificial Sequence
  Description of Artificial Sequence: Synthetic peptide
  Seed: SPGMMMGMFNMLSTV
SPGYMMVMANMFSTV

SEQ ID NO: 202077 - protein, 15 aa, Artificial Sequence
  Description of Artificial Sequence: Synthetic peptide
  Seed: SPGMMMGMFNMLSTV
SPGYMMVMANMISTV

SEQ ID NO: 202078 - protein, 15 aa, Artificial Sequence
  Description of Artificial Sequence: Synthetic peptide
  Seed: SPGMMMGMFNMLSTV
SPGYMMVMANMLSTV

SEQ ID NO: 202079 - protein, 15 aa, Artificial Sequence
  Description of Artificial Sequence: Synthetic peptide
  Seed: SPGMMMGMFNMLSTV
SPGYMMVMANMMSTV

SEQ ID NO: 202080 - protein, 15 aa, Artificial Sequence
  Description of Artificial Sequence: Synthetic peptide
  Seed: SPGMMMGMFNMLSTV
SPGYMMVMANMNSTV

SEQ ID NO: 202081 - protein, 15 aa, Artificial Sequence
  Description of Artificial Sequence: Synthetic peptide
  Seed: SPGMMMGMFNMLSTV
SPGYMMVMANMSSTV

SEQ ID NO: 202082 - protein, 15 aa, Artificial Sequence
  Description of Artificial Sequence: Synthetic peptide
  Seed: SPGMMMGMFNMLSTV
SPGYMMVMANMTSTV

SEQ ID NO: 202083 - protein, 15 aa, Artificial Sequence
  Description of Artificial Sequence: Synthetic peptide
  Seed: SPGMMMGMFNMLSTV
SPGYMMVMANMVSTV

SEQ ID NO: 202084 - protein, 15 aa, Artificial Sequence
  Description of Artificial Sequence: Synthetic peptide
  Seed: SPGMMMGMFNMLSTV
SPGYMMVMANMYSTV

SEQ ID NO: 202085 - protein, 15 aa, Artificial Sequence
  Description of Artificial Sequence: Synthetic peptide
  Seed: SPGMMMGMFNMLSTV
SPGYMMVMFNMDSTV

SEQ ID NO: 202086 - protein, 15 aa, Artificial Sequence
  Description of Artificial Sequence: Synthetic peptide
  Seed: SPGMMMGMFNMLSTV
SPGYMMVMFNMESTV

SEQ ID NO: 202087 - protein, 15 aa, Artificial Sequence
  Description of Artificial Sequence: Synthetic peptide
  Seed: SPGMMMGMFNMLSTV
SPGYMMVMFNMFSTV

SEQ ID NO: 202088 - protein, 15 aa, Artificial Sequence
  Description of Artificial Sequence: Synthetic peptide
  Seed: SPGMMMGMFNMLSTV
SPGYMMVMFNMISTV

SEQ ID NO: 202089 - protein, 15 aa, Artificial Sequence
  Description of Artificial Sequence: Synthetic peptide
  Seed: SPGMMMGMFNMLSTV
SPGYMMVMFNMLSTV

SEQ ID NO: 202090 - protein, 15 aa, Artificial Sequence
  Description of Artificial Sequence: Synthetic peptide
  Seed: SPGMMMGMFNMLSTV
SPGYMMVMFNMMSTV

SEQ ID NO: 202091 - protein, 15 aa, Artificial Sequence
  Description of Artificial Sequence: Synthetic peptide
  Seed: SPGMMMGMFNMLSTV
SPGYMMVMFNMNSTV

SEQ ID NO: 202092 - protein, 15 aa, Artificial Sequence
  Description of Artificial Sequence: Synthetic peptide
  Seed: SPGMMMGMFNMLSTV
SPGYMMVMFNMVSTV

SEQ ID NO: 202093 - protein, 15 aa, Artificial Sequence
  Description of Artificial Sequence: Synthetic peptide
  Seed: SPGMMMGMFNMLSTV
SPGYMMVMFNMYSTV

SEQ ID NO: 202094 - protein, 15 aa, Artificial Sequence
  Description of Artificial Sequence: Synthetic peptide
  Seed: SPGMMMGMFNMLSTV
SPGYMMVMGNMASTV

SEQ ID NO: 202095 - protein, 15 aa, Artificial Sequence
  Description of Artificial Sequence: Synthetic peptide
  Seed: SPGMMMGMFNMLSTV
SPGYMMVMGNMFSTV

SEQ ID NO: 202096 - protein, 15 aa, Artificial Sequence
  Description of Artificial Sequence: Synthetic peptide
  Seed: SPGMMMGMFNMLSTV
SPGYMMVMGNMISTV

SEQ ID NO: 202097 - protein, 15 aa, Artificial Sequence
  Description of Artificial Sequence: Synthetic peptide
  Seed: SPGMMMGMFNMLSTV
SPGYMMVMGNMLSTV

SEQ ID NO: 202098 - protein, 15 aa, Artificial Sequence
  Description of Artificial Sequence: Synthetic peptide
  Seed: SPGMMMGMFNMLSTV
SPGYMMVMGNMMSTV

SEQ ID NO: 202099 - protein, 15 aa, Artificial Sequence
  Description of Artificial Sequence: Synthetic peptide
  Seed: SPGMMMGMFNMLSTV
SPGYMMVMGNMTSTV

SEQ ID NO: 202100 - protein, 15 aa, Artificial Sequence
  Description of Artificial Sequence: Synthetic peptide
  Seed: SPGMMMGMFNMLSTV
SPGYMMVMGNMVSTV

SEQ ID NO: 202101 - protein, 15 aa, Artificial Sequence
  Description of Artificial Sequence: Synthetic peptide
  Seed: SPGMMMGMFNMLSTV
SPGYMMVMHNMASTV

SEQ ID NO: 202102 - protein, 15 aa, Artificial Sequence
  Description of Artificial Sequence: Synthetic peptide
  Seed: SPGMMMGMFNMLSTV
SPGYMMVMHNMNSTV

SEQ ID NO: 202103 - protein, 15 aa, Artificial Sequence
  Description of Artificial Sequence: Synthetic peptide
  Seed: SPGMMMGMFNMLSTV
SPGYMMVMHNMSSTV

SEQ ID NO: 202104 - protein, 15 aa, Artificial Sequence
  Description of Artificial Sequence: Synthetic peptide
  Seed: SPGMMMGMFNMLSTV
SPGYMMVMHNMVSTV

SEQ ID NO: 202105 - protein, 15 aa, Artificial Sequence
  Description of Artificial Sequence: Synthetic peptide
  Seed: SPGMMMGMFNMLSTV
SPGYMMVMKNMASTV

SEQ ID NO: 202106 - protein, 15 aa, Artificial Sequence
  Description of Artificial Sequence: Synthetic peptide
  Seed: SPGMMMGMFNMLSTV
SPGYMMVMKNMSSTV

SEQ ID NO: 202107 - protein, 15 aa, Artificial Sequence
  Description of Artificial Sequence: Synthetic peptide
  Seed: SPGMMMGMFNMLSTV
SPGYMMVMNNMASTV

SEQ ID NO: 202108 - protein, 15 aa, Artificial Sequence
  Description of Artificial Sequence: Synthetic peptide
  Seed: SPGMMMGMFNMLSTV
SPGYMMVMNNMFSTV

SEQ ID NO: 202109 - protein, 15 aa, Artificial Sequence
  Description of Artificial Sequence: Synthetic peptide
  Seed: SPGMMMGMFNMLSTV
SPGYMMVMNNMISTV

SEQ ID NO: 202110 - protein, 15 aa, Artificial Sequence
  Description of Artificial Sequence: Synthetic peptide
  Seed: SPGMMMGMFNMLSTV
SPGYMMVMNNMLSTV

SEQ ID NO: 202111 - protein, 15 aa, Artificial Sequence
  Description of Artificial Sequence: Synthetic peptide
  Seed: SPGMMMGMFNMLSTV
SPGYMMVMNNMMSTV

SEQ ID NO: 202112 - protein, 15 aa, Artificial Sequence
  Description of Artificial Sequence: Synthetic peptide
  Seed: SPGMMMGMFNMLSTV
SPGYMMVMNNMRSTV

SEQ ID NO: 202113 - protein, 15 aa, Artificial Sequence
  Description of Artificial Sequence: Synthetic peptide
  Seed: SPGMMMGMFNMLSTV
SPGYMMVMNNMSSTV

SEQ ID NO: 202114 - protein, 15 aa, Artificial Sequence
  Description of Artificial Sequence: Synthetic peptide
  Seed: SPGMMMGMFNMLSTV
SPGYMMVMNNMTSTV

SEQ ID NO: 202115 - protein, 15 aa, Artificial Sequence
  Description of Artificial Sequence: Synthetic peptide
  Seed: SPGMMMGMFNMLSTV
SPGYMMVMNNMVSTV

SEQ ID NO: 202116 - protein, 15 aa, Artificial Sequence
  Description of Artificial Sequence: Synthetic peptide
  Seed: SPGMMMGMFNMLSTV
SPGYMMVMNNMYSTV

SEQ ID NO: 202117 - protein, 15 aa, Artificial Sequence
  Description of Artificial Sequence: Synthetic peptide
  Seed: SPGMMMGMFNMLSTV
SPGYMMVMPNMASTV

SEQ ID NO: 202118 - protein, 15 aa, Artificial Sequence
  Description of Artificial Sequence: Synthetic peptide
  Seed: SPGMMMGMFNMLSTV
SPGYMMVMPNMFSTV

SEQ ID NO: 202119 - protein, 15 aa, Artificial Sequence
  Description of Artificial Sequence: Synthetic peptide
  Seed: SPGMMMGMFNMLSTV
SPGYMMVMPNMISTV

SEQ ID NO: 202120 - protein, 15 aa, Artificial Sequence
  Description of Artificial Sequence: Synthetic peptide
  Seed: SPGMMMGMFNMLSTV
SPGYMMVMPNMLSTV

SEQ ID NO: 202121 - protein, 15 aa, Artificial Sequence
  Description of Artificial Sequence: Synthetic peptide
  Seed: SPGMMMGMFNMLSTV
SPGYMMVMPNMMSTV

SEQ ID NO: 202122 - protein, 15 aa, Artificial Sequence
  Description of Artificial Sequence: Synthetic peptide
  Seed: SPGMMMGMFNMLSTV
SPGYMMVMPNMSSTV

SEQ ID NO: 202123 - protein, 15 aa, Artificial Sequence
  Description of Artificial Sequence: Synthetic peptide
  Seed: SPGMMMGMFNMLSTV
SPGYMMVMPNMTSTV

SEQ ID NO: 202124 - protein, 15 aa, Artificial Sequence
  Description of Artificial Sequence: Synthetic peptide
  Seed: SPGMMMGMFNMLSTV
SPGYMMVMPNMVSTV

SEQ ID NO: 202125 - protein, 15 aa, Artificial Sequence
  Description of Artificial Sequence: Synthetic peptide
  Seed: SPGMMMGMFNMLSTV
SPGYMMVMPNMYSTV

SEQ ID NO: 202126 - protein, 15 aa, Artificial Sequence
  Description of Artificial Sequence: Synthetic peptide
  Seed: SPGMMMGMFNMLSTV
SPGYMMVMRNMASTV

SEQ ID NO: 202127 - protein, 15 aa, Artificial Sequence
  Description of Artificial Sequence: Synthetic peptide
  Seed: SPGMMMGMFNMLSTV
SPGYMMVMRNMNSTV

SEQ ID NO: 202128 - protein, 15 aa, Artificial Sequence
  Description of Artificial Sequence: Synthetic peptide
  Seed: SPGMMMGMFNMLSTV
SPGYMMVMRNMSSTV

SEQ ID NO: 202129 - protein, 15 aa, Artificial Sequence
  Description of Artificial Sequence: Synthetic peptide
  Seed: SPGMMMGMFNMLSTV
SPGYMMVMSNMASTV

SEQ ID NO: 202130 - protein, 15 aa, Artificial Sequence
  Description of Artificial Sequence: Synthetic peptide
  Seed: SPGMMMGMFNMLSTV
SPGYMMVMSNMFSTV

SEQ ID NO: 202131 - protein, 15 aa, Artificial Sequence
  Description of Artificial Sequence: Synthetic peptide
  Seed: SPGMMMGMFNMLSTV
SPGYMMVMSNMHSTV

SEQ ID NO: 202132 - protein, 15 aa, Artificial Sequence
  Description of Artificial Sequence: Synthetic peptide
  Seed: SPGMMMGMFNMLSTV
SPGYMMVMSNMISTV

SEQ ID NO: 202133 - protein, 15 aa, Artificial Sequence
  Description of Artificial Sequence: Synthetic peptide
  Seed: SPGMMMGMFNMLSTV
SPGYMMVMSNMLSTV

SEQ ID NO: 202134 - protein, 15 aa, Artificial Sequence
  Description of Artificial Sequence: Synthetic peptide
  Seed: SPGMMMGMFNMLSTV
SPGYMMVMSNMMSTV

SEQ ID NO: 202135 - protein, 15 aa, Artificial Sequence
  Description of Artificial Sequence: Synthetic peptide
  Seed: SPGMMMGMFNMLSTV
SPGYMMVMSNMNSTV

SEQ ID NO: 202136 - protein, 15 aa, Artificial Sequence
  Description of Artificial Sequence: Synthetic peptide
  Seed: SPGMMMGMFNMLSTV
SPGYMMVMSNMSSTV

SEQ ID NO: 202137 - protein, 15 aa, Artificial Sequence
  Description of Artificial Sequence: Synthetic peptide
  Seed: SPGMMMGMFNMLSTV
SPGYMMVMSNMTSTV

SEQ ID NO: 202138 - protein, 15 aa, Artificial Sequence
  Description of Artificial Sequence: Synthetic peptide
  Seed: SPGMMMGMFNMLSTV
SPGYMMVMSNMVSTV

SEQ ID NO: 202139 - protein, 15 aa, Artificial Sequence
  Description of Artificial Sequence: Synthetic peptide
  Seed: SPGMMMGMFNMLSTV
SPGYMMVMSNMYSTV

SEQ ID NO: 202140 - protein, 15 aa, Artificial Sequence
  Description of Artificial Sequence: Synthetic peptide
  Seed: SPGMMMGMFNMLSTV
SPGYMMVMTNMASTV

SEQ ID NO: 202141 - protein, 15 aa, Artificial Sequence
  Description of Artificial Sequence: Synthetic peptide
  Seed: SPGMMMGMFNMLSTV
SPGYMMVMTNMFSTV

SEQ ID NO: 202142 - protein, 15 aa, Artificial Sequence
  Description of Artificial Sequence: Synthetic peptide
  Seed: SPGMMMGMFNMLSTV
SPGYMMVMTNMISTV

SEQ ID NO: 202143 - protein, 15 aa, Artificial Sequence
  Description of Artificial Sequence: Synthetic peptide
  Seed: SPGMMMGMFNMLSTV
SPGYMMVMTNMLSTV

SEQ ID NO: 202144 - protein, 15 aa, Artificial Sequence
  Description of Artificial Sequence: Synthetic peptide
  Seed: SPGMMMGMFNMLSTV
SPGYMMVMTNMMSTV

SEQ ID NO: 202145 - protein, 15 aa, Artificial Sequence
  Description of Artificial Sequence: Synthetic peptide
  Seed: SPGMMMGMFNMLSTV
SPGYMMVMTNMVSTV

SEQ ID NO: 202146 - protein, 15 aa, Artificial Sequence
  Description of Artificial Sequence: Synthetic peptide
  Seed: SPGMMMGMFNMLSTV
SPGYMMVMWNMFSTV

SEQ ID NO: 202147 - protein, 15 aa, Artificial Sequence
  Description of Artificial Sequence: Synthetic peptide
  Seed: SPGMMMGMFNMLSTV
SPGYMMVMWNMLSTV

SEQ ID NO: 202148 - protein, 15 aa, Artificial Sequence
  Description of Artificial Sequence: Synthetic peptide
  Seed: SPGMMMGMFNMLSTV
SPGYMMVMYNMFSTV

SEQ ID NO: 202149 - protein, 15 aa, Artificial Sequence
  Description of Artificial Sequence: Synthetic peptide
  Seed: SPGMMMGMFNMLSTV
SPGYMMVMYNMISTV

SEQ ID NO: 202150 - protein, 15 aa, Artificial Sequence
  Description of Artificial Sequence: Synthetic peptide
  Seed: SPGMMMGMFNMLSTV
SPGYMMVMYNMLSTV

SEQ ID NO: 202151 - protein, 15 aa, Artificial Sequence
  Description of Artificial Sequence: Synthetic peptide
  Seed: SPGMMMGMFNMLSTV
SPGYMMVMYNMMSTV

SEQ ID NO: 202152 - protein, 15 aa, Artificial Sequence
  Description of Artificial Sequence: Synthetic peptide
  Seed: SPGMMMGMFNMLSTV
SPGYMMVMYNMVSTV

SEQ ID NO: 202153 - protein, 15 aa, Artificial Sequence
  Description of Artificial Sequence: Synthetic peptide
  Seed: SPGMMMGMFNMLSTV
SPGYMMVMYNMYSTV

SEQ ID NO: 202154 - protein, 15 aa, Artificial Sequence
  Description of Artificial Sequence: Synthetic peptide
  Seed: SPGMMMGMFNMLSTV
SPGYMMWMANMASTV

SEQ ID NO: 202155 - protein, 15 aa, Artificial Sequence
  Description of Artificial Sequence: Synthetic peptide
  Seed: SPGMMMGMFNMLSTV
SPGYMMWMANMISTV

SEQ ID NO: 202156 - protein, 15 aa, Artificial Sequence
  Description of Artificial Sequence: Synthetic peptide
  Seed: SPGMMMGMFNMLSTV
SPGYMMWMANMLSTV

SEQ ID NO: 202157 - protein, 15 aa, Artificial Sequence
  Description of Artificial Sequence: Synthetic peptide
  Seed: SPGMMMGMFNMLSTV
SPGYMMWMANMVSTV

SEQ ID NO: 202158 - protein, 15 aa, Artificial Sequence
  Description of Artificial Sequence: Synthetic peptide
  Seed: SPGMMMGMFNMLSTV
SPGYMMWMFNMFSTV

SEQ ID NO: 202159 - protein, 15 aa, Artificial Sequence
  Description of Artificial Sequence: Synthetic peptide
  Seed: SPGMMMGMFNMLSTV
SPGYMMWMFNMISTV

SEQ ID NO: 202160 - protein, 15 aa, Artificial Sequence
  Description of Artificial Sequence: Synthetic peptide
  Seed: SPGMMMGMFNMLSTV
SPGYMMWMFNMLSTV

SEQ ID NO: 202161 - protein, 15 aa, Artificial Sequence
  Description of Artificial Sequence: Synthetic peptide
  Seed: SPGMMMGMFNMLSTV
SPGYMMWMFNMMSTV

SEQ ID NO: 202162 - protein, 15 aa, Artificial Sequence
  Description of Artificial Sequence: Synthetic peptide
  Seed: SPGMMMGMFNMLSTV
SPGYMMWMFNMVSTV

SEQ ID NO: 202163 - protein, 15 aa, Artificial Sequence
  Description of Artificial Sequence: Synthetic peptide
  Seed: SPGMMMGMFNMLSTV
SPGYMMWMFNMYSTV

SEQ ID NO: 202164 - protein, 15 aa, Artificial Sequence
  Description of Artificial Sequence: Synthetic peptide
  Seed: SPGMMMGMFNMLSTV
SPGYMMWMINMFSTV

SEQ ID NO: 202165 - protein, 15 aa, Artificial Sequence
  Description of Artificial Sequence: Synthetic peptide
  Seed: SPGMMMGMFNMLSTV
SPGYMMWMLNMFSTV

SEQ ID NO: 202166 - protein, 15 aa, Artificial Sequence
  Description of Artificial Sequence: Synthetic peptide
  Seed: SPGMMMGMFNMLSTV
SPGYMMWMNNMASTV

SEQ ID NO: 202167 - protein, 15 aa, Artificial Sequence
  Description of Artificial Sequence: Synthetic peptide
  Seed: SPGMMMGMFNMLSTV
SPGYMMWMNNMISTV

SEQ ID NO: 202168 - protein, 15 aa, Artificial Sequence
  Description of Artificial Sequence: Synthetic peptide
  Seed: SPGMMMGMFNMLSTV
SPGYMMWMNNMLSTV

SEQ ID NO: 202169 - protein, 15 aa, Artificial Sequence
  Description of Artificial Sequence: Synthetic peptide
  Seed: SPGMMMGMFNMLSTV
SPGYMMWMNNMMSTV

SEQ ID NO: 202170 - protein, 15 aa, Artificial Sequence
  Description of Artificial Sequence: Synthetic peptide
  Seed: SPGMMMGMFNMLSTV
SPGYMMWMNNMVSTV

SEQ ID NO: 202171 - protein, 15 aa, Artificial Sequence
  Description of Artificial Sequence: Synthetic peptide
  Seed: SPGMMMGMFNMLSTV
SPGYMMWMSNMISTV

SEQ ID NO: 202172 - protein, 15 aa, Artificial Sequence
  Description of Artificial Sequence: Synthetic peptide
  Seed: SPGMMMGMFNMLSTV
SPGYMMWMSNMLSTV

SEQ ID NO: 202173 - protein, 15 aa, Artificial Sequence
  Description of Artificial Sequence: Synthetic peptide
  Seed: SPGMMMGMFNMLSTV
SPGYMMWMSNMVSTV

SEQ ID NO: 202174 - protein, 15 aa, Artificial Sequence
  Description of Artificial Sequence: Synthetic peptide
  Seed: SPGMMMGMFNMLSTV
SPGYMMWMWNMLSTV

SEQ ID NO: 202175 - protein, 15 aa, Artificial Sequence
  Description of Artificial Sequence: Synthetic peptide
  Seed: SPGMMMGMFNMLSTV
SPGYMMWMYNMFSTV

SEQ ID NO: 202176 - protein, 15 aa, Artificial Sequence
  Description of Artificial Sequence: Synthetic peptide
  Seed: SPGMMMGMFNMLSTV
SPGYMMWMYNMISTV

SEQ ID NO: 202177 - protein, 15 aa, Artificial Sequence
  Description of Artificial Sequence: Synthetic peptide
  Seed: SPGMMMGMFNMLSTV
SPGYMMWMYNMLSTV

SEQ ID NO: 202178 - protein, 15 aa, Artificial Sequence
  Description of Artificial Sequence: Synthetic peptide
  Seed: SPGMMMGMFNMLSTV
SPGYMMWMYNMMSTV

SEQ ID NO: 202179 - protein, 15 aa, Artificial Sequence
  Description of Artificial Sequence: Synthetic peptide
  Seed: SPGMMMGMFNMLSTV
SPGYMMWMYNMYSTV

SEQ ID NO: 202180 - protein, 15 aa, Artificial Sequence
  Description of Artificial Sequence: Synthetic peptide
  Seed: SPGMMMGMFNMLSTV
SPGYMMYMANMASTV

SEQ ID NO: 202181 - protein, 15 aa, Artificial Sequence
  Description of Artificial Sequence: Synthetic peptide
  Seed: SPGMMMGMFNMLSTV
SPGYMMYMANMISTV

SEQ ID NO: 202182 - protein, 15 aa, Artificial Sequence
  Description of Artificial Sequence: Synthetic peptide
  Seed: SPGMMMGMFNMLSTV
SPGYMMYMANMLSTV

SEQ ID NO: 202183 - protein, 15 aa, Artificial Sequence
  Description of Artificial Sequence: Synthetic peptide
  Seed: SPGMMMGMFNMLSTV
SPGYMMYMANMVSTV

SEQ ID NO: 202184 - protein, 15 aa, Artificial Sequence
  Description of Artificial Sequence: Synthetic peptide
  Seed: SPGMMMGMFNMLSTV
SPGYMMYMFNMESTV

SEQ ID NO: 202185 - protein, 15 aa, Artificial Sequence
  Description of Artificial Sequence: Synthetic peptide
  Seed: SPGMMMGMFNMLSTV
SPGYMMYMFNMFSTV

SEQ ID NO: 202186 - protein, 15 aa, Artificial Sequence
  Description of Artificial Sequence: Synthetic peptide
  Seed: SPGMMMGMFNMLSTV
SPGYMMYMFNMISTV

SEQ ID NO: 202187 - protein, 15 aa, Artificial Sequence
  Description of Artificial Sequence: Synthetic peptide
  Seed: SPGMMMGMFNMLSTV
SPGYMMYMFNMLSTV

SEQ ID NO: 202188 - protein, 15 aa, Artificial Sequence
  Description of Artificial Sequence: Synthetic peptide
  Seed: SPGMMMGMFNMLSTV
SPGYMMYMFNMMSTV

SEQ ID NO: 202189 - protein, 15 aa, Artificial Sequence
  Description of Artificial Sequence: Synthetic peptide
  Seed: SPGMMMGMFNMLSTV
SPGYMMYMFNMYSTV

SEQ ID NO: 202190 - protein, 15 aa, Artificial Sequence
  Description of Artificial Sequence: Synthetic peptide
  Seed: SPGMMMGMFNMLSTV
SPGYMMYMLNMLSTV

SEQ ID NO: 202191 - protein, 15 aa, Artificial Sequence
  Description of Artificial Sequence: Synthetic peptide
  Seed: SPGMMMGMFNMLSTV
SPGYMMYMNNMASTV

SEQ ID NO: 202192 - protein, 15 aa, Artificial Sequence
  Description of Artificial Sequence: Synthetic peptide
  Seed: SPGMMMGMFNMLSTV
SPGYMMYMNNMFSTV

SEQ ID NO: 202193 - protein, 15 aa, Artificial Sequence
  Description of Artificial Sequence: Synthetic peptide
  Seed: SPGMMMGMFNMLSTV
SPGYMMYMNNMISTV

SEQ ID NO: 202194 - protein, 15 aa, Artificial Sequence
  Description of Artificial Sequence: Synthetic peptide
  Seed: SPGMMMGMFNMLSTV
SPGYMMYMNNMLSTV

SEQ ID NO: 202195 - protein, 15 aa, Artificial Sequence
  Description of Artificial Sequence: Synthetic peptide
  Seed: SPGMMMGMFNMLSTV
SPGYMMYMNNMMSTV

SEQ ID NO: 202196 - protein, 15 aa, Artificial Sequence
  Description of Artificial Sequence: Synthetic peptide
  Seed: SPGMMMGMFNMLSTV
SPGYMMYMNNMVSTV

SEQ ID NO: 202197 - protein, 15 aa, Artificial Sequence
  Description of Artificial Sequence: Synthetic peptide
  Seed: SPGMMMGMFNMLSTV
SPGYMMYMRNMASTV

SEQ ID NO: 202198 - protein, 15 aa, Artificial Sequence
  Description of Artificial Sequence: Synthetic peptide
  Seed: SPGMMMGMFNMLSTV
SPGYMMYMSNMASTV

SEQ ID NO: 202199 - protein, 15 aa, Artificial Sequence
  Description of Artificial Sequence: Synthetic peptide
  Seed: SPGMMMGMFNMLSTV
SPGYMMYMSNMISTV

SEQ ID NO: 202200 - protein, 15 aa, Artificial Sequence
  Description of Artificial Sequence: Synthetic peptide
  Seed: SPGMMMGMFNMLSTV
SPGYMMYMSNMVSTV

SEQ ID NO: 202201 - protein, 15 aa, Artificial Sequence
  Description of Artificial Sequence: Synthetic peptide
  Seed: SPGMMMGMFNMLSTV
SPGYMMYMWNMLSTV

SEQ ID NO: 202202 - protein, 15 aa, Artificial Sequence
  Description of Artificial Sequence: Synthetic peptide
  Seed: SPGMMMGMFNMLSTV
SPGYMMYMYNMISTV

SEQ ID NO: 202203 - protein, 15 aa, Artificial Sequence
  Description of Artificial Sequence: Synthetic peptide
  Seed: SPGMMMGMFNMLSTV
SPGYMMYMYNMLSTV

SEQ ID NO: 202204 - protein, 15 aa, Artificial Sequence
  Description of Artificial Sequence: Synthetic peptide
  Seed: SPGMMMGMFNMLSTV
SPGYMMYMYNMMSTV

SEQ ID NO: 202205 - protein, 15 aa, Artificial Sequence
  Description of Artificial Sequence: Synthetic peptide
  Seed: SPGMMMGMFNMLSTV
SPGYMMYMYNMYSTV

SEQ ID NO: 202206 - protein, 17 aa, Artificial Sequence
  Description of Artificial Sequence: Synthetic peptide
  Seed: GMMMGMFNMLSTVLGVS
GFMMHMFNMFSTVLGVS

SEQ ID NO: 202207 - protein, 17 aa, Artificial Sequence
  Description of Artificial Sequence: Synthetic peptide
  Seed: GMMMGMFNMLSTVLGVS
GMMMFMFHMFSTVLGVS

SEQ ID NO: 202208 - protein, 17 aa, Artificial Sequence
  Description of Artificial Sequence: Synthetic peptide
  Seed: GMMMGMFNMLSTVLGVS
GMMMGMQNMMSSVLNVS

SEQ ID NO: 202209 - protein, 15 aa, Artificial Sequence
  Description of Artificial Sequence: Synthetic peptide
  Seed: SPGMMMGMFNMLSTV
SPGGMMNMNNMISTV

SEQ ID NO: 202210 - protein, 17 aa, Artificial Sequence
  Description of Artificial Sequence: Synthetic peptide
  Seed: GMMMGMFNMLSTVLGVS
GMMMGMVNMRSRVLHVS

SEQ ID NO: 202211 - protein, 17 aa, Artificial Sequence
  Description of Artificial Sequence: Synthetic peptide
  Seed: GMMMGMFNMLSTVLGVS
GMMMGMTNMLSPVLLVS

SEQ ID NO: 202212 - protein, 20 aa, Artificial Sequence
  Description of Artificial Sequence: Synthetic peptide
  Seed: GNEKKAKLANVVRKMMTNSQ
GNEMKAFLMNVVRKMMTNSQ

SEQ ID NO: 202213 - protein, 17 aa, Artificial Sequence
  Description of Artificial Sequence: Synthetic peptide
  Seed: GMMMGMFNMLSTVLGVS
GMMMGMVNMQSNVLHVS

SEQ ID NO: 202214 - protein, 20 aa, Artificial Sequence
  Description of Artificial Sequence: Synthetic peptide
  Seed: GNEKKAKLANVVRKMMTNSQ
GNEKKAILAWVARKVMTNSQ

SEQ ID NO: 202215 - protein, 20 aa, Artificial Sequence
  Description of Artificial Sequence: Synthetic peptide
  Seed: GNEKKAKLANVVRKMMTNSQ
GNEIKAFLWNVARKMMTNSQ

SEQ ID NO: 202216 - protein, 20 aa, Artificial Sequence
  Description of Artificial Sequence: Synthetic peptide
  Seed: GNEKKAKLANVVRKMMTNSQ
GNEFKAFLLNVFRKMMTNSQ

SEQ ID NO: 202217 - protein, 15 aa, Artificial Sequence
  Description of Artificial Sequence: Synthetic peptide
  Seed: SPGMMMGMFNMLSTV
SPGPMMGMVNMASTV

SEQ ID NO: 202218 - protein, 20 aa, Artificial Sequence
  Description of Artificial Sequence: Synthetic peptide
  Seed: GNEKKAKLANVVRKMMTNSQ
GNEIKAFLANVFRKMMTNSQ

SEQ ID NO: 202219 - protein, 15 aa, Artificial Sequence
  Description of Artificial Sequence: Synthetic peptide
  Seed: SPGMMMGMFNMLSTV
SPGVMMFMWNMFSTV

SEQ ID NO: 202220 - protein, 20 aa, Artificial Sequence
  Description of Artificial Sequence: Synthetic peptide
  Seed: GNEKKAKLANVVRKMMTNSQ
GNEMKAMLWNVIRKMMTNSQ

SEQ ID NO: 202221 - protein, 17 aa, Artificial Sequence
  Description of Artificial Sequence: Synthetic peptide
  Seed: GMMMGMFNMLSTVLGVS
GMMFGMFNFLSKVLGVS

SEQ ID NO: 202222 - protein, 15 aa, Artificial Sequence
  Description of Artificial Sequence: Synthetic peptide
  Seed: SPGMMMGMFNMLSTV
SPGMAMGRFRMLRTV

SEQ ID NO: 202223 - protein, 15 aa, Artificial Sequence
  Description of Artificial Sequence: Synthetic peptide
  Seed: SPGMMMGMFNMLSTV
SPGVMMFMMNMFSTV

SEQ ID NO: 202224 - protein, 20 aa, Artificial Sequence
  Description of Artificial Sequence: Synthetic peptide
  Seed: GNEKKAKLANVVRKMMTNSQ
GNEFKALLMNVFRKMMTNSQ

SEQ ID NO: 202225 - protein, 20 aa, Artificial Sequence
  Description of Artificial Sequence: Synthetic peptide
  Seed: GNEKKAKLANVVRKMMTNSQ
GNEKKAFLFNVLRKMMTNSQ

SEQ ID NO: 202226 - protein, 20 aa, Artificial Sequence
  Description of Artificial Sequence: Synthetic peptide
  Seed: GNEKKAKLANVVRKMMTNSQ
GNEMKALLWNVARKMMTNSQ

SEQ ID NO: 202227 - protein, 20 aa, Artificial Sequence
  Description of Artificial Sequence: Synthetic peptide
  Seed: GNEKKAKLANVVRKMMTNSQ
GNEWKAFLYNVARKMMTNSQ

SEQ ID NO: 202228 - protein, 20 aa, Artificial Sequence
  Description of Artificial Sequence: Synthetic peptide
  Seed: GNEKKAKLANVVRKMMTNSQ
GNEIKAFLLNVARKMMTNSQ

SEQ ID NO: 202229 - protein, 17 aa, Artificial Sequence
  Description of Artificial Sequence: Synthetic peptide
  Seed: GMMMGMFNMLSTVLGVS
GMMMGMANMASAVLAVS

SEQ ID NO: 202230 - protein, 17 aa, Artificial Sequence
  Description of Artificial Sequence: Synthetic peptide
  Seed: GMMMGMFNMLSTVLGVS
GMMMGMVNMASRVLKVS

SEQ ID NO: 202231 - protein, 20 aa, Artificial Sequence
  Description of Artificial Sequence: Synthetic peptide
  Seed: GNEKKAKLANVVRKMMTNSQ
GNEVKAFLYNVVRKMMTNSQ

SEQ ID NO: 202232 - protein, 17 aa, Artificial Sequence
  Description of Artificial Sequence: Synthetic peptide
  Seed: GMMMGMFNMLSTVLGVS
GMMMGMMNMASRVLKVS

SEQ ID NO: 202233 - protein, 20 aa, Artificial Sequence
  Description of Artificial Sequence: Synthetic peptide
  Seed: GNEKKAKLANVVRKMMTNSQ
GNEMKALLMNVIRKMMTNSQ

SEQ ID NO: 202234 - protein, 20 aa, Artificial Sequence
  Description of Artificial Sequence: Synthetic peptide
  Seed: GNEKKAKLANVVRKMMTNSQ
GNEFKALLYNVPRKMMTNSQ

SEQ ID NO: 202235 - protein, 20 aa, Artificial Sequence
  Description of Artificial Sequence: Synthetic peptide
  Seed: GNEKKAKLANVVRKMMTNSQ
GNEFKALLWNVPRKMMTNSQ

SEQ ID NO: 202236 - protein, 20 aa, Artificial Sequence
  Description of Artificial Sequence: Synthetic peptide
  Seed: GNEKKAKLANVVRKMMTNSQ
GNEKKAFLFNVVRKMMTNSQ

SEQ ID NO: 202237 - protein, 20 aa, Artificial Sequence
  Description of Artificial Sequence: Synthetic peptide
  Seed: GNEKKAKLANVVRKMMTNSQ
GNEWKALLWNVARKMMTNSQ

SEQ ID NO: 202238 - protein, 20 aa, Artificial Sequence
  Description of Artificial Sequence: Synthetic peptide
  Seed: GNEKKAKLANVVRKMMTNSQ
GNEIKAMLMNVIRKMMTNSQ

SEQ ID NO: 202239 - protein, 15 aa, Artificial Sequence
  Description of Artificial Sequence: Synthetic peptide
  Seed: SPGMMMGMFNMLSTV
SPGPMMWMANMASTV

SEQ ID NO: 202240 - protein, 20 aa, Artificial Sequence
  Description of Artificial Sequence: Synthetic peptide
  Seed: GNEKKAKLANVVRKMMTNSQ
GNEIKALLYNVARKMMTNSQ

SEQ ID NO: 202241 - protein, 20 aa, Artificial Sequence
  Description of Artificial Sequence: Synthetic peptide
  Seed: GNEKKAKLANVVRKMMTNSQ
GNEKKAKFANHVFKMFTNSQ

SEQ ID NO: 202242 - protein, 15 aa, Artificial Sequence
  Description of Artificial Sequence: Synthetic peptide
  Seed: SPGMMMGMFNMLSTV
SPGMIMGRFRMLWTV

SEQ ID NO: 202243 - protein, 15 aa, Artificial Sequence
  Description of Artificial Sequence: Synthetic peptide
  Seed: SPGMMMGMFNMLSTV
SPGLMMFMHNMFSTV

SEQ ID NO: 202244 - protein, 17 aa, Artificial Sequence
  Description of Artificial Sequence: Synthetic peptide
  Seed: GMMMGMFNMLSTVLGVS
GMMMGMVNMASNVLCVS

SEQ ID NO: 202245 - protein, 20 aa, Artificial Sequence
  Description of Artificial Sequence: Synthetic peptide
  Seed: GNEKKAKLANVVRKMMTNSQ
GNELKARLYNVIRKMMTNSQ

SEQ ID NO: 202246 - protein, 20 aa, Artificial Sequence
  Description of Artificial Sequence: Synthetic peptide
  Seed: GNEKKAKLANVVRKMMTNSQ
GNELKARLFNVARKMMTNSQ

SEQ ID NO: 202247 - protein, 17 aa, Artificial Sequence
  Description of Artificial Sequence: Synthetic peptide
  Seed: GMMMGMFNMLSTVLGVS
GMMMGMFNFLSEVFGVV

SEQ ID NO: 202248 - protein, 15 aa, Artificial Sequence
  Description of Artificial Sequence: Synthetic peptide
  Seed: SPGMMMGMFNMLSTV
SPGYMMFMANMFSTV

SEQ ID NO: 202249 - protein, 17 aa, Artificial Sequence
  Description of Artificial Sequence: Synthetic peptide
  Seed: GMMMGMFNMLSTVLGVS
GMMMGMFNMLATALGAS

SEQ ID NO: 202250 - protein, 20 aa, Artificial Sequence
  Description of Artificial Sequence: Synthetic peptide
  Seed: GNEKKAKLANVVRKMMTNSQ
GNERKAFLFNVVRKMMTNSQ

SEQ ID NO: 202251 - protein, 20 aa, Artificial Sequence
  Description of Artificial Sequence: Synthetic peptide
  Seed: GNEKKAKLANVVRKMMTNSQ
GNEWKALLMNVIRKMMTNSQ

SEQ ID NO: 202252 - protein, 15 aa, Artificial Sequence
  Description of Artificial Sequence: Synthetic peptide
  Seed: SPGMMMGMFNMLSTV
SPGMMMFMANMFSTV

SEQ ID NO: 202253 - protein, 20 aa, Artificial Sequence
  Description of Artificial Sequence: Synthetic peptide
  Seed: GNEKKAKLANVVRKMMTNSQ
GNERKATLFNVVRKMMTNSQ

SEQ ID NO: 202254 - protein, 20 aa, Artificial Sequence
  Description of Artificial Sequence: Synthetic peptide
  Seed: GNEKKAKLANVVRKMMTNSQ
GNERKASLFNVIRKMMTNSQ

SEQ ID NO: 202255 - protein, 15 aa, Artificial Sequence
  Description of Artificial Sequence: Synthetic peptide
  Seed: SPGMMMGMFNMLSTV
SPGAMMMMFNMFSTV

SEQ ID NO: 202256 - protein, 17 aa, Artificial Sequence
  Description of Artificial Sequence: Synthetic peptide
  Seed: GMMMGMFNMLSTVLGVS
GMMMGMFNFLSTVFGVE

SEQ ID NO: 202257 - protein, 15 aa, Artificial Sequence
  Description of Artificial Sequence: Synthetic peptide
  Seed: SPGMMMGMFNMLSTV
SPGFMMFMGNMFSTV

SEQ ID NO: 202258 - protein, 20 aa, Artificial Sequence
  Description of Artificial Sequence: Synthetic peptide
  Seed: GNEKKAKLANVVRKMMTNSQ
GNERKAFLFNVIRKMMTNSQ

SEQ ID NO: 202259 - protein, 20 aa, Artificial Sequence
  Description of Artificial Sequence: Synthetic peptide
  Seed: GNEKKAKLANVVRKMMTNSQ
GNEFKAMLYNVPRKMMTNSQ

SEQ ID NO: 202260 - protein, 20 aa, Artificial Sequence
  Description of Artificial Sequence: Synthetic peptide
  Seed: GNEKKAKLANVVRKMMTNSQ
GNERKASLFNVVRKMMTNSQ

SEQ ID NO: 202261 - protein, 15 aa, Artificial Sequence
  Description of Artificial Sequence: Synthetic peptide
  Seed: SPGMMMGMFNMLSTV
SPGMTMGMFRMLRTV

SEQ ID NO: 202262 - protein, 20 aa, Artificial Sequence
  Description of Artificial Sequence: Synthetic peptide
  Seed: GNEKKAKLANVVRKMMTNSQ
GNEFKAFLHNVVRKMMTNSQ

SEQ ID NO: 202263 - protein, 17 aa, Artificial Sequence
  Description of Artificial Sequence: Synthetic peptide
  Seed: GMMMGMFNMLSTVLGVS
GMMMGMFNFLSEVFGVE

SEQ ID NO: 202264 - protein, 17 aa, Artificial Sequence
  Description of Artificial Sequence: Synthetic peptide
  Seed: GMMMGMFNMLSTVLGVS
GMMMGMINMNSRVLKVS

SEQ ID NO: 202265 - protein, 20 aa, Artificial Sequence
  Description of Artificial Sequence: Synthetic peptide
  Seed: GNEKKAKLANVVRKMMTNSQ
GNERKAILFNVVRKMMTNSQ

SEQ ID NO: 202266 - protein, 15 aa, Artificial Sequence
  Description of Artificial Sequence: Synthetic peptide
  Seed: SPGMMMGMFNMLSTV
SPGFMMFMSNMYSTV

SEQ ID NO: 202267 - protein, 20 aa, Artificial Sequence
  Description of Artificial Sequence: Synthetic peptide
  Seed: GNEKKAKLANVVRKMMTNSQ
GNERKAALFNVIRKMMTNSQ

SEQ ID NO: 202268 - protein, 15 aa, Artificial Sequence
  Description of Artificial Sequence: Synthetic peptide
  Seed: SPGMMMGMFNMLSTV
SPGYMMYMSNMFSTV

SEQ ID NO: 202269 - protein, 17 aa, Artificial Sequence
  Description of Artificial Sequence: Synthetic peptide
  Seed: GMMMGMFNMLSTVLGVS
GMMMGMFNMLATVLGAS

SEQ ID NO: 202270 - protein, 15 aa, Artificial Sequence
  Description of Artificial Sequence: Synthetic peptide
  Seed: SPGMMMGMFNMLSTV
SPGYMMFMPNMFSTV

SEQ ID NO: 202271 - protein, 20 aa, Artificial Sequence
  Description of Artificial Sequence: Synthetic peptide
  Seed: GNEKKAKLANVVRKMMTNSQ
GNEYKAFLFNVYRKMMTNSQ

SEQ ID NO: 202272 - protein, 17 aa, Artificial Sequence
  Description of Artificial Sequence: Synthetic peptide
  Seed: GMMMGMFNMLSTVLGVS
GMMMGMFNMLATILGAS

SEQ ID NO: 202273 - protein, 20 aa, Artificial Sequence
  Description of Artificial Sequence: Synthetic peptide
  Seed: GNEKKAKLANVVRKMMTNSQ
GNEIKAMLMNVVRKMMTNSQ

SEQ ID NO: 202274 - protein, 20 aa, Artificial Sequence
  Description of Artificial Sequence: Synthetic peptide
  Seed: GNEKKAKLANVVRKMMTNSQ
GNELKALLLNVARKMMTNSQ

SEQ ID NO: 202275 - protein, 15 aa, Artificial Sequence
  Description of Artificial Sequence: Synthetic peptide
  Seed: SPGMMMGMFNMLSTV
SPGMIMGRFHMLKTV

SEQ ID NO: 202276 - protein, 20 aa, Artificial Sequence
  Description of Artificial Sequence: Synthetic peptide
  Seed: GNEKKAKLANVVRKMMTNSQ
GNEYKAFLMNVMRKMMTNSQ

SEQ ID NO: 202277 - protein, 20 aa, Artificial Sequence
  Description of Artificial Sequence: Synthetic peptide
  Seed: GNEKKAKLANVVRKMMTNSQ
GNEFKAFLHNVIRKMMTNSQ

SEQ ID NO: 202278 - protein, 20 aa, Artificial Sequence
  Description of Artificial Sequence: Synthetic peptide
  Seed: GNEKKAKLANVVRKMMTNSQ
GNERKAVLFNVIRKMMTNSQ

SEQ ID NO: 202279 - protein, 20 aa, Artificial Sequence
  Description of Artificial Sequence: Synthetic peptide
  Seed: GNEKKAKLANVVRKMMTNSQ
GNERKAILFNVIRKMMTNSQ

SEQ ID NO: 202280 - protein, 20 aa, Artificial Sequence
  Description of Artificial Sequence: Synthetic peptide
  Seed: GNEKKAKLANVVRKMMTNSQ
GNERKAILANVIRKMMTNSQ

SEQ ID NO: 202281 - protein, 15 aa, Artificial Sequence
  Description of Artificial Sequence: Synthetic peptide
  Seed: SPGMMMGMFNMLSTV
SPGVMMFMPNMFSTV

SEQ ID NO: 202282 - protein, 20 aa, Artificial Sequence
  Description of Artificial Sequence: Synthetic peptide
  Seed: GNEKKAKLANVVRKMMTNSQ
GNERKAILFNVLRKMMTNSQ

SEQ ID NO: 202283 - protein, 15 aa, Artificial Sequence
  Description of Artificial Sequence: Synthetic peptide
  Seed: SPGMMMGMFNMLSTV
SPGMMMFMSNMFSTV

SEQ ID NO: 202284 - protein, 15 aa, Artificial Sequence
  Description of Artificial Sequence: Synthetic peptide
  Seed: SPGMMMGMFNMLSTV
SPGTMMAMANMLSTV

SEQ ID NO: 202285 - protein, 17 aa, Artificial Sequence
  Description of Artificial Sequence: Synthetic peptide
  Seed: GMMMGMFNMLSTVLGVS
GMMMGMYNMRSRVLKVS

SEQ ID NO: 202286 - protein, 15 aa, Artificial Sequence
  Description of Artificial Sequence: Synthetic peptide
  Seed: SPGMMMGMFNMLSTV
SPGYMMFMSNMYSTV

SEQ ID NO: 202287 - protein, 15 aa, Artificial Sequence
  Description of Artificial Sequence: Synthetic peptide
  Seed: SPGMMMGMFNMLSTV
SPGFMMSMFNMKSTV

SEQ ID NO: 202288 - protein, 15 aa, Artificial Sequence
  Description of Artificial Sequence: Synthetic peptide
  Seed: SPGMMMGMFNMLSTV
SPGRMMFMFNMLSTV

SEQ ID NO: 202289 - protein, 15 aa, Artificial Sequence
  Description of Artificial Sequence: Synthetic peptide
  Seed: SPGMMMGMFNMLSTV
SPGFMMSMWNMSSTV

SEQ ID NO: 202290 - protein, 15 aa, Artificial Sequence
  Description of Artificial Sequence: Synthetic peptide
  Seed: SPGMMMGMFNMLSTV
SPGYMMLMSNMFSTV

SEQ ID NO: 202291 - protein, 20 aa, Artificial Sequence
  Description of Artificial Sequence: Synthetic peptide
  Seed: GNEKKAKLANVVRKMMTNSQ
GNERKATLFNVMRKMMTNSQ

SEQ ID NO: 202292 - protein, 20 aa, Artificial Sequence
  Description of Artificial Sequence: Synthetic peptide
  Seed: GNEKKAKLANVVRKMMTNSQ
GNERKASLFNVFRKMMTNSQ

SEQ ID NO: 202293 - protein, 15 aa, Artificial Sequence
  Description of Artificial Sequence: Synthetic peptide
  Seed: SPGMMMGMFNMLSTV
SPGWMMIMYNMFSTV

SEQ ID NO: 202294 - protein, 15 aa, Artificial Sequence
  Description of Artificial Sequence: Synthetic peptide
  Seed: SPGMMMGMFNMLSTV
SPGYMMFMTNMFSTV

SEQ ID NO: 202295 - protein, 15 aa, Artificial Sequence
  Description of Artificial Sequence: Synthetic peptide
  Seed: SPGMMMGMFNMLSTV
SPGFMMDMFNMNSTV

SEQ ID NO: 202296 - protein, 20 aa, Artificial Sequence
  Description of Artificial Sequence: Synthetic peptide
  Seed: GNEKKAKLANVVRKMMTNSQ
GNERKAVLFNVLRKMMTNSQ

SEQ ID NO: 202297 - protein, 15 aa, Artificial Sequence
  Description of Artificial Sequence: Synthetic peptide
  Seed: SPGMMMGMFNMLSTV
SPGYMMYMANMFSTV

SEQ ID NO: 202298 - protein, 15 aa, Artificial Sequence
  Description of Artificial Sequence: Synthetic peptide
  Seed: SPGMMMGMFNMLSTV
SPGYMMLMTNMFSTV

SEQ ID NO: 202299 - protein, 20 aa, Artificial Sequence
  Description of Artificial Sequence: Synthetic peptide
  Seed: GNEKKAKLANVVRKMMTNSQ
GNERKAMLFNVVRKMMTNSQ

SEQ ID NO: 202300 - protein, 15 aa, Artificial Sequence
  Description of Artificial Sequence: Synthetic peptide
  Seed: SPGMMMGMFNMLSTV
SPGYMMIMGNMFSTV

SEQ ID NO: 202301 - protein, 20 aa, Artificial Sequence
  Description of Artificial Sequence: Synthetic peptide
  Seed: GNEKKAKLANVVRKMMTNSQ
GNEFKARLANVFRKMMTNSQ

SEQ ID NO: 202302 - protein, 20 aa, Artificial Sequence
  Description of Artificial Sequence: Synthetic peptide
  Seed: GNEKKAKLANVVRKMMTNSQ
GNEFKAMLLNVFRKMMTNSQ

SEQ ID NO: 202303 - protein, 20 aa, Artificial Sequence
  Description of Artificial Sequence: Synthetic peptide
  Seed: GNEKKAKLANVVRKMMTNSQ
GNERKATLFNVFRKMMTNSQ

SEQ ID NO: 202304 - protein, 15 aa, Artificial Sequence
  Description of Artificial Sequence: Synthetic peptide
  Seed: SPGMMMGMFNMLSTV
SPGFMMDMFNMSSTV

SEQ ID NO: 202305 - protein, 15 aa, Artificial Sequence
  Description of Artificial Sequence: Synthetic peptide
  Seed: SPGMMMGMFNMLSTV
SPGYMMFMANMYSTV

SEQ ID NO: 202306 - protein, 20 aa, Artificial Sequence
  Description of Artificial Sequence: Synthetic peptide
  Seed: GNEKKAKLANVVRKMMTNSQ
GNERKAHLFNVLRKMMTNSQ

SEQ ID NO: 202307 - protein, 20 aa, Artificial Sequence
  Description of Artificial Sequence: Synthetic peptide
  Seed: GNEKKAKLANVVRKMMTNSQ
GNERKALLFNVVRKMMTNSQ

SEQ ID NO: 202308 - protein, 17 aa, Artificial Sequence
  Description of Artificial Sequence: Synthetic peptide
  Seed: GMMMGMFNMLSTVLGVS
GMMMGMINMRSVVLRVS

SEQ ID NO: 202309 - protein, 20 aa, Artificial Sequence
  Description of Artificial Sequence: Synthetic peptide
  Seed: GNEKKAKLANVVRKMMTNSQ
GNEYKARLWNVLRKMMTNSQ

SEQ ID NO: 202310 - protein, 15 aa, Artificial Sequence
  Description of Artificial Sequence: Synthetic peptide
  Seed: SPGMMMGMFNMLSTV
SPGFMMEMFNMRSTV

SEQ ID NO: 202311 - protein, 15 aa, Artificial Sequence
  Description of Artificial Sequence: Synthetic peptide
  Seed: SPGMMMGMFNMLSTV
SPGVMMFMSNMYSTV

SEQ ID NO: 202312 - protein, 15 aa, Artificial Sequence
  Description of Artificial Sequence: Synthetic peptide
  Seed: SPGMMMGMFNMLSTV
SPGIMMFMTNMFSTV

SEQ ID NO: 202313 - protein, 20 aa, Artificial Sequence
  Description of Artificial Sequence: Synthetic peptide
  Seed: GNEKKAKLANVVRKMMTNSQ
GNEYKAWLFNVFRKMMTNSQ

SEQ ID NO: 202314 - protein, 15 aa, Artificial Sequence
  Description of Artificial Sequence: Synthetic peptide
  Seed: SPGMMMGMFNMLSTV
SPGFMMDMWNMVSTV

SEQ ID NO: 202315 - protein, 15 aa, Artificial Sequence
  Description of Artificial Sequence: Synthetic peptide
  Seed: SPGMMMGMFNMLSTV
SPGFMMSMLNMNSTV

SEQ ID NO: 202316 - protein, 20 aa, Artificial Sequence
  Description of Artificial Sequence: Synthetic peptide
  Seed: GNEKKAKLANVVRKMMTNSQ
GNEWKAMLWNVIRKMMTNSQ

SEQ ID NO: 202317 - protein, 20 aa, Artificial Sequence
  Description of Artificial Sequence: Synthetic peptide
  Seed: GNEKKAKLANVVRKMMTNSQ
GNEKKAKLANRVRKMRTNSQ

SEQ ID NO: 202318 - protein, 15 aa, Artificial Sequence
  Description of Artificial Sequence: Synthetic peptide
  Seed: SPGMMMGMFNMLSTV
SPGFMMSMWNMESTV

SEQ ID NO: 202319 - protein, 20 aa, Artificial Sequence
  Description of Artificial Sequence: Synthetic peptide
  Seed: GNEKKAKLANVVRKMMTNSQ
GNERKAILANVARKMMTNSQ

SEQ ID NO: 202320 - protein, 20 aa, Artificial Sequence
  Description of Artificial Sequence: Synthetic peptide
  Seed: GNEKKAKLANVVRKMMTNSQ
GNERKAFLFNVLRKMMTNSQ

SEQ ID NO: 202321 - protein, 15 aa, Artificial Sequence
  Description of Artificial Sequence: Synthetic peptide
  Seed: SPGMMMGMFNMLSTV
SPGFMMTMWNMHSTV

SEQ ID NO: 202322 - protein, 15 aa, Artificial Sequence
  Description of Artificial Sequence: Synthetic peptide
  Seed: SPGMMMGMFNMLSTV
SPGLMMLMSNMFSTV

SEQ ID NO: 202323 - protein, 20 aa, Artificial Sequence
  Description of Artificial Sequence: Synthetic peptide
  Seed: GNEKKAKLANVVRKMMTNSQ
GNEFKAWLFNVFRKMMTNSQ

SEQ ID NO: 202324 - protein, 15 aa, Artificial Sequence
  Description of Artificial Sequence: Synthetic peptide
  Seed: SPGMMMGMFNMLSTV
SPGLMMVMWNMFSTV

SEQ ID NO: 202325 - protein, 15 aa, Artificial Sequence
  Description of Artificial Sequence: Synthetic peptide
  Seed: SPGMMMGMFNMLSTV
SPGRMMTMFNMMSTV

SEQ ID NO: 202326 - protein, 15 aa, Artificial Sequence
  Description of Artificial Sequence: Synthetic peptide
  Seed: SPGMMMGMFNMLSTV
SPGYMMSMWNMMSTV

SEQ ID NO: 202327 - protein, 15 aa, Artificial Sequence
  Description of Artificial Sequence: Synthetic peptide
  Seed: SPGMMMGMFNMLSTV
SPGFMMFMLNMFSTV

SEQ ID NO: 202328 - protein, 20 aa, Artificial Sequence
  Description of Artificial Sequence: Synthetic peptide
  Seed: GNEKKAKLANVVRKMMTNSQ
GNERKALLFNVLRKMMTNSQ

SEQ ID NO: 202329 - protein, 15 aa, Artificial Sequence
  Description of Artificial Sequence: Synthetic peptide
  Seed: SPGMMMGMFNMLSTV
SPGRMMSMFNMFSTV

SEQ ID NO: 202330 - protein, 20 aa, Artificial Sequence
  Description of Artificial Sequence: Synthetic peptide
  Seed: GNEKKAKLANVVRKMMTNSQ
GNEMKAFLLNVLRKMMTNSQ

SEQ ID NO: 202331 - protein, 15 aa, Artificial Sequence
  Description of Artificial Sequence: Synthetic peptide
  Seed: SPGMMMGMFNMLSTV
SPGFMMIMTNMFSTV

SEQ ID NO: 202332 - protein, 15 aa, Artificial Sequence
  Description of Artificial Sequence: Synthetic peptide
  Seed: SPGMMMGMFNMLSTV
SPGWMMMMYNMFSTV

SEQ ID NO: 202333 - protein, 15 aa, Artificial Sequence
  Description of Artificial Sequence: Synthetic peptide
  Seed: SPGMMMGMFNMLSTV
SPGFMMFMHNMLSTV

SEQ ID NO: 202334 - protein, 15 aa, Artificial Sequence
  Description of Artificial Sequence: Synthetic peptide
  Seed: SPGMMMGMFNMLSTV
SPGYMMIMTNMFSTV

SEQ ID NO: 202335 - protein, 15 aa, Artificial Sequence
  Description of Artificial Sequence: Synthetic peptide
  Seed: SPGMMMGMFNMLSTV
SPGFMMAMFNMKSTV

SEQ ID NO: 202336 - protein, 15 aa, Artificial Sequence
  Description of Artificial Sequence: Synthetic peptide
  Seed: SPGMMMGMFNMLSTV
SPGYMMWMANMFSTV

SEQ ID NO: 202337 - protein, 15 aa, Artificial Sequence
  Description of Artificial Sequence: Synthetic peptide
  Seed: SPGMMMGMFNMLSTV
SPGFMMFMPNMYSTV

SEQ ID NO: 202338 - protein, 15 aa, Artificial Sequence
  Description of Artificial Sequence: Synthetic peptide
  Seed: SPGMMMGMFNMLSTV
SPGYMMSMFNMHSTV

SEQ ID NO: 202339 - protein, 20 aa, Artificial Sequence
  Description of Artificial Sequence: Synthetic peptide
  Seed: GNEKKAKLANVVRKMMTNSQ
GNEFKAKLANVFRKMMTNSQ

SEQ ID NO: 202340 - protein, 15 aa, Artificial Sequence
  Description of Artificial Sequence: Synthetic peptide
  Seed: SPGMMMGMFNMLSTV
SPGFMMAMYNMASTV

SEQ ID NO: 202341 - protein, 15 aa, Artificial Sequence
  Description of Artificial Sequence: Synthetic peptide
  Seed: SPGMMMGMFNMLSTV
SPGFMMSMWNMDSTV

SEQ ID NO: 202342 - protein, 17 aa, Artificial Sequence
  Description of Artificial Sequence: Synthetic peptide
  Seed: GMMMGMFNMLSTVLGVS
GMMMGMFNMSSFVLRVS

SEQ ID NO: 202343 - protein, 15 aa, Artificial Sequence
  Description of Artificial Sequence: Synthetic peptide
  Seed: SPGMMMGMFNMLSTV
SPGFMMEMWNMYSTV

SEQ ID NO: 202344 - protein, 15 aa, Artificial Sequence
  Description of Artificial Sequence: Synthetic peptide
  Seed: SPGMMMGMFNMLSTV
SPGFMMMMFNMHSTV

SEQ ID NO: 202345 - protein, 15 aa, Artificial Sequence
  Description of Artificial Sequence: Synthetic peptide
  Seed: SPGMMMGMFNMLSTV
SPGMLMGRFRMLTTV

SEQ ID NO: 202346 - protein, 15 aa, Artificial Sequence
  Description of Artificial Sequence: Synthetic peptide
  Seed: SPGMMMGMFNMLSTV
SPGFMMSMLNMASTV

SEQ ID NO: 202347 - protein, 15 aa, Artificial Sequence
  Description of Artificial Sequence: Synthetic peptide
  Seed: SPGMMMGMFNMLSTV
SPGFMMSMLNMSSTV

SEQ ID NO: 202348 - protein, 15 aa, Artificial Sequence
  Description of Artificial Sequence: Synthetic peptide
  Seed: SPGMMMGMFNMLSTV
SPGFMMEMYNMASTV

SEQ ID NO: 202349 - protein, 15 aa, Artificial Sequence
  Description of Artificial Sequence: Synthetic peptide
  Seed: SPGMMMGMFNMLSTV
SPGYMMMMSNMFSTV

SEQ ID NO: 202350 - protein, 15 aa, Artificial Sequence
  Description of Artificial Sequence: Synthetic peptide
  Seed: SPGMMMGMFNMLSTV
SPGFMMTMYNMHSTV

SEQ ID NO: 202351 - protein, 15 aa, Artificial Sequence
  Description of Artificial Sequence: Synthetic peptide
  Seed: SPGMMMGMFNMLSTV
SPGFMMTMYNMPSTV

SEQ ID NO: 202352 - protein, 15 aa, Artificial Sequence
  Description of Artificial Sequence: Synthetic peptide
  Seed: SPGMMMGMFNMLSTV
SPGMMMFMANMLSTV

SEQ ID NO: 202353 - protein, 17 aa, Artificial Sequence
  Description of Artificial Sequence: Synthetic peptide
  Seed: GMMMGMFNMLSTVLGVS
GMMMGMFNMNSFVLVVS

SEQ ID NO: 202354 - protein, 15 aa, Artificial Sequence
  Description of Artificial Sequence: Synthetic peptide
  Seed: SPGMMMGMFNMLSTV
SPGWMMMMWNMFSTV

SEQ ID NO: 202355 - protein, 20 aa, Artificial Sequence
  Description of Artificial Sequence: Synthetic peptide
  Seed: GNEKKAKLANVVRKMMTNSQ
GNEKKAKIANRVRKMRTNSQ

SEQ ID NO: 202356 - protein, 15 aa, Artificial Sequence
  Description of Artificial Sequence: Synthetic peptide
  Seed: SPGMMMGMFNMLSTV
SPGFMMTMINMNSTV

SEQ ID NO: 202357 - protein, 15 aa, Artificial Sequence
  Description of Artificial Sequence: Synthetic peptide
  Seed: SPGMMMGMFNMLSTV
SPGFMMTMWNMRSTV

SEQ ID NO: 202358 - protein, 15 aa, Artificial Sequence
  Description of Artificial Sequence: Synthetic peptide
  Seed: SPGMMMGMFNMLSTV
SPGYMMNMFNMASTV

SEQ ID NO: 202359 - protein, 15 aa, Artificial Sequence
  Description of Artificial Sequence: Synthetic peptide
  Seed: SPGMMMGMFNMLSTV
SPGFMMTMLNMSSTV

SEQ ID NO: 202360 - protein, 15 aa, Artificial Sequence
  Description of Artificial Sequence: Synthetic peptide
  Seed: SPGMMMGMFNMLSTV
SPGFMMGMWNMLSTV

SEQ ID NO: 202361 - protein, 15 aa, Artificial Sequence
  Description of Artificial Sequence: Synthetic peptide
  Seed: SPGMMMGMFNMLSTV
SPGIMMFMSNMLSTV

SEQ ID NO: 202362 - protein, 15 aa, Artificial Sequence
  Description of Artificial Sequence: Synthetic peptide
  Seed: SPGMMMGMFNMLSTV
SPGWMMVMWNMFSTV

SEQ ID NO: 202363 - protein, 15 aa, Artificial Sequence
  Description of Artificial Sequence: Synthetic peptide
  Seed: SPGMMMGMFNMLSTV
SPGFMMIMMNMFSTV

SEQ ID NO: 202364 - protein, 17 aa, Artificial Sequence
  Description of Artificial Sequence: Synthetic peptide
  Seed: GMMMGMFNMLSTVLGVS
GMMMGMFNMHSFVLEVS

SEQ ID NO: 202365 - protein, 15 aa, Artificial Sequence
  Description of Artificial Sequence: Synthetic peptide
  Seed: SPGMMMGMFNMLSTV
SPGFMMFMENMFSTV

SEQ ID NO: 202366 - protein, 15 aa, Artificial Sequence
  Description of Artificial Sequence: Synthetic peptide
  Seed: SPGMMMGMFNMLSTV
SPGFMMGMFNMSSTV

SEQ ID NO: 202367 - protein, 17 aa, Artificial Sequence
  Description of Artificial Sequence: Synthetic peptide
  Seed: GMMMGMFNMLSTVLGVS
GMMMGMFNMISKVLRVS

SEQ ID NO: 202368 - protein, 15 aa, Artificial Sequence
  Description of Artificial Sequence: Synthetic peptide
  Seed: SPGMMMGMFNMLSTV
SPGFMMPMYNMLSTV

SEQ ID NO: 202369 - protein, 15 aa, Artificial Sequence
  Description of Artificial Sequence: Synthetic peptide
  Seed: SPGMMMGMFNMLSTV
SPGIMMSMWNMMSTV

SEQ ID NO: 202370 - protein, 15 aa, Artificial Sequence
  Description of Artificial Sequence: Synthetic peptide
  Seed: SPGMMMGMFNMLSTV
SPGFMMEMANMFSTV

SEQ ID NO: 202371 - protein, 15 aa, Artificial Sequence
  Description of Artificial Sequence: Synthetic peptide
  Seed: SPGMMMGMFNMLSTV
SPGFMMLMMNMFSTV

SEQ ID NO: 202372 - protein, 15 aa, Artificial Sequence
  Description of Artificial Sequence: Synthetic peptide
  Seed: SPGMMMGMFNMLSTV
SPGMMMMMWNMFSTV

SEQ ID NO: 202373 - protein, 15 aa, Artificial Sequence
  Description of Artificial Sequence: Synthetic peptide
  Seed: SPGMMMGMFNMLSTV
SPGLMMPMFNMLSTV

SEQ ID NO: 202374 - protein, 17 aa, Artificial Sequence
  Description of Artificial Sequence: Synthetic peptide
  Seed: GMMMGMFNMLSTVLGVS
GMMMGMVNMYSNVLNVS

SEQ ID NO: 202375 - protein, 15 aa, Artificial Sequence
  Description of Artificial Sequence: Synthetic peptide
  Seed: SPGMMMGMFNMLSTV
SPGFMMSMLNMESTV

SEQ ID NO: 202376 - protein, 15 aa, Artificial Sequence
  Description of Artificial Sequence: Synthetic peptide
  Seed: SPGMMMGMFNMLSTV
SPGFMMTMMNMNSTV

SEQ ID NO: 202377 - protein, 15 aa, Artificial Sequence
  Description of Artificial Sequence: Synthetic peptide
  Seed: SPGMMMGMFNMLSTV
SPGFMMEMWNMSSTV

SEQ ID NO: 202378 - protein, 15 aa, Artificial Sequence
  Description of Artificial Sequence: Synthetic peptide
  Seed: SPGMMMGMFNMLSTV
SPGMIMGMFPMLRTV

SEQ ID NO: 202379 - protein, 15 aa, Artificial Sequence
  Description of Artificial Sequence: Synthetic peptide
  Seed: SPGMMMGMFNMLSTV
SPGFMMAMWNMTSTV

SEQ ID NO: 202380 - protein, 15 aa, Artificial Sequence
  Description of Artificial Sequence: Synthetic peptide
  Seed: SPGMMMGMFNMLSTV
SPGVMMLMFNMFSTV

SEQ ID NO: 202381 - protein, 15 aa, Artificial Sequence
  Description of Artificial Sequence: Synthetic peptide
  Seed: SPGMMMGMFNMLSTV
SPGRMMHMFNMFSTV

SEQ ID NO: 202382 - protein, 15 aa, Artificial Sequence
  Description of Artificial Sequence: Synthetic peptide
  Seed: SPGMMMGMFNMLSTV
SPGFMMHMFNMKSTV

SEQ ID NO: 202383 - protein, 15 aa, Artificial Sequence
  Description of Artificial Sequence: Synthetic peptide
  Seed: SPGMMMGMFNMLSTV
SPGWMMSMWNMISTV

SEQ ID NO: 202384 - protein, 20 aa, Artificial Sequence
  Description of Artificial Sequence: Synthetic peptide
  Seed: GNEKKAKLANVVRKMMTNSQ
GNERKAFLYNVLRKMMTNSQ

SEQ ID NO: 202385 - protein, 15 aa, Artificial Sequence
  Description of Artificial Sequence: Synthetic peptide
  Seed: SPGMMMGMFNMLSTV
SPGMMMSMWNMVSTV

SEQ ID NO: 202386 - protein, 20 aa, Artificial Sequence
  Description of Artificial Sequence: Synthetic peptide
  Seed: GNEKKAKLANVVRKMMTNSQ
GNEFKAWLFNVRRKMMTNSQ

SEQ ID NO: 202387 - protein, 15 aa, Artificial Sequence
  Description of Artificial Sequence: Synthetic peptide
  Seed: SPGMMMGMFNMLSTV
SPGMMMSMWNMISTV

SEQ ID NO: 202388 - protein, 20 aa, Artificial Sequence
  Description of Artificial Sequence: Synthetic peptide
  Seed: GNEKKAKLANVVRKMMTNSQ
GNEKKAKIANIVRKMITNSQ

SEQ ID NO: 202389 - protein, 15 aa, Artificial Sequence
  Description of Artificial Sequence: Synthetic peptide
  Seed: SPGMMMGMFNMLSTV
SPGLMMFMSNMLSTV

SEQ ID NO: 202390 - protein, 15 aa, Artificial Sequence
  Description of Artificial Sequence: Synthetic peptide
  Seed: SPGMMMGMFNMLSTV
SPGFMMTMYNMQSTV

SEQ ID NO: 202391 - protein, 20 aa, Artificial Sequence
  Description of Artificial Sequence: Synthetic peptide
  Seed: GNEKKAKLANVVRKMMTNSQ
GNEYKATLWNVARKMMTNSQ

SEQ ID NO: 202392 - protein, 15 aa, Artificial Sequence
  Description of Artificial Sequence: Synthetic peptide
  Seed: SPGMMMGMFNMLSTV
SPGFMMSMMNMNSTV

SEQ ID NO: 202393 - protein, 17 aa, Artificial Sequence
  Description of Artificial Sequence: Synthetic peptide
  Seed: GMMMGMFNMLSTVLGVS
GMMMGMYNMASNVLPVS

SEQ ID NO: 202394 - protein, 15 aa, Artificial Sequence
  Description of Artificial Sequence: Synthetic peptide
  Seed: SPGMMMGMFNMLSTV
SPGFMMPMYNMISTV

SEQ ID NO: 202395 - protein, 15 aa, Artificial Sequence
  Description of Artificial Sequence: Synthetic peptide
  Seed: SPGMMMGMFNMLSTV
SPGYMMAMWNMISTV

SEQ ID NO: 202396 - protein, 20 aa, Artificial Sequence
  Description of Artificial Sequence: Synthetic peptide
  Seed: GNEKKAKLANVVRKMMTNSQ
GNEFKAFLQNVVRKMMTNSQ

SEQ ID NO: 202397 - protein, 15 aa, Artificial Sequence
  Description of Artificial Sequence: Synthetic peptide
  Seed: SPGMMMGMFNMLSTV
SPGYMMAMWNMVSTV

SEQ ID NO: 202398 - protein, 15 aa, Artificial Sequence
  Description of Artificial Sequence: Synthetic peptide
  Seed: SPGMMMGMFNMLSTV
SPGFMMFMHNMMSTV

SEQ ID NO: 202399 - protein, 15 aa, Artificial Sequence
  Description of Artificial Sequence: Synthetic peptide
  Seed: SPGMMMGMFNMLSTV
SPGFMMPMFNMTSTV

SEQ ID NO: 202400 - protein, 15 aa, Artificial Sequence
  Description of Artificial Sequence: Synthetic peptide
  Seed: SPGMMMGMFNMLSTV
SPGFMMHMLNMSSTV

SEQ ID NO: 202401 - protein, 15 aa, Artificial Sequence
  Description of Artificial Sequence: Synthetic peptide
  Seed: SPGMMMGMFNMLSTV
SPGCMMAMSNMASTV

SEQ ID NO: 202402 - protein, 15 aa, Artificial Sequence
  Description of Artificial Sequence: Synthetic peptide
  Seed: SPGMMMGMFNMLSTV
SPGFMMYMTNMYSTV

SEQ ID NO: 202403 - protein, 15 aa, Artificial Sequence
  Description of Artificial Sequence: Synthetic peptide
  Seed: SPGMMMGMFNMLSTV
SPGFMMDMINMLSTV

SEQ ID NO: 202404 - protein, 15 aa, Artificial Sequence
  Description of Artificial Sequence: Synthetic peptide
  Seed: SPGMMMGMFNMLSTV
SPGVMMFMANMLSTV

SEQ ID NO: 202405 - protein, 20 aa, Artificial Sequence
  Description of Artificial Sequence: Synthetic peptide
  Seed: GNEKKAKLANVVRKMMTNSQ
GNERKAILANVNRKMMTNSQ

SEQ ID NO: 202406 - protein, 15 aa, Artificial Sequence
  Description of Artificial Sequence: Synthetic peptide
  Seed: SPGMMMGMFNMLSTV
SPGLMMFMANMMSTV

SEQ ID NO: 202407 - protein, 15 aa, Artificial Sequence
  Description of Artificial Sequence: Synthetic peptide
  Seed: SPGMMMGMFNMLSTV
SPGFMMSMMNMTSTV

SEQ ID NO: 202408 - protein, 15 aa, Artificial Sequence
  Description of Artificial Sequence: Synthetic peptide
  Seed: SPGMMMGMFNMLSTV
SPGFMMTMMNMTSTV

SEQ ID NO: 202409 - protein, 15 aa, Artificial Sequence
  Description of Artificial Sequence: Synthetic peptide
  Seed: SPGMMMGMFNMLSTV
SPGFMMDMWNMMSTV

SEQ ID NO: 202410 - protein, 20 aa, Artificial Sequence
  Description of Artificial Sequence: Synthetic peptide
  Seed: GNEKKAKLANVVRKMMTNSQ
GNEIKAFLANVYRKMMTNSQ

SEQ ID NO: 202411 - protein, 15 aa, Artificial Sequence
  Description of Artificial Sequence: Synthetic peptide
  Seed: SPGMMMGMFNMLSTV
SPGMMMVMWNMFSTV

SEQ ID NO: 202412 - protein, 17 aa, Artificial Sequence
  Description of Artificial Sequence: Synthetic peptide
  Seed: GMMMGMFNMLSTVLGVS
GMMMGMFNMHSFVLNVS

SEQ ID NO: 202413 - protein, 17 aa, Artificial Sequence
  Description of Artificial Sequence: Synthetic peptide
  Seed: GMMMGMFNMLSTVLGVS
GMMMGMFNMESFVLVVS

SEQ ID NO: 202414 - protein, 15 aa, Artificial Sequence
  Description of Artificial Sequence: Synthetic peptide
  Seed: SPGMMMGMFNMLSTV
SPGFMMMMGNMFSTV

SEQ ID NO: 202415 - protein, 15 aa, Artificial Sequence
  Description of Artificial Sequence: Synthetic peptide
  Seed: SPGMMMGMFNMLSTV
SPGFMMIMENMFSTV

SEQ ID NO: 202416 - protein, 17 aa, Artificial Sequence
  Description of Artificial Sequence: Synthetic peptide
  Seed: GMMMGMFNMLSTVLGVS
GMMMGMFNMLSKVLAVS

SEQ ID NO: 202417 - protein, 15 aa, Artificial Sequence
  Description of Artificial Sequence: Synthetic peptide
  Seed: SPGMMMGMFNMLSTV
SPGYMMEMWNMFSTV

SEQ ID NO: 202418 - protein, 15 aa, Artificial Sequence
  Description of Artificial Sequence: Synthetic peptide
  Seed: SPGMMMGMFNMLSTV
SPGIMMWMYNMYSTV

SEQ ID NO: 202419 - protein, 15 aa, Artificial Sequence
  Description of Artificial Sequence: Synthetic peptide
  Seed: SPGMMMGMFNMLSTV
SPGAMMAMSNMVSTV

SEQ ID NO: 202420 - protein, 20 aa, Artificial Sequence
  Description of Artificial Sequence: Synthetic peptide
  Seed: GNEKKAKLANVVRKMMTNSQ
GNEFKAILYNVFRKMMTNSQ

SEQ ID NO: 202421 - protein, 20 aa, Artificial Sequence
  Description of Artificial Sequence: Synthetic peptide
  Seed: GNEKKAKLANVVRKMMTNSQ
GNEKKAKLANIVRKMVTNSQ

SEQ ID NO: 202422 - protein, 15 aa, Artificial Sequence
  Description of Artificial Sequence: Synthetic peptide
  Seed: SPGMMMGMFNMLSTV
SPGYMMFMENMFSTV

SEQ ID NO: 202423 - protein, 15 aa, Artificial Sequence
  Description of Artificial Sequence: Synthetic peptide
  Seed: SPGMMMGMFNMLSTV
SPGMMMEMFNMTSTV

SEQ ID NO: 202424 - protein, 15 aa, Artificial Sequence
  Description of Artificial Sequence: Synthetic peptide
  Seed: SPGMMMGMFNMLSTV
SPGMIMGAFNMLATV

SEQ ID NO: 202425 - protein, 15 aa, Artificial Sequence
  Description of Artificial Sequence: Synthetic peptide
  Seed: SPGMMMGMFNMLSTV
SPGFMMTMINMSSTV

SEQ ID NO: 202426 - protein, 15 aa, Artificial Sequence
  Description of Artificial Sequence: Synthetic peptide
  Seed: SPGMMMGMFNMLSTV
SPGFMMAMLNMNSTV

SEQ ID NO: 202427 - protein, 17 aa, Artificial Sequence
  Description of Artificial Sequence: Synthetic peptide
  Seed: GMMMGMFNMLSTVLGVS
GMMMGMFNMFSTVLRVS

SEQ ID NO: 202428 - protein, 15 aa, Artificial Sequence
  Description of Artificial Sequence: Synthetic peptide
  Seed: SPGMMMGMFNMLSTV
SPGMIMGHFAMLATV

SEQ ID NO: 202429 - protein, 15 aa, Artificial Sequence
  Description of Artificial Sequence: Synthetic peptide
  Seed: SPGMMMGMFNMLSTV
SPGMMMFMMNMLSTV

SEQ ID NO: 202430 - protein, 17 aa, Artificial Sequence
  Description of Artificial Sequence: Synthetic peptide
  Seed: GMMMGMFNMLSTVLGVS
GMMMGMFNMASFVLHVS

SEQ ID NO: 202431 - protein, 17 aa, Artificial Sequence
  Description of Artificial Sequence: Synthetic peptide
  Seed: GMMMGMFNMLSTVLGVS
GMMMGMFNMFSSVLRVS

SEQ ID NO: 202432 - protein, 17 aa, Artificial Sequence
  Description of Artificial Sequence: Synthetic peptide
  Seed: GMMMGMFNMLSTVLGVS
GMMMGMLNMNSRVLRVS

SEQ ID NO: 202433 - protein, 15 aa, Artificial Sequence
  Description of Artificial Sequence: Synthetic peptide
  Seed: SPGMMMGMFNMLSTV
SPGFMMSMLNMHSTV

SEQ ID NO: 202434 - protein, 15 aa, Artificial Sequence
  Description of Artificial Sequence: Synthetic peptide
  Seed: SPGMMMGMFNMLSTV
SPGFMMNMFNMWSTV

SEQ ID NO: 202435 - protein, 20 aa, Artificial Sequence
  Description of Artificial Sequence: Synthetic peptide
  Seed: GNEKKAKLANVVRKMMTNSQ
GNEFKAELFNVKRKMMTNSQ

SEQ ID NO: 202436 - protein, 15 aa, Artificial Sequence
  Description of Artificial Sequence: Synthetic peptide
  Seed: SPGMMMGMFNMLSTV
SPGYMMEMFNMDSTV

SEQ ID NO: 202437 - protein, 15 aa, Artificial Sequence
  Description of Artificial Sequence: Synthetic peptide
  Seed: SPGMMMGMFNMLSTV
SPGLMMAMFNMHSTV

SEQ ID NO: 202438 - protein, 15 aa, Artificial Sequence
  Description of Artificial Sequence: Synthetic peptide
  Seed: SPGMMMGMFNMLSTV
SPGFMMMMHNMFSTV

SEQ ID NO: 202439 - protein, 15 aa, Artificial Sequence
  Description of Artificial Sequence: Synthetic peptide
  Seed: SPGMMMGMFNMLSTV
SPGWMMEMFNMTSTV

SEQ ID NO: 202440 - protein, 15 aa, Artificial Sequence
  Description of Artificial Sequence: Synthetic peptide
  Seed: SPGMMMGMFNMLSTV
SPGFMMKMFNMHSTV

SEQ ID NO: 202441 - protein, 20 aa, Artificial Sequence
  Description of Artificial Sequence: Synthetic peptide
  Seed: GNEKKAKLANVVRKMMTNSQ
GNEKKAELFNVVRKMMTNSQ

SEQ ID NO: 202442 - protein, 15 aa, Artificial Sequence
  Description of Artificial Sequence: Synthetic peptide
  Seed: SPGMMMGMFNMLSTV
SPGLMMTMFNMKSTV

SEQ ID NO: 202443 - protein, 15 aa, Artificial Sequence
  Description of Artificial Sequence: Synthetic peptide
  Seed: SPGMMMGMFNMLSTV
SPGWMMVMANMFSTV

SEQ ID NO: 202444 - protein, 15 aa, Artificial Sequence
  Description of Artificial Sequence: Synthetic peptide
  Seed: SPGMMMGMFNMLSTV
SPGFMMDMLNMVSTV

SEQ ID NO: 202445 - protein, 15 aa, Artificial Sequence
  Description of Artificial Sequence: Synthetic peptide
  Seed: SPGMMMGMFNMLSTV
SPGFMMYMTNMLSTV

SEQ ID NO: 202446 - protein, 15 aa, Artificial Sequence
  Description of Artificial Sequence: Synthetic peptide
  Seed: SPGMMMGMFNMLSTV
SPGRMMFMLNMMSTV

SEQ ID NO: 202447 - protein, 15 aa, Artificial Sequence
  Description of Artificial Sequence: Synthetic peptide
  Seed: SPGMMMGMFNMLSTV
SPGFMMPMYNMFSTV

SEQ ID NO: 202448 - protein, 15 aa, Artificial Sequence
  Description of Artificial Sequence: Synthetic peptide
  Seed: SPGMMMGMFNMLSTV
SPGMIMGHFNMLATV

SEQ ID NO: 202449 - protein, 17 aa, Artificial Sequence
  Description of Artificial Sequence: Synthetic peptide
  Seed: GMMMGMFNMLSTVLGVS
GMMMGMFNMFSPVLKVS

SEQ ID NO: 202450 - protein, 15 aa, Artificial Sequence
  Description of Artificial Sequence: Synthetic peptide
  Seed: SPGMMMGMFNMLSTV
SPGFMMSMLNMDSTV

SEQ ID NO: 202451 - protein, 15 aa, Artificial Sequence
  Description of Artificial Sequence: Synthetic peptide
  Seed: SPGMMMGMFNMLSTV
SPGYMMTMLNMMSTV

SEQ ID NO: 202452 - protein, 15 aa, Artificial Sequence
  Description of Artificial Sequence: Synthetic peptide
  Seed: SPGMMMGMFNMLSTV
SPGIMMSMWNMYSTV

SEQ ID NO: 202453 - protein, 20 aa, Artificial Sequence
  Description of Artificial Sequence: Synthetic peptide
  Seed: GNEKKAKLANVVRKMMTNSQ
GNEFKAELYNVNRKMMTNSQ

SEQ ID NO: 202454 - protein, 20 aa, Artificial Sequence
  Description of Artificial Sequence: Synthetic peptide
  Seed: GNEKKAKLANVVRKMMTNSQ
GNEFKADLLNVIRKMMTNSQ

SEQ ID NO: 202455 - protein, 17 aa, Artificial Sequence
  Description of Artificial Sequence: Synthetic peptide
  Seed: GMMMGMFNMLSTVLGVS
GMMMGMFNMMSRVLAVS

SEQ ID NO: 202456 - protein, 15 aa, Artificial Sequence
  Description of Artificial Sequence: Synthetic peptide
  Seed: SPGMMMGMFNMLSTV
SPGFMMSMMNMSSTV

SEQ ID NO: 202457 - protein, 15 aa, Artificial Sequence
  Description of Artificial Sequence: Synthetic peptide
  Seed: SPGMMMGMFNMLSTV
SPGQMMFMFNMMSTV

SEQ ID NO: 202458 - protein, 15 aa, Artificial Sequence
  Description of Artificial Sequence: Synthetic peptide
  Seed: SPGMMMGMFNMLSTV
SPGLMMSMYNMYSTV

SEQ ID NO: 202459 - protein, 15 aa, Artificial Sequence
  Description of Artificial Sequence: Synthetic peptide
  Seed: SPGMMMGMFNMLSTV
SPGIMMFMSNMMSTV

SEQ ID NO: 202460 - protein, 15 aa, Artificial Sequence
  Description of Artificial Sequence: Synthetic peptide
  Seed: SPGMMMGMFNMLSTV
SPGFMMLMTNMYSTV

SEQ ID NO: 202461 - protein, 20 aa, Artificial Sequence
  Description of Artificial Sequence: Synthetic peptide
  Seed: GNEKKAKLANVVRKMMTNSQ
GNEFKASLINVERKMMTNSQ

SEQ ID NO: 202462 - protein, 15 aa, Artificial Sequence
  Description of Artificial Sequence: Synthetic peptide
  Seed: SPGMMMGMFNMLSTV
SPGYMMDMFNMTSTV

SEQ ID NO: 202463 - protein, 17 aa, Artificial Sequence
  Description of Artificial Sequence: Synthetic peptide
  Seed: GMMMGMFNMLSTVLGVS
GMMMGMFNMLSHVLLVS

SEQ ID NO: 202464 - protein, 15 aa, Artificial Sequence
  Description of Artificial Sequence: Synthetic peptide
  Seed: SPGMMMGMFNMLSTV
SPGFMMTMMNMSSTV

SEQ ID NO: 202465 - protein, 15 aa, Artificial Sequence
  Description of Artificial Sequence: Synthetic peptide
  Seed: SPGMMMGMFNMLSTV
SPGMIMGSFPMLSTV

SEQ ID NO: 202466 - protein, 15 aa, Artificial Sequence
  Description of Artificial Sequence: Synthetic peptide
  Seed: SPGMMMGMFNMLSTV
SPGMIMGIFPMLRTV

SEQ ID NO: 202467 - protein, 17 aa, Artificial Sequence
  Description of Artificial Sequence: Synthetic peptide
  Seed: GMMMGMFNMLSTVLGVS
GMMMGMMNMYSNVLHVS

SEQ ID NO: 202468 - protein, 17 aa, Artificial Sequence
  Description of Artificial Sequence: Synthetic peptide
  Seed: GMMMGMFNMLSTVLGVS
GMMMGMFNMHSLVLLVS

SEQ ID NO: 202469 - protein, 15 aa, Artificial Sequence
  Description of Artificial Sequence: Synthetic peptide
  Seed: SPGMMMGMFNMLSTV
SPGMFMGHFAMLRTV

SEQ ID NO: 202470 - protein, 15 aa, Artificial Sequence
  Description of Artificial Sequence: Synthetic peptide
  Seed: SPGMMMGMFNMLSTV
SPGIMMHMWNMMSTV

SEQ ID NO: 202471 - protein, 15 aa, Artificial Sequence
  Description of Artificial Sequence: Synthetic peptide
  Seed: SPGMMMGMFNMLSTV
SPGVMMSMWNMVSTV

SEQ ID NO: 202472 - protein, 15 aa, Artificial Sequence
  Description of Artificial Sequence: Synthetic peptide
  Seed: SPGMMMGMFNMLSTV
SPGVMMSMWNMISTV

SEQ ID NO: 202473 - protein, 15 aa, Artificial Sequence
  Description of Artificial Sequence: Synthetic peptide
  Seed: SPGMMMGMFNMLSTV
SPGFMMLMENMFSTV

SEQ ID NO: 202474 - protein, 15 aa, Artificial Sequence
  Description of Artificial Sequence: Synthetic peptide
  Seed: SPGMMMGMFNMLSTV
SPGMIMGSFNMLATV

SEQ ID NO: 202475 - protein, 17 aa, Artificial Sequence
  Description of Artificial Sequence: Synthetic peptide
  Seed: GMMMGMFNMLSTVLGVS
GMMMGMLNMASTVLRVS

SEQ ID NO: 202476 - protein, 15 aa, Artificial Sequence
  Description of Artificial Sequence: Synthetic peptide
  Seed: SPGMMMGMFNMLSTV
SPGMIMGSFAMLRTV

SEQ ID NO: 202477 - protein, 15 aa, Artificial Sequence
  Description of Artificial Sequence: Synthetic peptide
  Seed: SPGMMMGMFNMLSTV
SPGCMMHMFNMFSTV

SEQ ID NO: 202478 - protein, 15 aa, Artificial Sequence
  Description of Artificial Sequence: Synthetic peptide
  Seed: SPGMMMGMFNMLSTV
SPGVMMFMANMMSTV

SEQ ID NO: 202479 - protein, 15 aa, Artificial Sequence
  Description of Artificial Sequence: Synthetic peptide
  Seed: SPGMMMGMFNMLSTV
SPGYMMLMANMYSTV

SEQ ID NO: 202480 - protein, 15 aa, Artificial Sequence
  Description of Artificial Sequence: Synthetic peptide
  Seed: SPGMMMGMFNMLSTV
SPGYMMYMSNMLSTV

SEQ ID NO: 202481 - protein, 15 aa, Artificial Sequence
  Description of Artificial Sequence: Synthetic peptide
  Seed: SPGMMMGMFNMLSTV
SPGMMMFMPNMLSTV

SEQ ID NO: 202482 - protein, 15 aa, Artificial Sequence
  Description of Artificial Sequence: Synthetic peptide
  Seed: SPGMMMGMFNMLSTV
SPGFMMSMINMESTV

SEQ ID NO: 202483 - protein, 17 aa, Artificial Sequence
  Description of Artificial Sequence: Synthetic peptide
  Seed: GMMMGMFNMLSTVLGVS
GMMMGMFNMYSAVLRVS

SEQ ID NO: 202484 - protein, 15 aa, Artificial Sequence
  Description of Artificial Sequence: Synthetic peptide
  Seed: SPGMMMGMFNMLSTV
SPGFMMTMINMRSTV

SEQ ID NO: 202485 - protein, 15 aa, Artificial Sequence
  Description of Artificial Sequence: Synthetic peptide
  Seed: SPGMMMGMFNMLSTV
SPGMIMGSFAMLATV

SEQ ID NO: 202486 - protein, 15 aa, Artificial Sequence
  Description of Artificial Sequence: Synthetic peptide
  Seed: SPGMMMGMFNMLSTV
SPGFMMHMYNMWSTV

SEQ ID NO: 202487 - protein, 15 aa, Artificial Sequence
  Description of Artificial Sequence: Synthetic peptide
  Seed: SPGMMMGMFNMLSTV
SPGLMMAMFNMRSTV

SEQ ID NO: 202488 - protein, 20 aa, Artificial Sequence
  Description of Artificial Sequence: Synthetic peptide
  Seed: GNEKKAKLANVVRKMMTNSQ
GNEKKAKWANTVFKMLTNSQ

SEQ ID NO: 202489 - protein, 15 aa, Artificial Sequence
  Description of Artificial Sequence: Synthetic peptide
  Seed: SPGMMMGMFNMLSTV
SPGYMMLMTNMLSTV

SEQ ID NO: 202490 - protein, 20 aa, Artificial Sequence
  Description of Artificial Sequence: Synthetic peptide
  Seed: GNEKKAKLANVVRKMMTNSQ
GNEFKAILMNVFRKMMTNSQ

SEQ ID NO: 202491 - protein, 15 aa, Artificial Sequence
  Description of Artificial Sequence: Synthetic peptide
  Seed: SPGMMMGMFNMLSTV
SPGFMMEMLNMTSTV

SEQ ID NO: 202492 - protein, 15 aa, Artificial Sequence
  Description of Artificial Sequence: Synthetic peptide
  Seed: SPGMMMGMFNMLSTV
SPGFMMFMVNMPSTV

SEQ ID NO: 202493 - protein, 15 aa, Artificial Sequence
  Description of Artificial Sequence: Synthetic peptide
  Seed: SPGMMMGMFNMLSTV
SPGMIMGHFSMLATV

SEQ ID NO: 202494 - protein, 17 aa, Artificial Sequence
  Description of Artificial Sequence: Synthetic peptide
  Seed: GMMMGMFNMLSTVLGVS
GMMMGMFNMMSRVLYVS

SEQ ID NO: 202495 - protein, 15 aa, Artificial Sequence
  Description of Artificial Sequence: Synthetic peptide
  Seed: SPGMMMGMFNMLSTV
SPGWMMHMINMLSTV

SEQ ID NO: 202496 - protein, 15 aa, Artificial Sequence
  Description of Artificial Sequence: Synthetic peptide
  Seed: SPGMMMGMFNMLSTV
SPGFMMGMLNMLSTV

SEQ ID NO: 202497 - protein, 15 aa, Artificial Sequence
  Description of Artificial Sequence: Synthetic peptide
  Seed: SPGMMMGMFNMLSTV
SPGFMMWMLNMVSTV

SEQ ID NO: 202498 - protein, 15 aa, Artificial Sequence
  Description of Artificial Sequence: Synthetic peptide
  Seed: SPGMMMGMFNMLSTV
SPGWMMEMYNMISTV

SEQ ID NO: 202499 - protein, 15 aa, Artificial Sequence
  Description of Artificial Sequence: Synthetic peptide
  Seed: SPGMMMGMFNMLSTV
SPGMNMGGFIMLATV

SEQ ID NO: 202500 - protein, 15 aa, Artificial Sequence
  Description of Artificial Sequence: Synthetic peptide
  Seed: SPGMMMGMFNMLSTV
SPGWMMEMYNMVSTV

SEQ ID NO: 202501 - protein, 15 aa, Artificial Sequence
  Description of Artificial Sequence: Synthetic peptide
  Seed: SPGMMMGMFNMLSTV
SPGWMMFMPNMLSTV

SEQ ID NO: 202502 - protein, 15 aa, Artificial Sequence
  Description of Artificial Sequence: Synthetic peptide
  Seed: SPGMMMGMFNMLSTV
SPGMIMGHFNMLVTV

SEQ ID NO: 202503 - protein, 15 aa, Artificial Sequence
  Description of Artificial Sequence: Synthetic peptide
  Seed: SPGMMMGMFNMLSTV
SPGMIMGFFPMLRTV

SEQ ID NO: 202504 - protein, 15 aa, Artificial Sequence
  Description of Artificial Sequence: Synthetic peptide
  Seed: SPGMMMGMFNMLSTV
SPGMIMGNFAMLYTV

SEQ ID NO: 202505 - protein, 15 aa, Artificial Sequence
  Description of Artificial Sequence: Synthetic peptide
  Seed: SPGMMMGMFNMLSTV
SPGMNMGGFVMLATV

SEQ ID NO: 202506 - protein, 15 aa, Artificial Sequence
  Description of Artificial Sequence: Synthetic peptide
  Seed: SPGMMMGMFNMLSTV
SPGFMMEMMNMMSTV

SEQ ID NO: 202507 - protein, 15 aa, Artificial Sequence
  Description of Artificial Sequence: Synthetic peptide
  Seed: SPGMMMGMFNMLSTV
SPGFMMWMPNMMSTV

SEQ ID NO: 202508 - protein, 15 aa, Artificial Sequence
  Description of Artificial Sequence: Synthetic peptide
  Seed: SPGMMMGMFNMLSTV
SPGFMMVMHNMLSTV

SEQ ID NO: 202509 - protein, 17 aa, Artificial Sequence
  Description of Artificial Sequence: Synthetic peptide
  Seed: GMMMGMFNMLSTVLGVS
GMMMGMINMMSTVLRVS

SEQ ID NO: 202510 - protein, 15 aa, Artificial Sequence
  Description of Artificial Sequence: Synthetic peptide
  Seed: SPGMMMGMFNMLSTV
SPGFMMFMANMRSTV

SEQ ID NO: 202511 - protein, 15 aa, Artificial Sequence
  Description of Artificial Sequence: Synthetic peptide
  Seed: SPGMMMGMFNMLSTV
SPGMIMGHFAMLYTV

SEQ ID NO: 202512 - protein, 15 aa, Artificial Sequence
  Description of Artificial Sequence: Synthetic peptide
  Seed: SPGMMMGMFNMLSTV
SPGFMMKMINMISTV

SEQ ID NO: 202513 - protein, 15 aa, Artificial Sequence
  Description of Artificial Sequence: Synthetic peptide
  Seed: SPGMMMGMFNMLSTV
SPGFMMRMSNMFSTV

SEQ ID NO: 202514 - protein, 15 aa, Artificial Sequence
  Description of Artificial Sequence: Synthetic peptide
  Seed: SPGMMMGMFNMLSTV
SPGIMMFMVNMYSTV

SEQ ID NO: 202515 - protein, 20 aa, Artificial Sequence
  Description of Artificial Sequence: Synthetic peptide
  Seed: GNEKKAKLANVVRKMMTNSQ
GNEFKAVLYNVGRKMMTNSQ

SEQ ID NO: 202516 - protein, 17 aa, Artificial Sequence
  Description of Artificial Sequence: Synthetic peptide
  Seed: GMMMGMFNMLSTVLGVS
GMMMGMFNMYSSVLRVS

SEQ ID NO: 202517 - protein, 20 aa, Artificial Sequence
  Description of Artificial Sequence: Synthetic peptide
  Seed: GNEKKAKLANVVRKMMTNSQ
GNEKKAKIANIVTKMATNSQ

SEQ ID NO: 202518 - protein, 15 aa, Artificial Sequence
  Description of Artificial Sequence: Synthetic peptide
  Seed: SPGMMMGMFNMLSTV
SPGMIMGWFPMLATV

SEQ ID NO: 202519 - protein, 17 aa, Artificial Sequence
  Description of Artificial Sequence: Synthetic peptide
  Seed: GMMMGMFNMLSTVLGVS
GMMMGMINMFSKVLRVS

SEQ ID NO: 202520 - protein, 17 aa, Artificial Sequence
  Description of Artificial Sequence: Synthetic peptide
  Seed: GMMMGMFNMLSTVLGVS
GMMMGMINMASDVLAVS

SEQ ID NO: 202521 - protein, 20 aa, Artificial Sequence
  Description of Artificial Sequence: Synthetic peptide
  Seed: GNEKKAKLANVVRKMMTNSQ
GNEYKAALYNVSRKMMTNSQ

SEQ ID NO: 202522 - protein, 15 aa, Artificial Sequence
  Description of Artificial Sequence: Synthetic peptide
  Seed: SPGMMMGMFNMLSTV
SPGFMMAMINMFSTV

SEQ ID NO: 202523 - protein, 15 aa, Artificial Sequence
  Description of Artificial Sequence: Synthetic peptide
  Seed: SPGMMMGMFNMLSTV
SPGMIMGHFAMLHTV

SEQ ID NO: 202524 - protein, 17 aa, Artificial Sequence
  Description of Artificial Sequence: Synthetic peptide
  Seed: GMMMGMFNMLSTVLGVS
GMMMGMLNMLSRVLGVS

SEQ ID NO: 202525 - protein, 17 aa, Artificial Sequence
  Description of Artificial Sequence: Synthetic peptide
  Seed: GMMMGMFNMLSTVLGVS
GMMMGMLNMMSNVLEVS

SEQ ID NO: 202526 - protein, 15 aa, Artificial Sequence
  Description of Artificial Sequence: Synthetic peptide
  Seed: SPGMMMGMFNMLSTV
SPGMIMGHFNMLMTV

SEQ ID NO: 202527 - protein, 15 aa, Artificial Sequence
  Description of Artificial Sequence: Synthetic peptide
  Seed: SPGMMMGMFNMLSTV
SPGNMMLMFNMLSTV

SEQ ID NO: 202528 - protein, 17 aa, Artificial Sequence
  Description of Artificial Sequence: Synthetic peptide
  Seed: GMMMGMFNMLSTVLGVS
GMMMGMFNMFSTVLKVS

SEQ ID NO: 202529 - protein, 15 aa, Artificial Sequence
  Description of Artificial Sequence: Synthetic peptide
  Seed: SPGMMMGMFNMLSTV
SPGFMMTMINMDSTV

SEQ ID NO: 202530 - protein, 15 aa, Artificial Sequence
  Description of Artificial Sequence: Synthetic peptide
  Seed: SPGMMMGMFNMLSTV
SPGMIMGAFNMLHTV

SEQ ID NO: 202531 - protein, 17 aa, Artificial Sequence
  Description of Artificial Sequence: Synthetic peptide
  Seed: GMMMGMFNMLSTVLGVS
GMMMGMLNMFSAVLRVS

SEQ ID NO: 202532 - protein, 15 aa, Artificial Sequence
  Description of Artificial Sequence: Synthetic peptide
  Seed: SPGMMMGMFNMLSTV
SPGFMMDMMNMISTV

SEQ ID NO: 202533 - protein, 17 aa, Artificial Sequence
  Description of Artificial Sequence: Synthetic peptide
  Seed: GMMMGMFNMLSTVLGVS
GMMMGMMNMMSKVLEVS

SEQ ID NO: 202534 - protein, 17 aa, Artificial Sequence
  Description of Artificial Sequence: Synthetic peptide
  Seed: GMMMGMFNMLSTVLGVS
GMMMGMMNMMSTVLRVS

SEQ ID NO: 202535 - protein, 15 aa, Artificial Sequence
  Description of Artificial Sequence: Synthetic peptide
  Seed: SPGMMMGMFNMLSTV
SPGFMMGMLNMVSTV

SEQ ID NO: 202536 - protein, 15 aa, Artificial Sequence
  Description of Artificial Sequence: Synthetic peptide
  Seed: SPGMMMGMFNMLSTV
SPGMLMGMFNMLHTV

SEQ ID NO: 202537 - protein, 15 aa, Artificial Sequence
  Description of Artificial Sequence: Synthetic peptide
  Seed: SPGMMMGMFNMLSTV
SPGMFMGSFNMLATV

SEQ ID NO: 202538 - protein, 17 aa, Artificial Sequence
  Description of Artificial Sequence: Synthetic peptide
  Seed: GMMMGMFNMLSTVLGVS
GMMMGMYNMASNVLEVS

SEQ ID NO: 202539 - protein, 15 aa, Artificial Sequence
  Description of Artificial Sequence: Synthetic peptide
  Seed: SPGMMMGMFNMLSTV
SPGMIMGWFAMLRTV

SEQ ID NO: 202540 - protein, 15 aa, Artificial Sequence
  Description of Artificial Sequence: Synthetic peptide
  Seed: SPGMMMGMFNMLSTV
SPGFMMVMMNMYSTV

SEQ ID NO: 202541 - protein, 15 aa, Artificial Sequence
  Description of Artificial Sequence: Synthetic peptide
  Seed: SPGMMMGMFNMLSTV
SPGMIMGAFRMLYTV

SEQ ID NO: 202542 - protein, 15 aa, Artificial Sequence
  Description of Artificial Sequence: Synthetic peptide
  Seed: SPGMMMGMFNMLSTV
SPGMMMTMINMLSTV

SEQ ID NO: 202543 - protein, 15 aa, Artificial Sequence
  Description of Artificial Sequence: Synthetic peptide
  Seed: SPGMMMGMFNMLSTV
SPGFMMQMVNMMSTV

SEQ ID NO: 202544 - protein, 20 aa, Artificial Sequence
  Description of Artificial Sequence: Synthetic peptide
  Seed: GNEKKAKLANVVRKMMTNSQ
GNEFKADLMNVVRKMMTNSQ

SEQ ID NO: 202545 - protein, 15 aa, Artificial Sequence
  Description of Artificial Sequence: Synthetic peptide
  Seed: SPGMMMGMFNMLSTV
SPGFMMVMENMLSTV

SEQ ID NO: 202546 - protein, 17 aa, Artificial Sequence
  Description of Artificial Sequence: Synthetic peptide
  Seed: GMMMGMFNMLSTVLGVS
GMMMGMINMFSNVLHVS

SEQ ID NO: 202547 - protein, 20 aa, Artificial Sequence
  Description of Artificial Sequence: Synthetic peptide
  Seed: GNEKKAKLANVVRKMMTNSQ
GNEKKAKFANIVTKMATNSQ

SEQ ID NO: 202548 - protein, 15 aa, Artificial Sequence
  Description of Artificial Sequence: Synthetic peptide
  Seed: SPGMMMGMFNMLSTV
SPGMIMGQFAMLRTV

SEQ ID NO: 202549 - protein, 15 aa, Artificial Sequence
  Description of Artificial Sequence: Synthetic peptide
  Seed: SPGMMMGMFNMLSTV
SPGMYMGMFRMLATV

SEQ ID NO: 202550 - protein, 15 aa, Artificial Sequence
  Description of Artificial Sequence: Synthetic peptide
  Seed: SPGMMMGMFNMLSTV
SPGFMMWMINMRSTV

SEQ ID NO: 202551 - protein, 15 aa, Artificial Sequence
  Description of Artificial Sequence: Synthetic peptide
  Seed: SPGMMMGMFNMLSTV
SPGMIMGIFNMLHTV

SEQ ID NO: 202552 - protein, 15 aa, Artificial Sequence
  Description of Artificial Sequence: Synthetic peptide
  Seed: SPGMMMGMFNMLSTV
SPGFMMFMANMESTV

SEQ ID NO: 202553 - protein, 15 aa, Artificial Sequence
  Description of Artificial Sequence: Synthetic peptide
  Seed: SPGMMMGMFNMLSTV
SPGLMMWMINMFSTV

SEQ ID NO: 202554 - protein, 20 aa, Artificial Sequence
  Description of Artificial Sequence: Synthetic peptide
  Seed: GNEKKAKLANVVRKMMTNSQ
GNEKKAKIANMVTKMATNSQ

SEQ ID NO: 202555 - protein, 15 aa, Artificial Sequence
  Description of Artificial Sequence: Synthetic peptide
  Seed: SPGMMMGMFNMLSTV
SPGFMMSMINMDSTV

SEQ ID NO: 202556 - protein, 17 aa, Artificial Sequence
  Description of Artificial Sequence: Synthetic peptide
  Seed: GMMMGMFNMLSTVLGVS
GMMMGMLNMLSKVLAVS

SEQ ID NO: 202557 - protein, 15 aa, Artificial Sequence
  Description of Artificial Sequence: Synthetic peptide
  Seed: SPGMMMGMFNMLSTV
SPGFMMFMLNMKSTV

SEQ ID NO: 202558 - protein, 15 aa, Artificial Sequence
  Description of Artificial Sequence: Synthetic peptide
  Seed: SPGMMMGMFNMLSTV
SPGIMMSMLNMMSTV

SEQ ID NO: 202559 - protein, 15 aa, Artificial Sequence
  Description of Artificial Sequence: Synthetic peptide
  Seed: SPGMMMGMFNMLSTV
SPGFMMLMENMLSTV

SEQ ID NO: 202560 - protein, 17 aa, Artificial Sequence
  Description of Artificial Sequence: Synthetic peptide
  Seed: GMMMGMFNMLSTVLGVS
GMMMGMFNMYSNVLRVS

SEQ ID NO: 202561 - protein, 20 aa, Artificial Sequence
  Description of Artificial Sequence: Synthetic peptide
  Seed: GNEKKAKLANVVRKMMTNSQ
GNEKKAKIANFVRKMYTNSQ

SEQ ID NO: 202562 - protein, 15 aa, Artificial Sequence
  Description of Artificial Sequence: Synthetic peptide
  Seed: SPGMMMGMFNMLSTV
SPGMIMGHFPMLITV

SEQ ID NO: 202563 - protein, 15 aa, Artificial Sequence
  Description of Artificial Sequence: Synthetic peptide
  Seed: SPGMMMGMFNMLSTV
SPGMMMGLFKMLHTV

SEQ ID NO: 202564 - protein, 17 aa, Artificial Sequence
  Description of Artificial Sequence: Synthetic peptide
  Seed: GMMMGMFNMLSTVLGVS
GMMMGMFNMFSNVLHVS

SEQ ID NO: 202565 - protein, 17 aa, Artificial Sequence
  Description of Artificial Sequence: Synthetic peptide
  Seed: GMMMGMFNMLSTVLGVS
GMMMGMFNMTSSVLRVS

SEQ ID NO: 202566 - protein, 20 aa, Artificial Sequence
  Description of Artificial Sequence: Synthetic peptide
  Seed: GNEKKAKLANVVRKMMTNSQ
GNEKKAKWANTVFKMITNSQ

SEQ ID NO: 202567 - protein, 17 aa, Artificial Sequence
  Description of Artificial Sequence: Synthetic peptide
  Seed: GMMMGMFNMLSTVLGVS
GMMMGMMNMISKVLQVS

SEQ ID NO: 202568 - protein, 15 aa, Artificial Sequence
  Description of Artificial Sequence: Synthetic peptide
  Seed: SPGMMMGMFNMLSTV
SPGYMMKMFNMTSTV

SEQ ID NO: 202569 - protein, 17 aa, Artificial Sequence
  Description of Artificial Sequence: Synthetic peptide
  Seed: GMMMGMFNMLSTVLGVS
GMMMGMINMFSAVLKVS

SEQ ID NO: 202570 - protein, 15 aa, Artificial Sequence
  Description of Artificial Sequence: Synthetic peptide
  Seed: SPGMMMGMFNMLSTV
SPGMIMGYFNMLHTV

SEQ ID NO: 202571 - protein, 17 aa, Artificial Sequence
  Description of Artificial Sequence: Synthetic peptide
  Seed: GMMMGMFNMLSTVLGVS
GMMMGMYNMYSSVLRVS

SEQ ID NO: 202572 - protein, 17 aa, Artificial Sequence
  Description of Artificial Sequence: Synthetic peptide
  Seed: GMMMGMFNMLSTVLGVS
GMMMGMINMASNVLMVS

SEQ ID NO: 202573 - protein, 15 aa, Artificial Sequence
  Description of Artificial Sequence: Synthetic peptide
  Seed: SPGMMMGMFNMLSTV
SPGMIMGNFNMLYTV

SEQ ID NO: 202574 - protein, 17 aa, Artificial Sequence
  Description of Artificial Sequence: Synthetic peptide
  Seed: GMMMGMFNMLSTVLGVS
GMMMGMFNMYSNVLAVS

SEQ ID NO: 202575 - protein, 15 aa, Artificial Sequence
  Description of Artificial Sequence: Synthetic peptide
  Seed: SPGMMMGMFNMLSTV
SPGMIMGMFKMLATV

SEQ ID NO: 202576 - protein, 15 aa, Artificial Sequence
  Description of Artificial Sequence: Synthetic peptide
  Seed: SPGMMMGMFNMLSTV
SPGMLMGWFPMLATV

SEQ ID NO: 202577 - protein, 17 aa, Artificial Sequence
  Description of Artificial Sequence: Synthetic peptide
  Seed: GMMMGMFNMLSTVLGVS
GMMMGMLNMASDVLAVS

SEQ ID NO: 202578 - protein, 15 aa, Artificial Sequence
  Description of Artificial Sequence: Synthetic peptide
  Seed: SPGMMMGMFNMLSTV
SPGFMMFMANMHSTV

SEQ ID NO: 202579 - protein, 15 aa, Artificial Sequence
  Description of Artificial Sequence: Synthetic peptide
  Seed: SPGMMMGMFNMLSTV
SPGMIMGFFNMLHTV

SEQ ID NO: 202580 - protein, 17 aa, Artificial Sequence
  Description of Artificial Sequence: Synthetic peptide
  Seed: GMMMGMFNMLSTVLGVS
GMMMGMINMFSPVLAVS

SEQ ID NO: 202581 - protein, 15 aa, Artificial Sequence
  Description of Artificial Sequence: Synthetic peptide
  Seed: SPGMMMGMFNMLSTV
SPGMIMGWFAMLHTV

SEQ ID NO: 202582 - protein, 17 aa, Artificial Sequence
  Description of Artificial Sequence: Synthetic peptide
  Seed: GMMMGMFNMLSTVLGVS
GMMMGMINMYSKVLRVS

SEQ ID NO: 202583 - protein, 20 aa, Artificial Sequence
  Description of Artificial Sequence: Synthetic peptide
  Seed: GNEKKAKLANVVRKMMTNSQ
GNEKKAKIANIVTKMSTNSQ

SEQ ID NO: 202584 - protein, 15 aa, Artificial Sequence
  Description of Artificial Sequence: Synthetic peptide
  Seed: SPGMMMGMFNMLSTV
SPGFMMVMINMESTV

SEQ ID NO: 202585 - protein, 15 aa, Artificial Sequence
  Description of Artificial Sequence: Synthetic peptide
  Seed: SPGMMMGMFNMLSTV
SPGMLMGWFPMLRTV

SEQ ID NO: 202586 - protein, 15 aa, Artificial Sequence
  Description of Artificial Sequence: Synthetic peptide
  Seed: SPGMMMGMFNMLSTV
SPGFMMQMLNMESTV

SEQ ID NO: 202587 - protein, 17 aa, Artificial Sequence
  Description of Artificial Sequence: Synthetic peptide
  Seed: GMMMGMFNMLSTVLGVS
GMMMGMLNMISAVLRVS

SEQ ID NO: 202588 - protein, 17 aa, Artificial Sequence
  Description of Artificial Sequence: Synthetic peptide
  Seed: GMMMGMFNMLSTVLGVS
GMMMGMFNMTSTVLLVS

SEQ ID NO: 202589 - protein, 15 aa, Artificial Sequence
  Description of Artificial Sequence: Synthetic peptide
  Seed: SPGMMMGMFNMLSTV
SPGMFMGKFRMLHTV

SEQ ID NO: 202590 - protein, 15 aa, Artificial Sequence
  Description of Artificial Sequence: Synthetic peptide
  Seed: SPGMMMGMFNMLSTV
SPGFMMGMMNMLSTV

SEQ ID NO: 202591 - protein, 17 aa, Artificial Sequence
  Description of Artificial Sequence: Synthetic peptide
  Seed: GMMMGMFNMLSTVLGVS
GMMMGMINMISTVLRVS

SEQ ID NO: 202592 - protein, 17 aa, Artificial Sequence
  Description of Artificial Sequence: Synthetic peptide
  Seed: GMMMGMFNMLSTVLGVS
GMMMGMFNMNSVVLLVS

SEQ ID NO: 202593 - protein, 15 aa, Artificial Sequence
  Description of Artificial Sequence: Synthetic peptide
  Seed: SPGMMMGMFNMLSTV
SPGFMMMMLNMESTV

SEQ ID NO: 202594 - protein, 15 aa, Artificial Sequence
  Description of Artificial Sequence: Synthetic peptide
  Seed: SPGMMMGMFNMLSTV
SPGVMMHMFNMSSTV

SEQ ID NO: 202595 - protein, 17 aa, Artificial Sequence
  Description of Artificial Sequence: Synthetic peptide
  Seed: GMMMGMFNMLSTVLGVS
GMMMGMFNMASNVLYVS

SEQ ID NO: 202596 - protein, 15 aa, Artificial Sequence
  Description of Artificial Sequence: Synthetic peptide
  Seed: SPGMMMGMFNMLSTV
SPGMIMGAFNMLGTV

SEQ ID NO: 202597 - protein, 17 aa, Artificial Sequence
  Description of Artificial Sequence: Synthetic peptide
  Seed: GMMMGMFNMLSTVLGVS
GMMMGMFNMNSVVLAVS

SEQ ID NO: 202598 - protein, 17 aa, Artificial Sequence
  Description of Artificial Sequence: Synthetic peptide
  Seed: GMMMGMFNMLSTVLGVS
GMMMGMINMASDVLSVS

SEQ ID NO: 202599 - protein, 15 aa, Artificial Sequence
  Description of Artificial Sequence: Synthetic peptide
  Seed: SPGMMMGMFNMLSTV
SPGFMMWMVNMASTV

SEQ ID NO: 202600 - protein, 15 aa, Artificial Sequence
  Description of Artificial Sequence: Synthetic peptide
  Seed: SPGMMMGMFNMLSTV
SPGMMMFMINMLSTV

SEQ ID NO: 202601 - protein, 15 aa, Artificial Sequence
  Description of Artificial Sequence: Synthetic peptide
  Seed: SPGMMMGMFNMLSTV
SPGMLMGWFPMLMTV

SEQ ID NO: 202602 - protein, 15 aa, Artificial Sequence
  Description of Artificial Sequence: Synthetic peptide
  Seed: SPGMMMGMFNMLSTV
SPGMIMGWFPMLYTV

SEQ ID NO: 202603 - protein, 15 aa, Artificial Sequence
  Description of Artificial Sequence: Synthetic peptide
  Seed: SPGMMMGMFNMLSTV
SPGFMMTMVNMESTV

SEQ ID NO: 202604 - protein, 17 aa, Artificial Sequence
  Description of Artificial Sequence: Synthetic peptide
  Seed: GMMMGMFNMLSTVLGVS
GMMMGMFNMQSNVLEVS

SEQ ID NO: 202605 - protein, 17 aa, Artificial Sequence
  Description of Artificial Sequence: Synthetic peptide
  Seed: GMMMGMFNMLSTVLGVS
GMMMGMFNMLSEVLLVS

SEQ ID NO: 202606 - protein, 17 aa, Artificial Sequence
  Description of Artificial Sequence: Synthetic peptide
  Seed: GMMMGMFNMLSTVLGVS
GMMMGMINMSSSVLLVS

SEQ ID NO: 202607 - protein, 17 aa, Artificial Sequence
  Description of Artificial Sequence: Synthetic peptide
  Seed: GMMMGMFNMLSTVLGVS
GMMMGMFNMVSNVLEVS

SEQ ID NO: 202608 - protein, 15 aa, Artificial Sequence
  Description of Artificial Sequence: Synthetic peptide
  Seed: SPGMMMGMFNMLSTV
SPGMLMGIFNMLHTV

SEQ ID NO: 202609 - protein, 17 aa, Artificial Sequence
  Description of Artificial Sequence: Synthetic peptide
  Seed: GMMMGMFNMLSTVLGVS
GMMMGMINMYSPVLAVS

SEQ ID NO: 202610 - protein, 15 aa, Artificial Sequence
  Description of Artificial Sequence: Synthetic peptide
  Seed: SPGMMMGMFNMLSTV
SPGMMMGAFIMLHTV

SEQ ID NO: 202611 - protein, 17 aa, Artificial Sequence
  Description of Artificial Sequence: Synthetic peptide
  Seed: GMMMGMFNMLSTVLGVS
GMMMGMFNMNSRVLAVS

SEQ ID NO: 202612 - protein, 15 aa, Artificial Sequence
  Description of Artificial Sequence: Synthetic peptide
  Seed: SPGMMMGMFNMLSTV
SPGYMMMMANMYSTV

SEQ ID NO: 202613 - protein, 15 aa, Artificial Sequence
  Description of Artificial Sequence: Synthetic peptide
  Seed: SPGMMMGMFNMLSTV
SPGIMMTMINMMSTV

SEQ ID NO: 202614 - protein, 15 aa, Artificial Sequence
  Description of Artificial Sequence: Synthetic peptide
  Seed: SPGMMMGMFNMLSTV
SPGIMMTMINMYSTV

SEQ ID NO: 202615 - protein, 15 aa, Artificial Sequence
  Description of Artificial Sequence: Synthetic peptide
  Seed: SPGMMMGMFNMLSTV
SPGMMMGSFVMLATV

SEQ ID NO: 202616 - protein, 17 aa, Artificial Sequence
  Description of Artificial Sequence: Synthetic peptide
  Seed: GMMMGMFNMLSTVLGVS
GMMMGMFNMFSNVLEVS

SEQ ID NO: 202617 - protein, 17 aa, Artificial Sequence
  Description of Artificial Sequence: Synthetic peptide
  Seed: GMMMGMFNMLSTVLGVS
GMMMGMINMASDVLVVS

SEQ ID NO: 202618 - protein, 15 aa, Artificial Sequence
  Description of Artificial Sequence: Synthetic peptide
  Seed: SPGMMMGMFNMLSTV
SPGMIMGMFNMLETV

SEQ ID NO: 202619 - protein, 15 aa, Artificial Sequence
  Description of Artificial Sequence: Synthetic peptide
  Seed: SPGMMMGMFNMLSTV
SPGMLMGQFNMLSTV

SEQ ID NO: 202620 - protein, 17 aa, Artificial Sequence
  Description of Artificial Sequence: Synthetic peptide
  Seed: GMMMGMFNMLSTVLGVS
GMMMGMFNMHSAVLYVS

SEQ ID NO: 202621 - protein, 15 aa, Artificial Sequence
  Description of Artificial Sequence: Synthetic peptide
  Seed: SPGMMMGMFNMLSTV
SPGFMMVMINMDSTV

SEQ ID NO: 202622 - protein, 15 aa, Artificial Sequence
  Description of Artificial Sequence: Synthetic peptide
  Seed: SPGMMMGMFNMLSTV
SPGMQMGAFAMLATV

SEQ ID NO: 202623 - protein, 17 aa, Artificial Sequence
  Description of Artificial Sequence: Synthetic peptide
  Seed: GMMMGMFNMLSTVLGVS
GMMMGMINMISNVLRVS

SEQ ID NO: 202624 - protein, 17 aa, Artificial Sequence
  Description of Artificial Sequence: Synthetic peptide
  Seed: GMMMGMFNMLSTVLGVS
GMMMGMFNMTSTVLHVS

SEQ ID NO: 202625 - protein, 17 aa, Artificial Sequence
  Description of Artificial Sequence: Synthetic peptide
  Seed: GMMMGMFNMLSTVLGVS
GMMMGMMNMYSDVLAVS

SEQ ID NO: 202626 - protein, 17 aa, Artificial Sequence
  Description of Artificial Sequence: Synthetic peptide
  Seed: GMMMGMFNMLSTVLGVS
GMMMGMINMASDVLIVS

SEQ ID NO: 202627 - protein, 15 aa, Artificial Sequence
  Description of Artificial Sequence: Synthetic peptide
  Seed: SPGMMMGMFNMLSTV
SPGMLMGFFNMLHTV

SEQ ID NO: 202628 - protein, 17 aa, Artificial Sequence
  Description of Artificial Sequence: Synthetic peptide
  Seed: GMMMGMFNMLSTVLGVS
GMMMGMFNMMSDVLHVS

SEQ ID NO: 202629 - protein, 17 aa, Artificial Sequence
  Description of Artificial Sequence: Synthetic peptide
  Seed: GMMMGMFNMLSTVLGVS
GMMMGMLNMASNVLDVS

SEQ ID NO: 202630 - protein, 17 aa, Artificial Sequence
  Description of Artificial Sequence: Synthetic peptide
  Seed: GMMMGMFNMLSTVLGVS
GMMMGMINMHSNVLAVS

SEQ ID NO: 202631 - protein, 15 aa, Artificial Sequence
  Description of Artificial Sequence: Synthetic peptide
  Seed: SPGMMMGMFNMLSTV
SPGMMMGSFAMLGTV

SEQ ID NO: 202632 - protein, 15 aa, Artificial Sequence
  Description of Artificial Sequence: Synthetic peptide
  Seed: SPGMMMGMFNMLSTV
SPGMLMGLFTMLHTV

SEQ ID NO: 202633 - protein, 17 aa, Artificial Sequence
  Description of Artificial Sequence: Synthetic peptide
  Seed: GMMMGMFNMLSTVLGVS
GMMMGMFNMVSDVLAVS

SEQ ID NO: 202634 - protein, 17 aa, Artificial Sequence
  Description of Artificial Sequence: Synthetic peptide
  Seed: GMMMGMFNMLSTVLGVS
GMMMGMINMASPVLYVS

SEQ ID NO: 202635 - protein, 15 aa, Artificial Sequence
  Description of Artificial Sequence: Synthetic peptide
  Seed: SPGMMMGMFNMLSTV
SPGMLMGMFNMLETV

SEQ ID NO: 202636 - protein, 17 aa, Artificial Sequence
  Description of Artificial Sequence: Synthetic peptide
  Seed: GMMMGMFNMLSTVLGVS
GMMMGMINMSSPVLMVS

SEQ ID NO: 202637 - protein, 17 aa, Artificial Sequence
  Description of Artificial Sequence: Synthetic peptide
  Seed: GMMMGMFNMLSTVLGVS
GMMMGMFNMSSAVLDVS

SEQ ID NO: 202638 - protein, 15 aa, Artificial Sequence
  Description of Artificial Sequence: Synthetic peptide
  Seed: SPGMMMGMFNMLSTV
SPGMNMGGFAMLSTV

SEQ ID NO: 202639 - protein, 15 aa, Artificial Sequence
  Description of Artificial Sequence: Synthetic peptide
  Seed: SPGMMMGMFNMLSTV
SPGMMMGAFVMLSTV

SEQ ID NO: 202640 - protein, 17 aa, Artificial Sequence
  Description of Artificial Sequence: Synthetic peptide
  Seed: GMMMGMFNMLSTVLGVS
GMMMGMINMYSDVLAVS

SEQ ID NO: 202641 - protein, 17 aa, Artificial Sequence
  Description of Artificial Sequence: Synthetic peptide
  Seed: GMMMGMFNMLSTVLGVS
GMMMGMINMQSNVLIVS

SEQ ID NO: 202642 - protein, 15 aa, Artificial Sequence
  Description of Artificial Sequence: Synthetic peptide
  Seed: SPGMMMGMFNMLSTV
SPGFMMWMANMHSTV

SEQ ID NO: 202643 - protein, 15 aa, Artificial Sequence
  Description of Artificial Sequence: Synthetic peptide
  Seed: SPGMMMGMFNMLSTV
SPGMFMGMFDMLATV

SEQ ID NO: 202644 - protein, 17 aa, Artificial Sequence
  Description of Artificial Sequence: Synthetic peptide
  Seed: GMMMGMFNMLSTVLGVS
GMMMGMINMHSAVLAVS

SEQ ID NO: 202645 - protein, 17 aa, Artificial Sequence
  Description of Artificial Sequence: Synthetic peptide
  Seed: GMMMGMFNMLSTVLGVS
GMMMGMINMQSNVLDVS

SEQ ID NO: 202646 - protein, 17 aa, Artificial Sequence
  Description of Artificial Sequence: Synthetic peptide
  Seed: GMMMGMFNMLSTVLGVS
GMMMGMINMHSSVLIVS

SEQ ID NO: 202647 - protein, 17 aa, Artificial Sequence
  Description of Artificial Sequence: Synthetic peptide
  Seed: GMMMGMFNMLSTVLGVS
GMMMGMFNMTSNVLTVS

SEQ ID NO: 202648 - protein, 17 aa, Artificial Sequence
  Description of Artificial Sequence: Synthetic peptide
  Seed: GMMMGMFNMLSTVLGVS
GMMMGMFNMNSNVLQVS

SEQ ID NO: 202649 - protein, 17 aa, Artificial Sequence
  Description of Artificial Sequence: Synthetic peptide
  Seed: GMMMGMFNMLSTVLGVS
GMMMGMFNMDSVVLSVS

SEQ ID NO: 202650 - protein, 15 aa, Artificial Sequence
  Description of Artificial Sequence: Synthetic peptide
  Seed: SPGMMMGMFNMLSTV
SPGMFMGIFDMLATV

SEQ ID NO: 202651 - protein, 17 aa, Artificial Sequence
  Description of Artificial Sequence: Synthetic peptide
  Seed: GMMMGMFNMLSTVLGVS
GMMMGMFNMSSSVLDVS

SEQ ID NO: 202652 - protein, 17 aa, Artificial Sequence
  Description of Artificial Sequence: Synthetic peptide
  Seed: GMMMGMFNMLSTVLGVS
GMMMGMFNMDSVVLHVS

SEQ ID NO: 202653 - protein, 15 aa, Artificial Sequence
  Description of Artificial Sequence: Synthetic peptide
  Seed: SPGMMMGMFNMLSTV
SPGMIMGSFDMLVTV

SEQ ID NO: 202654 - protein, 15 aa, Artificial Sequence
  Description of Artificial Sequence: Synthetic peptide
  Seed: SPGMMMGMFNMLSTV
SPGMMMSMINMASTV

SEQ ID NO: 202655 - protein, 17 aa, Artificial Sequence
  Description of Artificial Sequence: Synthetic peptide
  Seed: GMMMGMFNMLSTVLGVS
GMMMGMFNMNSNVLGVS

SEQ ID NO: 202656 - protein, 15 aa, Artificial Sequence
  Description of Artificial Sequence: Synthetic peptide
  Seed: SPGMMMGMFNMLSTV
SPGFMMWMPNMSSTV

SEQ ID NO: 202657 - protein, 17 aa, Artificial Sequence
  Description of Artificial Sequence: Synthetic peptide
  Seed: GMMMGMFNMLSTVLGVS
GMMMGMFNMDSAVLNVS

SEQ ID NO: 202658 - protein, 15 aa, Artificial Sequence
  Description of Artificial Sequence: Synthetic peptide
  Seed: SPGMMMGMFNMLSTV
SPGMMMGAFVMLGTV

SEQ ID NO: 202659 - protein, 15 aa, Artificial Sequence
  Description of Artificial Sequence: Synthetic peptide
  Seed: SPGMMMGMFNMLSTV
SPGIMMWMANMSSTV

SEQ ID NO: 202660 - protein, 15 aa, Artificial Sequence
  Description of Artificial Sequence: Synthetic peptide
  Seed: SPGMMMGMFNMLSTV
SPGMFMGFFNMLDTV

SEQ ID NO: 202661 - protein, 17 aa, Artificial Sequence
  Description of Artificial Sequence: Synthetic peptide
  Seed: GMMMGMFNMLSTVLGVS
GMMMGMINMDSNVLAVS

SEQ ID NO: 202662 - protein, 15 aa, Artificial Sequence
  Description of Artificial Sequence: Synthetic peptide
  Seed: SPGMMMGMFNMLSTV
SPGIMMAMINMASTV

SEQ ID NO: 202663 - protein, 17 aa, Artificial Sequence
  Description of Artificial Sequence: Synthetic peptide
  Seed: GMMMGMFNMLSTVLGVS
GMMMGMINMDSNVLQVS

SEQ ID NO: 202664 - protein, 17 aa, Artificial Sequence
  Description of Artificial Sequence: Synthetic peptide
  Seed: GMMMGMFNMLSTVLGVS
GMMMGMFNMCSNVLGVS

SEQ ID NO: 202665 - protein, 17 aa, Artificial Sequence
  Description of Artificial Sequence: Synthetic peptide
  Seed: GMMMGMFNMLSTVLGVS
GMMMGMYNMDSPVLAVS

SEQ ID NO: 202666 - protein, 15 aa, Artificial Sequence
  Description of Artificial Sequence: Synthetic peptide
  Seed: SPGMMMGMFNMLSTV
SPGSMMSMANMVSTV

SEQ ID NO: 202667 - protein, 14 aa, Artificial Sequence
  Description of Artificial Sequence: Synthetic peptide
  Seed: ERGLQRRRFVQNAL
ERGFQRARFVQFAL

SEQ ID NO: 202668 - protein, 14 aa, Artificial Sequence
  Description of Artificial Sequence: Synthetic peptide
  Seed: ERGLQRRRFVQNAL
ERGFQRARFVQIAL

SEQ ID NO: 202669 - protein, 14 aa, Artificial Sequence
  Description of Artificial Sequence: Synthetic peptide
  Seed: ERGLQRRRFVQNAL
ERGFQRARFVQLAL

SEQ ID NO: 202670 - protein, 14 aa, Artificial Sequence
  Description of Artificial Sequence: Synthetic peptide
  Seed: ERGLQRRRFVQNAL
ERGFQRARFVQMAL

SEQ ID NO: 202671 - protein, 14 aa, Artificial Sequence
  Description of Artificial Sequence: Synthetic peptide
  Seed: ERGLQRRRFVQNAL
ERGFQRARFVQTAL

SEQ ID NO: 202672 - protein, 14 aa, Artificial Sequence
  Description of Artificial Sequence: Synthetic peptide
  Seed: ERGLQRRRFVQNAL
ERGFQRARFVQVAL

SEQ ID NO: 202673 - protein, 14 aa, Artificial Sequence
  Description of Artificial Sequence: Synthetic peptide
  Seed: ERGLQRRRFVQNAL
ERGFQRARYVQIAL

SEQ ID NO: 202674 - protein, 14 aa, Artificial Sequence
  Description of Artificial Sequence: Synthetic peptide
  Seed: ERGLQRRRFVQNAL
ERGFQRARYVQLAL

SEQ ID NO: 202675 - protein, 14 aa, Artificial Sequence
  Description of Artificial Sequence: Synthetic peptide
  Seed: ERGLQRRRFVQNAL
ERGFQRERFVQFAL

SEQ ID NO: 202676 - protein, 14 aa, Artificial Sequence
  Description of Artificial Sequence: Synthetic peptide
  Seed: ERGLQRRRFVQNAL
ERGFQRERFVQIAL

SEQ ID NO: 202677 - protein, 14 aa, Artificial Sequence
  Description of Artificial Sequence: Synthetic peptide
  Seed: ERGLQRRRFVQNAL
ERGFQRERFVQLAL

SEQ ID NO: 202678 - protein, 14 aa, Artificial Sequence
  Description of Artificial Sequence: Synthetic peptide
  Seed: ERGLQRRRFVQNAL
ERGFQRERFVQMAL

SEQ ID NO: 202679 - protein, 14 aa, Artificial Sequence
  Description of Artificial Sequence: Synthetic peptide
  Seed: ERGLQRRRFVQNAL
ERGFQRERFVQVAL

SEQ ID NO: 202680 - protein, 14 aa, Artificial Sequence
  Description of Artificial Sequence: Synthetic peptide
  Seed: ERGLQRRRFVQNAL
ERGFQRFRFVQAAL

SEQ ID NO: 202681 - protein, 14 aa, Artificial Sequence
  Description of Artificial Sequence: Synthetic peptide
  Seed: ERGLQRRRFVQNAL
ERGFQRFRFVQFAL

SEQ ID NO: 202682 - protein, 14 aa, Artificial Sequence
  Description of Artificial Sequence: Synthetic peptide
  Seed: ERGLQRRRFVQNAL
ERGFQRFRFVQIAL

SEQ ID NO: 202683 - protein, 14 aa, Artificial Sequence
  Description of Artificial Sequence: Synthetic peptide
  Seed: ERGLQRRRFVQNAL
ERGFQRFRFVQLAL

SEQ ID NO: 202684 - protein, 14 aa, Artificial Sequence
  Description of Artificial Sequence: Synthetic peptide
  Seed: ERGLQRRRFVQNAL
ERGFQRFRFVQMAL

SEQ ID NO: 202685 - protein, 14 aa, Artificial Sequence
  Description of Artificial Sequence: Synthetic peptide
  Seed: ERGLQRRRFVQNAL
ERGFQRFRFVQTAL

SEQ ID NO: 202686 - protein, 14 aa, Artificial Sequence
  Description of Artificial Sequence: Synthetic peptide
  Seed: ERGLQRRRFVQNAL
ERGFQRFRFVQVAL

SEQ ID NO: 202687 - protein, 14 aa, Artificial Sequence
  Description of Artificial Sequence: Synthetic peptide
  Seed: ERGLQRRRFVQNAL
ERGFQRFRLVQIAL

SEQ ID NO: 202688 - protein, 14 aa, Artificial Sequence
  Description of Artificial Sequence: Synthetic peptide
  Seed: ERGLQRRRFVQNAL
ERGFQRFRLVQLAL

SEQ ID NO: 202689 - protein, 14 aa, Artificial Sequence
  Description of Artificial Sequence: Synthetic peptide
  Seed: ERGLQRRRFVQNAL
ERGFQRFRYVQIAL

SEQ ID NO: 202690 - protein, 14 aa, Artificial Sequence
  Description of Artificial Sequence: Synthetic peptide
  Seed: ERGLQRRRFVQNAL
ERGFQRFRYVQLAL

SEQ ID NO: 202691 - protein, 14 aa, Artificial Sequence
  Description of Artificial Sequence: Synthetic peptide
  Seed: ERGLQRRRFVQNAL
ERGFQRFRYVQVAL

SEQ ID NO: 202692 - protein, 14 aa, Artificial Sequence
  Description of Artificial Sequence: Synthetic peptide
  Seed: ERGLQRRRFVQNAL
ERGFQRGRFVQIAL

SEQ ID NO: 202693 - protein, 14 aa, Artificial Sequence
  Description of Artificial Sequence: Synthetic peptide
  Seed: ERGLQRRRFVQNAL
ERGFQRGRFVQLAL

SEQ ID NO: 202694 - protein, 14 aa, Artificial Sequence
  Description of Artificial Sequence: Synthetic peptide
  Seed: ERGLQRRRFVQNAL
ERGFQRHRFVQFAL

SEQ ID NO: 202695 - protein, 14 aa, Artificial Sequence
  Description of Artificial Sequence: Synthetic peptide
  Seed: ERGLQRRRFVQNAL
ERGFQRHRFVQIAL

SEQ ID NO: 202696 - protein, 14 aa, Artificial Sequence
  Description of Artificial Sequence: Synthetic peptide
  Seed: ERGLQRRRFVQNAL
ERGFQRHRFVQLAL

SEQ ID NO: 202697 - protein, 14 aa, Artificial Sequence
  Description of Artificial Sequence: Synthetic peptide
  Seed: ERGLQRRRFVQNAL
ERGFQRHRFVQMAL

SEQ ID NO: 202698 - protein, 14 aa, Artificial Sequence
  Description of Artificial Sequence: Synthetic peptide
  Seed: ERGLQRRRFVQNAL
ERGFQRHRFVQVAL

SEQ ID NO: 202699 - protein, 14 aa, Artificial Sequence
  Description of Artificial Sequence: Synthetic peptide
  Seed: ERGLQRRRFVQNAL
ERGFQRIRFVQAAL

SEQ ID NO: 202700 - protein, 14 aa, Artificial Sequence
  Description of Artificial Sequence: Synthetic peptide
  Seed: ERGLQRRRFVQNAL
ERGFQRIRFVQFAL

SEQ ID NO: 202701 - protein, 14 aa, Artificial Sequence
  Description of Artificial Sequence: Synthetic peptide
  Seed: ERGLQRRRFVQNAL
ERGFQRIRFVQIAL

SEQ ID NO: 202702 - protein, 14 aa, Artificial Sequence
  Description of Artificial Sequence: Synthetic peptide
  Seed: ERGLQRRRFVQNAL
ERGFQRIRFVQLAL

SEQ ID NO: 202703 - protein, 14 aa, Artificial Sequence
  Description of Artificial Sequence: Synthetic peptide
  Seed: ERGLQRRRFVQNAL
ERGFQRIRFVQMAL

SEQ ID NO: 202704 - protein, 14 aa, Artificial Sequence
  Description of Artificial Sequence: Synthetic peptide
  Seed: ERGLQRRRFVQNAL
ERGFQRIRFVQTAL

SEQ ID NO: 202705 - protein, 14 aa, Artificial Sequence
  Description of Artificial Sequence: Synthetic peptide
  Seed: ERGLQRRRFVQNAL
ERGFQRIRFVQVAL

SEQ ID NO: 202706 - protein, 14 aa, Artificial Sequence
  Description of Artificial Sequence: Synthetic peptide
  Seed: ERGLQRRRFVQNAL
ERGFQRIRFVQYAL

SEQ ID NO: 202707 - protein, 14 aa, Artificial Sequence
  Description of Artificial Sequence: Synthetic peptide
  Seed: ERGLQRRRFVQNAL
ERGFQRIRWVQLAL

SEQ ID NO: 202708 - protein, 14 aa, Artificial Sequence
  Description of Artificial Sequence: Synthetic peptide
  Seed: ERGLQRRRFVQNAL
ERGFQRIRYVQIAL

SEQ ID NO: 202709 - protein, 14 aa, Artificial Sequence
  Description of Artificial Sequence: Synthetic peptide
  Seed: ERGLQRRRFVQNAL
ERGFQRIRYVQLAL

SEQ ID NO: 202710 - protein, 14 aa, Artificial Sequence
  Description of Artificial Sequence: Synthetic peptide
  Seed: ERGLQRRRFVQNAL
ERGFQRIRYVQVAL

SEQ ID NO: 202711 - protein, 14 aa, Artificial Sequence
  Description of Artificial Sequence: Synthetic peptide
  Seed: ERGLQRRRFVQNAL
ERGFQRKRFVQIAL

SEQ ID NO: 202712 - protein, 14 aa, Artificial Sequence
  Description of Artificial Sequence: Synthetic peptide
  Seed: ERGLQRRRFVQNAL
ERGFQRKRFVQLAL

SEQ ID NO: 202713 - protein, 14 aa, Artificial Sequence
  Description of Artificial Sequence: Synthetic peptide
  Seed: ERGLQRRRFVQNAL
ERGFQRLRFVQFAL

SEQ ID NO: 202714 - protein, 14 aa, Artificial Sequence
  Description of Artificial Sequence: Synthetic peptide
  Seed: ERGLQRRRFVQNAL
ERGFQRLRFVQIAL

SEQ ID NO: 202715 - protein, 14 aa, Artificial Sequence
  Description of Artificial Sequence: Synthetic peptide
  Seed: ERGLQRRRFVQNAL
ERGFQRLRFVQLAL

SEQ ID NO: 202716 - protein, 14 aa, Artificial Sequence
  Description of Artificial Sequence: Synthetic peptide
  Seed: ERGLQRRRFVQNAL
ERGFQRLRFVQMAL

SEQ ID NO: 202717 - protein, 14 aa, Artificial Sequence
  Description of Artificial Sequence: Synthetic peptide
  Seed: ERGLQRRRFVQNAL
ERGFQRLRFVQVAL

SEQ ID NO: 202718 - protein, 14 aa, Artificial Sequence
  Description of Artificial Sequence: Synthetic peptide
  Seed: ERGLQRRRFVQNAL
ERGFQRMRFVQFAL

SEQ ID NO: 202719 - protein, 14 aa, Artificial Sequence
  Description of Artificial Sequence: Synthetic peptide
  Seed: ERGLQRRRFVQNAL
ERGFQRMRFVQIAL

SEQ ID NO: 202720 - protein, 14 aa, Artificial Sequence
  Description of Artificial Sequence: Synthetic peptide
  Seed: ERGLQRRRFVQNAL
ERGFQRMRFVQLAL

SEQ ID NO: 202721 - protein, 14 aa, Artificial Sequence
  Description of Artificial Sequence: Synthetic peptide
  Seed: ERGLQRRRFVQNAL
ERGFQRMRFVQMAL

SEQ ID NO: 202722 - protein, 14 aa, Artificial Sequence
  Description of Artificial Sequence: Synthetic peptide
  Seed: ERGLQRRRFVQNAL
ERGFQRMRFVQVAL

SEQ ID NO: 202723 - protein, 14 aa, Artificial Sequence
  Description of Artificial Sequence: Synthetic peptide
  Seed: ERGLQRRRFVQNAL
ERGFQRNRFVQFAL

SEQ ID NO: 202724 - protein, 14 aa, Artificial Sequence
  Description of Artificial Sequence: Synthetic peptide
  Seed: ERGLQRRRFVQNAL
ERGFQRNRFVQIAL

SEQ ID NO: 202725 - protein, 14 aa, Artificial Sequence
  Description of Artificial Sequence: Synthetic peptide
  Seed: ERGLQRRRFVQNAL
ERGFQRNRFVQLAL

SEQ ID NO: 202726 - protein, 14 aa, Artificial Sequence
  Description of Artificial Sequence: Synthetic peptide
  Seed: ERGLQRRRFVQNAL
ERGFQRNRFVQVAL

SEQ ID NO: 202727 - protein, 14 aa, Artificial Sequence
  Description of Artificial Sequence: Synthetic peptide
  Seed: ERGLQRRRFVQNAL
ERGFQRQRFVQFAL

SEQ ID NO: 202728 - protein, 14 aa, Artificial Sequence
  Description of Artificial Sequence: Synthetic peptide
  Seed: ERGLQRRRFVQNAL
ERGFQRQRFVQIAL

SEQ ID NO: 202729 - protein, 14 aa, Artificial Sequence
  Description of Artificial Sequence: Synthetic peptide
  Seed: ERGLQRRRFVQNAL
ERGFQRQRFVQLAL

SEQ ID NO: 202730 - protein, 14 aa, Artificial Sequence
  Description of Artificial Sequence: Synthetic peptide
  Seed: ERGLQRRRFVQNAL
ERGFQRQRFVQMAL

SEQ ID NO: 202731 - protein, 14 aa, Artificial Sequence
  Description of Artificial Sequence: Synthetic peptide
  Seed: ERGLQRRRFVQNAL
ERGFQRQRFVQVAL

SEQ ID NO: 202732 - protein, 14 aa, Artificial Sequence
  Description of Artificial Sequence: Synthetic peptide
  Seed: ERGLQRRRFVQNAL
ERGFQRSRFVQAAL

SEQ ID NO: 202733 - protein, 14 aa, Artificial Sequence
  Description of Artificial Sequence: Synthetic peptide
  Seed: ERGLQRRRFVQNAL
ERGFQRSRFVQFAL

SEQ ID NO: 202734 - protein, 14 aa, Artificial Sequence
  Description of Artificial Sequence: Synthetic peptide
  Seed: ERGLQRRRFVQNAL
ERGFQRSRFVQIAL

SEQ ID NO: 202735 - protein, 14 aa, Artificial Sequence
  Description of Artificial Sequence: Synthetic peptide
  Seed: ERGLQRRRFVQNAL
ERGFQRSRFVQLAL

SEQ ID NO: 202736 - protein, 14 aa, Artificial Sequence
  Description of Artificial Sequence: Synthetic peptide
  Seed: ERGLQRRRFVQNAL
ERGFQRSRFVQMAL

SEQ ID NO: 202737 - protein, 14 aa, Artificial Sequence
  Description of Artificial Sequence: Synthetic peptide
  Seed: ERGLQRRRFVQNAL
ERGFQRSRFVQTAL

SEQ ID NO: 202738 - protein, 14 aa, Artificial Sequence
  Description of Artificial Sequence: Synthetic peptide
  Seed: ERGLQRRRFVQNAL
ERGFQRSRFVQVAL

SEQ ID NO: 202739 - protein, 14 aa, Artificial Sequence
  Description of Artificial Sequence: Synthetic peptide
  Seed: ERGLQRRRFVQNAL
ERGFQRSRYVQIAL

SEQ ID NO: 202740 - protein, 14 aa, Artificial Sequence
  Description of Artificial Sequence: Synthetic peptide
  Seed: ERGLQRRRFVQNAL
ERGFQRSRYVQLAL

SEQ ID NO: 202741 - protein, 14 aa, Artificial Sequence
  Description of Artificial Sequence: Synthetic peptide
  Seed: ERGLQRRRFVQNAL
ERGFQRSRYVQVAL

SEQ ID NO: 202742 - protein, 14 aa, Artificial Sequence
  Description of Artificial Sequence: Synthetic peptide
  Seed: ERGLQRRRFVQNAL
ERGFQRTRFVQAAL

SEQ ID NO: 202743 - protein, 14 aa, Artificial Sequence
  Description of Artificial Sequence: Synthetic peptide
  Seed: ERGLQRRRFVQNAL
ERGFQRTRFVQEAL

SEQ ID NO: 202744 - protein, 14 aa, Artificial Sequence
  Description of Artificial Sequence: Synthetic peptide
  Seed: ERGLQRRRFVQNAL
ERGFQRTRFVQFAL

SEQ ID NO: 202745 - protein, 14 aa, Artificial Sequence
  Description of Artificial Sequence: Synthetic peptide
  Seed: ERGLQRRRFVQNAL
ERGFQRTRFVQIAL

SEQ ID NO: 202746 - protein, 14 aa, Artificial Sequence
  Description of Artificial Sequence: Synthetic peptide
  Seed: ERGLQRRRFVQNAL
ERGFQRTRFVQLAL

SEQ ID NO: 202747 - protein, 14 aa, Artificial Sequence
  Description of Artificial Sequence: Synthetic peptide
  Seed: ERGLQRRRFVQNAL
ERGFQRTRFVQMAL

SEQ ID NO: 202748 - protein, 14 aa, Artificial Sequence
  Description of Artificial Sequence: Synthetic peptide
  Seed: ERGLQRRRFVQNAL
ERGFQRTRFVQNAL

SEQ ID NO: 202749 - protein, 14 aa, Artificial Sequence
  Description of Artificial Sequence: Synthetic peptide
  Seed: ERGLQRRRFVQNAL
ERGFQRTRFVQSAL

SEQ ID NO: 202750 - protein, 14 aa, Artificial Sequence
  Description of Artificial Sequence: Synthetic peptide
  Seed: ERGLQRRRFVQNAL
ERGFQRTRFVQTAL

SEQ ID NO: 202751 - protein, 14 aa, Artificial Sequence
  Description of Artificial Sequence: Synthetic peptide
  Seed: ERGLQRRRFVQNAL
ERGFQRTRFVQVAL

SEQ ID NO: 202752 - protein, 14 aa, Artificial Sequence
  Description of Artificial Sequence: Synthetic peptide
  Seed: ERGLQRRRFVQNAL
ERGFQRTRFVQYAL

SEQ ID NO: 202753 - protein, 14 aa, Artificial Sequence
  Description of Artificial Sequence: Synthetic peptide
  Seed: ERGLQRRRFVQNAL
ERGFQRTRLVQIAL

SEQ ID NO: 202754 - protein, 14 aa, Artificial Sequence
  Description of Artificial Sequence: Synthetic peptide
  Seed: ERGLQRRRFVQNAL
ERGFQRTRLVQLAL

SEQ ID NO: 202755 - protein, 14 aa, Artificial Sequence
  Description of Artificial Sequence: Synthetic peptide
  Seed: ERGLQRRRFVQNAL
ERGFQRTRWVQIAL

SEQ ID NO: 202756 - protein, 14 aa, Artificial Sequence
  Description of Artificial Sequence: Synthetic peptide
  Seed: ERGLQRRRFVQNAL
ERGFQRTRWVQLAL

SEQ ID NO: 202757 - protein, 14 aa, Artificial Sequence
  Description of Artificial Sequence: Synthetic peptide
  Seed: ERGLQRRRFVQNAL
ERGFQRTRYVQIAL

SEQ ID NO: 202758 - protein, 14 aa, Artificial Sequence
  Description of Artificial Sequence: Synthetic peptide
  Seed: ERGLQRRRFVQNAL
ERGFQRTRYVQLAL

SEQ ID NO: 202759 - protein, 14 aa, Artificial Sequence
  Description of Artificial Sequence: Synthetic peptide
  Seed: ERGLQRRRFVQNAL
ERGFQRTRYVQVAL

SEQ ID NO: 202760 - protein, 14 aa, Artificial Sequence
  Description of Artificial Sequence: Synthetic peptide
  Seed: ERGLQRRRFVQNAL
ERGFQRVRFVQAAL

SEQ ID NO: 202761 - protein, 14 aa, Artificial Sequence
  Description of Artificial Sequence: Synthetic peptide
  Seed: ERGLQRRRFVQNAL
ERGFQRVRFVQFAL

SEQ ID NO: 202762 - protein, 14 aa, Artificial Sequence
  Description of Artificial Sequence: Synthetic peptide
  Seed: ERGLQRRRFVQNAL
ERGFQRVRFVQIAL

SEQ ID NO: 202763 - protein, 14 aa, Artificial Sequence
  Description of Artificial Sequence: Synthetic peptide
  Seed: ERGLQRRRFVQNAL
ERGFQRVRFVQLAL

SEQ ID NO: 202764 - protein, 14 aa, Artificial Sequence
  Description of Artificial Sequence: Synthetic peptide
  Seed: ERGLQRRRFVQNAL
ERGFQRVRFVQMAL

SEQ ID NO: 202765 - protein, 14 aa, Artificial Sequence
  Description of Artificial Sequence: Synthetic peptide
  Seed: ERGLQRRRFVQNAL
ERGFQRVRFVQSAL

SEQ ID NO: 202766 - protein, 14 aa, Artificial Sequence
  Description of Artificial Sequence: Synthetic peptide
  Seed: ERGLQRRRFVQNAL
ERGFQRVRFVQTAL

SEQ ID NO: 202767 - protein, 14 aa, Artificial Sequence
  Description of Artificial Sequence: Synthetic peptide
  Seed: ERGLQRRRFVQNAL
ERGFQRVRFVQVAL

SEQ ID NO: 202768 - protein, 14 aa, Artificial Sequence
  Description of Artificial Sequence: Synthetic peptide
  Seed: ERGLQRRRFVQNAL
ERGFQRVRFVQYAL

SEQ ID NO: 202769 - protein, 14 aa, Artificial Sequence
  Description of Artificial Sequence: Synthetic peptide
  Seed: ERGLQRRRFVQNAL
ERGFQRVRWVQLAL

SEQ ID NO: 202770 - protein, 14 aa, Artificial Sequence
  Description of Artificial Sequence: Synthetic peptide
  Seed: ERGLQRRRFVQNAL
ERGFQRVRYVQIAL

SEQ ID NO: 202771 - protein, 14 aa, Artificial Sequence
  Description of Artificial Sequence: Synthetic peptide
  Seed: ERGLQRRRFVQNAL
ERGFQRVRYVQLAL

SEQ ID NO: 202772 - protein, 14 aa, Artificial Sequence
  Description of Artificial Sequence: Synthetic peptide
  Seed: ERGLQRRRFVQNAL
ERGFQRVRYVQVAL

SEQ ID NO: 202773 - protein, 14 aa, Artificial Sequence
  Description of Artificial Sequence: Synthetic peptide
  Seed: ERGLQRRRFVQNAL
ERGFQRWRFVQIAL

SEQ ID NO: 202774 - protein, 14 aa, Artificial Sequence
  Description of Artificial Sequence: Synthetic peptide
  Seed: ERGLQRRRFVQNAL
ERGFQRWRFVQLAL

SEQ ID NO: 202775 - protein, 14 aa, Artificial Sequence
  Description of Artificial Sequence: Synthetic peptide
  Seed: ERGLQRRRFVQNAL
ERGFQRWRFVQVAL

SEQ ID NO: 202776 - protein, 14 aa, Artificial Sequence
  Description of Artificial Sequence: Synthetic peptide
  Seed: ERGLQRRRFVQNAL
ERGFQRYRFVQIAL

SEQ ID NO: 202777 - protein, 14 aa, Artificial Sequence
  Description of Artificial Sequence: Synthetic peptide
  Seed: ERGLQRRRFVQNAL
ERGFQRYRFVQLAL

SEQ ID NO: 202778 - protein, 14 aa, Artificial Sequence
  Description of Artificial Sequence: Synthetic peptide
  Seed: ERGLQRRRFVQNAL
ERGFQRYRFVQVAL

SEQ ID NO: 202779 - protein, 14 aa, Artificial Sequence
  Description of Artificial Sequence: Synthetic peptide
  Seed: ERGLQRRRFVQNAL
ERGIQRARFVQIAL

SEQ ID NO: 202780 - protein, 14 aa, Artificial Sequence
  Description of Artificial Sequence: Synthetic peptide
  Seed: ERGLQRRRFVQNAL
ERGIQRARFVQLAL

SEQ ID NO: 202781 - protein, 14 aa, Artificial Sequence
  Description of Artificial Sequence: Synthetic peptide
  Seed: ERGLQRRRFVQNAL
ERGIQRARFVQVAL

SEQ ID NO: 202782 - protein, 14 aa, Artificial Sequence
  Description of Artificial Sequence: Synthetic peptide
  Seed: ERGLQRRRFVQNAL
ERGIQRERFVQIAL

SEQ ID NO: 202783 - protein, 14 aa, Artificial Sequence
  Description of Artificial Sequence: Synthetic peptide
  Seed: ERGLQRRRFVQNAL
ERGIQRERFVQLAL

SEQ ID NO: 202784 - protein, 14 aa, Artificial Sequence
  Description of Artificial Sequence: Synthetic peptide
  Seed: ERGLQRRRFVQNAL
ERGIQRERFVQVAL

SEQ ID NO: 202785 - protein, 14 aa, Artificial Sequence
  Description of Artificial Sequence: Synthetic peptide
  Seed: ERGLQRRRFVQNAL
ERGIQRHRFVQIAL

SEQ ID NO: 202786 - protein, 14 aa, Artificial Sequence
  Description of Artificial Sequence: Synthetic peptide
  Seed: ERGLQRRRFVQNAL
ERGIQRHRFVQLAL

SEQ ID NO: 202787 - protein, 14 aa, Artificial Sequence
  Description of Artificial Sequence: Synthetic peptide
  Seed: ERGLQRRRFVQNAL
ERGIQRIRFVQIAL

SEQ ID NO: 202788 - protein, 14 aa, Artificial Sequence
  Description of Artificial Sequence: Synthetic peptide
  Seed: ERGLQRRRFVQNAL
ERGIQRIRFVQLAL

SEQ ID NO: 202789 - protein, 14 aa, Artificial Sequence
  Description of Artificial Sequence: Synthetic peptide
  Seed: ERGLQRRRFVQNAL
ERGIQRIRFVQVAL

SEQ ID NO: 202790 - protein, 14 aa, Artificial Sequence
  Description of Artificial Sequence: Synthetic peptide
  Seed: ERGLQRRRFVQNAL
ERGIQRIRRVQAAL

SEQ ID NO: 202791 - protein, 14 aa, Artificial Sequence
  Description of Artificial Sequence: Synthetic peptide
  Seed: ERGLQRRRFVQNAL
ERGIQRIRRVQSAL

SEQ ID NO: 202792 - protein, 14 aa, Artificial Sequence
  Description of Artificial Sequence: Synthetic peptide
  Seed: ERGLQRRRFVQNAL
ERGIQRLRRVQAAL

SEQ ID NO: 202793 - protein, 14 aa, Artificial Sequence
  Description of Artificial Sequence: Synthetic peptide
  Seed: ERGLQRRRFVQNAL
ERGIQRLRRVQSAL

SEQ ID NO: 202794 - protein, 14 aa, Artificial Sequence
  Description of Artificial Sequence: Synthetic peptide
  Seed: ERGLQRRRFVQNAL
ERGIQRMRRVQAAL

SEQ ID NO: 202795 - protein, 14 aa, Artificial Sequence
  Description of Artificial Sequence: Synthetic peptide
  Seed: ERGLQRRRFVQNAL
ERGIQRMRRVQHAL

SEQ ID NO: 202796 - protein, 14 aa, Artificial Sequence
  Description of Artificial Sequence: Synthetic peptide
  Seed: ERGLQRRRFVQNAL
ERGIQRMRRVQKAL

SEQ ID NO: 202797 - protein, 14 aa, Artificial Sequence
  Description of Artificial Sequence: Synthetic peptide
  Seed: ERGLQRRRFVQNAL
ERGIQRMRRVQRAL

SEQ ID NO: 202798 - protein, 14 aa, Artificial Sequence
  Description of Artificial Sequence: Synthetic peptide
  Seed: ERGLQRRRFVQNAL
ERGIQRMRRVQSAL

SEQ ID NO: 202799 - protein, 14 aa, Artificial Sequence
  Description of Artificial Sequence: Synthetic peptide
  Seed: ERGLQRRRFVQNAL
ERGIQRSRFVQIAL

SEQ ID NO: 202800 - protein, 14 aa, Artificial Sequence
  Description of Artificial Sequence: Synthetic peptide
  Seed: ERGLQRRRFVQNAL
ERGIQRSRFVQLAL

SEQ ID NO: 202801 - protein, 14 aa, Artificial Sequence
  Description of Artificial Sequence: Synthetic peptide
  Seed: ERGLQRRRFVQNAL
ERGIQRSRFVQVAL

SEQ ID NO: 202802 - protein, 14 aa, Artificial Sequence
  Description of Artificial Sequence: Synthetic peptide
  Seed: ERGLQRRRFVQNAL
ERGIQRTRFVQIAL

SEQ ID NO: 202803 - protein, 14 aa, Artificial Sequence
  Description of Artificial Sequence: Synthetic peptide
  Seed: ERGLQRRRFVQNAL
ERGIQRTRFVQLAL

SEQ ID NO: 202804 - protein, 14 aa, Artificial Sequence
  Description of Artificial Sequence: Synthetic peptide
  Seed: ERGLQRRRFVQNAL
ERGIQRTRFVQMAL

SEQ ID NO: 202805 - protein, 14 aa, Artificial Sequence
  Description of Artificial Sequence: Synthetic peptide
  Seed: ERGLQRRRFVQNAL
ERGIQRTRFVQVAL

SEQ ID NO: 202806 - protein, 14 aa, Artificial Sequence
  Description of Artificial Sequence: Synthetic peptide
  Seed: ERGLQRRRFVQNAL
ERGIQRVRFVQIAL

SEQ ID NO: 202807 - protein, 14 aa, Artificial Sequence
  Description of Artificial Sequence: Synthetic peptide
  Seed: ERGLQRRRFVQNAL
ERGIQRVRFVQLAL

SEQ ID NO: 202808 - protein, 14 aa, Artificial Sequence
  Description of Artificial Sequence: Synthetic peptide
  Seed: ERGLQRRRFVQNAL
ERGIQRVRFVQVAL

SEQ ID NO: 202809 - protein, 14 aa, Artificial Sequence
  Description of Artificial Sequence: Synthetic peptide
  Seed: ERGLQRRRFVQNAL
ERGLQRARFVQIAL

SEQ ID NO: 202810 - protein, 14 aa, Artificial Sequence
  Description of Artificial Sequence: Synthetic peptide
  Seed: ERGLQRRRFVQNAL
ERGLQRARFVQLAL

SEQ ID NO: 202811 - protein, 14 aa, Artificial Sequence
  Description of Artificial Sequence: Synthetic peptide
  Seed: ERGLQRRRFVQNAL
ERGLQRARFVQVAL

SEQ ID NO: 202812 - protein, 14 aa, Artificial Sequence
  Description of Artificial Sequence: Synthetic peptide
  Seed: ERGLQRRRFVQNAL
ERGLQRERFVQIAL

SEQ ID NO: 202813 - protein, 14 aa, Artificial Sequence
  Description of Artificial Sequence: Synthetic peptide
  Seed: ERGLQRRRFVQNAL
ERGLQRERFVQLAL

SEQ ID NO: 202814 - protein, 14 aa, Artificial Sequence
  Description of Artificial Sequence: Synthetic peptide
  Seed: ERGLQRRRFVQNAL
ERGLQRERFVQVAL

SEQ ID NO: 202815 - protein, 14 aa, Artificial Sequence
  Description of Artificial Sequence: Synthetic peptide
  Seed: ERGLQRRRFVQNAL
ERGLQRFRFVQIAL

SEQ ID NO: 202816 - protein, 14 aa, Artificial Sequence
  Description of Artificial Sequence: Synthetic peptide
  Seed: ERGLQRRRFVQNAL
ERGLQRFRFVQLAL

SEQ ID NO: 202817 - protein, 14 aa, Artificial Sequence
  Description of Artificial Sequence: Synthetic peptide
  Seed: ERGLQRRRFVQNAL
ERGLQRFRFVQVAL

SEQ ID NO: 202818 - protein, 14 aa, Artificial Sequence
  Description of Artificial Sequence: Synthetic peptide
  Seed: ERGLQRRRFVQNAL
ERGLQRHRFVQIAL

SEQ ID NO: 202819 - protein, 14 aa, Artificial Sequence
  Description of Artificial Sequence: Synthetic peptide
  Seed: ERGLQRRRFVQNAL
ERGLQRHRFVQLAL

SEQ ID NO: 202820 - protein, 14 aa, Artificial Sequence
  Description of Artificial Sequence: Synthetic peptide
  Seed: ERGLQRRRFVQNAL
ERGLQRHRFVQVAL

SEQ ID NO: 202821 - protein, 14 aa, Artificial Sequence
  Description of Artificial Sequence: Synthetic peptide
  Seed: ERGLQRRRFVQNAL
ERGLQRIRFVQIAL

SEQ ID NO: 202822 - protein, 14 aa, Artificial Sequence
  Description of Artificial Sequence: Synthetic peptide
  Seed: ERGLQRRRFVQNAL
ERGLQRIRFVQLAL

SEQ ID NO: 202823 - protein, 14 aa, Artificial Sequence
  Description of Artificial Sequence: Synthetic peptide
  Seed: ERGLQRRRFVQNAL
ERGLQRIRFVQVAL

SEQ ID NO: 202824 - protein, 14 aa, Artificial Sequence
  Description of Artificial Sequence: Synthetic peptide
  Seed: ERGLQRRRFVQNAL
ERGLQRLRFVQIAL

SEQ ID NO: 202825 - protein, 14 aa, Artificial Sequence
  Description of Artificial Sequence: Synthetic peptide
  Seed: ERGLQRRRFVQNAL
ERGLQRSRFVQIAL

SEQ ID NO: 202826 - protein, 14 aa, Artificial Sequence
  Description of Artificial Sequence: Synthetic peptide
  Seed: ERGLQRRRFVQNAL
ERGLQRSRFVQLAL

SEQ ID NO: 202827 - protein, 14 aa, Artificial Sequence
  Description of Artificial Sequence: Synthetic peptide
  Seed: ERGLQRRRFVQNAL
ERGLQRSRFVQVAL

SEQ ID NO: 202828 - protein, 14 aa, Artificial Sequence
  Description of Artificial Sequence: Synthetic peptide
  Seed: ERGLQRRRFVQNAL
ERGLQRTRFVQFAL

SEQ ID NO: 202829 - protein, 14 aa, Artificial Sequence
  Description of Artificial Sequence: Synthetic peptide
  Seed: ERGLQRRRFVQNAL
ERGLQRTRFVQIAL

SEQ ID NO: 202830 - protein, 14 aa, Artificial Sequence
  Description of Artificial Sequence: Synthetic peptide
  Seed: ERGLQRRRFVQNAL
ERGLQRTRFVQLAL

SEQ ID NO: 202831 - protein, 14 aa, Artificial Sequence
  Description of Artificial Sequence: Synthetic peptide
  Seed: ERGLQRRRFVQNAL
ERGLQRTRFVQMAL

SEQ ID NO: 202832 - protein, 14 aa, Artificial Sequence
  Description of Artificial Sequence: Synthetic peptide
  Seed: ERGLQRRRFVQNAL
ERGLQRTRFVQVAL

SEQ ID NO: 202833 - protein, 14 aa, Artificial Sequence
  Description of Artificial Sequence: Synthetic peptide
  Seed: ERGLQRRRFVQNAL
ERGLQRVRFVQIAL

SEQ ID NO: 202834 - protein, 14 aa, Artificial Sequence
  Description of Artificial Sequence: Synthetic peptide
  Seed: ERGLQRRRFVQNAL
ERGLQRVRFVQLAL

SEQ ID NO: 202835 - protein, 14 aa, Artificial Sequence
  Description of Artificial Sequence: Synthetic peptide
  Seed: ERGLQRRRFVQNAL
ERGLQRVRFVQVAL

SEQ ID NO: 202836 - protein, 14 aa, Artificial Sequence
  Description of Artificial Sequence: Synthetic peptide
  Seed: ERGLQRRRFVQNAL
ERGMQRIRFVQLAL

SEQ ID NO: 202837 - protein, 14 aa, Artificial Sequence
  Description of Artificial Sequence: Synthetic peptide
  Seed: ERGLQRRRFVQNAL
ERGMQRTRFVQIAL

SEQ ID NO: 202838 - protein, 14 aa, Artificial Sequence
  Description of Artificial Sequence: Synthetic peptide
  Seed: ERGLQRRRFVQNAL
ERGMQRTRFVQLAL

SEQ ID NO: 202839 - protein, 14 aa, Artificial Sequence
  Description of Artificial Sequence: Synthetic peptide
  Seed: ERGLQRRRFVQNAL
ERGMQRTRFVQVAL

SEQ ID NO: 202840 - protein, 14 aa, Artificial Sequence
  Description of Artificial Sequence: Synthetic peptide
  Seed: ERGLQRRRFVQNAL
ERGMQRVRFVQIAL

SEQ ID NO: 202841 - protein, 14 aa, Artificial Sequence
  Description of Artificial Sequence: Synthetic peptide
  Seed: ERGLQRRRFVQNAL
ERGMQRVRFVQLAL

SEQ ID NO: 202842 - protein, 14 aa, Artificial Sequence
  Description of Artificial Sequence: Synthetic peptide
  Seed: ERGLQRRRFVQNAL
ERGVQRSRFVQLAL

SEQ ID NO: 202843 - protein, 14 aa, Artificial Sequence
  Description of Artificial Sequence: Synthetic peptide
  Seed: ERGLQRRRFVQNAL
ERGVQRTRFVQIAL

SEQ ID NO: 202844 - protein, 14 aa, Artificial Sequence
  Description of Artificial Sequence: Synthetic peptide
  Seed: ERGLQRRRFVQNAL
ERGVQRTRFVQLAL

SEQ ID NO: 202845 - protein, 14 aa, Artificial Sequence
  Description of Artificial Sequence: Synthetic peptide
  Seed: ERGLQRRRFVQNAL
ERGVQRTRFVQVAL

SEQ ID NO: 202846 - protein, 14 aa, Artificial Sequence
  Description of Artificial Sequence: Synthetic peptide
  Seed: ERGLQRRRFVQNAL
ERGWQRARFVQIAL

SEQ ID NO: 202847 - protein, 14 aa, Artificial Sequence
  Description of Artificial Sequence: Synthetic peptide
  Seed: ERGLQRRRFVQNAL
ERGWQRARFVQLAL

SEQ ID NO: 202848 - protein, 14 aa, Artificial Sequence
  Description of Artificial Sequence: Synthetic peptide
  Seed: ERGLQRRRFVQNAL
ERGWQRARFVQVAL

SEQ ID NO: 202849 - protein, 14 aa, Artificial Sequence
  Description of Artificial Sequence: Synthetic peptide
  Seed: ERGLQRRRFVQNAL
ERGWQRERFVQLAL

SEQ ID NO: 202850 - protein, 14 aa, Artificial Sequence
  Description of Artificial Sequence: Synthetic peptide
  Seed: ERGLQRRRFVQNAL
ERGWQRIRFVQIAL

SEQ ID NO: 202851 - protein, 14 aa, Artificial Sequence
  Description of Artificial Sequence: Synthetic peptide
  Seed: ERGLQRRRFVQNAL
ERGWQRIRFVQLAL

SEQ ID NO: 202852 - protein, 14 aa, Artificial Sequence
  Description of Artificial Sequence: Synthetic peptide
  Seed: ERGLQRRRFVQNAL
ERGWQRIRFVQVAL

SEQ ID NO: 202853 - protein, 14 aa, Artificial Sequence
  Description of Artificial Sequence: Synthetic peptide
  Seed: ERGLQRRRFVQNAL
ERGWQRSRFVQIAL

SEQ ID NO: 202854 - protein, 14 aa, Artificial Sequence
  Description of Artificial Sequence: Synthetic peptide
  Seed: ERGLQRRRFVQNAL
ERGWQRSRFVQLAL

SEQ ID NO: 202855 - protein, 14 aa, Artificial Sequence
  Description of Artificial Sequence: Synthetic peptide
  Seed: ERGLQRRRFVQNAL
ERGWQRSRFVQVAL

SEQ ID NO: 202856 - protein, 14 aa, Artificial Sequence
  Description of Artificial Sequence: Synthetic peptide
  Seed: ERGLQRRRFVQNAL
ERGWQRTRFVQIAL

SEQ ID NO: 202857 - protein, 14 aa, Artificial Sequence
  Description of Artificial Sequence: Synthetic peptide
  Seed: ERGLQRRRFVQNAL
ERGWQRTRFVQLAL

SEQ ID NO: 202858 - protein, 14 aa, Artificial Sequence
  Description of Artificial Sequence: Synthetic peptide
  Seed: ERGLQRRRFVQNAL
ERGWQRTRFVQVAL

SEQ ID NO: 202859 - protein, 14 aa, Artificial Sequence
  Description of Artificial Sequence: Synthetic peptide
  Seed: ERGLQRRRFVQNAL
ERGWQRVRFVQIAL

SEQ ID NO: 202860 - protein, 14 aa, Artificial Sequence
  Description of Artificial Sequence: Synthetic peptide
  Seed: ERGLQRRRFVQNAL
ERGWQRVRFVQLAL

SEQ ID NO: 202861 - protein, 14 aa, Artificial Sequence
  Description of Artificial Sequence: Synthetic peptide
  Seed: ERGLQRRRFVQNAL
ERGWQRVRFVQVAL

SEQ ID NO: 202862 - protein, 14 aa, Artificial Sequence
  Description of Artificial Sequence: Synthetic peptide
  Seed: ERGLQRRRFVQNAL
ERGYQRARFVQIAL

SEQ ID NO: 202863 - protein, 14 aa, Artificial Sequence
  Description of Artificial Sequence: Synthetic peptide
  Seed: ERGLQRRRFVQNAL
ERGYQRARFVQLAL

SEQ ID NO: 202864 - protein, 14 aa, Artificial Sequence
  Description of Artificial Sequence: Synthetic peptide
  Seed: ERGLQRRRFVQNAL
ERGYQRARFVQVAL

SEQ ID NO: 202865 - protein, 14 aa, Artificial Sequence
  Description of Artificial Sequence: Synthetic peptide
  Seed: ERGLQRRRFVQNAL
ERGYQRERFVQIAL

SEQ ID NO: 202866 - protein, 14 aa, Artificial Sequence
  Description of Artificial Sequence: Synthetic peptide
  Seed: ERGLQRRRFVQNAL
ERGYQRERFVQLAL

SEQ ID NO: 202867 - protein, 14 aa, Artificial Sequence
  Description of Artificial Sequence: Synthetic peptide
  Seed: ERGLQRRRFVQNAL
ERGYQRERFVQVAL

SEQ ID NO: 202868 - protein, 14 aa, Artificial Sequence
  Description of Artificial Sequence: Synthetic peptide
  Seed: ERGLQRRRFVQNAL
ERGYQRFRFVQIAL

SEQ ID NO: 202869 - protein, 14 aa, Artificial Sequence
  Description of Artificial Sequence: Synthetic peptide
  Seed: ERGLQRRRFVQNAL
ERGYQRFRFVQLAL

SEQ ID NO: 202870 - protein, 14 aa, Artificial Sequence
  Description of Artificial Sequence: Synthetic peptide
  Seed: ERGLQRRRFVQNAL
ERGYQRFRFVQVAL

SEQ ID NO: 202871 - protein, 14 aa, Artificial Sequence
  Description of Artificial Sequence: Synthetic peptide
  Seed: ERGLQRRRFVQNAL
ERGYQRHRFVQIAL

SEQ ID NO: 202872 - protein, 14 aa, Artificial Sequence
  Description of Artificial Sequence: Synthetic peptide
  Seed: ERGLQRRRFVQNAL
ERGYQRHRFVQLAL

SEQ ID NO: 202873 - protein, 14 aa, Artificial Sequence
  Description of Artificial Sequence: Synthetic peptide
  Seed: ERGLQRRRFVQNAL
ERGYQRHRFVQVAL

SEQ ID NO: 202874 - protein, 14 aa, Artificial Sequence
  Description of Artificial Sequence: Synthetic peptide
  Seed: ERGLQRRRFVQNAL
ERGYQRIRFVQIAL

SEQ ID NO: 202875 - protein, 14 aa, Artificial Sequence
  Description of Artificial Sequence: Synthetic peptide
  Seed: ERGLQRRRFVQNAL
ERGYQRIRFVQLAL

SEQ ID NO: 202876 - protein, 14 aa, Artificial Sequence
  Description of Artificial Sequence: Synthetic peptide
  Seed: ERGLQRRRFVQNAL
ERGYQRIRFVQMAL

SEQ ID NO: 202877 - protein, 14 aa, Artificial Sequence
  Description of Artificial Sequence: Synthetic peptide
  Seed: ERGLQRRRFVQNAL
ERGYQRIRFVQVAL

SEQ ID NO: 202878 - protein, 14 aa, Artificial Sequence
  Description of Artificial Sequence: Synthetic peptide
  Seed: ERGLQRRRFVQNAL
ERGYQRSRFVQIAL

SEQ ID NO: 202879 - protein, 14 aa, Artificial Sequence
  Description of Artificial Sequence: Synthetic peptide
  Seed: ERGLQRRRFVQNAL
ERGYQRSRFVQLAL

SEQ ID NO: 202880 - protein, 14 aa, Artificial Sequence
  Description of Artificial Sequence: Synthetic peptide
  Seed: ERGLQRRRFVQNAL
ERGYQRSRFVQVAL

SEQ ID NO: 202881 - protein, 14 aa, Artificial Sequence
  Description of Artificial Sequence: Synthetic peptide
  Seed: ERGLQRRRFVQNAL
ERGYQRTRFVQIAL

SEQ ID NO: 202882 - protein, 14 aa, Artificial Sequence
  Description of Artificial Sequence: Synthetic peptide
  Seed: ERGLQRRRFVQNAL
ERGYQRTRFVQLAL

SEQ ID NO: 202883 - protein, 14 aa, Artificial Sequence
  Description of Artificial Sequence: Synthetic peptide
  Seed: ERGLQRRRFVQNAL
ERGYQRTRFVQMAL

SEQ ID NO: 202884 - protein, 14 aa, Artificial Sequence
  Description of Artificial Sequence: Synthetic peptide
  Seed: ERGLQRRRFVQNAL
ERGYQRTRFVQVAL

SEQ ID NO: 202885 - protein, 14 aa, Artificial Sequence
  Description of Artificial Sequence: Synthetic peptide
  Seed: ERGLQRRRFVQNAL
ERGYQRVRFVQIAL

SEQ ID NO: 202886 - protein, 14 aa, Artificial Sequence
  Description of Artificial Sequence: Synthetic peptide
  Seed: ERGLQRRRFVQNAL
ERGYQRVRFVQLAL

SEQ ID NO: 202887 - protein, 14 aa, Artificial Sequence
  Description of Artificial Sequence: Synthetic peptide
  Seed: ERGLQRRRFVQNAL
ERGYQRVRFVQMAL

SEQ ID NO: 202888 - protein, 14 aa, Artificial Sequence
  Description of Artificial Sequence: Synthetic peptide
  Seed: ERGLQRRRFVQNAL
ERGYQRVRFVQVAL

SEQ ID NO: 202889 - protein, 15 aa, Artificial Sequence
  Description of Artificial Sequence: Synthetic peptide
  Seed: EWLKTRPILSPLTKG
EWAKTFPFLSILTKG

SEQ ID NO: 202890 - protein, 15 aa, Artificial Sequence
  Description of Artificial Sequence: Synthetic peptide
  Seed: EWLKTRPILSPLTKG
EWAKTFPFLSLLTKG

SEQ ID NO: 202891 - protein, 15 aa, Artificial Sequence
  Description of Artificial Sequence: Synthetic peptide
  Seed: EWLKTRPILSPLTKG
EWAKTIPFLSILTKG

SEQ ID NO: 202892 - protein, 15 aa, Artificial Sequence
  Description of Artificial Sequence: Synthetic peptide
  Seed: EWLKTRPILSPLTKG
EWCKTAPFLSILTKG

SEQ ID NO: 202893 - protein, 15 aa, Artificial Sequence
  Description of Artificial Sequence: Synthetic peptide
  Seed: EWLKTRPILSPLTKG
EWCKTAPFLSLLTKG

SEQ ID NO: 202894 - protein, 15 aa, Artificial Sequence
  Description of Artificial Sequence: Synthetic peptide
  Seed: EWLKTRPILSPLTKG
EWCKTAPFLSVLTKG

SEQ ID NO: 202895 - protein, 15 aa, Artificial Sequence
  Description of Artificial Sequence: Synthetic peptide
  Seed: EWLKTRPILSPLTKG
EWCKTFPFLSILTKG

SEQ ID NO: 202896 - protein, 15 aa, Artificial Sequence
  Description of Artificial Sequence: Synthetic peptide
  Seed: EWLKTRPILSPLTKG
EWCKTFPFLSLLTKG

SEQ ID NO: 202897 - protein, 15 aa, Artificial Sequence
  Description of Artificial Sequence: Synthetic peptide
  Seed: EWLKTRPILSPLTKG
EWCKTFPFLSMLTKG

SEQ ID NO: 202898 - protein, 15 aa, Artificial Sequence
  Description of Artificial Sequence: Synthetic peptide
  Seed: EWLKTRPILSPLTKG
EWCKTFPFLSVLTKG

SEQ ID NO: 202899 - protein, 15 aa, Artificial Sequence
  Description of Artificial Sequence: Synthetic peptide
  Seed: EWLKTRPILSPLTKG
EWCKTHPFLSILTKG

SEQ ID NO: 202900 - protein, 15 aa, Artificial Sequence
  Description of Artificial Sequence: Synthetic peptide
  Seed: EWLKTRPILSPLTKG
EWCKTHPFLSLLTKG

SEQ ID NO: 202901 - protein, 15 aa, Artificial Sequence
  Description of Artificial Sequence: Synthetic peptide
  Seed: EWLKTRPILSPLTKG
EWCKTHPFLSVLTKG

SEQ ID NO: 202902 - protein, 15 aa, Artificial Sequence
  Description of Artificial Sequence: Synthetic peptide
  Seed: EWLKTRPILSPLTKG
EWCKTIPFLSILTKG

SEQ ID NO: 202903 - protein, 15 aa, Artificial Sequence
  Description of Artificial Sequence: Synthetic peptide
  Seed: EWLKTRPILSPLTKG
EWCKTIPFLSLLTKG

SEQ ID NO: 202904 - protein, 15 aa, Artificial Sequence
  Description of Artificial Sequence: Synthetic peptide
  Seed: EWLKTRPILSPLTKG
EWCKTIPFLSVLTKG

SEQ ID NO: 202905 - protein, 15 aa, Artificial Sequence
  Description of Artificial Sequence: Synthetic peptide
  Seed: EWLKTRPILSPLTKG
EWCKTLPFLSILTKG

SEQ ID NO: 202906 - protein, 15 aa, Artificial Sequence
  Description of Artificial Sequence: Synthetic peptide
  Seed: EWLKTRPILSPLTKG
EWCKTLPFLSLLTKG

SEQ ID NO: 202907 - protein, 15 aa, Artificial Sequence
  Description of Artificial Sequence: Synthetic peptide
  Seed: EWLKTRPILSPLTKG
EWCKTLPFLSVLTKG

SEQ ID NO: 202908 - protein, 15 aa, Artificial Sequence
  Description of Artificial Sequence: Synthetic peptide
  Seed: EWLKTRPILSPLTKG
EWCKTMPFLSILTKG
